United States Patent Application Publication US 2005/0244851 A1 - sequence listing, part 61

SEQ ID NO: 2370048 - DNA, 25 bp, Homo sapien
gccttcagccatgatgttggccttc

SEQ ID NO: 2370049 - DNA, 25 bp, Homo sapien
agccatgatgttggccttcaggaag

SEQ ID NO: 2370050 - DNA, 25 bp, Homo sapien
ttcagccatgatgttggccttcagg

SEQ ID NO: 2370051 - DNA, 25 bp, Homo sapien
ggctccggtcatcctcaatgctgtt

SEQ ID NO: 2370052 - DNA, 25 bp, Homo sapien
tttttgctggctttgcatgaaaaca

SEQ ID NO: 2370053 - DNA, 25 bp, Homo sapien
catcaggctccggtcatcctcaatg

SEQ ID NO: 2370054 - DNA, 25 bp, Homo sapien
ctttgcatgaaaacagccaggctgt

SEQ ID NO: 2370055 - DNA, 25 bp, Homo sapien
gagtaatgagaccatggccattgcc

SEQ ID NO: 2370056 - DNA, 25 bp, Homo sapien
attgggaaaccaagctgccggttgg

SEQ ID NO: 2370057 - DNA, 25 bp, Homo sapien
cagggcactgtccactgagacatga

SEQ ID NO: 2370058 - DNA, 25 bp, Homo sapien
tcacggatgtgtcatacagggcact

SEQ ID NO: 2370059 - DNA, 25 bp, Homo sapien
gaacagcggctttgatctcaggcca

SEQ ID NO: 2370060 - DNA, 25 bp, Homo sapien
ggccaacaccaatgacgctcggggt

SEQ ID NO: 2370061 - DNA, 25 bp, Homo sapien
caacaccaatgacgctcggggttgg

SEQ ID NO: 2370062 - DNA, 25 bp, Homo sapien
cgaggttaaaaatggaacagcggct

SEQ ID NO: 2370063 - DNA, 25 bp, Homo sapien
caaggaccacctcttgggactatcg

SEQ ID NO: 2370064 - DNA, 25 bp, Homo sapien
cttggttcccgatgagtgagaaact

SEQ ID NO: 2370065 - DNA, 25 bp, Homo sapien
ttcttccactacagaaccagcttgc

SEQ ID NO: 2370066 - DNA, 25 bp, Homo sapien
cttcatgtgagagcagcggtaggca

SEQ ID NO: 2370067 - DNA, 25 bp, Homo sapien
tggactaaaccaagcttgctgggct

SEQ ID NO: 2370068 - DNA, 25 bp, Homo sapien
taaagccaggcaagtcaaatccaaa

SEQ ID NO: 2370069 - DNA, 25 bp, Homo sapien
gagatgagctttgcacagagtccaa

SEQ ID NO: 2370070 - DNA, 25 bp, Homo sapien
tgacctatgatagatcccgccttag

SEQ ID NO: 2370071 - DNA, 25 bp, Homo sapien
agattcacgatgagcaaatccaagc

SEQ ID NO: 2370072 - DNA, 25 bp, Homo sapien
gattcacgatgagcaaatccaagcc

SEQ ID NO: 2370073 - DNA, 25 bp, Homo sapien
aagattcacgatgagcaaatccaag

SEQ ID NO: 2370074 - DNA, 25 bp, Homo sapien
gaagattcacgatgagcaaatccaa

SEQ ID NO: 2370075 - DNA, 25 bp, Homo sapien
tctgctccttgggaatctgtgagag

SEQ ID NO: 2370076 - DNA, 25 bp, Homo sapien
ctccttgggaatctgtgagagccat

SEQ ID NO: 2370077 - DNA, 25 bp, Homo sapien
tgctccttgggaatctgtgagagcc

SEQ ID NO: 2370078 - DNA, 25 bp, Homo sapien
agggacatctgctccttgggaatct

SEQ ID NO: 2370079 - DNA, 25 bp, Homo sapien
tgcatatccattgaaaaccctagtc

SEQ ID NO: 2370080 - DNA, 25 bp, Homo sapien
catatccattgaaaaccctagtcat

SEQ ID NO: 2370081 - DNA, 25 bp, Homo sapien
gcatatccattgaaaaccctagtca

SEQ ID NO: 2370082 - DNA, 25 bp, Homo sapien
ctgcatatccattgaaaaccctagt

SEQ ID NO: 2370083 - DNA, 25 bp, Homo sapien
aaaacccaactggaagatttctgtg

SEQ ID NO: 2370084 - DNA, 25 bp, Homo sapien
tgtgctgtaaactgacagggtcagc

SEQ ID NO: 2370085 - DNA, 25 bp, Homo sapien
aagatttctgtgctgtaaactgaca

SEQ ID NO: 2370086 - DNA, 25 bp, Homo sapien
aaacccaactggaagatttctgtgc

SEQ ID NO: 2370087 - DNA, 25 bp, Homo sapien
ggcttgcacctttgtgggatcccca

SEQ ID NO: 2370088 - DNA, 25 bp, Homo sapien
tgtgccaacactaattcacggctgt

SEQ ID NO: 2370089 - DNA, 25 bp, Homo sapien
ggatccccactcagaggcgtctgtg

SEQ ID NO: 2370090 - DNA, 25 bp, Homo sapien
gaggtcctgtcttgcaaaggcttgc

SEQ ID NO: 2370091 - DNA, 25 bp, Homo sapien
gggacacccactgccctccttggct

SEQ ID NO: 2370092 - DNA, 25 bp, Homo sapien
ctccttggctctctacctgacccac

SEQ ID NO: 2370093 - DNA, 25 bp, Homo sapien
tcagcatttccatttagggacaccc

SEQ ID NO: 2370094 - DNA, 25 bp, Homo sapien
ctaactctcagttttgtcagcattt

SEQ ID NO: 2370095 - DNA, 25 bp, Homo sapien
tgctgtgtggcatgagaagcctcca

SEQ ID NO: 2370096 - DNA, 25 bp, Homo sapien
catccagtattgaggaactgaactc

SEQ ID NO: 2370097 - DNA, 25 bp, Homo sapien
cattctgtaatgaggggctgctgtg

SEQ ID NO: 2370098 - DNA, 25 bp, Homo sapien
cattctgtaatgaggggcttgactt

SEQ ID NO: 2370099 - DNA, 25 bp, Homo sapien
gcatcaccggagagggaatacaagt

SEQ ID NO: 2370100 - DNA, 25 bp, Homo sapien
tggtttctcaccctgcgctatgaga

SEQ ID NO: 2370101 - DNA, 25 bp, Homo sapien
ccttgtgaaatagtgagtcacagag

SEQ ID NO: 2370102 - DNA, 25 bp, Homo sapien
ttttctggtaatgatgcatcaccgg

SEQ ID NO: 2370103 - DNA, 25 bp, Homo sapien
ccaaggctatggttcctttctctga

SEQ ID NO: 2370104 - DNA, 25 bp, Homo sapien
aaggctatggttcctttctctgaga

SEQ ID NO: 2370105 - DNA, 25 bp, Homo sapien
aaccaaggctatggttcctttctct

SEQ ID NO: 2370106 - DNA, 25 bp, Homo sapien
ggctatggttcctttctctgagaca

SEQ ID NO: 2370107 - DNA, 25 bp, Homo sapien
tgcacatacccaaatattgtacacc

SEQ ID NO: 2370108 - DNA, 25 bp, Homo sapien
gttcactacactcatcatgcacata

SEQ ID NO: 2370109 - DNA, 25 bp, Homo sapien
ggatagtgggtacacttcaccttca

SEQ ID NO: 2370110 - DNA, 25 bp, Homo sapien
tcatcttggctgcaacgctctcaac

SEQ ID NO: 2370111 - DNA, 25 bp, Homo sapien
ccttgatgctgttccatcagtcttc

SEQ ID NO: 2370112 - DNA, 25 bp, Homo sapien
gaggaagccatgcacttcttggata

SEQ ID NO: 2370113 - DNA, 25 bp, Homo sapien
ttaacctttgtccagaggcagccct

SEQ ID NO: 2370114 - DNA, 25 bp, Homo sapien
aagtgaatgaaccagtgattggttc

SEQ ID NO: 2370115 - DNA, 25 bp, Homo sapien
ctgattttaggccagtggatcttaa

SEQ ID NO: 2370116 - DNA, 25 bp, Homo sapien
tgattttaggccagtggatcttaat

SEQ ID NO: 2370117 - DNA, 25 bp, Homo sapien
gcgagtccacggcattgtttctttg

SEQ ID NO: 2370118 - DNA, 25 bp, Homo sapien
gtcaccgtagacatttgaattgggt

SEQ ID NO: 2370119 - DNA, 25 bp, Homo sapien
tcctggaccaaatggtgtgatagct

SEQ ID NO: 2370120 - DNA, 25 bp, Homo sapien
gatagctgcactctgcgagtccacg

SEQ ID NO: 2370121 - DNA, 25 bp, Homo sapien
tgcctgcaattctagagggtgcaat

SEQ ID NO: 2370122 - DNA, 25 bp, Homo sapien
tatgagcttctcttgcagccataag

SEQ ID NO: 2370123 - DNA, 25 bp, Homo sapien
gtcaaattcctcctttatgagcttc

SEQ ID NO: 2370124 - DNA, 25 bp, Homo sapien
cagccataagttatcatgaattgtc

SEQ ID NO: 2370125 - DNA, 25 bp, Homo sapien
cagctttaatacttaaagccctaga

SEQ ID NO: 2370126 - DNA, 25 bp, Homo sapien
ccctttgaacgctccttatcagctt

SEQ ID NO: 2370127 - DNA, 25 bp, Homo sapien
gccaacttcactctcacagctgcaa

SEQ ID NO: 2370128 - DNA, 25 bp, Homo sapien
agaatttgtcagcttagattcccca

SEQ ID NO: 2370129 - DNA, 25 bp, Homo sapien
gtatgaagaatacaaagaacaccca

SEQ ID NO: 2370130 - DNA, 25 bp, Homo sapien
tgaagaatacaaagaacacccagga

SEQ ID NO: 2370131 - DNA, 25 bp, Homo sapien
atgaagaatacaaagaacacccagg

SEQ ID NO: 2370132 - DNA, 25 bp, Homo sapien
ctagtatgaagaatacaaagaacac

SEQ ID NO: 2370133 - DNA, 25 bp, Homo sapien
ctaagggcatttggcgtgttatgga

SEQ ID NO: 2370134 - DNA, 25 bp, Homo sapien
ggttctaagggcatttggcgtgtta

SEQ ID NO: 2370135 - DNA, 25 bp, Homo sapien
tctaagggcatttggcgtgttatgg

SEQ ID NO: 2370136 - DNA, 25 bp, Homo sapien
agggcatttggcgtgttatggattt

SEQ ID NO: 2370137 - DNA, 25 bp, Homo sapien
aagacatttgtaaaacctgggtgct

SEQ ID NO: 2370138 - DNA, 25 bp, Homo sapien
ggtatgtaattgttggtttgtgtca

SEQ ID NO: 2370139 - DNA, 25 bp, Homo sapien
catttgtaaaacctgggtgctgtcc

SEQ ID NO: 2370140 - DNA, 25 bp, Homo sapien
aaagcctggtatgtaattgttggtt

SEQ ID NO: 2370141 - DNA, 25 bp, Homo sapien
tctgggagtagaaacccaagctgcc

SEQ ID NO: 2370142 - DNA, 25 bp, Homo sapien
caagccaacgtcaaggactccgtgg

SEQ ID NO: 2370143 - DNA, 25 bp, Homo sapien
taaagcacaatatgtgggtgccctg

SEQ ID NO: 2370144 - DNA, 25 bp, Homo sapien
tgtttcggcataaatctccaggtgg

SEQ ID NO: 2370145 - DNA, 25 bp, Homo sapien
tgaactccgcagaaacacaagcaat

SEQ ID NO: 2370146 - DNA, 25 bp, Homo sapien
gaaattacacccgtttcactgatgg

SEQ ID NO: 2370147 - DNA, 25 bp, Homo sapien
tcagcttggctataggatatcttca

SEQ ID NO: 2370148 - DNA, 25 bp, Homo sapien
tgcataactgagcactctcaacgag

SEQ ID NO: 2370149 - DNA, 25 bp, Homo sapien
gtgaggaaccagtaagaaactagga

SEQ ID NO: 2370150 - DNA, 25 bp, Homo sapien
taagaaactaggacaattgtcaaca

SEQ ID NO: 2370151 - DNA, 25 bp, Homo sapien
aactaggacaattgtcaacaaatga

SEQ ID NO: 2370152 - DNA, 25 bp, Homo sapien
ccagtaagaaactaggacaattgtc

SEQ ID NO: 2370153 - DNA, 25 bp, Homo sapien
tttagcttctgcaggcagatcggag

SEQ ID NO: 2370154 - DNA, 25 bp, Homo sapien
agcttctgcaggcagatcggagatg

SEQ ID NO: 2370155 - DNA, 25 bp, Homo sapien
tcggagatgggaggtaagatctcaa

SEQ ID NO: 2370156 - DNA, 25 bp, Homo sapien
cagatcggagatgggaggtaagatc

SEQ ID NO: 2370157 - DNA, 25 bp, Homo sapien
caggcacttgatgcaggctgttggc

SEQ ID NO: 2370158 - DNA, 25 bp, Homo sapien
tcaggcacttgatgcaggctgttgg

SEQ ID NO: 2370159 - DNA, 25 bp, Homo sapien
aggcacttgatgcaggctgttggct

SEQ ID NO: 2370160 - DNA, 25 bp, Homo sapien
gtcaggcacttgatgcaggctgttg

SEQ ID NO: 2370161 - DNA, 25 bp, Homo sapien
tgtacatatgttagcgcttatagcg

SEQ ID NO: 2370162 - DNA, 25 bp, Homo sapien
taccttcggcaaatcagaacgccag

SEQ ID NO: 2370163 - DNA, 25 bp, Homo sapien
gagatagttgcttactaccttcggc

SEQ ID NO: 2370164 - DNA, 25 bp, Homo sapien
taggctcaggtctcagggttgtaca

SEQ ID NO: 2370165 - DNA, 25 bp, Homo sapien
acaagggctgactctgtataggcac

SEQ ID NO: 2370166 - DNA, 25 bp, Homo sapien
gggagacaccaagcagctatttgta

SEQ ID NO: 2370167 - DNA, 25 bp, Homo sapien
ggagacaccaagcagctatttgtaa

SEQ ID NO: 2370168 - DNA, 25 bp, Homo sapien
tgagcagcacaagggctgactctgt

SEQ ID NO: 2370169 - DNA, 25 bp, Homo sapien
tctcgcagttagtgtcgccgggaca

SEQ ID NO: 2370170 - DNA, 25 bp, Homo sapien
tccaaaatgcatgccggtaacccct

SEQ ID NO: 2370171 - DNA, 25 bp, Homo sapien
gatctaaacccaggtgcagccggga

SEQ ID NO: 2370172 - DNA, 25 bp, Homo sapien
caaaattcttacaactgccagcagg

SEQ ID NO: 2370173 - DNA, 25 bp, Homo sapien
cacctactaagatgacaggcacttt

SEQ ID NO: 2370174 - DNA, 25 bp, Homo sapien
gatttcaaatgaggcatcgctgtca

SEQ ID NO: 2370175 - DNA, 25 bp, Homo sapien
agattttacctcatggacgggcccg

SEQ ID NO: 2370176 - DNA, 25 bp, Homo sapien
gaacaggtccacgtacagaatttga

SEQ ID NO: 2370177 - DNA, 25 bp, Homo sapien
ggtttgaagtcagccgcccaatggc

SEQ ID NO: 2370178 - DNA, 25 bp, Homo sapien
cacctcgcctccagccacgggccat

SEQ ID NO: 2370179 - DNA, 25 bp, Homo sapien
cccaatggcctcgacaccgtcacct

SEQ ID NO: 2370180 - DNA, 25 bp, Homo sapien
ctggtttgaagtcagccgcccaatg

SEQ ID NO: 2370181 - DNA, 25 bp, Homo sapien
caatgaccccaaagtacgtgctgca

SEQ ID NO: 2370182 - DNA, 25 bp, Homo sapien
gagggagcttgacaagatcacaaat

SEQ ID NO: 2370183 - DNA, 25 bp, Homo sapien
tgccatgacacacatccagtaagag

SEQ ID NO: 2370184 - DNA, 25 bp, Homo sapien
cttggggtaacacagggcaatgacc

SEQ ID NO: 2370185 - DNA, 25 bp, Homo sapien
ccactttatagaccattcggagaac

SEQ ID NO: 2370186 - DNA, 25 bp, Homo sapien
gttccagtttttatgagatgctttc

SEQ ID NO: 2370187 - DNA, 25 bp, Homo sapien
tagaccattcggagaactcagatgt

SEQ ID NO: 2370188 - DNA, 25 bp, Homo sapien
actcagatgtatccttcgagttcca

SEQ ID NO: 2370189 - DNA, 25 bp, Homo sapien
aagcatccgcattagtatcttctca

SEQ ID NO: 2370190 - DNA, 25 bp, Homo sapien
catgggaatcattggcaactgactt

SEQ ID NO: 2370191 - DNA, 25 bp, Homo sapien
agcacgggcctctttagtggcaaaa

SEQ ID NO: 2370192 - DNA, 25 bp, Homo sapien
taggttcagtcaacctgccaaacag

SEQ ID NO: 2370193 - DNA, 25 bp, Homo sapien
tgacatttaggttcagtcaacctgc

SEQ ID NO: 2370194 - DNA, 25 bp, Homo sapien
gtttatcactcaagagactcatccg

SEQ ID NO: 2370195 - DNA, 25 bp, Homo sapien
tccgcactggatttttatcaaagta

SEQ ID NO: 2370196 - DNA, 25 bp, Homo sapien
ttcccaatatatccattgtttccca

SEQ ID NO: 2370197 - DNA, 25 bp, Homo sapien
gaattcccgaggtctgtttatcact

SEQ ID NO: 2370198 - DNA, 25 bp, Homo sapien
tcaaagtctgcatgtatcgaatgtt

SEQ ID NO: 2370199 - DNA, 25 bp, Homo sapien
cctttcaaagtctgcatgtatcgaa

SEQ ID NO: 2370200 - DNA, 25 bp, Homo sapien
tcctttcaaagtctgcatgtatcga

SEQ ID NO: 2370201 - DNA, 25 bp, Homo sapien
tttcaaagtctgcatgtatcgaatg

SEQ ID NO: 2370202 - DNA, 25 bp, Homo sapien
tccgagacaggcgttcttgcaaatt

SEQ ID NO: 2370203 - DNA, 25 bp, Homo sapien
ttcagaattggataccaccagggcc

SEQ ID NO: 2370204 - DNA, 25 bp, Homo sapien
caacttggttgtgatcagaaacagc

SEQ ID NO: 2370205 - DNA, 25 bp, Homo sapien
gataccagcccagaatatgaatgcc

SEQ ID NO: 2370206 - DNA, 25 bp, Homo sapien
atttaactgagataaaattccagtc

SEQ ID NO: 2370207 - DNA, 25 bp, Homo sapien
gatttaactgagataaaattccagt

SEQ ID NO: 2370208 - DNA, 25 bp, Homo sapien
tgtggctcatgcaagagggattaca

SEQ ID NO: 2370209 - DNA, 25 bp, Homo sapien
tcagcttcagtggatggttaccatc

SEQ ID NO: 2370210 - DNA, 25 bp, Homo sapien
cacaccctagaagaatgaagcttgg

SEQ ID NO: 2370211 - DNA, 25 bp, Homo sapien
cccatcatggttaggagtttatcct

SEQ ID NO: 2370212 - DNA, 25 bp, Homo sapien
catcacgctcaccataaagagtcat

SEQ ID NO: 2370213 - DNA, 25 bp, Homo sapien
atcatgctcatcacgctcaccataa

SEQ ID NO: 2370214 - DNA, 25 bp, Homo sapien
cactgtccttcacatgcttcaggaa

SEQ ID NO: 2370215 - DNA, 25 bp, Homo sapien
agaggatgtggaataacagctcatc

SEQ ID NO: 2370216 - DNA, 25 bp, Homo sapien
tccagagccagtaatatgagaaagt

SEQ ID NO: 2370217 - DNA, 25 bp, Homo sapien
gggttcctcgccattcacctgaggg

SEQ ID NO: 2370218 - DNA, 25 bp, Homo sapien
ttttacacaatgaggcggcctgtgc

SEQ ID NO: 2370219 - DNA, 25 bp, Homo sapien
gaatataagccaggcctgatctggg

SEQ ID NO: 2370220 - DNA, 25 bp, Homo sapien
aattcctggctgttatgcttgggaa

SEQ ID NO: 2370221 - DNA, 25 bp, Homo sapien
tcggagggtgcaccaggattcttgg

SEQ ID NO: 2370222 - DNA, 25 bp, Homo sapien
gatggtcggagggtgcaccaggatt

SEQ ID NO: 2370223 - DNA, 25 bp, Homo sapien
tatgcttgggaaggcggtcatcttg

SEQ ID NO: 2370224 - DNA, 25 bp, Homo sapien
cttttatgtgcttggggtcactcac

SEQ ID NO: 2370225 - DNA, 25 bp, Homo sapien
caggaggaagatttcgtccttgctt

SEQ ID NO: 2370226 - DNA, 25 bp, Homo sapien
caatcaggaggaagatttcgtcctt

SEQ ID NO: 2370227 - DNA, 25 bp, Homo sapien
ttcaatcagtccgcatatgtaaggc

SEQ ID NO: 2370228 - DNA, 25 bp, Homo sapien
ggaggaagatttcgtccttgctttc

SEQ ID NO: 2370229 - DNA, 25 bp, Homo sapien
gctcactgagcacacactctagcat

SEQ ID NO: 2370230 - DNA, 25 bp, Homo sapien
catgctcactgagcacacactctag

SEQ ID NO: 2370231 - DNA, 25 bp, Homo sapien
tgactacacactcactgaccacatg

SEQ ID NO: 2370232 - DNA, 25 bp, Homo sapien
tgaccacatgctcactgagcacaca

SEQ ID NO: 2370233 - DNA, 25 bp, Homo sapien
ccgaagcttgttgaatttgatgagt

SEQ ID NO: 2370234 - DNA, 25 bp, Homo sapien
catgaagctggaagtaaaaccgaag

SEQ ID NO: 2370235 - DNA, 25 bp, Homo sapien
gctaccgaggaagcaaagtggattt

SEQ ID NO: 2370236 - DNA, 25 bp, Homo sapien
tccccattctgtgaagctaccgagg

SEQ ID NO: 2370237 - DNA, 25 bp, Homo sapien
tgcagctctggaaagtctcctttcc

SEQ ID NO: 2370238 - DNA, 25 bp, Homo sapien
gtttggctgccatgaatactttttt

SEQ ID NO: 2370239 - DNA, 25 bp, Homo sapien
tgtggacacgaacaggcaggatgcc

SEQ ID NO: 2370240 - DNA, 25 bp, Homo sapien
gatgccccgagttcctttgagtgtc

SEQ ID NO: 2370241 - DNA, 25 bp, Homo sapien
tgcagacttgtgagggatgctgccc

SEQ ID NO: 2370242 - DNA, 25 bp, Homo sapien
tcacaaaagcccaggtccacatctg

SEQ ID NO: 2370243 - DNA, 25 bp, Homo sapien
tccagtcctgttgttccctagtaaa

SEQ ID NO: 2370244 - DNA, 25 bp, Homo sapien
accaatggtgcatcatcaatgggaa

SEQ ID NO: 2370245 - DNA, 25 bp, Homo sapien
aatattttagtgctcatggagacca

SEQ ID NO: 2370246 - DNA, 25 bp, Homo sapien
tcaatgggaaattgaatgtaaatca

SEQ ID NO: 2370247 - DNA, 25 bp, Homo sapien
atgagatgagtgatagaagccagtc

SEQ ID NO: 2370248 - DNA, 25 bp, Homo sapien
gatagaagccagtcaataagggctg

SEQ ID NO: 2370249 - DNA, 25 bp, Homo sapien
tagaagccagtcaataagggctgct

SEQ ID NO: 2370250 - DNA, 25 bp, Homo sapien
ctttaatgagatgagtgatagaagc

SEQ ID NO: 2370251 - DNA, 25 bp, Homo sapien
caataccgcgcaaaaaacattaagg

SEQ ID NO: 2370252 - DNA, 25 bp, Homo sapien
gagttttatgaatggctcccagccc

SEQ ID NO: 2370253 - DNA, 25 bp, Homo sapien
aactttgtgaaagccgatcgttcaa

SEQ ID NO: 2370254 - DNA, 25 bp, Homo sapien
cagccccagctctaagcatttggaa

SEQ ID NO: 2370255 - DNA, 25 bp, Homo sapien
gagaggcgatgaagaccaaaagaca

SEQ ID NO: 2370256 - DNA, 25 bp, Homo sapien
ggagcgctcatgatttatggctttg

SEQ ID NO: 2370257 - DNA, 25 bp, Homo sapien
cacattcaaacaaatctaaccaaac

SEQ ID NO: 2370258 - DNA, 25 bp, Homo sapien
ccactcgcagaaccggaggagcgct

SEQ ID NO: 2370259 - DNA, 25 bp, Homo sapien
tgtgcttctctcgcttttgctccct

SEQ ID NO: 2370260 - DNA, 25 bp, Homo sapien
tgcttctctcgcttttgctccctct

SEQ ID NO: 2370261 - DNA, 25 bp, Homo sapien
ggatgtgcttctctcgcttttgctc

SEQ ID NO: 2370262 - DNA, 25 bp, Homo sapien
gatgtgcttctctcgcttttgctcc

SEQ ID NO: 2370263 - DNA, 25 bp, Homo sapien
gagcataagcactagccctggaatc

SEQ ID NO: 2370264 - DNA, 25 bp, Homo sapien
tcaagaggctccatccagatgccgt

SEQ ID NO: 2370265 - DNA, 25 bp, Homo sapien
ccagatgccgtgtgatgatgaatat

SEQ ID NO: 2370266 - DNA, 25 bp, Homo sapien
gtgatgatgaatatgagcataagca

SEQ ID NO: 2370267 - DNA, 25 bp, Homo sapien
atcctctaaacttgctaatgtgtct

SEQ ID NO: 2370268 - DNA, 25 bp, Homo sapien
catcctctaaacttgctaatgtgtc

SEQ ID NO: 2370269 - DNA, 25 bp, Homo sapien
tcatcctctaaacttgctaatgtgt

SEQ ID NO: 2370270 - DNA, 25 bp, Homo sapien
aattccagacacgttagcaagttca

SEQ ID NO: 2370271 - DNA, 25 bp, Homo sapien
ggaattccagacacgttagcaagtt

SEQ ID NO: 2370272 - DNA, 25 bp, Homo sapien
gggaattccagacacgttagcaagt

SEQ ID NO: 2370273 - DNA, 25 bp, Homo sapien
ttccagacacgttagcaagttcaga

SEQ ID NO: 2370274 - DNA, 25 bp, Homo sapien
caaccatcgccatctggggctgtgc

SEQ ID NO: 2370275 - DNA, 25 bp, Homo sapien
gctccataaatcaggctgtggagga

SEQ ID NO: 2370276 - DNA, 25 bp, Homo sapien
ccaggagacggcactgctccataaa

SEQ ID NO: 2370277 - DNA, 25 bp, Homo sapien
gtgtctccatatcatccaggagacg

SEQ ID NO: 2370278 - DNA, 25 bp, Homo sapien
tggttcccaaagcattcacaaagac

SEQ ID NO: 2370279 - DNA, 25 bp, Homo sapien
aatcgtgggctgatctctcccaggg

SEQ ID NO: 2370280 - DNA, 25 bp, Homo sapien
tttgaggaaggaatgcccctgagct

SEQ ID NO: 2370281 - DNA, 25 bp, Homo sapien
tctcgttcccaacacatggttttgg

SEQ ID NO: 2370282 - DNA, 25 bp, Homo sapien
caatctctaggtccatgttagcccg

SEQ ID NO: 2370283 - DNA, 25 bp, Homo sapien
tggtcactgaatctacttggatgta

SEQ ID NO: 2370284 - DNA, 25 bp, Homo sapien
cactggaaccagaagtatcttggaa

SEQ ID NO: 2370285 - DNA, 25 bp, Homo sapien
tgttagcccgattgtgatggtcact

SEQ ID NO: 2370286 - DNA, 25 bp, Homo sapien
aagtcactgttaactgcggatcagc

SEQ ID NO: 2370287 - DNA, 25 bp, Homo sapien
tcttttgcacggaatttggcatagt

SEQ ID NO: 2370288 - DNA, 25 bp, Homo sapien
tgtcctggttcttttgcacggaatt

SEQ ID NO: 2370289 - DNA, 25 bp, Homo sapien
ggatcagcagccaaaccctgtcctg

SEQ ID NO: 2370290 - DNA, 25 bp, Homo sapien
tgtacattggtaagttgaagcttgg

SEQ ID NO: 2370291 - DNA, 25 bp, Homo sapien
taagttgaagcttggtgcacataag

SEQ ID NO: 2370292 - DNA, 25 bp, Homo sapien
aagcttggtgcacataagcgcatcc

SEQ ID NO: 2370293 - DNA, 25 bp, Homo sapien
cattggtaagttgaagcttggtgca

SEQ ID NO: 2370294 - DNA, 25 bp, Homo sapien
tgatcatccgaagacttctctcagc

SEQ ID NO: 2370295 - DNA, 25 bp, Homo sapien
taatttgatcatccgaagacttctc

SEQ ID NO: 2370296 - DNA, 25 bp, Homo sapien
cggagtaatttgatcatccgaagac

SEQ ID NO: 2370297 - DNA, 25 bp, Homo sapien
atttgatcatccgaagacttctctc

SEQ ID NO: 2370298 - DNA, 25 bp, Homo sapien
tggattctcatgcacggtaaagttg

SEQ ID NO: 2370299 - DNA, 25 bp, Homo sapien
gatgaggccacttccgcattgttaa

SEQ ID NO: 2370300 - DNA, 25 bp, Homo sapien
tgagaccttatagcaaggtgcaggc

SEQ ID NO: 2370301 - DNA, 25 bp, Homo sapien
tgtctgtactggagaagttggctca

SEQ ID NO: 2370302 - DNA, 25 bp, Homo sapien
ttagtgccgcggcttcatccgacct

SEQ ID NO: 2370303 - DNA, 25 bp, Homo sapien
tcatcagaattcattagcgttagtg

SEQ ID NO: 2370304 - DNA, 25 bp, Homo sapien
cattagcgttagtgccgcggcttca

SEQ ID NO: 2370305 - DNA, 25 bp, Homo sapien
aattcattagcgttagtgccgcggc

SEQ ID NO: 2370306 - DNA, 25 bp, Homo sapien
tccactttattaagagtcgagatga

SEQ ID NO: 2370307 - DNA, 25 bp, Homo sapien
ggaaccctccaatggctgtcgttgt

SEQ ID NO: 2370308 - DNA, 25 bp, Homo sapien
cctccaatggctgtcgttgttctca

SEQ ID NO: 2370309 - DNA, 25 bp, Homo sapien
ttaagagtcgagatgaatgatttcc

SEQ ID NO: 2370310 - DNA, 25 bp, Homo sapien
cgtgacaccatactgatcccgaggg

SEQ ID NO: 2370311 - DNA, 25 bp, Homo sapien
tttagcacccgagtatctgctgcct

SEQ ID NO: 2370312 - DNA, 25 bp, Homo sapien
aatgttgagatgtttggagggattt

SEQ ID NO: 2370313 - DNA, 25 bp, Homo sapien
tggagggatttttagcacccgagta

SEQ ID NO: 2370314 - DNA, 25 bp, Homo sapien
tctatagacacacagtgggatggct

SEQ ID NO: 2370315 - DNA, 25 bp, Homo sapien
gcatctatagacacacagtgggatg

SEQ ID NO: 2370316 - DNA, 25 bp, Homo sapien
ggcatctatagacacacagtgggat

SEQ ID NO: 2370317 - DNA, 25 bp, Homo sapien
tatagacacacagtgggatggctgg

SEQ ID NO: 2370318 - DNA, 25 bp, Homo sapien
tgctgaataccatggaagaccaaag

SEQ ID NO: 2370319 - DNA, 25 bp, Homo sapien
aaacttttgcttatagcggctgcca

SEQ ID NO: 2370320 - DNA, 25 bp, Homo sapien
ccaaagctgatagtggttgaaaacc

SEQ ID NO: 2370321 - DNA, 25 bp, Homo sapien
tactgtcatgtgatctaagggagtc

SEQ ID NO: 2370322 - DNA, 25 bp, Homo sapien
tacccgtgagttgatgtctcgcttc

SEQ ID NO: 2370323 - DNA, 25 bp, Homo sapien
caagctggtgctgtgcaggtttcct

SEQ ID NO: 2370324 - DNA, 25 bp, Homo sapien
ccaaaggttcattcaggcaactacc

SEQ ID NO: 2370325 - DNA, 25 bp, Homo sapien
aacagaacaggtgcaaggtacaagc

SEQ ID NO: 2370326 - DNA, 25 bp, Homo sapien
tcctaagatcagcgcctgtgctctc

SEQ ID NO: 2370327 - DNA, 25 bp, Homo sapien
gatcctcttgtgacatctgtattct

SEQ ID NO: 2370328 - DNA, 25 bp, Homo sapien
tcttgtgacatctgtattcttctct

SEQ ID NO: 2370329 - DNA, 25 bp, Homo sapien
ctaagatcagcgcctgtgctctcca

SEQ ID NO: 2370330 - DNA, 25 bp, Homo sapien
cacagccttgccgtccggaaagcaa

SEQ ID NO: 2370331 - DNA, 25 bp, Homo sapien
gatgccacgagtgctgaatctggga

SEQ ID NO: 2370332 - DNA, 25 bp, Homo sapien
gaatctgggatccatcacagccttg

SEQ ID NO: 2370333 - DNA, 25 bp, Homo sapien
taaacacagctgattgagatgccac

SEQ ID NO: 2370334 - DNA, 25 bp, Homo sapien
ccctggctctggctgttaaagtttg

SEQ ID NO: 2370335 - DNA, 25 bp, Homo sapien
ggctctggctgttaaagtttggttc

SEQ ID NO: 2370336 - DNA, 25 bp, Homo sapien
ctggctctggctgttaaagtttggt

SEQ ID NO: 2370337 - DNA, 25 bp, Homo sapien
ctggtttctctttcactccctggct

SEQ ID NO: 2370338 - DNA, 25 bp, Homo sapien
cagcttaaagattaaggcttcgtcc

SEQ ID NO: 2370339 - DNA, 25 bp, Homo sapien
tgcctgtgatatggcagcttaaaga

SEQ ID NO: 2370340 - DNA, 25 bp, Homo sapien
cttcgtcccggcaatggcgtaacat

SEQ ID NO: 2370341 - DNA, 25 bp, Homo sapien
attaaggcttcgtcccggcaatggc

SEQ ID NO: 2370342 - DNA, 25 bp, Homo sapien
gatggtcacgggaagtggctgttcc

SEQ ID NO: 2370343 - DNA, 25 bp, Homo sapien
acagcatttagaatacactgtctct

SEQ ID NO: 2370344 - DNA, 25 bp, Homo sapien
tggctgttccccataaatcacagca

SEQ ID NO: 2370345 - DNA, 25 bp, Homo sapien
tcttcttatgagatatgagagaggg

SEQ ID NO: 2370346 - DNA, 25 bp, Homo sapien
atagatgctccccaacatatgtgtc

SEQ ID NO: 2370347 - DNA, 25 bp, Homo sapien
ggcatttcttgaattccccggccca

SEQ ID NO: 2370348 - DNA, 25 bp, Homo sapien
gcccattggttcctggcagaaaatg

SEQ ID NO: 2370349 - DNA, 25 bp, Homo sapien
gggtgatttatagcaaggctcaggc

SEQ ID NO: 2370350 - DNA, 25 bp, Homo sapien
ctgtgtagcatcagcatcccgtggg

SEQ ID NO: 2370351 - DNA, 25 bp, Homo sapien
tgcccaattctaggcaaccgtcgaa

SEQ ID NO: 2370352 - DNA, 25 bp, Homo sapien
tggtagtactttcttcccttatgga

SEQ ID NO: 2370353 - DNA, 25 bp, Homo sapien
gaggtgctggcaaactgtactaagt

SEQ ID NO: 2370354 - DNA, 25 bp, Homo sapien
acggatggatttggccctcgaatat

SEQ ID NO: 2370355 - DNA, 25 bp, Homo sapien
cactgccaaagcacacacggatgga

SEQ ID NO: 2370356 - DNA, 25 bp, Homo sapien
ttaatctgacatgaggacaatgggc

SEQ ID NO: 2370357 - DNA, 25 bp, Homo sapien
caaaggacagacgtctgctctcagt

SEQ ID NO: 2370358 - DNA, 25 bp, Homo sapien
tacttcacgtttacacaggcccgaa

SEQ ID NO: 2370359 - DNA, 25 bp, Homo sapien
acacaggcccgaagcttgcctgcaa

SEQ ID NO: 2370360 - DNA, 25 bp, Homo sapien
ttacacaggcccgaagcttgcctgc

SEQ ID NO: 2370361 - DNA, 25 bp, Homo sapien
cacgtttacacaggcccgaagcttg

SEQ ID NO: 2370362 - DNA, 25 bp, Homo sapien
tcccttagcaactggcacatcttca

SEQ ID NO: 2370363 - DNA, 25 bp, Homo sapien
cttagcaactggcacatcttcaatg

SEQ ID NO: 2370364 - DNA, 25 bp, Homo sapien
tagcaactggcacatcttcaatgaa

SEQ ID NO: 2370365 - DNA, 25 bp, Homo sapien
gggcctcccttagcaactggcacat

SEQ ID NO: 2370366 - DNA, 25 bp, Homo sapien
aaggctcattcatcagaagacgtac

SEQ ID NO: 2370367 - DNA, 25 bp, Homo sapien
ctaaggctcattcatcagaagacgt

SEQ ID NO: 2370368 - DNA, 25 bp, Homo sapien
taaggctcattcatcagaagacgta

SEQ ID NO: 2370369 - DNA, 25 bp, Homo sapien
ggtagatcctcggtcgaattctgtg

SEQ ID NO: 2370370 - DNA, 25 bp, Homo sapien
tactttgggtagatcctcggtcgaa

SEQ ID NO: 2370371 - DNA, 25 bp, Homo sapien
taggccaagatactttgggtagatc

SEQ ID NO: 2370372 - DNA, 25 bp, Homo sapien
gatcctcggtcgaattctgtgttga

SEQ ID NO: 2370373 - DNA, 25 bp, Homo sapien
tttttcttactagactgaaagctcc

SEQ ID NO: 2370374 - DNA, 25 bp, Homo sapien
gcagttccaggtatattcgtttgag

SEQ ID NO: 2370375 - DNA, 25 bp, Homo sapien
cagcattgcccgttggacttttctt

SEQ ID NO: 2370376 - DNA, 25 bp, Homo sapien
tctttgcttggtagctctttttctt

SEQ ID NO: 2370377 - DNA, 25 bp, Homo sapien
cacagtgtggacagtcactaaaaac

SEQ ID NO: 2370378 - DNA, 25 bp, Homo sapien
gcacacagtgtggacagtcactaaa

SEQ ID NO: 2370379 - DNA, 25 bp, Homo sapien
aagcacacagtgtggacagtcacta

SEQ ID NO: 2370380 - DNA, 25 bp, Homo sapien
cagtgtggacagtcactaaaaacca

SEQ ID NO: 2370381 - DNA, 25 bp, Homo sapien
gctcttcctgctggttgcaattgtc

SEQ ID NO: 2370382 - DNA, 25 bp, Homo sapien
tcttcctgctggttgcaattgtctc

SEQ ID NO: 2370383 - DNA, 25 bp, Homo sapien
ttcctgctggttgcaattgtctcca

SEQ ID NO: 2370384 - DNA, 25 bp, Homo sapien
cttcctgctggttgcaattgtctcc

SEQ ID NO: 2370385 - DNA, 25 bp, Homo sapien
cagaagcatcgtagatctgaaaggg

SEQ ID NO: 2370386 - DNA, 25 bp, Homo sapien
ctttccaagaccaagttgagagcct

SEQ ID NO: 2370387 - DNA, 25 bp, Homo sapien
tggctggtgctgcataaaagctctg

SEQ ID NO: 2370388 - DNA, 25 bp, Homo sapien
gctttgtccaagtgaccttcctcgg

SEQ ID NO: 2370389 - DNA, 25 bp, Homo sapien
catcatcattaggactggggcatgc

SEQ ID NO: 2370390 - DNA, 25 bp, Homo sapien
atcatcattaggactggggcatgct

SEQ ID NO: 2370391 - DNA, 25 bp, Homo sapien
ttcatcatcattaggactggggcat

SEQ ID NO: 2370392 - DNA, 25 bp, Homo sapien
tttcatcatcattaggactggggca

SEQ ID NO: 2370393 - DNA, 25 bp, Homo sapien
tcaggacacctgctgagcctagccc

SEQ ID NO: 2370394 - DNA, 25 bp, Homo sapien
ccccttgtggggtccagctattcct

SEQ ID NO: 2370395 - DNA, 25 bp, Homo sapien
agctattcctgcaaccgctggctct

SEQ ID NO: 2370396 - DNA, 25 bp, Homo sapien
ctattcctgcaaccgctggctctga

SEQ ID NO: 2370397 - DNA, 25 bp, Homo sapien
tgtttgtgaagtgcgccagagcctt

SEQ ID NO: 2370398 - DNA, 25 bp, Homo sapien
caggccttaatgactgtttgtgaag

SEQ ID NO: 2370399 - DNA, 25 bp, Homo sapien
caggcaggccttaatgactgtttgt

SEQ ID NO: 2370400 - DNA, 25 bp, Homo sapien
ctgtttgtgaagtgcgccagagcct

SEQ ID NO: 2370401 - DNA, 25 bp, Homo sapien
ggctttgccccagatgcagtttctg

SEQ ID NO: 2370402 - DNA, 25 bp, Homo sapien
gatgctgacgcatggcaactcctga

SEQ ID NO: 2370403 - DNA, 25 bp, Homo sapien
ctttgccccagatgcagtttctgag

SEQ ID NO: 2370404 - DNA, 25 bp, Homo sapien
ttctgagatgctgacgcatggcaac

SEQ ID NO: 2370405 - DNA, 25 bp, Homo sapien
ttcagtagagcaacagttgaagcct

SEQ ID NO: 2370406 - DNA, 25 bp, Homo sapien
tgtgattctgtataataaaatctga

SEQ ID NO: 2370407 - DNA, 25 bp, Homo sapien
aacctatgggccatggaccatttct

SEQ ID NO: 2370408 - DNA, 25 bp, Homo sapien
tgtgaaacagacataaaacctatgg

SEQ ID NO: 2370409 - DNA, 25 bp, Homo sapien
gccatcagtaactgctccagtcagc

SEQ ID NO: 2370410 - DNA, 25 bp, Homo sapien
tcctctttaagctggtgccatcagt

SEQ ID NO: 2370411 - DNA, 25 bp, Homo sapien
tatgaagagattgtctcaggatgcc

SEQ ID NO: 2370412 - DNA, 25 bp, Homo sapien
caggatgcctatttcatggcagaaa

SEQ ID NO: 2370413 - DNA, 25 bp, Homo sapien
ttctgtttgaagtgttggtctggat

SEQ ID NO: 2370414 - DNA, 25 bp, Homo sapien
gtgtttctgtttgaagtgttggtct

SEQ ID NO: 2370415 - DNA, 25 bp, Homo sapien
gtttgaagtgttggtctggattttg

SEQ ID NO: 2370416 - DNA, 25 bp, Homo sapien
tgtgtttctgtttgaagtgttggtc

SEQ ID NO: 2370417 - DNA, 25 bp, Homo sapien
tttaaaatatcaggtgcaaaatttg

SEQ ID NO: 2370418 - DNA, 25 bp, Homo sapien
tatcaggtgcaaaatttgtccttat

SEQ ID NO: 2370419 - DNA, 25 bp, Homo sapien
aaatatcaggtgcaaaatttgtcct

SEQ ID NO: 2370420 - DNA, 25 bp, Homo sapien
caggtgcaaaatttgtccttatgaa

SEQ ID NO: 2370421 - DNA, 25 bp, Homo sapien
taagacttgcctaggtgtgggcagg

SEQ ID NO: 2370422 - DNA, 25 bp, Homo sapien
acctgctggtccgttcagagcaggt

SEQ ID NO: 2370423 - DNA, 25 bp, Homo sapien
gggcccttcacccagagccctatct

SEQ ID NO: 2370424 - DNA, 25 bp, Homo sapien
gagcaggtaagacttgcctaggtgt

SEQ ID NO: 2370425 - DNA, 25 bp, Homo sapien
ttgcgtgactcctcagtttgctctt

SEQ ID NO: 2370426 - DNA, 25 bp, Homo sapien
gcctcttctgttccgactcagatag

SEQ ID NO: 2370427 - DNA, 25 bp, Homo sapien
tgtgcaatcattggccttgcgtgac

SEQ ID NO: 2370428 - DNA, 25 bp, Homo sapien
tctctcggcgccaattgtgcaatca

SEQ ID NO: 2370429 - DNA, 25 bp, Homo sapien
cataaaatgggtatgcttgggcagt

SEQ ID NO: 2370430 - DNA, 25 bp, Homo sapien
taaaatgggtatgcttgggcagtgc

SEQ ID NO: 2370431 - DNA, 25 bp, Homo sapien
aaaatgggtatgcttgggcagtgca

SEQ ID NO: 2370432 - DNA, 25 bp, Homo sapien
atgggtatgcttgggcagtgcagcc

SEQ ID NO: 2370433 - DNA, 25 bp, Homo sapien
ttgcttccagtgatcaatcaattga

SEQ ID NO: 2370434 - DNA, 25 bp, Homo sapien
tggtgatttggatccagcagcagat

SEQ ID NO: 2370435 - DNA, 25 bp, Homo sapien
tgccagttgcactcaatctggtgat

SEQ ID NO: 2370436 - DNA, 25 bp, Homo sapien
aggtagtggccagcccggctaaact

SEQ ID NO: 2370437 - DNA, 25 bp, Homo sapien
gacatatcttgccagttcagaaacc

SEQ ID NO: 2370438 - DNA, 25 bp, Homo sapien
gaggcccaagatgaacactggcagg

SEQ ID NO: 2370439 - DNA, 25 bp, Homo sapien
ctcaaagcagagctaactggatggg

SEQ ID NO: 2370440 - DNA, 25 bp, Homo sapien
gacaggcaagggctttttgctgaca

SEQ ID NO: 2370441 - DNA, 25 bp, Homo sapien
tgtgaaatgtcaggtgccaaaagcg

SEQ ID NO: 2370442 - DNA, 25 bp, Homo sapien
aacaccctgaacaccctggagctgt

SEQ ID NO: 2370443 - DNA, 25 bp, Homo sapien
gcatgtaatcttgaccgctctggca

SEQ ID NO: 2370444 - DNA, 25 bp, Homo sapien
gaaggcctaggacaagttcgcactg

SEQ ID NO: 2370445 - DNA, 25 bp, Homo sapien
cccctccaacaaacatcttggatcc

SEQ ID NO: 2370446 - DNA, 25 bp, Homo sapien
ccctccaacaaacatcttggatcct

SEQ ID NO: 2370447 - DNA, 25 bp, Homo sapien
accctggcaagtgcaccaggagggc

SEQ ID NO: 2370448 - DNA, 25 bp, Homo sapien
gggctactcagctcttgcgcgatgg

SEQ ID NO: 2370449 - DNA, 25 bp, Homo sapien
agctcttgcgcgatggctgcctgtc

SEQ ID NO: 2370450 - DNA, 25 bp, Homo sapien
caggagggctactcagctcttgcgc

SEQ ID NO: 2370451 - DNA, 25 bp, Homo sapien
tggaaatggaattaaccagaccaca

SEQ ID NO: 2370452 - DNA, 25 bp, Homo sapien
ttttcatcgggtgttgtacctaaca

SEQ ID NO: 2370453 - DNA, 25 bp, Homo sapien
aaactgagtcatgtgctccgtcccg

SEQ ID NO: 2370454 - DNA, 25 bp, Homo sapien
tccgtcccgtgaggaatttttgcaa

SEQ ID NO: 2370455 - DNA, 25 bp, Homo sapien
ttaaatctatagtggacggtgatct

SEQ ID NO: 2370456 - DNA, 25 bp, Homo sapien
tatccaggcagagtacctagggaca

SEQ ID NO: 2370457 - DNA, 25 bp, Homo sapien
tagtggacggtgatcttttttccta

SEQ ID NO: 2370458 - DNA, 25 bp, Homo sapien
gagtacctagggacagctatgaatt

SEQ ID NO: 2370459 - DNA, 25 bp, Homo sapien
tgggcagacaggcttcaatatcatc

SEQ ID NO: 2370460 - DNA, 25 bp, Homo sapien
tcatcgctatcattagcagtcacca

SEQ ID NO: 2370461 - DNA, 25 bp, Homo sapien
gcttaatagattggttgggcagaca

SEQ ID NO: 2370462 - DNA, 25 bp, Homo sapien
tttttaaggcctgcagcgtgcagat

SEQ ID NO: 2370463 - DNA, 25 bp, Homo sapien
tgatgctgaagcctcggagacagga

SEQ ID NO: 2370464 - DNA, 25 bp, Homo sapien
ctagaacaccacaaggaccacaaat

SEQ ID NO: 2370465 - DNA, 25 bp, Homo sapien
ccacaaggaccacaaatagcagagg

SEQ ID NO: 2370466 - DNA, 25 bp, Homo sapien
tcgagtgggaaacacagatgcctcc

SEQ ID NO: 2370467 - DNA, 25 bp, Homo sapien
ctcagtttccccagcaagtgaccgt

SEQ ID NO: 2370468 - DNA, 25 bp, Homo sapien
agtttccccagcaagtgaccgttgg

SEQ ID NO: 2370469 - DNA, 25 bp, Homo sapien
ttccccagcaagtgaccgttgggct

SEQ ID NO: 2370470 - DNA, 25 bp, Homo sapien
cagcaagtgaccgttgggctagtga

SEQ ID NO: 2370471 - DNA, 25 bp, Homo sapien
aatgtaattgagtgtgaaggccggc

SEQ ID NO: 2370472 - DNA, 25 bp, Homo sapien
tcggagcctccacttaatgtaattg

SEQ ID NO: 2370473 - DNA, 25 bp, Homo sapien
cactattggttgctaattggcgcca

SEQ ID NO: 2370474 - DNA, 25 bp, Homo sapien
agtaggctggtgctaattgtcctaa

SEQ ID NO: 2370475 - DNA, 25 bp, Homo sapien
tccaccactgagtatctccagagta

SEQ ID NO: 2370476 - DNA, 25 bp, Homo sapien
cgtggccgtccaccactgagtatct

SEQ ID NO: 2370477 - DNA, 25 bp, Homo sapien
gctggcagaaacgtggccgtccacc

SEQ ID NO: 2370478 - DNA, 25 bp, Homo sapien
agaaacgtggccgtccaccactgag

SEQ ID NO: 2370479 - DNA, 25 bp, Homo sapien
tgcacagactagcagaaagtcccat

SEQ ID NO: 2370480 - DNA, 25 bp, Homo sapien
gttggagtcttttgcccacccattg

SEQ ID NO: 2370481 - DNA, 25 bp, Homo sapien
aactctccagcggagcagagacctg

SEQ ID NO: 2370482 - DNA, 25 bp, Homo sapien
gctggctcagcgaaagagctggccc

SEQ ID NO: 2370483 - DNA, 25 bp, Homo sapien
gaagaagccttcttgagccaagatt

SEQ ID NO: 2370484 - DNA, 25 bp, Homo sapien
tttaattaattttaggaatgcagcc

SEQ ID NO: 2370485 - DNA, 25 bp, Homo sapien
gggacatgacagcccgttcatttca

SEQ ID NO: 2370486 - DNA, 25 bp, Homo sapien
catgacagcccgttcatttcactgt

SEQ ID NO: 2370487 - DNA, 25 bp, Homo sapien
gctgggccagaggatgaggcatcca

SEQ ID NO: 2370488 - DNA, 25 bp, Homo sapien
ccatggcttcttcccgtggagaagg

SEQ ID NO: 2370489 - DNA, 25 bp, Homo sapien
tgggtaatccagagccctgagatca

SEQ ID NO: 2370490 - DNA, 25 bp, Homo sapien
tggagaaggaggtgcccattcagcc

SEQ ID NO: 2370491 - DNA, 25 bp, Homo sapien
ttcactctgtgggtgtgctcggcag

SEQ ID NO: 2370492 - DNA, 25 bp, Homo sapien
tgctcggcaggcatgcacgggttta

SEQ ID NO: 2370493 - DNA, 25 bp, Homo sapien
cacgggtttagcacacattgccagc

SEQ ID NO: 2370494 - DNA, 25 bp, Homo sapien
gaaaagtccctagcatgtagtaaac

SEQ ID NO: 2370495 - DNA, 25 bp, Homo sapien
gagcttctctgcattcagtcttctc

SEQ ID NO: 2370496 - DNA, 25 bp, Homo sapien
ttgagcttctctgcattcagtcttc

SEQ ID NO: 2370497 - DNA, 25 bp, Homo sapien
gcttctctgcattcagtcttctcat

SEQ ID NO: 2370498 - DNA, 25 bp, Homo sapien
cttgcttttgaccttgagcttctct

SEQ ID NO: 2370499 - DNA, 25 bp, Homo sapien
cagagtgcgtgggaattaggaacat

SEQ ID NO: 2370500 - DNA, 25 bp, Homo sapien
tttgcagactgagcacaagaaatag

SEQ ID NO: 2370501 - DNA, 25 bp, Homo sapien
tgtgctcatactcagtacaggctga

SEQ ID NO: 2370502 - DNA, 25 bp, Homo sapien
tgggcacacgtgcattccatgtgag

SEQ ID NO: 2370503 - DNA, 25 bp, Homo sapien
cctgagaaacccgaggcagatgtgg

SEQ ID NO: 2370504 - DNA, 25 bp, Homo sapien
cctaaaaaatgtgaagcggtggctg

SEQ ID NO: 2370505 - DNA, 25 bp, Homo sapien
tacgttatagcggttgcctgtgggc

SEQ ID NO: 2370506 - DNA, 25 bp, Homo sapien
tagggtgtctatctgcaagctgagt

SEQ ID NO: 2370507 - DNA, 25 bp, Homo sapien
tggttttccagtaagaactatgttg

SEQ ID NO: 2370508 - DNA, 25 bp, Homo sapien
actggttttccagtaagaactatgt

SEQ ID NO: 2370509 - DNA, 25 bp, Homo sapien
acttttttgacaagtgatactggtt

SEQ ID NO: 2370510 - DNA, 25 bp, Homo sapien
gttacttttttgacaagtgatactg

SEQ ID NO: 2370511 - DNA, 25 bp, Homo sapien
aacaggcaaggtccccaacctcatg

SEQ ID NO: 2370512 - DNA, 25 bp, Homo sapien
gccgctgttctaggagatagaagtg

SEQ ID NO: 2370513 - DNA, 25 bp, Homo sapien
tagaagtgaatacaacaggcaaggt

SEQ ID NO: 2370514 - DNA, 25 bp, Homo sapien
aggtccccaacctcatggagctgac

SEQ ID NO: 2370515 - DNA, 25 bp, Homo sapien
ctgaagcctctacaatagggtctgg

SEQ ID NO: 2370516 - DNA, 25 bp, Homo sapien
tctccttgcaaccatttgagttgga

SEQ ID NO: 2370517 - DNA, 25 bp, Homo sapien
tagaaacagcgttcctcttctctac

SEQ ID NO: 2370518 - DNA, 25 bp, Homo sapien
gggacacattaagcactagaaacag

SEQ ID NO: 2370519 - DNA, 25 bp, Homo sapien
gacaaggtgcacacaggtctcttga

SEQ ID NO: 2370520 - DNA, 25 bp, Homo sapien
cacacaggtctcttgaagatgccat

SEQ ID NO: 2370521 - DNA, 25 bp, Homo sapien
tcagggtgtgtacttcaactcagac

SEQ ID NO: 2370522 - DNA, 25 bp, Homo sapien
tacttcaactcagacaaggtgcaca

SEQ ID NO: 2370523 - DNA, 25 bp, Homo sapien
gaaatgcggccacgccaacaacctg

SEQ ID NO: 2370524 - DNA, 25 bp, Homo sapien
gaagaaatgcggccacgccaacaac

SEQ ID NO: 2370525 - DNA, 25 bp, Homo sapien
gctgcaagaagaaatgcggccacgc

SEQ ID NO: 2370526 - DNA, 25 bp, Homo sapien
gcaagaagaaatgcggccacgccaa

SEQ ID NO: 2370527 - DNA, 25 bp, Homo sapien
aagacaaggagggcatcctgcctga

SEQ ID NO: 2370528 - DNA, 25 bp, Homo sapien
caaattgacagtatgctatccaagt

SEQ ID NO: 2370529 - DNA, 25 bp, Homo sapien
aaattgacagtatgctatccaagtg

SEQ ID NO: 2370530 - DNA, 25 bp, Homo sapien
tcaaattgacagtatgctatccaag

SEQ ID NO: 2370531 - DNA, 25 bp, Homo sapien
agggggtgaagaatgctggcagatg

SEQ ID NO: 2370532 - DNA, 25 bp, Homo sapien
aatgctggcagatggtgtgggtgag

SEQ ID NO: 2370533 - DNA, 25 bp, Homo sapien
gggagggggtgaagaatgctggcag

SEQ ID NO: 2370534 - DNA, 25 bp, Homo sapien
ctgcagtaggggagggggtgaagaa

SEQ ID NO: 2370535 - DNA, 25 bp, Homo sapien
agttggtcaagatattactctcagg

SEQ ID NO: 2370536 - DNA, 25 bp, Homo sapien
ataaggtggtccctgagttggtcaa

SEQ ID NO: 2370537 - DNA, 25 bp, Homo sapien
gagcagagctatctcgggaacaggt

SEQ ID NO: 2370538 - DNA, 25 bp, Homo sapien
ttataaggtggtccctgagttggtc

SEQ ID NO: 2370539 - DNA, 25 bp, Homo sapien
ggacttgtttctggagccagttctg

SEQ ID NO: 2370540 - DNA, 25 bp, Homo sapien
cacccaacaaacagcagggggtggg

SEQ ID NO: 2370541 - DNA, 25 bp, Homo sapien
ggtgggggacttgtttctggagcca

SEQ ID NO: 2370542 - DNA, 25 bp, Homo sapien
cccacccaacaaacagcagggggtg

SEQ ID NO: 2370543 - DNA, 25 bp, Homo sapien
gcatctaattctaatcgggtgaatc

SEQ ID NO: 2370544 - DNA, 25 bp, Homo sapien
tctaattctaatcgggtgaatctgg

SEQ ID NO: 2370545 - DNA, 25 bp, Homo sapien
caataacgtggcgatgaaaggacac

SEQ ID NO: 2370546 - DNA, 25 bp, Homo sapien
tgaaaggacaccacgaaagagttaa

SEQ ID NO: 2370547 - DNA, 25 bp, Homo sapien
ctgttatcggctcctagcccaatgt

SEQ ID NO: 2370548 - DNA, 25 bp, Homo sapien
tgttatcggctcctagcccaatgtt

SEQ ID NO: 2370549 - DNA, 25 bp, Homo sapien
cggctcctagcccaatgtttggcat

SEQ ID NO: 2370550 - DNA, 25 bp, Homo sapien
tatcggctcctagcccaatgtttgg

SEQ ID NO: 2370551 - DNA, 25 bp, Homo sapien
taatcccgtggaggcaactgtgaca

SEQ ID NO: 2370552 - DNA, 25 bp, Homo sapien
cccattaaggcctgacgccaggctc

SEQ ID NO: 2370553 - DNA, 25 bp, Homo sapien
cccaggtagcctcggagtaatcccg

SEQ ID NO: 2370554 - DNA, 25 bp, Homo sapien
gtggcaaggcgcctctccgtctggg

SEQ ID NO: 2370555 - DNA, 25 bp, Homo sapien
cattgtttccgacgcctccaactca

SEQ ID NO: 2370556 - DNA, 25 bp, Homo sapien
gtttccgacgcctccaactcattac

SEQ ID NO: 2370557 - DNA, 25 bp, Homo sapien
tcattgtttccgacgcctccaactc

SEQ ID NO: 2370558 - DNA, 25 bp, Homo sapien
ttgtttccgacgcctccaactcatt

SEQ ID NO: 2370559 - DNA, 25 bp, Homo sapien
gacctgttgtgggtctggcgcccac

SEQ ID NO: 2370560 - DNA, 25 bp, Homo sapien
tatttcatagcccttgactgacaac

SEQ ID NO: 2370561 - DNA, 25 bp, Homo sapien
cttgactgacaactcctgaggacct

SEQ ID NO: 2370562 - DNA, 25 bp, Homo sapien
cctgttgtgggtctggcgcccacat

SEQ ID NO: 2370563 - DNA, 25 bp, Homo sapien
gaggtcttggcctaacagagcctca

SEQ ID NO: 2370564 - DNA, 25 bp, Homo sapien
agggctggcagactcagcagttggg

SEQ ID NO: 2370565 - DNA, 25 bp, Homo sapien
acctggaggtcttggcctaacagag

SEQ ID NO: 2370566 - DNA, 25 bp, Homo sapien
ttggcctaacagagcctcacttatt

SEQ ID NO: 2370567 - DNA, 25 bp, Homo sapien
cacatcttgaatgcccacatatatg

SEQ ID NO: 2370568 - DNA, 25 bp, Homo sapien
catatatgagaagacgccactcact

SEQ ID NO: 2370569 - DNA, 25 bp, Homo sapien
gaatgcccacatatatgagaagacg

SEQ ID NO: 2370570 - DNA, 25 bp, Homo sapien
cccacatatatgagaagacgccact

SEQ ID NO: 2370571 - DNA, 25 bp, Homo sapien
tgttggcattggctcagtaagccaa

SEQ ID NO: 2370572 - DNA, 25 bp, Homo sapien
tatcagaagtccttgtgagtatgca

SEQ ID NO: 2370573 - DNA, 25 bp, Homo sapien
tgtgagtatgcagtagattgttggc

SEQ ID NO: 2370574 - DNA, 25 bp, Homo sapien
ccaatagtattcttttgagagctcc

SEQ ID NO: 2370575 - DNA, 25 bp, Homo sapien
tgcactcaggacagtggaggtcggg

SEQ ID NO: 2370576 - DNA, 25 bp, Homo sapien
ctcgggttgactgaatgctctgctg

SEQ ID NO: 2370577 - DNA, 25 bp, Homo sapien
gaacagggatcctcgggttgactga

SEQ ID NO: 2370578 - DNA, 25 bp, Homo sapien
tgaggtatcccaggtggagagaaca

SEQ ID NO: 2370579 - DNA, 25 bp, Homo sapien
ggttgagctcctatgcgcctcctta

SEQ ID NO: 2370580 - DNA, 25 bp, Homo sapien
ttctgatggatcaagagtgccggag

SEQ ID NO: 2370581 - DNA, 25 bp, Homo sapien
gctgtcattcttggtctctagggtt

SEQ ID NO: 2370582 - DNA, 25 bp, Homo sapien
acagtagggctgtcagtttctgatg

SEQ ID NO: 2370583 - DNA, 25 bp, Homo sapien
aagtttccaagtcaacaaatgccat

SEQ ID NO: 2370584 - DNA, 25 bp, Homo sapien
ctggaagtttccaagtcaacaaatg

SEQ ID NO: 2370585 - DNA, 25 bp, Homo sapien
ggaagtttccaagtcaacaaatgcc

SEQ ID NO: 2370586 - DNA, 25 bp, Homo sapien
gaagtttccaagtcaacaaatgcca

SEQ ID NO: 2370587 - DNA, 25 bp, Homo sapien
cagagcctcgggacaagtctgaatg

SEQ ID NO: 2370588 - DNA, 25 bp, Homo sapien
gaacgccctgttcttagatcaaaag

SEQ ID NO: 2370589 - DNA, 25 bp, Homo sapien
ctgttattcagcttcatgtgtgagg

SEQ ID NO: 2370590 - DNA, 25 bp, Homo sapien
ctcgggttctgccactggacaagtg

SEQ ID NO: 2370591 - DNA, 25 bp, Homo sapien
tcctattttcctcgtggactttcac

SEQ ID NO: 2370592 - DNA, 25 bp, Homo sapien
ctcctattttcctcgtggactttca

SEQ ID NO: 2370593 - DNA, 25 bp, Homo sapien
tcagctgagtgctcaccaaacacca

SEQ ID NO: 2370594 - DNA, 25 bp, Homo sapien
gctctgttaggtttctattggtaaa

SEQ ID NO: 2370595 - DNA, 25 bp, Homo sapien
cctcttttctctacggcagcctgag

SEQ ID NO: 2370596 - DNA, 25 bp, Homo sapien
ttggtaaacctgaagtttccattca

SEQ ID NO: 2370597 - DNA, 25 bp, Homo sapien
accagggctctgttaggtttctatt

SEQ ID NO: 2370598 - DNA, 25 bp, Homo sapien
tttggagatgaggatggagtggata

SEQ ID NO: 2370599 - DNA, 25 bp, Homo sapien
ctttggagatgaggatggagtggat

SEQ ID NO: 2370600 - DNA, 25 bp, Homo sapien
ttggagatgaggatggagtggatac

SEQ ID NO: 2370601 - DNA, 25 bp, Homo sapien
actccagagagtatttgatgtttat

SEQ ID NO: 2370602 - DNA, 25 bp, Homo sapien
aactccagagagtatttgatgttta

SEQ ID NO: 2370603 - DNA, 25 bp, Homo sapien
tgaactccagagagtatttgatgtt

SEQ ID NO: 2370604 - DNA, 25 bp, Homo sapien
ggctcacagctaagtccctctgcag

SEQ ID NO: 2370605 - DNA, 25 bp, Homo sapien
gctttccacttgtgacagcttcggt

SEQ ID NO: 2370606 - DNA, 25 bp, Homo sapien
ccctgctcctccgatggcttctagc

SEQ ID NO: 2370607 - DNA, 25 bp, Homo sapien
gcttctagctttccacttgtgacag

SEQ ID NO: 2370608 - DNA, 25 bp, Homo sapien
tcctccgatggcttctagctttcca

SEQ ID NO: 2370609 - DNA, 25 bp, Homo sapien
gtggaacaagacatttccagctgcc

SEQ ID NO: 2370610 - DNA, 25 bp, Homo sapien
tatagatgccttaagatttggcacc

SEQ ID NO: 2370611 - DNA, 25 bp, Homo sapien
ccgtttggcctttgtcagtctgaat

SEQ ID NO: 2370612 - DNA, 25 bp, Homo sapien
ctccattaagggtggcactgacaca

SEQ ID NO: 2370613 - DNA, 25 bp, Homo sapien
gttgagatggattgggatattccca

SEQ ID NO: 2370614 - DNA, 25 bp, Homo sapien
gggtgacaaactgaagttgagatgg

SEQ ID NO: 2370615 - DNA, 25 bp, Homo sapien
agttgagatggattgggatattccc

SEQ ID NO: 2370616 - DNA, 25 bp, Homo sapien
tgagatggattgggatattcccagc

SEQ ID NO: 2370617 - DNA, 25 bp, Homo sapien
tctggcttatgggaatacccacagg

SEQ ID NO: 2370618 - DNA, 25 bp, Homo sapien
tgggaatacccacaggttccagaga

SEQ ID NO: 2370619 - DNA, 25 bp, Homo sapien
tgaggtctctctctagctcccagtg

SEQ ID NO: 2370620 - DNA, 25 bp, Homo sapien
tccttggcaaacctgggatggtagc

SEQ ID NO: 2370621 - DNA, 25 bp, Homo sapien
cagtcaagtctcagggaatggtagg

SEQ ID NO: 2370622 - DNA, 25 bp, Homo sapien
tcctctgtctggaaccttcggagcc

SEQ ID NO: 2370623 - DNA, 25 bp, Homo sapien
tctgtcggataacatgtttagctcc

SEQ ID NO: 2370624 - DNA, 25 bp, Homo sapien
gtggctgctgcgttttccttttatt

SEQ ID NO: 2370625 - DNA, 25 bp, Homo sapien
agtttaaccatgagttgtgtagcca

SEQ ID NO: 2370626 - DNA, 25 bp, Homo sapien
cattatttggtggttgaagaagcct

SEQ ID NO: 2370627 - DNA, 25 bp, Homo sapien
tgtgtagccattgtattgacccgga

SEQ ID NO: 2370628 - DNA, 25 bp, Homo sapien
gatatgtgtccccattaggccctgg

SEQ ID NO: 2370629 - DNA, 25 bp, Homo sapien
gccttggaaaatgggagggatggaa

SEQ ID NO: 2370630 - DNA, 25 bp, Homo sapien
tcccgagcctttctggctacttctt

SEQ ID NO: 2370631 - DNA, 25 bp, Homo sapien
tctctagaggcccagtggaaacact

SEQ ID NO: 2370632 - DNA, 25 bp, Homo sapien
gatggaagttttggtgtcccgagcc

SEQ ID NO: 2370633 - DNA, 25 bp, Homo sapien
atcagcatagtgcatgacaacccgg

SEQ ID NO: 2370634 - DNA, 25 bp, Homo sapien
ctgaacttagtacaaacacaccatc

SEQ ID NO: 2370635 - DNA, 25 bp, Homo sapien
gcatagtgcatgacaacccggaact

SEQ ID NO: 2370636 - DNA, 25 bp, Homo sapien
actatagttgtgtggcacgggggcc

SEQ ID NO: 2370637 - DNA, 25 bp, Homo sapien
tttctctctcaaagtatcctcttct

SEQ ID NO: 2370638 - DNA, 25 bp, Homo sapien
ccatctctggtccctgtgacttaat

SEQ ID NO: 2370639 - DNA, 25 bp, Homo sapien
ctggtccctgtgacttaatgttcac

SEQ ID NO: 2370640 - DNA, 25 bp, Homo sapien
tctggtccctgtgacttaatgttca

SEQ ID NO: 2370641 - DNA, 25 bp, Homo sapien
ctcatttccaatgacctcagtgagc

SEQ ID NO: 2370642 - DNA, 25 bp, Homo sapien
cttctgaccattgtcgtcgtcttct

SEQ ID NO: 2370643 - DNA, 25 bp, Homo sapien
aactcatttccaatgacctcagtga

SEQ ID NO: 2370644 - DNA, 25 bp, Homo sapien
tgtcgtcgtcttctctaaactcatt

SEQ ID NO: 2370645 - DNA, 25 bp, Homo sapien
agtgacaaacagttccccaagtctt

SEQ ID NO: 2370646 - DNA, 25 bp, Homo sapien
gacaaacagttccccaagtctttgc

SEQ ID NO: 2370647 - DNA, 25 bp, Homo sapien
aagtgacaaacagttccccaagtct

SEQ ID NO: 2370648 - DNA, 25 bp, Homo sapien
tgacaaacagttccccaagtctttg

SEQ ID NO: 2370649 - DNA, 25 bp, Homo sapien
gacagaaggcagtgaatatcggtgc

SEQ ID NO: 2370650 - DNA, 25 bp, Homo sapien
aactgggcatcaggaatggaaagaa

SEQ ID NO: 2370651 - DNA, 25 bp, Homo sapien
tctagcatcttcgaagacagaaggc

SEQ ID NO: 2370652 - DNA, 25 bp, Homo sapien
gaatatcggtgctgtttaaaggtag

SEQ ID NO: 2370653 - DNA, 25 bp, Homo sapien
tatgcacagaggcactggttcctgg

SEQ ID NO: 2370654 - DNA, 25 bp, Homo sapien
ggcagcttgctgaacatcggcagcc

SEQ ID NO: 2370655 - DNA, 25 bp, Homo sapien
tggctgaatgttgctaactgcctgc

SEQ ID NO: 2370656 - DNA, 25 bp, Homo sapien
tcgcctttgtaatagcaagtggctg

SEQ ID NO: 2370657 - DNA, 25 bp, Homo sapien
tggcagtctcagggacttgctctct

SEQ ID NO: 2370658 - DNA, 25 bp, Homo sapien
gcagtctcagggacttgctctctgt

SEQ ID NO: 2370659 - DNA, 25 bp, Homo sapien
cagtctcagggacttgctctctgtt

SEQ ID NO: 2370660 - DNA, 25 bp, Homo sapien
gtctcagggacttgctctctgtttc

SEQ ID NO: 2370661 - DNA, 25 bp, Homo sapien
ttgagttttaagagggagcctagcc

SEQ ID NO: 2370662 - DNA, 25 bp, Homo sapien
tatattaacgagagcggtgtcaccc

SEQ ID NO: 2370663 - DNA, 25 bp, Homo sapien
ctgctcaagagcatacaggtcagct

SEQ ID NO: 2370664 - DNA, 25 bp, Homo sapien
cctggaactcgggaaagtggagcat

SEQ ID NO: 2370665 - DNA, 25 bp, Homo sapien
gagatcttcctccatatattaacga

SEQ ID NO: 2370666 - DNA, 25 bp, Homo sapien
tagccctccagtgttgaagaagggt

SEQ ID NO: 2370667 - DNA, 25 bp, Homo sapien
ctgaatgtgagttagccctccagtg

SEQ ID NO: 2370668 - DNA, 25 bp, Homo sapien
tggggcattttccaagccttgtatg

SEQ ID NO: 2370669 - DNA, 25 bp, Homo sapien
agggtggggcattttccaagccttg

SEQ ID NO: 2370670 - DNA, 25 bp, Homo sapien
cctttccttccattgaacctgctgt

SEQ ID NO: 2370671 - DNA, 25 bp, Homo sapien
taagttggacacgtgggagcttgcc

SEQ ID NO: 2370672 - DNA, 25 bp, Homo sapien
ttatagacaggatgctcagggtgct

SEQ ID NO: 2370673 - DNA, 25 bp, Homo sapien
tacaatgtatgcgacggaagtggca

SEQ ID NO: 2370674 - DNA, 25 bp, Homo sapien
tgaatgaggtaccatgtccagcaga

SEQ ID NO: 2370675 - DNA, 25 bp, Homo sapien
gaccctgaagcagtgtgtaaccaat

SEQ ID NO: 2370676 - DNA, 25 bp, Homo sapien
caaagataacactgagtcacgagta

SEQ ID NO: 2370677 - DNA, 25 bp, Homo sapien
gcccggaaggcctggagaccctgaa

SEQ ID NO: 2370678 - DNA, 25 bp, Homo sapien
cactgagtcacgagtattcacagtc

SEQ ID NO: 2370679 - DNA, 25 bp, Homo sapien
acacctcaggattttggcttcccag

SEQ ID NO: 2370680 - DNA, 25 bp, Homo sapien
tcccacaagtgcctactccatgaag

SEQ ID NO: 2370681 - DNA, 25 bp, Homo sapien
catctccatacacctcaggattttg

SEQ ID NO: 2370682 - DNA, 25 bp, Homo sapien
catacacctcaggattttggcttcc

SEQ ID NO: 2370683 - DNA, 25 bp, Homo sapien
gatggaaggacactgacgacgatga

SEQ ID NO: 2370684 - DNA, 25 bp, Homo sapien
gaagatgctgatttcggcattccct

SEQ ID NO: 2370685 - DNA, 25 bp, Homo sapien
cactgacgacgatgaccttgtgaaa

SEQ ID NO: 2370686 - DNA, 25 bp, Homo sapien
tgtcttgaaagggagcgttgttacg

SEQ ID NO: 2370687 - DNA, 25 bp, Homo sapien
tccatactgggtggaacttgtgagt

SEQ ID NO: 2370688 - DNA, 25 bp, Homo sapien
ggaacttgtgagtatgtcacttgaa

SEQ ID NO: 2370689 - DNA, 25 bp, Homo sapien
gtgagtatgtcacttgaagcaagac

SEQ ID NO: 2370690 - DNA, 25 bp, Homo sapien
ctgggtggaacttgtgagtatgtca

SEQ ID NO: 2370691 - DNA, 25 bp, Homo sapien
caccacttgtgtgtttgctaaaaca

SEQ ID NO: 2370692 - DNA, 25 bp, Homo sapien
tgtgaaactcatgggggcttaactc

SEQ ID NO: 2370693 - DNA, 25 bp, Homo sapien
gctaaaacagtcaactctgattcca

SEQ ID NO: 2370694 - DNA, 25 bp, Homo sapien
tacattgccaccacttgtgtgtttg

SEQ ID NO: 2370695 - DNA, 25 bp, Homo sapien
gaaacacatcagagggtgaaggaca

SEQ ID NO: 2370696 - DNA, 25 bp, Homo sapien
ctgaaacacatcagagggtgaagga

SEQ ID NO: 2370697 - DNA, 25 bp, Homo sapien
tgaaacacatcagagggtgaaggac

SEQ ID NO: 2370698 - DNA, 25 bp, Homo sapien
aaacacatcagagggtgaaggacaa

SEQ ID NO: 2370699 - DNA, 25 bp, Homo sapien
agtgcagaacccaaggcccaagagg

SEQ ID NO: 2370700 - DNA, 25 bp, Homo sapien
gggatgtctgatggagccatccatc

SEQ ID NO: 2370701 - DNA, 25 bp, Homo sapien
catgggaaaggccacttagtgcaga

SEQ ID NO: 2370702 - DNA, 25 bp, Homo sapien
ctttctgtcaggaagttgaaggcct

SEQ ID NO: 2370703 - DNA, 25 bp, Homo sapien
gggctgggccctccataggtagaat

SEQ ID NO: 2370704 - DNA, 25 bp, Homo sapien
ctgtggctctccagatttattggga

SEQ ID NO: 2370705 - DNA, 25 bp, Homo sapien
gggccctccataggtagaatgagga

SEQ ID NO: 2370706 - DNA, 25 bp, Homo sapien
ctccagatttattgggagcagctgg

SEQ ID NO: 2370707 - DNA, 25 bp, Homo sapien
tgccccccgggactgtccatgtccc

SEQ ID NO: 2370708 - DNA, 25 bp, Homo sapien
ctgcacaggtggaacaagcgctaca

SEQ ID NO: 2370709 - DNA, 25 bp, Homo sapien
gaacaagcgctacaaaaagccaaag

SEQ ID NO: 2370710 - DNA, 25 bp, Homo sapien
cagtggagctttgccccccgggact

SEQ ID NO: 2370711 - DNA, 25 bp, Homo sapien
gcagggttggactctgacaggccca

SEQ ID NO: 2370712 - DNA, 25 bp, Homo sapien
ccgctagagtggaaggacacagctc

SEQ ID NO: 2370713 - DNA, 25 bp, Homo sapien
tgggccagtaattccatccctcttc

SEQ ID NO: 2370714 - DNA, 25 bp, Homo sapien
tctgacaggcccaaatcacactggg

SEQ ID NO: 2370715 - DNA, 25 bp, Homo sapien
agggactgggtccagctgcttccag

SEQ ID NO: 2370716 - DNA, 25 bp, Homo sapien
gctgcttccagcatgaactgcccat

SEQ ID NO: 2370717 - DNA, 25 bp, Homo sapien
ctccaggaccagggactgggtccag

SEQ ID NO: 2370718 - DNA, 25 bp, Homo sapien
tccagctgcttccagcatgaactgc

SEQ ID NO: 2370719 - DNA, 25 bp, Homo sapien
tctgtgtgctccacgccactctgtg

SEQ ID NO: 2370720 - DNA, 25 bp, Homo sapien
ctgtgtgctccacgccactctgtga

SEQ ID NO: 2370721 - DNA, 25 bp, Homo sapien
tgtgtgctccacgccactctgtgat

SEQ ID NO: 2370722 - DNA, 25 bp, Homo sapien
tttctttgctgtgagtccccacaac

SEQ ID NO: 2370723 - DNA, 25 bp, Homo sapien
ctttgctgtgagtccccacaactgt

SEQ ID NO: 2370724 - DNA, 25 bp, Homo sapien
ccatcctgtgtaggctcccctttct

SEQ ID NO: 2370725 - DNA, 25 bp, Homo sapien
cttcccatcctgtgtaggctcccct

SEQ ID NO: 2370726 - DNA, 25 bp, Homo sapien
ctccaacttgtctccatctgctgcc

SEQ ID NO: 2370727 - DNA, 25 bp, Homo sapien
gctgccttttggcagctgggtgagc

SEQ ID NO: 2370728 - DNA, 25 bp, Homo sapien
cttttggcagctgggtgagctcttg

SEQ ID NO: 2370729 - DNA, 25 bp, Homo sapien
tccatctgctgccttttggcagctg

SEQ ID NO: 2370730 - DNA, 25 bp, Homo sapien
gtggatccttggctacccagtggag

SEQ ID NO: 2370731 - DNA, 25 bp, Homo sapien
tcagagcgaagcaaggaagccctct

SEQ ID NO: 2370732 - DNA, 25 bp, Homo sapien
ttttccctgcatgacatcagagcga

SEQ ID NO: 2370733 - DNA, 25 bp, Homo sapien
gaggactctcagaactagtgattgg

SEQ ID NO: 2370734 - DNA, 25 bp, Homo sapien
gaactcttaccatggtttgaacaaa

SEQ ID NO: 2370735 - DNA, 25 bp, Homo sapien
ggcagcaaagggtagttttcatctg

SEQ ID NO: 2370736 - DNA, 25 bp, Homo sapien
taaatgggctgtttttaatgcaggg

SEQ ID NO: 2370737 - DNA, 25 bp, Homo sapien
tgctacagagtgagaagttatttta

SEQ ID NO: 2370738 - DNA, 25 bp, Homo sapien
accgcacccagcataaacagagact

SEQ ID NO: 2370739 - DNA, 25 bp, Homo sapien
aatgcattacttattgcttgcatga

SEQ ID NO: 2370740 - DNA, 25 bp, Homo sapien
caattgatgaagctagctaaaagaa

SEQ ID NO: 2370741 - DNA, 25 bp, Homo sapien
tattaaggggaatgctgcaaatgaa

SEQ ID NO: 2370742 - DNA, 25 bp, Homo sapien
agataccactgtgcctcagatttaa

SEQ ID NO: 2370743 - DNA, 25 bp, Homo sapien
ccttctaagtaggaagaatggactc

SEQ ID NO: 2370744 - DNA, 25 bp, Homo sapien
tgacgtgcttctttcacattataag

SEQ ID NO: 2370745 - DNA, 25 bp, Homo sapien
tttaggctggtagtttaggcatagc

SEQ ID NO: 2370746 - DNA, 25 bp, Homo sapien
gagccaggcttgagaatctaggcag

SEQ ID NO: 2370747 - DNA, 25 bp, Homo sapien
tgttttacactcttttggcgggtca

SEQ ID NO: 2370748 - DNA, 25 bp, Homo sapien
gaagggcagcatgttggaacttcca

SEQ ID NO: 2370749 - DNA, 25 bp, Homo sapien
tttgaccgcataggtaaagtcctgc

SEQ ID NO: 2370750 - DNA, 25 bp, Homo sapien
aagaagctgacggcagtagggcact

SEQ ID NO: 2370751 - DNA, 25 bp, Homo sapien
aaaagaagctgacggcagtagggca

SEQ ID NO: 2370752 - DNA, 25 bp, Homo sapien
ttaaaagaagctgacggcagtaggg

SEQ ID NO: 2370753 - DNA, 25 bp, Homo sapien
gaagctgacggcagtagggcactgg

SEQ ID NO: 2370754 - DNA, 25 bp, Homo sapien
taatactgtaacctgttcctgtcag

SEQ ID NO: 2370755 - DNA, 25 bp, Homo sapien
tatgtctagtagaaagggctggtct

SEQ ID NO: 2370756 - DNA, 25 bp, Homo sapien
gctggtcattttcactctgctaaaa

SEQ ID NO: 2370757 - DNA, 25 bp, Homo sapien
tgtttgctaggaaggcagaagaagc

SEQ ID NO: 2370758 - DNA, 25 bp, Homo sapien
tcctgattttcagtctgatgcattt

SEQ ID NO: 2370759 - DNA, 25 bp, Homo sapien
cttatcctgattttcagtctgatgc

SEQ ID NO: 2370760 - DNA, 25 bp, Homo sapien
catttcatttagaacttttaaacag

SEQ ID NO: 2370761 - DNA, 25 bp, Homo sapien
tatcctgattttcagtctgatgcat

SEQ ID NO: 2370762 - DNA, 25 bp, Homo sapien
tgcagactcaacctcaaggttcaag

SEQ ID NO: 2370763 - DNA, 25 bp, Homo sapien
cactgcagactcaacctcaaggttc

SEQ ID NO: 2370764 - DNA, 25 bp, Homo sapien
actgcagactcaacctcaaggttca

SEQ ID NO: 2370765 - DNA, 25 bp, Homo sapien
cagactcaacctcaaggttcaagtg

SEQ ID NO: 2370766 - DNA, 25 bp, Homo sapien
gtttcccacaatctgtgtcaagatt

SEQ ID NO: 2370767 - DNA, 25 bp, Homo sapien
cctgtttcccacaatctgtgtcaag

SEQ ID NO: 2370768 - DNA, 25 bp, Homo sapien
tgtttcccacaatctgtgtcaagat

SEQ ID NO: 2370769 - DNA, 25 bp, Homo sapien
catcctgtttcccacaatctgtgtc

SEQ ID NO: 2370770 - DNA, 25 bp, Homo sapien
agggctgctcaggattcttttggca

SEQ ID NO: 2370771 - DNA, 25 bp, Homo sapien
ttaatgggaagtgagttcagccgcc

SEQ ID NO: 2370772 - DNA, 25 bp, Homo sapien
cacgtatcatctttaatagggctgc

SEQ ID NO: 2370773 - DNA, 25 bp, Homo sapien
caacaagtcttggttccacgtatca

SEQ ID NO: 2370774 - DNA, 25 bp, Homo sapien
tgcgggaagttgcaaaatagagcca

SEQ ID NO: 2370775 - DNA, 25 bp, Homo sapien
cacagcacatagcaggcacgtgaat

SEQ ID NO: 2370776 - DNA, 25 bp, Homo sapien
tagagccaggattgtttaggcaaca

SEQ ID NO: 2370777 - DNA, 25 bp, Homo sapien
tggtgaactgtagtgccaggtttcc

SEQ ID NO: 2370778 - DNA, 25 bp, Homo sapien
tacccaagaaatgattggatgaatg

SEQ ID NO: 2370779 - DNA, 25 bp, Homo sapien
ttacaaaattgcatagagactggca

SEQ ID NO: 2370780 - DNA, 25 bp, Homo sapien
tggcatttagaattacccaagaaat

SEQ ID NO: 2370781 - DNA, 25 bp, Homo sapien
tgctttcactaataaagttaatgtt

SEQ ID NO: 2370782 - DNA, 25 bp, Homo sapien
tgtgtatatgcttctgaagcgaaca

SEQ ID NO: 2370783 - DNA, 25 bp, Homo sapien
gtgtatatgcttctgaagcgaacaa

SEQ ID NO: 2370784 - DNA, 25 bp, Homo sapien
cctaatttagggatagtagtgtgta

SEQ ID NO: 2370785 - DNA, 25 bp, Homo sapien
cctggcctgcacaagattaaatgag

SEQ ID NO: 2370786 - DNA, 25 bp, Homo sapien
aagcagatgctggaactcccataac

SEQ ID NO: 2370787 - DNA, 25 bp, Homo sapien
tggttctcatagtaccttatgcagt

SEQ ID NO: 2370788 - DNA, 25 bp, Homo sapien
tttcagaagaatacgaacaaatgcg

SEQ ID NO: 2370789 - DNA, 25 bp, Homo sapien
ttaacacacgtttaagcacaattct

SEQ ID NO: 2370790 - DNA, 25 bp, Homo sapien
tagcatgtttctttgtcgagagaca

SEQ ID NO: 2370791 - DNA, 25 bp, Homo sapien
gaataaagctcttggtatctctgca

SEQ ID NO: 2370792 - DNA, 25 bp, Homo sapien
ttgtgtttctggagtttcgagtgaa

SEQ ID NO: 2370793 - DNA, 25 bp, Homo sapien
taacggctgaataagaagtgccatc

SEQ ID NO: 2370794 - DNA, 25 bp, Homo sapien
ccaatgccgttgctgaactcaatgt

SEQ ID NO: 2370795 - DNA, 25 bp, Homo sapien
caatatttgcagtggccaatgccgt

SEQ ID NO: 2370796 - DNA, 25 bp, Homo sapien
gtatatacataaatgtgaaggttct

SEQ ID NO: 2370797 - DNA, 25 bp, Homo sapien
ctaaaatgtgattgcaatgggattt

SEQ ID NO: 2370798 - DNA, 25 bp, Homo sapien
tatatacataaatgtgaaggttctt

SEQ ID NO: 2370799 - DNA, 25 bp, Homo sapien
ttggtactgctatttctaaaatgtg

SEQ ID NO: 2370800 - DNA, 25 bp, Homo sapien
ttgagcttccccagatttgtcctga

SEQ ID NO: 2370801 - DNA, 25 bp, Homo sapien
gatcagcctttaattaatctagtgg

SEQ ID NO: 2370802 - DNA, 25 bp, Homo sapien
cataatcaagaatgccttaagtcag

SEQ ID NO: 2370803 - DNA, 25 bp, Homo sapien
tagtctacttggagggatatgagga

SEQ ID NO: 2370804 - DNA, 25 bp, Homo sapien
caggaaagagggaagttagtctact

SEQ ID NO: 2370805 - DNA, 25 bp, Homo sapien
taggctttaacatctgtttcttggt

SEQ ID NO: 2370806 - DNA, 25 bp, Homo sapien
ttggtgctttctttgtaactagcaa

SEQ ID NO: 2370807 - DNA, 25 bp, Homo sapien
tgctttctttgtaactagcaatact

SEQ ID NO: 2370808 - DNA, 25 bp, Homo sapien
ggtgctttctttgtaactagcaata

SEQ ID NO: 2370809 - DNA, 25 bp, Homo sapien
tgcctggctgggttttcatacatgc

SEQ ID NO: 2370810 - DNA, 25 bp, Homo sapien
ttaagtgatcttccctctgtggtgg

SEQ ID NO: 2370811 - DNA, 25 bp, Homo sapien
cctggctgggttttcatacatgcaa

SEQ ID NO: 2370812 - DNA, 25 bp, Homo sapien
ctgggttttcatacatgcaagttta

SEQ ID NO: 2370813 - DNA, 25 bp, Homo sapien
tgggtcctcatcaaggacgtcctga

SEQ ID NO: 2370814 - DNA, 25 bp, Homo sapien
gaaatttaggtttggcgatgtcctg

SEQ ID NO: 2370815 - DNA, 25 bp, Homo sapien
ccagtaccagattccagttggctgg

SEQ ID NO: 2370816 - DNA, 25 bp, Homo sapien
gtaacttgccagtaccagattccag

SEQ ID NO: 2370817 - DNA, 25 bp, Homo sapien
tatgtattcctgttatgtaacttgc

SEQ ID NO: 2370818 - DNA, 25 bp, Homo sapien
tgtgactcctactattcccatgatg

SEQ ID NO: 2370819 - DNA, 25 bp, Homo sapien
tcggtttacttgtgagttacattct

SEQ ID NO: 2370820 - DNA, 25 bp, Homo sapien
gttacattctttggactggatgtga

SEQ ID NO: 2370821 - DNA, 25 bp, Homo sapien
actgatgtacagtgatcggtttact

SEQ ID NO: 2370822 - DNA, 25 bp, Homo sapien
tagctggtgtggtagcgcacacctg

SEQ ID NO: 2370823 - DNA, 25 bp, Homo sapien
ggcaggagaatcgctttgaacctgg

SEQ ID NO: 2370824 - DNA, 25 bp, Homo sapien
aattagctggtgtggtagcgcacac

SEQ ID NO: 2370825 - DNA, 25 bp, Homo sapien
taatctcagctacttgggaagctga

SEQ ID NO: 2370826 - DNA, 25 bp, Homo sapien
tcaatttgggatagaggactttaaa

SEQ ID NO: 2370827 - DNA, 25 bp, Homo sapien
tctaatcttgtagaagacttttctt

SEQ ID NO: 2370828 - DNA, 25 bp, Homo sapien
taaagatagatactctcatatgaca

SEQ ID NO: 2370829 - DNA, 25 bp, Homo sapien
tatacttcttcgtgtaacattttca

SEQ ID NO: 2370830 - DNA, 25 bp, Homo sapien
cttttgccatcagagctcctagagc

SEQ ID NO: 2370831 - DNA, 25 bp, Homo sapien
aagaacttatgtctttggtcccaag

SEQ ID NO: 2370832 - DNA, 25 bp, Homo sapien
taataggcaccgtttttgttcacca

SEQ ID NO: 2370833 - DNA, 25 bp, Homo sapien
gagttctggttaggatttggcgaca

SEQ ID NO: 2370834 - DNA, 25 bp, Homo sapien
caagacttctgagaaaaataggatg

SEQ ID NO: 2370835 - DNA, 25 bp, Homo sapien
tttgaaggttctatggaatatgtag

SEQ ID NO: 2370836 - DNA, 25 bp, Homo sapien
tggaatatgtagtaacagatttctc

SEQ ID NO: 2370837 - DNA, 25 bp, Homo sapien
ccaagacttctgagaaaaataggat

SEQ ID NO: 2370838 - DNA, 25 bp, Homo sapien
tcttgaggcccatctaggattgaac

SEQ ID NO: 2370839 - DNA, 25 bp, Homo sapien
gaataagcattatcctcttgaggcc

SEQ ID NO: 2370840 - DNA, 25 bp, Homo sapien
taaacccgacgttgataaaatgcac

SEQ ID NO: 2370841 - DNA, 25 bp, Homo sapien
taaagggcttctacaatatccacat

SEQ ID NO: 2370842 - DNA, 25 bp, Homo sapien
tgtagtgattcagagcacgggctct

SEQ ID NO: 2370843 - DNA, 25 bp, Homo sapien
tgaatgcttgcatagtcactagctg

SEQ ID NO: 2370844 - DNA, 25 bp, Homo sapien
tcatagcgtactccaaatagcgtcc

SEQ ID NO: 2370845 - DNA, 25 bp, Homo sapien
tacaggctgcgaatgaattgtggca

SEQ ID NO: 2370846 - DNA, 25 bp, Homo sapien
aatggcgtaggtacaattttggagg

SEQ ID NO: 2370847 - DNA, 25 bp, Homo sapien
gggaatcaaatggcgtaggtacaat

SEQ ID NO: 2370848 - DNA, 25 bp, Homo sapien
gaatcaaatggcgtaggtacaattt

SEQ ID NO: 2370849 - DNA, 25 bp, Homo sapien
caaatggcgtaggtacaattttgga

SEQ ID NO: 2370850 - DNA, 25 bp, Homo sapien
ctgaattagttaccaggtgtttaag

SEQ ID NO: 2370851 - DNA, 25 bp, Homo sapien
ccaggtgtttaagtttgtagcgttg

SEQ ID NO: 2370852 - DNA, 25 bp, Homo sapien
taagtttgtagcgttgctgttgtgt

SEQ ID NO: 2370853 - DNA, 25 bp, Homo sapien
tgtagcgttgctgttgtgtcacttg

SEQ ID NO: 2370854 - DNA, 25 bp, Homo sapien
tgcattcttgcagcatgtagtacaa

SEQ ID NO: 2370855 - DNA, 25 bp, Homo sapien
cccatgagttttataggagttctaa

SEQ ID NO: 2370856 - DNA, 25 bp, Homo sapien
ttggctgtgaaaattaatgtactgc

SEQ ID NO: 2370857 - DNA, 25 bp, Homo sapien
aaatttcagccatccttgtggcgtg

SEQ ID NO: 2370858 - DNA, 25 bp, Homo sapien
aagagcagcagttttgaaggcaggt

SEQ ID NO: 2370859 - DNA, 25 bp, Homo sapien
gcttagtgttctcatgtagggtgtc

SEQ ID NO: 2370860 - DNA, 25 bp, Homo sapien
tatagtcctggcagtcagagcggga

SEQ ID NO: 2370861 - DNA, 25 bp, Homo sapien
gctatagctcctcttctaggccaag

SEQ ID NO: 2370862 - DNA, 25 bp, Homo sapien
tactactttgaaatagcgcagagcc

SEQ ID NO: 2370863 - DNA, 25 bp, Homo sapien
gagagtcagttgtgtccaaggcaaa

SEQ ID NO: 2370864 - DNA, 25 bp, Homo sapien
gatcctcttgagttgagtgcatcaa

SEQ ID NO: 2370865 - DNA, 25 bp, Homo sapien
gcgcagagccttggctgacagcttt

SEQ ID NO: 2370866 - DNA, 25 bp, Homo sapien
caagcgccagccaatggcgggccga

SEQ ID NO: 2370867 - DNA, 25 bp, Homo sapien
caatggcgggccgagccgcggtcgg

SEQ ID NO: 2370868 - DNA, 25 bp, Homo sapien
gtgaccaagcgccagccaatggcgg

SEQ ID NO: 2370869 - DNA, 25 bp, Homo sapien
atggcgggccgagccgcggtcggcg

SEQ ID NO: 2370870 - DNA, 25 bp, Homo sapien
aagagcttggcttcactgtgcgcgg

SEQ ID NO: 2370871 - DNA, 25 bp, Homo sapien
acagtaagcgctccgtctatggcag

SEQ ID NO: 2370872 - DNA, 25 bp, Homo sapien
tatggcagccgtgaatatccctggg

SEQ ID NO: 2370873 - DNA, 25 bp, Homo sapien
tatccctgggcgaagcctgtgaaac

SEQ ID NO: 2370874 - DNA, 25 bp, Homo sapien
tttggaggcgtattagtgaagacat

SEQ ID NO: 2370875 - DNA, 25 bp, Homo sapien
tgtttggaggcgtattagtgaagac

SEQ ID NO: 2370876 - DNA, 25 bp, Homo sapien
tccatgtttggaggcgtattagtga

SEQ ID NO: 2370877 - DNA, 25 bp, Homo sapien
tgttccatgtttggaggcgtattag

SEQ ID NO: 2370878 - DNA, 25 bp, Homo sapien
gtcatgacgggggttcttgctacat

SEQ ID NO: 2370879 - DNA, 25 bp, Homo sapien
tttttgtcatgacgggggttcttgc

SEQ ID NO: 2370880 - DNA, 25 bp, Homo sapien
cactgtgccagccatccactcttcc

SEQ ID NO: 2370881 - DNA, 25 bp, Homo sapien
tggtcttaaacctcggctaggatta

SEQ ID NO: 2370882 - DNA, 25 bp, Homo sapien
ctccaaatcggcgataactgctgtt

SEQ ID NO: 2370883 - DNA, 25 bp, Homo sapien
actgcctctccaaatcggcgataac

SEQ ID NO: 2370884 - DNA, 25 bp, Homo sapien
caaatcggcgataactgctgttgtt

SEQ ID NO: 2370885 - DNA, 25 bp, Homo sapien
gttgtttttacttcatcctctatac

SEQ ID NO: 2370886 - DNA, 25 bp, Homo sapien
gctcccacggaagtgagtttttctg

SEQ ID NO: 2370887 - DNA, 25 bp, Homo sapien
ggtgggaggtactggcgctcctgct

SEQ ID NO: 2370888 - DNA, 25 bp, Homo sapien
gaggcttggagttgacaaggccctc

SEQ ID NO: 2370889 - DNA, 25 bp, Homo sapien
tggagttgacaaggccctcgtcctc

SEQ ID NO: 2370890 - DNA, 25 bp, Homo sapien
ataaactgacagcatctgattgaca

SEQ ID NO: 2370891 - DNA, 25 bp, Homo sapien
tgacagcatctgattgacagtgttc

SEQ ID NO: 2370892 - DNA, 25 bp, Homo sapien
taaactgacagcatctgattgacag

SEQ ID NO: 2370893 - DNA, 25 bp, Homo sapien
aactgacagcatctgattgacagtg

SEQ ID NO: 2370894 - DNA, 25 bp, Homo sapien
tggatttgattgcttcttcgtgaaa

SEQ ID NO: 2370895 - DNA, 25 bp, Homo sapien
tggaagtaatttggatttgattgct

SEQ ID NO: 2370896 - DNA, 25 bp, Homo sapien
attctaatgtcaagactgtgtctaa

SEQ ID NO: 2370897 - DNA, 25 bp, Homo sapien
gcttcttcgtgaaattctaatgtca

SEQ ID NO: 2370898 - DNA, 25 bp, Homo sapien
tgacgaattcagtgttaatgcccat

SEQ ID NO: 2370899 - DNA, 25 bp, Homo sapien
gacatttgacgaattcagtgttaat

SEQ ID NO: 2370900 - DNA, 25 bp, Homo sapien
aagacctggtctgacatttgacgaa

SEQ ID NO: 2370901 - DNA, 25 bp, Homo sapien
ggtctgacatttgacgaattcagtg

SEQ ID NO: 2370902 - DNA, 25 bp, Homo sapien
tggaggcaaatgagaaaatatccat

SEQ ID NO: 2370903 - DNA, 25 bp, Homo sapien
ggaagttggaggcaaatgagaaaat

SEQ ID NO: 2370904 - DNA, 25 bp, Homo sapien
ttccagcagagacaccaggaagttg

SEQ ID NO: 2370905 - DNA, 25 bp, Homo sapien
gacaccaggaagttggaggcaaatg

SEQ ID NO: 2370906 - DNA, 25 bp, Homo sapien
tcagaaactgcaaaaccgcaccccg

SEQ ID NO: 2370907 - DNA, 25 bp, Homo sapien
tgtttcagaaactgcaaaaccgcac

SEQ ID NO: 2370908 - DNA, 25 bp, Homo sapien
tttcgatttttctggctgtgtttca

SEQ ID NO: 2370909 - DNA, 25 bp, Homo sapien
cttcatcatttcgatttttctggct

SEQ ID NO: 2370910 - DNA, 25 bp, Homo sapien
aagaaacgcgcggtcaggattcggt

SEQ ID NO: 2370911 - DNA, 25 bp, Homo sapien
cgcggtcaggattcggtttcctatt

SEQ ID NO: 2370912 - DNA, 25 bp, Homo sapien
ctataaaaagaaacgcgcggtcagg

SEQ ID NO: 2370913 - DNA, 25 bp, Homo sapien
cgcgcggtcaggattcggtttccta

SEQ ID NO: 2370914 - DNA, 25 bp, Homo sapien
tggcgtattgtttagagacgatgag

SEQ ID NO: 2370915 - DNA, 25 bp, Homo sapien
cgatgaggggtaatcttgtgctctg

SEQ ID NO: 2370916 - DNA, 25 bp, Homo sapien
tccatctgatgattggcgtattgtt

SEQ ID NO: 2370917 - DNA, 25 bp, Homo sapien
tgatgattggcgtattgtttagaga

SEQ ID NO: 2370918 - DNA, 25 bp, Homo sapien
catcttcttcaatgtctatcagcac

SEQ ID NO: 2370919 - DNA, 25 bp, Homo sapien
ttcaatgtctatcagcacatggatg

SEQ ID NO: 2370920 - DNA, 25 bp, Homo sapien
tgtcatcttcttcaatgtctatcag

SEQ ID NO: 2370921 - DNA, 25 bp, Homo sapien
tcttcaatgtctatcagcacatgga

SEQ ID NO: 2370922 - DNA, 25 bp, Homo sapien
gatgcaatttcaatgagccagaatg

SEQ ID NO: 2370923 - DNA, 25 bp, Homo sapien
caaaactggatatcccttaaagctg

SEQ ID NO: 2370924 - DNA, 25 bp, Homo sapien
cacattctggcaacgtttagatgca

SEQ ID NO: 2370925 - DNA, 25 bp, Homo sapien
gccagaatgtagtactgtaaaccca

SEQ ID NO: 2370926 - DNA, 25 bp, Homo sapien
gcgttctctctctgagtggacctag

SEQ ID NO: 2370927 - DNA, 25 bp, Homo sapien
cagtctgaagtcaggcctggggctt

SEQ ID NO: 2370928 - DNA, 25 bp, Homo sapien
gagtggacctagacgtgcattccgg

SEQ ID NO: 2370929 - DNA, 25 bp, Homo sapien
gaaagggcaaatctgcaaagtctct

SEQ ID NO: 2370930 - DNA, 25 bp, Homo sapien
cacctatatcctcatgctttgagag

SEQ ID NO: 2370931 - DNA, 25 bp, Homo sapien
caaacctgagtatagagaccaagtc

SEQ ID NO: 2370932 - DNA, 25 bp, Homo sapien
agtcatattcagcacacacccagtg

SEQ ID NO: 2370933 - DNA, 25 bp, Homo sapien
cacggtggcgttgtctagatgtttc

SEQ ID NO: 2370934 - DNA, 25 bp, Homo sapien
ccttctctgtacttcaggacgcact

SEQ ID NO: 2370935 - DNA, 25 bp, Homo sapien
tacttcaggacgcactgttcctggg

SEQ ID NO: 2370936 - DNA, 25 bp, Homo sapien
tactcccttctaccggcttctgcct

SEQ ID NO: 2370937 - DNA, 25 bp, Homo sapien
ctgggtctggaatttcctactccct

SEQ ID NO: 2370938 - DNA, 25 bp, Homo sapien
tatggaatctatgccccttgtttgc

SEQ ID NO: 2370939 - DNA, 25 bp, Homo sapien
cagttgagaacttggcttatggaat

SEQ ID NO: 2370940 - DNA, 25 bp, Homo sapien
cggccaacacagcagttgagaactt

SEQ ID NO: 2370941 - DNA, 25 bp, Homo sapien
gaacttggcttatggaatctatgcc

SEQ ID NO: 2370942 - DNA, 25 bp, Homo sapien
cagacactccaagcctttttagggc

SEQ ID NO: 2370943 - DNA, 25 bp, Homo sapien
gcgcagggctgggtcccaagcacca

SEQ ID NO: 2370944 - DNA, 25 bp, Homo sapien
taaagactgtgtagcagagcgcagg

SEQ ID NO: 2370945 - DNA, 25 bp, Homo sapien
agggcagccatagaacccagagaag

SEQ ID NO: 2370946 - DNA, 25 bp, Homo sapien
cagaactgtcagatcggcactgtga

SEQ ID NO: 2370947 - DNA, 25 bp, Homo sapien
tctccccagcataaggccattttgc

SEQ ID NO: 2370948 - DNA, 25 bp, Homo sapien
cagaaatacctgtaggacgcagagg

SEQ ID NO: 2370949 - DNA, 25 bp, Homo sapien
gaaaacaagtcagccaagagcagaa

SEQ ID NO: 2370950 - DNA, 25 bp, Homo sapien
gtgtcctgttggctcgctcctatca

SEQ ID NO: 2370951 - DNA, 25 bp, Homo sapien
tgttggctcgctcctatcagagtcc

SEQ ID NO: 2370952 - DNA, 25 bp, Homo sapien
agtctaactggcatccgaattccct

SEQ ID NO: 2370953 - DNA, 25 bp, Homo sapien
ctcttgtccccaagtctaactggca

SEQ ID NO: 2370954 - DNA, 25 bp, Homo sapien
taatagtggacaaccactgtgcagt

SEQ ID NO: 2370955 - DNA, 25 bp, Homo sapien
caaccactgtgcagtaggactcagc

SEQ ID NO: 2370956 - DNA, 25 bp, Homo sapien
tccccttcataatagtggacaacca

SEQ ID NO: 2370957 - DNA, 25 bp, Homo sapien
tggacaaccactgtgcagtaggact

SEQ ID NO: 2370958 - DNA, 25 bp, Homo sapien
ccagctttagttcccagttgtatcc

SEQ ID NO: 2370959 - DNA, 25 bp, Homo sapien
catggagttatcagaaacgagcgcc

SEQ ID NO: 2370960 - DNA, 25 bp, Homo sapien
tccccagttagccagctgctgatga

SEQ ID NO: 2370961 - DNA, 25 bp, Homo sapien
gctgattgttctccaaaaggcccat

SEQ ID NO: 2370962 - DNA, 25 bp, Homo sapien
taaatggttatcagaagaccctggc

SEQ ID NO: 2370963 - DNA, 25 bp, Homo sapien
ccacagagatcgctatgaagagtgt

SEQ ID NO: 2370964 - DNA, 25 bp, Homo sapien
tgaatcacctccacctatgaagctg

SEQ ID NO: 2370965 - DNA, 25 bp, Homo sapien
taggcatccaagtcttcggcaattg

SEQ ID NO: 2370966 - DNA, 25 bp, Homo sapien
cttagagcaggtgggagcctcggac

SEQ ID NO: 2370967 - DNA, 25 bp, Homo sapien
caagcgcttagagcaggtgggagcc

SEQ ID NO: 2370968 - DNA, 25 bp, Homo sapien
agcgcttagagcaggtgggagcctc

SEQ ID NO: 2370969 - DNA, 25 bp, Homo sapien
cgcttagagcaggtgggagcctcgg

SEQ ID NO: 2370970 - DNA, 25 bp, Homo sapien
ctcaacaagggggtgaatgaagaag

SEQ ID NO: 2370971 - DNA, 25 bp, Homo sapien
tgcaaaagccaagggcctcaacaag

SEQ ID NO: 2370972 - DNA, 25 bp, Homo sapien
agctctcaccctgccaatttccagc

SEQ ID NO: 2370973 - DNA, 25 bp, Homo sapien
aggagggctgcgtcccagactagtt

SEQ ID NO: 2370974 - DNA, 25 bp, Homo sapien
tctcgagccagcacacgcattaaat

SEQ ID NO: 2370975 - DNA, 25 bp, Homo sapien
aggagctcccacctagacagacaga

SEQ ID NO: 2370976 - DNA, 25 bp, Homo sapien
agaaggcggaggtacactggcatat

SEQ ID NO: 2370977 - DNA, 25 bp, Homo sapien
cactggcatatgaaggacagaaaga

SEQ ID NO: 2370978 - DNA, 25 bp, Homo sapien
gaaagaccgagtattcccgacagac

SEQ ID NO: 2370979 - DNA, 25 bp, Homo sapien
tcggatggataggaaccagcctctt

SEQ ID NO: 2370980 - DNA, 25 bp, Homo sapien
actgagatgcctccagtcggatgga

SEQ ID NO: 2370981 - DNA, 25 bp, Homo sapien
catataaatttcctgcgggccggcc

SEQ ID NO: 2370982 - DNA, 25 bp, Homo sapien
tgaagagattgagtccctgcagcac

SEQ ID NO: 2370983 - DNA, 25 bp, Homo sapien
gactgtaatcatcgtgctgtacggg

SEQ ID NO: 2370984 - DNA, 25 bp, Homo sapien
taaagccttagagtaacgtgacctg

SEQ ID NO: 2370985 - DNA, 25 bp, Homo sapien
gcagcacgcaattagacagtagcag

SEQ ID NO: 2370986 - DNA, 25 bp, Homo sapien
gaagtcccgggaactaacattcatc

SEQ ID NO: 2370987 - DNA, 25 bp, Homo sapien
gacagccatgtctcagaggtgaaga

SEQ ID NO: 2370988 - DNA, 25 bp, Homo sapien
tggacaccttggatcctgccagcaa

SEQ ID NO: 2370989 - DNA, 25 bp, Homo sapien
ggatcgcaacattcctgccaagggt

SEQ ID NO: 2370990 - DNA, 25 bp, Homo sapien
gtggagcagagggccattaaacaaa

SEQ ID NO: 2370991 - DNA, 25 bp, Homo sapien
tggagcagagggccattaaacaaat

SEQ ID NO: 2370992 - DNA, 25 bp, Homo sapien
cgatgtgccaaggaagactaggtgc

SEQ ID NO: 2370993 - DNA, 25 bp, Homo sapien
acgatgtgccaaggaagactaggtg

SEQ ID NO: 2370994 - DNA, 25 bp, Homo sapien
cgtgatctgagtacatgtaggataa

SEQ ID NO: 2370995 - DNA, 25 bp, Homo sapien
aagggtgaataggagtctccaggca

SEQ ID NO: 2370996 - DNA, 25 bp, Homo sapien
taggataaatgaccccaggcaaggc

SEQ ID NO: 2370997 - DNA, 25 bp, Homo sapien
gccagagtgactgggagtttatttg

SEQ ID NO: 2370998 - DNA, 25 bp, Homo sapien
tgtttgctgaaaacgccaggcaaga

SEQ ID NO: 2370999 - DNA, 25 bp, Homo sapien
tctccccgtaatcctctgtgtgtgt

SEQ ID NO: 2371000 - DNA, 25 bp, Homo sapien
caccttaggagccatgtccacttgg

SEQ ID NO: 2371001 - DNA, 25 bp, Homo sapien
tttcctggtgcgtctaagcgtagca

SEQ ID NO: 2371002 - DNA, 25 bp, Homo sapien
tcaaccagccatcatatttccattt

SEQ ID NO: 2371003 - DNA, 25 bp, Homo sapien
atatttccatttctcttgggccgtt

SEQ ID NO: 2371004 - DNA, 25 bp, Homo sapien
tccatttctcttgggccgtttctgt

SEQ ID NO: 2371005 - DNA, 25 bp, Homo sapien
tcatatttccatttctcttgggccg

SEQ ID NO: 2371006 - DNA, 25 bp, Homo sapien
ggcagcaaagaagccgagaggtcac

SEQ ID NO: 2371007 - DNA, 25 bp, Homo sapien
tcatgcagctagatggagaaagagg

SEQ ID NO: 2371008 - DNA, 25 bp, Homo sapien
tggtccactgcaaaacacatgatag

SEQ ID NO: 2371009 - DNA, 25 bp, Homo sapien
tggaaaacgggcttcatgtctcttg

SEQ ID NO: 2371010 - DNA, 25 bp, Homo sapien
gaacaagataaacaggtctttgtct

SEQ ID NO: 2371011 - DNA, 25 bp, Homo sapien
caagataaacaggtctttgtcttca

SEQ ID NO: 2371012 - DNA, 25 bp, Homo sapien
acaagataaacaggtctttgtcttc

SEQ ID NO: 2371013 - DNA, 25 bp, Homo sapien
agataaacaggtctttgtcttcatg

SEQ ID NO: 2371014 - DNA, 25 bp, Homo sapien
ctcttgctatgtttcccaggctggt

SEQ ID NO: 2371015 - DNA, 25 bp, Homo sapien
ctgactcagcctcccaaagttctgg

SEQ ID NO: 2371016 - DNA, 25 bp, Homo sapien
tttttctcccaatagagacaggctc

SEQ ID NO: 2371017 - DNA, 25 bp, Homo sapien
cttgaactggcctcaagtgatcctc

SEQ ID NO: 2371018 - DNA, 25 bp, Homo sapien
gctgcgagccttgcggaggcagaga

SEQ ID NO: 2371019 - DNA, 25 bp, Homo sapien
cacctcgggcctcgtcgctgttgct

SEQ ID NO: 2371020 - DNA, 25 bp, Homo sapien
atcttctgtgcatgccggtgcctgc

SEQ ID NO: 2371021 - DNA, 25 bp, Homo sapien
ctgcactcccgagaggtggctgcga

SEQ ID NO: 2371022 - DNA, 25 bp, Homo sapien
tggaaggtgcatgatgctcagctct

SEQ ID NO: 2371023 - DNA, 25 bp, Homo sapien
ccggtgagcggctgtgggattcttc

SEQ ID NO: 2371024 - DNA, 25 bp, Homo sapien
ctggagcagtaaccgtcaagaagcc

SEQ ID NO: 2371025 - DNA, 25 bp, Homo sapien
gccattcaagcaaggctagaaataa

SEQ ID NO: 2371026 - DNA, 25 bp, Homo sapien
tttctacagctatgaccattaaaaa

SEQ ID NO: 2371027 - DNA, 25 bp, Homo sapien
cctaagaatagcagtccgtggccgg

SEQ ID NO: 2371028 - DNA, 25 bp, Homo sapien
gctttaagcaggaacttcgcggaca

SEQ ID NO: 2371029 - DNA, 25 bp, Homo sapien
caaaggagagacagttcagaataac

SEQ ID NO: 2371030 - DNA, 25 bp, Homo sapien
gcggcggcgacgacgcgagggtccc

SEQ ID NO: 2371031 - DNA, 25 bp, Homo sapien
tcacccttgtatcgttctattatca

SEQ ID NO: 2371032 - DNA, 25 bp, Homo sapien
cacccttgtatcgttctattatcac

SEQ ID NO: 2371033 - DNA, 25 bp, Homo sapien
gaacactactgtttgatgatctgtg

SEQ ID NO: 2371034 - DNA, 25 bp, Homo sapien
aaatttgaaaacaagctagcctaca

SEQ ID NO: 2371035 - DNA, 25 bp, Homo sapien
gatctcagttggtaacatccctttt

SEQ ID NO: 2371036 - DNA, 25 bp, Homo sapien
tccaaagctgaatgtgctcacttgg

SEQ ID NO: 2371037 - DNA, 25 bp, Homo sapien
gcaccacgggaagatttatggaacg

SEQ ID NO: 2371038 - DNA, 25 bp, Homo sapien
ccaagggaccttacttatagagaag

SEQ ID NO: 2371039 - DNA, 25 bp, Homo sapien
gacccctctggcgattagaaataag

SEQ ID NO: 2371040 - DNA, 25 bp, Homo sapien
tttgtgcgaaagaatgacccctctg

SEQ ID NO: 2371041 - DNA, 25 bp, Homo sapien
tccatatgctgtcatagggaatgtt

SEQ ID NO: 2371042 - DNA, 25 bp, Homo sapien
tatgctgtcatagggaatgttgagg

SEQ ID NO: 2371043 - DNA, 25 bp, Homo sapien
tagcccagcgcttttttccatatgc

SEQ ID NO: 2371044 - DNA, 25 bp, Homo sapien
tgaggtatttcacgtaccacttaaa

SEQ ID NO: 2371045 - DNA, 25 bp, Homo sapien
gtgagactgaggatgtgtttacata

SEQ ID NO: 2371046 - DNA, 25 bp, Homo sapien
cacaccgtttttctttgggctgttg

SEQ ID NO: 2371047 - DNA, 25 bp, Homo sapien
taaagaagctgctcaaggctacagg

SEQ ID NO: 2371048 - DNA, 25 bp, Homo sapien
attttagccctttgagttgaattgc

SEQ ID NO: 2371049 - DNA, 25 bp, Homo sapien
ggcatcctttggaccactggggctg

SEQ ID NO: 2371050 - DNA, 25 bp, Homo sapien
gggctgccatcgtggccacgtgcat

SEQ ID NO: 2371051 - DNA, 25 bp, Homo sapien
accactggggctgccatcgtggcca

SEQ ID NO: 2371052 - DNA, 25 bp, Homo sapien
tggccacgtgcatctgggggctcca

SEQ ID NO: 2371053 - DNA, 25 bp, Homo sapien
ttattggccctgacgtgggtctccg

SEQ ID NO: 2371054 - DNA, 25 bp, Homo sapien
cctccgacaagggaacggtactgct

SEQ ID NO: 2371055 - DNA, 25 bp, Homo sapien
cgagtccacggatcacatatgaatg

SEQ ID NO: 2371056 - DNA, 25 bp, Homo sapien
taaataccagaattattttcacgag

SEQ ID NO: 2371057 - DNA, 25 bp, Homo sapien
gaagaaatcagactgagcttcaatg

SEQ ID NO: 2371058 - DNA, 25 bp, Homo sapien
agaaatcagactgagcttcaatgaa

SEQ ID NO: 2371059 - DNA, 25 bp, Homo sapien
ttagaagaaatcagactgagcttca

SEQ ID NO: 2371060 - DNA, 25 bp, Homo sapien
tagaagaaatcagactgagcttcaa

SEQ ID NO: 2371061 - DNA, 25 bp, Homo sapien
caatgtccgctatagcttctaaagc

SEQ ID NO: 2371062 - DNA, 25 bp, Homo sapien
ttatgatgaagactcaagcacttgg

SEQ ID NO: 2371063 - DNA, 25 bp, Homo sapien
ggaaaaaattcatgcccctgcttat

SEQ ID NO: 2371064 - DNA, 25 bp, Homo sapien
atgttaacctcaccctcaatgtccg

SEQ ID NO: 2371065 - DNA, 25 bp, Homo sapien
caagatgagaattgatctcaaacct

SEQ ID NO: 2371066 - DNA, 25 bp, Homo sapien
gcgttttgaaagagaggccgacaga

SEQ ID NO: 2371067 - DNA, 25 bp, Homo sapien
aatcagggtttcctgccgcagagca

SEQ ID NO: 2371068 - DNA, 25 bp, Homo sapien
gaacgtctcgaatcacaatcagggt

SEQ ID NO: 2371069 - DNA, 25 bp, Homo sapien
attgaaagggtgtctccacttttgt

SEQ ID NO: 2371070 - DNA, 25 bp, Homo sapien
tgaaagggtgtctccacttttgtcc

SEQ ID NO: 2371071 - DNA, 25 bp, Homo sapien
ttgaaagggtgtctccacttttgtc

SEQ ID NO: 2371072 - DNA, 25 bp, Homo sapien
tatgttacagccttccggtgggttc

SEQ ID NO: 2371073 - DNA, 25 bp, Homo sapien
agtggcctctgtaccccggatagtc

SEQ ID NO: 2371074 - DNA, 25 bp, Homo sapien
gtgggttcgtagtcttctcgcctga

SEQ ID NO: 2371075 - DNA, 25 bp, Homo sapien
taccgctcttaatgcggcgagtctg

SEQ ID NO: 2371076 - DNA, 25 bp, Homo sapien
cgctcctgaacgattgctgcctggg

SEQ ID NO: 2371077 - DNA, 25 bp, Homo sapien
gcccgtctgaatagccttggcggaa

SEQ ID NO: 2371078 - DNA, 25 bp, Homo sapien
gcatttctgaacagccacggagcgg

SEQ ID NO: 2371079 - DNA, 25 bp, Homo sapien
cacggagcgggatactcttgagttc

SEQ ID NO: 2371080 - DNA, 25 bp, Homo sapien
ttccacattctggcttgtcagtttg

SEQ ID NO: 2371081 - DNA, 25 bp, Homo sapien
gggcttctgacatttgcagcaggga

SEQ ID NO: 2371082 - DNA, 25 bp, Homo sapien
tgaggttgaggtggcatcgcatttc

SEQ ID NO: 2371083 - DNA, 25 bp, Homo sapien
cagggaggcctgataggctgatttt

SEQ ID NO: 2371084 - DNA, 25 bp, Homo sapien
ccaaagcacattcgggaggtcattc

SEQ ID NO: 2371085 - DNA, 25 bp, Homo sapien
cacagctcccaaagcacattcggga

SEQ ID NO: 2371086 - DNA, 25 bp, Homo sapien
tcatggctccgactgtcatcagctg

SEQ ID NO: 2371087 - DNA, 25 bp, Homo sapien
tgtgctcatggctccgactgtcatc

SEQ ID NO: 2371088 - DNA, 25 bp, Homo sapien
cacgtccattgtgagtctttcctcc

SEQ ID NO: 2371089 - DNA, 25 bp, Homo sapien
gaaaggttgagtaccaccaattctc

SEQ ID NO: 2371090 - DNA, 25 bp, Homo sapien
cccctatcagggagaaaggttgagt

SEQ ID NO: 2371091 - DNA, 25 bp, Homo sapien
tggtttccgtcttgcaggcttttcc

SEQ ID NO: 2371092 - DNA, 25 bp, Homo sapien
gacatcatggaacagttgtctccac

SEQ ID NO: 2371093 - DNA, 25 bp, Homo sapien
ctcccatttcaagggtttccaccat

SEQ ID NO: 2371094 - DNA, 25 bp, Homo sapien
tcatggaacagttgtctccacatgc

SEQ ID NO: 2371095 - DNA, 25 bp, Homo sapien
atggaacagttgtctccacatgcac

SEQ ID NO: 2371096 - DNA, 25 bp, Homo sapien
ggctctttagtagtatgaagaccgg

SEQ ID NO: 2371097 - DNA, 25 bp, Homo sapien
aaatcttttatctgacccaaaatat

SEQ ID NO: 2371098 - DNA, 25 bp, Homo sapien
ccaccaccgcctgcttctgtgggtg

SEQ ID NO: 2371099 - DNA, 25 bp, Homo sapien
tcatgcatcgattatacacaaactt

SEQ ID NO: 2371100 - DNA, 25 bp, Homo sapien
tgcagacaaataaatgatcctcccc

SEQ ID NO: 2371101 - DNA, 25 bp, Homo sapien
ggtgcatttttccccgtcctgatta

SEQ ID NO: 2371102 - DNA, 25 bp, Homo sapien
caagaaacgggagccggagaacagc

SEQ ID NO: 2371103 - DNA, 25 bp, Homo sapien
taacccgcggcactcctttggtgca

SEQ ID NO: 2371104 - DNA, 25 bp, Homo sapien
gctggcagccactcaatcatacagc

SEQ ID NO: 2371105 - DNA, 25 bp, Homo sapien
gggctggctctcagataacccggtc

SEQ ID NO: 2371106 - DNA, 25 bp, Homo sapien
tgtcgctcttaacagctggataatg

SEQ ID NO: 2371107 - DNA, 25 bp, Homo sapien
aatttgcactccaacactcttgttt

SEQ ID NO: 2371108 - DNA, 25 bp, Homo sapien
tctgcagcaggatgtcgggagctgg

SEQ ID NO: 2371109 - DNA, 25 bp, Homo sapien
agtttctcccgggaggtttgcatct

SEQ ID NO: 2371110 - DNA, 25 bp, Homo sapien
agctccgtccgtggcatccatacct

SEQ ID NO: 2371111 - DNA, 25 bp, Homo sapien
taaatgctccgtggcatctgcagca

SEQ ID NO: 2371112 - DNA, 25 bp, Homo sapien
cctaattttattgacaagagcactg

SEQ ID NO: 2371113 - DNA, 25 bp, Homo sapien
gccacatctcactattcttaaggaa

SEQ ID NO: 2371114 - DNA, 25 bp, Homo sapien
gatgacattatatattctcagggat

SEQ ID NO: 2371115 - DNA, 25 bp, Homo sapien
aaagcagtatgaagtatgtgagcaa

SEQ ID NO: 2371116 - DNA, 25 bp, Homo sapien
gcttctgatcactgtgcacccagat

SEQ ID NO: 2371117 - DNA, 25 bp, Homo sapien
gtaagcttctgatcactgtgcaccc

SEQ ID NO: 2371118 - DNA, 25 bp, Homo sapien
gggtaggtaagcttctgatcactgt

SEQ ID NO: 2371119 - DNA, 25 bp, Homo sapien
taggtaagcttctgatcactgtgca

SEQ ID NO: 2371120 - DNA, 25 bp, Homo sapien
caaagtggagcaagtggtcgccgtt

SEQ ID NO: 2371121 - DNA, 25 bp, Homo sapien
caaagaagatagtgggactccgaga

SEQ ID NO: 2371122 - DNA, 25 bp, Homo sapien
gcagttttgtgtacaggcatcccta

SEQ ID NO: 2371123 - DNA, 25 bp, Homo sapien
tagtctatcgttcgttgggcaaggc

SEQ ID NO: 2371124 - DNA, 25 bp, Homo sapien
gaaatgcctattcgtgacttagcca

SEQ ID NO: 2371125 - DNA, 25 bp, Homo sapien
cacctagtgtgtatggaagtgtcca

SEQ ID NO: 2371126 - DNA, 25 bp, Homo sapien
tcaggagcacgtaaggatgaaactt

SEQ ID NO: 2371127 - DNA, 25 bp, Homo sapien
gaggacattaactggtttccaaggc

SEQ ID NO: 2371128 - DNA, 25 bp, Homo sapien
gaggatatgacttgagagcagtgct

SEQ ID NO: 2371129 - DNA, 25 bp, Homo sapien
tgcaagtttctgagtgcagcttttc

SEQ ID NO: 2371130 - DNA, 25 bp, Homo sapien
tggagatgcctcagtcggcactggc

SEQ ID NO: 2371131 - DNA, 25 bp, Homo sapien
gctgctattgatgggtgagctccac

SEQ ID NO: 2371132 - DNA, 25 bp, Homo sapien
tcatgcccttcgaatagtactgctc

SEQ ID NO: 2371133 - DNA, 25 bp, Homo sapien
gaagagtcttacacctgccctcagt

SEQ ID NO: 2371134 - DNA, 25 bp, Homo sapien
tcagagcactgcaagagaagagtct

SEQ ID NO: 2371135 - DNA, 25 bp, Homo sapien
cagattctccggctcaaggtctaga

SEQ ID NO: 2371136 - DNA, 25 bp, Homo sapien
tctgcggaagaggtgggtgctcgcc

SEQ ID NO: 2371137 - DNA, 25 bp, Homo sapien
gtgctcgccctggtcttcgggctgt

SEQ ID NO: 2371138 - DNA, 25 bp, Homo sapien
tgtcgctcgtctacttcctcagcag

SEQ ID NO: 2371139 - DNA, 25 bp, Homo sapien
aacctggcggccatggtgtggcgcc

SEQ ID NO: 2371140 - DNA, 25 bp, Homo sapien
cctcctattgggtggtttcttggcg

SEQ ID NO: 2371141 - DNA, 25 bp, Homo sapien
tcacagccgcatcattcaggtccag

SEQ ID NO: 2371142 - DNA, 25 bp, Homo sapien
catgtgacttccgatgcttccggcc

SEQ ID NO: 2371143 - DNA, 25 bp, Homo sapien
tattgggtggtttcttggcgtcgcc

SEQ ID NO: 2371144 - DNA, 25 bp, Homo sapien
tcacttggactggaagccggcaggt

SEQ ID NO: 2371145 - DNA, 25 bp, Homo sapien
tgcacttcgggaacaacgtcgcgag

SEQ ID NO: 2371146 - DNA, 25 bp, Homo sapien
ggagcatcgcctgcatcacttggac

SEQ ID NO: 2371147 - DNA, 25 bp, Homo sapien
gactgcaccgaaatgcactcagagg

SEQ ID NO: 2371148 - DNA, 25 bp, Homo sapien
agaactccatgttgacgacactgga

SEQ ID NO: 2371149 - DNA, 25 bp, Homo sapien
gatgtgaccaatggatcccagagag

SEQ ID NO: 2371150 - DNA, 25 bp, Homo sapien
gaggtaggcattcgggaatcctcag

SEQ ID NO: 2371151 - DNA, 25 bp, Homo sapien
cctcagggggatgtgaccaatggat

SEQ ID NO: 2371152 - DNA, 25 bp, Homo sapien
caggtggaatgttatccgtgttgct

SEQ ID NO: 2371153 - DNA, 25 bp, Homo sapien
ttcaggtggaatgttatccgtgttg

SEQ ID NO: 2371154 - DNA, 25 bp, Homo sapien
ggtggaatgttatccgtgttgctgc

SEQ ID NO: 2371155 - DNA, 25 bp, Homo sapien
gtggaatgttatccgtgttgctgct

SEQ ID NO: 2371156 - DNA, 25 bp, Homo sapien
ctcgggatcccaaggaccgctggct

SEQ ID NO: 2371157 - DNA, 25 bp, Homo sapien
ggatcccaaggaccgctggctctgc

SEQ ID NO: 2371158 - DNA, 25 bp, Homo sapien
tggctctgcagtcttcaagttcaat

SEQ ID NO: 2371159 - DNA, 25 bp, Homo sapien
tgcagtcttcaagttcaatggcccc

SEQ ID NO: 2371160 - DNA, 25 bp, Homo sapien
tgataagcccgagaagagcgctggt

SEQ ID NO: 2371161 - DNA, 25 bp, Homo sapien
ttcagactctcaaagacgccacctt

SEQ ID NO: 2371162 - DNA, 25 bp, Homo sapien
ggctgcctgataagcccgagaagag

SEQ ID NO: 2371163 - DNA, 25 bp, Homo sapien
tggatgaacacgtccccgccgccag

SEQ ID NO: 2371164 - DNA, 25 bp, Homo sapien
ggctggcggtggtggtaggcgcccc

SEQ ID NO: 2371165 - DNA, 25 bp, Homo sapien
acagtttggccaggaggatcaggat

SEQ ID NO: 2371166 - DNA, 25 bp, Homo sapien
gggcgtcccaggctgctcgtcgcct

SEQ ID NO: 2371167 - DNA, 25 bp, Homo sapien
cgcggtggccgccatggtggaaatg

SEQ ID NO: 2371168 - DNA, 25 bp, Homo sapien
aaggtgctggccatcccgatgcaca

SEQ ID NO: 2371169 - DNA, 25 bp, Homo sapien
ttctcgaagcgtggagttggcatag

SEQ ID NO: 2371170 - DNA, 25 bp, Homo sapien
ttcagtgagacctgttctcgaagcg

SEQ ID NO: 2371171 - DNA, 25 bp, Homo sapien
gcataggcgaaggtgctggccatcc

SEQ ID NO: 2371172 - DNA, 25 bp, Homo sapien
agcactctgagagccgagatagctt

SEQ ID NO: 2371173 - DNA, 25 bp, Homo sapien
attaagcactctgagagccgagata

SEQ ID NO: 2371174 - DNA, 25 bp, Homo sapien
gccgagagaattaatgtgcatattg

SEQ ID NO: 2371175 - DNA, 25 bp, Homo sapien
taagcactctgagagccgagatagc

SEQ ID NO: 2371176 - DNA, 25 bp, Homo sapien
tgctaaccgaatccaacaaattacc

SEQ ID NO: 2371177 - DNA, 25 bp, Homo sapien
taacaaaatacttgctaaccgaatc

SEQ ID NO: 2371178 - DNA, 25 bp, Homo sapien
caacggcgaccaagtagagaatcac

SEQ ID NO: 2371179 - DNA, 25 bp, Homo sapien
cagaagtcagtagctcttttataca

SEQ ID NO: 2371180 - DNA, 25 bp, Homo sapien
tctacttaacccatagcaagacccg

SEQ ID NO: 2371181 - DNA, 25 bp, Homo sapien
ctaaaccctcttctttggcagctgg

SEQ ID NO: 2371182 - DNA, 25 bp, Homo sapien
gtgagaggtcagaaacgcctagcct

SEQ ID NO: 2371183 - DNA, 25 bp, Homo sapien
tgagaccggcccttcgttttgcagg

SEQ ID NO: 2371184 - DNA, 25 bp, Homo sapien
gtgatatcaaaggtgcatgtggcag

SEQ ID NO: 2371185 - DNA, 25 bp, Homo sapien
tgtgatatcaaaggtgcatgtggca

SEQ ID NO: 2371186 - DNA, 25 bp, Homo sapien
ccacaagatgaccagcactgacctc

SEQ ID NO: 2371187 - DNA, 25 bp, Homo sapien
cacaagatgaccagcactgacctct

SEQ ID NO: 2371188 - DNA, 25 bp, Homo sapien
aaagcacatagagggtgttccccgc

SEQ ID NO: 2371189 - DNA, 25 bp, Homo sapien
tgtataaagcacatagagggtgttc

SEQ ID NO: 2371190 - DNA, 25 bp, Homo sapien
tgaatgtataaagcacatagagggt

SEQ ID NO: 2371191 - DNA, 25 bp, Homo sapien
tataaagcacatagagggtgttccc

SEQ ID NO: 2371192 - DNA, 25 bp, Homo sapien
ccaggatgatcttgggcagggccac

SEQ ID NO: 2371193 - DNA, 25 bp, Homo sapien
ggcgatggtgatgtacttcagaaca

SEQ ID NO: 2371194 - DNA, 25 bp, Homo sapien
agaacaaagtctgcgatccccacaa

SEQ ID NO: 2371195 - DNA, 25 bp, Homo sapien
ccacgatgaggcacttgagggcgat

SEQ ID NO: 2371196 - DNA, 25 bp, Homo sapien
accttgtggccgcagccagtgccta

SEQ ID NO: 2371197 - DNA, 25 bp, Homo sapien
atcctctgcatgatccatgtgactg

SEQ ID NO: 2371198 - DNA, 25 bp, Homo sapien
tgactggggctaccttgtggccgca

SEQ ID NO: 2371199 - DNA, 25 bp, Homo sapien
cctctgcatgatccatgtgactggg

SEQ ID NO: 2371200 - DNA, 25 bp, Homo sapien
atcttcaataacagctgcaggcaga

SEQ ID NO: 2371201 - DNA, 25 bp, Homo sapien
ctgggtggcattcccttgctggccc

SEQ ID NO: 2371202 - DNA, 25 bp, Homo sapien
gggtggcattcccttgctggccctc

SEQ ID NO: 2371203 - DNA, 25 bp, Homo sapien
tggcattcccttgctggccctcagt

SEQ ID NO: 2371204 - DNA, 25 bp, Homo sapien
tggctttctcttctgttccagtaaa

SEQ ID NO: 2371205 - DNA, 25 bp, Homo sapien
gctttctcttctgttccagtaaaac

SEQ ID NO: 2371206 - DNA, 25 bp, Homo sapien
ggctttctcttctgttccagtaaaa

SEQ ID NO: 2371207 - DNA, 25 bp, Homo sapien
agagaaagacaattacttgcttttc

SEQ ID NO: 2371208 - DNA, 25 bp, Homo sapien
ctctttcgacgattccacagggctg

SEQ ID NO: 2371209 - DNA, 25 bp, Homo sapien
taaagccaactaaatatcaggtaat

SEQ ID NO: 2371210 - DNA, 25 bp, Homo sapien
aattttagggtatagtatgtgctct

SEQ ID NO: 2371211 - DNA, 25 bp, Homo sapien
gaatgggatgttcaggagttatctg

SEQ ID NO: 2371212 - DNA, 25 bp, Homo sapien
gctttgcgatgcctgggtaactccc

SEQ ID NO: 2371213 - DNA, 25 bp, Homo sapien
ttatctggaaaaacgcacaccccga

SEQ ID NO: 2371214 - DNA, 25 bp, Homo sapien
gttttccacttccacaccatggctg

SEQ ID NO: 2371215 - DNA, 25 bp, Homo sapien
acagtggtaacggtcccacttgcgg

SEQ ID NO: 2371216 - DNA, 25 bp, Homo sapien
caaacctctgcacctttaccccagt

SEQ ID NO: 2371217 - DNA, 25 bp, Homo sapien
ccttgctctggtgtaaacagtggta

SEQ ID NO: 2371218 - DNA, 25 bp, Homo sapien
gtaacggtcccacttgcggcgtgcc

SEQ ID NO: 2371219 - DNA, 25 bp, Homo sapien
tggagtacagagatgtagggggtgg

SEQ ID NO: 2371220 - DNA, 25 bp, Homo sapien
ctgagccccagaaacatcccctgga

SEQ ID NO: 2371221 - DNA, 25 bp, Homo sapien
tgagccccagaaacatcccctggag

SEQ ID NO: 2371222 - DNA, 25 bp, Homo sapien
ctggagtacagagatgtagggggtg

SEQ ID NO: 2371223 - DNA, 25 bp, Homo sapien
gctgtagagaacgatcaggaccccg

SEQ ID NO: 2371224 - DNA, 25 bp, Homo sapien
tcctcgatgaccagatagaactttc

SEQ ID NO: 2371225 - DNA, 25 bp, Homo sapien
acaagggatcggaacagctggctca

SEQ ID NO: 2371226 - DNA, 25 bp, Homo sapien
aagtagctgttggaggagtcgtcac

SEQ ID NO: 2371227 - DNA, 25 bp, Homo sapien
tccgcccacacgtccacagatgtcg

SEQ ID NO: 2371228 - DNA, 25 bp, Homo sapien
gctttcctaactccgcccacacgtc

SEQ ID NO: 2371229 - DNA, 25 bp, Homo sapien
taactccgcccacacgtccacagat

SEQ ID NO: 2371230 - DNA, 25 bp, Homo sapien
ccacacgtccacagatgtcgaagga

SEQ ID NO: 2371231 - DNA, 25 bp, Homo sapien
agaggctctcggaactcggcctgac

SEQ ID NO: 2371232 - DNA, 25 bp, Homo sapien
agcttctgtgcactgctgcccggtg

SEQ ID NO: 2371233 - DNA, 25 bp, Homo sapien
gatggcgcagatgtcaccagcttct

SEQ ID NO: 2371234 - DNA, 25 bp, Homo sapien
tgcccggtggctcggactccatagt

SEQ ID NO: 2371235 - DNA, 25 bp, Homo sapien
cagtacacccctcactgggtttcag

SEQ ID NO: 2371236 - DNA, 25 bp, Homo sapien
gcaacaaaaatgcttgtcgatgtta

SEQ ID NO: 2371237 - DNA, 25 bp, Homo sapien
caaagctaagaaacccacgttgata

SEQ ID NO: 2371238 - DNA, 25 bp, Homo sapien
ggtcccagactgtgtttagtcatca

SEQ ID NO: 2371239 - DNA, 25 bp, Homo sapien
gacaaggtgtggctttagcctagtg

SEQ ID NO: 2371240 - DNA, 25 bp, Homo sapien
tgctcctgagcagagtgttctaacc

SEQ ID NO: 2371241 - DNA, 25 bp, Homo sapien
ctgtagcctgtcagagggcacacca

SEQ ID NO: 2371242 - DNA, 25 bp, Homo sapien
tgcagagtgcctaactgggcaagtg

SEQ ID NO: 2371243 - DNA, 25 bp, Homo sapien
gagcgggcaggtgcgctcacggtcc

SEQ ID NO: 2371244 - DNA, 25 bp, Homo sapien
tggaagtgtgcggacgtggcgccgt

SEQ ID NO: 2371245 - DNA, 25 bp, Homo sapien
ggacgtggcgccgtccttccagcag

SEQ ID NO: 2371246 - DNA, 25 bp, Homo sapien
agcgcagggtgtccacggcgaccga

SEQ ID NO: 2371247 - DNA, 25 bp, Homo sapien
cttctgggtgtcctcagtgttcggt

SEQ ID NO: 2371248 - DNA, 25 bp, Homo sapien
ttctgggtgtcctcagtgttcggtc

SEQ ID NO: 2371249 - DNA, 25 bp, Homo sapien
aggaggcacgcactataccacagaa

SEQ ID NO: 2371250 - DNA, 25 bp, Homo sapien
catctagaagggcatcaagtctgag

SEQ ID NO: 2371251 - DNA, 25 bp, Homo sapien
tgtattgccaggtccttgacttgga

SEQ ID NO: 2371252 - DNA, 25 bp, Homo sapien
caagtgggaacttcatgtattgcca

SEQ ID NO: 2371253 - DNA, 25 bp, Homo sapien
tgcaccatcaagtcctaggtactag

SEQ ID NO: 2371254 - DNA, 25 bp, Homo sapien
aggcagtgatctctaggctcctccc

SEQ ID NO: 2371255 - DNA, 25 bp, Homo sapien
caagtcctaggtactaggtactaag

SEQ ID NO: 2371256 - DNA, 25 bp, Homo sapien
gcaggcctgggctatctgggaggca

SEQ ID NO: 2371257 - DNA, 25 bp, Homo sapien
ggaaagttaccgcaccaagctctgt

SEQ ID NO: 2371258 - DNA, 25 bp, Homo sapien
gatgacagcacgtaatccaagcagg

SEQ ID NO: 2371259 - DNA, 25 bp, Homo sapien
tttagaagaccgtgtctgctgggcc

SEQ ID NO: 2371260 - DNA, 25 bp, Homo sapien
tgctgcgcatgaagtatttgggacc

SEQ ID NO: 2371261 - DNA, 25 bp, Homo sapien
aggttggagtgctgtggtgcaatct

SEQ ID NO: 2371262 - DNA, 25 bp, Homo sapien
ttggagtgctgtggtgcaatctcgg

SEQ ID NO: 2371263 - DNA, 25 bp, Homo sapien
tgggccaaagctgacctttctttct

SEQ ID NO: 2371264 - DNA, 25 bp, Homo sapien
ctgggccaaagctgacctttctttc

SEQ ID NO: 2371265 - DNA, 25 bp, Homo sapien
ggagatgacagaataggaagaggag

SEQ ID NO: 2371266 - DNA, 25 bp, Homo sapien
agaaagacataaagacaggagacca

SEQ ID NO: 2371267 - DNA, 25 bp, Homo sapien
cttaagtgagggagatgacagaata

SEQ ID NO: 2371268 - DNA, 25 bp, Homo sapien
gacaggagaccaaggggtaaccaca

SEQ ID NO: 2371269 - DNA, 25 bp, Homo sapien
gatggcaatgtccacaggagctgct

SEQ ID NO: 2371270 - DNA, 25 bp, Homo sapien
tggcaatgtccacaggagctgctga

SEQ ID NO: 2371271 - DNA, 25 bp, Homo sapien
ggatggcaatgtccacaggagctgc

SEQ ID NO: 2371272 - DNA, 25 bp, Homo sapien
gcaatgtccacaggagctgctgaca

SEQ ID NO: 2371273 - DNA, 25 bp, Homo sapien
ccataacataggttgtcctgtttgc

SEQ ID NO: 2371274 - DNA, 25 bp, Homo sapien
catccataacataggttgtcctgtt

SEQ ID NO: 2371275 - DNA, 25 bp, Homo sapien
aaacatccataacataggttgtcct

SEQ ID NO: 2371276 - DNA, 25 bp, Homo sapien
taacataggttgtcctgtttgctct

SEQ ID NO: 2371277 - DNA, 25 bp, Homo sapien
gtggctctgtcatagagatcacaga

SEQ ID NO: 2371278 - DNA, 25 bp, Homo sapien
tggttacggtgctccatgccactac

SEQ ID NO: 2371279 - DNA, 25 bp, Homo sapien
gagcagggaacatttcagaggtgga

SEQ ID NO: 2371280 - DNA, 25 bp, Homo sapien
gcacagatggttacggtgctccatg

SEQ ID NO: 2371281 - DNA, 25 bp, Homo sapien
ggcttgcatggtaatctgcccacta

SEQ ID NO: 2371282 - DNA, 25 bp, Homo sapien
tgtaatgccattggcgccagcctgt

SEQ ID NO: 2371283 - DNA, 25 bp, Homo sapien
catgttaatactggctgacagcgag

SEQ ID NO: 2371284 - DNA, 25 bp, Homo sapien
tgacagcgaggtggctacaaagctc

SEQ ID NO: 2371285 - DNA, 25 bp, Homo sapien
aacagacgtcttgctgggtaccagg

SEQ ID NO: 2371286 - DNA, 25 bp, Homo sapien
tggccatcgccatagtaacggagct

SEQ ID NO: 2371287 - DNA, 25 bp, Homo sapien
tgctacactgccctggaacagacgt

SEQ ID NO: 2371288 - DNA, 25 bp, Homo sapien
tctttccgataaaaaccagttgcag

SEQ ID NO: 2371289 - DNA, 25 bp, Homo sapien
acctgcactttcatcaatcttctcc

SEQ ID NO: 2371290 - DNA, 25 bp, Homo sapien
acacctgcactttcatcaatcttct

SEQ ID NO: 2371291 - DNA, 25 bp, Homo sapien
cacctgcactttcatcaatcttctc

SEQ ID NO: 2371292 - DNA, 25 bp, Homo sapien
tattgttttggtggcatgggcataa

SEQ ID NO: 2371293 - DNA, 25 bp, Homo sapien
tgactcccagcagactgttctattt

SEQ ID NO: 2371294 - DNA, 25 bp, Homo sapien
gggtattcactagtaacctacattg

SEQ ID NO: 2371295 - DNA, 25 bp, Homo sapien
gcaggtaatacactgggttccgtca

SEQ ID NO: 2371296 - DNA, 25 bp, Homo sapien
cagacactgttttccctaggacaga

SEQ ID NO: 2371297 - DNA, 25 bp, Homo sapien
ggatactgtgaacctgatactcgat

SEQ ID NO: 2371298 - DNA, 25 bp, Homo sapien
tacagtgttaacaggcatggctcac

SEQ ID NO: 2371299 - DNA, 25 bp, Homo sapien
gtttgtcctacagcagaagtcctaa

SEQ ID NO: 2371300 - DNA, 25 bp, Homo sapien
tatagtatttactgagagccctgct

SEQ ID NO: 2371301 - DNA, 25 bp, Homo sapien
tttgcactataagcgccaaggagcc

SEQ ID NO: 2371302 - DNA, 25 bp, Homo sapien
gggaccagctagacactcttcttag

SEQ ID NO: 2371303 - DNA, 25 bp, Homo sapien
tgtgaccccaagctttgctggcaga

SEQ ID NO: 2371304 - DNA, 25 bp, Homo sapien
cccaatactgtcacagaaaaatgaa

SEQ ID NO: 2371305 - DNA, 25 bp, Homo sapien
gtttctgacagtgataaaatatcac

SEQ ID NO: 2371306 - DNA, 25 bp, Homo sapien
aagggtgatttacccaatactgtca

SEQ ID NO: 2371307 - DNA, 25 bp, Homo sapien
ggtgatttacccaatactgtcacag

SEQ ID NO: 2371308 - DNA, 25 bp, Homo sapien
ttattggtgtagcttgagtaggaag

SEQ ID NO: 2371309 - DNA, 25 bp, Homo sapien
ttctctttgttattggtgtagcttg

SEQ ID NO: 2371310 - DNA, 25 bp, Homo sapien
tggtgtagcttgagtaggaagtttc

SEQ ID NO: 2371311 - DNA, 25 bp, Homo sapien
tagcttgagtaggaagtttctctgg

SEQ ID NO: 2371312 - DNA, 25 bp, Homo sapien
cgactgccccgatttttgacacggg

SEQ ID NO: 2371313 - DNA, 25 bp, Homo sapien
attggagtgcacttctcgactgccc

SEQ ID NO: 2371314 - DNA, 25 bp, Homo sapien
gcacttctcgactgccccgattttt

SEQ ID NO: 2371315 - DNA, 25 bp, Homo sapien
tccttgcacatcattcattggagtg

SEQ ID NO: 2371316 - DNA, 25 bp, Homo sapien
gaccaggtcctttagaatgtacaac

SEQ ID NO: 2371317 - DNA, 25 bp, Homo sapien
taagacgccagcagtgggatccatg

SEQ ID NO: 2371318 - DNA, 25 bp, Homo sapien
tgcggctgaaatgggaattatccct

SEQ ID NO: 2371319 - DNA, 25 bp, Homo sapien
tgcggctgaaatgggaattatcccc

SEQ ID NO: 2371320 - DNA, 25 bp, Homo sapien
ctggggacgaatatccagaggtggt

SEQ ID NO: 2371321 - DNA, 25 bp, Homo sapien
tccagaggtggtttggagcaaacct

SEQ ID NO: 2371322 - DNA, 25 bp, Homo sapien
cagaggtggtttggagcaaaccttg

SEQ ID NO: 2371323 - DNA, 25 bp, Homo sapien
tatccagaggtggtttggagcaaac

SEQ ID NO: 2371324 - DNA, 25 bp, Homo sapien
agatgcctgctgtgtacttagaaac

SEQ ID NO: 2371325 - DNA, 25 bp, Homo sapien
caaagactggtgggaattagcccca

SEQ ID NO: 2371326 - DNA, 25 bp, Homo sapien
tattctgtaatgtctggggcgccag

SEQ ID NO: 2371327 - DNA, 25 bp, Homo sapien
aattagccccagcatcggccaactg

SEQ ID NO: 2371328 - DNA, 25 bp, Homo sapien
catctctgaagatgcctatgtaaat

SEQ ID NO: 2371329 - DNA, 25 bp, Homo sapien
ctatgaaatgaatcgaggaaggtcc

SEQ ID NO: 2371330 - DNA, 25 bp, Homo sapien
aagttcatgtgtctctagattcttc

SEQ ID NO: 2371331 - DNA, 25 bp, Homo sapien
tggagaagcaaaaagttcatgtgtc

SEQ ID NO: 2371332 - DNA, 25 bp, Homo sapien
ctacacaaccagccggtaatactgg

SEQ ID NO: 2371333 - DNA, 25 bp, Homo sapien
cacaaccagccggtaatactggctg

SEQ ID NO: 2371334 - DNA, 25 bp, Homo sapien
aaccagccggtaatactggctgcct

SEQ ID NO: 2371335 - DNA, 25 bp, Homo sapien
caaccagccggtaatactggctgcc

SEQ ID NO: 2371336 - DNA, 25 bp, Homo sapien
cccggctcaaggcgctaggcgacga

SEQ ID NO: 2371337 - DNA, 25 bp, Homo sapien
gcgacgagctgcaccagcgcaccat

SEQ ID NO: 2371338 - DNA, 25 bp, Homo sapien
cgccgcccggctcaaggcgctaggc

SEQ ID NO: 2371339 - DNA, 25 bp, Homo sapien
ctcaaggcgctaggcgacgagctgc

SEQ ID NO: 2371340 - DNA, 25 bp, Homo sapien
gcaaacaagcctttttccctcgcca

SEQ ID NO: 2371341 - DNA, 25 bp, Homo sapien
ttccctcgccaaatcggaactcgag

SEQ ID NO: 2371342 - DNA, 25 bp, Homo sapien
tttccctcgccaaatcggaactcga

SEQ ID NO: 2371343 - DNA, 25 bp, Homo sapien
ttcacagactcgaagaatcttggtt

SEQ ID NO: 2371344 - DNA, 25 bp, Homo sapien
agttcacagactcgaagaatcttgg

SEQ ID NO: 2371345 - DNA, 25 bp, Homo sapien
aaactaagttcacagactcgaagaa

SEQ ID NO: 2371346 - DNA, 25 bp, Homo sapien
cagactcgaagaatcttggttatac

SEQ ID NO: 2371347 - DNA, 25 bp, Homo sapien
acccacagacatgggagaccacaga

SEQ ID NO: 2371348 - DNA, 25 bp, Homo sapien
gagacccacagacatgggagaccac

SEQ ID NO: 2371349 - DNA, 25 bp, Homo sapien
ctgagacccacagacatgggagacc

SEQ ID NO: 2371350 - DNA, 25 bp, Homo sapien
ttgtggccctcactgagacccacag

SEQ ID NO: 2371351 - DNA, 25 bp, Homo sapien
ttctcctcggttccaccgggtgcca

SEQ ID NO: 2371352 - DNA, 25 bp, Homo sapien
tcctcggttccaccgggtgccacga

SEQ ID NO: 2371353 - DNA, 25 bp, Homo sapien
gttccaccgggtgccacgagacagt

SEQ ID NO: 2371354 - DNA, 25 bp, Homo sapien
cggttccaccgggtgccacgagaca

SEQ ID NO: 2371355 - DNA, 25 bp, Homo sapien
cgccgacggaactcatccaggctgt

SEQ ID NO: 2371356 - DNA, 25 bp, Homo sapien
cctgccagcgccgacggaactcatc

SEQ ID NO: 2371357 - DNA, 25 bp, Homo sapien
agcgccgacggaactcatccaggct

SEQ ID NO: 2371358 - DNA, 25 bp, Homo sapien
ccgacggaactcatccaggctgtag

SEQ ID NO: 2371359 - DNA, 25 bp, Homo sapien
ccgcctctcggcagcctcgggccgt

SEQ ID NO: 2371360 - DNA, 25 bp, Homo sapien
cagcctcgggccgtcgccgcttctt

SEQ ID NO: 2371361 - DNA, 25 bp, Homo sapien
cgggccgtcgccgcttcttcggcgc

SEQ ID NO: 2371362 - DNA, 25 bp, Homo sapien
tccggccgccgagcccgcctctcgg

SEQ ID NO: 2371363 - DNA, 25 bp, Homo sapien
ctccccgcgccctccaggagacgct

SEQ ID NO: 2371364 - DNA, 25 bp, Homo sapien
ccccgcgccctccaggagacgctgg

SEQ ID NO: 2371365 - DNA, 25 bp, Homo sapien
tccccgcgccctccaggagacgctg

SEQ ID NO: 2371366 - DNA, 25 bp, Homo sapien
ccccgaggcctgttcgccgcgcccg

SEQ ID NO: 2371367 - DNA, 25 bp, Homo sapien
ctcgcgggccagaggagaacgtgag

SEQ ID NO: 2371368 - DNA, 25 bp, Homo sapien
gagaacgtgagcggctcgctacgtc

SEQ ID NO: 2371369 - DNA, 25 bp, Homo sapien
gaggagaacgtgagcggctcgctac

SEQ ID NO: 2371370 - DNA, 25 bp, Homo sapien
gccagaggagaacgtgagcggctcg

SEQ ID NO: 2371371 - DNA, 25 bp, Homo sapien
tcgcggatgagctggtccaccagct

SEQ ID NO: 2371372 - DNA, 25 bp, Homo sapien
gatgagctggtccaccagctgctcc

SEQ ID NO: 2371373 - DNA, 25 bp, Homo sapien
caggtcgcggatgagctggtccacc

SEQ ID NO: 2371374 - DNA, 25 bp, Homo sapien
ggatgagctggtccaccagctgctc

SEQ ID NO: 2371375 - DNA, 25 bp, Homo sapien
ttttgcctgcttttgacagggtctt

SEQ ID NO: 2371376 - DNA, 25 bp, Homo sapien
tttttgcctgcttttgacagggtct

SEQ ID NO: 2371377 - DNA, 25 bp, Homo sapien
tctttcctgtccagatactgaaata

SEQ ID NO: 2371378 - DNA, 25 bp, Homo sapien
tcctagttctttcctgtccagatac

SEQ ID NO: 2371379 - DNA, 25 bp, Homo sapien
cgtaaggcagttggatatcaaagaa

SEQ ID NO: 2371380 - DNA, 25 bp, Homo sapien
tatattgattgccaattcgtaaggc

SEQ ID NO: 2371381 - DNA, 25 bp, Homo sapien
agatgctgctatccggaaggtgccc

SEQ ID NO: 2371382 - DNA, 25 bp, Homo sapien
gaagatgagcttccagcaagaatag

SEQ ID NO: 2371383 - DNA, 25 bp, Homo sapien
acagcctgtaccacagcacctcatc

SEQ ID NO: 2371384 - DNA, 25 bp, Homo sapien
tcctctgcaatcaccttccacgtct

SEQ ID NO: 2371385 - DNA, 25 bp, Homo sapien
cttccagttggttcgtaacatgtgt

SEQ ID NO: 2371386 - DNA, 25 bp, Homo sapien
taacatgtgttccttggctcggcac

SEQ ID NO: 2371387 - DNA, 25 bp, Homo sapien
gttggttcgtaacatgtgttccttg

SEQ ID NO: 2371388 - DNA, 25 bp, Homo sapien
tcgtaacatgtgttccttggctcgg

SEQ ID NO: 2371389 - DNA, 25 bp, Homo sapien
ggtaatgatattggccactgcccac

SEQ ID NO: 2371390 - DNA, 25 bp, Homo sapien
tcccaaatcttgaggctgaaaacag

SEQ ID NO: 2371391 - DNA, 25 bp, Homo sapien
gagtgaaagcttggattcccatgtc

SEQ ID NO: 2371392 - DNA, 25 bp, Homo sapien
tggtgaacaaaatgggcaacaagtc

SEQ ID NO: 2371393 - DNA, 25 bp, Homo sapien
tctgaccaccctaacaatccgagag

SEQ ID NO: 2371394 - DNA, 25 bp, Homo sapien
gcaggtagtgcttttgctttctggg

SEQ ID NO: 2371395 - DNA, 25 bp, Homo sapien
gaggaagtggctggcaacccaatct

SEQ ID NO: 2371396 - DNA, 25 bp, Homo sapien
cctcttttgtatgcaggtagtgctt

SEQ ID NO: 2371397 - DNA, 25 bp, Homo sapien
aatgttatggaagcacgccaatagg

SEQ ID NO: 2371398 - DNA, 25 bp, Homo sapien
cctatggaaacacttcactgtgcaa

SEQ ID NO: 2371399 - DNA, 25 bp, Homo sapien
cgccaataggttatgtgagggaaga

SEQ ID NO: 2371400 - DNA, 25 bp, Homo sapien
aacacggctcttgacagttatctcc

SEQ ID NO: 2371401 - DNA, 25 bp, Homo sapien
ctgggacaaagactagaaacagtgt

SEQ ID NO: 2371402 - DNA, 25 bp, Homo sapien
aaagtatttacatgtgggaggttgg

SEQ ID NO: 2371403 - DNA, 25 bp, Homo sapien
gcacagttcttaacatacagcaagt

SEQ ID NO: 2371404 - DNA, 25 bp, Homo sapien
gttgggaaaagtgagataggccaca

SEQ ID NO: 2371405 - DNA, 25 bp, Homo sapien
gctcgctcacggcacctttgcgatt

SEQ ID NO: 2371406 - DNA, 25 bp, Homo sapien
gagaatgcacatcacacaaaactgt

SEQ ID NO: 2371407 - DNA, 25 bp, Homo sapien
cacaccatcgtgagaatgcacatca

SEQ ID NO: 2371408 - DNA, 25 bp, Homo sapien
gaccacaccatcgtgagaatgcaca

SEQ ID NO: 2371409 - DNA, 25 bp, Homo sapien
cagtagcatgtgtctaatcatttta

SEQ ID NO: 2371410 - DNA, 25 bp, Homo sapien
caaaggctacagtcacactatgaaa

SEQ ID NO: 2371411 - DNA, 25 bp, Homo sapien
cacaggaaatgaccttaatgtccac

SEQ ID NO: 2371412 - DNA, 25 bp, Homo sapien
tatatacttatatagaatttcaagt

SEQ ID NO: 2371413 - DNA, 25 bp, Homo sapien
gtgcgggtgtcccacactctcacat

SEQ ID NO: 2371414 - DNA, 25 bp, Homo sapien
tacgtagtcccaggtgcgggtgtcc

SEQ ID NO: 2371415 - DNA, 25 bp, Homo sapien
tgccaacgagctgtttatcctcaca

SEQ ID NO: 2371416 - DNA, 25 bp, Homo sapien
catcctcataagctgctactgccaa

SEQ ID NO: 2371417 - DNA, 25 bp, Homo sapien
tacaacactgtaacggcaaacacaa

SEQ ID NO: 2371418 - DNA, 25 bp, Homo sapien
gacatgcactcccttttaagatatg

SEQ ID NO: 2371419 - DNA, 25 bp, Homo sapien
tgaggaagcgggcacactctcatgg

SEQ ID NO: 2371420 - DNA, 25 bp, Homo sapien
tctcatggcttgctggtaagagcat

SEQ ID NO: 2371421 - DNA, 25 bp, Homo sapien
ggcaggcaagcacggagcagatgga

SEQ ID NO: 2371422 - DNA, 25 bp, Homo sapien
caggcaagcacggagcagatggagt

SEQ ID NO: 2371423 - DNA, 25 bp, Homo sapien
aaaggcaggcaagcacggagcagat

SEQ ID NO: 2371424 - DNA, 25 bp, Homo sapien
aaggcaggcaagcacggagcagatg

SEQ ID NO: 2371425 - DNA, 25 bp, Homo sapien
caaagagcgagatttcaagacaaac

SEQ ID NO: 2371426 - DNA, 25 bp, Homo sapien
accagggagcgggtttcgaagcaca

SEQ ID NO: 2371427 - DNA, 25 bp, Homo sapien
gtttcgaagcacactgccattccct

SEQ ID NO: 2371428 - DNA, 25 bp, Homo sapien
aagacaaactcggtgaccagggagc

SEQ ID NO: 2371429 - DNA, 25 bp, Homo sapien
caccatataaagaggactgctggct

SEQ ID NO: 2371430 - DNA, 25 bp, Homo sapien
gataagccactttgccgtgcttgat

SEQ ID NO: 2371431 - DNA, 25 bp, Homo sapien
tgctaatatgcaccagatcgcgtct

SEQ ID NO: 2371432 - DNA, 25 bp, Homo sapien
taagaagtgtgtaatctcatttctc

SEQ ID NO: 2371433 - DNA, 25 bp, Homo sapien
gccacagtcccggacaatggagcat

SEQ ID NO: 2371434 - DNA, 25 bp, Homo sapien
cattgttgatacgtcagtaaatgag

SEQ ID NO: 2371435 - DNA, 25 bp, Homo sapien
gcatgtgtgcgttcagacagttgca

SEQ ID NO: 2371436 - DNA, 25 bp, Homo sapien
cccgtccattgttgatacgtcagta

SEQ ID NO: 2371437 - DNA, 25 bp, Homo sapien
ccgctaaaaagcagcttggagagac

SEQ ID NO: 2371438 - DNA, 25 bp, Homo sapien
taaaaagcagcttggagagacccac

SEQ ID NO: 2371439 - DNA, 25 bp, Homo sapien
gctaaaaagcagcttggagagaccc

SEQ ID NO: 2371440 - DNA, 25 bp, Homo sapien
caccgctaaaaagcagcttggagag

SEQ ID NO: 2371441 - DNA, 25 bp, Homo sapien
caagggtaccatctaatctcaggcc

SEQ ID NO: 2371442 - DNA, 25 bp, Homo sapien
gacagcagaaaagcggcaagcacat

SEQ ID NO: 2371443 - DNA, 25 bp, Homo sapien
taaaaattatgcaaagagttccagt

SEQ ID NO: 2371444 - DNA, 25 bp, Homo sapien
gagttccagttatagcttcatccag

SEQ ID NO: 2371445 - DNA, 25 bp, Homo sapien
tcagcctagaccagtaacagccatt

SEQ ID NO: 2371446 - DNA, 25 bp, Homo sapien
tgaaggaactctgagctcagcctag

SEQ ID NO: 2371447 - DNA, 25 bp, Homo sapien
aacgatgacatgagtaacgatggcc

SEQ ID NO: 2371448 - DNA, 25 bp, Homo sapien
gaccactggcccaataaaggagaag

SEQ ID NO: 2371449 - DNA, 25 bp, Homo sapien
aagacatgcagaaccaaggtagtgt

SEQ ID NO: 2371450 - DNA, 25 bp, Homo sapien
ggaggtcttctactccaagaatgca

SEQ ID NO: 2371451 - DNA, 25 bp, Homo sapien
tttctctcatccctgggtacatgga

SEQ ID NO: 2371452 - DNA, 25 bp, Homo sapien
gtgtatgtaacttgtgtgcaccaca

SEQ ID NO: 2371453 - DNA, 25 bp, Homo sapien
cctgtcagggtcaaggaaattcact

SEQ ID NO: 2371454 - DNA, 25 bp, Homo sapien
tattgcataactactaaggaagaag

SEQ ID NO: 2371455 - DNA, 25 bp, Homo sapien
tactgcggacctagcaatgaaatgg

SEQ ID NO: 2371456 - DNA, 25 bp, Homo sapien
gatttggctcctgacactgtgaact

SEQ ID NO: 2371457 - DNA, 25 bp, Homo sapien
gagggctagtgcctgtattcttgca

SEQ ID NO: 2371458 - DNA, 25 bp, Homo sapien
tgctcaaaacgatgaacagggtact

SEQ ID NO: 2371459 - DNA, 25 bp, Homo sapien
ccacggttgcatcgtcctggctgag

SEQ ID NO: 2371460 - DNA, 25 bp, Homo sapien
gaacttcaaattccgcagctatctg

SEQ ID NO: 2371461 - DNA, 25 bp, Homo sapien
gaataatttgattctgtccatccac

SEQ ID NO: 2371462 - DNA, 25 bp, Homo sapien
gagtctgagacgcacttttcaagaa

SEQ ID NO: 2371463 - DNA, 25 bp, Homo sapien
atttctccgcggtgccgttcgcaac

SEQ ID NO: 2371464 - DNA, 25 bp, Homo sapien
gtcaccgccggcactttctctaatg

SEQ ID NO: 2371465 - DNA, 25 bp, Homo sapien
tctagacatgtgacaggcgggccgt

SEQ ID NO: 2371466 - DNA, 25 bp, Homo sapien
tcttcggctttgagcaggtacatca

SEQ ID NO: 2371467 - DNA, 25 bp, Homo sapien
gctactgccacagggtaccttctgg

SEQ ID NO: 2371468 - DNA, 25 bp, Homo sapien
aaagcaacttggttggccgagacgt

SEQ ID NO: 2371469 - DNA, 25 bp, Homo sapien
ttttacaatcatataccacttagca

SEQ ID NO: 2371470 - DNA, 25 bp, Homo sapien
ttcttttacaatcatataccactta

SEQ ID NO: 2371471 - DNA, 25 bp, Homo sapien
tgtgaggtcctgtatgtcactgaag

SEQ ID NO: 2371472 - DNA, 25 bp, Homo sapien
taccacttagcagtgactacctgtg

SEQ ID NO: 2371473 - DNA, 25 bp, Homo sapien
tgggagtcagcatcactcaacagcc

SEQ ID NO: 2371474 - DNA, 25 bp, Homo sapien
tacatcgccaagtcgctgttaagga

SEQ ID NO: 2371475 - DNA, 25 bp, Homo sapien
ccctgaggcagatgtgatatttgac

SEQ ID NO: 2371476 - DNA, 25 bp, Homo sapien
tcagatattgcacacgcagcatgtg

SEQ ID NO: 2371477 - DNA, 25 bp, Homo sapien
cgccacgcagccagtgctctgagaa

SEQ ID NO: 2371478 - DNA, 25 bp, Homo sapien
catgctcctcgccacgcagccagtg

SEQ ID NO: 2371479 - DNA, 25 bp, Homo sapien
ccatgctcctcgccacgcagccagt

SEQ ID NO: 2371480 - DNA, 25 bp, Homo sapien
cacgcagccagtgctctgagaaaac

SEQ ID NO: 2371481 - DNA, 25 bp, Homo sapien
taacacggccgtatctgtgaacatg

SEQ ID NO: 2371482 - DNA, 25 bp, Homo sapien
tagcgtgaggcttggtaacacggcc

SEQ ID NO: 2371483 - DNA, 25 bp, Homo sapien
tccttgccagagataagtcatagcg

SEQ ID NO: 2371484 - DNA, 25 bp, Homo sapien
aaggtgtgcctatcaacgttcatgc

SEQ ID NO: 2371485 - DNA, 25 bp, Homo sapien
tccccagatctgtggttctcagata

SEQ ID NO: 2371486 - DNA, 25 bp, Homo sapien
ttcttccggctcttccccagatctg

SEQ ID NO: 2371487 - DNA, 25 bp, Homo sapien
cctacgtgtcaatacctatagatag

SEQ ID NO: 2371488 - DNA, 25 bp, Homo sapien
tctgtggatacacaactccatatgg

SEQ ID NO: 2371489 - DNA, 25 bp, Homo sapien
taaagtatttccataaatcctggtc

SEQ ID NO: 2371490 - DNA, 25 bp, Homo sapien
gaagtggtagccctctgtatattca

SEQ ID NO: 2371491 - DNA, 25 bp, Homo sapien
tatctgattgccatagactagtgag

SEQ ID NO: 2371492 - DNA, 25 bp, Homo sapien
gcagttctttccacgttacgagtcc

SEQ ID NO: 2371493 - DNA, 25 bp, Homo sapien
cgtttagttaaagaccacagagatt

SEQ ID NO: 2371494 - DNA, 25 bp, Homo sapien
taaggttgagcaaatgggacttcat

SEQ ID NO: 2371495 - DNA, 25 bp, Homo sapien
tgtttaataattcaaacgaatccga

SEQ ID NO: 2371496 - DNA, 25 bp, Homo sapien
aaacgaatccgaactatctgaagag

SEQ ID NO: 2371497 - DNA, 25 bp, Homo sapien
cgaatccgaactatctgaagagtac

SEQ ID NO: 2371498 - DNA, 25 bp, Homo sapien
aattcaaacgaatccgaactatctg

SEQ ID NO: 2371499 - DNA, 25 bp, Homo sapien
agtgagatgtaatccctttccaaaa

SEQ ID NO: 2371500 - DNA, 25 bp, Homo sapien
ccaaaaagactctctgcaaattcat

SEQ ID NO: 2371501 - DNA, 25 bp, Homo sapien
agacatctaagttagtagtccagag

SEQ ID NO: 2371502 - DNA, 25 bp, Homo sapien
ttcatcataaagacatctaagttag

SEQ ID NO: 2371503 - DNA, 25 bp, Homo sapien
tgatccttatcactgagctcccgtg

SEQ ID NO: 2371504 - DNA, 25 bp, Homo sapien
caccatcgtggagggcatgatcctt

SEQ ID NO: 2371505 - DNA, 25 bp, Homo sapien
tcgtggagggcatgatccttatcac

SEQ ID NO: 2371506 - DNA, 25 bp, Homo sapien
tttcatttcaccatcgtggagggca

SEQ ID NO: 2371507 - DNA, 25 bp, Homo sapien
tcgctgaggttgacacacgtgaagt

SEQ ID NO: 2371508 - DNA, 25 bp, Homo sapien
ttacccagcttcaagaggcggcgtc

SEQ ID NO: 2371509 - DNA, 25 bp, Homo sapien
cacgtgaagtcacggagaacgttac

SEQ ID NO: 2371510 - DNA, 25 bp, Homo sapien
catgttgccactgaccatgaggttg

SEQ ID NO: 2371511 - DNA, 25 bp, Homo sapien
acaggcccgaatgccgtgcgccttg

SEQ ID NO: 2371512 - DNA, 25 bp, Homo sapien
ttggcaaagcccgtcgtcagctcag

SEQ ID NO: 2371513 - DNA, 25 bp, Homo sapien
gctcagcactcaaaccaaatactcg

SEQ ID NO: 2371514 - DNA, 25 bp, Homo sapien
cagcactcaaaccaaatactcgacg

SEQ ID NO: 2371515 - DNA, 25 bp, Homo sapien
tggcttctcgtcgacagaaacagca

SEQ ID NO: 2371516 - DNA, 25 bp, Homo sapien
gcacagtgtgctaagtccacccaag

SEQ ID NO: 2371517 - DNA, 25 bp, Homo sapien
tttagataccagcatggatggctcc

SEQ ID NO: 2371518 - DNA, 25 bp, Homo sapien
taaaccaaaagatgcggcctcagtg

SEQ ID NO: 2371519 - DNA, 25 bp, Homo sapien
gcagtcacgtccatggaagccgaaa

SEQ ID NO: 2371520 - DNA, 25 bp, Homo sapien
tggccagacctgttaaggaccagct

SEQ ID NO: 2371521 - DNA, 25 bp, Homo sapien
gcaacgggatgaaacgtcacagcca

SEQ ID NO: 2371522 - DNA, 25 bp, Homo sapien
gaattatcaaaacgaatccccagga

SEQ ID NO: 2371523 - DNA, 25 bp, Homo sapien
ggagagcgacagggcgatgttacca

SEQ ID NO: 2371524 - DNA, 25 bp, Homo sapien
cgatgttaccactgcggaggtcgtg

SEQ ID NO: 2371525 - DNA, 25 bp, Homo sapien
ggcggagagcgacagggcgatgtta

SEQ ID NO: 2371526 - DNA, 25 bp, Homo sapien
gatgttaccactgcggaggtcgtgg

SEQ ID NO: 2371527 - DNA, 25 bp, Homo sapien
gcttctggttcatccgataatccca

SEQ ID NO: 2371528 - DNA, 25 bp, Homo sapien
cacagcttctggttcatccgataat

SEQ ID NO: 2371529 - DNA, 25 bp, Homo sapien
ggttcatccgataatcccacacgga

SEQ ID NO: 2371530 - DNA, 25 bp, Homo sapien
tctggttcatccgataatcccacac

SEQ ID NO: 2371531 - DNA, 25 bp, Homo sapien
ctctgcagagcggtgctgggacagc

SEQ ID NO: 2371532 - DNA, 25 bp, Homo sapien
tctgcagagcggtgctgggacagca

SEQ ID NO: 2371533 - DNA, 25 bp, Homo sapien
aaatgacaaattcctccttcgttgg

SEQ ID NO: 2371534 - DNA, 25 bp, Homo sapien
ttcgttggagcctgaaccccttcag

SEQ ID NO: 2371535 - DNA, 25 bp, Homo sapien
tagtggtgttaaaggtggaaatgac

SEQ ID NO: 2371536 - DNA, 25 bp, Homo sapien
gcctgtgcttaggatagtatttatt

SEQ ID NO: 2371537 - DNA, 25 bp, Homo sapien
aggtcggcgtttcgcattaccgtct

SEQ ID NO: 2371538 - DNA, 25 bp, Homo sapien
ctcctgtgagtagtgaagctgtcca

SEQ ID NO: 2371539 - DNA, 25 bp, Homo sapien
cacgttggccgtgatgaggctgtgg

SEQ ID NO: 2371540 - DNA, 25 bp, Homo sapien
taccgtctggtaaggcacgttggcc

SEQ ID NO: 2371541 - DNA, 25 bp, Homo sapien
cgtagtagtgagtggccatggcgtc

SEQ ID NO: 2371542 - DNA, 25 bp, Homo sapien
ggaaaggccagtgcgaggtcgtagt

SEQ ID NO: 2371543 - DNA, 25 bp, Homo sapien
taaacatggttatagggaaaggcca

SEQ ID NO: 2371544 - DNA, 25 bp, Homo sapien
gcaaactcataggcgcggatcagcc

SEQ ID NO: 2371545 - DNA, 25 bp, Homo sapien
catggaggttattgccttggaggcc

SEQ ID NO: 2371546 - DNA, 25 bp, Homo sapien
tagcccatagggtgcagtgtcttgg

SEQ ID NO: 2371547 - DNA, 25 bp, Homo sapien
gaaatggcagctctgtatcacactg

SEQ ID NO: 2371548 - DNA, 25 bp, Homo sapien
cagaagctggctaagcagggaccgt

SEQ ID NO: 2371549 - DNA, 25 bp, Homo sapien
tgaaagaaagcgctctggacgggaa

SEQ ID NO: 2371550 - DNA, 25 bp, Homo sapien
ggaaggtgacgcttcccagtcgcag

SEQ ID NO: 2371551 - DNA, 25 bp, Homo sapien
tacgtacacgtgtgcaactgagagg

SEQ ID NO: 2371552 - DNA, 25 bp, Homo sapien
aatgagtgtggacaaacggttccca

SEQ ID NO: 2371553 - DNA, 25 bp, Homo sapien
cgaatgcgcctgcaaaatgaactgg

SEQ ID NO: 2371554 - DNA, 25 bp, Homo sapien
ggcaggtacgttagaaacaggctct

SEQ ID NO: 2371555 - DNA, 25 bp, Homo sapien
caggcgacttccacgaatggcaggt

SEQ ID NO: 2371556 - DNA, 25 bp, Homo sapien
gcaaactaggaagggcgaatgcgcc

SEQ ID NO: 2371557 - DNA, 25 bp, Homo sapien
gcagcatgctcgagtatcttctacc

SEQ ID NO: 2371558 - DNA, 25 bp, Homo sapien
gagaggcgatatgagatcttcaggt

SEQ ID NO: 2371559 - DNA, 25 bp, Homo sapien
gcaagtccgacagtgttttgagagg

SEQ ID NO: 2371560 - DNA, 25 bp, Homo sapien
caactacggacatcataaagcagaa

SEQ ID NO: 2371561 - DNA, 25 bp, Homo sapien
gaagagctggaatcgtggcatgcca

SEQ ID NO: 2371562 - DNA, 25 bp, Homo sapien
tttatggccagcaatatgccgtggg

SEQ ID NO: 2371563 - DNA, 25 bp, Homo sapien
taaatgacgctgtacggaagtgccc

SEQ ID NO: 2371564 - DNA, 25 bp, Homo sapien
caccacggtgggaggtaagatttca

SEQ ID NO: 2371565 - DNA, 25 bp, Homo sapien
tgtgtccccagctcaattcctagca

SEQ ID NO: 2371566 - DNA, 25 bp, Homo sapien
cactgggggttgtgaagccagcacc

SEQ ID NO: 2371567 - DNA, 25 bp, Homo sapien
ttcctagcaggtcaagcatgtcttg

SEQ ID NO: 2371568 - DNA, 25 bp, Homo sapien
ggacaggcctcttgtgttgagttaa

SEQ ID NO: 2371569 - DNA, 25 bp, Homo sapien
tgtgcatttccctcaggttgaaatc

SEQ ID NO: 2371570 - DNA, 25 bp, Homo sapien
ccccatggactggtgtgcatttccc

SEQ ID NO: 2371571 - DNA, 25 bp, Homo sapien
ccatggactggtgtgcatttccctc

SEQ ID NO: 2371572 - DNA, 25 bp, Homo sapien
agccccatggactggtgtgcatttc

SEQ ID NO: 2371573 - DNA, 25 bp, Homo sapien
gttgaagttggcatgaaaaagggta

SEQ ID NO: 2371574 - DNA, 25 bp, Homo sapien
gtgggttgaagttggcatgaaaaag

SEQ ID NO: 2371575 - DNA, 25 bp, Homo sapien
tgaagttggcatgaaaaagggtatt

SEQ ID NO: 2371576 - DNA, 25 bp, Homo sapien
tcacacttacaaagtgggttgaagt

SEQ ID NO: 2371577 - DNA, 25 bp, Homo sapien
catagatgagcgaaacagactgtga

SEQ ID NO: 2371578 - DNA, 25 bp, Homo sapien
taaacactgctgacgtgggcctgtg

SEQ ID NO: 2371579 - DNA, 25 bp, Homo sapien
taaggcgcatggtaaagaacagagc

SEQ ID NO: 2371580 - DNA, 25 bp, Homo sapien
gatttttaaagtcacgagcacccac

SEQ ID NO: 2371581 - DNA, 25 bp, Homo sapien
tggcagtcctctccaagacgtcctc

SEQ ID NO: 2371582 - DNA, 25 bp, Homo sapien
tagatccccgctgcatctttctttc

SEQ ID NO: 2371583 - DNA, 25 bp, Homo sapien
aagacgtcctcgctccgcagattgg

SEQ ID NO: 2371584 - DNA, 25 bp, Homo sapien
cagattggtggtaattagatccccg

SEQ ID NO: 2371585 - DNA, 25 bp, Homo sapien
gaccctggaggatggcgttccatgt

SEQ ID NO: 2371586 - DNA, 25 bp, Homo sapien
tggaggatggcgttccatgtgcact

SEQ ID NO: 2371587 - DNA, 25 bp, Homo sapien
gatgtctcatccaggctgtgtcctt

SEQ ID NO: 2371588 - DNA, 25 bp, Homo sapien
cgtcctgtgccacttcgctcagatg

SEQ ID NO: 2371589 - DNA, 25 bp, Homo sapien
ccatccgtgtctgctcctggagttg

SEQ ID NO: 2371590 - DNA, 25 bp, Homo sapien
ttcaggcatgtctatgttgatgcca

SEQ ID NO: 2371591 - DNA, 25 bp, Homo sapien
cccatccgtgtctgctcctggagtt

SEQ ID NO: 2371592 - DNA, 25 bp, Homo sapien
agctcttcaggcatgtctatgttga

SEQ ID NO: 2371593 - DNA, 25 bp, Homo sapien
gggtcctgaactcggcatggccagt

SEQ ID NO: 2371594 - DNA, 25 bp, Homo sapien
gaaccagcgtccagtattgatcacc

SEQ ID NO: 2371595 - DNA, 25 bp, Homo sapien
ctgagttcgctgagtctcccgggac

SEQ ID NO: 2371596 - DNA, 25 bp, Homo sapien
taagagttctcctagtacctggtag

SEQ ID NO: 2371597 - DNA, 25 bp, Homo sapien
cggaagggacgaggtacgtgagcac

SEQ ID NO: 2371598 - DNA, 25 bp, Homo sapien
tacgtgagcactgctgcacgaacgg

SEQ ID NO: 2371599 - DNA, 25 bp, Homo sapien
caggtgtgcggaagggacgaggtac

SEQ ID NO: 2371600 - DNA, 25 bp, Homo sapien
aacggggactccagagcggtgggct

SEQ ID NO: 2371601 - DNA, 25 bp, Homo sapien
agagccttcaggagagccttgacct

SEQ ID NO: 2371602 - DNA, 25 bp, Homo sapien
gatacctgacggtcattgatggtgg

SEQ ID NO: 2371603 - DNA, 25 bp, Homo sapien
gggacaagattccatagcgcccacc

SEQ ID NO: 2371604 - DNA, 25 bp, Homo sapien
ggccctctggtggacatctcattaa

SEQ ID NO: 2371605 - DNA, 25 bp, Homo sapien
ttgaacagggagcaccaagagagcg

SEQ ID NO: 2371606 - DNA, 25 bp, Homo sapien
tttgtaatgtgtggagtggcagccc

SEQ ID NO: 2371607 - DNA, 25 bp, Homo sapien
gatgctgcgaattgtcactgtctag

SEQ ID NO: 2371608 - DNA, 25 bp, Homo sapien
tatattcggcatgagtcaccctcag

SEQ ID NO: 2371609 - DNA, 25 bp, Homo sapien
agggcagcccttatgcaggcaggca

SEQ ID NO: 2371610 - DNA, 25 bp, Homo sapien
tgtggaagtggcaccccttatgtcc

SEQ ID NO: 2371611 - DNA, 25 bp, Homo sapien
ggccacaccttcgttccagaggagg

SEQ ID NO: 2371612 - DNA, 25 bp, Homo sapien
tttgcacggaggtgggaaacgtcca

SEQ ID NO: 2371613 - DNA, 25 bp, Homo sapien
tagaatcagaccggttttgccaggc

SEQ ID NO: 2371614 - DNA, 25 bp, Homo sapien
gaatcagaccggttttgccaggcgt

SEQ ID NO: 2371615 - DNA, 25 bp, Homo sapien
atcagaccggttttgccaggcgtca

SEQ ID NO: 2371616 - DNA, 25 bp, Homo sapien
cttagaatcagaccggttttgccag

SEQ ID NO: 2371617 - DNA, 25 bp, Homo sapien
ctgtgcgtcgtgactttctaagaga

SEQ ID NO: 2371618 - DNA, 25 bp, Homo sapien
acagtactgtgcgtcgtgactttct

SEQ ID NO: 2371619 - DNA, 25 bp, Homo sapien
tactgtgcgtcgtgactttctaaga

SEQ ID NO: 2371620 - DNA, 25 bp, Homo sapien
gcgtcgtgactttctaagagaagtg

SEQ ID NO: 2371621 - DNA, 25 bp, Homo sapien
tgtatacgatgtgtccagaatgtct

SEQ ID NO: 2371622 - DNA, 25 bp, Homo sapien
tcttcagagcactgtttccgtgtga

SEQ ID NO: 2371623 - DNA, 25 bp, Homo sapien
ttctgttgccgttgatttgaatggc

SEQ ID NO: 2371624 - DNA, 25 bp, Homo sapien
aaaaccaggttcttcgtgcgttctg

SEQ ID NO: 2371625 - DNA, 25 bp, Homo sapien
tctgagcattggtgagcggacagcc

SEQ ID NO: 2371626 - DNA, 25 bp, Homo sapien
caaggttgggaggattgtacactac

SEQ ID NO: 2371627 - DNA, 25 bp, Homo sapien
tttcgtttgaggacagaaagcccag

SEQ ID NO: 2371628 - DNA, 25 bp, Homo sapien
tatccagagaaaccacgcaaatggc

SEQ ID NO: 2371629 - DNA, 25 bp, Homo sapien
tgctcttagaagtcatactccatgg

SEQ ID NO: 2371630 - DNA, 25 bp, Homo sapien
gcctgttgtggcgtcttctgggaaa

SEQ ID NO: 2371631 - DNA, 25 bp, Homo sapien
gaaagcctgaccgtgtgttcggacg

SEQ ID NO: 2371632 - DNA, 25 bp, Homo sapien
tgttcggacggcactggctcctttc

SEQ ID NO: 2371633 - DNA, 25 bp, Homo sapien
cgttgtagggtacttagcagcaccc

SEQ ID NO: 2371634 - DNA, 25 bp, Homo sapien
tgtcagcccagcactagtcacatgt

SEQ ID NO: 2371635 - DNA, 25 bp, Homo sapien
caggctgtccctcgataatacatag

SEQ ID NO: 2371636 - DNA, 25 bp, Homo sapien
tctcatgcatcttgttctgggccca

SEQ ID NO: 2371637 - DNA, 25 bp, Homo sapien
tgagagttcccgtcttctgccggcg

SEQ ID NO: 2371638 - DNA, 25 bp, Homo sapien
tctaatcatatctaggtaaacatgc

SEQ ID NO: 2371639 - DNA, 25 bp, Homo sapien
gaacttcaaagctgttcctacacta

SEQ ID NO: 2371640 - DNA, 25 bp, Homo sapien
tgggtaatgttagcaaattggcttc

SEQ ID NO: 2371641 - DNA, 25 bp, Homo sapien
tggtactggacataactgaatatcc

SEQ ID NO: 2371642 - DNA, 25 bp, Homo sapien
taatgggaaactggcatcactagat

SEQ ID NO: 2371643 - DNA, 25 bp, Homo sapien
aaatagctgcatcagtagcagagga

SEQ ID NO: 2371644 - DNA, 25 bp, Homo sapien
gaagactaaattcacaagaagagcc

SEQ ID NO: 2371645 - DNA, 25 bp, Homo sapien
gggtccccaaatggcgcatctagga

SEQ ID NO: 2371646 - DNA, 25 bp, Homo sapien
tcctaggaggcgctcaatcagtgct

SEQ ID NO: 2371647 - DNA, 25 bp, Homo sapien
catggacccagtgatgcatcgatcg

SEQ ID NO: 2371648 - DNA, 25 bp, Homo sapien
tgtggacggcacagatttcagcgtg

SEQ ID NO: 2371649 - DNA, 25 bp, Homo sapien
ggtgcctgccaccacagctgcctaa

SEQ ID NO: 2371650 - DNA, 25 bp, Homo sapien
gtgcctgccaccacagctgcctaat

SEQ ID NO: 2371651 - DNA, 25 bp, Homo sapien
tgcagccccgctactattccatcag

SEQ ID NO: 2371652 - DNA, 25 bp, Homo sapien
tcctcatgggaagtatgtggcagct

SEQ ID NO: 2371653 - DNA, 25 bp, Homo sapien
ctttctatctgtcaacagggtctca

SEQ ID NO: 2371654 - DNA, 25 bp, Homo sapien
cttggcacagggtttgcaggagtac

SEQ ID NO: 2371655 - DNA, 25 bp, Homo sapien
catgtgccgtgttccgacaaactga

SEQ ID NO: 2371656 - DNA, 25 bp, Homo sapien
cctcatcccgccctagtggtgttga

SEQ ID NO: 2371657 - DNA, 25 bp, Homo sapien
ccgaaaaggagccaatgacagtcat

SEQ ID NO: 2371658 - DNA, 25 bp, Homo sapien
gcttttgcagcattccgaaaaggag

SEQ ID NO: 2371659 - DNA, 25 bp, Homo sapien
gccaggttgaaagggagggcctcac

SEQ ID NO: 2371660 - DNA, 25 bp, Homo sapien
caggttgaaagggagggcctcacac

SEQ ID NO: 2371661 - DNA, 25 bp, Homo sapien
gcagccaggttgaaagggagggcct

SEQ ID NO: 2371662 - DNA, 25 bp, Homo sapien
cagccaggttgaaagggagggcctc

SEQ ID NO: 2371663 - DNA, 25 bp, Homo sapien
tgcgaggagcctccttgcgctctcc

SEQ ID NO: 2371664 - DNA, 25 bp, Homo sapien
ttgcgaggagcctccttgcgctctc

SEQ ID NO: 2371665 - DNA, 25 bp, Homo sapien
tttgcgaggagcctccttgcgctct

SEQ ID NO: 2371666 - DNA, 25 bp, Homo sapien
gcaagacgatctgaaaagcatttat

SEQ ID NO: 2371667 - DNA, 25 bp, Homo sapien
cctcccctgctggatgtgcaagacg

SEQ ID NO: 2371668 - DNA, 25 bp, Homo sapien
tctgcgcaactcgaagcctgagtgg

SEQ ID NO: 2371669 - DNA, 25 bp, Homo sapien
gagtgggtttgctccgcttggcaag

SEQ ID NO: 2371670 - DNA, 25 bp, Homo sapien
ccaatcccataagctgatataaagt

SEQ ID NO: 2371671 - DNA, 25 bp, Homo sapien
tcccataagctgatataaagtcccc

SEQ ID NO: 2371672 - DNA, 25 bp, Homo sapien
ctgttgactccaacgcccccgataa

SEQ ID NO: 2371673 - DNA, 25 bp, Homo sapien
taagctgatataaagtcccctctag

SEQ ID NO: 2371674 - DNA, 25 bp, Homo sapien
gaggtagcaccaagatgttgaggaa

SEQ ID NO: 2371675 - DNA, 25 bp, Homo sapien
tgattgggcagcgttatttttagct

SEQ ID NO: 2371676 - DNA, 25 bp, Homo sapien
ccttcgtggtgatttataattcttg

SEQ ID NO: 2371677 - DNA, 25 bp, Homo sapien
tcttgattgggcagcgttattttta

SEQ ID NO: 2371678 - DNA, 25 bp, Homo sapien
ctgggcgagagcactcccttcgtgg

SEQ ID NO: 2371679 - DNA, 25 bp, Homo sapien
ctccaccaccaacttggaaacagat

SEQ ID NO: 2371680 - DNA, 25 bp, Homo sapien
tccaccaccaacttggaaacagatg

SEQ ID NO: 2371681 - DNA, 25 bp, Homo sapien
agctcttggtgcgttgttactccca

SEQ ID NO: 2371682 - DNA, 25 bp, Homo sapien
gtctctttgcggcagactgtcctca

SEQ ID NO: 2371683 - DNA, 25 bp, Homo sapien
aacagccggcagctgcgtctctttg

SEQ ID NO: 2371684 - DNA, 25 bp, Homo sapien
cgttgttactcccaacagccggcag

SEQ ID NO: 2371685 - DNA, 25 bp, Homo sapien
ttgttaacaatacgatcagccactg

SEQ ID NO: 2371686 - DNA, 25 bp, Homo sapien
ttggccttgttaacaatacgatcag

SEQ ID NO: 2371687 - DNA, 25 bp, Homo sapien
aacaatacgatcagccactgtgcca

SEQ ID NO: 2371688 - DNA, 25 bp, Homo sapien
gccttgttaacaatacgatcagcca

SEQ ID NO: 2371689 - DNA, 25 bp, Homo sapien
gtaagagctactttcagagttggac

SEQ ID NO: 2371690 - DNA, 25 bp, Homo sapien
gttctgaaaactgtggccagaaaga

SEQ ID NO: 2371691 - DNA, 25 bp, Homo sapien
tagttctgaaaactgtggccagaaa

SEQ ID NO: 2371692 - DNA, 25 bp, Homo sapien
catgctgtggaagagggtcccttct

SEQ ID NO: 2371693 - DNA, 25 bp, Homo sapien
ctctcttcaaataagtggagcatga

SEQ ID NO: 2371694 - DNA, 25 bp, Homo sapien
tctcttcaaataagtggagcatgaa

SEQ ID NO: 2371695 - DNA, 25 bp, Homo sapien
ctcttcaaataagtggagcatgaag

SEQ ID NO: 2371696 - DNA, 25 bp, Homo sapien
tgtttctcgcatcttgcagaggagg

SEQ ID NO: 2371697 - DNA, 25 bp, Homo sapien
cagacctcctggtcttagggctaaa

SEQ ID NO: 2371698 - DNA, 25 bp, Homo sapien
tatctggtaacagtgaaagcctttc

SEQ ID NO: 2371699 - DNA, 25 bp, Homo sapien
aaccaagggcaacatggatgctctg

SEQ ID NO: 2371700 - DNA, 25 bp, Homo sapien
ctagattttcaaccagccataaaat

SEQ ID NO: 2371701 - DNA, 25 bp, Homo sapien
attttcaaccagccataaaatggtc

SEQ ID NO: 2371702 - DNA, 25 bp, Homo sapien
agattttcaaccagccataaaatgg

SEQ ID NO: 2371703 - DNA, 25 bp, Homo sapien
gattttcaaccagccataaaatggt

SEQ ID NO: 2371704 - DNA, 25 bp, Homo sapien
tgatttttcttctattctcatgatc

SEQ ID NO: 2371705 - DNA, 25 bp, Homo sapien
gatttttcttctattctcatgatca

SEQ ID NO: 2371706 - DNA, 25 bp, Homo sapien
tttttcttctattctcatgatcagg

SEQ ID NO: 2371707 - DNA, 25 bp, Homo sapien
cttgatttttcttctattctcatga

SEQ ID NO: 2371708 - DNA, 25 bp, Homo sapien
tgaggtgtacaggtagctgacaaag

SEQ ID NO: 2371709 - DNA, 25 bp, Homo sapien
tgaattcctgaggtgtacaggtagc

SEQ ID NO: 2371710 - DNA, 25 bp, Homo sapien
gcagctgaattcctgaggtgtacag

SEQ ID NO: 2371711 - DNA, 25 bp, Homo sapien
tctcaccccctatatgcagctgaat

SEQ ID NO: 2371712 - DNA, 25 bp, Homo sapien
gaaatacctctaatcaccagctcgg

SEQ ID NO: 2371713 - DNA, 25 bp, Homo sapien
gagcgggcagcacttgtttatgcca

SEQ ID NO: 2371714 - DNA, 25 bp, Homo sapien
tcccctgtattgtaaactgaggaga

SEQ ID NO: 2371715 - DNA, 25 bp, Homo sapien
taagatcttgaggtcctagtggacc

SEQ ID NO: 2371716 - DNA, 25 bp, Homo sapien
caagtcattgggatggtgatctaga

SEQ ID NO: 2371717 - DNA, 25 bp, Homo sapien
catcttcaaccaagtcattgggatg

SEQ ID NO: 2371718 - DNA, 25 bp, Homo sapien
tgagttttcatcttcaaccaagtca

SEQ ID NO: 2371719 - DNA, 25 bp, Homo sapien
caaccaagtcattgggatggtgatc

SEQ ID NO: 2371720 - DNA, 25 bp, Homo sapien
atgtcaatgtactggcccacagaaa

SEQ ID NO: 2371721 - DNA, 25 bp, Homo sapien
ggcccacagaaaagagctgaccact

SEQ ID NO: 2371722 - DNA, 25 bp, Homo sapien
gagctgaccactagcattcatagac

SEQ ID NO: 2371723 - DNA, 25 bp, Homo sapien
tgtcaatgtactggcccacagaaaa

SEQ ID NO: 2371724 - DNA, 25 bp, Homo sapien
gcgacccattgagtcaggtggccca

SEQ ID NO: 2371725 - DNA, 25 bp, Homo sapien
taaaaacgagtctttgggctcatcc

SEQ ID NO: 2371726 - DNA, 25 bp, Homo sapien
tctaggaggcagagtaacaatccac

SEQ ID NO: 2371727 - DNA, 25 bp, Homo sapien
tatctgtgacgtatgaagcgaccca

SEQ ID NO: 2371728 - DNA, 25 bp, Homo sapien
gtgaagattcaccaggaagccttgg

SEQ ID NO: 2371729 - DNA, 25 bp, Homo sapien
tccagtcagtcttgcttttagcaaa

SEQ ID NO: 2371730 - DNA, 25 bp, Homo sapien
ccgtcatatacatgggcttcccgag

SEQ ID NO: 2371731 - DNA, 25 bp, Homo sapien
tcagcagcgagttgttccagtcagt

SEQ ID NO: 2371732 - DNA, 25 bp, Homo sapien
cacactcctggttatagaggcagag

SEQ ID NO: 2371733 - DNA, 25 bp, Homo sapien
tgccatgtagggtaaattttcacca

SEQ ID NO: 2371734 - DNA, 25 bp, Homo sapien
tgaagaccctgcgattacatccatc

SEQ ID NO: 2371735 - DNA, 25 bp, Homo sapien
ggagccattattcagttcaccacac

SEQ ID NO: 2371736 - DNA, 25 bp, Homo sapien
tgctgttgtatgctcccttcttcaa

SEQ ID NO: 2371737 - DNA, 25 bp, Homo sapien
gatgatgctgttgtatgctcccttc

SEQ ID NO: 2371738 - DNA, 25 bp, Homo sapien
ctctttgagaaatgaggagacaggc

SEQ ID NO: 2371739 - DNA, 25 bp, Homo sapien
catgccaagagggtgataccagtct

SEQ ID NO: 2371740 - DNA, 25 bp, Homo sapien
tgttgtccattgtcctcacccacag

SEQ ID NO: 2371741 - DNA, 25 bp, Homo sapien
cctgtgtcatgggagcttggtttga

SEQ ID NO: 2371742 - DNA, 25 bp, Homo sapien
gccaacggatggcagtcctgtccct

SEQ ID NO: 2371743 - DNA, 25 bp, Homo sapien
tcagcttccatttgccaacggatgg

SEQ ID NO: 2371744 - DNA, 25 bp, Homo sapien
gctggctgtcagctttcacttgcac

SEQ ID NO: 2371745 - DNA, 25 bp, Homo sapien
catttgccaacggatggcagtcctg

SEQ ID NO: 2371746 - DNA, 25 bp, Homo sapien
tcagatcatggctggataggcaaag

SEQ ID NO: 2371747 - DNA, 25 bp, Homo sapien
atcatggctggataggcaaagtggt

SEQ ID NO: 2371748 - DNA, 25 bp, Homo sapien
agatcatggctggataggcaaagtg

SEQ ID NO: 2371749 - DNA, 25 bp, Homo sapien
tcatggctggataggcaaagtggta

SEQ ID NO: 2371750 - DNA, 25 bp, Homo sapien
ttgcaccctggtctggcacactggg

SEQ ID NO: 2371751 - DNA, 25 bp, Homo sapien
aatatgggatactctgaagtgttta

SEQ ID NO: 2371752 - DNA, 25 bp, Homo sapien
agagggaatgtcagatctttcacct

SEQ ID NO: 2371753 - DNA, 25 bp, Homo sapien
gagggaatgtcagatctttcacctt

SEQ ID NO: 2371754 - DNA, 25 bp, Homo sapien
gaatttcttccgaggcactgtcaac

SEQ ID NO: 2371755 - DNA, 25 bp, Homo sapien
gagtcggtgtcctttgccgtgcaag

SEQ ID NO: 2371756 - DNA, 25 bp, Homo sapien
gccgtgcaagtcagaatgatatgtc

SEQ ID NO: 2371757 - DNA, 25 bp, Homo sapien
gcaagggacccgtttccagaggctg

SEQ ID NO: 2371758 - DNA, 25 bp, Homo sapien
caaagatgatgtcgccaggaaggtg

SEQ ID NO: 2371759 - DNA, 25 bp, Homo sapien
gcatgctgagctccgtgtgaaaagg

SEQ ID NO: 2371760 - DNA, 25 bp, Homo sapien
gaaggtgacaccattgacaagttgg

SEQ ID NO: 2371761 - DNA, 25 bp, Homo sapien
tcttggtgtcctgacaatcctgagc

SEQ ID NO: 2371762 - DNA, 25 bp, Homo sapien
gctttcttaggaatgcagtcttcag

SEQ ID NO: 2371763 - DNA, 25 bp, Homo sapien
gctggaacaggaaccagtccaggca

SEQ ID NO: 2371764 - DNA, 25 bp, Homo sapien
caggcatgggctgtaggaagatccc

SEQ ID NO: 2371765 - DNA, 25 bp, Homo sapien
cagaagcgcggatatgagagactga

SEQ ID NO: 2371766 - DNA, 25 bp, Homo sapien
cctttcaaaaaggcagacttcattc

SEQ ID NO: 2371767 - DNA, 25 bp, Homo sapien
tttcaaaaaggcagacttcattctc

SEQ ID NO: 2371768 - DNA, 25 bp, Homo sapien
tcctttcaaaaaggcagacttcatt

SEQ ID NO: 2371769 - DNA, 25 bp, Homo sapien
ctttcaaaaaggcagacttcattct

SEQ ID NO: 2371770 - DNA, 25 bp, Homo sapien
ctttcttcctcagacttccaggagc

SEQ ID NO: 2371771 - DNA, 25 bp, Homo sapien
gatcacccaagtccagtctttcttc

SEQ ID NO: 2371772 - DNA, 25 bp, Homo sapien
ctcagacttccaggagcaggtacac

SEQ ID NO: 2371773 - DNA, 25 bp, Homo sapien
cagaagatcacccaagtccagtctt

SEQ ID NO: 2371774 - DNA, 25 bp, Homo sapien
cacgtagctgcttggccgtagacac

SEQ ID NO: 2371775 - DNA, 25 bp, Homo sapien
tgtaaagaccttgtgccatcatgat

SEQ ID NO: 2371776 - DNA, 25 bp, Homo sapien
ttcttggacaccatacgaccagggc

SEQ ID NO: 2371777 - DNA, 25 bp, Homo sapien
tcatgatcacgtagggtggaggaac

SEQ ID NO: 2371778 - DNA, 25 bp, Homo sapien
tatggccccacgtctcgttatttaa

SEQ ID NO: 2371779 - DNA, 25 bp, Homo sapien
gataaagcaagttcctgacatttgg

SEQ ID NO: 2371780 - DNA, 25 bp, Homo sapien
agtctatccatctgaattgaagggg

SEQ ID NO: 2371781 - DNA, 25 bp, Homo sapien
taaaaatagtcacactctttcaact

SEQ ID NO: 2371782 - DNA, 25 bp, Homo sapien
aaggtgaccccatggtaattcctca

SEQ ID NO: 2371783 - DNA, 25 bp, Homo sapien
gatgaaccatgtagcaaggtgaccc

SEQ ID NO: 2371784 - DNA, 25 bp, Homo sapien
tctgctggaacacaagtctcctgac

SEQ ID NO: 2371785 - DNA, 25 bp, Homo sapien
caagatatggcagagagatgtccca

SEQ ID NO: 2371786 - DNA, 25 bp, Homo sapien
gatgggtaactggttggcaggtagt

SEQ ID NO: 2371787 - DNA, 25 bp, Homo sapien
ggcaggaggctggacgcgttcacag

SEQ ID NO: 2371788 - DNA, 25 bp, Homo sapien
ggcaggtagttgatgggcaggaggc

SEQ ID NO: 2371789 - DNA, 25 bp, Homo sapien
aggctggacgcgttcacaggaagct

SEQ ID NO: 2371790 - DNA, 25 bp, Homo sapien
ccaggcacttgcctttgctaagcat

SEQ ID NO: 2371791 - DNA, 25 bp, Homo sapien
cattgaagtctaccagatctgagtt

SEQ ID NO: 2371792 - DNA, 25 bp, Homo sapien
gaaaggttggcattgaagtctacca

SEQ ID NO: 2371793 - DNA, 25 bp, Homo sapien
tgctaagcatgatgtcgtagccaat

SEQ ID NO: 2371794 - DNA, 25 bp, Homo sapien
acaattttgatgaacgtcaataggg

SEQ ID NO: 2371795 - DNA, 25 bp, Homo sapien
ctagcttgaaactagatccactgtg

SEQ ID NO: 2371796 - DNA, 25 bp, Homo sapien
tgttgtaaccaggacttaaactaca

SEQ ID NO: 2371797 - DNA, 25 bp, Homo sapien
ccatactgtcacaatgggtgcagtg

SEQ ID NO: 2371798 - DNA, 25 bp, Homo sapien
tgagatcgtcgcgtcacccaagcgc

SEQ ID NO: 2371799 - DNA, 25 bp, Homo sapien
tgcacagtgaccagccgcgacctga

SEQ ID NO: 2371800 - DNA, 25 bp, Homo sapien
gacgaaggtgaccagatccgctgag

SEQ ID NO: 2371801 - DNA, 25 bp, Homo sapien
ggcacttacagttcgcgcgcaaaag

SEQ ID NO: 2371802 - DNA, 25 bp, Homo sapien
cctgatcttggtcgccgcgggctgc

SEQ ID NO: 2371803 - DNA, 25 bp, Homo sapien
ctgctgcttgagtgctgaggtctcc

SEQ ID NO: 2371804 - DNA, 25 bp, Homo sapien
caggttcctgatcttggtcgccgcg

SEQ ID NO: 2371805 - DNA, 25 bp, Homo sapien
cagggcaggttcctgatcttggtcg

SEQ ID NO: 2371806 - DNA, 25 bp, Homo sapien
ccgccgccgctcggcctcctcctac

SEQ ID NO: 2371807 - DNA, 25 bp, Homo sapien
gcccaccgccgccgctcggcctcct

SEQ ID NO: 2371808 - DNA, 25 bp, Homo sapien
ccaccgccgccgctcggcctcctcc

SEQ ID NO: 2371809 - DNA, 25 bp, Homo sapien
accgccgccgctcggcctcctccta

SEQ ID NO: 2371810 - DNA, 25 bp, Homo sapien
ttcttcttcggcaaatggagctggg

SEQ ID NO: 2371811 - DNA, 25 bp, Homo sapien
agccctaaacagaacggacgagtct

SEQ ID NO: 2371812 - DNA, 25 bp, Homo sapien
ggtgagaactggcaaaagccctaaa

SEQ ID NO: 2371813 - DNA, 25 bp, Homo sapien
aaacctctgcaggtcggtcccggct

SEQ ID NO: 2371814 - DNA, 25 bp, Homo sapien
caatgtttgaggttacactgagctg

SEQ ID NO: 2371815 - DNA, 25 bp, Homo sapien
tgaaccccaatgtttgaggttacac

SEQ ID NO: 2371816 - DNA, 25 bp, Homo sapien
atggcttgaaccccaatgtttgagg

SEQ ID NO: 2371817 - DNA, 25 bp, Homo sapien
ctctaaaagtcccagttcttcggag

SEQ ID NO: 2371818 - DNA, 25 bp, Homo sapien
ccacaacagtacactgcattctgaa

SEQ ID NO: 2371819 - DNA, 25 bp, Homo sapien
tggaactagatagcgggaagactcc

SEQ ID NO: 2371820 - DNA, 25 bp, Homo sapien
actgtcaatgggtaaaggatttcca

SEQ ID NO: 2371821 - DNA, 25 bp, Homo sapien
taaaatggttacaggatgggcttgg

SEQ ID NO: 2371822 - DNA, 25 bp, Homo sapien
gaaagcagattagtggttgccaggg

SEQ ID NO: 2371823 - DNA, 25 bp, Homo sapien
aaagcagattagtggttgccagggg

SEQ ID NO: 2371824 - DNA, 25 bp, Homo sapien
taggcaaatccatagatagaaagca

SEQ ID NO: 2371825 - DNA, 25 bp, Homo sapien
gcaaatccatagatagaaagcagat

SEQ ID NO: 2371826 - DNA, 25 bp, Homo sapien
cattcagggtctgtggccggtattt

SEQ ID NO: 2371827 - DNA, 25 bp, Homo sapien
tgatgagaaatgagatcattcaggg

SEQ ID NO: 2371828 - DNA, 25 bp, Homo sapien
ggtactcagaatgtcctgatgagaa

SEQ ID NO: 2371829 - DNA, 25 bp, Homo sapien
tgagatcattcagggtctgtggccg

SEQ ID NO: 2371830 - DNA, 25 bp, Homo sapien
ggatggtagatgtcttgcctgtccc

SEQ ID NO: 2371831 - DNA, 25 bp, Homo sapien
tagctgtttcgcacaggctaggatg

SEQ ID NO: 2371832 - DNA, 25 bp, Homo sapien
gtggcagtcggtcttcattgataaa

SEQ ID NO: 2371833 - DNA, 25 bp, Homo sapien
ctttgtctttatatagctgtttcgc

SEQ ID NO: 2371834 - DNA, 25 bp, Homo sapien
caggatcggtcctcgaatgatgtct

SEQ ID NO: 2371835 - DNA, 25 bp, Homo sapien
taaatattgtccttgtgctagcaaa

SEQ ID NO: 2371836 - DNA, 25 bp, Homo sapien
gctagcaaagctcaggatcggtcct

SEQ ID NO: 2371837 - DNA, 25 bp, Homo sapien
tctattcctcggtcatctgaagcat

SEQ ID NO: 2371838 - DNA, 25 bp, Homo sapien
gtcctgagtcatggcgtctgcttca

SEQ ID NO: 2371839 - DNA, 25 bp, Homo sapien
tcaaggcattctgggcgtcctgagt

SEQ ID NO: 2371840 - DNA, 25 bp, Homo sapien
ccaagatcactagcttaaagccttt

SEQ ID NO: 2371841 - DNA, 25 bp, Homo sapien
cgtctgcttcatccaagatcactag

SEQ ID NO: 2371842 - DNA, 25 bp, Homo sapien
cagggagggcggctttttgcagact

SEQ ID NO: 2371843 - DNA, 25 bp, Homo sapien
agggagcaataacccgaacaaagag

SEQ ID NO: 2371844 - DNA, 25 bp, Homo sapien
cttagagcactcaagggagcaataa

SEQ ID NO: 2371845 - DNA, 25 bp, Homo sapien
agagttgcttatgacaccggttcca

SEQ ID NO: 2371846 - DNA, 25 bp, Homo sapien
ttcttccacgacatgttccaggcgg

SEQ ID NO: 2371847 - DNA, 25 bp, Homo sapien
gaaacctcgtgcagcgggactgcaa

SEQ ID NO: 2371848 - DNA, 25 bp, Homo sapien
caaggcagggatgatctttgacaga

SEQ ID NO: 2371849 - DNA, 25 bp, Homo sapien
tttgacagatagttacagatgaggc

SEQ ID NO: 2371850 - DNA, 25 bp, Homo sapien
gagtgactagtgctttcattccatc

SEQ ID NO: 2371851 - DNA, 25 bp, Homo sapien
tccactggaaagagtgactagtgct

SEQ ID NO: 2371852 - DNA, 25 bp, Homo sapien
cctacgcatgtctccactggaaaga

SEQ ID NO: 2371853 - DNA, 25 bp, Homo sapien
tgcaaaatgttcagagccctacgca

SEQ ID NO: 2371854 - DNA, 25 bp, Homo sapien
caatgtctgacttgagcgggtgccc

SEQ ID NO: 2371855 - DNA, 25 bp, Homo sapien
ggtgcaggtgtagacagtctcctct

SEQ ID NO: 2371856 - DNA, 25 bp, Homo sapien
ttggcaatgtctgacttgagcgggt

SEQ ID NO: 2371857 - DNA, 25 bp, Homo sapien
ttgattcaacatccagtccaggatg

SEQ ID NO: 2371858 - DNA, 25 bp, Homo sapien
caggtctcggtggccaggaggtcat

SEQ ID NO: 2371859 - DNA, 25 bp, Homo sapien
tcaggtctcggtggccaggaggtca

SEQ ID NO: 2371860 - DNA, 25 bp, Homo sapien
ggcaaagggaacaagttccagaaca

SEQ ID NO: 2371861 - DNA, 25 bp, Homo sapien
caggatatcatgcagtgccaacccc

SEQ ID NO: 2371862 - DNA, 25 bp, Homo sapien
ctctatgcacaaacaagtgtatctc

SEQ ID NO: 2371863 - DNA, 25 bp, Homo sapien
ggatatcatgcagtgccaacccctt

SEQ ID NO: 2371864 - DNA, 25 bp, Homo sapien
caagtgtatctctgtcaggatatca

SEQ ID NO: 2371865 - DNA, 25 bp, Homo sapien
gaattaatatatactacttactgct

SEQ ID NO: 2371866 - DNA, 25 bp, Homo sapien
ctagaggaaataaagttagcctcca

SEQ ID NO: 2371867 - DNA, 25 bp, Homo sapien
agaggaaataaagttagcctccagg

SEQ ID NO: 2371868 - DNA, 25 bp, Homo sapien
tacttactgctataaaatataaacc

SEQ ID NO: 2371869 - DNA, 25 bp, Homo sapien
catggcatgggccagccaggaagag

SEQ ID NO: 2371870 - DNA, 25 bp, Homo sapien
aggcctgggcagaaccaacattcat

SEQ ID NO: 2371871 - DNA, 25 bp, Homo sapien
gaaggcatggcatgggccagccagg

SEQ ID NO: 2371872 - DNA, 25 bp, Homo sapien
tgggcagaaggcatggcatgggcca

SEQ ID NO: 2371873 - DNA, 25 bp, Homo sapien
gaatgctgagttcccacttgctgtt

SEQ ID NO: 2371874 - DNA, 25 bp, Homo sapien
ggcgtcagccactataccgatcctg

SEQ ID NO: 2371875 - DNA, 25 bp, Homo sapien
taaagttggtttatgctcagcttcc

SEQ ID NO: 2371876 - DNA, 25 bp, Homo sapien
gagcagataccaaagtgatcctaag

SEQ ID NO: 2371877 - DNA, 25 bp, Homo sapien
taaatgtattcgaactgaagatgga

SEQ ID NO: 2371878 - DNA, 25 bp, Homo sapien
caataaatgtattcgaactgaagat

SEQ ID NO: 2371879 - DNA, 25 bp, Homo sapien
gtcaataaatgtattcgaactgaag

SEQ ID NO: 2371880 - DNA, 25 bp, Homo sapien
aatgtattcgaactgaagatggaaa

SEQ ID NO: 2371881 - DNA, 25 bp, Homo sapien
tagaacaaatgtgccctggatggca

SEQ ID NO: 2371882 - DNA, 25 bp, Homo sapien
aattattaggtatcaggccgggcgt

SEQ ID NO: 2371883 - DNA, 25 bp, Homo sapien
ttaagggaccaagagatctagggct

SEQ ID NO: 2371884 - DNA, 25 bp, Homo sapien
tgatgtttcaaacttgtaaggaccg

SEQ ID NO: 2371885 - DNA, 25 bp, Homo sapien
cgttggtgccaacagaaagcctgta

SEQ ID NO: 2371886 - DNA, 25 bp, Homo sapien
taggcctctgcaacaatcaggtctc

SEQ ID NO: 2371887 - DNA, 25 bp, Homo sapien
tgaaatgcagcaatgagggagctca

SEQ ID NO: 2371888 - DNA, 25 bp, Homo sapien
tcagctggatcttctcgttggtgcc

SEQ ID NO: 2371889 - DNA, 25 bp, Homo sapien
ctgtcatccaagcaactaaaaggta

SEQ ID NO: 2371890 - DNA, 25 bp, Homo sapien
tgctgagccctgagaattgtgaatg

SEQ ID NO: 2371891 - DNA, 25 bp, Homo sapien
gggtaggctaattccctgtcatcca

SEQ ID NO: 2371892 - DNA, 25 bp, Homo sapien
cttgagtaggaagacacttggacca

SEQ ID NO: 2371893 - DNA, 25 bp, Homo sapien
gtataatagtttcggccagacgtcc

SEQ ID NO: 2371894 - DNA, 25 bp, Homo sapien
cacccagtggcatagtttaaggctc

SEQ ID NO: 2371895 - DNA, 25 bp, Homo sapien
cgcagttctaggtttacagtcaggc

SEQ ID NO: 2371896 - DNA, 25 bp, Homo sapien
tggtgactcttctaccacagagggt

SEQ ID NO: 2371897 - DNA, 25 bp, Homo sapien
gacaaagtcagcatctttctagctg

SEQ ID NO: 2371898 - DNA, 25 bp, Homo sapien
aaggaagagtcacttgtaacacagc

SEQ ID NO: 2371899 - DNA, 25 bp, Homo sapien
gtcagcatctttctagctgtctaag

SEQ ID NO: 2371900 - DNA, 25 bp, Homo sapien
aagagtcacttgtaacacagccagc

SEQ ID NO: 2371901 - DNA, 25 bp, Homo sapien
cctggttggccatcagatatttagc

SEQ ID NO: 2371902 - DNA, 25 bp, Homo sapien
ggtgagtcctccatgaacaaaggga

SEQ ID NO: 2371903 - DNA, 25 bp, Homo sapien
catactttgccgctgtccttaaggg

SEQ ID NO: 2371904 - DNA, 25 bp, Homo sapien
gaagttccaggtacagcagatgctg

SEQ ID NO: 2371905 - DNA, 25 bp, Homo sapien
aggctgtagcgagccacgatcgtgt

SEQ ID NO: 2371906 - DNA, 25 bp, Homo sapien
ggtgactgacagagcatgatcttgc

SEQ ID NO: 2371907 - DNA, 25 bp, Homo sapien
cgagccacgatcgtgtcacggtatt

SEQ ID NO: 2371908 - DNA, 25 bp, Homo sapien
gggtgactgacagagcatgatcttg

SEQ ID NO: 2371909 - DNA, 25 bp, Homo sapien
gtgagataagacccaatctttattt

SEQ ID NO: 2371910 - DNA, 25 bp, Homo sapien
agtgagataagacccaatctttatt

SEQ ID NO: 2371911 - DNA, 25 bp, Homo sapien
agagtgagataagacccaatcttta

SEQ ID NO: 2371912 - DNA, 25 bp, Homo sapien
gagtgagataagacccaatctttat

SEQ ID NO: 2371913 - DNA, 25 bp, Homo sapien
tatggaggccagtgtaacgttacat

SEQ ID NO: 2371914 - DNA, 25 bp, Homo sapien
tcttaatcggtgctttatggaggcc

SEQ ID NO: 2371915 - DNA, 25 bp, Homo sapien
catgactcgttgagaaagttgagga

SEQ ID NO: 2371916 - DNA, 25 bp, Homo sapien
tctaccacctttgttgcttgaagaa

SEQ ID NO: 2371917 - DNA, 25 bp, Homo sapien
taaaccgcatgactattcagatggc

SEQ ID NO: 2371918 - DNA, 25 bp, Homo sapien
tccagagcctctctagtggcagagc

SEQ ID NO: 2371919 - DNA, 25 bp, Homo sapien
gaagagattccacttgcacggcaac

SEQ ID NO: 2371920 - DNA, 25 bp, Homo sapien
gcacttatgccggaaagcccttcga

SEQ ID NO: 2371921 - DNA, 25 bp, Homo sapien
tcctttgaaccatcaaatttgaatc

SEQ ID NO: 2371922 - DNA, 25 bp, Homo sapien
aaatttgaatccctctaattcggat

SEQ ID NO: 2371923 - DNA, 25 bp, Homo sapien
tttgaaccatcaaatttgaatccct

SEQ ID NO: 2371924 - DNA, 25 bp, Homo sapien
cctctaattcggatttcccattcaa

SEQ ID NO: 2371925 - DNA, 25 bp, Homo sapien
tttaattcactgagacatggaggtc

SEQ ID NO: 2371926 - DNA, 25 bp, Homo sapien
gattcaagtgttatcgggccacctg

SEQ ID NO: 2371927 - DNA, 25 bp, Homo sapien
tcggtgagtctccagcgttattgct

SEQ ID NO: 2371928 - DNA, 25 bp, Homo sapien
gagtgttctcaaaatcgtccgcaaa

SEQ ID NO: 2371929 - DNA, 25 bp, Homo sapien
tgttttgtaggatcactgggatatt

SEQ ID NO: 2371930 - DNA, 25 bp, Homo sapien
aaaaaccctagctaggaacacagag

SEQ ID NO: 2371931 - DNA, 25 bp, Homo sapien
aaaaccctagctaggaacacagaga

SEQ ID NO: 2371932 - DNA, 25 bp, Homo sapien
agagaatgttttgtaggatcactgg

SEQ ID NO: 2371933 - DNA, 25 bp, Homo sapien
tcaagagtgggctgcaatgtgcacc

SEQ ID NO: 2371934 - DNA, 25 bp, Homo sapien
aatgtgcacccctcaggaatagctg

SEQ ID NO: 2371935 - DNA, 25 bp, Homo sapien
gagtcttcggcaaccaaattccaga

SEQ ID NO: 2371936 - DNA, 25 bp, Homo sapien
ttttgctgcaaggtaccccacgtac

SEQ ID NO: 2371937 - DNA, 25 bp, Homo sapien
gcttggaaagctacatcgaagatga

SEQ ID NO: 2371938 - DNA, 25 bp, Homo sapien
aagttgcgtatctgctctagtgggc

SEQ ID NO: 2371939 - DNA, 25 bp, Homo sapien
tgatttgacctgtacccctggtggg

SEQ ID NO: 2371940 - DNA, 25 bp, Homo sapien
ggtaccaatgccaatcagaggaagg

SEQ ID NO: 2371941 - DNA, 25 bp, Homo sapien
tggtccatggttgtcttgctctgaa

SEQ ID NO: 2371942 - DNA, 25 bp, Homo sapien
ttggagagctacattgaagacgagc

SEQ ID NO: 2371943 - DNA, 25 bp, Homo sapien
cattcagctttgactccacctgcac

SEQ ID NO: 2371944 - DNA, 25 bp, Homo sapien
ggcttgcactaacaatgtttgggtc

SEQ ID NO: 2371945 - DNA, 25 bp, Homo sapien
gtggtattacacgcatttgccatca

SEQ ID NO: 2371946 - DNA, 25 bp, Homo sapien
aggtggtattacacgcatttgccat

SEQ ID NO: 2371947 - DNA, 25 bp, Homo sapien
ggtggtattacacgcatttgccatc

SEQ ID NO: 2371948 - DNA, 25 bp, Homo sapien
ttctattctctagtgaccaccctgt

SEQ ID NO: 2371949 - DNA, 25 bp, Homo sapien
ttacttctgcagcaaaagtttcctt

SEQ ID NO: 2371950 - DNA, 25 bp, Homo sapien
ttattggccccttacttctgcagca

SEQ ID NO: 2371951 - DNA, 25 bp, Homo sapien
tctcactgggaccctaagaaattgg

SEQ ID NO: 2371952 - DNA, 25 bp, Homo sapien
caaaaaagccgcacatggtgacaca

SEQ ID NO: 2371953 - DNA, 25 bp, Homo sapien
ggttgccaagccaattccctagagt

SEQ ID NO: 2371954 - DNA, 25 bp, Homo sapien
tgcaagctccggaattttccgcaag

SEQ ID NO: 2371955 - DNA, 25 bp, Homo sapien
tatacagaaatatgactgggcacca

SEQ ID NO: 2371956 - DNA, 25 bp, Homo sapien
ctcgggaagacgcagacccagcgac

SEQ ID NO: 2371957 - DNA, 25 bp, Homo sapien
ggcgacgcggagagctcagcacact

SEQ ID NO: 2371958 - DNA, 25 bp, Homo sapien
accacgcgagagcacgcgcctcagc

SEQ ID NO: 2371959 - DNA, 25 bp, Homo sapien
ccaggcgcgggcgacagaggcgacg

SEQ ID NO: 2371960 - DNA, 25 bp, Homo sapien
ggaccacttgctgaggtccaccggc

SEQ ID NO: 2371961 - DNA, 25 bp, Homo sapien
gaccacttgctgaggtccaccggca

SEQ ID NO: 2371962 - DNA, 25 bp, Homo sapien
ccggaccacttgctgaggtccaccg

SEQ ID NO: 2371963 - DNA, 25 bp, Homo sapien
cggaccacttgctgaggtccaccgg

SEQ ID NO: 2371964 - DNA, 25 bp, Homo sapien
tgaagcccgggaaaagtgaatgaat

SEQ ID NO: 2371965 - DNA, 25 bp, Homo sapien
gcatgggacatggaccccgggacct

SEQ ID NO: 2371966 - DNA, 25 bp, Homo sapien
gggcctcgacacacgcaggctgaac

SEQ ID NO: 2371967 - DNA, 25 bp, Homo sapien
ccaaaaccaggcctaaaatgctgag

SEQ ID NO: 2371968 - DNA, 25 bp, Homo sapien
taaccaactagcagtggcgtctgca

SEQ ID NO: 2371969 - DNA, 25 bp, Homo sapien
gctgttgcccggagcttcataacca

SEQ ID NO: 2371970 - DNA, 25 bp, Homo sapien
ggcgtctgcaaatctagtttcttca

SEQ ID NO: 2371971 - DNA, 25 bp, Homo sapien
gcttcataaccaactagcagtggcg

SEQ ID NO: 2371972 - DNA, 25 bp, Homo sapien
gaggctgtgttagatgggcactaca

SEQ ID NO: 2371973 - DNA, 25 bp, Homo sapien
tacattgtctgtccggaatcacagc

SEQ ID NO: 2371974 - DNA, 25 bp, Homo sapien
tatttcagtcccaacaacaccatgg

SEQ ID NO: 2371975 - DNA, 25 bp, Homo sapien
gataaggctgggattccaaccctgg

SEQ ID NO: 2371976 - DNA, 25 bp, Homo sapien
gaaccagtttgcagtaaaaaagtca

SEQ ID NO: 2371977 - DNA, 25 bp, Homo sapien
tatgaaggaaccagtttgcagtaaa

SEQ ID NO: 2371978 - DNA, 25 bp, Homo sapien
tgaaggaaccagtttgcagtaaaaa

SEQ ID NO: 2371979 - DNA, 25 bp, Homo sapien
ctgtatgaaggaaccagtttgcagt

SEQ ID NO: 2371980 - DNA, 25 bp, Homo sapien
aaggtgtagagcttccctgaatcaa

SEQ ID NO: 2371981 - DNA, 25 bp, Homo sapien
ctgctgggagcatccgggtctgtca

SEQ ID NO: 2371982 - DNA, 25 bp, Homo sapien
gaccaaggtgtagagcttccctgaa

SEQ ID NO: 2371983 - DNA, 25 bp, Homo sapien
gtcaggaccaaggtgtagagcttcc

SEQ ID NO: 2371984 - DNA, 25 bp, Homo sapien
agatcagggaacattcactgcacag

SEQ ID NO: 2371985 - DNA, 25 bp, Homo sapien
aaacacgggatgtcagcaccacagg

SEQ ID NO: 2371986 - DNA, 25 bp, Homo sapien
cacaggagatcagggaacattcact

SEQ ID NO: 2371987 - DNA, 25 bp, Homo sapien
cagcaccacaggagatcagggaaca

SEQ ID NO: 2371988 - DNA, 25 bp, Homo sapien
ttgcccttcatgttgaccaccagga

SEQ ID NO: 2371989 - DNA, 25 bp, Homo sapien
atcggagaggactgtgccactgctg

SEQ ID NO: 2371990 - DNA, 25 bp, Homo sapien
ttgggaggccccgagcccacataat

SEQ ID NO: 2371991 - DNA, 25 bp, Homo sapien
ccgagcccacataatcggagaggac

SEQ ID NO: 2371992 - DNA, 25 bp, Homo sapien
tccactgatggatgaaaagatgatc

SEQ ID NO: 2371993 - DNA, 25 bp, Homo sapien
tgtgttactctaggactattcagcc

SEQ ID NO: 2371994 - DNA, 25 bp, Homo sapien
gaagcaacccgactgtccactgatg

SEQ ID NO: 2371995 - DNA, 25 bp, Homo sapien
gtacaattccacgaggtatctaaag

SEQ ID NO: 2371996 - DNA, 25 bp, Homo sapien
gaggcagagggaagatgtacacaca

SEQ ID NO: 2371997 - DNA, 25 bp, Homo sapien
aaaccagccagacatagcggtggag

SEQ ID NO: 2371998 - DNA, 25 bp, Homo sapien
taaaccagccagacatagcggtgga

SEQ ID NO: 2371999 - DNA, 25 bp, Homo sapien
gtgacatactgatgcctactgaggc

SEQ ID NO: 2372000 - DNA, 25 bp, Homo sapien
gatgcactgtgttggaggttagcct

SEQ ID NO: 2372001 - DNA, 25 bp, Homo sapien
tagattgccatgtcccaacaacagc

SEQ ID NO: 2372002 - DNA, 25 bp, Homo sapien
gcgagcgctgctaccggtctagatt

SEQ ID NO: 2372003 - DNA, 25 bp, Homo sapien
tctatttttattcaactacaagcaa

SEQ ID NO: 2372004 - DNA, 25 bp, Homo sapien
agcaaacagcacaattaatgcaaca

SEQ ID NO: 2372005 - DNA, 25 bp, Homo sapien
gagttcaacactgtctctcaatcag

SEQ ID NO: 2372006 - DNA, 25 bp, Homo sapien
gaacctgctggcaagagtttaactt

SEQ ID NO: 2372007 - DNA, 25 bp, Homo sapien
cagtagcacaaattgggctttggca

SEQ ID NO: 2372008 - DNA, 25 bp, Homo sapien
tccaaggaagagcatgataactgtc

SEQ ID NO: 2372009 - DNA, 25 bp, Homo sapien
gacatcgtgtcggactagtgcctgt

SEQ ID NO: 2372010 - DNA, 25 bp, Homo sapien
ttctattcacagtacacgtcacagt

SEQ ID NO: 2372011 - DNA, 25 bp, Homo sapien
tcaactttcagtgctggccaaaacc

SEQ ID NO: 2372012 - DNA, 25 bp, Homo sapien
aaaacctggccgtctcttctattca

SEQ ID NO: 2372013 - DNA, 25 bp, Homo sapien
aaaattagctgggcaggcacctgta

SEQ ID NO: 2372014 - DNA, 25 bp, Homo sapien
agctactcaggaggctgaggcagga

SEQ ID NO: 2372015 - DNA, 25 bp, Homo sapien
tcccagctactcaggaggctgaggc

SEQ ID NO: 2372016 - DNA, 25 bp, Homo sapien
aaattagctgggcaggcacctgtag

SEQ ID NO: 2372017 - DNA, 25 bp, Homo sapien
cgcggaagccaccgcggttccccat

SEQ ID NO: 2372018 - DNA, 25 bp, Homo sapien
ccgctgcaccggcgtcatccgccat

SEQ ID NO: 2372019 - DNA, 25 bp, Homo sapien
gggcctccgtgcccccccgctgcac

SEQ ID NO: 2372020 - DNA, 25 bp, Homo sapien
ccagggcctccgtgcccccccgctg

SEQ ID NO: 2372021 - DNA, 25 bp, Homo sapien
ccccggccccggatgccactgccga

SEQ ID NO: 2372022 - DNA, 25 bp, Homo sapien
cggccccggatgccactgccgaaac

SEQ ID NO: 2372023 - DNA, 25 bp, Homo sapien
cgcgaccccggccccggatgccact

SEQ ID NO: 2372024 - DNA, 25 bp, Homo sapien
gccgcgaccccggccccggatgcca

SEQ ID NO: 2372025 - DNA, 25 bp, Homo sapien
ttatcctcggccttgcctccgcgag

SEQ ID NO: 2372026 - DNA, 25 bp, Homo sapien
gtccttgaccaagcggcccaacttg

SEQ ID NO: 2372027 - DNA, 25 bp, Homo sapien
tcatgtccttgaccaagcggcccaa

SEQ ID NO: 2372028 - DNA, 25 bp, Homo sapien
caagcggcccaacttggtgacgggc

SEQ ID NO: 2372029 - DNA, 25 bp, Homo sapien
cccaggaagaaatcaatgatctctg

SEQ ID NO: 2372030 - DNA, 25 bp, Homo sapien
agaggcccccaggaagaaatcaatg

SEQ ID NO: 2372031 - DNA, 25 bp, Homo sapien
ctggtgcgctggctggcacgggtct

SEQ ID NO: 2372032 - DNA, 25 bp, Homo sapien
tggtgcgctggctggcacgggtctg

SEQ ID NO: 2372033 - DNA, 25 bp, Homo sapien
cattgtagtccccgatagcaacaaa

SEQ ID NO: 2372034 - DNA, 25 bp, Homo sapien
gccattgtagtccccgatagcaaca

SEQ ID NO: 2372035 - DNA, 25 bp, Homo sapien
gtggccattgtagtccccgatagca

SEQ ID NO: 2372036 - DNA, 25 bp, Homo sapien
tggccattgtagtccccgatagcaa

SEQ ID NO: 2372037 - DNA, 25 bp, Homo sapien
ttggagcacttaacacccagaccga

SEQ ID NO: 2372038 - DNA, 25 bp, Homo sapien
cttggagcacttaacacccagaccg

SEQ ID NO: 2372039 - DNA, 25 bp, Homo sapien
tggagcacttaacacccagaccgac

SEQ ID NO: 2372040 - DNA, 25 bp, Homo sapien
tcttaggcacaggtgcggagacgat

SEQ ID NO: 2372041 - DNA, 25 bp, Homo sapien
cagcttcttaggcacaggtgcggag

SEQ ID NO: 2372042 - DNA, 25 bp, Homo sapien
agcagcttcttaggcacaggtgcgg

SEQ ID NO: 2372043 - DNA, 25 bp, Homo sapien
cttcttaggcacaggtgcggagacg

SEQ ID NO: 2372044 - DNA, 25 bp, Homo sapien
tggatcctgagtccgctgcacggag

SEQ ID NO: 2372045 - DNA, 25 bp, Homo sapien
ctggatcctgagtccgctgcacgga

SEQ ID NO: 2372046 - DNA, 25 bp, Homo sapien
atcctgagtccgctgcacggagact

SEQ ID NO: 2372047 - DNA, 25 bp, Homo sapien
agctggatcctgagtccgctgcacg

SEQ ID NO: 2372048 - DNA, 25 bp, Homo sapien
ctgcatgttctgttatctccagtgc

SEQ ID NO: 2372049 - DNA, 25 bp, Homo sapien
tttacaatttccgtatcagcaaagg

SEQ ID NO: 2372050 - DNA, 25 bp, Homo sapien
tgtttttcagatgaacacgtgagta

SEQ ID NO: 2372051 - DNA, 25 bp, Homo sapien
cacgtgagtacatttgcattactga

SEQ ID NO: 2372052 - DNA, 25 bp, Homo sapien
caatttttgctaaatagtaaatggg

SEQ ID NO: 2372053 - DNA, 25 bp, Homo sapien
aggctgcaatgcagtggcccgagct

SEQ ID NO: 2372054 - DNA, 25 bp, Homo sapien
ctgcaatgcagtggcccgagctcgg

SEQ ID NO: 2372055 - DNA, 25 bp, Homo sapien
ggctgcaatgcagtggcccgagctc

SEQ ID NO: 2372056 - DNA, 25 bp, Homo sapien
gcaatgcagtggcccgagctcggct

SEQ ID NO: 2372057 - DNA, 25 bp, Homo sapien
aaggagctcaaaaaactcaagagaa

SEQ ID NO: 2372058 - DNA, 25 bp, Homo sapien
taaggagctcaaaaaactcaagaga

SEQ ID NO: 2372059 - DNA, 25 bp, Homo sapien
ggcatataccaccacaccatgcctg

SEQ ID NO: 2372060 - DNA, 25 bp, Homo sapien
caggcatataccaccacaccatgcc

SEQ ID NO: 2372061 - DNA, 25 bp, Homo sapien
gtcacccaagccccaagctggagtg

SEQ ID NO: 2372062 - DNA, 25 bp, Homo sapien
ctctgtcacccaagccccaagctgg

SEQ ID NO: 2372063 - DNA, 25 bp, Homo sapien
tgtgagctgtagagcccagatgact

SEQ ID NO: 2372064 - DNA, 25 bp, Homo sapien
aataccaaagctgcctactctgagg

SEQ ID NO: 2372065 - DNA, 25 bp, Homo sapien
tcgtggtagctttctcactggaaac

SEQ ID NO: 2372066 - DNA, 25 bp, Homo sapien
tcatggcatagtaaaaagtctggct

SEQ ID NO: 2372067 - DNA, 25 bp, Homo sapien
ggcattaacggcttggcatagagag

SEQ ID NO: 2372068 - DNA, 25 bp, Homo sapien
gagagatttattgagggcattaacg

SEQ ID NO: 2372069 - DNA, 25 bp, Homo sapien
aagcagcttgtgagagatttattga

SEQ ID NO: 2372070 - DNA, 25 bp, Homo sapien
tattgagggcattaacggcttggca

SEQ ID NO: 2372071 - DNA, 25 bp, Homo sapien
gacaagtagtctttaattccagatg

SEQ ID NO: 2372072 - DNA, 25 bp, Homo sapien
gatgaatagtctgtgtttaacactg

SEQ ID NO: 2372073 - DNA, 25 bp, Homo sapien
tggaattaagaaaggtccatgtcct

SEQ ID NO: 2372074 - DNA, 25 bp, Homo sapien
cattgaaggcactatggaaagcgaa

SEQ ID NO: 2372075 - DNA, 25 bp, Homo sapien
ggagaatggcgtgagcccgggaggc

SEQ ID NO: 2372076 - DNA, 25 bp, Homo sapien
gagcccgggaggcagagcttgcagt

SEQ ID NO: 2372077 - DNA, 25 bp, Homo sapien
gtagtccgagctactcgggtagttg

SEQ ID NO: 2372078 - DNA, 25 bp, Homo sapien
ccgagctactcgggtagttgaggca

SEQ ID NO: 2372079 - DNA, 25 bp, Homo sapien
gacttggctgaaacctagatttgct

SEQ ID NO: 2372080 - DNA, 25 bp, Homo sapien
ctttataccacaaattgaagctgtc

SEQ ID NO: 2372081 - DNA, 25 bp, Homo sapien
tgctgattgaaaggtcagagctctt

SEQ ID NO: 2372082 - DNA, 25 bp, Homo sapien
cattgtagcgtacatcagtgatgat

SEQ ID NO: 2372083 - DNA, 25 bp, Homo sapien
tgtaaaggaagagctcagtgtgcaa

SEQ ID NO: 2372084 - DNA, 25 bp, Homo sapien
cagtgtgcaagaatagttatgctta

SEQ ID NO: 2372085 - DNA, 25 bp, Homo sapien
tcacataggtttgggattggcagga

SEQ ID NO: 2372086 - DNA, 25 bp, Homo sapien
taattttggccacacactgtaaagg

SEQ ID NO: 2372087 - DNA, 25 bp, Homo sapien
gaaaccttactctagtatgcaggga

SEQ ID NO: 2372088 - DNA, 25 bp, Homo sapien
tcctttctcgggatgaaggtgctga

SEQ ID NO: 2372089 - DNA, 25 bp, Homo sapien
ccataacggtgagcattgatagact

SEQ ID NO: 2372090 - DNA, 25 bp, Homo sapien
tagctgtctgaccaggaagtactct

SEQ ID NO: 2372091 - DNA, 25 bp, Homo sapien
cctcccgagtacctgagattacggc

SEQ ID NO: 2372092 - DNA, 25 bp, Homo sapien
cgagtacctgagattacggcctcct

SEQ ID NO: 2372093 - DNA, 25 bp, Homo sapien
tcccgagtacctgagattacggcct

SEQ ID NO: 2372094 - DNA, 25 bp, Homo sapien
cccgagtacctgagattacggcctc

SEQ ID NO: 2372095 - DNA, 25 bp, Homo sapien
aacattttcattgccggccggtatt

SEQ ID NO: 2372096 - DNA, 25 bp, Homo sapien
tacagcagccacacattgcaaggtc

SEQ ID NO: 2372097 - DNA, 25 bp, Homo sapien
cagttccgtatgaaggcttacagca

SEQ ID NO: 2372098 - DNA, 25 bp, Homo sapien
tactggagtcgtatacaggcaaact

SEQ ID NO: 2372099 - DNA, 25 bp, Homo sapien
aggctgcgcacagccggatccggca

SEQ ID NO: 2372100 - DNA, 25 bp, Homo sapien
agaccgcgagcagaggctgcgcaca

SEQ ID NO: 2372101 - DNA, 25 bp, Homo sapien
ggcactcagcgaccggacccaagga

SEQ ID NO: 2372102 - DNA, 25 bp, Homo sapien
caggagagcgactcaggaacaagtg

SEQ ID NO: 2372103 - DNA, 25 bp, Homo sapien
tcgccgtctgcctagcagtgtccgc

SEQ ID NO: 2372104 - DNA, 25 bp, Homo sapien
cccccaactcgaggaccggcagcca

SEQ ID NO: 2372105 - DNA, 25 bp, Homo sapien
ccccaactcgaggaccggcagccac

SEQ ID NO: 2372106 - DNA, 25 bp, Homo sapien
cgtctgcctagcagtgtccgcggca

SEQ ID NO: 2372107 - DNA, 25 bp, Homo sapien
ggccggggccagcagccccgcggca

SEQ ID NO: 2372108 - DNA, 25 bp, Homo sapien
ccggggccagcagccccgcggcact

SEQ ID NO: 2372109 - DNA, 25 bp, Homo sapien
gggccggggccagcagccccgcggc

SEQ ID NO: 2372110 - DNA, 25 bp, Homo sapien
cggggccggggccagcagccccgcg

SEQ ID NO: 2372111 - DNA, 25 bp, Homo sapien
tccgactcgcggccccgacagctgc

SEQ ID NO: 2372112 - DNA, 25 bp, Homo sapien
cataattcacggagttggcgtcacc

SEQ ID NO: 2372113 - DNA, 25 bp, Homo sapien
tagataccgagggacagccgtactt

SEQ ID NO: 2372114 - DNA, 25 bp, Homo sapien
cacagaatagggtgtctcaggcaca

SEQ ID NO: 2372115 - DNA, 25 bp, Homo sapien
tatctgcaaacacgaaacctgtgga

SEQ ID NO: 2372116 - DNA, 25 bp, Homo sapien
tgctttgccaggtcagtttcactag

SEQ ID NO: 2372117 - DNA, 25 bp, Homo sapien
gctttgccaggtcagtttcactagc

SEQ ID NO: 2372118 - DNA, 25 bp, Homo sapien
tgaatctgttcggctgtggctctgt

SEQ ID NO: 2372119 - DNA, 25 bp, Homo sapien
cgttttccatctgggtgtacgctaa

SEQ ID NO: 2372120 - DNA, 25 bp, Homo sapien
tacgctaaaagtgagtgaggttttc

SEQ ID NO: 2372121 - DNA, 25 bp, Homo sapien
gtgaggttttcgtttctctgaatct

SEQ ID NO: 2372122 - DNA, 25 bp, Homo sapien
cacatgggcgtgataacctttttag

SEQ ID NO: 2372123 - DNA, 25 bp, Homo sapien
tttttagcgctcaaataagggctgc

SEQ ID NO: 2372124 - DNA, 25 bp, Homo sapien
tgtgatctgaaagaacactgtccaa

SEQ ID NO: 2372125 - DNA, 25 bp, Homo sapien
gatgcactttagatttccccttgaa

SEQ ID NO: 2372126 - DNA, 25 bp, Homo sapien
agaagccagtttgtcctgatacatc

SEQ ID NO: 2372127 - DNA, 25 bp, Homo sapien
gagaagccagtttgtcctgatacat

SEQ ID NO: 2372128 - DNA, 25 bp, Homo sapien
ctgcaagttccgcctccaggttcac

SEQ ID NO: 2372129 - DNA, 25 bp, Homo sapien
gctaattttttgcatttttcagtag

SEQ ID NO: 2372130 - DNA, 25 bp, Homo sapien
cgcctccaggttcacgctattctcc

SEQ ID NO: 2372131 - DNA, 25 bp, Homo sapien
ctacaggtgcccactacaacgccca

SEQ ID NO: 2372132 - DNA, 25 bp, Homo sapien
gcattccgtatcctctctttgtact

SEQ ID NO: 2372133 - DNA, 25 bp, Homo sapien
cattccgtatcctctctttgtactg

SEQ ID NO: 2372134 - DNA, 25 bp, Homo sapien
attccgtatcctctctttgtactgc

SEQ ID NO: 2372135 - DNA, 25 bp, Homo sapien
tgaaagaacacatgagggccgggca

SEQ ID NO: 2372136 - DNA, 25 bp, Homo sapien
tctgcatttttacctaggagagaga

SEQ ID NO: 2372137 - DNA, 25 bp, Homo sapien
caagtcgtgactgatttaggagctc

SEQ ID NO: 2372138 - DNA, 25 bp, Homo sapien
cacatgaggacatgattgagagtct

SEQ ID NO: 2372139 - DNA, 25 bp, Homo sapien
aaatcagacccacgtgacttttgct

SEQ ID NO: 2372140 - DNA, 25 bp, Homo sapien
tgagaacaagctttccagcgagggt

SEQ ID NO: 2372141 - DNA, 25 bp, Homo sapien
cagtaacagtgtgtctgagaacaag

SEQ ID NO: 2372142 - DNA, 25 bp, Homo sapien
gccagggctccaactcaaagtctag

SEQ ID NO: 2372143 - DNA, 25 bp, Homo sapien
gaaacacgggctgggagtacacagc

SEQ ID NO: 2372144 - DNA, 25 bp, Homo sapien
agaaacacgggctgggagtacacag

SEQ ID NO: 2372145 - DNA, 25 bp, Homo sapien
agctcaaccttcttgtcttcaaatt

SEQ ID NO: 2372146 - DNA, 25 bp, Homo sapien
gctcaaccttcttgtcttcaaattc

SEQ ID NO: 2372147 - DNA, 25 bp, Homo sapien
cagctcaaccttcttgtcttcaaat

SEQ ID NO: 2372148 - DNA, 25 bp, Homo sapien
tccagtcagttccattgtcagcttt

SEQ ID NO: 2372149 - DNA, 25 bp, Homo sapien
ttgtcagcttttcattttcaatcat

SEQ ID NO: 2372150 - DNA, 25 bp, Homo sapien
ccattgtcagcttttcattttcaat

SEQ ID NO: 2372151 - DNA, 25 bp, Homo sapien
ctccagtcagttccattgtcagctt

SEQ ID NO: 2372152 - DNA, 25 bp, Homo sapien
ctggcaggagagatctaatagcata

SEQ ID NO: 2372153 - DNA, 25 bp, Homo sapien
agccaaaagcctttgttcttacatc

SEQ ID NO: 2372154 - DNA, 25 bp, Homo sapien
tctaatagcatagaggatatagcca

SEQ ID NO: 2372155 - DNA, 25 bp, Homo sapien
tacatctaggtcaaagggagacaat

SEQ ID NO: 2372156 - DNA, 25 bp, Homo sapien
gggacgggatcatttggtcgcctcc

SEQ ID NO: 2372157 - DNA, 25 bp, Homo sapien
ggatcatttggtcgcctccgcaact

SEQ ID NO: 2372158 - DNA, 25 bp, Homo sapien
ccgcaactttctggtcatgataggt

SEQ ID NO: 2372159 - DNA, 25 bp, Homo sapien
tggtcgcctccgcaactttctggtc

SEQ ID NO: 2372160 - DNA, 25 bp, Homo sapien
gataaaatgagcaacccctgacctg

SEQ ID NO: 2372161 - DNA, 25 bp, Homo sapien
ttttctgtaggacaacggccatgtg

SEQ ID NO: 2372162 - DNA, 25 bp, Homo sapien
tagcaaacggataaacataggattc

SEQ ID NO: 2372163 - DNA, 25 bp, Homo sapien
caggttgcaatccactacattatgg

SEQ ID NO: 2372164 - DNA, 25 bp, Homo sapien
ctcagatcctccatgatctgttcat

SEQ ID NO: 2372165 - DNA, 25 bp, Homo sapien
gtttgccatcttctatccgagcttc

SEQ ID NO: 2372166 - DNA, 25 bp, Homo sapien
tagtccaggttttcccataacatac

SEQ ID NO: 2372167 - DNA, 25 bp, Homo sapien
aatgctaggcggtctgaacgtttca

SEQ ID NO: 2372168 - DNA, 25 bp, Homo sapien
taaaccaggaatgcaggacacagtg

SEQ ID NO: 2372169 - DNA, 25 bp, Homo sapien
gccaaggcagtaatatcatgtgagg

SEQ ID NO: 2372170 - DNA, 25 bp, Homo sapien
gaacgtttcaaagagtcttcaatgt

SEQ ID NO: 2372171 - DNA, 25 bp, Homo sapien
caagagttggaagtatcagcggagc

SEQ ID NO: 2372172 - DNA, 25 bp, Homo sapien
gggccagccccacgtcgattaataa

SEQ ID NO: 2372173 - DNA, 25 bp, Homo sapien
tactctcaacctgtagtgtagggcc

SEQ ID NO: 2372174 - DNA, 25 bp, Homo sapien
gcccaaatgggacaaaagcagctgc

SEQ ID NO: 2372175 - DNA, 25 bp, Homo sapien
tcattggctcctacagaactgatca

SEQ ID NO: 2372176 - DNA, 25 bp, Homo sapien
actgatcacgcagctcagtttctgg

SEQ ID NO: 2372177 - DNA, 25 bp, Homo sapien
ttctggttgtcctttgactccagat

SEQ ID NO: 2372178 - DNA, 25 bp, Homo sapien
ctttgactccagatagatggcctgg

SEQ ID NO: 2372179 - DNA, 25 bp, Homo sapien
aagagcccgcgctgaagctggccca

SEQ ID NO: 2372180 - DNA, 25 bp, Homo sapien
agagcccgcgctgaagctggcccag

SEQ ID NO: 2372181 - DNA, 25 bp, Homo sapien
gaagagcccgcgctgaagctggccc

SEQ ID NO: 2372182 - DNA, 25 bp, Homo sapien
aagcatccggccacaaaagtgccct

SEQ ID NO: 2372183 - DNA, 25 bp, Homo sapien
tatttctctgagaaggccgagagcc

SEQ ID NO: 2372184 - DNA, 25 bp, Homo sapien
tccggccacaaaagtgccctaaaga

SEQ ID NO: 2372185 - DNA, 25 bp, Homo sapien
cgagagccacgagaattcatcatct

SEQ ID NO: 2372186 - DNA, 25 bp, Homo sapien
gacgctaacagttgctctaacccca

SEQ ID NO: 2372187 - DNA, 25 bp, Homo sapien
cagataatcagcctgtggcacatac

SEQ ID NO: 2372188 - DNA, 25 bp, Homo sapien
caggcaagcttttccatcgctcagc

SEQ ID NO: 2372189 - DNA, 25 bp, Homo sapien
taaaatatggtaccttcagcacatt

SEQ ID NO: 2372190 - DNA, 25 bp, Homo sapien
tgaatattggaacacacccgcagca

SEQ ID NO: 2372191 - DNA, 25 bp, Homo sapien
tccgcatgaatgaaaacaccctggc

SEQ ID NO: 2372192 - DNA, 25 bp, Homo sapien
tgcttcaatgcggaaccccagtggt

SEQ ID NO: 2372193 - DNA, 25 bp, Homo sapien
tcgagactatgactaagggcgccct

SEQ ID NO: 2372194 - DNA, 25 bp, Homo sapien
gtgtaacagtaagcaccgagatttc

SEQ ID NO: 2372195 - DNA, 25 bp, Homo sapien
catgttctggcattaaagtgatttc

SEQ ID NO: 2372196 - DNA, 25 bp, Homo sapien
gaaatggctgcaaatttaccatgtt

SEQ ID NO: 2372197 - DNA, 25 bp, Homo sapien
ctctttggacaaattggtgtaacag

SEQ ID NO: 2372198 - DNA, 25 bp, Homo sapien
caagattgtttttccacccaagatc

SEQ ID NO: 2372199 - DNA, 25 bp, Homo sapien
tacaaaactgagtattagcctgaca

SEQ ID NO: 2372200 - DNA, 25 bp, Homo sapien
ggtcaacaccccagattgctcttta

SEQ ID NO: 2372201 - DNA, 25 bp, Homo sapien
gcacaaacatttaagggtcaacacc

SEQ ID NO: 2372202 - DNA, 25 bp, Homo sapien
cgtaccggtgttgctgactcccagg

SEQ ID NO: 2372203 - DNA, 25 bp, Homo sapien
tgtactcctgcgttgagtatctgct

SEQ ID NO: 2372204 - DNA, 25 bp, Homo sapien
gggcttgctaacctgtactgtactc

SEQ ID NO: 2372205 - DNA, 25 bp, Homo sapien
gagtatctgcttgctccgtaccggt

SEQ ID NO: 2372206 - DNA, 25 bp, Homo sapien
gagatctcacatctgagcctagagg

SEQ ID NO: 2372207 - DNA, 25 bp, Homo sapien
gcctgtgggccataatttgctgacc

SEQ ID NO: 2372208 - DNA, 25 bp, Homo sapien
tctgttctgaaaagaccgtgcatag

SEQ ID NO: 2372209 - DNA, 25 bp, Homo sapien
tacaaaaacagagggtgagccagat

SEQ ID NO: 2372210 - DNA, 25 bp, Homo sapien
tagtatatctgaatggcaacagggt

SEQ ID NO: 2372211 - DNA, 25 bp, Homo sapien
ttgacgaccaaaagaggcttaagtg

SEQ ID NO: 2372212 - DNA, 25 bp, Homo sapien
gataacttagaaccacattaggaaa

SEQ ID NO: 2372213 - DNA, 25 bp, Homo sapien
ctgcctggaccatagtaagtgctca

SEQ ID NO: 2372214 - DNA, 25 bp, Homo sapien
tatctgagataatgcactgtaccac

SEQ ID NO: 2372215 - DNA, 25 bp, Homo sapien
tacagcatggattgagcacaggact

SEQ ID NO: 2372216 - DNA, 25 bp, Homo sapien
tgtatgacattctctcggcctcagt

SEQ ID NO: 2372217 - DNA, 25 bp, Homo sapien
caactgttacaataggtagctggtc

SEQ ID NO: 2372218 - DNA, 25 bp, Homo sapien
cagagcccctttgtgactgcatgac

SEQ ID NO: 2372219 - DNA, 25 bp, Homo sapien
cttgttggtgaccgtggtaagaaag

SEQ ID NO: 2372220 - DNA, 25 bp, Homo sapien
tgactgaacttgggcatccagaatt

SEQ ID NO: 2372221 - DNA, 25 bp, Homo sapien
tcagagcccctttgtgactgcatga

SEQ ID NO: 2372222 - DNA, 25 bp, Homo sapien
gcccagatgtaacaacttcttcaaa

SEQ ID NO: 2372223 - DNA, 25 bp, Homo sapien
ctgcccagatgtaacaacttcttca

SEQ ID NO: 2372224 - DNA, 25 bp, Homo sapien
tgcccagatgtaacaacttcttcaa

SEQ ID NO: 2372225 - DNA, 25 bp, Homo sapien
cagggtcctgaaggcgtctgtttct

SEQ ID NO: 2372226 - DNA, 25 bp, Homo sapien
ccatcagaagagatgtagacagggt

SEQ ID NO: 2372227 - DNA, 25 bp, Homo sapien
cttctaggcattcacccattggttg

SEQ ID NO: 2372228 - DNA, 25 bp, Homo sapien
gaagtcttggcactgacccatcaga

SEQ ID NO: 2372229 - DNA, 25 bp, Homo sapien
taagcaatgacaattgtgatgagtg

SEQ ID NO: 2372230 - DNA, 25 bp, Homo sapien
ttaagcaatgacaattgtgatgagt

SEQ ID NO: 2372231 - DNA, 25 bp, Homo sapien
ccgaaatggtgtctaactgtggata

SEQ ID NO: 2372232 - DNA, 25 bp, Homo sapien
taaagcgtgcgacaaagtaaactac

SEQ ID NO: 2372233 - DNA, 25 bp, Homo sapien
tctccatgtacgctgaaagttgcat

SEQ ID NO: 2372234 - DNA, 25 bp, Homo sapien
gataatgtcacttttccgaaatggt

SEQ ID NO: 2372235 - DNA, 25 bp, Homo sapien
gacattgctagagccccatccagat

SEQ ID NO: 2372236 - DNA, 25 bp, Homo sapien
cttctgtacactccagagcttctgt

SEQ ID NO: 2372237 - DNA, 25 bp, Homo sapien
tgctaaaactttgtacctgtgacct

SEQ ID NO: 2372238 - DNA, 25 bp, Homo sapien
tttcccattgcagagacattgctag

SEQ ID NO: 2372239 - DNA, 25 bp, Homo sapien
gtgggaccaggtgtgctccaaatct

SEQ ID NO: 2372240 - DNA, 25 bp, Homo sapien
tccacctttctagtgggaaccatct

SEQ ID NO: 2372241 - DNA, 25 bp, Homo sapien
cacctttctagtgggaaccatctgc

SEQ ID NO: 2372242 - DNA, 25 bp, Homo sapien
gcatccacctttctagtgggaacca

SEQ ID NO: 2372243 - DNA, 25 bp, Homo sapien
agaaagaccaacctcatcctaacca

SEQ ID NO: 2372244 - DNA, 25 bp, Homo sapien
tactagcctacggtgatcttacaac

SEQ ID NO: 2372245 - DNA, 25 bp, Homo sapien
taaaagatagcttcactgttctctc

SEQ ID NO: 2372246 - DNA, 25 bp, Homo sapien
caacaccttcaattgcaaaatgcat

SEQ ID NO: 2372247 - DNA, 25 bp, Homo sapien
ggtataagacaaatccagatggtac

SEQ ID NO: 2372248 - DNA, 25 bp, Homo sapien
cacataatcctggtggtataagaca

SEQ ID NO: 2372249 - DNA, 25 bp, Homo sapien
gcactatgtatttcacataatcctg

SEQ ID NO: 2372250 - DNA, 25 bp, Homo sapien
caaagggcactatgtatttcacata

SEQ ID NO: 2372251 - DNA, 25 bp, Homo sapien
gggcatataggctgtctctagttct

SEQ ID NO: 2372252 - DNA, 25 bp, Homo sapien
tagttctctggtaccgggctctggg

SEQ ID NO: 2372253 - DNA, 25 bp, Homo sapien
cagggtaagcaggtgtaatattagc

SEQ ID NO: 2372254 - DNA, 25 bp, Homo sapien
tcaacatggtcggtcaagaggcaga

SEQ ID NO: 2372255 - DNA, 25 bp, Homo sapien
tataagtttctgcactttctggttg

SEQ ID NO: 2372256 - DNA, 25 bp, Homo sapien
cttataagtttctgcactttctggt

SEQ ID NO: 2372257 - DNA, 25 bp, Homo sapien
ttctggttgagaaatgctacacatg

SEQ ID NO: 2372258 - DNA, 25 bp, Homo sapien
gttgagaaatgctacacatggccat

SEQ ID NO: 2372259 - DNA, 25 bp, Homo sapien
tgagagctcatgaggagggacagcc

SEQ ID NO: 2372260 - DNA, 25 bp, Homo sapien
ctcatgaggagggacagccaattct

SEQ ID NO: 2372261 - DNA, 25 bp, Homo sapien
tgaggagggacagccaattctcctg

SEQ ID NO: 2372262 - DNA, 25 bp, Homo sapien
gagctcatgaggagggacagccaat

SEQ ID NO: 2372263 - DNA, 25 bp, Homo sapien
ttatctggtcatttgctagagatga

SEQ ID NO: 2372264 - DNA, 25 bp, Homo sapien
atttatctggtcatttgctagagat

SEQ ID NO: 2372265 - DNA, 25 bp, Homo sapien
tctgtgtgaatccattggtttgggc

SEQ ID NO: 2372266 - DNA, 25 bp, Homo sapien
atctggtcatttgctagagatgatt

SEQ ID NO: 2372267 - DNA, 25 bp, Homo sapien
tcagcaaacgcatccacaagtcctt

SEQ ID NO: 2372268 - DNA, 25 bp, Homo sapien
taatggcttcaatctgccagttgcc

SEQ ID NO: 2372269 - DNA, 25 bp, Homo sapien
ttcaatctgccagttgccctctctg

SEQ ID NO: 2372270 - DNA, 25 bp, Homo sapien
tataaatccactgtcagcaaacgca

SEQ ID NO: 2372271 - DNA, 25 bp, Homo sapien
caggaggaccacactgcactggtgc

SEQ ID NO: 2372272 - DNA, 25 bp, Homo sapien
tctagcggtgtacatagtttatcca

SEQ ID NO: 2372273 - DNA, 25 bp, Homo sapien
tttctccaacagcagtaaatctatg

SEQ ID NO: 2372274 - DNA, 25 bp, Homo sapien
gggaccacattgttgcagcactttg

SEQ ID NO: 2372275 - DNA, 25 bp, Homo sapien
caacctcttcctcccaagttcgaga

SEQ ID NO: 2372276 - DNA, 25 bp, Homo sapien
aacctcttcctcccaagttcgagat

SEQ ID NO: 2372277 - DNA, 25 bp, Homo sapien
acctcttcctcccaagttcgagatt

SEQ ID NO: 2372278 - DNA, 25 bp, Homo sapien
gcaacctcttcctcccaagttcgag

SEQ ID NO: 2372279 - DNA, 25 bp, Homo sapien
ccgcggaaaccatagcaacgggcag

SEQ ID NO: 2372280 - DNA, 25 bp, Homo sapien
gtccctctcccgttgcctggtaaca

SEQ ID NO: 2372281 - DNA, 25 bp, Homo sapien
gcagccggaagatgcggccattcct

SEQ ID NO: 2372282 - DNA, 25 bp, Homo sapien
ttgcctggtaacagccctccccttc

SEQ ID NO: 2372283 - DNA, 25 bp, Homo sapien
tagctcaggtatcctctgaactctt

SEQ ID NO: 2372284 - DNA, 25 bp, Homo sapien
tcatggtacacactttagctcaggt

SEQ ID NO: 2372285 - DNA, 25 bp, Homo sapien
ggtacacactttagctcaggtatcc

SEQ ID NO: 2372286 - DNA, 25 bp, Homo sapien
agctcaggtatcctctgaactcttc

SEQ ID NO: 2372287 - DNA, 25 bp, Homo sapien
ccactcagatggaggcaactgctgc

SEQ ID NO: 2372288 - DNA, 25 bp, Homo sapien
caggaaaaactgcagagctgccggg

SEQ ID NO: 2372289 - DNA, 25 bp, Homo sapien
ccacaggagactcttcttgtatttc

SEQ ID NO: 2372290 - DNA, 25 bp, Homo sapien
ggcttctccacaggagactcttctt

SEQ ID NO: 2372291 - DNA, 25 bp, Homo sapien
agactcttcttgtatttcacaggaa

SEQ ID NO: 2372292 - DNA, 25 bp, Homo sapien
aagattagatgagatcgggcacgtt

SEQ ID NO: 2372293 - DNA, 25 bp, Homo sapien
cttccaagattagatgagatcgggc

SEQ ID NO: 2372294 - DNA, 25 bp, Homo sapien
caagattagatgagatcgggcacgt

SEQ ID NO: 2372295 - DNA, 25 bp, Homo sapien
tccaagattagatgagatcgggcac

SEQ ID NO: 2372296 - DNA, 25 bp, Homo sapien
agcttgtggcatattgagctgccat

SEQ ID NO: 2372297 - DNA, 25 bp, Homo sapien
tccatgatgctgagacaacagctcc

SEQ ID NO: 2372298 - DNA, 25 bp, Homo sapien
ccctcaaggctttccctgtagcttg

SEQ ID NO: 2372299 - DNA, 25 bp, Homo sapien
gctgagacaacagctcccctcaagg

SEQ ID NO: 2372300 - DNA, 25 bp, Homo sapien
gacaacagacaggaaaacgatcagc

SEQ ID NO: 2372301 - DNA, 25 bp, Homo sapien
gatcagctcaccaacaacaatgtca

SEQ ID NO: 2372302 - DNA, 25 bp, Homo sapien
tgtcatgaggaaacgccctcttctc

SEQ ID NO: 2372303 - DNA, 25 bp, Homo sapien
taactcctagcacggagatgctccc

SEQ ID NO: 2372304 - DNA, 25 bp, Homo sapien
tgcctcatccagatttatcctactt

SEQ ID NO: 2372305 - DNA, 25 bp, Homo sapien
tttcaaatgccccatgctgcagtgt

SEQ ID NO: 2372306 - DNA, 25 bp, Homo sapien
gatttatcctacttccaaagaccac

SEQ ID NO: 2372307 - DNA, 25 bp, Homo sapien
caggaataacatacgcatgcatttc

SEQ ID NO: 2372308 - DNA, 25 bp, Homo sapien
tcacgtagaaagctgggtttgagaa

SEQ ID NO: 2372309 - DNA, 25 bp, Homo sapien
gaataatttcacgtagaaagctggg

SEQ ID NO: 2372310 - DNA, 25 bp, Homo sapien
ttttgaataatttcacgtagaaagc

SEQ ID NO: 2372311 - DNA, 25 bp, Homo sapien
aatttcacgtagaaagctgggtttg

SEQ ID NO: 2372312 - DNA, 25 bp, Homo sapien
ctctatggagaggcccttatggcaa

SEQ ID NO: 2372313 - DNA, 25 bp, Homo sapien
gcagccagcatactgtgataaacta

SEQ ID NO: 2372314 - DNA, 25 bp, Homo sapien
cagccagcatactgtgataaactaa

SEQ ID NO: 2372315 - DNA, 25 bp, Homo sapien
tgttgccaagctgctctatggagag

SEQ ID NO: 2372316 - DNA, 25 bp, Homo sapien
ggaaatcacagagggttctctctcc

SEQ ID NO: 2372317 - DNA, 25 bp, Homo sapien
tcagggtctactctggaaatcacag

SEQ ID NO: 2372318 - DNA, 25 bp, Homo sapien
tccccctcaaaaaggctagtgccag

SEQ ID NO: 2372319 - DNA, 25 bp, Homo sapien
atgagatcagggtctactctggaaa

SEQ ID NO: 2372320 - DNA, 25 bp, Homo sapien
tacctcatgatggaaatgttaggca

SEQ ID NO: 2372321 - DNA, 25 bp, Homo sapien
gcatagccatgcttcatcccaaggg

SEQ ID NO: 2372322 - DNA, 25 bp, Homo sapien
agatattacagagtttgctcccttc

SEQ ID NO: 2372323 - DNA, 25 bp, Homo sapien
cccaagggggtacctcatgatggaa

SEQ ID NO: 2372324 - DNA, 25 bp, Homo sapien
cggacaagtcactatcttctaggac

SEQ ID NO: 2372325 - DNA, 25 bp, Homo sapien
cactatcttctaggaccaaggctca

SEQ ID NO: 2372326 - DNA, 25 bp, Homo sapien
ggttgctcccggacaagtcactatc

SEQ ID NO: 2372327 - DNA, 25 bp, Homo sapien
ctgctctttaggttgctcccggaca

SEQ ID NO: 2372328 - DNA, 25 bp, Homo sapien
gcctggcacaccgtgaacgttctat

SEQ ID NO: 2372329 - DNA, 25 bp, Homo sapien
taggccgtaacatattgcagaaaga

SEQ ID NO: 2372330 - DNA, 25 bp, Homo sapien
gacacagccgactagaatgaaacac

SEQ ID NO: 2372331 - DNA, 25 bp, Homo sapien
gaattttctggtgcataggccgtaa

SEQ ID NO: 2372332 - DNA, 25 bp, Homo sapien
cgacaaggtcattttctctccccaa

SEQ ID NO: 2372333 - DNA, 25 bp, Homo sapien
tggatgatgtaggtgaagatccccg

SEQ ID NO: 2372334 - DNA, 25 bp, Homo sapien
tgaagatccccgacaaggtcatttt

SEQ ID NO: 2372335 - DNA, 25 bp, Homo sapien
tccaggagtggatgatgtaggtgaa

SEQ ID NO: 2372336 - DNA, 25 bp, Homo sapien
gcctgatacccaagacaacttcatg

SEQ ID NO: 2372337 - DNA, 25 bp, Homo sapien
tcttgatctggtaccagcctgatac

SEQ ID NO: 2372338 - DNA, 25 bp, Homo sapien
aaaaagatgagtgacctttctagcc

SEQ ID NO: 2372339 - DNA, 25 bp, Homo sapien
gacaacttcatggatactgccatct

SEQ ID NO: 2372340 - DNA, 25 bp, Homo sapien
taagccccaagatcatgtgaaggag

SEQ ID NO: 2372341 - DNA, 25 bp, Homo sapien
taaatttcctctagcaccgtaggga

SEQ ID NO: 2372342 - DNA, 25 bp, Homo sapien
gagaggctacaatcctgtcgggaaa

SEQ ID NO: 2372343 - DNA, 25 bp, Homo sapien
tctccattttggacgtcggcccagg

SEQ ID NO: 2372344 - DNA, 25 bp, Homo sapien
ggcaaaagtcttcaggacactaatg

SEQ ID NO: 2372345 - DNA, 25 bp, Homo sapien
ttctcaagggtagaaagctggcact

SEQ ID NO: 2372346 - DNA, 25 bp, Homo sapien
cttctgaactaatgagaaacaggca

SEQ ID NO: 2372347 - DNA, 25 bp, Homo sapien
tccaagggtttgctgctcatctgtc

SEQ ID NO: 2372348 - DNA, 25 bp, Homo sapien
ccaggagagaagaggcgacggggtc

SEQ ID NO: 2372349 - DNA, 25 bp, Homo sapien
gcaccaggagagaagaggcgacggg

SEQ ID NO: 2372350 - DNA, 25 bp, Homo sapien
caggagagaagaggcgacggggtcg

SEQ ID NO: 2372351 - DNA, 25 bp, Homo sapien
gcagcaccaggagagaagaggcgac

SEQ ID NO: 2372352 - DNA, 25 bp, Homo sapien
aaaggaggctcgtccgctgggcttt

SEQ ID NO: 2372353 - DNA, 25 bp, Homo sapien
tgggagagatcggagttcagggcgg

SEQ ID NO: 2372354 - DNA, 25 bp, Homo sapien
caaagtgctgaaacgtggattccaa

SEQ ID NO: 2372355 - DNA, 25 bp, Homo sapien
ggctctgtccgggtgaaacccagag

SEQ ID NO: 2372356 - DNA, 25 bp, Homo sapien
aaaaagctgcttctcgccttgctga

SEQ ID NO: 2372357 - DNA, 25 bp, Homo sapien
tggccaccgctttgaaggttcctcg

SEQ ID NO: 2372358 - DNA, 25 bp, Homo sapien
tactggcgacaatgatgctctcggg

SEQ ID NO: 2372359 - DNA, 25 bp, Homo sapien
cttgcgggccgtgatactggcgaca

SEQ ID NO: 2372360 - DNA, 25 bp, Homo sapien
ctgtatgatcctcaataagacagtg

SEQ ID NO: 2372361 - DNA, 25 bp, Homo sapien
tgatcctcaataagacagtgaagag

SEQ ID NO: 2372362 - DNA, 25 bp, Homo sapien
ataatttcccatacgtcttccacct

SEQ ID NO: 2372363 - DNA, 25 bp, Homo sapien
cagacataatttcccatacgtcttc

SEQ ID NO: 2372364 - DNA, 25 bp, Homo sapien
actgctaactgatctcttggcaccg

SEQ ID NO: 2372365 - DNA, 25 bp, Homo sapien
acaaactgctaactgatctcttggc

SEQ ID NO: 2372366 - DNA, 25 bp, Homo sapien
tgctaactgatctcttggcaccgag

SEQ ID NO: 2372367 - DNA, 25 bp, Homo sapien
ctaactgatctcttggcaccgaggg

SEQ ID NO: 2372368 - DNA, 25 bp, Homo sapien
ttcctcctctgcaaagtgtcttatc

SEQ ID NO: 2372369 - DNA, 25 bp, Homo sapien
tttcctcctctgcaaagtgtcttat

SEQ ID NO: 2372370 - DNA, 25 bp, Homo sapien
ttttcctcctctgcaaagtgtctta

SEQ ID NO: 2372371 - DNA, 25 bp, Homo sapien
tttttcctcctctgcaaagtgtctt

SEQ ID NO: 2372372 - DNA, 25 bp, Homo sapien
atgtcatgtctcacagcgtgggtgg

SEQ ID NO: 2372373 - DNA, 25 bp, Homo sapien
gggtcaccagagagaactggtgtct

SEQ ID NO: 2372374 - DNA, 25 bp, Homo sapien
gagggggcgggatgtcatgtctcac

SEQ ID NO: 2372375 - DNA, 25 bp, Homo sapien
gggtggggtcaccagagagaactgg

SEQ ID NO: 2372376 - DNA, 25 bp, Homo sapien
tgctctgctaggcacaggctgggtg

SEQ ID NO: 2372377 - DNA, 25 bp, Homo sapien
tgtcaggatacccagacgagtgggt

SEQ ID NO: 2372378 - DNA, 25 bp, Homo sapien
catcttgtcaggatacccagacgag

SEQ ID NO: 2372379 - DNA, 25 bp, Homo sapien
atggacatcttgtcaggatacccag

SEQ ID NO: 2372380 - DNA, 25 bp, Homo sapien
cactggccaaacaaaagccctttat

SEQ ID NO: 2372381 - DNA, 25 bp, Homo sapien
ctgcaccactgctcagatacctgcc

SEQ ID NO: 2372382 - DNA, 25 bp, Homo sapien
tatcagctggaagttctgaaatctg

SEQ ID NO: 2372383 - DNA, 25 bp, Homo sapien
gatacctgccccttccggatgtggg

SEQ ID NO: 2372384 - DNA, 25 bp, Homo sapien
ttgaaaggtgctataatgatgatgg

SEQ ID NO: 2372385 - DNA, 25 bp, Homo sapien
aaaggtgctataatgatgatggcct

SEQ ID NO: 2372386 - DNA, 25 bp, Homo sapien
cattgaaaggtgctataatgatgat

SEQ ID NO: 2372387 - DNA, 25 bp, Homo sapien
ctataatgatgatggcctctcgttc

SEQ ID NO: 2372388 - DNA, 25 bp, Homo sapien
tgccctctcatcctgacagtagact

SEQ ID NO: 2372389 - DNA, 25 bp, Homo sapien
cagtagactaagtgccccagtgagg

SEQ ID NO: 2372390 - DNA, 25 bp, Homo sapien
tcctgacagtagactaagtgcccca

SEQ ID NO: 2372391 - DNA, 25 bp, Homo sapien
tctcatcctgacagtagactaagtg

SEQ ID NO: 2372392 - DNA, 25 bp, Homo sapien
gctgcaggcatgtgttatagcaccc

SEQ ID NO: 2372393 - DNA, 25 bp, Homo sapien
ctgcaggcatgtgttatagcaccca

SEQ ID NO: 2372394 - DNA, 25 bp, Homo sapien
ggctgcaggcatgtgttatagcacc

SEQ ID NO: 2372395 - DNA, 25 bp, Homo sapien
ctgcacctaactgggtcagcttggg

SEQ ID NO: 2372396 - DNA, 25 bp, Homo sapien
gaatggatgaatagagaaactgctg

SEQ ID NO: 2372397 - DNA, 25 bp, Homo sapien
taaatgcatgataaacggatgggtg

SEQ ID NO: 2372398 - DNA, 25 bp, Homo sapien
catgattgcataatggctgcaccta

SEQ ID NO: 2372399 - DNA, 25 bp, Homo sapien
cccactgtcagttgaatgaaataaa

SEQ ID NO: 2372400 - DNA, 25 bp, Homo sapien
ttggacccacaatgttttacaggtg

SEQ ID NO: 2372401 - DNA, 25 bp, Homo sapien
ctaggactggaagatcaggtttaac

SEQ ID NO: 2372402 - DNA, 25 bp, Homo sapien
taatttgagctggtagttagttccc

SEQ ID NO: 2372403 - DNA, 25 bp, Homo sapien
gccaaatgatcccatgactatgaac

SEQ ID NO: 2372404 - DNA, 25 bp, Homo sapien
cccattggccaaatgatcccatgac

SEQ ID NO: 2372405 - DNA, 25 bp, Homo sapien
ccaggttcccccattggccaaatga

SEQ ID NO: 2372406 - DNA, 25 bp, Homo sapien
ttggccaaatgatcccatgactatg

SEQ ID NO: 2372407 - DNA, 25 bp, Homo sapien
tgggtccctgtatgccacgagaagc

SEQ ID NO: 2372408 - DNA, 25 bp, Homo sapien
aaagctctccttcaaccaacatagg

SEQ ID NO: 2372409 - DNA, 25 bp, Homo sapien
tccagcagagacagtcaagagtagg

SEQ ID NO: 2372410 - DNA, 25 bp, Homo sapien
aagtcatgccataagggtgggtccc

SEQ ID NO: 2372411 - DNA, 25 bp, Homo sapien
tgatgttgatcaagttactttctct

SEQ ID NO: 2372412 - DNA, 25 bp, Homo sapien
tatcgtcatgtttaacccctcaggg

SEQ ID NO: 2372413 - DNA, 25 bp, Homo sapien
tggtctaatgggtaagaacacaggc

SEQ ID NO: 2372414 - DNA, 25 bp, Homo sapien
gggctaagcacttcgtctatcgtca

SEQ ID NO: 2372415 - DNA, 25 bp, Homo sapien
gactaatggcatggcaggcaactgg

SEQ ID NO: 2372416 - DNA, 25 bp, Homo sapien
gcaggaagtaaagtgccttctcagt

SEQ ID NO: 2372417 - DNA, 25 bp, Homo sapien
cacaggaactgtgatgctgctagca

SEQ ID NO: 2372418 - DNA, 25 bp, Homo sapien
tctctgggtgaaccagttgggtgcc

SEQ ID NO: 2372419 - DNA, 25 bp, Homo sapien
cagaaacaccgaaatctgaagccac

SEQ ID NO: 2372420 - DNA, 25 bp, Homo sapien
gctgctagcagcctgttttaatctt

SEQ ID NO: 2372421 - DNA, 25 bp, Homo sapien
ttgatgtaaaacacctggtgaaatt

SEQ ID NO: 2372422 - DNA, 25 bp, Homo sapien
gttgatgtaaaacacctggtgaaat

SEQ ID NO: 2372423 - DNA, 25 bp, Homo sapien
ggttgatgtaaaacacctggtgaaa

SEQ ID NO: 2372424 - DNA, 25 bp, Homo sapien
tgatgtaaaacacctggtgaaattt

SEQ ID NO: 2372425 - DNA, 25 bp, Homo sapien
caaagcatctaagttcccatgaagg

SEQ ID NO: 2372426 - DNA, 25 bp, Homo sapien
gcttcaaagccagtagtttatgaga

SEQ ID NO: 2372427 - DNA, 25 bp, Homo sapien
gcccgtggcaggatgttcatgagca

SEQ ID NO: 2372428 - DNA, 25 bp, Homo sapien
gagccctactcctcaaataaaatag

SEQ ID NO: 2372429 - DNA, 25 bp, Homo sapien
ggcaataatgaccactgggggtagt

SEQ ID NO: 2372430 - DNA, 25 bp, Homo sapien
aataatgaccactgggggtagttgg

SEQ ID NO: 2372431 - DNA, 25 bp, Homo sapien
cactgggggtagttggtgcacactg

SEQ ID NO: 2372432 - DNA, 25 bp, Homo sapien
ctcctcaaaatgcacatctggcaat

SEQ ID NO: 2372433 - DNA, 25 bp, Homo sapien
taacattgcagtcaggaagttcttc

SEQ ID NO: 2372434 - DNA, 25 bp, Homo sapien
cagctccagggtacatgaaatctat

SEQ ID NO: 2372435 - DNA, 25 bp, Homo sapien
cctcagtttgagacatatgtgacca

SEQ ID NO: 2372436 - DNA, 25 bp, Homo sapien
tatatgactagaaactcagctccag

SEQ ID NO: 2372437 - DNA, 25 bp, Homo sapien
tactccttgcaccatatattccagc

SEQ ID NO: 2372438 - DNA, 25 bp, Homo sapien
gcaggcctggattaacaaacctcca

SEQ ID NO: 2372439 - DNA, 25 bp, Homo sapien
tatgagcagtcttatcttgacaccc

SEQ ID NO: 2372440 - DNA, 25 bp, Homo sapien
tacatactggtgtttgcactgcccg

SEQ ID NO: 2372441 - DNA, 25 bp, Homo sapien
tgattttggcatattcggcaagttc

SEQ ID NO: 2372442 - DNA, 25 bp, Homo sapien
gcatattcggcaagttccatcacca

SEQ ID NO: 2372443 - DNA, 25 bp, Homo sapien
tattcggcaagttccatcaccatca

SEQ ID NO: 2372444 - DNA, 25 bp, Homo sapien
ttttggcatattcggcaagttccat

SEQ ID NO: 2372445 - DNA, 25 bp, Homo sapien
catgtctgcatttaatccaaggctc

SEQ ID NO: 2372446 - DNA, 25 bp, Homo sapien
tctgcatttaatccaaggctcccat

SEQ ID NO: 2372447 - DNA, 25 bp, Homo sapien
tgccatgtctgcatttaatccaagg

SEQ ID NO: 2372448 - DNA, 25 bp, Homo sapien
cctgccatgtctgcatttaatccaa

SEQ ID NO: 2372449 - DNA, 25 bp, Homo sapien
aatattctctgctcacggcgacctc

SEQ ID NO: 2372450 - DNA, 25 bp, Homo sapien
gcagtggaatattctctgctcacgg

SEQ ID NO: 2372451 - DNA, 25 bp, Homo sapien
gactgcagtggaatattctctgctc

SEQ ID NO: 2372452 - DNA, 25 bp, Homo sapien
tggaatattctctgctcacggcgac

SEQ ID NO: 2372453 - DNA, 25 bp, Homo sapien
ctgaggacagaacccccttgtagca

SEQ ID NO: 2372454 - DNA, 25 bp, Homo sapien
atgaaaaaacgtggagcatgaatcc

SEQ ID NO: 2372455 - DNA, 25 bp, Homo sapien
gaaaaaacgtggagcatgaatccag

SEQ ID NO: 2372456 - DNA, 25 bp, Homo sapien
gaggacagaacccccttgtagcacc

SEQ ID NO: 2372457 - DNA, 25 bp, Homo sapien
ggcagcaggaataccaccagcaaat

SEQ ID NO: 2372458 - DNA, 25 bp, Homo sapien
tggctcccgtaataacagtatgtgt

SEQ ID NO: 2372459 - DNA, 25 bp, Homo sapien
ataacacgtcggatctaactgggca

SEQ ID NO: 2372460 - DNA, 25 bp, Homo sapien
gggaggatcataacagctttctaca

SEQ ID NO: 2372461 - DNA, 25 bp, Homo sapien
gatagttggaatccaaacccagact

SEQ ID NO: 2372462 - DNA, 25 bp, Homo sapien
ggcccactaacaacccaaaatgcag

SEQ ID NO: 2372463 - DNA, 25 bp, Homo sapien
gagatgtctccattaagctctagat

SEQ ID NO: 2372464 - DNA, 25 bp, Homo sapien
tgtccttagttaaatgctctccctc

SEQ ID NO: 2372465 - DNA, 25 bp, Homo sapien
gcttccttacacctgtgaaatagaa

SEQ ID NO: 2372466 - DNA, 25 bp, Homo sapien
tttatgttccagactgtgctgcttc

SEQ ID NO: 2372467 - DNA, 25 bp, Homo sapien
tttttatgttccagactgtgctgct

SEQ ID NO: 2372468 - DNA, 25 bp, Homo sapien
accagagtccacacgtttttatgtt

SEQ ID NO: 2372469 - DNA, 25 bp, Homo sapien
agaggctgactacattgggattttg

SEQ ID NO: 2372470 - DNA, 25 bp, Homo sapien
gagagtggtacttgccacttggaaa

SEQ ID NO: 2372471 - DNA, 25 bp, Homo sapien
ttttgagagtggtacttgccacttg

SEQ ID NO: 2372472 - DNA, 25 bp, Homo sapien
aaatccaatagaggctgactacatt

SEQ ID NO: 2372473 - DNA, 25 bp, Homo sapien
tgtaggtcaagaatcagcccagaga

SEQ ID NO: 2372474 - DNA, 25 bp, Homo sapien
taatatgctagactctgtaccagag

SEQ ID NO: 2372475 - DNA, 25 bp, Homo sapien
gggacaactcccatcagtctcaggg

SEQ ID NO: 2372476 - DNA, 25 bp, Homo sapien
ctataggaagagcaaggtgaccaac

SEQ ID NO: 2372477 - DNA, 25 bp, Homo sapien
tctgtgagtgtcttccacattcttt

SEQ ID NO: 2372478 - DNA, 25 bp, Homo sapien
acattctttggcctcatagattttc

SEQ ID NO: 2372479 - DNA, 25 bp, Homo sapien
ctttggcctcatagattttctcttc

SEQ ID NO: 2372480 - DNA, 25 bp, Homo sapien
cttctgtgagtgtcttccacattct

SEQ ID NO: 2372481 - DNA, 25 bp, Homo sapien
ctcctttaggcttattccgtaggct

SEQ ID NO: 2372482 - DNA, 25 bp, Homo sapien
ctttaggcttattccgtaggctcca

SEQ ID NO: 2372483 - DNA, 25 bp, Homo sapien
taggcttattccgtaggctccatcc

SEQ ID NO: 2372484 - DNA, 25 bp, Homo sapien
tttaggcttattccgtaggctccat

SEQ ID NO: 2372485 - DNA, 25 bp, Homo sapien
ctttcctcaaacagccaaggcaagg

SEQ ID NO: 2372486 - DNA, 25 bp, Homo sapien
tcctcaaacagccaaggcaagggat

SEQ ID NO: 2372487 - DNA, 25 bp, Homo sapien
tttcctcaaacagccaaggcaaggg

SEQ ID NO: 2372488 - DNA, 25 bp, Homo sapien
cctcaaacagccaaggcaagggatc

SEQ ID NO: 2372489 - DNA, 25 bp, Homo sapien
atctttgcaggtccttaagaaaaat

SEQ ID NO: 2372490 - DNA, 25 bp, Homo sapien
ttgcatctttgcaggtccttaagaa

SEQ ID NO: 2372491 - DNA, 25 bp, Homo sapien
gccttgcatctttgcaggtccttaa

SEQ ID NO: 2372492 - DNA, 25 bp, Homo sapien
ccagccttgcatctttgcaggtcct

SEQ ID NO: 2372493 - DNA, 25 bp, Homo sapien
gaatactgaggcgtcgtctatgagt

SEQ ID NO: 2372494 - DNA, 25 bp, Homo sapien
gaggcgtcgtctatgagtcccacgt

SEQ ID NO: 2372495 - DNA, 25 bp, Homo sapien
gagtcccacgtctttatgggagttc

SEQ ID NO: 2372496 - DNA, 25 bp, Homo sapien
gctgcagagaatactgaggcgtcgt

SEQ ID NO: 2372497 - DNA, 25 bp, Homo sapien
tctggtggcacccagttcccgacag

SEQ ID NO: 2372498 - DNA, 25 bp, Homo sapien
agttcccgacaggtcttgtctctct

SEQ ID NO: 2372499 - DNA, 25 bp, Homo sapien
cctgagctgggacaacggggttatt

SEQ ID NO: 2372500 - DNA, 25 bp, Homo sapien
cccagcttttctgagggtccatcct

SEQ ID NO: 2372501 - DNA, 25 bp, Homo sapien
tcaaagaccacaggctgataaaacc

SEQ ID NO: 2372502 - DNA, 25 bp, Homo sapien
catcatcaaagaccacaggctgata

SEQ ID NO: 2372503 - DNA, 25 bp, Homo sapien
gaccacaggctgataaaaccacaaa

SEQ ID NO: 2372504 - DNA, 25 bp, Homo sapien
gatgatcagtgattacaaacttctc

SEQ ID NO: 2372505 - DNA, 25 bp, Homo sapien
aggtggtggtgtcaagtctttgtca

SEQ ID NO: 2372506 - DNA, 25 bp, Homo sapien
tgtcaagtctttgtcatgagaggca

SEQ ID NO: 2372507 - DNA, 25 bp, Homo sapien
gaaggtggtggtgtcaagtctttgt

SEQ ID NO: 2372508 - DNA, 25 bp, Homo sapien
ggtgtcaagtctttgtcatgagagg

SEQ ID NO: 2372509 - DNA, 25 bp, Homo sapien
tccttctcttcttccgagtggattt

SEQ ID NO: 2372510 - DNA, 25 bp, Homo sapien
ccttctcttcttccgagtggatttc

SEQ ID NO: 2372511 - DNA, 25 bp, Homo sapien
tctcttcttccgagtggatttcttc

SEQ ID NO: 2372512 - DNA, 25 bp, Homo sapien
cttcttccgagtggatttcttcttt

SEQ ID NO: 2372513 - DNA, 25 bp, Homo sapien
gcgtcgcttgtgtttcttggaactt

SEQ ID NO: 2372514 - DNA, 25 bp, Homo sapien
tttttcttgacaggcgatgggctat

SEQ ID NO: 2372515 - DNA, 25 bp, Homo sapien
ctgcgtcgcttgtgtttcttggaac

SEQ ID NO: 2372516 - DNA, 25 bp, Homo sapien
cttgacaggcgatgggctataggat

SEQ ID NO: 2372517 - DNA, 25 bp, Homo sapien
ctggggaggtcttgtttgcagagaa

SEQ ID NO: 2372518 - DNA, 25 bp, Homo sapien
ttcattctgttgttaattgcacaag

SEQ ID NO: 2372519 - DNA, 25 bp, Homo sapien
cattctgttgttaattgcacaagta

SEQ ID NO: 2372520 - DNA, 25 bp, Homo sapien
tctcattcattctgttgttaattgc

SEQ ID NO: 2372521 - DNA, 25 bp, Homo sapien
cattcattctgttgttaattgcaca

SEQ ID NO: 2372522 - DNA, 25 bp, Homo sapien
aaacaagaaatggtcaattaattga

SEQ ID NO: 2372523 - DNA, 25 bp, Homo sapien
aacaagaaatggtcaattaattgaa

SEQ ID NO: 2372524 - DNA, 25 bp, Homo sapien
ctaaacaagaaatggtcaattaatt

SEQ ID NO: 2372525 - DNA, 25 bp, Homo sapien
cttgtgcctcttctcatctcttctt

SEQ ID NO: 2372526 - DNA, 25 bp, Homo sapien
tgtttcttgtgcctcttctcatctc

SEQ ID NO: 2372527 - DNA, 25 bp, Homo sapien
ttcttgtgcctcttctcatctcttc

SEQ ID NO: 2372528 - DNA, 25 bp, Homo sapien
gtttcttgtgcctcttctcatctct

SEQ ID NO: 2372529 - DNA, 25 bp, Homo sapien
actccgagctctgggaccgcgaggg

SEQ ID NO: 2372530 - DNA, 25 bp, Homo sapien
agactttcggggccggcttcgagat

SEQ ID NO: 2372531 - DNA, 25 bp, Homo sapien
tctcacagcttgaggggcgggactc

SEQ ID NO: 2372532 - DNA, 25 bp, Homo sapien
tggcggtggcggtgagactttcggg

SEQ ID NO: 2372533 - DNA, 25 bp, Homo sapien
ggtcttggagcagcggcgggagtgc

SEQ ID NO: 2372534 - DNA, 25 bp, Homo sapien
tgccttcggcgggacttctgccctt

SEQ ID NO: 2372535 - DNA, 25 bp, Homo sapien
ctgacaggtagccaagcatctggag

SEQ ID NO: 2372536 - DNA, 25 bp, Homo sapien
gggcctcagggctgtccttgcagag

SEQ ID NO: 2372537 - DNA, 25 bp, Homo sapien
taaagaattggcctagcacctggtg

SEQ ID NO: 2372538 - DNA, 25 bp, Homo sapien
caccgggacccagttagatacatta

SEQ ID NO: 2372539 - DNA, 25 bp, Homo sapien
tatgaggcccaaagacgtgaaatgg

SEQ ID NO: 2372540 - DNA, 25 bp, Homo sapien
ctatcagggtaagctttcaaggcac

SEQ ID NO: 2372541 - DNA, 25 bp, Homo sapien
aagaatggattcattgacctggtag

SEQ ID NO: 2372542 - DNA, 25 bp, Homo sapien
tggattcattgacctggtaggagtt

SEQ ID NO: 2372543 - DNA, 25 bp, Homo sapien
gattcattgacctggtaggagttca

SEQ ID NO: 2372544 - DNA, 25 bp, Homo sapien
gaatggattcattgacctggtagga

SEQ ID NO: 2372545 - DNA, 25 bp, Homo sapien
gaaccagtgtagaacatgcacccca

SEQ ID NO: 2372546 - DNA, 25 bp, Homo sapien
tcaacactggaaaaccggtgagccg

SEQ ID NO: 2372547 - DNA, 25 bp, Homo sapien
gtaataatgccctccaggtacccag

SEQ ID NO: 2372548 - DNA, 25 bp, Homo sapien
cctgcctggcaagaatcagctgaga

SEQ ID NO: 2372549 - DNA, 25 bp, Homo sapien
gctgggatgacacagttaagtttga

SEQ ID NO: 2372550 - DNA, 25 bp, Homo sapien
gggatgacacagttaagtttgatgc

SEQ ID NO: 2372551 - DNA, 25 bp, Homo sapien
ggctgggatgacacagttaagtttg

SEQ ID NO: 2372552 - DNA, 25 bp, Homo sapien
gatgacacagttaagtttgatgctg

SEQ ID NO: 2372553 - DNA, 25 bp, Homo sapien
aagagcgggcaacgtgagtccatca

SEQ ID NO: 2372554 - DNA, 25 bp, Homo sapien
gaaacccttgtggaacatgccagtg

SEQ ID NO: 2372555 - DNA, 25 bp, Homo sapien
cccaagttggagcaggaaacccttg

SEQ ID NO: 2372556 - DNA, 25 bp, Homo sapien
ccagtggcagctagagtattgcatc

SEQ ID NO: 2372557 - DNA, 25 bp, Homo sapien
aagcaaaaagacccgttggacactg

SEQ ID NO: 2372558 - DNA, 25 bp, Homo sapien
tgaaagcaaaaagacccgttggaca

SEQ ID NO: 2372559 - DNA, 25 bp, Homo sapien
taaagaggtcagcagcagaccccga

SEQ ID NO: 2372560 - DNA, 25 bp, Homo sapien
ggtaaagaggtcagcagcagacccc

SEQ ID NO: 2372561 - DNA, 25 bp, Homo sapien
gtcagcagcagaccccgacccagtg

SEQ ID NO: 2372562 - DNA, 25 bp, Homo sapien
aagaggtcagcagcagaccccgacc

SEQ ID NO: 2372563 - DNA, 25 bp, Homo sapien
gaacgtcctcgcgaggtggtgagcg

SEQ ID NO: 2372564 - DNA, 25 bp, Homo sapien
cgtcctcgcgaggtggtgagcgggc

SEQ ID NO: 2372565 - DNA, 25 bp, Homo sapien
ctgggaacgtcctcgcgaggtggtg

SEQ ID NO: 2372566 - DNA, 25 bp, Homo sapien
tgggaacgtcctcgcgaggtggtga

SEQ ID NO: 2372567 - DNA, 25 bp, Homo sapien
gggagagattctccaacatggcccc

SEQ ID NO: 2372568 - DNA, 25 bp, Homo sapien
gacgtgtcatttcctgagtcgtact

SEQ ID NO: 2372569 - DNA, 25 bp, Homo sapien
gtggagggtggcgaggacgtgtcat

SEQ ID NO: 2372570 - DNA, 25 bp, Homo sapien
ggctgagctggtttgcgtggagggt

SEQ ID NO: 2372571 - DNA, 25 bp, Homo sapien
tgtcatacagttggagccatgcagt

SEQ ID NO: 2372572 - DNA, 25 bp, Homo sapien
tgtcacacagagtagttccattgcc

SEQ ID NO: 2372573 - DNA, 25 bp, Homo sapien
taccttccgagcactgaatagcatt

SEQ ID NO: 2372574 - DNA, 25 bp, Homo sapien
tgtcttttcatagcgtggtacctca

SEQ ID NO: 2372575 - DNA, 25 bp, Homo sapien
gagggcaccagcaaagcttttccac

SEQ ID NO: 2372576 - DNA, 25 bp, Homo sapien
tgttagcatgacagagggcaccagc

SEQ ID NO: 2372577 - DNA, 25 bp, Homo sapien
gggcaccagcaaagcttttccaccc

SEQ ID NO: 2372578 - DNA, 25 bp, Homo sapien
cagagggcaccagcaaagcttttcc

SEQ ID NO: 2372579 - DNA, 25 bp, Homo sapien
tcttcacttcggcacattccagaca

SEQ ID NO: 2372580 - DNA, 25 bp, Homo sapien
tggatgggaccaaactggacttctt

SEQ ID NO: 2372581 - DNA, 25 bp, Homo sapien
gcacattccagacacggtgactgaa

SEQ ID NO: 2372582 - DNA, 25 bp, Homo sapien
ttccagacacggtgactgaaatccc

SEQ ID NO: 2372583 - DNA, 25 bp, Homo sapien
tgactggaggatcgggtgctggcat

SEQ ID NO: 2372584 - DNA, 25 bp, Homo sapien
aggagctgcgggaacaccctttcat

SEQ ID NO: 2372585 - DNA, 25 bp, Homo sapien
gtgctggcataggaggagctgcggg

SEQ ID NO: 2372586 - DNA, 25 bp, Homo sapien
ggatcgggacgagtgactggaggat

SEQ ID NO: 2372587 - DNA, 25 bp, Homo sapien
gaagaggtggatcggctttgggtgt

SEQ ID NO: 2372588 - DNA, 25 bp, Homo sapien
agaggtggatcggctttgggtgtac

SEQ ID NO: 2372589 - DNA, 25 bp, Homo sapien
cagaagaggtggatcggctttgggt

SEQ ID NO: 2372590 - DNA, 25 bp, Homo sapien
tcagaagaggtggatcggctttggg

SEQ ID NO: 2372591 - DNA, 25 bp, Homo sapien
gcgggctcctcttgccagacttgga

SEQ ID NO: 2372592 - DNA, 25 bp, Homo sapien
ggcgggctcctcttgccagacttgg

SEQ ID NO: 2372593 - DNA, 25 bp, Homo sapien
gggcgggctcctcttgccagacttg

SEQ ID NO: 2372594 - DNA, 25 bp, Homo sapien
ggccctggtgcgtgggtaagaactg

SEQ ID NO: 2372595 - DNA, 25 bp, Homo sapien
gtgaggacgtgaatgttacgcaggc

SEQ ID NO: 2372596 - DNA, 25 bp, Homo sapien
caggggtgaggacgtgaatgttacg

SEQ ID NO: 2372597 - DNA, 25 bp, Homo sapien
gccctggtgcgtgggtaagaactgg

SEQ ID NO: 2372598 - DNA, 25 bp, Homo sapien
ggtgggcatcatagcagggcaggtg

SEQ ID NO: 2372599 - DNA, 25 bp, Homo sapien
gctgcggtaagagtctgcgagggtt

SEQ ID NO: 2372600 - DNA, 25 bp, Homo sapien
tctgcacgttgccgcaagggagacc

SEQ ID NO: 2372601 - DNA, 25 bp, Homo sapien
tgtcagcatttgcaggtgggcatca

SEQ ID NO: 2372602 - DNA, 25 bp, Homo sapien
gtctctccggcgctttctcataggc

SEQ ID NO: 2372603 - DNA, 25 bp, Homo sapien
ctgctgcgagtccttctcactgtat

SEQ ID NO: 2372604 - DNA, 25 bp, Homo sapien
tctcataggcgagtaggaccgacgt

SEQ ID NO: 2372605 - DNA, 25 bp, Homo sapien
gtaggaccgacgtctccgacgcgct

SEQ ID NO: 2372606 - DNA, 25 bp, Homo sapien
gaggctgccggatgaggaggggctg

SEQ ID NO: 2372607 - DNA, 25 bp, Homo sapien
ggggctgggccgatagtaggggatg

SEQ ID NO: 2372608 - DNA, 25 bp, Homo sapien
ggctgggccgatagtaggggatggg

SEQ ID NO: 2372609 - DNA, 25 bp, Homo sapien
tgaggctgccggatgaggaggggct

SEQ ID NO: 2372610 - DNA, 25 bp, Homo sapien
gtagctgcggctggccgagcggcta

SEQ ID NO: 2372611 - DNA, 25 bp, Homo sapien
gagtagctgcggctggccgagcggc

SEQ ID NO: 2372612 - DNA, 25 bp, Homo sapien
ggctccgggagtagctgcggctggc

SEQ ID NO: 2372613 - DNA, 25 bp, Homo sapien
ccgggagtagctgcggctggccgag

SEQ ID NO: 2372614 - DNA, 25 bp, Homo sapien
gagcccggactagggctgcgggagc

SEQ ID NO: 2372615 - DNA, 25 bp, Homo sapien
ctagagctgctgctcgtgcgggtcc

SEQ ID NO: 2372616 - DNA, 25 bp, Homo sapien
ttagcgcctcgtgctggagtagctg

SEQ ID NO: 2372617 - DNA, 25 bp, Homo sapien
tgcgggagcccggactagggctgcg

SEQ ID NO: 2372618 - DNA, 25 bp, Homo sapien
ggtagaggctcctagcaggctgatc

SEQ ID NO: 2372619 - DNA, 25 bp, Homo sapien
gaaggacaaggtataggagccctca

SEQ ID NO: 2372620 - DNA, 25 bp, Homo sapien
tcccctaggcaagcaggaaggacaa

SEQ ID NO: 2372621 - DNA, 25 bp, Homo sapien
gctcaatttttgagtcacagaccca

SEQ ID NO: 2372622 - DNA, 25 bp, Homo sapien
catgaagttggactagtggggcatc

SEQ ID NO: 2372623 - DNA, 25 bp, Homo sapien
aagttggactagtggggcatccggg

SEQ ID NO: 2372624 - DNA, 25 bp, Homo sapien
tgcagccatgaagttggactagtgg

SEQ ID NO: 2372625 - DNA, 25 bp, Homo sapien
gacatgggggtccatccacgtgcag

SEQ ID NO: 2372626 - DNA, 25 bp, Homo sapien
tttctcgtgaggttgcagggcccct

SEQ ID NO: 2372627 - DNA, 25 bp, Homo sapien
tgtggatcggagatcagcttaccct

SEQ ID NO: 2372628 - DNA, 25 bp, Homo sapien
tatcttgaacctgaactgccattgg

SEQ ID NO: 2372629 - DNA, 25 bp, Homo sapien
gacgtcactgcttccaagaaaaagg

SEQ ID NO: 2372630 - DNA, 25 bp, Homo sapien
tctccatggagggagactgaagtcc

SEQ ID NO: 2372631 - DNA, 25 bp, Homo sapien
cctgctaagaaggtttttggtggct

SEQ ID NO: 2372632 - DNA, 25 bp, Homo sapien
acagctgtcctgctaagaaggtttt

SEQ ID NO: 2372633 - DNA, 25 bp, Homo sapien
catggagggagactgaagtccagtc

SEQ ID NO: 2372634 - DNA, 25 bp, Homo sapien
tcactgtagctcataagcctctggg

SEQ ID NO: 2372635 - DNA, 25 bp, Homo sapien
caagggatttcgactttgtgcagcc

SEQ ID NO: 2372636 - DNA, 25 bp, Homo sapien
tcttgatgaaggcagtccgaacgtg

SEQ ID NO: 2372637 - DNA, 25 bp, Homo sapien
accaactaggtgtgctcagagaagc

SEQ ID NO: 2372638 - DNA, 25 bp, Homo sapien
tgatgacctttggatcctgggccct

SEQ ID NO: 2372639 - DNA, 25 bp, Homo sapien
gagaggcagagatttccccgaagca

SEQ ID NO: 2372640 - DNA, 25 bp, Homo sapien
tcaaaggcttgggatgcatggcgct

SEQ ID NO: 2372641 - DNA, 25 bp, Homo sapien
cagggatgttgcaaaagtctcacca

SEQ ID NO: 2372642 - DNA, 25 bp, Homo sapien
tttgagagcaccctgaattttggcc

SEQ ID NO: 2372643 - DNA, 25 bp, Homo sapien
gattctagcactccttacctgggca

SEQ ID NO: 2372644 - DNA, 25 bp, Homo sapien
tatcattggctcactggtgcagaag

SEQ ID NO: 2372645 - DNA, 25 bp, Homo sapien
gaagtgatgcggttctctgagactg

SEQ ID NO: 2372646 - DNA, 25 bp, Homo sapien
tcaagggagcttgggcatgtcaact

SEQ ID NO: 2372647 - DNA, 25 bp, Homo sapien
gcagataatatataggacaagcccc

SEQ ID NO: 2372648 - DNA, 25 bp, Homo sapien
cagaaatcaagctagccatggctgc

SEQ ID NO: 2372649 - DNA, 25 bp, Homo sapien
gaagttcttatagcacaggaccccg

SEQ ID NO: 2372650 - DNA, 25 bp, Homo sapien
tcagagaggttaggtcactacacaa

SEQ ID NO: 2372651 - DNA, 25 bp, Homo sapien
tgtatgggacatgtcacaaccttgc

SEQ ID NO: 2372652 - DNA, 25 bp, Homo sapien
cacacagtgaggaagtagcagagtt

SEQ ID NO: 2372653 - DNA, 25 bp, Homo sapien
gagatccttagagtccctgtatggg

SEQ ID NO: 2372654 - DNA, 25 bp, Homo sapien
cttctattattttctccaaaattct

SEQ ID NO: 2372655 - DNA, 25 bp, Homo sapien
gagctctggctttcttctattattt

SEQ ID NO: 2372656 - DNA, 25 bp, Homo sapien
tggagctctggctttcttctattat

SEQ ID NO: 2372657 - DNA, 25 bp, Homo sapien
attggagctctggctttcttctatt

SEQ ID NO: 2372658 - DNA, 25 bp, Homo sapien
aatattcggaggtgatgaaccagcc

SEQ ID NO: 2372659 - DNA, 25 bp, Homo sapien
ggcacgcgcgcctagaaacttcttc

SEQ ID NO: 2372660 - DNA, 25 bp, Homo sapien
cagaaccgctgaggtctagagcgga

SEQ ID NO: 2372661 - DNA, 25 bp, Homo sapien
ttttgcaagcgtctcctgtcacagg

SEQ ID NO: 2372662 - DNA, 25 bp, Homo sapien
ggtccatgccaaagccatcatccag

SEQ ID NO: 2372663 - DNA, 25 bp, Homo sapien
tggtcttcaccatcaactcctctgg

SEQ ID NO: 2372664 - DNA, 25 bp, Homo sapien
ggagaagggcatctgaccgtcagcc

SEQ ID NO: 2372665 - DNA, 25 bp, Homo sapien
cagtcgggccaagaggctgtcaagt

SEQ ID NO: 2372666 - DNA, 25 bp, Homo sapien
tgtgtcacactgtcccaacgtcagc

SEQ ID NO: 2372667 - DNA, 25 bp, Homo sapien
cgtaaagataactttgcaggctgca

SEQ ID NO: 2372668 - DNA, 25 bp, Homo sapien
taccatgattgatgagcacccagag

SEQ ID NO: 2372669 - DNA, 25 bp, Homo sapien
gctgagtcaggcaggttaagatctc

SEQ ID NO: 2372670 - DNA, 25 bp, Homo sapien
cacatccgccatgctagtgaacagc

SEQ ID NO: 2372671 - DNA, 25 bp, Homo sapien
gatggtgaaaaaccctccaggctgg

SEQ ID NO: 2372672 - DNA, 25 bp, Homo sapien
tctgtttacagagtgccaggcaagc

SEQ ID NO: 2372673 - DNA, 25 bp, Homo sapien
gctgagatctcaacatggagctgcc

SEQ ID NO: 2372674 - DNA, 25 bp, Homo sapien
tctagttatctaagcctcaaggacc

SEQ ID NO: 2372675 - DNA, 25 bp, Homo sapien
tgtgacttaggcctaccctagagac

SEQ ID NO: 2372676 - DNA, 25 bp, Homo sapien
gaagaaaagtgtggcgtgtcagcat

SEQ ID NO: 2372677 - DNA, 25 bp, Homo sapien
tcaaggaccttgtctgccatacaga

SEQ ID NO: 2372678 - DNA, 25 bp, Homo sapien
gaagttcttagaaacaatgccacct

SEQ ID NO: 2372679 - DNA, 25 bp, Homo sapien
gattttctttgtgaagttcttagaa

SEQ ID NO: 2372680 - DNA, 25 bp, Homo sapien
cttagaaacaatgccaccttcttgc

SEQ ID NO: 2372681 - DNA, 25 bp, Homo sapien
agttcttagaaacaatgccaccttc

SEQ ID NO: 2372682 - DNA, 25 bp, Homo sapien
tatttaacaactagtgcagctgggc

SEQ ID NO: 2372683 - DNA, 25 bp, Homo sapien
gctcagggcaatagctagccaatat

SEQ ID NO: 2372684 - DNA, 25 bp, Homo sapien
gaacagtttcattccccagtccatg

SEQ ID NO: 2372685 - DNA, 25 bp, Homo sapien
tattttaacaactagcccagctcag

SEQ ID NO: 2372686 - DNA, 25 bp, Homo sapien
ccatggagatgaacaaggctgcttc

SEQ ID NO: 2372687 - DNA, 25 bp, Homo sapien
cacatgagccgtatctacccaggag

SEQ ID NO: 2372688 - DNA, 25 bp, Homo sapien
gatcattgaaccacagagtatcagg

SEQ ID NO: 2372689 - DNA, 25 bp, Homo sapien
gcaggcaggctgacgtgcattcaaa

SEQ ID NO: 2372690 - DNA, 25 bp, Homo sapien
gggaagctcgttgttgaaactgctc

SEQ ID NO: 2372691 - DNA, 25 bp, Homo sapien
gcttcgatgatcagcagaccctctg

SEQ ID NO: 2372692 - DNA, 25 bp, Homo sapien
aatactgtcacaggatccacctctg

SEQ ID NO: 2372693 - DNA, 25 bp, Homo sapien
gaggcaaatactgtcacaggatcca

SEQ ID NO: 2372694 - DNA, 25 bp, Homo sapien
aatcgggagcccagagtaggaacct

SEQ ID NO: 2372695 - DNA, 25 bp, Homo sapien
tcattaaccaaaccatgcggcatgg

SEQ ID NO: 2372696 - DNA, 25 bp, Homo sapien
gccaattgcgctatcctgtggagaa

SEQ ID NO: 2372697 - DNA, 25 bp, Homo sapien
tatatcacccattttaggccaggca

SEQ ID NO: 2372698 - DNA, 25 bp, Homo sapien
gggctcctatactgcctcgcccagc

SEQ ID NO: 2372699 - DNA, 25 bp, Homo sapien
agggctcctatactgcctcgcccag

SEQ ID NO: 2372700 - DNA, 25 bp, Homo sapien
cagcctgcagctgtacgtcgatctc

SEQ ID NO: 2372701 - DNA, 25 bp, Homo sapien
gcagctgtacgtcgatctcctcagg

SEQ ID NO: 2372702 - DNA, 25 bp, Homo sapien
ctgcagccccatctccaccttcttt

SEQ ID NO: 2372703 - DNA, 25 bp, Homo sapien
catctccaccttctttttgctcctc

SEQ ID NO: 2372704 - DNA, 25 bp, Homo sapien
ccccatctccaccttctttttgctc

SEQ ID NO: 2372705 - DNA, 25 bp, Homo sapien
tgcagccccatctccaccttctttt

SEQ ID NO: 2372706 - DNA, 25 bp, Homo sapien
ctgagtctagagatttcttctcctt

SEQ ID NO: 2372707 - DNA, 25 bp, Homo sapien
gagtctagagatttcttctcctttt

SEQ ID NO: 2372708 - DNA, 25 bp, Homo sapien
tgagtctagagatttcttctccttt

SEQ ID NO: 2372709 - DNA, 25 bp, Homo sapien
ttcaacgcctttgcggttttgctgg

SEQ ID NO: 2372710 - DNA, 25 bp, Homo sapien
gttctcgatgttgaagagcccttca

SEQ ID NO: 2372711 - DNA, 25 bp, Homo sapien
cgatgttgaagagcccttcaacgcc

SEQ ID NO: 2372712 - DNA, 25 bp, Homo sapien
gttttgctggtagtcatcttcttca

SEQ ID NO: 2372713 - DNA, 25 bp, Homo sapien
tcctcccgctgtttccggatgatgg

SEQ ID NO: 2372714 - DNA, 25 bp, Homo sapien
cctcctcccgctgtttccggatgat

SEQ ID NO: 2372715 - DNA, 25 bp, Homo sapien
ccgctgtttccggatgatggccagc

SEQ ID NO: 2372716 - DNA, 25 bp, Homo sapien
ctcccgctgtttccggatgatggcc

SEQ ID NO: 2372717 - DNA, 25 bp, Homo sapien
ccatgggtcgcggttacttatacag

SEQ ID NO: 2372718 - DNA, 25 bp, Homo sapien
ggccacgaggggctgttgcggcggc

SEQ ID NO: 2372719 - DNA, 25 bp, Homo sapien
tgtgccaaaatgaagaggaggcccc

SEQ ID NO: 2372720 - DNA, 25 bp, Homo sapien
tcgcggttacttatacagggagagc

SEQ ID NO: 2372721 - DNA, 25 bp, Homo sapien
ccccagcaagggctctgaattctaa

SEQ ID NO: 2372722 - DNA, 25 bp, Homo sapien
tgtctcaaagatagcaactgcccct

SEQ ID NO: 2372723 - DNA, 25 bp, Homo sapien
cattcaaatggttacatgtgaaatg

SEQ ID NO: 2372724 - DNA, 25 bp, Homo sapien
catgtgaaatgctgtccctcatctt

SEQ ID NO: 2372725 - DNA, 25 bp, Homo sapien
gcgaggcctcgatcagacaggactg

SEQ ID NO: 2372726 - DNA, 25 bp, Homo sapien
aggcgaggcctcgatcagacaggac

SEQ ID NO: 2372727 - DNA, 25 bp, Homo sapien
gagaggcgaggcctcgatcagacag

SEQ ID NO: 2372728 - DNA, 25 bp, Homo sapien
gaggcctcgatcagacaggactgac

SEQ ID NO: 2372729 - DNA, 25 bp, Homo sapien
tatacatcaccattggcagccagct

SEQ ID NO: 2372730 - DNA, 25 bp, Homo sapien
tacatcaccattggcagccagctgg

SEQ ID NO: 2372731 - DNA, 25 bp, Homo sapien
ctatacatcaccattggcagccagc

SEQ ID NO: 2372732 - DNA, 25 bp, Homo sapien
atacatcaccattggcagccagctg

SEQ ID NO: 2372733 - DNA, 25 bp, Homo sapien
ttatgatgcactacccgtgaagcac

SEQ ID NO: 2372734 - DNA, 25 bp, Homo sapien
agaagccagccaccgattgccggaa

SEQ ID NO: 2372735 - DNA, 25 bp, Homo sapien
ctacccgtgaagcactgaagggagg

SEQ ID NO: 2372736 - DNA, 25 bp, Homo sapien
accgattgccggaatttattttgag

SEQ ID NO: 2372737 - DNA, 25 bp, Homo sapien
cacacggctacaccaatgccatgtt

SEQ ID NO: 2372738 - DNA, 25 bp, Homo sapien
tcacacggctacaccaatgccatgt

SEQ ID NO: 2372739 - DNA, 25 bp, Homo sapien
ggtggagcaagatggagcagatgag

SEQ ID NO: 2372740 - DNA, 25 bp, Homo sapien
catgaacaacactgttgctgtttgc

SEQ ID NO: 2372741 - DNA, 25 bp, Homo sapien
tgtggaccttagtaacctgccagag

SEQ ID NO: 2372742 - DNA, 25 bp, Homo sapien
tgccagagagagacgggcttagatc

SEQ ID NO: 2372743 - DNA, 25 bp, Homo sapien
ttgcatcactctggttgcctgggag

SEQ ID NO: 2372744 - DNA, 25 bp, Homo sapien
tgggcttgcaccaatcctgcctggg

SEQ ID NO: 2372745 - DNA, 25 bp, Homo sapien
tcccaggtcatgagcccggattagg

SEQ ID NO: 2372746 - DNA, 25 bp, Homo sapien
ggtcctgggcttgcaccaatcctgc

SEQ ID NO: 2372747 - DNA, 25 bp, Homo sapien
tgcttaagcttagatccagttgtat

SEQ ID NO: 2372748 - DNA, 25 bp, Homo sapien
tccctcatcacgtgtttgcttaagc

SEQ ID NO: 2372749 - DNA, 25 bp, Homo sapien
tgcctgtttacttgttccctcatca

SEQ ID NO: 2372750 - DNA, 25 bp, Homo sapien
tacttgttccctcatcacgtgtttg

SEQ ID NO: 2372751 - DNA, 25 bp, Homo sapien
aggagcattggccacctgaagaaaa

SEQ ID NO: 2372752 - DNA, 25 bp, Homo sapien
agaagaagcagagtgctaaaggtag

SEQ ID NO: 2372753 - DNA, 25 bp, Homo sapien
gtaggagcattggccacctgaagaa

SEQ ID NO: 2372754 - DNA, 25 bp, Homo sapien
ctagaagaagcagagtgctaaaggt

SEQ ID NO: 2372755 - DNA, 25 bp, Homo sapien
gacaggtgcattgatggttatgcag

SEQ ID NO: 2372756 - DNA, 25 bp, Homo sapien
ggtgtggatgatccagtgacaggtg

SEQ ID NO: 2372757 - DNA, 25 bp, Homo sapien
ggagccccgggtataagaggagata

SEQ ID NO: 2372758 - DNA, 25 bp, Homo sapien
gcattgatggttatgcagtctgtct

SEQ ID NO: 2372759 - DNA, 25 bp, Homo sapien
ggaattgatatagatcctgtcagaa

SEQ ID NO: 2372760 - DNA, 25 bp, Homo sapien
gacactcgtgatatgtactaataaa

SEQ ID NO: 2372761 - DNA, 25 bp, Homo sapien
tctggttttcctgtaacaaaatgtc

SEQ ID NO: 2372762 - DNA, 25 bp, Homo sapien
ttattagcaaggaaagacactcgtg

SEQ ID NO: 2372763 - DNA, 25 bp, Homo sapien
cacagcgaggtatggtgggcagcag

SEQ ID NO: 2372764 - DNA, 25 bp, Homo sapien
cagcacagcgaggtatggtgggcag

SEQ ID NO: 2372765 - DNA, 25 bp, Homo sapien
gccaaggcaaacgccatctcctcct

SEQ ID NO: 2372766 - DNA, 25 bp, Homo sapien
cttcccagcacagcgaggtatggtg

SEQ ID NO: 2372767 - DNA, 25 bp, Homo sapien
gaaatgagccagcataacgttccca

SEQ ID NO: 2372768 - DNA, 25 bp, Homo sapien
tctgatgcattttacaagccgcttc

SEQ ID NO: 2372769 - DNA, 25 bp, Homo sapien
gacagaccataaaagcagggaggaa

SEQ ID NO: 2372770 - DNA, 25 bp, Homo sapien
gagaaacccaaagaatcaaccagtg

SEQ ID NO: 2372771 - DNA, 25 bp, Homo sapien
ccatggttctgctgcctctaaacct

SEQ ID NO: 2372772 - DNA, 25 bp, Homo sapien
tgcctcagtcttagcgagtagctag

SEQ ID NO: 2372773 - DNA, 25 bp, Homo sapien
actcccaacttcaagtgatcctacc

SEQ ID NO: 2372774 - DNA, 25 bp, Homo sapien
acaggtgcctgccaccatgcccagc

SEQ ID NO: 2372775 - DNA, 25 bp, Homo sapien
taatttttgtattttcagtggaggc

SEQ ID NO: 2372776 - DNA, 25 bp, Homo sapien
gcatccggctgtcctgttctcctct

SEQ ID NO: 2372777 - DNA, 25 bp, Homo sapien
ccactgagctcactgtgataacagc

SEQ ID NO: 2372778 - DNA, 25 bp, Homo sapien
ggatccatgtcttcaaccagtgaag

SEQ ID NO: 2372779 - DNA, 25 bp, Homo sapien
aagtcacttggagtgatgacactgt

SEQ ID NO: 2372780 - DNA, 25 bp, Homo sapien
tatccaggaatgaaagccttgattg

SEQ ID NO: 2372781 - DNA, 25 bp, Homo sapien
caacaatacagctttaacagggcca

SEQ ID NO: 2372782 - DNA, 25 bp, Homo sapien
tgctttggaaatgccggtgcttctg

SEQ ID NO: 2372783 - DNA, 25 bp, Homo sapien
cagtaagtagtgacaggaaacatct

SEQ ID NO: 2372784 - DNA, 25 bp, Homo sapien
cactttgctggtgattcctggataa

SEQ ID NO: 2372785 - DNA, 25 bp, Homo sapien
tccactgtccattggcaaggctttg

SEQ ID NO: 2372786 - DNA, 25 bp, Homo sapien
tctgcccgtgggtaaaattttcagc

SEQ ID NO: 2372787 - DNA, 25 bp, Homo sapien
tgaataagcgggactctgttgagtg

SEQ ID NO: 2372788 - DNA, 25 bp, Homo sapien
tccagttttccatgtgtggtcactt

SEQ ID NO: 2372789 - DNA, 25 bp, Homo sapien
tactcttttcggttctgatttcctg

SEQ ID NO: 2372790 - DNA, 25 bp, Homo sapien
gtcacttgatggagtcagacaagag

SEQ ID NO: 2372791 - DNA, 25 bp, Homo sapien
gacaagagaaagatactcttttcgg

SEQ ID NO: 2372792 - DNA, 25 bp, Homo sapien
atgatggaaacattaaaggcctggc

SEQ ID NO: 2372793 - DNA, 25 bp, Homo sapien
ggaaacattaaaggcctggcagata

SEQ ID NO: 2372794 - DNA, 25 bp, Homo sapien
gatagagtgagctggggaatgtcga

SEQ ID NO: 2372795 - DNA, 25 bp, Homo sapien
aatgtcgaggaaggcacttctctgg

SEQ ID NO: 2372796 - DNA, 25 bp, Homo sapien
cctctcctttccgtcacctgcgact

SEQ ID NO: 2372797 - DNA, 25 bp, Homo sapien
agtttatcataaagagtttcttgat

SEQ ID NO: 2372798 - DNA, 25 bp, Homo sapien
tttatcataaagagtttcttgatat

SEQ ID NO: 2372799 - DNA, 25 bp, Homo sapien
atcataaagagtttcttgatattct

SEQ ID NO: 2372800 - DNA, 25 bp, Homo sapien
tatcataaagagtttcttgatattc

SEQ ID NO: 2372801 - DNA, 25 bp, Homo sapien
cccacagacgggataaggaagtccg

SEQ ID NO: 2372802 - DNA, 25 bp, Homo sapien
ccaattacacgaactccaaagcggt

SEQ ID NO: 2372803 - DNA, 25 bp, Homo sapien
cccaagacaaggatttttccagaat

SEQ ID NO: 2372804 - DNA, 25 bp, Homo sapien
tgagaaagcacctgggtctcccaca

SEQ ID NO: 2372805 - DNA, 25 bp, Homo sapien
taggttctccgaggcataaaagggc

SEQ ID NO: 2372806 - DNA, 25 bp, Homo sapien
ttgggggaactctgaagcttcttgg

SEQ ID NO: 2372807 - DNA, 25 bp, Homo sapien
cccgagttgggggaactctgaagct

SEQ ID NO: 2372808 - DNA, 25 bp, Homo sapien
ctgccttaggttctccgaggcataa

SEQ ID NO: 2372809 - DNA, 25 bp, Homo sapien
atgctcctgtaacttctgagcttaa

SEQ ID NO: 2372810 - DNA, 25 bp, Homo sapien
tctcaaatgctcctgtaacttctga

SEQ ID NO: 2372811 - DNA, 25 bp, Homo sapien
aaggagggctcataaaagctgtatg

SEQ ID NO: 2372812 - DNA, 25 bp, Homo sapien
aggagggctcataaaagctgtatga

SEQ ID NO: 2372813 - DNA, 25 bp, Homo sapien
tacccaatcaacttcatggatggca

SEQ ID NO: 2372814 - DNA, 25 bp, Homo sapien
tgttgtggacctcgtgggtacccaa

SEQ ID NO: 2372815 - DNA, 25 bp, Homo sapien
tgcagaacagtgttgtggacctcgt

SEQ ID NO: 2372816 - DNA, 25 bp, Homo sapien
gttcctgtaacccaacaaagtgcag

SEQ ID NO: 2372817 - DNA, 25 bp, Homo sapien
aatgaagtagatttgccagatacag

SEQ ID NO: 2372818 - DNA, 25 bp, Homo sapien
atgaagtagatttgccagatacaga

SEQ ID NO: 2372819 - DNA, 25 bp, Homo sapien
tgaagtagatttgccagatacagaa

SEQ ID NO: 2372820 - DNA, 25 bp, Homo sapien
ggtaccattagtcttaaggctcctg

SEQ ID NO: 2372821 - DNA, 25 bp, Homo sapien
taccattagtcttaaggctcctgtc

SEQ ID NO: 2372822 - DNA, 25 bp, Homo sapien
ttgggtaccattagtcttaaggctc

SEQ ID NO: 2372823 - DNA, 25 bp, Homo sapien
ccattagtcttaaggctcctgtcat

SEQ ID NO: 2372824 - DNA, 25 bp, Homo sapien
gcaatgctcggttggtaatgactga

SEQ ID NO: 2372825 - DNA, 25 bp, Homo sapien
taatgactgagttgtaggcacggac

SEQ ID NO: 2372826 - DNA, 25 bp, Homo sapien
gagagaggcttcctcgcaatgctcg

SEQ ID NO: 2372827 - DNA, 25 bp, Homo sapien
ggactgtttcgtaattgccttccag

SEQ ID NO: 2372828 - DNA, 25 bp, Homo sapien
aatcacttggaaccataagaatttg

SEQ ID NO: 2372829 - DNA, 25 bp, Homo sapien
tcacttggaaccataagaatttgac

SEQ ID NO: 2372830 - DNA, 25 bp, Homo sapien
ctaatcacttggaaccataagaatt

SEQ ID NO: 2372831 - DNA, 25 bp, Homo sapien
taatcacttggaaccataagaattt

SEQ ID NO: 2372832 - DNA, 25 bp, Homo sapien
ttaaggtattgtctggtacttcagc

SEQ ID NO: 2372833 - DNA, 25 bp, Homo sapien
aaggtattgtctggtacttcagcaa

SEQ ID NO: 2372834 - DNA, 25 bp, Homo sapien
atgattattgttgaagtcctcagga

SEQ ID NO: 2372835 - DNA, 25 bp, Homo sapien
ggtattgtctggtacttcagcaatt

SEQ ID NO: 2372836 - DNA, 25 bp, Homo sapien
ttgttgtgatagtgggtccctgttc

SEQ ID NO: 2372837 - DNA, 25 bp, Homo sapien
tgtgtcattatgacccccttctttc

SEQ ID NO: 2372838 - DNA, 25 bp, Homo sapien
tctgggaaagggcccacaccaaagc

SEQ ID NO: 2372839 - DNA, 25 bp, Homo sapien
aagcccttgttgtgatagtgggtcc

SEQ ID NO: 2372840 - DNA, 25 bp, Homo sapien
gatgtcccctcggtgttctctgctg

SEQ ID NO: 2372841 - DNA, 25 bp, Homo sapien
catgccaagggcagtcagaatatac

SEQ ID NO: 2372842 - DNA, 25 bp, Homo sapien
ccacctggatgggacattcatgcca

SEQ ID NO: 2372843 - DNA, 25 bp, Homo sapien
agtcagaatatacccccctatggcc

SEQ ID NO: 2372844 - DNA, 25 bp, Homo sapien
gctggagcaggttgatgccaaactc

SEQ ID NO: 2372845 - DNA, 25 bp, Homo sapien
aaactcttgagtctttggagctgaa

SEQ ID NO: 2372846 - DNA, 25 bp, Homo sapien
cagggtattgagtatcgtgggacta

SEQ ID NO: 2372847 - DNA, 25 bp, Homo sapien
caatgtatcttggagagcgtcaggg

SEQ ID NO: 2372848 - DNA, 25 bp, Homo sapien
tatcgtgaaccttgcaaatggcgtg

SEQ ID NO: 2372849 - DNA, 25 bp, Homo sapien
aatctgtacgatgggctagcggctg

SEQ ID NO: 2372850 - DNA, 25 bp, Homo sapien
gacaaccactctattctgtatcgtg

SEQ ID NO: 2372851 - DNA, 25 bp, Homo sapien
tagcggctgctgttcaaagtcctgg

SEQ ID NO: 2372852 - DNA, 25 bp, Homo sapien
actattactctcactataccaggag

SEQ ID NO: 2372853 - DNA, 25 bp, Homo sapien
cccacttggtacacagggctttgtg

SEQ ID NO: 2372854 - DNA, 25 bp, Homo sapien
aagtcatctcttgtgtacctccggg

SEQ ID NO: 2372855 - DNA, 25 bp, Homo sapien
caagccaaggaaatgtcactattac

SEQ ID NO: 2372856 - DNA, 25 bp, Homo sapien
agcggttgctagctattgatttaca

SEQ ID NO: 2372857 - DNA, 25 bp, Homo sapien
gatttacagatactacctccaaaac

SEQ ID NO: 2372858 - DNA, 25 bp, Homo sapien
gggtagcggttgctagctattgatt

SEQ ID NO: 2372859 - DNA, 25 bp, Homo sapien
tagcggttgctagctattgatttac

SEQ ID NO: 2372860 - DNA, 25 bp, Homo sapien
tctttgcttcccttggatgtgccat

SEQ ID NO: 2372861 - DNA, 25 bp, Homo sapien
tccattgctctgcagagcaccggtg

SEQ ID NO: 2372862 - DNA, 25 bp, Homo sapien
gcaccggtgatgactccgttctttg

SEQ ID NO: 2372863 - DNA, 25 bp, Homo sapien
ctgtctttgcttcccttggatgtgc

SEQ ID NO: 2372864 - DNA, 25 bp, Homo sapien
cttgtccatatacttgatgctcttc

SEQ ID NO: 2372865 - DNA, 25 bp, Homo sapien
acttgatgctcttcattggcttgtc

SEQ ID NO: 2372866 - DNA, 25 bp, Homo sapien
tattatttccttgtccatatacttg

SEQ ID NO: 2372867 - DNA, 25 bp, Homo sapien
tatacttgatgctcttcattggctt

SEQ ID NO: 2372868 - DNA, 25 bp, Homo sapien
gggcagggtggagattccggtagtg

SEQ ID NO: 2372869 - DNA, 25 bp, Homo sapien
tggagattccggtagtggtggagaa

SEQ ID NO: 2372870 - DNA, 25 bp, Homo sapien
tccatgaagttgtgctgctggatgg

SEQ ID NO: 2372871 - DNA, 25 bp, Homo sapien
cagggtggagattccggtagtggtg

SEQ ID NO: 2372872 - DNA, 25 bp, Homo sapien
tcagggagtttgtgccacttggaga

SEQ ID NO: 2372873 - DNA, 25 bp, Homo sapien
cacttggagagatgacttcccttgg

SEQ ID NO: 2372874 - DNA, 25 bp, Homo sapien
tctcctttgtgtccggcagtgggag

SEQ ID NO: 2372875 - DNA, 25 bp, Homo sapien
tgtggccagatggaacatctcattg

SEQ ID NO: 2372876 - DNA, 25 bp, Homo sapien
gaccctgattgtcaacttccgctag

SEQ ID NO: 2372877 - DNA, 25 bp, Homo sapien
tagggtgctgcttagtgccactgaa

SEQ ID NO: 2372878 - DNA, 25 bp, Homo sapien
gaactgggcacatgcaaagagaccc

SEQ ID NO: 2372879 - DNA, 25 bp, Homo sapien
ccaagtttgtgcctagggtgctgct

SEQ ID NO: 2372880 - DNA, 25 bp, Homo sapien
ttcagaagccttaaccatgcctgct

SEQ ID NO: 2372881 - DNA, 25 bp, Homo sapien
ttgaacgatgagatgcagaagcgac

SEQ ID NO: 2372882 - DNA, 25 bp, Homo sapien
gctactggctatggatgtgcgcatc

SEQ ID NO: 2372883 - DNA, 25 bp, Homo sapien
tgagagcggtcagtaaatgcctgag

SEQ ID NO: 2372884 - DNA, 25 bp, Homo sapien
cagaagatgctggagtgatgtcctc

SEQ ID NO: 2372885 - DNA, 25 bp, Homo sapien
tcaatgatgaggagcatgtattctc

SEQ ID NO: 2372886 - DNA, 25 bp, Homo sapien
gatactttcaagacagctagcataa

SEQ ID NO: 2372887 - DNA, 25 bp, Homo sapien
agctcatgttctttgttgccaccca

SEQ ID NO: 2372888 - DNA, 25 bp, Homo sapien
cagagaagagtggccagcgtggtct

SEQ ID NO: 2372889 - DNA, 25 bp, Homo sapien
ggccatgagaagcaatggcagtgga

SEQ ID NO: 2372890 - DNA, 25 bp, Homo sapien
aagcaatggcagtggaggacacagc

SEQ ID NO: 2372891 - DNA, 25 bp, Homo sapien
tgtttttgtacagcgccaccttgtg

SEQ ID NO: 2372892 - DNA, 25 bp, Homo sapien
caggcgattctcaggagccagtttc

SEQ ID NO: 2372893 - DNA, 25 bp, Homo sapien
tcaggcgattctcaggagccagttt

SEQ ID NO: 2372894 - DNA, 25 bp, Homo sapien
cagttccaggctaggtcaagtgcac

SEQ ID NO: 2372895 - DNA, 25 bp, Homo sapien
tgtctgcctttcttactgtctgtgg

SEQ ID NO: 2372896 - DNA, 25 bp, Homo sapien
cactacatggtgattgctgattgac

SEQ ID NO: 2372897 - DNA, 25 bp, Homo sapien
gggtaaaactatcaactgttggtca

SEQ ID NO: 2372898 - DNA, 25 bp, Homo sapien
tacgtacacaaaagattgctctggt

SEQ ID NO: 2372899 - DNA, 25 bp, Homo sapien
tctgaatgactcagcccaaagagaa

SEQ ID NO: 2372900 - DNA, 25 bp, Homo sapien
tctttataggacaagattgccagag

SEQ ID NO: 2372901 - DNA, 25 bp, Homo sapien
gagataaaggtcaactacgtacaca

SEQ ID NO: 2372902 - DNA, 25 bp, Homo sapien
aagagatttttttcaacttattcat

SEQ ID NO: 2372903 - DNA, 25 bp, Homo sapien
tgtagtaattaacaagttggtaaga

SEQ ID NO: 2372904 - DNA, 25 bp, Homo sapien
ctctgcatctcggtcatttaccttt

SEQ ID NO: 2372905 - DNA, 25 bp, Homo sapien
tgcatctcggtcatttacctttttg

SEQ ID NO: 2372906 - DNA, 25 bp, Homo sapien
ggtgccagggatttgctgttgtcca

SEQ ID NO: 2372907 - DNA, 25 bp, Homo sapien
tgttgtccagattctctcatggatt

SEQ ID NO: 2372908 - DNA, 25 bp, Homo sapien
gtaggtgccagggatttgctgttgt

SEQ ID NO: 2372909 - DNA, 25 bp, Homo sapien
taggtgccagggatttgctgttgtc

SEQ ID NO: 2372910 - DNA, 25 bp, Homo sapien
tttctttgcagtctcttccctcaga

SEQ ID NO: 2372911 - DNA, 25 bp, Homo sapien
ttctttgcagtctcttccctcagaa

SEQ ID NO: 2372912 - DNA, 25 bp, Homo sapien
ctcaataaggtgtccccatagtgga

SEQ ID NO: 2372913 - DNA, 25 bp, Homo sapien
gatcttttcggctggctggaattta

SEQ ID NO: 2372914 - DNA, 25 bp, Homo sapien
taaggtgtccccatagtggatttct

SEQ ID NO: 2372915 - DNA, 25 bp, Homo sapien
ccccatagtggatttctgagatctt

SEQ ID NO: 2372916 - DNA, 25 bp, Homo sapien
ttagcgagggagaaatgatgcagct

SEQ ID NO: 2372917 - DNA, 25 bp, Homo sapien
aatgggcgacgtgtgactctagctc

SEQ ID NO: 2372918 - DNA, 25 bp, Homo sapien
agtgaatgggcgacgtgtgactcta

SEQ ID NO: 2372919 - DNA, 25 bp, Homo sapien
cgtgagcctcggttagcgagggaga

SEQ ID NO: 2372920 - DNA, 25 bp, Homo sapien
tgtggtcaatagtcagggcctccag

SEQ ID NO: 2372921 - DNA, 25 bp, Homo sapien
ggtcaatagtcagggcctccagaag

SEQ ID NO: 2372922 - DNA, 25 bp, Homo sapien
gtcaatagtcagggcctccagaagc

SEQ ID NO: 2372923 - DNA, 25 bp, Homo sapien
gtggtcaatagtcagggcctccaga

SEQ ID NO: 2372924 - DNA, 25 bp, Homo sapien
tagtctaagacaagttgaagggctg

SEQ ID NO: 2372925 - DNA, 25 bp, Homo sapien
ctagtctaagacaagttgaagggct

SEQ ID NO: 2372926 - DNA, 25 bp, Homo sapien
agtctaagacaagttgaagggctga

SEQ ID NO: 2372927 - DNA, 25 bp, Homo sapien
gtctaagacaagttgaagggctgag

SEQ ID NO: 2372928 - DNA, 25 bp, Homo sapien
ctttggcgctgtgatgaaatgctcc

SEQ ID NO: 2372929 - DNA, 25 bp, Homo sapien
atggtgctcttgcttccacccgggt

SEQ ID NO: 2372930 - DNA, 25 bp, Homo sapien
ggtgctcttgcttccacccgggtcc

SEQ ID NO: 2372931 - DNA, 25 bp, Homo sapien
tttggcgctgtgatgaaatgctccc

SEQ ID NO: 2372932 - DNA, 25 bp, Homo sapien
agtaggggttgcagactggtggccc

SEQ ID NO: 2372933 - DNA, 25 bp, Homo sapien
aagtaggggttgcagactggtggcc

SEQ ID NO: 2372934 - DNA, 25 bp, Homo sapien
gacacctgggcctcaaagaataatt

SEQ ID NO: 2372935 - DNA, 25 bp, Homo sapien
caaactgtgtatgaggatgggtcta

SEQ ID NO: 2372936 - DNA, 25 bp, Homo sapien
tattgaacgagctcatggttgccca

SEQ ID NO: 2372937 - DNA, 25 bp, Homo sapien
catgatgatgtcaaggcccagaaca

SEQ ID NO: 2372938 - DNA, 25 bp, Homo sapien
cttggtttgcggttggtgactcgca

SEQ ID NO: 2372939 - DNA, 25 bp, Homo sapien
cggttggtgactcgcattgtgggaa

SEQ ID NO: 2372940 - DNA, 25 bp, Homo sapien
tttgcggttggtgactcgcattgtg

SEQ ID NO: 2372941 - DNA, 25 bp, Homo sapien
ttggtgactcgcattgtgggaattt

SEQ ID NO: 2372942 - DNA, 25 bp, Homo sapien
tcatatacagaggttcttcatctgg

SEQ ID NO: 2372943 - DNA, 25 bp, Homo sapien
ccagggttcacagagatcatgctgc

SEQ ID NO: 2372944 - DNA, 25 bp, Homo sapien
cgactcagactgagtgtggagcctc

SEQ ID NO: 2372945 - DNA, 25 bp, Homo sapien
ggttgaagatgactcattgtcctca

SEQ ID NO: 2372946 - DNA, 25 bp, Homo sapien
gtctccctcatattttgagccactg

SEQ ID NO: 2372947 - DNA, 25 bp, Homo sapien
cagagtggtacaacttccatctata

SEQ ID NO: 2372948 - DNA, 25 bp, Homo sapien
ttcagggtgaagatcacagagtggt

SEQ ID NO: 2372949 - DNA, 25 bp, Homo sapien
tcacagagtggtacaacttccatct

SEQ ID NO: 2372950 - DNA, 25 bp, Homo sapien
gttgtctcagttctgtcgctggaca

SEQ ID NO: 2372951 - DNA, 25 bp, Homo sapien
gagagaacactggccgccagtgttg

SEQ ID NO: 2372952 - DNA, 25 bp, Homo sapien
gagaacactggccgccagtgttgtc

SEQ ID NO: 2372953 - DNA, 25 bp, Homo sapien
aacactggccgccagtgttgtctca

SEQ ID NO: 2372954 - DNA, 25 bp, Homo sapien
agaggtggctgatagtgttgggcat

SEQ ID NO: 2372955 - DNA, 25 bp, Homo sapien
aagaggtggctgatagtgttgggca

SEQ ID NO: 2372956 - DNA, 25 bp, Homo sapien
gaagaggtggctgatagtgttgggc

SEQ ID NO: 2372957 - DNA, 25 bp, Homo sapien
ctattgtgactgtcctccgggcatc

SEQ ID NO: 2372958 - DNA, 25 bp, Homo sapien
tcctccgggcatcttcccgaaccat

SEQ ID NO: 2372959 - DNA, 25 bp, Homo sapien
tgtcctccgggcatcttcccgaacc

SEQ ID NO: 2372960 - DNA, 25 bp, Homo sapien
attgtgactgtcctccgggcatctt

SEQ ID NO: 2372961 - DNA, 25 bp, Homo sapien
gagtggtctgcatttccttataagc

SEQ ID NO: 2372962 - DNA, 25 bp, Homo sapien
tccttataagcagaattactcttgt

SEQ ID NO: 2372963 - DNA, 25 bp, Homo sapien
cttgatttgagagtggtctgcattt

SEQ ID NO: 2372964 - DNA, 25 bp, Homo sapien
gcatttccttataagcagaattact

SEQ ID NO: 2372965 - DNA, 25 bp, Homo sapien
tttctgcacttgtactgctggatct

SEQ ID NO: 2372966 - DNA, 25 bp, Homo sapien
gcctcctgggctacgctgtaaaact

SEQ ID NO: 2372967 - DNA, 25 bp, Homo sapien
cactcttgtagtggatgttgatgtc

SEQ ID NO: 2372968 - DNA, 25 bp, Homo sapien
aaaacttggccctcatggtgttaca

SEQ ID NO: 2372969 - DNA, 25 bp, Homo sapien
tcatggtgttacacaccccactctt

SEQ ID NO: 2372970 - DNA, 25 bp, Homo sapien
gagacaaggacaaaagcacggaact

SEQ ID NO: 2372971 - DNA, 25 bp, Homo sapien
catctccttttactacagatatgtg

SEQ ID NO: 2372972 - DNA, 25 bp, Homo sapien
tcatttttgctatgtccttttgaaa

SEQ ID NO: 2372973 - DNA, 25 bp, Homo sapien
tctggatacctctctcttcttggcg

SEQ ID NO: 2372974 - DNA, 25 bp, Homo sapien
ggcggaagttctttagatcctctgg

SEQ ID NO: 2372975 - DNA, 25 bp, Homo sapien
tcaccaggatctttttggcggggcg

SEQ ID NO: 2372976 - DNA, 25 bp, Homo sapien
gtcgaatccgcaagtccaggttttc

SEQ ID NO: 2372977 - DNA, 25 bp, Homo sapien
agcacagttcccaaatcctcagatc

SEQ ID NO: 2372978 - DNA, 25 bp, Homo sapien
ggcatatggatgatgtgttctcgca

SEQ ID NO: 2372979 - DNA, 25 bp, Homo sapien
cgctgtagggcccaatgggtatgtt

SEQ ID NO: 2372980 - DNA, 25 bp, Homo sapien
tgcagccagctgatgtaatcctctt

SEQ ID NO: 2372981 - DNA, 25 bp, Homo sapien
gggtatgttgatccggctctgcagc

SEQ ID NO: 2372982 - DNA, 25 bp, Homo sapien
gaacacaggcaggatacaggaacat

SEQ ID NO: 2372983 - DNA, 25 bp, Homo sapien
catccatgagggtagtcaggaggca

SEQ ID NO: 2372984 - DNA, 25 bp, Homo sapien
tatgctgtagcttaatcggtgtgaa

SEQ ID NO: 2372985 - DNA, 25 bp, Homo sapien
caggaacatgatataggcaaacact

SEQ ID NO: 2372986 - DNA, 25 bp, Homo sapien
ccaaatagcttttcaaggtttactg

SEQ ID NO: 2372987 - DNA, 25 bp, Homo sapien
ctttgcaccccaaatagcttttcaa

SEQ ID NO: 2372988 - DNA, 25 bp, Homo sapien
caaatagcttttcaaggtttactgt

SEQ ID NO: 2372989 - DNA, 25 bp, Homo sapien
tgcaccccaaatagcttttcaaggt

SEQ ID NO: 2372990 - DNA, 25 bp, Homo sapien
ccagactccggtggtggctttctgt

SEQ ID NO: 2372991 - DNA, 25 bp, Homo sapien
tgacttgccagactccggtggtggc

SEQ ID NO: 2372992 - DNA, 25 bp, Homo sapien
tgccagactccggtggtggctttct

SEQ ID NO: 2372993 - DNA, 25 bp, Homo sapien
cttttttgacttgccagactccggt

SEQ ID NO: 2372994 - DNA, 25 bp, Homo sapien
tttaaatccaaattggcactttcac

SEQ ID NO: 2372995 - DNA, 25 bp, Homo sapien
taaatccaaattggcactttcacac

SEQ ID NO: 2372996 - DNA, 25 bp, Homo sapien
atccaaattggcactttcacacctg

SEQ ID NO: 2372997 - DNA, 25 bp, Homo sapien
aatccaaattggcactttcacacct

SEQ ID NO: 2372998 - DNA, 25 bp, Homo sapien
gtctgctgttcttcattggtgagtt

SEQ ID NO: 2372999 - DNA, 25 bp, Homo sapien
ctgctgttcttcattggtgagtttt

SEQ ID NO: 2373000 - DNA, 25 bp, Homo sapien
ctgtctgctgttcttcattggtgag

SEQ ID NO: 2373001 - DNA, 25 bp, Homo sapien
tgtctgctgttcttcattggtgagt

SEQ ID NO: 2373002 - DNA, 25 bp, Homo sapien
cccacttcctggccagcctgttcac

SEQ ID NO: 2373003 - DNA, 25 bp, Homo sapien
ctgacccacttcctggccagcctgt

SEQ ID NO: 2373004 - DNA, 25 bp, Homo sapien
catctgacccacttcctggccagcc

SEQ ID NO: 2373005 - DNA, 25 bp, Homo sapien
gacccacttcctggccagcctgttc

SEQ ID NO: 2373006 - DNA, 25 bp, Homo sapien
ggtgttaataacatcctgtgctgag

SEQ ID NO: 2373007 - DNA, 25 bp, Homo sapien
taacatcctgtgctgagtgggcaca

SEQ ID NO: 2373008 - DNA, 25 bp, Homo sapien
gggtgcaatggtgttaataacatcc

SEQ ID NO: 2373009 - DNA, 25 bp, Homo sapien
caatggtgttaataacatcctgtgc

SEQ ID NO: 2373010 - DNA, 25 bp, Homo sapien
gaaaggcctgaggactctctgggat

SEQ ID NO: 2373011 - DNA, 25 bp, Homo sapien
tagaaaggcctgaggactctctggg

SEQ ID NO: 2373012 - DNA, 25 bp, Homo sapien
ttagaaaggcctgaggactctctgg

SEQ ID NO: 2373013 - DNA, 25 bp, Homo sapien
aaggcctgaggactctctgggatcc

SEQ ID NO: 2373014 - DNA, 25 bp, Homo sapien
taaccacagggaagagcgtagtctt

SEQ ID NO: 2373015 - DNA, 25 bp, Homo sapien
tgtaaccacagggaagagcgtagtc

SEQ ID NO: 2373016 - DNA, 25 bp, Homo sapien
accacagggaagagcgtagtctttc

SEQ ID NO: 2373017 - DNA, 25 bp, Homo sapien
ccacagggaagagcgtagtctttca

SEQ ID NO: 2373018 - DNA, 25 bp, Homo sapien
gagtcatatgaagtcgaggagccct

SEQ ID NO: 2373019 - DNA, 25 bp, Homo sapien
tcttggagtcatatgaagtcgagga

SEQ ID NO: 2373020 - DNA, 25 bp, Homo sapien
aagcacctaatcttggagtcatatg

SEQ ID NO: 2373021 - DNA, 25 bp, Homo sapien
tgaagtcgaggagcccttttgggct

SEQ ID NO: 2373022 - DNA, 25 bp, Homo sapien
gggctttcacaatggattttagtgc

SEQ ID NO: 2373023 - DNA, 25 bp, Homo sapien
tggattttagtgcttcagagttgaa

SEQ ID NO: 2373024 - DNA, 25 bp, Homo sapien
tgtaaagtgagttgccttgtgaatg

SEQ ID NO: 2373025 - DNA, 25 bp, Homo sapien
gactaaattgcagttgccctaaaaa

SEQ ID NO: 2373026 - DNA, 25 bp, Homo sapien
tccagtatagtcagtcagtgggcac

SEQ ID NO: 2373027 - DNA, 25 bp, Homo sapien
tggagtccagtatagtcagtcagtg

SEQ ID NO: 2373028 - DNA, 25 bp, Homo sapien
gggctcaagagactggagtccagta

SEQ ID NO: 2373029 - DNA, 25 bp, Homo sapien
caagagactggagtccagtatagtc

SEQ ID NO: 2373030 - DNA, 25 bp, Homo sapien
ggaaggaggacgcaaaggcccatta

SEQ ID NO: 2373031 - DNA, 25 bp, Homo sapien
gacgcaaaggcccattaagttccaa

SEQ ID NO: 2373032 - DNA, 25 bp, Homo sapien
gcccattaagttccaaattggccag

SEQ ID NO: 2373033 - DNA, 25 bp, Homo sapien
ttccaaattggccagcccgtgggct

SEQ ID NO: 2373034 - DNA, 25 bp, Homo sapien
ctggccgccggcttgtggcgaggct

SEQ ID NO: 2373035 - DNA, 25 bp, Homo sapien
aacacgagacgatggtgagccacag

SEQ ID NO: 2373036 - DNA, 25 bp, Homo sapien
agaccaaagccacgatgttgatggg

SEQ ID NO: 2373037 - DNA, 25 bp, Homo sapien
ggtacgcagggcaaaaacacgagac

SEQ ID NO: 2373038 - DNA, 25 bp, Homo sapien
gactgctgtccaaagccctcttgaa

SEQ ID NO: 2373039 - DNA, 25 bp, Homo sapien
gtcagaggagtcagcaaagtccacg

SEQ ID NO: 2373040 - DNA, 25 bp, Homo sapien
cagcaaagtccacggaagaacttcc

SEQ ID NO: 2373041 - DNA, 25 bp, Homo sapien
gaggagtcagcaaagtccacggaag

SEQ ID NO: 2373042 - DNA, 25 bp, Homo sapien
gaaggtcagaggagtcagcaaagtc

SEQ ID NO: 2373043 - DNA, 25 bp, Homo sapien
agagggttgagaagccccgggcaag

SEQ ID NO: 2373044 - DNA, 25 bp, Homo sapien
gcccttgggcgcagcaaagagagaa

SEQ ID NO: 2373045 - DNA, 25 bp, Homo sapien
ggaaaggaacgtagagcctgcatgc

SEQ ID NO: 2373046 - DNA, 25 bp, Homo sapien
aactgttgcctggacagagcgtgcc

SEQ ID NO: 2373047 - DNA, 25 bp, Homo sapien
caaagcgcggaaacgggatcaagga

SEQ ID NO: 2373048 - DNA, 25 bp, Homo sapien
agctgctgcagtcaataaggcgagg

SEQ ID NO: 2373049 - DNA, 25 bp, Homo sapien
tagcaggcgctcgtcgccctcctgg

SEQ ID NO: 2373050 - DNA, 25 bp, Homo sapien
agtcaataaggcgagggcctagcag

SEQ ID NO: 2373051 - DNA, 25 bp, Homo sapien
tcgccctcctggtggggttcgctcg

SEQ ID NO: 2373052 - DNA, 25 bp, Homo sapien
tgtcccgggacagtgccggtacgaa

SEQ ID NO: 2373053 - DNA, 25 bp, Homo sapien
caactgcaagggttgtcccgggaca

SEQ ID NO: 2373054 - DNA, 25 bp, Homo sapien
gggacagtgccggtacgaacctcac

SEQ ID NO: 2373055 - DNA, 25 bp, Homo sapien
gggagggagcgcaactgcaagggtt

SEQ ID NO: 2373056 - DNA, 25 bp, Homo sapien
ctctgcgtctgtggccggggagttc

SEQ ID NO: 2373057 - DNA, 25 bp, Homo sapien
agcgctgaatcagggctctgcgtct

SEQ ID NO: 2373058 - DNA, 25 bp, Homo sapien
cacagcgctgaatcagggctctgcg

SEQ ID NO: 2373059 - DNA, 25 bp, Homo sapien
tcacagcgctgaatcagggctctgc

SEQ ID NO: 2373060 - DNA, 25 bp, Homo sapien
tttggactggtcacatccttggaga

SEQ ID NO: 2373061 - DNA, 25 bp, Homo sapien
cattaatctcgttttcagcttggca

SEQ ID NO: 2373062 - DNA, 25 bp, Homo sapien
tccttgttcaacattgcagctttcc

SEQ ID NO: 2373063 - DNA, 25 bp, Homo sapien
taatcttctgtctgagttggtgagg

SEQ ID NO: 2373064 - DNA, 25 bp, Homo sapien
ccttcagggcagccttctcaggcct

SEQ ID NO: 2373065 - DNA, 25 bp, Homo sapien
caccttcagggcagccttctcaggc

SEQ ID NO: 2373066 - DNA, 25 bp, Homo sapien
tcagggcagccttctcaggcctcct

SEQ ID NO: 2373067 - DNA, 25 bp, Homo sapien
ctgttggcaccttcagggcagcctt

SEQ ID NO: 2373068 - DNA, 25 bp, Homo sapien
accatttctatgctgaacctcaaaa

SEQ ID NO: 2373069 - DNA, 25 bp, Homo sapien
gaccatttctatgctgaacctcaaa

SEQ ID NO: 2373070 - DNA, 25 bp, Homo sapien
ggcatcttgtatgtgaccctccttc

SEQ ID NO: 2373071 - DNA, 25 bp, Homo sapien
tccagggacatgtaagggagacctt

SEQ ID NO: 2373072 - DNA, 25 bp, Homo sapien
cagtattaagtgtggaagctcctct

SEQ ID NO: 2373073 - DNA, 25 bp, Homo sapien
gagaccttgagtgaatctgggaatg

SEQ ID NO: 2373074 - DNA, 25 bp, Homo sapien
gtgcaagccacaggtgaatcctgcc

SEQ ID NO: 2373075 - DNA, 25 bp, Homo sapien
gggatttgggtgcaagccacaggtg

SEQ ID NO: 2373076 - DNA, 25 bp, Homo sapien
gatttgggtgcaagccacaggtgaa

SEQ ID NO: 2373077 - DNA, 25 bp, Homo sapien
tgggtgcaagccacaggtgaatcct

SEQ ID NO: 2373078 - DNA, 25 bp, Homo sapien
tctccatcgttgtagctgttcagag

SEQ ID NO: 2373079 - DNA, 25 bp, Homo sapien
ggctccttcgtagtctccatcgttg

SEQ ID NO: 2373080 - DNA, 25 bp, Homo sapien
aagtgaactgcacaagaaatgccga

SEQ ID NO: 2373081 - DNA, 25 bp, Homo sapien
gatggaggcgatggctacccactta

SEQ ID NO: 2373082 - DNA, 25 bp, Homo sapien
tactgtcttggttgccaaggttggg

SEQ ID NO: 2373083 - DNA, 25 bp, Homo sapien
ctctgataggaagtggatctaccat

SEQ ID NO: 2373084 - DNA, 25 bp, Homo sapien
ccactggttgttcctgggtctgcct

SEQ ID NO: 2373085 - DNA, 25 bp, Homo sapien
tgcaggcaagaaaccttgagtttcc

SEQ ID NO: 2373086 - DNA, 25 bp, Homo sapien
tcatgggccaacatcaaatttgcca

SEQ ID NO: 2373087 - DNA, 25 bp, Homo sapien
tcacgtgtattctccaaccatcttc

SEQ ID NO: 2373088 - DNA, 25 bp, Homo sapien
gaatatagtcaggttcattcacgtg

SEQ ID NO: 2373089 - DNA, 25 bp, Homo sapien
tcttcatgggccaacatcaaatttg

SEQ ID NO: 2373090 - DNA, 25 bp, Homo sapien
tctgtgggtcatccagttaaccttt

SEQ ID NO: 2373091 - DNA, 25 bp, Homo sapien
tggctgaaggtctcacagtgaataa

SEQ ID NO: 2373092 - DNA, 25 bp, Homo sapien
ggtccaggcagtctggtgccaaaac

SEQ ID NO: 2373093 - DNA, 25 bp, Homo sapien
tttgtgcacccactaaagaacagag

SEQ ID NO: 2373094 - DNA, 25 bp, Homo sapien
cataccattcccccgtaaatcaatc

SEQ ID NO: 2373095 - DNA, 25 bp, Homo sapien
cgactcctctaatgtcagattttcc

SEQ ID NO: 2373096 - DNA, 25 bp, Homo sapien
tcgactcctctaatgtcagattttc

SEQ ID NO: 2373097 - DNA, 25 bp, Homo sapien
cttcgactcctctaatgtcagattt

SEQ ID NO: 2373098 - DNA, 25 bp, Homo sapien
ggcttcgactcctctaatgtcagat

SEQ ID NO: 2373099 - DNA, 25 bp, Homo sapien
caacgggattcgctaaactgagaca

SEQ ID NO: 2373100 - DNA, 25 bp, Homo sapien
tcctgggacaagtgctggctcatca

SEQ ID NO: 2373101 - DNA, 25 bp, Homo sapien
tgaccaacgtggatgcaagcaaggg

SEQ ID NO: 2373102 - DNA, 25 bp, Homo sapien
caatgactttggctgatccggctgt

SEQ ID NO: 2373103 - DNA, 25 bp, Homo sapien
acaaaaacaattaaccatatatgtg

SEQ ID NO: 2373104 - DNA, 25 bp, Homo sapien
caaaaacaattaaccatatatgtgt

SEQ ID NO: 2373105 - DNA, 25 bp, Homo sapien
ccaaaaatcaatttacagccaggtg

SEQ ID NO: 2373106 - DNA, 25 bp, Homo sapien
aaatcaatttacagccaggtgccgt

SEQ ID NO: 2373107 - DNA, 25 bp, Homo sapien
aaaatcaatttacagccaggtgccg

SEQ ID NO: 2373108 - DNA, 25 bp, Homo sapien
aaaaatcaatttacagccaggtgcc

SEQ ID NO: 2373109 - DNA, 25 bp, Homo sapien
atgcttctaagaaaacaggtgtaca

SEQ ID NO: 2373110 - DNA, 25 bp, Homo sapien
tctcagatgtatggaatcaaacagt

SEQ ID NO: 2373111 - DNA, 25 bp, Homo sapien
aattttgctgctgcaagtatctcag

SEQ ID NO: 2373112 - DNA, 25 bp, Homo sapien
tcatgtccctttgagttgttttggg

SEQ ID NO: 2373113 - DNA, 25 bp, Homo sapien
ttccggtcttgagcggtgcggtaac

SEQ ID NO: 2373114 - DNA, 25 bp, Homo sapien
cggccagctaaacgcgcgaggctat

SEQ ID NO: 2373115 - DNA, 25 bp, Homo sapien
gaggctatctcgattccatttccgc

SEQ ID NO: 2373116 - DNA, 25 bp, Homo sapien
gcttccggcgactccgtaagtcggc

SEQ ID NO: 2373117 - DNA, 25 bp, Homo sapien
cgcaaggggcgcgaagataaaccga

SEQ ID NO: 2373118 - DNA, 25 bp, Homo sapien
ccaggcaagccgcggcaagaacgca

SEQ ID NO: 2373119 - DNA, 25 bp, Homo sapien
gcgcgaagataaaccgacactttcc

SEQ ID NO: 2373120 - DNA, 25 bp, Homo sapien
gcaagccgcggcaagaacgcaaggg

SEQ ID NO: 2373121 - DNA, 25 bp, Homo sapien
gaaagggaccctgagcaagggactc

SEQ ID NO: 2373122 - DNA, 25 bp, Homo sapien
ttccggctgagtcggcagggttgcc

SEQ ID NO: 2373123 - DNA, 25 bp, Homo sapien
tcccaaggagcctgcggaaggagtc

SEQ ID NO: 2373124 - DNA, 25 bp, Homo sapien
gccgagctctcgcaatcgcgcttta

SEQ ID NO: 2373125 - DNA, 25 bp, Homo sapien
cacagggaaggcggacggcgcctca

SEQ ID NO: 2373126 - DNA, 25 bp, Homo sapien
ctgcggggacacagggaaggcggac

SEQ ID NO: 2373127 - DNA, 25 bp, Homo sapien
gggacacagggaaggcggacggcgc

SEQ ID NO: 2373128 - DNA, 25 bp, Homo sapien
gacacagggaaggcggacggcgcct

SEQ ID NO: 2373129 - DNA, 25 bp, Homo sapien
tccggggcgtcttatggccaccatg

SEQ ID NO: 2373130 - DNA, 25 bp, Homo sapien
agtggaagaggtcggcgtcttcggg

SEQ ID NO: 2373131 - DNA, 25 bp, Homo sapien
ttgatttcctcggagtggaagaggt

SEQ ID NO: 2373132 - DNA, 25 bp, Homo sapien
gcggcgcgctcactgctggtattgc

SEQ ID NO: 2373133 - DNA, 25 bp, Homo sapien
ggatggtttgagtccgggagacgaa

SEQ ID NO: 2373134 - DNA, 25 bp, Homo sapien
gatggtttgagtccgggagacgaag

SEQ ID NO: 2373135 - DNA, 25 bp, Homo sapien
atggtttgagtccgggagacgaagg

SEQ ID NO: 2373136 - DNA, 25 bp, Homo sapien
ataagtagggtgggttcagtggctc

SEQ ID NO: 2373137 - DNA, 25 bp, Homo sapien
tgttctctgacagtgagtgagtctc

SEQ ID NO: 2373138 - DNA, 25 bp, Homo sapien
gttctctgacagtgagtgagtctca

SEQ ID NO: 2373139 - DNA, 25 bp, Homo sapien
gagcctgggcgggagctttatcatt

SEQ ID NO: 2373140 - DNA, 25 bp, Homo sapien
atcgaaacaccgttggccgagcctg

SEQ ID NO: 2373141 - DNA, 25 bp, Homo sapien
gaagtttactccagttgttgaagga

SEQ ID NO: 2373142 - DNA, 25 bp, Homo sapien
acttccagatcatgctgccaggcca

SEQ ID NO: 2373143 - DNA, 25 bp, Homo sapien
aagaacttgtactgatgctctcctt

SEQ ID NO: 2373144 - DNA, 25 bp, Homo sapien
ctctccttccggcagatccaggatg

SEQ ID NO: 2373145 - DNA, 25 bp, Homo sapien
ctcggaagggtcgtgcgtccactga

SEQ ID NO: 2373146 - DNA, 25 bp, Homo sapien
gggtcgtgcgtccactgaccatcca

SEQ ID NO: 2373147 - DNA, 25 bp, Homo sapien
gttaactgtgccaagctggctggtt

SEQ ID NO: 2373148 - DNA, 25 bp, Homo sapien
cagacacatcggagcacttttggga

SEQ ID NO: 2373149 - DNA, 25 bp, Homo sapien
gtgccaagctggctggttactatgg

SEQ ID NO: 2373150 - DNA, 25 bp, Homo sapien
tgggaatccaccattaaagcatcaa

SEQ ID NO: 2373151 - DNA, 25 bp, Homo sapien
atgtggtataaaataactgtgttca

SEQ ID NO: 2373152 - DNA, 25 bp, Homo sapien
ctgcacgcatgtggtataaaataac

SEQ ID NO: 2373153 - DNA, 25 bp, Homo sapien
tgcacgcatgtggtataaaataact

SEQ ID NO: 2373154 - DNA, 25 bp, Homo sapien
tggtataaaataactgtgttcatac

SEQ ID NO: 2373155 - DNA, 25 bp, Homo sapien
tagggggtgcccgaaagcgctcttc

SEQ ID NO: 2373156 - DNA, 25 bp, Homo sapien
gaaatccccgtgtccttgttcagga

SEQ ID NO: 2373157 - DNA, 25 bp, Homo sapien
tttgcagacgtagggctcctgatgg

SEQ ID NO: 2373158 - DNA, 25 bp, Homo sapien
cccgaaagcgctcttcgggtttgca

SEQ ID NO: 2373159 - DNA, 25 bp, Homo sapien
tgggcaagacaccactactctggaa

SEQ ID NO: 2373160 - DNA, 25 bp, Homo sapien
ccaaatcaggcagcgcaagggcttg

SEQ ID NO: 2373161 - DNA, 25 bp, Homo sapien
tctgtgacagcatggataaacctgg

SEQ ID NO: 2373162 - DNA, 25 bp, Homo sapien
tgctgagagcaccaactaccaagga

SEQ ID NO: 2373163 - DNA, 25 bp, Homo sapien
gatagacagcgcgtataggtggttc

SEQ ID NO: 2373164 - DNA, 25 bp, Homo sapien
tggttcagcatgacgtgattgggct

SEQ ID NO: 2373165 - DNA, 25 bp, Homo sapien
gacagcgcgtataggtggttcagca

SEQ ID NO: 2373166 - DNA, 25 bp, Homo sapien
cgtgattgggctcaggaagcaaagc

SEQ ID NO: 2373167 - DNA, 25 bp, Homo sapien
tcatatgggcttgtataacaaggtg

SEQ ID NO: 2373168 - DNA, 25 bp, Homo sapien
cttcttgtaccggtgggttgcgctg

SEQ ID NO: 2373169 - DNA, 25 bp, Homo sapien
taccggtgggttgcgctgagcacca

SEQ ID NO: 2373170 - DNA, 25 bp, Homo sapien
aacaaggtggtgacgtacttcttct

SEQ ID NO: 2373171 - DNA, 25 bp, Homo sapien
tatagaaatgacacctccctggagc

SEQ ID NO: 2373172 - DNA, 25 bp, Homo sapien
tgccacgggaccttgtaaaatcacg

SEQ ID NO: 2373173 - DNA, 25 bp, Homo sapien
tcccgggaaactgagctgcgtataa

SEQ ID NO: 2373174 - DNA, 25 bp, Homo sapien
tccctggagccgagagacaatctgt

SEQ ID NO: 2373175 - DNA, 25 bp, Homo sapien
caccgaggcatagtgtagaacagtc

SEQ ID NO: 2373176 - DNA, 25 bp, Homo sapien
agaacagtcccggtcagttggccaa

SEQ ID NO: 2373177 - DNA, 25 bp, Homo sapien
tgcaatagacttgctcggagcccag

SEQ ID NO: 2373178 - DNA, 25 bp, Homo sapien
tttttagctcgaccacatcatcagg

SEQ ID NO: 2373179 - DNA, 25 bp, Homo sapien
atgttctgaaatgccgtcgtggccc

SEQ ID NO: 2373180 - DNA, 25 bp, Homo sapien
gccatctgaaagcttagtgacttca

SEQ ID NO: 2373181 - DNA, 25 bp, Homo sapien
gtcgtggcccagatacccttcgagg

SEQ ID NO: 2373182 - DNA, 25 bp, Homo sapien
cagatacccttcgaggctattttgt

SEQ ID NO: 2373183 - DNA, 25 bp, Homo sapien
tagccgcacagacgatctcaagtgg

SEQ ID NO: 2373184 - DNA, 25 bp, Homo sapien
tcttggctgtgctaatgcccacgtg

SEQ ID NO: 2373185 - DNA, 25 bp, Homo sapien
caagtggagtcgcttacctttggcc

SEQ ID NO: 2373186 - DNA, 25 bp, Homo sapien
gattcttacggaagacgtagccgca

SEQ ID NO: 2373187 - DNA, 25 bp, Homo sapien
tcatgagacatattccaaggcaaga

SEQ ID NO: 2373188 - DNA, 25 bp, Homo sapien
gaggtggtggccattcaagcatctt

SEQ ID NO: 2373189 - DNA, 25 bp, Homo sapien
cagttgtctcaatatttccggtgcc

SEQ ID NO: 2373190 - DNA, 25 bp, Homo sapien
catcttcgctgtaagggcatgagca

SEQ ID NO: 2373191 - DNA, 25 bp, Homo sapien
gacctgcctgaagtgtctgactgga

SEQ ID NO: 2373192 - DNA, 25 bp, Homo sapien
tagagggagttagcaagtcacaagt

SEQ ID NO: 2373193 - DNA, 25 bp, Homo sapien
caacccttttagattgcaggagaca

SEQ ID NO: 2373194 - DNA, 25 bp, Homo sapien
catgcatacatgactctagagggag

SEQ ID NO: 2373195 - DNA, 25 bp, Homo sapien
tcatcaccccaaatgcatagtttaa

SEQ ID NO: 2373196 - DNA, 25 bp, Homo sapien
taggtttgctattggtgttgtatgt

SEQ ID NO: 2373197 - DNA, 25 bp, Homo sapien
tgttacaatcaatgggcctgcactg

SEQ ID NO: 2373198 - DNA, 25 bp, Homo sapien
gctatcaacaccctgtaccagagtg

SEQ ID NO: 2373199 - DNA, 25 bp, Homo sapien
agtaggcaagcaacgtgtgggcagg

SEQ ID NO: 2373200 - DNA, 25 bp, Homo sapien
taggcaagcaacgtgtgggcaggct

SEQ ID NO: 2373201 - DNA, 25 bp, Homo sapien
taactggctgtgtatccgagatgtg

SEQ ID NO: 2373202 - DNA, 25 bp, Homo sapien
gggataactggctgtgtatccgaga

SEQ ID NO: 2373203 - DNA, 25 bp, Homo sapien
gcctcctcccatcgtacactgtgtt

SEQ ID NO: 2373204 - DNA, 25 bp, Homo sapien
ggcctcctcccatcgtacactgtgt

SEQ ID NO: 2373205 - DNA, 25 bp, Homo sapien
tcctcccatcgtacactgtgttcct

SEQ ID NO: 2373206 - DNA, 25 bp, Homo sapien
cctcctcccatcgtacactgtgttc

SEQ ID NO: 2373207 - DNA, 25 bp, Homo sapien
tcacacgtcgtactggaaggacgtg

SEQ ID NO: 2373208 - DNA, 25 bp, Homo sapien
tgcaagcttgcttgggtgttggtca

SEQ ID NO: 2373209 - DNA, 25 bp, Homo sapien
gttctagttctggttagcagtgggc

SEQ ID NO: 2373210 - DNA, 25 bp, Homo sapien
aaggacgtgtggagagttctagttc

SEQ ID NO: 2373211 - DNA, 25 bp, Homo sapien
gattctgacactaacagggaagatt

SEQ ID NO: 2373212 - DNA, 25 bp, Homo sapien
tgagcctgtgttgatggaagtacac

SEQ ID NO: 2373213 - DNA, 25 bp, Homo sapien
gtgtcacagaactagtaagtggtgg

SEQ ID NO: 2373214 - DNA, 25 bp, Homo sapien
taaattctcttgagagactggaggt

SEQ ID NO: 2373215 - DNA, 25 bp, Homo sapien
cctgaaatgaccgtgtggaagtgtg

SEQ ID NO: 2373216 - DNA, 25 bp, Homo sapien
gttgtacaaccatgaccgctctcca

SEQ ID NO: 2373217 - DNA, 25 bp, Homo sapien
cacggcaggcaaacaatagagatat

SEQ ID NO: 2373218 - DNA, 25 bp, Homo sapien
gaagaggcattacgtgtagccctga

SEQ ID NO: 2373219 - DNA, 25 bp, Homo sapien
tgtacgaagctacttcgaggactgt

SEQ ID NO: 2373220 - DNA, 25 bp, Homo sapien
cacttggggaaactacagtcttata

SEQ ID NO: 2373221 - DNA, 25 bp, Homo sapien
gctacttcgaggactgttggcagct

SEQ ID NO: 2373222 - DNA, 25 bp, Homo sapien
gtttctcatgtacgaagctacttcg

SEQ ID NO: 2373223 - DNA, 25 bp, Homo sapien
cagtggggcaatctcggctgacggc

SEQ ID NO: 2373224 - DNA, 25 bp, Homo sapien
gtggggcaatctcggctgacggcaa

SEQ ID NO: 2373225 - DNA, 25 bp, Homo sapien
ggggcaatctcggctgacggcaacc

SEQ ID NO: 2373226 - DNA, 25 bp, Homo sapien
tctgcctcctgggttcaagcaattc

SEQ ID NO: 2373227 - DNA, 25 bp, Homo sapien
atggattccatgtctagtggcttta

SEQ ID NO: 2373228 - DNA, 25 bp, Homo sapien
ggctttagcaggaagtttgctttgg

SEQ ID NO: 2373229 - DNA, 25 bp, Homo sapien
tataaataagcagacctcttgccca

SEQ ID NO: 2373230 - DNA, 25 bp, Homo sapien
ttccatgtctagtggctttagcagg

SEQ ID NO: 2373231 - DNA, 25 bp, Homo sapien
aaggtgaagcaggttcccgcagcat

SEQ ID NO: 2373232 - DNA, 25 bp, Homo sapien
aaaggtgaagcaggttcccgcagca

SEQ ID NO: 2373233 - DNA, 25 bp, Homo sapien
ttgagtcatgccgattaggtttaac

SEQ ID NO: 2373234 - DNA, 25 bp, Homo sapien
tcaaaagacctgacacctctttcaa

SEQ ID NO: 2373235 - DNA, 25 bp, Homo sapien
gcagtgaagtaaagctcaaaagacc

SEQ ID NO: 2373236 - DNA, 25 bp, Homo sapien
cctctttcaacttttggcttgagtc

SEQ ID NO: 2373237 - DNA, 25 bp, Homo sapien
tccatgactggtacccacttttggg

SEQ ID NO: 2373238 - DNA, 25 bp, Homo sapien
caaaggctaagattaagtctgcagg

SEQ ID NO: 2373239 - DNA, 25 bp, Homo sapien
tacattacttgtatgggcccgggct

SEQ ID NO: 2373240 - DNA, 25 bp, Homo sapien
tctgcaggactcaagctaggttgtg

SEQ ID NO: 2373241 - DNA, 25 bp, Homo sapien
gccgggttctcagccgccctgttgc

SEQ ID NO: 2373242 - DNA, 25 bp, Homo sapien
cagagactgagggtcggcgaagcgg

SEQ ID NO: 2373243 - DNA, 25 bp, Homo sapien
gggaggaagcgaggaggaacgccgc

SEQ ID NO: 2373244 - DNA, 25 bp, Homo sapien
gggcgggctgcgctccgctgtcgcc

SEQ ID NO: 2373245 - DNA, 25 bp, Homo sapien
gcggcggcgggactccggactgcgt

SEQ ID NO: 2373246 - DNA, 25 bp, Homo sapien
gcgctgtccggctcggcgggtgctg

SEQ ID NO: 2373247 - DNA, 25 bp, Homo sapien
taacgccagttctagctccccggag

SEQ ID NO: 2373248 - DNA, 25 bp, Homo sapien
gtgctgaagcgcggccgaccaagcc

SEQ ID NO: 2373249 - DNA, 25 bp, Homo sapien
cggccccctcggccagagacccagg

SEQ ID NO: 2373250 - DNA, 25 bp, Homo sapien
cggcggctgcggtccggccccctcg

SEQ ID NO: 2373251 - DNA, 25 bp, Homo sapien
tccggccccctcggccagagaccca

SEQ ID NO: 2373252 - DNA, 25 bp, Homo sapien
tgcggtccggccccctcggccagag

SEQ ID NO: 2373253 - DNA, 25 bp, Homo sapien
cgtactgccggctcatgtcctggtt

SEQ ID NO: 2373254 - DNA, 25 bp, Homo sapien
ttctccttctgtcggatcaccgaca

SEQ ID NO: 2373255 - DNA, 25 bp, Homo sapien
ctggttcctctcgagcagcgcctta

SEQ ID NO: 2373256 - DNA, 25 bp, Homo sapien
tgtctgtcagctccttatgcatctg

SEQ ID NO: 2373257 - DNA, 25 bp, Homo sapien
atgatcagccactccactgcagcct

SEQ ID NO: 2373258 - DNA, 25 bp, Homo sapien
gccaggctcaatggttcactcctgt

SEQ ID NO: 2373259 - DNA, 25 bp, Homo sapien
ttcaatagtgaaagtggcattccct

SEQ ID NO: 2373260 - DNA, 25 bp, Homo sapien
gaaaatgccttgtttgtcccgacat

SEQ ID NO: 2373261 - DNA, 25 bp, Homo sapien
tggaagaaaggtgccaattttgaag

SEQ ID NO: 2373262 - DNA, 25 bp, Homo sapien
tcccgacattagaaaggtgccggcc

SEQ ID NO: 2373263 - DNA, 25 bp, Homo sapien
tacataaaacaggtctttacagaaa

SEQ ID NO: 2373264 - DNA, 25 bp, Homo sapien
ccactagtgactcccattatgtatt

SEQ ID NO: 2373265 - DNA, 25 bp, Homo sapien
gacaatatgctcagaagtccagtac

SEQ ID NO: 2373266 - DNA, 25 bp, Homo sapien
tttcttccctaaatccactagtgac

SEQ ID NO: 2373267 - DNA, 25 bp, Homo sapien
acaggaatgcgccatgacactgggc

SEQ ID NO: 2373268 - DNA, 25 bp, Homo sapien
gtgcagtggtaagactccgtcgccc

SEQ ID NO: 2373269 - DNA, 25 bp, Homo sapien
ggttctagactagggagttcacttg

SEQ ID NO: 2373270 - DNA, 25 bp, Homo sapien
tatccttaggcatgaggttctagac

SEQ ID NO: 2373271 - DNA, 25 bp, Homo sapien
ggttctgttccgacagttcctggac

SEQ ID NO: 2373272 - DNA, 25 bp, Homo sapien
ggacagcccgtgatttttctcgatc

SEQ ID NO: 2373273 - DNA, 25 bp, Homo sapien
cgcagatgaatctgctgcctctcca

SEQ ID NO: 2373274 - DNA, 25 bp, Homo sapien
gctgagctgatccaatagcctttgg

SEQ ID NO: 2373275 - DNA, 25 bp, Homo sapien
tcctccggtaactgaagagttggta

SEQ ID NO: 2373276 - DNA, 25 bp, Homo sapien
catcagtgctgagggatgatatcag

SEQ ID NO: 2373277 - DNA, 25 bp, Homo sapien
atgcagacacggcactgctcccatg

SEQ ID NO: 2373278 - DNA, 25 bp, Homo sapien
tgaggtagaatagtaaatccaagtc

SEQ ID NO: 2373279 - DNA, 25 bp, Homo sapien
gaaatcctgttactgagctggctct

SEQ ID NO: 2373280 - DNA, 25 bp, Homo sapien
caaataaatcaatctagccaggcct

SEQ ID NO: 2373281 - DNA, 25 bp, Homo sapien
caggcctctctggttgaatctttca

SEQ ID NO: 2373282 - DNA, 25 bp, Homo sapien
tgactggattctccagatgggaaac

SEQ ID NO: 2373283 - DNA, 25 bp, Homo sapien
gaaacaaatccttaccttcacacgc

SEQ ID NO: 2373284 - DNA, 25 bp, Homo sapien
ggagcagcttatcaggattttctat

SEQ ID NO: 2373285 - DNA, 25 bp, Homo sapien
ttcctacgttcttttaggagcagct

SEQ ID NO: 2373286 - DNA, 25 bp, Homo sapien
tcaccaagggcctatattcaaggcc

SEQ ID NO: 2373287 - DNA, 25 bp, Homo sapien
ttaataaaacgctatctaaacttgc

SEQ ID NO: 2373288 - DNA, 25 bp, Homo sapien
aaacgctatctaaacttgctgctga

SEQ ID NO: 2373289 - DNA, 25 bp, Homo sapien
cctggatactcagttaataaaacgc

SEQ ID NO: 2373290 - DNA, 25 bp, Homo sapien
gttcctggatactcagttaataaaa

SEQ ID NO: 2373291 - DNA, 25 bp, Homo sapien
caccactacacatggagaatttaaa

SEQ ID NO: 2373292 - DNA, 25 bp, Homo sapien
ctcaagcaatcagccagtactacag

SEQ ID NO: 2373293 - DNA, 25 bp, Homo sapien
taaactctggacgaaggtatcaaag

SEQ ID NO: 2373294 - DNA, 25 bp, Homo sapien
ctgtatagttcaggctagtctcaag

SEQ ID NO: 2373295 - DNA, 25 bp, Homo sapien
gataaggcattagaggctgactgag

SEQ ID NO: 2373296 - DNA, 25 bp, Homo sapien
ccaaaatgagctgtttaaagaacaa

SEQ ID NO: 2373297 - DNA, 25 bp, Homo sapien
tctttgtgtgtggataaggcattag

SEQ ID NO: 2373298 - DNA, 25 bp, Homo sapien
ttcagctagtatgcaaactgtattc

SEQ ID NO: 2373299 - DNA, 25 bp, Homo sapien
tacctagtgatgtaaaaggcatcca

SEQ ID NO: 2373300 - DNA, 25 bp, Homo sapien
gagagctcctatgtaaaaggccctt

SEQ ID NO: 2373301 - DNA, 25 bp, Homo sapien
acatttggattcattttacctagtg

SEQ ID NO: 2373302 - DNA, 25 bp, Homo sapien
caatagcacaatctggaaatgctgg

SEQ ID NO: 2373303 - DNA, 25 bp, Homo sapien
ggtggcaatcttactcagtatgcat

SEQ ID NO: 2373304 - DNA, 25 bp, Homo sapien
aacaaattgttttattcacccagtg

SEQ ID NO: 2373305 - DNA, 25 bp, Homo sapien
actggtggtcttgcgtgtgttctac

SEQ ID NO: 2373306 - DNA, 25 bp, Homo sapien
cagttacaagcgcaaccagttttac

SEQ ID NO: 2373307 - DNA, 25 bp, Homo sapien
ggaggtataactggtatccatggca

SEQ ID NO: 2373308 - DNA, 25 bp, Homo sapien
tgaaaagccgtaacctagcaactga

SEQ ID NO: 2373309 - DNA, 25 bp, Homo sapien
caactgatgacgagaggtgtgtata

SEQ ID NO: 2373310 - DNA, 25 bp, Homo sapien
gacagtgtcataggaggaggtataa

SEQ ID NO: 2373311 - DNA, 25 bp, Homo sapien
catctctgacatcatagttacatct

SEQ ID NO: 2373312 - DNA, 25 bp, Homo sapien
atagttacatcttgcccgccctctg

SEQ ID NO: 2373313 - DNA, 25 bp, Homo sapien
gacatatgctaaaacatctctgaca

SEQ ID NO: 2373314 - DNA, 25 bp, Homo sapien
gggaaagacatatgctaaaacatct

SEQ ID NO: 2373315 - DNA, 25 bp, Homo sapien
cattaccggcccacaggctttataa

SEQ ID NO: 2373316 - DNA, 25 bp, Homo sapien
ccactgaaggcaatgtaaaggataa

SEQ ID NO: 2373317 - DNA, 25 bp, Homo sapien
catgtatagcccaccctatgggagg

SEQ ID NO: 2373318 - DNA, 25 bp, Homo sapien
tgagctggacacagtatagcagatc

SEQ ID NO: 2373319 - DNA, 25 bp, Homo sapien
catattaaggccatggacacaagac

SEQ ID NO: 2373320 - DNA, 25 bp, Homo sapien
aggtcaccatattaaggccatggac

SEQ ID NO: 2373321 - DNA, 25 bp, Homo sapien
tctaacccgggctggttcacttcac

SEQ ID NO: 2373322 - DNA, 25 bp, Homo sapien
tcaccttaagcaagctggcggtccc

SEQ ID NO: 2373323 - DNA, 25 bp, Homo sapien
tacaacaaaggcaataattccaaat

SEQ ID NO: 2373324 - DNA, 25 bp, Homo sapien
gaagagcacaaatacaacaaaggca

SEQ ID NO: 2373325 - DNA, 25 bp, Homo sapien
taattccaaataatgctgtacccat

SEQ ID NO: 2373326 - DNA, 25 bp, Homo sapien
cagagaagagcacaaatacaacaaa

SEQ ID NO: 2373327 - DNA, 25 bp, Homo sapien
tactgtcagtcaacttcttatgtct

SEQ ID NO: 2373328 - DNA, 25 bp, Homo sapien
tcctctctgcttccttactgtcagt

SEQ ID NO: 2373329 - DNA, 25 bp, Homo sapien
gttctctctcattgctgagcactat

SEQ ID NO: 2373330 - DNA, 25 bp, Homo sapien
tctctctcattgctgagcactattc

SEQ ID NO: 2373331 - DNA, 25 bp, Homo sapien
atatggctcaccaggagacttctta

SEQ ID NO: 2373332 - DNA, 25 bp, Homo sapien
cacctgttttggtcatatggctcac

SEQ ID NO: 2373333 - DNA, 25 bp, Homo sapien
acctgttttggtcatatggctcacc

SEQ ID NO: 2373334 - DNA, 25 bp, Homo sapien
ctgttttggtcatatggctcaccag

SEQ ID NO: 2373335 - DNA, 25 bp, Homo sapien
cacagtaggcagtacgtgtgttagc

SEQ ID NO: 2373336 - DNA, 25 bp, Homo sapien
gaaagatcaactctgactttagagc

SEQ ID NO: 2373337 - DNA, 25 bp, Homo sapien
tctcaggttcttcccttacatttag

SEQ ID NO: 2373338 - DNA, 25 bp, Homo sapien
cactggcacagaaaagtctaacaga

SEQ ID NO: 2373339 - DNA, 25 bp, Homo sapien
tctgatggccctaacaattgtgagg

SEQ ID NO: 2373340 - DNA, 25 bp, Homo sapien
tacaatttgcatgaaggttcctgcc

SEQ ID NO: 2373341 - DNA, 25 bp, Homo sapien
gaggcatgggtcaacaaagttaggc

SEQ ID NO: 2373342 - DNA, 25 bp, Homo sapien
gaaggtatacatccactagataggg

SEQ ID NO: 2373343 - DNA, 25 bp, Homo sapien
tgggaacctgtcatccatgataatg

SEQ ID NO: 2373344 - DNA, 25 bp, Homo sapien
aagtcctagtagtacttgtccatgt

SEQ ID NO: 2373345 - DNA, 25 bp, Homo sapien
cctgaagctctcttcctctaaggca

SEQ ID NO: 2373346 - DNA, 25 bp, Homo sapien
tctctgtaataattgggaacctgtc

SEQ ID NO: 2373347 - DNA, 25 bp, Homo sapien
ttaaattttccttcctatgaatcat

SEQ ID NO: 2373348 - DNA, 25 bp, Homo sapien
tttaaattttccttcctatgaatca

SEQ ID NO: 2373349 - DNA, 25 bp, Homo sapien
tgatgagtttttctcccgaaagtct

SEQ ID NO: 2373350 - DNA, 25 bp, Homo sapien
gagagttgtctctcaacttctgatg

SEQ ID NO: 2373351 - DNA, 25 bp, Homo sapien
ctgcatggagagttgtctctcaact

SEQ ID NO: 2373352 - DNA, 25 bp, Homo sapien
tccagccggataatgtgctggttgg

SEQ ID NO: 2373353 - DNA, 25 bp, Homo sapien
ccaggttctcacagtattgttcccc

SEQ ID NO: 2373354 - DNA, 25 bp, Homo sapien
tctcacagtattgttcccctgccga

SEQ ID NO: 2373355 - DNA, 25 bp, Homo sapien
cacagtattgttcccctgccgatac

SEQ ID NO: 2373356 - DNA, 25 bp, Homo sapien
tattgttcccctgccgatactttct

SEQ ID NO: 2373357 - DNA, 25 bp, Homo sapien
tccaggattagcacccggtcctgta

SEQ ID NO: 2373358 - DNA, 25 bp, Homo sapien
cgtttccgatctgacagcatcttga

SEQ ID NO: 2373359 - DNA, 25 bp, Homo sapien
aaagtagcgctgagacgatgctcca

SEQ ID NO: 2373360 - DNA, 25 bp, Homo sapien
gattagcacccggtcctgtagctcc

SEQ ID NO: 2373361 - DNA, 25 bp, Homo sapien
tactggatagtaagagtttggcaaa

SEQ ID NO: 2373362 - DNA, 25 bp, Homo sapien
tcctttactggatagtaagagtttg

SEQ ID NO: 2373363 - DNA, 25 bp, Homo sapien
ccttagagggacaaatagatttcct

SEQ ID NO: 2373364 - DNA, 25 bp, Homo sapien
taagtggcccttagagggacaaata

SEQ ID NO: 2373365 - DNA, 25 bp, Homo sapien
tgggactaggccctgcagacatctg

SEQ ID NO: 2373366 - DNA, 25 bp, Homo sapien
atggaatccacccagtcgctgggac

SEQ ID NO: 2373367 - DNA, 25 bp, Homo sapien
gggcctgtgctctgctgatggaatc

SEQ ID NO: 2373368 - DNA, 25 bp, Homo sapien
ctaggccctgcagacatctgtaaga

SEQ ID NO: 2373369 - DNA, 25 bp, Homo sapien
tacgctcatctaagggaactgggat

SEQ ID NO: 2373370 - DNA, 25 bp, Homo sapien
gtacagtacactacatttacgctca

SEQ ID NO: 2373371 - DNA, 25 bp, Homo sapien
gatggtgtgatgttacgtgatttgc

SEQ ID NO: 2373372 - DNA, 25 bp, Homo sapien
aatggtacacaatcagcattagagc

SEQ ID NO: 2373373 - DNA, 25 bp, Homo sapien
tggctaatggcaccagtgatctgga

SEQ ID NO: 2373374 - DNA, 25 bp, Homo sapien
gaaatgattggctaatggcaccagt

SEQ ID NO: 2373375 - DNA, 25 bp, Homo sapien
cttcaccgtcagtacttcgaaatga

SEQ ID NO: 2373376 - DNA, 25 bp, Homo sapien
tacttcgaaatgattggctaatggc

SEQ ID NO: 2373377 - DNA, 25 bp, Homo sapien
tatggacgtttataagacaagtgaa

SEQ ID NO: 2373378 - DNA, 25 bp, Homo sapien
ggctgggcttcattacactgtgcca

SEQ ID NO: 2373379 - DNA, 25 bp, Homo sapien
cacaggcacacaaagtgagatacca

SEQ ID NO: 2373380 - DNA, 25 bp, Homo sapien
agataccattagagtctcacccaag

SEQ ID NO: 2373381 - DNA, 25 bp, Homo sapien
caggagagacgcacctcctgaagct

SEQ ID NO: 2373382 - DNA, 25 bp, Homo sapien
agctgtcggcaggagagacgcacct

SEQ ID NO: 2373383 - DNA, 25 bp, Homo sapien
gctcgatctctgacaggagggatgt

SEQ ID NO: 2373384 - DNA, 25 bp, Homo sapien
gcagactcctctcctcagtgagttc

SEQ ID NO: 2373385 - DNA, 25 bp, Homo sapien
tcattgcctcgaaggtgtgagcaca

SEQ ID NO: 2373386 - DNA, 25 bp, Homo sapien
catccttggcggacgaggtttctga

SEQ ID NO: 2373387 - DNA, 25 bp, Homo sapien
cagtctcttgagctcattgagggca

SEQ ID NO: 2373388 - DNA, 25 bp, Homo sapien
tgtgagcacagatagcgaacctggc

SEQ ID NO: 2373389 - DNA, 25 bp, Homo sapien
tagggctctcgagtcctcactggtc

SEQ ID NO: 2373390 - DNA, 25 bp, Homo sapien
agtcatcatcaagtctccgggagcc

SEQ ID NO: 2373391 - DNA, 25 bp, Homo sapien
ggtctgccttatctgttcttctaag

SEQ ID NO: 2373392 - DNA, 25 bp, Homo sapien
catgagctcccttagggctctcgag

SEQ ID NO: 2373393 - DNA, 25 bp, Homo sapien
tcttctaggctttgcctcagtttac

SEQ ID NO: 2373394 - DNA, 25 bp, Homo sapien
gagtcgctgcagctcttctaggctt

SEQ ID NO: 2373395 - DNA, 25 bp, Homo sapien
tgtggagtcgctgcagctcttctag

SEQ ID NO: 2373396 - DNA, 25 bp, Homo sapien
tgactgtggagtcgctgcagctctt

SEQ ID NO: 2373397 - DNA, 25 bp, Homo sapien
aaggatgcaggtcttgaaatagggc

SEQ ID NO: 2373398 - DNA, 25 bp, Homo sapien
gatcaatccaaagcgtgtgagggtg

SEQ ID NO: 2373399 - DNA, 25 bp, Homo sapien
catagccagggtgtgaaaggatgca

SEQ ID NO: 2373400 - DNA, 25 bp, Homo sapien
tttcaagtcacgcttcaggaagatc

SEQ ID NO: 2373401 - DNA, 25 bp, Homo sapien
atcctgcttcaagagagggcctgtc

SEQ ID NO: 2373402 - DNA, 25 bp, Homo sapien
caagctggtagcattccactgccat

SEQ ID NO: 2373403 - DNA, 25 bp, Homo sapien
aatgaatatggtatcactgctgctg

SEQ ID NO: 2373404 - DNA, 25 bp, Homo sapien
ggaacaaagagaccccaggcaggac

SEQ ID NO: 2373405 - DNA, 25 bp, Homo sapien
cttgtcctcagaagtgactctgagt

SEQ ID NO: 2373406 - DNA, 25 bp, Homo sapien
gactctgagtcggtctctctcctct

SEQ ID NO: 2373407 - DNA, 25 bp, Homo sapien
tcgcggtccctgatggccttctgaa

SEQ ID NO: 2373408 - DNA, 25 bp, Homo sapien
tttgcaatggcctcgtcgcggtccc

SEQ ID NO: 2373409 - DNA, 25 bp, Homo sapien
tgcagggctcaagggcagctagagg

SEQ ID NO: 2373410 - DNA, 25 bp, Homo sapien
tcaagggcagctagaggatccgcct

SEQ ID NO: 2373411 - DNA, 25 bp, Homo sapien
cagctagaggatccgcctgcagagg

SEQ ID NO: 2373412 - DNA, 25 bp, Homo sapien
tgcagaggccgcctagctcgagctt

SEQ ID NO: 2373413 - DNA, 25 bp, Homo sapien
cctaaatcacggctgttcaatgcaa

SEQ ID NO: 2373414 - DNA, 25 bp, Homo sapien
acattcctaaatcacggctgttcaa

SEQ ID NO: 2373415 - DNA, 25 bp, Homo sapien
tcacggctgttcaatgcaaaagaaa

SEQ ID NO: 2373416 - DNA, 25 bp, Homo sapien
aaatcacggctgttcaatgcaaaag

SEQ ID NO: 2373417 - DNA, 25 bp, Homo sapien
catatccatcctgcacttggcaagt

SEQ ID NO: 2373418 - DNA, 25 bp, Homo sapien
gtttctgctgaatggcatccagcaa

SEQ ID NO: 2373419 - DNA, 25 bp, Homo sapien
tcctgcacttggcaagttccagctc

SEQ ID NO: 2373420 - DNA, 25 bp, Homo sapien
cagtttctgctgaatggcatccagc

SEQ ID NO: 2373421 - DNA, 25 bp, Homo sapien
gaaaggccactagatcagaaaccaa

SEQ ID NO: 2373422 - DNA, 25 bp, Homo sapien
tgttgatacgggaactgagaaaggc

SEQ ID NO: 2373423 - DNA, 25 bp, Homo sapien
gggtgtacaactaaagctgttgata

SEQ ID NO: 2373424 - DNA, 25 bp, Homo sapien
cctgaggaagcaaactgtagccggg

SEQ ID NO: 2373425 - DNA, 25 bp, Homo sapien
gtcgccctttagagtttcccagaca

SEQ ID NO: 2373426 - DNA, 25 bp, Homo sapien
ttttaactttaagcaatcaggtctg

SEQ ID NO: 2373427 - DNA, 25 bp, Homo sapien
cctgctggtccctcagtggatggaa

SEQ ID NO: 2373428 - DNA, 25 bp, Homo sapien
agcaatcaggtctgtccaggtcgcc

SEQ ID NO: 2373429 - DNA, 25 bp, Homo sapien
ccctgaccaagaaagcggtgagcgt

SEQ ID NO: 2373430 - DNA, 25 bp, Homo sapien
aacagtgttactcctgctgggccgc

SEQ ID NO: 2373431 - DNA, 25 bp, Homo sapien
tagggccacctcagcttaacagctc

SEQ ID NO: 2373432 - DNA, 25 bp, Homo sapien
tattccagcctgagctactgatgcc

SEQ ID NO: 2373433 - DNA, 25 bp, Homo sapien
tcctgaagaatgagaagagtcgttt

SEQ ID NO: 2373434 - DNA, 25 bp, Homo sapien
ttcaggtgcgtgtccatcagctgcc

SEQ ID NO: 2373435 - DNA, 25 bp, Homo sapien
ggctggctccgttctttcaggtgcg

SEQ ID NO: 2373436 - DNA, 25 bp, Homo sapien
gagtcgtttgccttcagcgatgctg

SEQ ID NO: 2373437 - DNA, 25 bp, Homo sapien
catttgctaaaatcaaggaggcagc

SEQ ID NO: 2373438 - DNA, 25 bp, Homo sapien
agctgagcttgggtaagccccggct

SEQ ID NO: 2373439 - DNA, 25 bp, Homo sapien
tggcctaaccctgctcaagcacgtg

SEQ ID NO: 2373440 - DNA, 25 bp, Homo sapien
cctggacttgtttggctaggccaag

SEQ ID NO: 2373441 - DNA, 25 bp, Homo sapien
ggcagcatctggaggcttccggcag

SEQ ID NO: 2373442 - DNA, 25 bp, Homo sapien
ctgagggctggccgggccgcggagc

SEQ ID NO: 2373443 - DNA, 25 bp, Homo sapien
ggccgggccgcggagcctctgagtt

SEQ ID NO: 2373444 - DNA, 25 bp, Homo sapien
gccgcggagcctctgagttggggcc

SEQ ID NO: 2373445 - DNA, 25 bp, Homo sapien
cgcggagcctctgagttggggcctg

SEQ ID NO: 2373446 - DNA, 25 bp, Homo sapien
agggagactgaatcggttgtgagca

SEQ ID NO: 2373447 - DNA, 25 bp, Homo sapien
agggagggagactgaatcggttgtg

SEQ ID NO: 2373448 - DNA, 25 bp, Homo sapien
attcttgccgcgcatccctgctgtg

SEQ ID NO: 2373449 - DNA, 25 bp, Homo sapien
tgctgtgctttccccacgtgaggga

SEQ ID NO: 2373450 - DNA, 25 bp, Homo sapien
atgtatttacatgattgctacatac

SEQ ID NO: 2373451 - DNA, 25 bp, Homo sapien
tttacatgattgctacatacaaaat

SEQ ID NO: 2373452 - DNA, 25 bp, Homo sapien
gacaggccttcactttggagccacg

SEQ ID NO: 2373453 - DNA, 25 bp, Homo sapien
tccacttgcccaaactgccaaaagc

SEQ ID NO: 2373454 - DNA, 25 bp, Homo sapien
cttcactttggagccacgggatggg

SEQ ID NO: 2373455 - DNA, 25 bp, Homo sapien
ggtgattctgggacaggccttcact

SEQ ID NO: 2373456 - DNA, 25 bp, Homo sapien
cacagcgctgggatgggatttcgac

SEQ ID NO: 2373457 - DNA, 25 bp, Homo sapien
caaagcttttaagggatggaggcca

SEQ ID NO: 2373458 - DNA, 25 bp, Homo sapien
tgcacacgtttagcttctggcggcc

SEQ ID NO: 2373459 - DNA, 25 bp, Homo sapien
tttctatcgggagcacatgagcagc

SEQ ID NO: 2373460 - DNA, 25 bp, Homo sapien
gagcttggaagatggcgttcccaga

SEQ ID NO: 2373461 - DNA, 25 bp, Homo sapien
gaaaatgattcacagctctggcagt

SEQ ID NO: 2373462 - DNA, 25 bp, Homo sapien
cacagacggtggatctctgcccagt

SEQ ID NO: 2373463 - DNA, 25 bp, Homo sapien
tgagagctggcgctaccaacctttt

SEQ ID NO: 2373464 - DNA, 25 bp, Homo sapien
tcaaagaacacagctgtaagcccgg

SEQ ID NO: 2373465 - DNA, 25 bp, Homo sapien
gaatttgcagtggtcccgtagccct

SEQ ID NO: 2373466 - DNA, 25 bp, Homo sapien
gtaagcccggagtggttcatgagca

SEQ ID NO: 2373467 - DNA, 25 bp, Homo sapien
gccaagatagcagggaggtccatgt

SEQ ID NO: 2373468 - DNA, 25 bp, Homo sapien
ccttccagtgttgcgggaaggagtc

SEQ ID NO: 2373469 - DNA, 25 bp, Homo sapien
tctcttgtcagggagtgacctccat

SEQ ID NO: 2373470 - DNA, 25 bp, Homo sapien
cttaggcttggtaatccgcctgacc

SEQ ID NO: 2373471 - DNA, 25 bp, Homo sapien
gtaatccgcctgacctcggctgacg

SEQ ID NO: 2373472 - DNA, 25 bp, Homo sapien
atggcggcggacacgcaggtgaggc

SEQ ID NO: 2373473 - DNA, 25 bp, Homo sapien
tgtgacccggaagcgttccggaagc

SEQ ID NO: 2373474 - DNA, 25 bp, Homo sapien
gttccggagtcagccccggcaggat

SEQ ID NO: 2373475 - DNA, 25 bp, Homo sapien
tcggggccgtctcaggctggactct

SEQ ID NO: 2373476 - DNA, 25 bp, Homo sapien
gttgatgtttgggtatctaaatgaa

SEQ ID NO: 2373477 - DNA, 25 bp, Homo sapien
gccatggtaaaaccagagctttgta

SEQ ID NO: 2373478 - DNA, 25 bp, Homo sapien
gaagctaccaatcaaacatcctata

SEQ ID NO: 2373479 - DNA, 25 bp, Homo sapien
tagtgccatatgctagaaacgaaag

SEQ ID NO: 2373480 - DNA, 25 bp, Homo sapien
tttgactaatcaccaaaaagcaacc

SEQ ID NO: 2373481 - DNA, 25 bp, Homo sapien
tcgttcatggaactcaatggctacg

SEQ ID NO: 2373482 - DNA, 25 bp, Homo sapien
cctgtagggaatctcacgtaaaatg

SEQ ID NO: 2373483 - DNA, 25 bp, Homo sapien
tctagggcctgcattgagactcaca

SEQ ID NO: 2373484 - DNA, 25 bp, Homo sapien
gcctctcttgagactgagctgccaa

SEQ ID NO: 2373485 - DNA, 25 bp, Homo sapien
gcagcatctacaaccctgaagtgct

SEQ ID NO: 2373486 - DNA, 25 bp, Homo sapien
cagcatctacaaccctgaagtgctt

SEQ ID NO: 2373487 - DNA, 25 bp, Homo sapien
gacaatggcagcatctacaaccctg

SEQ ID NO: 2373488 - DNA, 25 bp, Homo sapien
acaatggcagcatctacaaccctga

SEQ ID NO: 2373489 - DNA, 25 bp, Homo sapien
gagatcagggacatgttgctggcca

SEQ ID NO: 2373490 - DNA, 25 bp, Homo sapien
ttgtgttcaccaaggaggacctcac

SEQ ID NO: 2373491 - DNA, 25 bp, Homo sapien
aaggaggacctcactgagatcaggg

SEQ ID NO: 2373492 - DNA, 25 bp, Homo sapien
actgagatcagggacatgttgctgg

SEQ ID NO: 2373493 - DNA, 25 bp, Homo sapien
agcagatccgcatgtcccttcgcgg

SEQ ID NO: 2373494 - DNA, 25 bp, Homo sapien
gcaaggccatccgagggcacctgga

SEQ ID NO: 2373495 - DNA, 25 bp, Homo sapien
caccatgatgcgcaaggccatccga

SEQ ID NO: 2373496 - DNA, 25 bp, Homo sapien
gatgcagcagatccgcatgtccctt

SEQ ID NO: 2373497 - DNA, 25 bp, Homo sapien
tgaggtcaggaatgactcattgtaa

SEQ ID NO: 2373498 - DNA, 25 bp, Homo sapien
gactcattgtaaggaagcaagctgt

SEQ ID NO: 2373499 - DNA, 25 bp, Homo sapien
gcccggccgcacattacagttttac

SEQ ID NO: 2373500 - DNA, 25 bp, Homo sapien
ggcttctaaaagagcgcgctttata

SEQ ID NO: 2373501 - DNA, 25 bp, Homo sapien
aagtccaactacttccttaagatca

SEQ ID NO: 2373502 - DNA, 25 bp, Homo sapien
ggaaccgggactccgaattcgcagc

SEQ ID NO: 2373503 - DNA, 25 bp, Homo sapien
aaccgggactccgaattcgcagctc

SEQ ID NO: 2373504 - DNA, 25 bp, Homo sapien
ggactccgaattcgcagctccagct

SEQ ID NO: 2373505 - DNA, 25 bp, Homo sapien
tggcacagggaaccgggactccgaa

SEQ ID NO: 2373506 - DNA, 25 bp, Homo sapien
ctgcagagctcacagctcccgggtt

SEQ ID NO: 2373507 - DNA, 25 bp, Homo sapien
cttagctcactgcagagctcacagc

SEQ ID NO: 2373508 - DNA, 25 bp, Homo sapien
agcgattcttctgcctcggcctcct

SEQ ID NO: 2373509 - DNA, 25 bp, Homo sapien
gcagagctcacagctcccgggttca

SEQ ID NO: 2373510 - DNA, 25 bp, Homo sapien
gctcacatcagtgccggaaacgatg

SEQ ID NO: 2373511 - DNA, 25 bp, Homo sapien
tcacatcagtgccggaaacgatgaa

SEQ ID NO: 2373512 - DNA, 25 bp, Homo sapien
tgcttatgatgtgctcacatcagtg

SEQ ID NO: 2373513 - DNA, 25 bp, Homo sapien
acatcagtgccggaaacgatgaaga

SEQ ID NO: 2373514 - DNA, 25 bp, Homo sapien
tgctccggtcagatccagagctcca

SEQ ID NO: 2373515 - DNA, 25 bp, Homo sapien
gtgcttcctctttgctccggtcaga

SEQ ID NO: 2373516 - DNA, 25 bp, Homo sapien
catgtccggatttgcgtgcttcctc

SEQ ID NO: 2373517 - DNA, 25 bp, Homo sapien
tgcctcctcgtcgtcatgtccggat

SEQ ID NO: 2373518 - DNA, 25 bp, Homo sapien
cacctgggtttaccaagggcatcct

SEQ ID NO: 2373519 - DNA, 25 bp, Homo sapien
ggcctgcccagggtgtgatcacctg

SEQ ID NO: 2373520 - DNA, 25 bp, Homo sapien
gcatcctcactcacgggcttgtggg

SEQ ID NO: 2373521 - DNA, 25 bp, Homo sapien
tggtggtctgaacctcatggtccca

SEQ ID NO: 2373522 - DNA, 25 bp, Homo sapien
tatagtgacccaccctagatcttcc

SEQ ID NO: 2373523 - DNA, 25 bp, Homo sapien
agcccctccaaaggtctgatgtctc

SEQ ID NO: 2373524 - DNA, 25 bp, Homo sapien
ccgcaggccttaccgctctgtttat

SEQ ID NO: 2373525 - DNA, 25 bp, Homo sapien
ttctggggtccattctctgagtcag

SEQ ID NO: 2373526 - DNA, 25 bp, Homo sapien
ccccagagctctttaccaaggatga

SEQ ID NO: 2373527 - DNA, 25 bp, Homo sapien
tctggaaagaaggtcataagggagc

SEQ ID NO: 2373528 - DNA, 25 bp, Homo sapien
tcaggactctgacgtctctttggtc

SEQ ID NO: 2373529 - DNA, 25 bp, Homo sapien
tttcacaggtgggatcggcactcag

SEQ ID NO: 2373530 - DNA, 25 bp, Homo sapien
tcacttcatagctcaccaggactgt

SEQ ID NO: 2373531 - DNA, 25 bp, Homo sapien
ttcttagcacaagcaggtgaactgg

SEQ ID NO: 2373532 - DNA, 25 bp, Homo sapien
ctgtctgagtaagccctcaggagcc

SEQ ID NO: 2373533 - DNA, 25 bp, Homo sapien
gaaactggttgaagggtgttgcacc

SEQ ID NO: 2373534 - DNA, 25 bp, Homo sapien
gacaagccttactgtcagaactgct

SEQ ID NO: 2373535 - DNA, 25 bp, Homo sapien
gactgtgacctagagacttcacccg

SEQ ID NO: 2373536 - DNA, 25 bp, Homo sapien
atgtacgtccccacgaactggcctg

SEQ ID NO: 2373537 - DNA, 25 bp, Homo sapien
tcaagctcttctgctaggtgccctg

SEQ ID NO: 2373538 - DNA, 25 bp, Homo sapien
tgaacggcagcttcttcgagcacga

SEQ ID NO: 2373539 - DNA, 25 bp, Homo sapien
cgtttaggacaacacggcacatggg

SEQ ID NO: 2373540 - DNA, 25 bp, Homo sapien
tactgtgaggtgcactaccacgagc

SEQ ID NO: 2373541 - DNA, 25 bp, Homo sapien
ggcacatgggaaacgcctagcaagt

SEQ ID NO: 2373542 - DNA, 25 bp, Homo sapien
ttgcaggaggccacatttgaccagc

SEQ ID NO: 2373543 - DNA, 25 bp, Homo sapien
tgtgtatgaatccaggctgtgacct

SEQ ID NO: 2373544 - DNA, 25 bp, Homo sapien
ctggctaagtgctcaggagtcagac

SEQ ID NO: 2373545 - DNA, 25 bp, Homo sapien
tgtttctgggaacactgttacagcc

SEQ ID NO: 2373546 - DNA, 25 bp, Homo sapien
gatttggctcccttgccgctgttaa

SEQ ID NO: 2373547 - DNA, 25 bp, Homo sapien
tcaagtgagggcctggcatagccag

SEQ ID NO: 2373548 - DNA, 25 bp, Homo sapien
tcctgagggctagggatcaagctgt

SEQ ID NO: 2373549 - DNA, 25 bp, Homo sapien
gcttgccagacttccgcagaaacag

SEQ ID NO: 2373550 - DNA, 25 bp, Homo sapien
ttattttatcccagccaccaggatg

SEQ ID NO: 2373551 - DNA, 25 bp, Homo sapien
aggatggctctcacattctttttca

SEQ ID NO: 2373552 - DNA, 25 bp, Homo sapien
attttatcccagccaccaggatggc

SEQ ID NO: 2373553 - DNA, 25 bp, Homo sapien
gtttattttatcccagccaccagga

SEQ ID NO: 2373554 - DNA, 25 bp, Homo sapien
ggaatgctccacgtgtgtacatggg

SEQ ID NO: 2373555 - DNA, 25 bp, Homo sapien
tttctgggcattgcggccacgtact

SEQ ID NO: 2373556 - DNA, 25 bp, Homo sapien
ctggatttgcggagccccagagtgt

SEQ ID NO: 2373557 - DNA, 25 bp, Homo sapien
tccaaacaaccttctggaatgctcc

SEQ ID NO: 2373558 - DNA, 25 bp, Homo sapien
ttgcggcaggctagggtaattctga

SEQ ID NO: 2373559 - DNA, 25 bp, Homo sapien
tgttgcggcaggctagggtaattct

SEQ ID NO: 2373560 - DNA, 25 bp, Homo sapien
agttccacggatggctttgaaagcc

SEQ ID NO: 2373561 - DNA, 25 bp, Homo sapien
taaattgccacctctagttccacgg

SEQ ID NO: 2373562 - DNA, 25 bp, Homo sapien
ctagaaccttcatcacgaggcgttt

SEQ ID NO: 2373563 - DNA, 25 bp, Homo sapien
tcctagaaccttcatcacgaggcgt

SEQ ID NO: 2373564 - DNA, 25 bp, Homo sapien
cctagaaccttcatcacgaggcgtt

SEQ ID NO: 2373565 - DNA, 25 bp, Homo sapien
gaaacatttcgggcagccagcaggc

SEQ ID NO: 2373566 - DNA, 25 bp, Homo sapien
ccagcaggctctcatgaggggaggg

SEQ ID NO: 2373567 - DNA, 25 bp, Homo sapien
tagaaacatttcgggcagccagcag

SEQ ID NO: 2373568 - DNA, 25 bp, Homo sapien
ggagggcttcatgccaaggtcttct

SEQ ID NO: 2373569 - DNA, 25 bp, Homo sapien
tgcacccgaacatgctccttgtctt

SEQ ID NO: 2373570 - DNA, 25 bp, Homo sapien
ttgaaaactttatggtggagaatga

SEQ ID NO: 2373571 - DNA, 25 bp, Homo sapien
tgtctttcccgtatccagaggaggg

SEQ ID NO: 2373572 - DNA, 25 bp, Homo sapien
aaactttatggtggagaatgaagga

SEQ ID NO: 2373573 - DNA, 25 bp, Homo sapien
tcttctttcagcttctcagcagtct

SEQ ID NO: 2373574 - DNA, 25 bp, Homo sapien
ttctttcagcttctcagcagtcttg

SEQ ID NO: 2373575 - DNA, 25 bp, Homo sapien
gtcttctttcagcttctcagcagtc

SEQ ID NO: 2373576 - DNA, 25 bp, Homo sapien
ctttcagcttctcagcagtcttgac

SEQ ID NO: 2373577 - DNA, 25 bp, Homo sapien
cctgctgagtaattgatagttacct

SEQ ID NO: 2373578 - DNA, 25 bp, Homo sapien
tcccatcctctagcagggggaacag

SEQ ID NO: 2373579 - DNA, 25 bp, Homo sapien
cagctgttggcagtgcccagttgct

SEQ ID NO: 2373580 - DNA, 25 bp, Homo sapien
caagactgggtagctttgccttccc

SEQ ID NO: 2373581 - DNA, 25 bp, Homo sapien
gcaagccacgcctgactgaccggag

SEQ ID NO: 2373582 - DNA, 25 bp, Homo sapien
caaggggcaagccacgcctgactga

SEQ ID NO: 2373583 - DNA, 25 bp, Homo sapien
gggcaagccacgcctgactgaccgg

SEQ ID NO: 2373584 - DNA, 25 bp, Homo sapien
gctcccaaggggcaagccacgcctg

SEQ ID NO: 2373585 - DNA, 25 bp, Homo sapien
gagatgagcgtgtgatgaccacacc

SEQ ID NO: 2373586 - DNA, 25 bp, Homo sapien
gtggaccagcccctcaattcacaga

SEQ ID NO: 2373587 - DNA, 25 bp, Homo sapien
aaagaggacaggatgcccagaacag

SEQ ID NO: 2373588 - DNA, 25 bp, Homo sapien
tatgaccatccctgaacgtgtcctg

SEQ ID NO: 2373589 - DNA, 25 bp, Homo sapien
aaggcctggattcttgagggacaag

SEQ ID NO: 2373590 - DNA, 25 bp, Homo sapien
tcttgagggacaaggggaactcgaa

SEQ ID NO: 2373591 - DNA, 25 bp, Homo sapien
aggggaactcgaagctgtacttgca

SEQ ID NO: 2373592 - DNA, 25 bp, Homo sapien
aagctgtacttgcagagcagtttta

SEQ ID NO: 2373593 - DNA, 25 bp, Homo sapien
gaaggtagacatcatgttagtctta

SEQ ID NO: 2373594 - DNA, 25 bp, Homo sapien
ttgctcttttgcgtgcacctttaga

SEQ ID NO: 2373595 - DNA, 25 bp, Homo sapien
ttttgcgtgcacctttagattcaag

SEQ ID NO: 2373596 - DNA, 25 bp, Homo sapien
cactttgctcttttgcgtgcacctt

SEQ ID NO: 2373597 - DNA, 25 bp, Homo sapien
tcaggtcaatgtagtgctgcttcag

SEQ ID NO: 2373598 - DNA, 25 bp, Homo sapien
ttcaggtcaatgtagtgctgcttca

SEQ ID NO: 2373599 - DNA, 25 bp, Homo sapien
caggtcaatgtagtgctgcttcagg

SEQ ID NO: 2373600 - DNA, 25 bp, Homo sapien
tgtcttcacgacgttcagcccctcc

SEQ ID NO: 2373601 - DNA, 25 bp, Homo sapien
tcacgacgttcagcccctcccagac

SEQ ID NO: 2373602 - DNA, 25 bp, Homo sapien
cctgtcttcacgacgttcagcccct

SEQ ID NO: 2373603 - DNA, 25 bp, Homo sapien
tcggcctgtcttcacgacgttcagc

SEQ ID NO: 2373604 - DNA, 25 bp, Homo sapien
tgctggattggtctccccaagcatc

SEQ ID NO: 2373605 - DNA, 25 bp, Homo sapien
agtccccacgaatggtgcctggctt

SEQ ID NO: 2373606 - DNA, 25 bp, Homo sapien
gctggattggtctccccaagcatca

SEQ ID NO: 2373607 - DNA, 25 bp, Homo sapien
aagtccccacgaatggtgcctggct

SEQ ID NO: 2373608 - DNA, 25 bp, Homo sapien
gtagtcaaccagttcttcaggctta

SEQ ID NO: 2373609 - DNA, 25 bp, Homo sapien
ggcaaatatgctctataaaagaatg

SEQ ID NO: 2373610 - DNA, 25 bp, Homo sapien
atgagcacaagacttgtagtcaacc

SEQ ID NO: 2373611 - DNA, 25 bp, Homo sapien
taaaagaatgatcaatcctgttgcc

SEQ ID NO: 2373612 - DNA, 25 bp, Homo sapien
ccatggacagaggtcctcaggagtc

SEQ ID NO: 2373613 - DNA, 25 bp, Homo sapien
cctcaggagtcacaactctgggcat

SEQ ID NO: 2373614 - DNA, 25 bp, Homo sapien
gctgtccatggacagaggtcctcag

SEQ ID NO: 2373615 - DNA, 25 bp, Homo sapien
tttttacgaagacctgggctgtcca

SEQ ID NO: 2373616 - DNA, 25 bp, Homo sapien
cagcgagtgagctactccacttcct

SEQ ID NO: 2373617 - DNA, 25 bp, Homo sapien
cagccagcgagtgagctactccact

SEQ ID NO: 2373618 - DNA, 25 bp, Homo sapien
ttatccaaatgcagccagcgagtga

SEQ ID NO: 2373619 - DNA, 25 bp, Homo sapien
aatgcagccagcgagtgagctactc

SEQ ID NO: 2373620 - DNA, 25 bp, Homo sapien
cagctgattcgcgagagcacctgca

SEQ ID NO: 2373621 - DNA, 25 bp, Homo sapien
cctgcaagtttacctgttttagtga

SEQ ID NO: 2373622 - DNA, 25 bp, Homo sapien
agcacctgcaagtttacctgtttta

SEQ ID NO: 2373623 - DNA, 25 bp, Homo sapien
tgttttagtgatttgcgtttatgaa

SEQ ID NO: 2373624 - DNA, 25 bp, Homo sapien
ctacggacacttcacaccccacagt

SEQ ID NO: 2373625 - DNA, 25 bp, Homo sapien
ctcacagctctacggacacttcaca

SEQ ID NO: 2373626 - DNA, 25 bp, Homo sapien
agctctacggacacttcacacccca

SEQ ID NO: 2373627 - DNA, 25 bp, Homo sapien
ctctcacagctctacggacacttca

SEQ ID NO: 2373628 - DNA, 25 bp, Homo sapien
gggcaaagaggagaaatagaatccc

SEQ ID NO: 2373629 - DNA, 25 bp, Homo sapien
gcaaagaggagaaatagaatccctc

SEQ ID NO: 2373630 - DNA, 25 bp, Homo sapien
caggtcccaccgagggcaaagagga

SEQ ID NO: 2373631 - DNA, 25 bp, Homo sapien
tccaggtcccaccgagggcaaagag

SEQ ID NO: 2373632 - DNA, 25 bp, Homo sapien
gatctgagatcaggaccccgctttc

SEQ ID NO: 2373633 - DNA, 25 bp, Homo sapien
catgcaccccgtatgtaaacattat

SEQ ID NO: 2373634 - DNA, 25 bp, Homo sapien
cataaatcctctagtgacatgcacc

SEQ ID NO: 2373635 - DNA, 25 bp, Homo sapien
caaaacgtgaacagctgaacaaaca

SEQ ID NO: 2373636 - DNA, 25 bp, Homo sapien
agcttttctagctgtaacaatagag

SEQ ID NO: 2373637 - DNA, 25 bp, Homo sapien
tgtagtctggtatccccgattcggt

SEQ ID NO: 2373638 - DNA, 25 bp, Homo sapien
caatggaggctttcgagcacggctg

SEQ ID NO: 2373639 - DNA, 25 bp, Homo sapien
gaggccagcctacgaagtttctcgc

SEQ ID NO: 2373640 - DNA, 25 bp, Homo sapien
caaaatcaccatgctggatgggcct

SEQ ID NO: 2373641 - DNA, 25 bp, Homo sapien
gtgatcaagacagccaaggtcccta

SEQ ID NO: 2373642 - DNA, 25 bp, Homo sapien
gtttcattgagacaatcctcaggca

SEQ ID NO: 2373643 - DNA, 25 bp, Homo sapien
tcctagacagttggagggtccctca

SEQ ID NO: 2373644 - DNA, 25 bp, Homo sapien
gttttacatccttgctccgtcaatg

SEQ ID NO: 2373645 - DNA, 25 bp, Homo sapien
atgttctctgcccacggaagcctcc

SEQ ID NO: 2373646 - DNA, 25 bp, Homo sapien
caattttcttacaagcagtttcctg

SEQ ID NO: 2373647 - DNA, 25 bp, Homo sapien
tttcttacaagcagtttcctgtgtc

SEQ ID NO: 2373648 - DNA, 25 bp, Homo sapien
attttcttacaagcagtttcctgtg

SEQ ID NO: 2373649 - DNA, 25 bp, Homo sapien
tttttaagagacagggtcaggctgg

SEQ ID NO: 2373650 - DNA, 25 bp, Homo sapien
ttttaagagacagggtcaggctggg

SEQ ID NO: 2373651 - DNA, 25 bp, Homo sapien
aagagacagggtcaggctgggcgtg

SEQ ID NO: 2373652 - DNA, 25 bp, Homo sapien
ttaagagacagggtcaggctgggcg

SEQ ID NO: 2373653 - DNA, 25 bp, Homo sapien
tggaaccaaggaagacgctgactga

SEQ ID NO: 2373654 - DNA, 25 bp, Homo sapien
accaaggaagacgctgactgaacag

SEQ ID NO: 2373655 - DNA, 25 bp, Homo sapien
ctggaaccaaggaagacgctgactg

SEQ ID NO: 2373656 - DNA, 25 bp, Homo sapien
gaaccaaggaagacgctgactgaac

SEQ ID NO: 2373657 - DNA, 25 bp, Homo sapien
acttggaaacgctcttgcagcaccc

SEQ ID NO: 2373658 - DNA, 25 bp, Homo sapien
ggttcaggacttggaaacgctcttg

SEQ ID NO: 2373659 - DNA, 25 bp, Homo sapien
tgagagaaagacgtcaccatcagga

SEQ ID NO: 2373660 - DNA, 25 bp, Homo sapien
aagacgtcaccatcaggagccaggc

SEQ ID NO: 2373661 - DNA, 25 bp, Homo sapien
aagaaaacgacatctggtttcagat

SEQ ID NO: 2373662 - DNA, 25 bp, Homo sapien
gagggagtcggcttcttttacacgc

SEQ ID NO: 2373663 - DNA, 25 bp, Homo sapien
tcagatggcctccacattgaacgca

SEQ ID NO: 2373664 - DNA, 25 bp, Homo sapien
aaccttgtcagggttcactgtgtcc

SEQ ID NO: 2373665 - DNA, 25 bp, Homo sapien
atccgaccgtgtgggcccaatgttc

SEQ ID NO: 2373666 - DNA, 25 bp, Homo sapien
caggcagtgaggataaacctgtaac

SEQ ID NO: 2373667 - DNA, 25 bp, Homo sapien
cagtattgcaatcgggagcttcttc

SEQ ID NO: 2373668 - DNA, 25 bp, Homo sapien
tcagtttcagacacgccaagtcatc

SEQ ID NO: 2373669 - DNA, 25 bp, Homo sapien
tcagcatgggtctatcaaaggcagc

SEQ ID NO: 2373670 - DNA, 25 bp, Homo sapien
tctatcaaaggcagcaactctccac

SEQ ID NO: 2373671 - DNA, 25 bp, Homo sapien
tgggtctatcaaaggcagcaactct

SEQ ID NO: 2373672 - DNA, 25 bp, Homo sapien
gggtctatcaaaggcagcaactctc

SEQ ID NO: 2373673 - DNA, 25 bp, Homo sapien
cagtgcaccctactctgttgaatgg

SEQ ID NO: 2373674 - DNA, 25 bp, Homo sapien
tcaagtgaaagtccctgttccaggt

SEQ ID NO: 2373675 - DNA, 25 bp, Homo sapien
tgttgaatgggaactggaatctgtc

SEQ ID NO: 2373676 - DNA, 25 bp, Homo sapien
tccaggttctggaatatcaggctgt

SEQ ID NO: 2373677 - DNA, 25 bp, Homo sapien
gagatccttgggttggcgctccaga

SEQ ID NO: 2373678 - DNA, 25 bp, Homo sapien
tacaggctgcactcagcgagctttg

SEQ ID NO: 2373679 - DNA, 25 bp, Homo sapien
tcagcctagaccttaactctttggc

SEQ ID NO: 2373680 - DNA, 25 bp, Homo sapien
cactctggcctacatatgtcccagg

SEQ ID NO: 2373681 - DNA, 25 bp, Homo sapien
gtggatgtgactctccgggtcgctc

SEQ ID NO: 2373682 - DNA, 25 bp, Homo sapien
tctccgggtcgctcttccctgtcac

SEQ ID NO: 2373683 - DNA, 25 bp, Homo sapien
ctccgggtcgctcttccctgtcacc

SEQ ID NO: 2373684 - DNA, 25 bp, Homo sapien
ccgggtcgctcttccctgtcaccca

SEQ ID NO: 2373685 - DNA, 25 bp, Homo sapien
ctggcggcgctcttctcctgagcca

SEQ ID NO: 2373686 - DNA, 25 bp, Homo sapien
gcgtccgcgtgaggtggaggtgtca

SEQ ID NO: 2373687 - DNA, 25 bp, Homo sapien
cctggcggcgctcttctcctgagcc

SEQ ID NO: 2373688 - DNA, 25 bp, Homo sapien
tcacactaggtggcgtccgcgtgag

SEQ ID NO: 2373689 - DNA, 25 bp, Homo sapien
ttaaaactatctgacctagggaggc

SEQ ID NO: 2373690 - DNA, 25 bp, Homo sapien
ctggataaacagtgcagatagttta

SEQ ID NO: 2373691 - DNA, 25 bp, Homo sapien
aaactatctgacctagggaggctga

SEQ ID NO: 2373692 - DNA, 25 bp, Homo sapien
gctgtatctctagctcctaggacag

SEQ ID NO: 2373693 - DNA, 25 bp, Homo sapien
tctacacgtttgagctgagtcctga

SEQ ID NO: 2373694 - DNA, 25 bp, Homo sapien
actgggcccaaccatgggctcagga

SEQ ID NO: 2373695 - DNA, 25 bp, Homo sapien
gagtcctgagacacttagcttccct

SEQ ID NO: 2373696 - DNA, 25 bp, Homo sapien
gatgttacatggtgtttcgaagcca

SEQ ID NO: 2373697 - DNA, 25 bp, Homo sapien
gaaccatcccgtcctgtatcatatg

SEQ ID NO: 2373698 - DNA, 25 bp, Homo sapien
gttactgtaagcttgcaggcctcag

SEQ ID NO: 2373699 - DNA, 25 bp, Homo sapien
gctgagaacaaagtgtctatctggg

SEQ ID NO: 2373700 - DNA, 25 bp, Homo sapien
tctaggtttgtgaatgtgaagcccc

SEQ ID NO: 2373701 - DNA, 25 bp, Homo sapien
tgatccagcagctgtgattggaggc

SEQ ID NO: 2373702 - DNA, 25 bp, Homo sapien
gagctcgcactaatctgatccagca

SEQ ID NO: 2373703 - DNA, 25 bp, Homo sapien
gtgtctttgtgtctgagcgccgagc

SEQ ID NO: 2373704 - DNA, 25 bp, Homo sapien
ctcggctttcgtgcctcggtgggca

SEQ ID NO: 2373705 - DNA, 25 bp, Homo sapien
tgttgtggcgacatccgacattagg

SEQ ID NO: 2373706 - DNA, 25 bp, Homo sapien
tcctacgtttgaagtctaggaggga

SEQ ID NO: 2373707 - DNA, 25 bp, Homo sapien
agatggcagagagggtcctacgttt

SEQ ID NO: 2373708 - DNA, 25 bp, Homo sapien
cctctgaaaggtggacaatgtgaac

SEQ ID NO: 2373709 - DNA, 25 bp, Homo sapien
tgaaggcaccgggaagcgcttcatt

SEQ ID NO: 2373710 - DNA, 25 bp, Homo sapien
caccgggaagcgcttcattccggga

SEQ ID NO: 2373711 - DNA, 25 bp, Homo sapien
accgggaagcgcttcattccgggag

SEQ ID NO: 2373712 - DNA, 25 bp, Homo sapien
aggcaccgggaagcgcttcattccg

SEQ ID NO: 2373713 - DNA, 25 bp, Homo sapien
ggaatgcttttgtgtcggaatggta

SEQ ID NO: 2373714 - DNA, 25 bp, Homo sapien
tcggaatggtaagaaatgccttgtg

SEQ ID NO: 2373715 - DNA, 25 bp, Homo sapien
ttgtgtcggaatggtaagaaatgcc

SEQ ID NO: 2373716 - DNA, 25 bp, Homo sapien
aatggtaagaaatgccttgtgtggg

SEQ ID NO: 2373717 - DNA, 25 bp, Homo sapien
taggtcgccactgccggaaaggacc

SEQ ID NO: 2373718 - DNA, 25 bp, Homo sapien
tgattcagagtgctttgggtgctgc

SEQ ID NO: 2373719 - DNA, 25 bp, Homo sapien
gtttgtgcatggctacagaccatgg

SEQ ID NO: 2373720 - DNA, 25 bp, Homo sapien
gaacatccttctgtagccttccttt

SEQ ID NO: 2373721 - DNA, 25 bp, Homo sapien
atcttgattcagagtgctttgggtg

SEQ ID NO: 2373722 - DNA, 25 bp, Homo sapien
attactccagctcatagccttctgg

SEQ ID NO: 2373723 - DNA, 25 bp, Homo sapien
tttcattactccagctcatagcctt

SEQ ID NO: 2373724 - DNA, 25 bp, Homo sapien
tagccttctggttgagtccagaaat

SEQ ID NO: 2373725 - DNA, 25 bp, Homo sapien
ccagctcatagccttctggttgagt

SEQ ID NO: 2373726 - DNA, 25 bp, Homo sapien
tttttgtaaagtatcactctcactc

SEQ ID NO: 2373727 - DNA, 25 bp, Homo sapien
ttgtaaagtatcactctcactctca

SEQ ID NO: 2373728 - DNA, 25 bp, Homo sapien
ttttttgtaaagtatcactctcact

SEQ ID NO: 2373729 - DNA, 25 bp, Homo sapien
ttttgtaaagtatcactctcactct

SEQ ID NO: 2373730 - DNA, 25 bp, Homo sapien
gatccagaggaagtctcttaacctc

SEQ ID NO: 2373731 - DNA, 25 bp, Homo sapien
gctgtgtgatccagaggaagtctct

SEQ ID NO: 2373732 - DNA, 25 bp, Homo sapien
gtgatccagaggaagtctcttaacc

SEQ ID NO: 2373733 - DNA, 25 bp, Homo sapien
tagctgtgtgatccagaggaagtct

SEQ ID NO: 2373734 - DNA, 25 bp, Homo sapien
gggatttcaccgggcctcctgttgc

SEQ ID NO: 2373735 - DNA, 25 bp, Homo sapien
gtgctgccatagtgcttcacggcag

SEQ ID NO: 2373736 - DNA, 25 bp, Homo sapien
gctctcaccggggatttcaccgggc

SEQ ID NO: 2373737 - DNA, 25 bp, Homo sapien
aggccacggcgaaaaggctgctctc

SEQ ID NO: 2373738 - DNA, 25 bp, Homo sapien
gacgttaagagaacagactggcttg

SEQ ID NO: 2373739 - DNA, 25 bp, Homo sapien
agcaagtgcgtcagtccctctgggc

SEQ ID NO: 2373740 - DNA, 25 bp, Homo sapien
actgcagaatagacgttaagagaac

SEQ ID NO: 2373741 - DNA, 25 bp, Homo sapien
caagctcactgtgaatggtcacata

SEQ ID NO: 2373742 - DNA, 25 bp, Homo sapien
gtgcccatggattcccctgtccagg

SEQ ID NO: 2373743 - DNA, 25 bp, Homo sapien
ggtgcccaagcacgtagagatgtat

SEQ ID NO: 2373744 - DNA, 25 bp, Homo sapien
cgtagagatgtatgtgcccatggat

SEQ ID NO: 2373745 - DNA, 25 bp, Homo sapien
gctcccacaggacctatctccttgg

SEQ ID NO: 2373746 - DNA, 25 bp, Homo sapien
tgttcaccgtgagtctgacggcgtg

SEQ ID NO: 2373747 - DNA, 25 bp, Homo sapien
gtgttcaccgtgagtctgacggcgt

SEQ ID NO: 2373748 - DNA, 25 bp, Homo sapien
tgacggcgtgggtgcatgcatgtgt

SEQ ID NO: 2373749 - DNA, 25 bp, Homo sapien
catgtgttaaccagtgctctgctga

SEQ ID NO: 2373750 - DNA, 25 bp, Homo sapien
ttatttttcatagtatccatggtac

SEQ ID NO: 2373751 - DNA, 25 bp, Homo sapien
tttttcatagtatccatggtactgt

SEQ ID NO: 2373752 - DNA, 25 bp, Homo sapien
atttttcatagtatccatggtactg

SEQ ID NO: 2373753 - DNA, 25 bp, Homo sapien
tttcatagtatccatggtactgttt

SEQ ID NO: 2373754 - DNA, 25 bp, Homo sapien
tctctacaataggaatgtaataatg

SEQ ID NO: 2373755 - DNA, 25 bp, Homo sapien
cacagccaaagggtatatgaggccc

SEQ ID NO: 2373756 - DNA, 25 bp, Homo sapien
caaagggtctaagctagccgggctt

SEQ ID NO: 2373757 - DNA, 25 bp, Homo sapien
caaatctctggtttgccaccagcta

SEQ ID NO: 2373758 - DNA, 25 bp, Homo sapien
ggagtccttgtcaaaatcctcggca

SEQ ID NO: 2373759 - DNA, 25 bp, Homo sapien
tatcatccgggacgacggagtcctt

SEQ ID NO: 2373760 - DNA, 25 bp, Homo sapien
tcccactggcattaacctgagcact

SEQ ID NO: 2373761 - DNA, 25 bp, Homo sapien
gaagttactattgggcgccgccctc

SEQ ID NO: 2373762 - DNA, 25 bp, Homo sapien
gggaccgacccagcagccgagaaac

SEQ ID NO: 2373763 - DNA, 25 bp, Homo sapien
gcgggaccgacccagcagccgagaa

SEQ ID NO: 2373764 - DNA, 25 bp, Homo sapien
agctgtgggcgggaccgacccagca

SEQ ID NO: 2373765 - DNA, 25 bp, Homo sapien
actcgacataggccgccccagctgt

SEQ ID NO: 2373766 - DNA, 25 bp, Homo sapien
attcagcatgctgactgccaccccg

SEQ ID NO: 2373767 - DNA, 25 bp, Homo sapien
gatgaactcgggtctctcgtgctct

SEQ ID NO: 2373768 - DNA, 25 bp, Homo sapien
cgggtctctcgtgctctccgtggtg

SEQ ID NO: 2373769 - DNA, 25 bp, Homo sapien
ggtaggcgatgaactcgggtctctc

SEQ ID NO: 2373770 - DNA, 25 bp, Homo sapien
taaggagctcttataactaccaggg

SEQ ID NO: 2373771 - DNA, 25 bp, Homo sapien
gaaagaacaccgtcatgaactgctt

SEQ ID NO: 2373772 - DNA, 25 bp, Homo sapien
taaagttatcctggctacaggacag

SEQ ID NO: 2373773 - DNA, 25 bp, Homo sapien
caaacaatatctgggctgggaaact

SEQ ID NO: 2373774 - DNA, 25 bp, Homo sapien
tattcatcttcgtagccagttggaa

SEQ ID NO: 2373775 - DNA, 25 bp, Homo sapien
ttattcatcttcgtagccagttgga

SEQ ID NO: 2373776 - DNA, 25 bp, Homo sapien
ttggaagtggattcacatgagggtt

SEQ ID NO: 2373777 - DNA, 25 bp, Homo sapien
ggattcacatgagggttatggaata

SEQ ID NO: 2373778 - DNA, 25 bp, Homo sapien
tggtgcccgggtagtggtccagatt

SEQ ID NO: 2373779 - DNA, 25 bp, Homo sapien
aagcaaagggatgggagaccagtat

SEQ ID NO: 2373780 - DNA, 25 bp, Homo sapien
ccagtataccagtcatcatttgata

SEQ ID NO: 2373781 - DNA, 25 bp, Homo sapien
ggtgagcttaaggtcccatatactt

SEQ ID NO: 2373782 - DNA, 25 bp, Homo sapien
tcttttcaacttggacactgacttg

SEQ ID NO: 2373783 - DNA, 25 bp, Homo sapien
acagaaataactaatgccaatttct

SEQ ID NO: 2373784 - DNA, 25 bp, Homo sapien
aacagaaataactaatgccaatttc

SEQ ID NO: 2373785 - DNA, 25 bp, Homo sapien
tacttggcgtggaatcagctttaca

SEQ ID NO: 2373786 - DNA, 25 bp, Homo sapien
gctctcagtgtgcagttcaggaatt

SEQ ID NO: 2373787 - DNA, 25 bp, Homo sapien
agggatctgggcacaacagtttcag

SEQ ID NO: 2373788 - DNA, 25 bp, Homo sapien
cctgccttcacaagaggtgtcagat

SEQ ID NO: 2373789 - DNA, 25 bp, Homo sapien
gaaatttctcaagggggacagctcc

SEQ ID NO: 2373790 - DNA, 25 bp, Homo sapien
aggcatgcacggacatgaagcgcga

SEQ ID NO: 2373791 - DNA, 25 bp, Homo sapien
gcgcgagtacgaccagtgcttcaat

SEQ ID NO: 2373792 - DNA, 25 bp, Homo sapien
caatcgctggttcgccgagaaattt

SEQ ID NO: 2373793 - DNA, 25 bp, Homo sapien
tggcccccgcagtgcgcccgcgcgt

SEQ ID NO: 2373794 - DNA, 25 bp, Homo sapien
ttccttggcccccgcagtgcgcccg

SEQ ID NO: 2373795 - DNA, 25 bp, Homo sapien
tcttccttccttggcccccgcagtg

SEQ ID NO: 2373796 - DNA, 25 bp, Homo sapien
ccttccttggcccccgcagtgcgcc

SEQ ID NO: 2373797 - DNA, 25 bp, Homo sapien
cctggcgcccgcccagaggggcccg

SEQ ID NO: 2373798 - DNA, 25 bp, Homo sapien
ccagccacaccaaccgcgaccacat

SEQ ID NO: 2373799 - DNA, 25 bp, Homo sapien
ctgaggatccgccttggaggtgaag

SEQ ID NO: 2373800 - DNA, 25 bp, Homo sapien
cagaggggcccgaaggcccagccac

SEQ ID NO: 2373801 - DNA, 25 bp, Homo sapien
gggagtgtgggtcaccggcgctccg

SEQ ID NO: 2373802 - DNA, 25 bp, Homo sapien
gggtcaccggcgctccgaagtgcct

SEQ ID NO: 2373803 - DNA, 25 bp, Homo sapien
gagtgtgggtcaccggcgctccgaa

SEQ ID NO: 2373804 - DNA, 25 bp, Homo sapien
ggcggggagtgtgggtcaccggcgc

SEQ ID NO: 2373805 - DNA, 25 bp, Homo sapien
atagctttctccagtcgcgccactg

SEQ ID NO: 2373806 - DNA, 25 bp, Homo sapien
tccacaagcgctagacgctccaggt

SEQ ID NO: 2373807 - DNA, 25 bp, Homo sapien
ggtgctcgatcaccgcagccgtgat

SEQ ID NO: 2373808 - DNA, 25 bp, Homo sapien
ccggtcggcgaaggcgatagctttc

SEQ ID NO: 2373809 - DNA, 25 bp, Homo sapien
gtaaggaatgtccatactgtgtcca

SEQ ID NO: 2373810 - DNA, 25 bp, Homo sapien
tgcccctcaggctcttaaagagacc

SEQ ID NO: 2373811 - DNA, 25 bp, Homo sapien
ccatgtgcagtggatggtccagaaa

SEQ ID NO: 2373812 - DNA, 25 bp, Homo sapien
aacatttaagcaacttggcctcctg

SEQ ID NO: 2373813 - DNA, 25 bp, Homo sapien
gactttctggagtttatagtttctg

SEQ ID NO: 2373814 - DNA, 25 bp, Homo sapien
gcgggggcctgtagcgagaggctga

SEQ ID NO: 2373815 - DNA, 25 bp, Homo sapien
gctgaggaggggaacggcgtgaacc

SEQ ID NO: 2373816 - DNA, 25 bp, Homo sapien
tgttggacagtattaaaaaatggct

SEQ ID NO: 2373817 - DNA, 25 bp, Homo sapien
atcacttgaatgtaggaagcagagt

SEQ ID NO: 2373818 - DNA, 25 bp, Homo sapien
acaagaatcacttgaatgtaggaag

SEQ ID NO: 2373819 - DNA, 25 bp, Homo sapien
tgagcggagatcacaccactgcact

SEQ ID NO: 2373820 - DNA, 25 bp, Homo sapien
taggaagcagagtttgtagtgagcg

SEQ ID NO: 2373821 - DNA, 25 bp, Homo sapien
cacattgtcggatctcaggtataga

SEQ ID NO: 2373822 - DNA, 25 bp, Homo sapien
agtactcctccacgacgcgatggga

SEQ ID NO: 2373823 - DNA, 25 bp, Homo sapien
caaagtactcctccacgacgcgatg

SEQ ID NO: 2373824 - DNA, 25 bp, Homo sapien
acagttgccttctaccacattgtcg

SEQ ID NO: 2373825 - DNA, 25 bp, Homo sapien
gccaaagctggatgaacaagagcca

SEQ ID NO: 2373826 - DNA, 25 bp, Homo sapien
aacaagagccattcccacacagctg

SEQ ID NO: 2373827 - DNA, 25 bp, Homo sapien
gtaatatctctttgccaaagctgga

SEQ ID NO: 2373828 - DNA, 25 bp, Homo sapien
gctggatgaacaagagccattccca

SEQ ID NO: 2373829 - DNA, 25 bp, Homo sapien
caaagctggatgaacaagagccatt

SEQ ID NO: 2373830 - DNA, 25 bp, Homo sapien
acaagagccattcccacacagctga

SEQ ID NO: 2373831 - DNA, 25 bp, Homo sapien
cagctgtgtgggaatggctcttgtt

SEQ ID NO: 2373832 - DNA, 25 bp, Homo sapien
tgtgggaatggctcttgttcatcca

SEQ ID NO: 2373833 - DNA, 25 bp, Homo sapien
gggaatggctcttgttcatccagct

SEQ ID NO: 2373834 - DNA, 25 bp, Homo sapien
tggctcttgttcatccagctttggc

SEQ ID NO: 2373835 - DNA, 25 bp, Homo sapien
tcagctgtgtgggaatggctcttgt

SEQ ID NO: 2373836 - DNA, 25 bp, Homo sapien
tccagctttggcaaagagatattac

SEQ ID NO: 2373837 - DNA, 25 bp, Homo sapien
gagcttgggaactcctaacctagaa

SEQ ID NO: 2373838 - DNA, 25 bp, Homo sapien
tacgtaactggtagacggagcatct

SEQ ID NO: 2373839 - DNA, 25 bp, Homo sapien
gatcactatgtgacaaccttggctg

SEQ ID NO: 2373840 - DNA, 25 bp, Homo sapien
aagatctggccccaacaaggcagtg

SEQ ID NO: 2373841 - DNA, 25 bp, Homo sapien
tgagcagccctatctttaccgaaca

SEQ ID NO: 2373842 - DNA, 25 bp, Homo sapien
taacaggcctgttcagtatggaaga

SEQ ID NO: 2373843 - DNA, 25 bp, Homo sapien
tgtcttccatactgaacaggcctgt

SEQ ID NO: 2373844 - DNA, 25 bp, Homo sapien
gatagttctaggttaggagttccca

SEQ ID NO: 2373845 - DNA, 25 bp, Homo sapien
ggaagttagccctcttctgggaaga

SEQ ID NO: 2373846 - DNA, 25 bp, Homo sapien
cagccaaggttgtcacatagtgatc

SEQ ID NO: 2373847 - DNA, 25 bp, Homo sapien
tgttcggtaaagatagggctgctca

SEQ ID NO: 2373848 - DNA, 25 bp, Homo sapien
gatcaagatgctccgtctaccagtt

SEQ ID NO: 2373849 - DNA, 25 bp, Homo sapien
caggataaaactcagataccaagga

SEQ ID NO: 2373850 - DNA, 25 bp, Homo sapien
aaaactcagataccaaggataaatg

SEQ ID NO: 2373851 - DNA, 25 bp, Homo sapien
gataaaactcagataccaaggataa

SEQ ID NO: 2373852 - DNA, 25 bp, Homo sapien
tattaaattgagatgagtccaggat

SEQ ID NO: 2373853 - DNA, 25 bp, Homo sapien
ttaaattgagatgagtccaggataa

SEQ ID NO: 2373854 - DNA, 25 bp, Homo sapien
actcagataccaaggataaatgaaa

SEQ ID NO: 2373855 - DNA, 25 bp, Homo sapien
tatccttggtatctgagttttatcc

SEQ ID NO: 2373856 - DNA, 25 bp, Homo sapien
tccttggtatctgagttttatcctg

SEQ ID NO: 2373857 - DNA, 25 bp, Homo sapien
catttatccttggtatctgagtttt

SEQ ID NO: 2373858 - DNA, 25 bp, Homo sapien
tttcatttatccttggtatctgagt

SEQ ID NO: 2373859 - DNA, 25 bp, Homo sapien
ttatcctggactcatctcaatttaa

SEQ ID NO: 2373860 - DNA, 25 bp, Homo sapien
tatcctggactcatctcaatttaat

SEQ ID NO: 2373861 - DNA, 25 bp, Homo sapien
agtgatagaatcagagagtttttcc

SEQ ID NO: 2373862 - DNA, 25 bp, Homo sapien
tgccaaagttggttttggctaagaa

SEQ ID NO: 2373863 - DNA, 25 bp, Homo sapien
gaatcagagagtttttcctctaacc

SEQ ID NO: 2373864 - DNA, 25 bp, Homo sapien
atcagagagtttttcctctaaccaa

SEQ ID NO: 2373865 - DNA, 25 bp, Homo sapien
caaactgccaaagttggttttggct

SEQ ID NO: 2373866 - DNA, 25 bp, Homo sapien
tgatagaatcagagagtttttcctc

SEQ ID NO: 2373867 - DNA, 25 bp, Homo sapien
gaggaaaaactctctgattctatca

SEQ ID NO: 2373868 - DNA, 25 bp, Homo sapien
ggttagaggaaaaactctctgattc

SEQ ID NO: 2373869 - DNA, 25 bp, Homo sapien
ttggttagaggaaaaactctctgat

SEQ ID NO: 2373870 - DNA, 25 bp, Homo sapien
agccaaaaccaactttggcagtttg

SEQ ID NO: 2373871 - DNA, 25 bp, Homo sapien
ggaaaaactctctgattctatcact

SEQ ID NO: 2373872 - DNA, 25 bp, Homo sapien
ttcttagccaaaaccaactttggca

SEQ ID NO: 2373873 - DNA, 25 bp, Homo sapien
ctacatatgtgcatcaccacgtcca

SEQ ID NO: 2373874 - DNA, 25 bp, Homo sapien
acatatgtgcatcaccacgtccagt

SEQ ID NO: 2373875 - DNA, 25 bp, Homo sapien
gctatgttgcctatctggtcgtgaa

SEQ ID NO: 2373876 - DNA, 25 bp, Homo sapien
gactacatatgtgcatcaccacgtc

SEQ ID NO: 2373877 - DNA, 25 bp, Homo sapien
catatgtgcatcaccacgtccagtt

SEQ ID NO: 2373878 - DNA, 25 bp, Homo sapien
ttgctatgttgcctatctggtcgtg

SEQ ID NO: 2373879 - DNA, 25 bp, Homo sapien
cacgaccagataggcaacatagcaa

SEQ ID NO: 2373880 - DNA, 25 bp, Homo sapien
tcacgaccagataggcaacatagca

SEQ ID NO: 2373881 - DNA, 25 bp, Homo sapien
tggacgtggtgatgcacatatgtag

SEQ ID NO: 2373882 - DNA, 25 bp, Homo sapien
aactggacgtggtgatgcacatatg

SEQ ID NO: 2373883 - DNA, 25 bp, Homo sapien
gacgtggtgatgcacatatgtagtc

SEQ ID NO: 2373884 - DNA, 25 bp, Homo sapien
ttcacgaccagataggcaacatagc

SEQ ID NO: 2373885 - DNA, 25 bp, Homo sapien
cccctgctttggtatggagagtcac

SEQ ID NO: 2373886 - DNA, 25 bp, Homo sapien
tccgtaaatctcatagtaaggcagg

SEQ ID NO: 2373887 - DNA, 25 bp, Homo sapien
gcccatgaaggaatcgaggtcccaa

SEQ ID NO: 2373888 - DNA, 25 bp, Homo sapien
ttgacccagaccgagaccgtgagta

SEQ ID NO: 2373889 - DNA, 25 bp, Homo sapien
aatgttacggtttagcctggcacag

SEQ ID NO: 2373890 - DNA, 25 bp, Homo sapien
ggtatgaagaccgactgcactagta

SEQ ID NO: 2373891 - DNA, 25 bp, Homo sapien
ttcactgctaatatggccctggtag

SEQ ID NO: 2373892 - DNA, 25 bp, Homo sapien
gaaccaaaaccacaatttctgcagt

SEQ ID NO: 2373893 - DNA, 25 bp, Homo sapien
tatacaacttgtttctgaaccaaaa

SEQ ID NO: 2373894 - DNA, 25 bp, Homo sapien
tgtttcactgctaatatggccctgg

SEQ ID NO: 2373895 - DNA, 25 bp, Homo sapien
taaaatgtttcactgctaatatggc

SEQ ID NO: 2373896 - DNA, 25 bp, Homo sapien
tcacagtaactgttgatctccatag

SEQ ID NO: 2373897 - DNA, 25 bp, Homo sapien
tatggagatcaacagttactgtgac

SEQ ID NO: 2373898 - DNA, 25 bp, Homo sapien
tctaccagggccatattagcagtga

SEQ ID NO: 2373899 - DNA, 25 bp, Homo sapien
tatttttcacccctgattatgggaa

SEQ ID NO: 2373900 - DNA, 25 bp, Homo sapien
tttggttcagaaacaagttgtatat

SEQ ID NO: 2373901 - DNA, 25 bp, Homo sapien
gccatattagcagtgaaacatttta

SEQ ID NO: 2373902 - DNA, 25 bp, Homo sapien
ccagggccatattagcagtgaaaca

SEQ ID NO: 2373903 - DNA, 25 bp, Homo sapien
tacctgaactactcttgggacctcg

SEQ ID NO: 2373904 - DNA, 25 bp, Homo sapien
tactcacggtctcggtctgggtcaa

SEQ ID NO: 2373905 - DNA, 25 bp, Homo sapien
cgtgactctccataccaaagcaggg

SEQ ID NO: 2373906 - DNA, 25 bp, Homo sapien
gccaggcacagagtacacagtaagt

SEQ ID NO: 2373907 - DNA, 25 bp, Homo sapien
ggattaaactatatgacccctgaga

SEQ ID NO: 2373908 - DNA, 25 bp, Homo sapien
tcagttatactgcaaagcagggcct

SEQ ID NO: 2373909 - DNA, 25 bp, Homo sapien
ctttggtttggagacgtttcatgat

SEQ ID NO: 2373910 - DNA, 25 bp, Homo sapien
cgacctccataagtcctggggaact

SEQ ID NO: 2373911 - DNA, 25 bp, Homo sapien
cacacaaatcaggatcctgaagcac

SEQ ID NO: 2373912 - DNA, 25 bp, Homo sapien
gtttggagacgtttcatgatactgg

SEQ ID NO: 2373913 - DNA, 25 bp, Homo sapien
gctgtcacacgcagttttagaggta

SEQ ID NO: 2373914 - DNA, 25 bp, Homo sapien
taacctttacagctgtcacacgcag

SEQ ID NO: 2373915 - DNA, 25 bp, Homo sapien
acgaagccgacactggccataatca

SEQ ID NO: 2373916 - DNA, 25 bp, Homo sapien
tttcttccataaatagcatcctctg

SEQ ID NO: 2373917 - DNA, 25 bp, Homo sapien
acacgaagccgacactggccataat

SEQ ID NO: 2373918 - DNA, 25 bp, Homo sapien
gaagccgacactggccataatcata

SEQ ID NO: 2373919 - DNA, 25 bp, Homo sapien
gaactccacacgaagccgacactgg

SEQ ID NO: 2373920 - DNA, 25 bp, Homo sapien
agccgacactggccataatcataac

SEQ ID NO: 2373921 - DNA, 25 bp, Homo sapien
tatgattatggccagtgtcggcttc

SEQ ID NO: 2373922 - DNA, 25 bp, Homo sapien
cagaggatgctatttatggaagaaa

SEQ ID NO: 2373923 - DNA, 25 bp, Homo sapien
gttatgattatggccagtgtcggct

SEQ ID NO: 2373924 - DNA, 25 bp, Homo sapien
tgattatggccagtgtcggcttcgt

SEQ ID NO: 2373925 - DNA, 25 bp, Homo sapien
ccagtgtcggcttcgtgtggagttc

SEQ ID NO: 2373926 - DNA, 25 bp, Homo sapien
gattatggccagtgtcggcttcgtg

SEQ ID NO: 2373927 - DNA, 25 bp, Homo sapien
agttccccaggacttatggaggtcg

SEQ ID NO: 2373928 - DNA, 25 bp, Homo sapien
cagtatcatgaaacgtctccaaacc

SEQ ID NO: 2373929 - DNA, 25 bp, Homo sapien
ttatgcttactactcatgcccctca

SEQ ID NO: 2373930 - DNA, 25 bp, Homo sapien
tacctctaaaactgcgtgtgacagc

SEQ ID NO: 2373931 - DNA, 25 bp, Homo sapien
tgcgtgtgacagctgtaaaggttaa

SEQ ID NO: 2373932 - DNA, 25 bp, Homo sapien
tgcttcaggatcctgatttgtgtgt

SEQ ID NO: 2373933 - DNA, 25 bp, Homo sapien
tggaacctttagcatctcgccaagc

SEQ ID NO: 2373934 - DNA, 25 bp, Homo sapien
taggaaaacagggtgcgggctctta

SEQ ID NO: 2373935 - DNA, 25 bp, Homo sapien
taggaatctagagtttccaaatccc

SEQ ID NO: 2373936 - DNA, 25 bp, Homo sapien
cgaatccgtgatccctttacaaagc

SEQ ID NO: 2373937 - DNA, 25 bp, Homo sapien
gagggccgacgctgtttgcaaaatc

SEQ ID NO: 2373938 - DNA, 25 bp, Homo sapien
aacggcgagctattccaccagagat

SEQ ID NO: 2373939 - DNA, 25 bp, Homo sapien
ataagagcccgcaccctgttttcct

SEQ ID NO: 2373940 - DNA, 25 bp, Homo sapien
gatctctggtggaatagctcgccgt

SEQ ID NO: 2373941 - DNA, 25 bp, Homo sapien
gctttgtaaagggatcacggattcg

SEQ ID NO: 2373942 - DNA, 25 bp, Homo sapien
gcttggcgagatgctaaaggttcca

SEQ ID NO: 2373943 - DNA, 25 bp, Homo sapien
tgattttgcaaacagcgtcggccct

SEQ ID NO: 2373944 - DNA, 25 bp, Homo sapien
taaccccgctctaaggagtgcttgt

SEQ ID NO: 2373945 - DNA, 25 bp, Homo sapien
tacccacgtcagtgagtgctcacaa

SEQ ID NO: 2373946 - DNA, 25 bp, Homo sapien
ctgggcgctacccacgtcagtgagt

SEQ ID NO: 2373947 - DNA, 25 bp, Homo sapien
cagtgagtgctcacaagtctgtgag

SEQ ID NO: 2373948 - DNA, 25 bp, Homo sapien
ggagcccaagccacttgtccagcgc

SEQ ID NO: 2373949 - DNA, 25 bp, Homo sapien
cagtcacaccagtagggattttccc

SEQ ID NO: 2373950 - DNA, 25 bp, Homo sapien
ttgggcactgccctacactctggtg

SEQ ID NO: 2373951 - DNA, 25 bp, Homo sapien
taaatggcttgctgtgggaactgca

SEQ ID NO: 2373952 - DNA, 25 bp, Homo sapien
tctctcctatttgggtgatttctca

SEQ ID NO: 2373953 - DNA, 25 bp, Homo sapien
cttgtaagtctggttaagacacgtg

SEQ ID NO: 2373954 - DNA, 25 bp, Homo sapien
tggactgtcttctgcggccaccagt

SEQ ID NO: 2373955 - DNA, 25 bp, Homo sapien
taagacacgtggactgtcttctgcg

SEQ ID NO: 2373956 - DNA, 25 bp, Homo sapien
tctggttaagacacgtggactgtct

SEQ ID NO: 2373957 - DNA, 25 bp, Homo sapien
gaagcgagtcagacacagttcctat

SEQ ID NO: 2373958 - DNA, 25 bp, Homo sapien
gacagacattgaacaggatgcacac

SEQ ID NO: 2373959 - DNA, 25 bp, Homo sapien
cacaagggacatgaaaggaagcgag

SEQ ID NO: 2373960 - DNA, 25 bp, Homo sapien
tctatacaagcagggaactaggctg

SEQ ID NO: 2373961 - DNA, 25 bp, Homo sapien
tgttgagcacctgcttgatacaagg

SEQ ID NO: 2373962 - DNA, 25 bp, Homo sapien
cacctgcttgatacaaggcacccat

SEQ ID NO: 2373963 - DNA, 25 bp, Homo sapien
attttttcagcagacatttgttgag

SEQ ID NO: 2373964 - DNA, 25 bp, Homo sapien
caccgcaccctgcatcattttttca

SEQ ID NO: 2373965 - DNA, 25 bp, Homo sapien
cctcagtaggtgggattaccggcat

SEQ ID NO: 2373966 - DNA, 25 bp, Homo sapien
gcaccaccacatcgggctaattttt

SEQ ID NO: 2373967 - DNA, 25 bp, Homo sapien
cctcctcagtaggtgggattaccgg

SEQ ID NO: 2373968 - DNA, 25 bp, Homo sapien
caccacatcgggctaattttttgta

SEQ ID NO: 2373969 - DNA, 25 bp, Homo sapien
tatctctgataagggcaatggataa

SEQ ID NO: 2373970 - DNA, 25 bp, Homo sapien
ttatctctgataagggcaatggata

SEQ ID NO: 2373971 - DNA, 25 bp, Homo sapien
tctctgataagggcaatggataaaa

SEQ ID NO: 2373972 - DNA, 25 bp, Homo sapien
aacttatagcaggagaataaagata

SEQ ID NO: 2373973 - DNA, 25 bp, Homo sapien
attaagggattatccccaagagtgg

SEQ ID NO: 2373974 - DNA, 25 bp, Homo sapien
ttgctcaggtgaggcagtctttcct

SEQ ID NO: 2373975 - DNA, 25 bp, Homo sapien
gggtctctgccaagcaatgcggaca

SEQ ID NO: 2373976 - DNA, 25 bp, Homo sapien
tgtccagggtgaagcttcttgctca

SEQ ID NO: 2373977 - DNA, 25 bp, Homo sapien
agataccgtcgctaccgaaaccgtg

SEQ ID NO: 2373978 - DNA, 25 bp, Homo sapien
gctagagataccgtcgctaccgaaa

SEQ ID NO: 2373979 - DNA, 25 bp, Homo sapien
gaaaccgtggcgcatctaagcagcc

SEQ ID NO: 2373980 - DNA, 25 bp, Homo sapien
gctcaggcccggctagagataccgt

SEQ ID NO: 2373981 - DNA, 25 bp, Homo sapien
tacgcggagggctaagtccggagtg

SEQ ID NO: 2373982 - DNA, 25 bp, Homo sapien
cacttctcaggaagcgcgggctacg

SEQ ID NO: 2373983 - DNA, 25 bp, Homo sapien
gccggcgccaccacgggacgacgcc

SEQ ID NO: 2373984 - DNA, 25 bp, Homo sapien
ggcgaaataaggcagcgaggacacc

SEQ ID NO: 2373985 - DNA, 25 bp, Homo sapien
cgagtcctgttgcatctcttccgac

SEQ ID NO: 2373986 - DNA, 25 bp, Homo sapien
tgatcacggcctttcggtcgcacat

SEQ ID NO: 2373987 - DNA, 25 bp, Homo sapien
tgagtagcgcactccaccgagtcct

SEQ ID NO: 2373988 - DNA, 25 bp, Homo sapien
tgtatttctccagcgcctgagtagc

SEQ ID NO: 2373989 - DNA, 25 bp, Homo sapien
taccgttgctaggtggcgctttccc

SEQ ID NO: 2373990 - DNA, 25 bp, Homo sapien
cgggacctgtcaggcgcccttagga

SEQ ID NO: 2373991 - DNA, 25 bp, Homo sapien
caagccgccagcagtattcccggga

SEQ ID NO: 2373992 - DNA, 25 bp, Homo sapien
caaaatgcatctgcgtcctttctgg

SEQ ID NO: 2373993 - DNA, 25 bp, Homo sapien
gacgaaaggtcagccctaaagacag

SEQ ID NO: 2373994 - DNA, 25 bp, Homo sapien
tcttggataagccagagcctgtagg

SEQ ID NO: 2373995 - DNA, 25 bp, Homo sapien
tgcacccctgcaacacaagactttt

SEQ ID NO: 2373996 - DNA, 25 bp, Homo sapien
tacttgcagtctgagcgaagatggg

SEQ ID NO: 2373997 - DNA, 25 bp, Homo sapien
gtcacataactaccgaagttcctcc

SEQ ID NO: 2373998 - DNA, 25 bp, Homo sapien
ctccccacgatgcaatgccaggtgg

SEQ ID NO: 2373999 - DNA, 25 bp, Homo sapien
cgaagttcctccccacgatgcaatg

SEQ ID NO: 2374000 - DNA, 25 bp, Homo sapien
cgatgcaatgccaggtgggattgta

SEQ ID NO: 2374001 - DNA, 25 bp, Homo sapien
ccaggtagaagtagatgaagtgttt

SEQ ID NO: 2374002 - DNA, 25 bp, Homo sapien
caggtagaagtagatgaagtgtttg

SEQ ID NO: 2374003 - DNA, 25 bp, Homo sapien
tctgctaattgttttataaccacga

SEQ ID NO: 2374004 - DNA, 25 bp, Homo sapien
ctgctaattgttttataaccacgac

SEQ ID NO: 2374005 - DNA, 25 bp, Homo sapien
cccagaacattctatagcaatgtct

SEQ ID NO: 2374006 - DNA, 25 bp, Homo sapien
gcaatgtcttaacaaatatccttaa

SEQ ID NO: 2374007 - DNA, 25 bp, Homo sapien
ttttcagattaggactaaagattta

SEQ ID NO: 2374008 - DNA, 25 bp, Homo sapien
cattctatagcaatgtcttaacaaa

SEQ ID NO: 2374009 - DNA, 25 bp, Homo sapien
tgctaagtggataccagagctttcg

SEQ ID NO: 2374010 - DNA, 25 bp, Homo sapien
gattcttacgctcaacaaagtgtgc

SEQ ID NO: 2374011 - DNA, 25 bp, Homo sapien
caaagtgtgcaggaattggcccgtg

SEQ ID NO: 2374012 - DNA, 25 bp, Homo sapien
tgaagtaaaacacccatgacatgcc

SEQ ID NO: 2374013 - DNA, 25 bp, Homo sapien
acctgctccgggaatggcgacgagt

SEQ ID NO: 2374014 - DNA, 25 bp, Homo sapien
acagcaacggatactcgcccctggg

SEQ ID NO: 2374015 - DNA, 25 bp, Homo sapien
caaagaacccggatggactgtatat

SEQ ID NO: 2374016 - DNA, 25 bp, Homo sapien
tagtgtctccgacacagcaacggat

SEQ ID NO: 2374017 - DNA, 25 bp, Homo sapien
gcgagggaggttgcgcgagccccgc

SEQ ID NO: 2374018 - DNA, 25 bp, Homo sapien
gagggaggttgcgcgagccccgccg

SEQ ID NO: 2374019 - DNA, 25 bp, Homo sapien
cgagggaggttgcgcgagccccgcc

SEQ ID NO: 2374020 - DNA, 25 bp, Homo sapien
ccggcggcagcggcgaccgaggacg

SEQ ID NO: 2374021 - DNA, 25 bp, Homo sapien
ctgttaagcccggcggcagcggcga

SEQ ID NO: 2374022 - DNA, 25 bp, Homo sapien
cggcagcggcgaccgaggacgagga

SEQ ID NO: 2374023 - DNA, 25 bp, Homo sapien
ggcggcagcggcgaccgaggacgag

SEQ ID NO: 2374024 - DNA, 25 bp, Homo sapien
tctcaaactaggaagagaagcggcg

SEQ ID NO: 2374025 - DNA, 25 bp, Homo sapien
actaggaagagaagcggcggacggg

SEQ ID NO: 2374026 - DNA, 25 bp, Homo sapien
cttggcttctcaaactaggaagaga

SEQ ID NO: 2374027 - DNA, 25 bp, Homo sapien
gcttctcaaactaggaagagaagcg

SEQ ID NO: 2374028 - DNA, 25 bp, Homo sapien
gctcatggcgttcagggccggcggg

SEQ ID NO: 2374029 - DNA, 25 bp, Homo sapien
acccaggctcatggcgttcagggcc

SEQ ID NO: 2374030 - DNA, 25 bp, Homo sapien
acggcagtcggagcggagcgggcgc

SEQ ID NO: 2374031 - DNA, 25 bp, Homo sapien
ggcggcagcggttctcggccttcat

SEQ ID NO: 2374032 - DNA, 25 bp, Homo sapien
tgctgcccgaagaggcggaggagct

SEQ ID NO: 2374033 - DNA, 25 bp, Homo sapien
tgttcttgtccatgtcggaggcggt

SEQ ID NO: 2374034 - DNA, 25 bp, Homo sapien
ggctggccccgccgaggcggagcgg

SEQ ID NO: 2374035 - DNA, 25 bp, Homo sapien
gttggagccgctgttcttgtccatg

SEQ ID NO: 2374036 - DNA, 25 bp, Homo sapien
aaatgaagaacaccgggactctagc

SEQ ID NO: 2374037 - DNA, 25 bp, Homo sapien
gcgcccggtctcactctaaacagtt

SEQ ID NO: 2374038 - DNA, 25 bp, Homo sapien
caccctggtagacaagtcagtgact

SEQ ID NO: 2374039 - DNA, 25 bp, Homo sapien
aactggacctccacatttagggact

SEQ ID NO: 2374040 - DNA, 25 bp, Homo sapien
gatggtatgcagtatcgtgatatag

SEQ ID NO: 2374041 - DNA, 25 bp, Homo sapien
cagtatcgtgatatagctcaccgca

SEQ ID NO: 2374042 - DNA, 25 bp, Homo sapien
ggtatgcagtatcgtgatatagctc

SEQ ID NO: 2374043 - DNA, 25 bp, Homo sapien
gctggatggtatgcagtatcgtgat

SEQ ID NO: 2374044 - DNA, 25 bp, Homo sapien
tacagaatcaactgacaacaaattg

SEQ ID NO: 2374045 - DNA, 25 bp, Homo sapien
gagtagttgacaagcacctccagag

SEQ ID NO: 2374046 - DNA, 25 bp, Homo sapien
gtagttgacaagcacctccagaggg

SEQ ID NO: 2374047 - DNA, 25 bp, Homo sapien
tccagaggggcaacatatggcctta

SEQ ID NO: 2374048 - DNA, 25 bp, Homo sapien
caggctccagagtcgacaaataaat

SEQ ID NO: 2374049 - DNA, 25 bp, Homo sapien
tgccaagaactactgtcaagacaca

SEQ ID NO: 2374050 - DNA, 25 bp, Homo sapien
ggacaagaccactaaactcaggctc

SEQ ID NO: 2374051 - DNA, 25 bp, Homo sapien
cctaatggaaaggtctccaccaagt

SEQ ID NO: 2374052 - DNA, 25 bp, Homo sapien
cctcaacctcagcttagcatctttc

SEQ ID NO: 2374053 - DNA, 25 bp, Homo sapien
tgttaccctgattggtttccaactc

SEQ ID NO: 2374054 - DNA, 25 bp, Homo sapien
ggcatatacaccattcttggcttaa

SEQ ID NO: 2374055 - DNA, 25 bp, Homo sapien
ggactccaggcatatacaccattct

SEQ ID NO: 2374056 - DNA, 25 bp, Homo sapien
tgccgccgcccctttgaggaggcat

SEQ ID NO: 2374057 - DNA, 25 bp, Homo sapien
tttctgtgaactggagcgacgggac

SEQ ID NO: 2374058 - DNA, 25 bp, Homo sapien
gaagagctaaagagtttgctgctgc

SEQ ID NO: 2374059 - DNA, 25 bp, Homo sapien
gtaggaaagttcacgtttgcgatta

SEQ ID NO: 2374060 - DNA, 25 bp, Homo sapien
cttcttaggaccagagaactgggca

SEQ ID NO: 2374061 - DNA, 25 bp, Homo sapien
tctggccacggggttcaaaagtgaa

SEQ ID NO: 2374062 - DNA, 25 bp, Homo sapien
tcaacaagtggttcaggttgatctt

SEQ ID NO: 2374063 - DNA, 25 bp, Homo sapien
gggctaaactctgcccgttgagcct

SEQ ID NO: 2374064 - DNA, 25 bp, Homo sapien
tcagttcatataaagtacaaaacgg

SEQ ID NO: 2374065 - DNA, 25 bp, Homo sapien
tcttcaattatgactagggccacac

SEQ ID NO: 2374066 - DNA, 25 bp, Homo sapien
tacaaaacggttacttcagtctaga

SEQ ID NO: 2374067 - DNA, 25 bp, Homo sapien
atgccaagcacttcaacttgtcatt

SEQ ID NO: 2374068 - DNA, 25 bp, Homo sapien
tgactccatcaaacagcagtaagcc

SEQ ID NO: 2374069 - DNA, 25 bp, Homo sapien
tcagcaggcagaagtctaaatccat

SEQ ID NO: 2374070 - DNA, 25 bp, Homo sapien
aatgcaggccattagcagccctggt

SEQ ID NO: 2374071 - DNA, 25 bp, Homo sapien
aaattaacctagaccgtgactccat

SEQ ID NO: 2374072 - DNA, 25 bp, Homo sapien
tgtgtagtcttggtcttcagacacc

SEQ ID NO: 2374073 - DNA, 25 bp, Homo sapien
taactaatgtatcaggatcagcaaa

SEQ ID NO: 2374074 - DNA, 25 bp, Homo sapien
cacaaagtcccagttaactaatgta

SEQ ID NO: 2374075 - DNA, 25 bp, Homo sapien
cttggtcttcagacaccacaaattg

SEQ ID NO: 2374076 - DNA, 25 bp, Homo sapien
cagaaaagggtatcaagcagtgcac

SEQ ID NO: 2374077 - DNA, 25 bp, Homo sapien
aaaagggtatcaagcagtgcacaca

SEQ ID NO: 2374078 - DNA, 25 bp, Homo sapien
gcagaaaagggtatcaagcagtgca

SEQ ID NO: 2374079 - DNA, 25 bp, Homo sapien
agggtatcaagcagtgcacacagcc

SEQ ID NO: 2374080 - DNA, 25 bp, Homo sapien
ccaattagtcacaaaatggactcca

SEQ ID NO: 2374081 - DNA, 25 bp, Homo sapien
gccaattagtcacaaaatggactcc

SEQ ID NO: 2374082 - DNA, 25 bp, Homo sapien
acatcttcagatcagagcctttcat

SEQ ID NO: 2374083 - DNA, 25 bp, Homo sapien
tcagatcagagcctttcatacacca

SEQ ID NO: 2374084 - DNA, 25 bp, Homo sapien
gatcagagcctttcatacaccatcc

SEQ ID NO: 2374085 - DNA, 25 bp, Homo sapien
catcttcagatcagagcctttcata

SEQ ID NO: 2374086 - DNA, 25 bp, Homo sapien
tggctgccaatgaagcaatggccct

SEQ ID NO: 2374087 - DNA, 25 bp, Homo sapien
gccacaaggctgaggcctactttga

SEQ ID NO: 2374088 - DNA, 25 bp, Homo sapien
tagtgattgctacgaatggctgcca

SEQ ID NO: 2374089 - DNA, 25 bp, Homo sapien
tgtaatgagcccaacccagatcagg

SEQ ID NO: 2374090 - DNA, 25 bp, Homo sapien
gaaagtgcaactgaagctgggcgtg

SEQ ID NO: 2374091 - DNA, 25 bp, Homo sapien
ctttgaaagtgcaactgaagctggg

SEQ ID NO: 2374092 - DNA, 25 bp, Homo sapien
tgaaagtgcaactgaagctgggcgt

SEQ ID NO: 2374093 - DNA, 25 bp, Homo sapien
tttgaaagtgcaactgaagctgggc

SEQ ID NO: 2374094 - DNA, 25 bp, Homo sapien
ttatgctatgtcattctcagatgat

SEQ ID NO: 2374095 - DNA, 25 bp, Homo sapien
gctatgtcattctcagatgatttta

SEQ ID NO: 2374096 - DNA, 25 bp, Homo sapien
tatgctatgtcattctcagatgatt

SEQ ID NO: 2374097 - DNA, 25 bp, Homo sapien
gtttttatgctatgtcattctcaga

SEQ ID NO: 2374098 - DNA, 25 bp, Homo sapien
gctttgtatgatagctctttaagca

SEQ ID NO: 2374099 - DNA, 25 bp, Homo sapien
gtatgatagctctttaagcaaagca

SEQ ID NO: 2374100 - DNA, 25 bp, Homo sapien
agctctttaagcaaagcatcaagga

SEQ ID NO: 2374101 - DNA, 25 bp, Homo sapien
tagctctttaagcaaagcatcaagg

SEQ ID NO: 2374102 - DNA, 25 bp, Homo sapien
gatagtgcaggatgcatgcccagca

SEQ ID NO: 2374103 - DNA, 25 bp, Homo sapien
caacgggttatcttggctgcagtag

SEQ ID NO: 2374104 - DNA, 25 bp, Homo sapien
caagatggcacttcatggctacaaa

SEQ ID NO: 2374105 - DNA, 25 bp, Homo sapien
cagaagatgtgtccacaacgggtta

SEQ ID NO: 2374106 - DNA, 25 bp, Homo sapien
atcagctgcatcgtaatggtatcac

SEQ ID NO: 2374107 - DNA, 25 bp, Homo sapien
tagatgaatgggatggtctacattc

SEQ ID NO: 2374108 - DNA, 25 bp, Homo sapien
tcaccaacaacatactgatgtgact

SEQ ID NO: 2374109 - DNA, 25 bp, Homo sapien
ctcctagatgaatgggatggtctac

SEQ ID NO: 2374110 - DNA, 25 bp, Homo sapien
acctgctccttagaggccagcagca

SEQ ID NO: 2374111 - DNA, 25 bp, Homo sapien
tttctcctccagaactacccggtgc

SEQ ID NO: 2374112 - DNA, 25 bp, Homo sapien
ccagcagcaacttggagtactggct

SEQ ID NO: 2374113 - DNA, 25 bp, Homo sapien
tcctccagaactacccggtgcagca

SEQ ID NO: 2374114 - DNA, 25 bp, Homo sapien
gatagctgcctcaataaagcaggac

SEQ ID NO: 2374115 - DNA, 25 bp, Homo sapien
tcctggatagctgcctcaataaagc

SEQ ID NO: 2374116 - DNA, 25 bp, Homo sapien
gagctcctggatagctgcctcaata

SEQ ID NO: 2374117 - DNA, 25 bp, Homo sapien
cttgagctcctggatagctgcctca

SEQ ID NO: 2374118 - DNA, 25 bp, Homo sapien
aacagactccttcgccaagggagcc

SEQ ID NO: 2374119 - DNA, 25 bp, Homo sapien
gcttccggccaatcccgacagagcc

SEQ ID NO: 2374120 - DNA, 25 bp, Homo sapien
caatcccgacagagcctcttcccga

SEQ ID NO: 2374121 - DNA, 25 bp, Homo sapien
agactccttcgccaagggagccatc

SEQ ID NO: 2374122 - DNA, 25 bp, Homo sapien
gacagcatttgaggaacggcagcca

SEQ ID NO: 2374123 - DNA, 25 bp, Homo sapien
tgaggaacggcagccacttagtaac

SEQ ID NO: 2374124 - DNA, 25 bp, Homo sapien
ggcagccacttagtaacaggaacac

SEQ ID NO: 2374125 - DNA, 25 bp, Homo sapien
gcatttgaggaacggcagccactta

SEQ ID NO: 2374126 - DNA, 25 bp, Homo sapien
ggatatctcctgctttccgaaagca

SEQ ID NO: 2374127 - DNA, 25 bp, Homo sapien
caagaggtctagaaggagtgtccag

SEQ ID NO: 2374128 - DNA, 25 bp, Homo sapien
ttcatcgaaggcagacagatactcc

SEQ ID NO: 2374129 - DNA, 25 bp, Homo sapien
ccaagtcatcacaggcctctggcaa

SEQ ID NO: 2374130 - DNA, 25 bp, Homo sapien
cagtgcaaatggtcccctctttaag

SEQ ID NO: 2374131 - DNA, 25 bp, Homo sapien
tctgcggcaacccagccctctcttc

SEQ ID NO: 2374132 - DNA, 25 bp, Homo sapien
tctgaaacacctctgcggcaaccca

SEQ ID NO: 2374133 - DNA, 25 bp, Homo sapien
tagagcaccgggtcacctctgaaac

SEQ ID NO: 2374134 - DNA, 25 bp, Homo sapien
tcctctgcttagagcaccgggtcac

SEQ ID NO: 2374135 - DNA, 25 bp, Homo sapien
cgaggcagcgcacattcacagggtg

SEQ ID NO: 2374136 - DNA, 25 bp, Homo sapien
gcaggaacatatgctgtccatcttc

SEQ ID NO: 2374137 - DNA, 25 bp, Homo sapien
gagtagccagcaatctccaccacag

SEQ ID NO: 2374138 - DNA, 25 bp, Homo sapien
ctcagacatggagtagccagcaatc

SEQ ID NO: 2374139 - DNA, 25 bp, Homo sapien
tctcccaagcaataaggaggataag

SEQ ID NO: 2374140 - DNA, 25 bp, Homo sapien
gcagggaacagcattaactgattta

SEQ ID NO: 2374141 - DNA, 25 bp, Homo sapien
gatttaacagaaccctggcatgctg

SEQ ID NO: 2374142 - DNA, 25 bp, Homo sapien
tatatccccaaactacaatcaatga

SEQ ID NO: 2374143 - DNA, 25 bp, Homo sapien
ttcacagatgctgaactcacaggtg

SEQ ID NO: 2374144 - DNA, 25 bp, Homo sapien
gagatatctgtgacgctgtcgaaca

SEQ ID NO: 2374145 - DNA, 25 bp, Homo sapien
ccacaggaggttgcaaagccagttc

SEQ ID NO: 2374146 - DNA, 25 bp, Homo sapien
ggaggttgcaaagccagttcacaga

SEQ ID NO: 2374147 - DNA, 25 bp, Homo sapien
tcccgagccttcttttggcgctgac

SEQ ID NO: 2374148 - DNA, 25 bp, Homo sapien
tttggcgctgacgtttcctcttctc

SEQ ID NO: 2374149 - DNA, 25 bp, Homo sapien
tctcctctatctcaatcctgcgctc

SEQ ID NO: 2374150 - DNA, 25 bp, Homo sapien
tcaatcctgcgctctcggcggcgtt

SEQ ID NO: 2374151 - DNA, 25 bp, Homo sapien
ccctcggtgctggtgggacccaaag

SEQ ID NO: 2374152 - DNA, 25 bp, Homo sapien
tagattctcgaggggaatgtggact

SEQ ID NO: 2374153 - DNA, 25 bp, Homo sapien
ttctcgaggggaatgtggacttctg

SEQ ID NO: 2374154 - DNA, 25 bp, Homo sapien
cagaggagcaggtataagaattgaa

SEQ ID NO: 2374155 - DNA, 25 bp, Homo sapien
tatcctgcctaaagagctccttgag

SEQ ID NO: 2374156 - DNA, 25 bp, Homo sapien
tccttgaggtgcttagaagctggca

SEQ ID NO: 2374157 - DNA, 25 bp, Homo sapien
tgaagtccacaccatgctgagtggg

SEQ ID NO: 2374158 - DNA, 25 bp, Homo sapien
taccaaagtaaggttatgcccctga

SEQ ID NO: 2374159 - DNA, 25 bp, Homo sapien
cacgcccggccttctggtgtgaaac

SEQ ID NO: 2374160 - DNA, 25 bp, Homo sapien
ccagagacctgattatattcgtcac

SEQ ID NO: 2374161 - DNA, 25 bp, Homo sapien
ggaaccagagacctgattatattcg

SEQ ID NO: 2374162 - DNA, 25 bp, Homo sapien
gacctgattatattcgtcacgttcc

SEQ ID NO: 2374163 - DNA, 25 bp, Homo sapien
gattatattcgtcacgttccaaggg

SEQ ID NO: 2374164 - DNA, 25 bp, Homo sapien
ttcttccagactcccaacgcagaat

SEQ ID NO: 2374165 - DNA, 25 bp, Homo sapien
agaatgagggactgccctgactggc

SEQ ID NO: 2374166 - DNA, 25 bp, Homo sapien
aacgcagaatgagggactgccctga

SEQ ID NO: 2374167 - DNA, 25 bp, Homo sapien
gactcccaacgcagaatgagggact

SEQ ID NO: 2374168 - DNA, 25 bp, Homo sapien
tcatgttccttgacttcggaaccct

SEQ ID NO: 2374169 - DNA, 25 bp, Homo sapien
tttcatgttccttgacttcggaacc

SEQ ID NO: 2374170 - DNA, 25 bp, Homo sapien
tcggaaccctccttaccaaagctca

SEQ ID NO: 2374171 - DNA, 25 bp, Homo sapien
tccttaccaaagctcaattcttgct

SEQ ID NO: 2374172 - DNA, 25 bp, Homo sapien
tctataaaacaactggccatggaag

SEQ ID NO: 2374173 - DNA, 25 bp, Homo sapien
caaaggaacggttatagatcaaagg

SEQ ID NO: 2374174 - DNA, 25 bp, Homo sapien
aatgaaggacgctgagacaaatgtg

SEQ ID NO: 2374175 - DNA, 25 bp, Homo sapien
tactgtggcagtggaatttctctaa

SEQ ID NO: 2374176 - DNA, 25 bp, Homo sapien
agctggtgtgtccagtttcacaaag

SEQ ID NO: 2374177 - DNA, 25 bp, Homo sapien
acaaaggctgcttcaatagcttggc

SEQ ID NO: 2374178 - DNA, 25 bp, Homo sapien
cagtttcacaaaggctgcttcaata

SEQ ID NO: 2374179 - DNA, 25 bp, Homo sapien
tgtgtccagtttcacaaaggctgct

SEQ ID NO: 2374180 - DNA, 25 bp, Homo sapien
gaggaatgcctattactcaagatga

SEQ ID NO: 2374181 - DNA, 25 bp, Homo sapien
tgtaactgctgaaggccactatgag

SEQ ID NO: 2374182 - DNA, 25 bp, Homo sapien
aatatcaagagacaaaccccatggg

SEQ ID NO: 2374183 - DNA, 25 bp, Homo sapien
tggccaaggccagctttgtaactgc

SEQ ID NO: 2374184 - DNA, 25 bp, Homo sapien
atccaaccacaggccagtaaaattc

SEQ ID NO: 2374185 - DNA, 25 bp, Homo sapien
gtctgcttttccaatagctccttca

SEQ ID NO: 2374186 - DNA, 25 bp, Homo sapien
cagatccaaccacaggccagtaaaa

SEQ ID NO: 2374187 - DNA, 25 bp, Homo sapien
tcagatccaaccacaggccagtaaa

SEQ ID NO: 2374188 - DNA, 25 bp, Homo sapien
tcttgacctcagttaatccctcacc

SEQ ID NO: 2374189 - DNA, 25 bp, Homo sapien
ctcttgacctcagttaatccctcac

SEQ ID NO: 2374190 - DNA, 25 bp, Homo sapien
tgacctcagttaatccctcaccttg

SEQ ID NO: 2374191 - DNA, 25 bp, Homo sapien
cctcagttaatccctcaccttggcc

SEQ ID NO: 2374192 - DNA, 25 bp, Homo sapien
cctaaaaacatcgagctgtcggagg

SEQ ID NO: 2374193 - DNA, 25 bp, Homo sapien
tcggaggaagcagtgagtagtaccc

SEQ ID NO: 2374194 - DNA, 25 bp, Homo sapien
taccttgactaactggagaggcaca

SEQ ID NO: 2374195 - DNA, 25 bp, Homo sapien
gaaatggcaatgaaacccacaaggt

SEQ ID NO: 2374196 - DNA, 25 bp, Homo sapien
agcagttttgggccacacatctgct

SEQ ID NO: 2374197 - DNA, 25 bp, Homo sapien
ttctttggagcagttttgggccaca

SEQ ID NO: 2374198 - DNA, 25 bp, Homo sapien
agttttgggccacacatctgctttt

SEQ ID NO: 2374199 - DNA, 25 bp, Homo sapien
ctttctttggagcagttttgggcca

SEQ ID NO: 2374200 - DNA, 25 bp, Homo sapien
agaagccaaactcccccttcaccag

SEQ ID NO: 2374201 - DNA, 25 bp, Homo sapien
cccttcaccagtggaccatcctcac

SEQ ID NO: 2374202 - DNA, 25 bp, Homo sapien
gccaaactcccccttcaccagtgga

SEQ ID NO: 2374203 - DNA, 25 bp, Homo sapien
aactcccccttcaccagtggaccat

SEQ ID NO: 2374204 - DNA, 25 bp, Homo sapien
gaattatcactctccccgtcgctgt

SEQ ID NO: 2374205 - DNA, 25 bp, Homo sapien
ttgaaaactgggcacaggaacacgg

SEQ ID NO: 2374206 - DNA, 25 bp, Homo sapien
acaggaacacggtctgaattatcac

SEQ ID NO: 2374207 - DNA, 25 bp, Homo sapien
ggaacacggtctgaattatcactct

SEQ ID NO: 2374208 - DNA, 25 bp, Homo sapien
tctctggggtggcaaataggtccta

SEQ ID NO: 2374209 - DNA, 25 bp, Homo sapien
atttctctggggtggcaaataggtc

SEQ ID NO: 2374210 - DNA, 25 bp, Homo sapien
ctctggggtggcaaataggtcctat

SEQ ID NO: 2374211 - DNA, 25 bp, Homo sapien
tcaatttctctggggtggcaaatag

SEQ ID NO: 2374212 - DNA, 25 bp, Homo sapien
tactgagagtcacagagtgggagct

SEQ ID NO: 2374213 - DNA, 25 bp, Homo sapien
tctggaattagactgcctagatgcc

SEQ ID NO: 2374214 - DNA, 25 bp, Homo sapien
aacagagtgcaacaggcttcgagac

SEQ ID NO: 2374215 - DNA, 25 bp, Homo sapien
ccatctgtaacgtgaggtacaccca

SEQ ID NO: 2374216 - DNA, 25 bp, Homo sapien
actgaggtgctgaacaggagcttct

SEQ ID NO: 2374217 - DNA, 25 bp, Homo sapien
tggacgactgaggtgctgaacagga

SEQ ID NO: 2374218 - DNA, 25 bp, Homo sapien
cgactgaggtgctgaacaggagctt

SEQ ID NO: 2374219 - DNA, 25 bp, Homo sapien
gacgactgaggtgctgaacaggagc

SEQ ID NO: 2374220 - DNA, 25 bp, Homo sapien
cccagagctaatctgttcaaactca

SEQ ID NO: 2374221 - DNA, 25 bp, Homo sapien
gagaaggtagcctgggccagtagtg

SEQ ID NO: 2374222 - DNA, 25 bp, Homo sapien
cagcagccaaacaaaagcatggggg

SEQ ID NO: 2374223 - DNA, 25 bp, Homo sapien
tccccccagagctaatctgttcaaa

SEQ ID NO: 2374224 - DNA, 25 bp, Homo sapien
gaggtgtactgagtccaggaagccc

SEQ ID NO: 2374225 - DNA, 25 bp, Homo sapien
gaagccctgacatgatgctacagca

SEQ ID NO: 2374226 - DNA, 25 bp, Homo sapien
gactgctctaatgcatctcaaaggg

SEQ ID NO: 2374227 - DNA, 25 bp, Homo sapien
catgggtcaaaaagactaaactggc

SEQ ID NO: 2374228 - DNA, 25 bp, Homo sapien
gccagtcactgaaaacaagctcgat

SEQ ID NO: 2374229 - DNA, 25 bp, Homo sapien
gatggtggcaatgctaccgcttcag

SEQ ID NO: 2374230 - DNA, 25 bp, Homo sapien
aactcaagccatgctcaagaagagg

SEQ ID NO: 2374231 - DNA, 25 bp, Homo sapien
aagtgccaaggacagcctactccat

SEQ ID NO: 2374232 - DNA, 25 bp, Homo sapien
caaaccaaggcataagaaaactgct

SEQ ID NO: 2374233 - DNA, 25 bp, Homo sapien
caaattcagctcaaaccaaggcata

SEQ ID NO: 2374234 - DNA, 25 bp, Homo sapien
gcagcaaaagaattcacatcaaatt

SEQ ID NO: 2374235 - DNA, 25 bp, Homo sapien
gaattcacatcaaattcagctcaaa

SEQ ID NO: 2374236 - DNA, 25 bp, Homo sapien
ttattgcaactatttgccttcgcat

SEQ ID NO: 2374237 - DNA, 25 bp, Homo sapien
tgtgatccaggtttgatctgctacc

SEQ ID NO: 2374238 - DNA, 25 bp, Homo sapien
tgtagttccgctcttattgcgcctg

SEQ ID NO: 2374239 - DNA, 25 bp, Homo sapien
gacaagtcagactgccatactcaca

SEQ ID NO: 2374240 - DNA, 25 bp, Homo sapien
tacaaggcgccctgaagacaagtca

SEQ ID NO: 2374241 - DNA, 25 bp, Homo sapien
gaagttcctaattcagtacaacagg

SEQ ID NO: 2374242 - DNA, 25 bp, Homo sapien
tctgaaagtctgtaaggtcgagatc

SEQ ID NO: 2374243 - DNA, 25 bp, Homo sapien
cagaactgcactgatgaaggtaagc

SEQ ID NO: 2374244 - DNA, 25 bp, Homo sapien
tgaccacagtaactcatatgccagg

SEQ ID NO: 2374245 - DNA, 25 bp, Homo sapien
tctgcgagcaaaaaacgagacggca

SEQ ID NO: 2374246 - DNA, 25 bp, Homo sapien
tgaccacgtattgtttctgcgagca

SEQ ID NO: 2374247 - DNA, 25 bp, Homo sapien
tatactcgcatacataactgtggtg

SEQ ID NO: 2374248 - DNA, 25 bp, Homo sapien
taagattgctgaaaggcccaaacag

SEQ ID NO: 2374249 - DNA, 25 bp, Homo sapien
gagtgaaatcctgcacgggagagca

SEQ ID NO: 2374250 - DNA, 25 bp, Homo sapien
cccacgagggaggaaccattgttat

SEQ ID NO: 2374251 - DNA, 25 bp, Homo sapien
aaaagggcttactatgcactcgctg

SEQ ID NO: 2374252 - DNA, 25 bp, Homo sapien
taaacttcatatccacccacgaggg

SEQ ID NO: 2374253 - DNA, 25 bp, Homo sapien
gaataaagacagtgatcccggctgg

SEQ ID NO: 2374254 - DNA, 25 bp, Homo sapien
actgggagagcccaattaatgatca

SEQ ID NO: 2374255 - DNA, 25 bp, Homo sapien
gcccaattaatgatcacccaggaga

SEQ ID NO: 2374256 - DNA, 25 bp, Homo sapien
taaagacagtgatcccggctggaca

SEQ ID NO: 2374257 - DNA, 25 bp, Homo sapien
ttcgtaagtgacatcaccgacctga

SEQ ID NO: 2374258 - DNA, 25 bp, Homo sapien
tcaccgacctgaaggtggactccag

SEQ ID NO: 2374259 - DNA, 25 bp, Homo sapien
ggactccaggtaactgccctatctg

SEQ ID NO: 2374260 - DNA, 25 bp, Homo sapien
gataattttcccttcgtaagtgaca

SEQ ID NO: 2374261 - DNA, 25 bp, Homo sapien
tatgcctgggactaggcgcagcagc

SEQ ID NO: 2374262 - DNA, 25 bp, Homo sapien
aaatcaaaccatcaggacagataga

SEQ ID NO: 2374263 - DNA, 25 bp, Homo sapien
tgggttacaagaatttatgcctggg

SEQ ID NO: 2374264 - DNA, 25 bp, Homo sapien
agtacaacggttgactggacctaat

SEQ ID NO: 2374265 - DNA, 25 bp, Homo sapien
tggcaatgaggactacagaggtccg

SEQ ID NO: 2374266 - DNA, 25 bp, Homo sapien
aaccggagacccgaggagcatgaag

SEQ ID NO: 2374267 - DNA, 25 bp, Homo sapien
cccagggggtacaactttggcaatg

SEQ ID NO: 2374268 - DNA, 25 bp, Homo sapien
gagcatgaaggcactctgtgacatc

SEQ ID NO: 2374269 - DNA, 25 bp, Homo sapien
atgtgacagcgcagcctctacgccc

SEQ ID NO: 2374270 - DNA, 25 bp, Homo sapien
ggccgcttaaatgcggccccgtcgc

SEQ ID NO: 2374271 - DNA, 25 bp, Homo sapien
gtcgccgccgcccatgtgacagcgc

SEQ ID NO: 2374272 - DNA, 25 bp, Homo sapien
cgaggacgcgctggaggcgggcgcc

SEQ ID NO: 2374273 - DNA, 25 bp, Homo sapien
gacgtcttggactcgcttttggcga

SEQ ID NO: 2374274 - DNA, 25 bp, Homo sapien
cgcttttggcgatgtgcgagctcat

SEQ ID NO: 2374275 - DNA, 25 bp, Homo sapien
tggactcgcttttggcgatgtgcga

SEQ ID NO: 2374276 - DNA, 25 bp, Homo sapien
agcagcgacgtcttggactcgcttt

SEQ ID NO: 2374277 - DNA, 25 bp, Homo sapien
cacaggggcctccgcgaactggggt

SEQ ID NO: 2374278 - DNA, 25 bp, Homo sapien
cccggaggccgagcgccggggacag

SEQ ID NO: 2374279 - DNA, 25 bp, Homo sapien
gggtccgcctcggacgcggcggctg

SEQ ID NO: 2374280 - DNA, 25 bp, Homo sapien
cgacggcgaaggtcgggacgccgcg

SEQ ID NO: 2374281 - DNA, 25 bp, Homo sapien
gcatggggcgcagccggtggaggaa

SEQ ID NO: 2374282 - DNA, 25 bp, Homo sapien
gaggacgaggtgagccgaggcgtga

SEQ ID NO: 2374283 - DNA, 25 bp, Homo sapien
cccggggaggacgaggtgagccgag

SEQ ID NO: 2374284 - DNA, 25 bp, Homo sapien
acgaggtgagccgaggcgtgatccg

SEQ ID NO: 2374285 - DNA, 25 bp, Homo sapien
gaggtgagccgaggcgtgatccgtg

SEQ ID NO: 2374286 - DNA, 25 bp, Homo sapien
tctcttccaggactggcgggttctg

SEQ ID NO: 2374287 - DNA, 25 bp, Homo sapien
tcagggacatgataggcagtggcca

SEQ ID NO: 2374288 - DNA, 25 bp, Homo sapien
cgcaaatctccaggacggtcgtaga

SEQ ID NO: 2374289 - DNA, 25 bp, Homo sapien
tgtccctcgccctcaagtaattctg

SEQ ID NO: 2374290 - DNA, 25 bp, Homo sapien
taactcggctaacgagggctccctg

SEQ ID NO: 2374291 - DNA, 25 bp, Homo sapien
gagaactgtttccagctaactcggc

SEQ ID NO: 2374292 - DNA, 25 bp, Homo sapien
cttcctggtgtctagcaaatgtctg

SEQ ID NO: 2374293 - DNA, 25 bp, Homo sapien
gggccctggctatctggttcactgt

SEQ ID NO: 2374294 - DNA, 25 bp, Homo sapien
gagttgatgatgctaaccttcacag

SEQ ID NO: 2374295 - DNA, 25 bp, Homo sapien
tcttaggaacctaggcttagtgcaa

SEQ ID NO: 2374296 - DNA, 25 bp, Homo sapien
tgttgcctctcaaaaacagctggag

SEQ ID NO: 2374297 - DNA, 25 bp, Homo sapien
cagtgggctctagactgaggcctca

SEQ ID NO: 2374298 - DNA, 25 bp, Homo sapien
gagctgcggctccagtcgagagcct

SEQ ID NO: 2374299 - DNA, 25 bp, Homo sapien
cctgggaggtctggtgacgcctcca

SEQ ID NO: 2374300 - DNA, 25 bp, Homo sapien
tccagctgcattgagagctgcggct

SEQ ID NO: 2374301 - DNA, 25 bp, Homo sapien
ctccagtcgagagcctgggaggtct

SEQ ID NO: 2374302 - DNA, 25 bp, Homo sapien
gcagctgcggctgggaattaggcca

SEQ ID NO: 2374303 - DNA, 25 bp, Homo sapien
tctacatcagattagcgctcagtcc

SEQ ID NO: 2374304 - DNA, 25 bp, Homo sapien
tttccccgctgccaaatctgcaggg

SEQ ID NO: 2374305 - DNA, 25 bp, Homo sapien
gctggagaaggctgccggatcatct

SEQ ID NO: 2374306 - DNA, 25 bp, Homo sapien
cccgggtccatgaaggaggctcctg

SEQ ID NO: 2374307 - DNA, 25 bp, Homo sapien
ggactgagggacttccgtcccagtc

SEQ ID NO: 2374308 - DNA, 25 bp, Homo sapien
aggcagcccctcttgggatccccgg

SEQ ID NO: 2374309 - DNA, 25 bp, Homo sapien
actgagggacttccgtcccagtctc

SEQ ID NO: 2374310 - DNA, 25 bp, Homo sapien
ttccttgagagatttctcagtggat

SEQ ID NO: 2374311 - DNA, 25 bp, Homo sapien
cttccttgagagatttctcagtgga

SEQ ID NO: 2374312 - DNA, 25 bp, Homo sapien
tccttgagagatttctcagtggata

SEQ ID NO: 2374313 - DNA, 25 bp, Homo sapien
caattcagtcaatctccagggctaa

SEQ ID NO: 2374314 - DNA, 25 bp, Homo sapien
cacacccaagtgcatgaagagacag

SEQ ID NO: 2374315 - DNA, 25 bp, Homo sapien
caatccttgacggaaatggtggttc

SEQ ID NO: 2374316 - DNA, 25 bp, Homo sapien
ccagaggttgcacatgcaggtgcca

SEQ ID NO: 2374317 - DNA, 25 bp, Homo sapien
ccagcaggttgtgcatgactgcgca

SEQ ID NO: 2374318 - DNA, 25 bp, Homo sapien
cccttgcgcaggaaaatgcaggcag

SEQ ID NO: 2374319 - DNA, 25 bp, Homo sapien
gcatcaggagcggtcccgggagctc

SEQ ID NO: 2374320 - DNA, 25 bp, Homo sapien
tgcctgttctcagcgaagcccttgc

SEQ ID NO: 2374321 - DNA, 25 bp, Homo sapien
caagttcagcgggctccactgggcc

SEQ ID NO: 2374322 - DNA, 25 bp, Homo sapien
gaagccaagttcagcgggctccact

SEQ ID NO: 2374323 - DNA, 25 bp, Homo sapien
aagttcagcgggctccactgggcca

SEQ ID NO: 2374324 - DNA, 25 bp, Homo sapien
ttggggatcagattcataagttggg

SEQ ID NO: 2374325 - DNA, 25 bp, Homo sapien
aactttggggatcagattcataagt

SEQ ID NO: 2374326 - DNA, 25 bp, Homo sapien
aaaactttggggatcagattcataa

SEQ ID NO: 2374327 - DNA, 25 bp, Homo sapien
ctttggggatcagattcataagttg

SEQ ID NO: 2374328 - DNA, 25 bp, Homo sapien
cgttccagccaacggggccaggatg

SEQ ID NO: 2374329 - DNA, 25 bp, Homo sapien
caggacaaaagacgacaacaccaga

SEQ ID NO: 2374330 - DNA, 25 bp, Homo sapien
agacacgcaggcatgccacagtgag

SEQ ID NO: 2374331 - DNA, 25 bp, Homo sapien
ggtatggccatacctcccacgaaca

SEQ ID NO: 2374332 - DNA, 25 bp, Homo sapien
ggagccagggtccaaaaagcacatg

SEQ ID NO: 2374333 - DNA, 25 bp, Homo sapien
ggtctcctgggcaatcaaggcaacc

SEQ ID NO: 2374334 - DNA, 25 bp, Homo sapien
tgggatcacaggacaccacatagga

SEQ ID NO: 2374335 - DNA, 25 bp, Homo sapien
aaagcacatgtctccagcctcaagc

SEQ ID NO: 2374336 - DNA, 25 bp, Homo sapien
cttagacatagaagctcctgggccc

SEQ ID NO: 2374337 - DNA, 25 bp, Homo sapien
ccagggaggtcacaacagggaaaag

SEQ ID NO: 2374338 - DNA, 25 bp, Homo sapien
ctattagccgcgacaagggacctgg

SEQ ID NO: 2374339 - DNA, 25 bp, Homo sapien
gagagcaccacccaatgaaacagga

SEQ ID NO: 2374340 - DNA, 25 bp, Homo sapien
ttcaatttcctctggtcgcagtgat

SEQ ID NO: 2374341 - DNA, 25 bp, Homo sapien
tcaggggtaggacccgcagagcctc

SEQ ID NO: 2374342 - DNA, 25 bp, Homo sapien
gtttcacagaagataccccgcgttg

SEQ ID NO: 2374343 - DNA, 25 bp, Homo sapien
tcccacaccttcctagagggctagg

SEQ ID NO: 2374344 - DNA, 25 bp, Homo sapien
aaggcccaccggcatggaaagagag

SEQ ID NO: 2374345 - DNA, 25 bp, Homo sapien
gcccatggtgcgcatgcagttgccc

SEQ ID NO: 2374346 - DNA, 25 bp, Homo sapien
ccttgtcgaattctctgaaggcctc

SEQ ID NO: 2374347 - DNA, 25 bp, Homo sapien
tccttgtccttgtcgaattctctga

SEQ ID NO: 2374348 - DNA, 25 bp, Homo sapien
ccagatcccggcagttgatgtagcc

SEQ ID NO: 2374349 - DNA, 25 bp, Homo sapien
cgcagttcctttacaccaatcatat

SEQ ID NO: 2374350 - DNA, 25 bp, Homo sapien
atctgctgtctctgccaggagttta

SEQ ID NO: 2374351 - DNA, 25 bp, Homo sapien
ctctcggaaagcatctcgcagttcc

SEQ ID NO: 2374352 - DNA, 25 bp, Homo sapien
tgtctctgccaggagtttaggcccc

SEQ ID NO: 2374353 - DNA, 25 bp, Homo sapien
ccccagcatggcgattggcagcagc

SEQ ID NO: 2374354 - DNA, 25 bp, Homo sapien
gagaggtcgccccagcatggcgatt

SEQ ID NO: 2374355 - DNA, 25 bp, Homo sapien
tactgcagataggattccaatagcc

SEQ ID NO: 2374356 - DNA, 25 bp, Homo sapien
tgatctgggacttgaggctcaggct

SEQ ID NO: 2374357 - DNA, 25 bp, Homo sapien
atagcctctcgcagctcactggtgc

SEQ ID NO: 2374358 - DNA, 25 bp, Homo sapien
tgaggtccacatctcggataatttc

SEQ ID NO: 2374359 - DNA, 25 bp, Homo sapien
tcggtgtcccacctgatgacccagg

SEQ ID NO: 2374360 - DNA, 25 bp, Homo sapien
taatttcctctatgtctcggtgtcc

SEQ ID NO: 2374361 - DNA, 25 bp, Homo sapien
catgatggatacacaattggagggc

SEQ ID NO: 2374362 - DNA, 25 bp, Homo sapien
tgttcagaaaacacctaccgtggat

SEQ ID NO: 2374363 - DNA, 25 bp, Homo sapien
tgcagacgaagagacatgaatgtgt

SEQ ID NO: 2374364 - DNA, 25 bp, Homo sapien
gatcagtgtattcaagagggaccct

SEQ ID NO: 2374365 - DNA, 25 bp, Homo sapien
ttatagctcactgtaaggtcaaact

SEQ ID NO: 2374366 - DNA, 25 bp, Homo sapien
accgtgcccagccccttctctctct

SEQ ID NO: 2374367 - DNA, 25 bp, Homo sapien
gtcaaactcctgggctctagcaatc

SEQ ID NO: 2374368 - DNA, 25 bp, Homo sapien
gattatagctcactgtaaggtcaaa

SEQ ID NO: 2374369 - DNA, 25 bp, Homo sapien
cagcgggacatcatccggacaaact

SEQ ID NO: 2374370 - DNA, 25 bp, Homo sapien
tcagcgggacatcatccggacaaac

SEQ ID NO: 2374371 - DNA, 25 bp, Homo sapien
cagttgcaggagttagtctttcaca

SEQ ID NO: 2374372 - DNA, 25 bp, Homo sapien
ttggcgcctggcatgacctctgccg

SEQ ID NO: 2374373 - DNA, 25 bp, Homo sapien
gctacagcgggtgaggcaagctcta

SEQ ID NO: 2374374 - DNA, 25 bp, Homo sapien
cctttgggagcttggcagtcctgga

SEQ ID NO: 2374375 - DNA, 25 bp, Homo sapien
cggagccaagctagtacagaggcag

SEQ ID NO: 2374376 - DNA, 25 bp, Homo sapien
agccaagctagtacagaggcaggca

SEQ ID NO: 2374377 - DNA, 25 bp, Homo sapien
gagccaagctagtacagaggcaggc

SEQ ID NO: 2374378 - DNA, 25 bp, Homo sapien
gcggagccaagctagtacagaggca

SEQ ID NO: 2374379 - DNA, 25 bp, Homo sapien
atagagatgtctacagaagccctct

SEQ ID NO: 2374380 - DNA, 25 bp, Homo sapien
agaagccctcttcccgcaggttgcc

SEQ ID NO: 2374381 - DNA, 25 bp, Homo sapien
cctgccagccgatagagatgtctac

SEQ ID NO: 2374382 - DNA, 25 bp, Homo sapien
gagatgtctacagaagccctcttcc

SEQ ID NO: 2374383 - DNA, 25 bp, Homo sapien
aatctcacgggaccatcatcgtgta

SEQ ID NO: 2374384 - DNA, 25 bp, Homo sapien
taataaaaccgcatgaagaagagga

SEQ ID NO: 2374385 - DNA, 25 bp, Homo sapien
caattgtttagatactccgagacca

SEQ ID NO: 2374386 - DNA, 25 bp, Homo sapien
tatttcagagggcagacgtgaggat

SEQ ID NO: 2374387 - DNA, 25 bp, Homo sapien
ggtttagggtagggcgcactgacat

SEQ ID NO: 2374388 - DNA, 25 bp, Homo sapien
aggtttagggtagggcgcactgaca

SEQ ID NO: 2374389 - DNA, 25 bp, Homo sapien
gaaggtttagggtagggcgcactga

SEQ ID NO: 2374390 - DNA, 25 bp, Homo sapien
atggagcgcgcgcagagggagtgag

SEQ ID NO: 2374391 - DNA, 25 bp, Homo sapien
ggttcgatgcggaagtggcgggtgc

SEQ ID NO: 2374392 - DNA, 25 bp, Homo sapien
tgaagcggcggttcgatgcggaagt

SEQ ID NO: 2374393 - DNA, 25 bp, Homo sapien
cagagggagtgagttcggttgaagc

SEQ ID NO: 2374394 - DNA, 25 bp, Homo sapien
cccgctcattggctgtcaggcgcgg

SEQ ID NO: 2374395 - DNA, 25 bp, Homo sapien
aagggcgtggcttctcccaggcgcc

SEQ ID NO: 2374396 - DNA, 25 bp, Homo sapien
aggcgcgggaaagggcgtggcttct

SEQ ID NO: 2374397 - DNA, 25 bp, Homo sapien
ctcattggctgtcaggcgcgggaaa

SEQ ID NO: 2374398 - DNA, 25 bp, Homo sapien
gccgaccctcgtcctcggccggctg

SEQ ID NO: 2374399 - DNA, 25 bp, Homo sapien
ccggggacatgtcgctctcaggcct

SEQ ID NO: 2374400 - DNA, 25 bp, Homo sapien
ccggactcagaaaaacagcgccacg

SEQ ID NO: 2374401 - DNA, 25 bp, Homo sapien
cttcttctcagccacgggtaccgcc

SEQ ID NO: 2374402 - DNA, 25 bp, Homo sapien
cgggtccccggatcgccggcggcag

SEQ ID NO: 2374403 - DNA, 25 bp, Homo sapien
acagcggttccctcaaccgcccagg

SEQ ID NO: 2374404 - DNA, 25 bp, Homo sapien
gcagcagtcgcaggagcgccacagc

SEQ ID NO: 2374405 - DNA, 25 bp, Homo sapien
aggagcgccacagcggttccctcaa

SEQ ID NO: 2374406 - DNA, 25 bp, Homo sapien
acatgcgcctctccacccgcgttga

SEQ ID NO: 2374407 - DNA, 25 bp, Homo sapien
cacccgcgttgaccgcccaaatgac

SEQ ID NO: 2374408 - DNA, 25 bp, Homo sapien
cttccaaagggtccttgcggaagtg

SEQ ID NO: 2374409 - DNA, 25 bp, Homo sapien
ttgcggaagtggatcccgtgcacgt

SEQ ID NO: 2374410 - DNA, 25 bp, Homo sapien
gagaaacttcgctccagagacgcgg

SEQ ID NO: 2374411 - DNA, 25 bp, Homo sapien
caggccctggatcccgcggctcggc

SEQ ID NO: 2374412 - DNA, 25 bp, Homo sapien
gcagagagaaacttcgctccagaga

SEQ ID NO: 2374413 - DNA, 25 bp, Homo sapien
ccagagacgcggccccagggtcgaa

SEQ ID NO: 2374414 - DNA, 25 bp, Homo sapien
gctcaatctactataatcaatttcg

SEQ ID NO: 2374415 - DNA, 25 bp, Homo sapien
tctactataatcaatttcgagtggg

SEQ ID NO: 2374416 - DNA, 25 bp, Homo sapien
caagcccctggtgcagaaacctgga

SEQ ID NO: 2374417 - DNA, 25 bp, Homo sapien
tcgagtggggactaggaatctgcat

SEQ ID NO: 2374418 - DNA, 25 bp, Homo sapien
aatgggctgagacagcgaacccacg

SEQ ID NO: 2374419 - DNA, 25 bp, Homo sapien
ctccagtgaggccagtacctaaaga

SEQ ID NO: 2374420 - DNA, 25 bp, Homo sapien
tcatcccatgtttcaagctcttacc

SEQ ID NO: 2374421 - DNA, 25 bp, Homo sapien
gcctgcctgttaggtgacagtagag

SEQ ID NO: 2374422 - DNA, 25 bp, Homo sapien
gacagtaacgtaatctgcggcagtc

SEQ ID NO: 2374423 - DNA, 25 bp, Homo sapien
tcagcacagggttcaggaaaagaca

SEQ ID NO: 2374424 - DNA, 25 bp, Homo sapien
gaaacatgggtatgctagccaggca

SEQ ID NO: 2374425 - DNA, 25 bp, Homo sapien
tagccaggcaaggatatgcacacga

SEQ ID NO: 2374426 - DNA, 25 bp, Homo sapien
tacctcgggtcagtatcagaagagc

SEQ ID NO: 2374427 - DNA, 25 bp, Homo sapien
tagtcgccactcatacagtttgctg

SEQ ID NO: 2374428 - DNA, 25 bp, Homo sapien
gagcagaaaacctctcttggccctg

SEQ ID NO: 2374429 - DNA, 25 bp, Homo sapien
gcaaagcagtgaagccatgccactc

SEQ ID NO: 2374430 - DNA, 25 bp, Homo sapien
ctcagtttgatacaggatctggtcc

SEQ ID NO: 2374431 - DNA, 25 bp, Homo sapien
ggtctcctcattgtaccgctcagtt

SEQ ID NO: 2374432 - DNA, 25 bp, Homo sapien
gcaaatttcaagaccagcacgtagt

SEQ ID NO: 2374433 - DNA, 25 bp, Homo sapien
tgatgggcacttcgtagccaaaggt

SEQ ID NO: 2374434 - DNA, 25 bp, Homo sapien
gacgtggccattcaatcgtacatca

SEQ ID NO: 2374435 - DNA, 25 bp, Homo sapien
gctatgcccaacacgatcaaagata

SEQ ID NO: 2374436 - DNA, 25 bp, Homo sapien
cccctttctgatgctcataggtata

SEQ ID NO: 2374437 - DNA, 25 bp, Homo sapien
cataggtataatttcatcgtgagct

SEQ ID NO: 2374438 - DNA, 25 bp, Homo sapien
cccagccatgatgtagagtgcacag

SEQ ID NO: 2374439 - DNA, 25 bp, Homo sapien
cagccatgatgtagagtgcacagac

SEQ ID NO: 2374440 - DNA, 25 bp, Homo sapien
ccagccatgatgtagagtgcacaga

SEQ ID NO: 2374441 - DNA, 25 bp, Homo sapien
tcccagccatgatgtagagtgcaca

SEQ ID NO: 2374442 - DNA, 25 bp, Homo sapien
tgaagaaacgttgacccagagagtt

SEQ ID NO: 2374443 - DNA, 25 bp, Homo sapien
gccgtgctcatagggaggttcacta

SEQ ID NO: 2374444 - DNA, 25 bp, Homo sapien
tcctcagggacttgaacacaggtct

SEQ ID NO: 2374445 - DNA, 25 bp, Homo sapien
gattgctgtgattgaacccgggtcc

SEQ ID NO: 2374446 - DNA, 25 bp, Homo sapien
tctccaatcccggatgaggctgaag

SEQ ID NO: 2374447 - DNA, 25 bp, Homo sapien
cggatgaggctgaagctttggtaca

SEQ ID NO: 2374448 - DNA, 25 bp, Homo sapien
tctttcttctccaatcccggatgag

SEQ ID NO: 2374449 - DNA, 25 bp, Homo sapien
caatcccggatgaggctgaagcttt

SEQ ID NO: 2374450 - DNA, 25 bp, Homo sapien
tggaatgaagactccgaaggccacc

SEQ ID NO: 2374451 - DNA, 25 bp, Homo sapien
gaaacatgaggctgctgttgtccga

SEQ ID NO: 2374452 - DNA, 25 bp, Homo sapien
tgaagactccgaaggccaccaggat

SEQ ID NO: 2374453 - DNA, 25 bp, Homo sapien
gggcctgactgcacccggttcttat

SEQ ID NO: 2374454 - DNA, 25 bp, Homo sapien
ccaaaaccaatatggctggtttctt

SEQ ID NO: 2374455 - DNA, 25 bp, Homo sapien
accaaaaccaatatggctggtttct

SEQ ID NO: 2374456 - DNA, 25 bp, Homo sapien
ccagtgctggtcgtctcaggtaata

SEQ ID NO: 2374457 - DNA, 25 bp, Homo sapien
gaatgagggctgctctctactcgct

SEQ ID NO: 2374458 - DNA, 25 bp, Homo sapien
tgagcaggaaggatccagtttaccc

SEQ ID NO: 2374459 - DNA, 25 bp, Homo sapien
caaagagaggacgaggactgaagca

SEQ ID NO: 2374460 - DNA, 25 bp, Homo sapien
agaagaaatcaagtccccaacaggc

SEQ ID NO: 2374461 - DNA, 25 bp, Homo sapien
tgtggtaacaagtcagaggcgatct

SEQ ID NO: 2374462 - DNA, 25 bp, Homo sapien
caaacactaaaggtgggaccatcac

SEQ ID NO: 2374463 - DNA, 25 bp, Homo sapien
tctgaggacccgacataaccgaaac

SEQ ID NO: 2374464 - DNA, 25 bp, Homo sapien
cacattctagaaaagcgggcctggc

SEQ ID NO: 2374465 - DNA, 25 bp, Homo sapien
ttagttaggatgtccactgccccag

SEQ ID NO: 2374466 - DNA, 25 bp, Homo sapien
ttaaagagccaaaacccaggacatg

SEQ ID NO: 2374467 - DNA, 25 bp, Homo sapien
taaatgcccgctaacgtgatcccag

SEQ ID NO: 2374468 - DNA, 25 bp, Homo sapien
tactctcctaggtccttctggaggg

SEQ ID NO: 2374469 - DNA, 25 bp, Homo sapien
cccatggcagggactataggacccc

SEQ ID NO: 2374470 - DNA, 25 bp, Homo sapien
aacctgaatctagagggaatgcccc

SEQ ID NO: 2374471 - DNA, 25 bp, Homo sapien
gaaagattcgtctctcactttggaa

SEQ ID NO: 2374472 - DNA, 25 bp, Homo sapien
ggtaccaatctagtctcataacaaa

SEQ ID NO: 2374473 - DNA, 25 bp, Homo sapien
tacagagagtcttagtttggactga

SEQ ID NO: 2374474 - DNA, 25 bp, Homo sapien
taggcagctgatctactggtaccaa

SEQ ID NO: 2374475 - DNA, 25 bp, Homo sapien
ccggttctgcttccgtgtactatca

SEQ ID NO: 2374476 - DNA, 25 bp, Homo sapien
ccaataatggttgaagaggctgccc

SEQ ID NO: 2374477 - DNA, 25 bp, Homo sapien
cctttgaaaggacggaaagcgcact

SEQ ID NO: 2374478 - DNA, 25 bp, Homo sapien
gactgcctggatgcaagaggtgcca

SEQ ID NO: 2374479 - DNA, 25 bp, Homo sapien
ttaagtccaaggagagaaccaatcc

SEQ ID NO: 2374480 - DNA, 25 bp, Homo sapien
gctttttctccagtacttggtacag

SEQ ID NO: 2374481 - DNA, 25 bp, Homo sapien
caagggctaagaacttgatgctttt

SEQ ID NO: 2374482 - DNA, 25 bp, Homo sapien
agttggtttggcctccacagagaga

SEQ ID NO: 2374483 - DNA, 25 bp, Homo sapien
aactagggtagaagctacaagggct

SEQ ID NO: 2374484 - DNA, 25 bp, Homo sapien
ggttcaaagcccatcagttatatct

SEQ ID NO: 2374485 - DNA, 25 bp, Homo sapien
catcagttatatctcactgtgccgc

SEQ ID NO: 2374486 - DNA, 25 bp, Homo sapien
cactgtgccgctgtcaatgcatgtt

SEQ ID NO: 2374487 - DNA, 25 bp, Homo sapien
aaagccagctctatccacccctaca

SEQ ID NO: 2374488 - DNA, 25 bp, Homo sapien
catttggcagctcatgcaaagctac

SEQ ID NO: 2374489 - DNA, 25 bp, Homo sapien
gattaagatctggacccacagagtg

SEQ ID NO: 2374490 - DNA, 25 bp, Homo sapien
caaccgggagcctgatttccttagt

SEQ ID NO: 2374491 - DNA, 25 bp, Homo sapien
ctccagttatgggtgggctcagcct

SEQ ID NO: 2374492 - DNA, 25 bp, Homo sapien
ggtcaaacagcattgggttccagtc

SEQ ID NO: 2374493 - DNA, 25 bp, Homo sapien
ggaagagtgtcccatgaatggtcac

SEQ ID NO: 2374494 - DNA, 25 bp, Homo sapien
tataagtcaggctagtcacaggtct

SEQ ID NO: 2374495 - DNA, 25 bp, Homo sapien
tcagttatcaatactcaaaggttcc

SEQ ID NO: 2374496 - DNA, 25 bp, Homo sapien
taaaaggaatagactggctgggcac

SEQ ID NO: 2374497 - DNA, 25 bp, Homo sapien
tctctgggcactacctatgaatttt

SEQ ID NO: 2374498 - DNA, 25 bp, Homo sapien
gggtgtaaccgccaatctgcctttc

SEQ ID NO: 2374499 - DNA, 25 bp, Homo sapien
taaatagtaatcctgacaccaaaag

SEQ ID NO: 2374500 - DNA, 25 bp, Homo sapien
aaatatttagatgtgggccgagtgt

SEQ ID NO: 2374501 - DNA, 25 bp, Homo sapien
atccagccgcgaatcccatttattt

SEQ ID NO: 2374502 - DNA, 25 bp, Homo sapien
taaatatttagatgtgggccgagtg

SEQ ID NO: 2374503 - DNA, 25 bp, Homo sapien
agctcactgcatccagccgcgaatc

SEQ ID NO: 2374504 - DNA, 25 bp, Homo sapien
tagacattgggctaggctacaggag

SEQ ID NO: 2374505 - DNA, 25 bp, Homo sapien
tgagattgccatccgtaagccctac

SEQ ID NO: 2374506 - DNA, 25 bp, Homo sapien
tctgacctggctgtaaaagcttgag

SEQ ID NO: 2374507 - DNA, 25 bp, Homo sapien
gcctgaacagtatcccactatggaa

SEQ ID NO: 2374508 - DNA, 25 bp, Homo sapien
ctttcgcacagggtggaccaaggcc

SEQ ID NO: 2374509 - DNA, 25 bp, Homo sapien
tatagcaattcagcggacgacacca

SEQ ID NO: 2374510 - DNA, 25 bp, Homo sapien
gcctaactgggtgactgcacactcc

SEQ ID NO: 2374511 - DNA, 25 bp, Homo sapien
caacctgaggtgcacatgagcagcc

SEQ ID NO: 2374512 - DNA, 25 bp, Homo sapien
tccgtgaccgctgccccgacgccgt

SEQ ID NO: 2374513 - DNA, 25 bp, Homo sapien
gcaggacgtgctcgggccggatggt

SEQ ID NO: 2374514 - DNA, 25 bp, Homo sapien
gcagccttcgggttagacccgctca

SEQ ID NO: 2374515 - DNA, 25 bp, Homo sapien
tctcggtgacccggctgaggcgcag

SEQ ID NO: 2374516 - DNA, 25 bp, Homo sapien
cctgggctgcctgctatagcagctc

SEQ ID NO: 2374517 - DNA, 25 bp, Homo sapien
ctgctatagcagctcagcagacacc

SEQ ID NO: 2374518 - DNA, 25 bp, Homo sapien
gggctgcctgctatagcagctcagc

SEQ ID NO: 2374519 - DNA, 25 bp, Homo sapien
gcctgctatagcagctcagcagaca

SEQ ID NO: 2374520 - DNA, 25 bp, Homo sapien
atctcgaattttgaagcgggtgaaa

SEQ ID NO: 2374521 - DNA, 25 bp, Homo sapien
tttgaagcgggtgaaatcaatactg

SEQ ID NO: 2374522 - DNA, 25 bp, Homo sapien
aaacgcaaggtttggcaatctcaaa

SEQ ID NO: 2374523 - DNA, 25 bp, Homo sapien
tcgaattttgaagcgggtgaaatca

SEQ ID NO: 2374524 - DNA, 25 bp, Homo sapien
cagaccaggccacgggaagaggtca

SEQ ID NO: 2374525 - DNA, 25 bp, Homo sapien
accaggccacgggaagaggtcacag

SEQ ID NO: 2374526 - DNA, 25 bp, Homo sapien
tggcagaccaggccacgggaagagg

SEQ ID NO: 2374527 - DNA, 25 bp, Homo sapien
gaccaggccacgggaagaggtcaca

SEQ ID NO: 2374528 - DNA, 25 bp, Homo sapien
ccctcctcctcatcctcctcctggt

SEQ ID NO: 2374529 - DNA, 25 bp, Homo sapien
ctgatgtccacgtctccacctccct

SEQ ID NO: 2374530 - DNA, 25 bp, Homo sapien
gatgtccacgtctccacctccctcc

SEQ ID NO: 2374531 - DNA, 25 bp, Homo sapien
ctccctcctcctcatcctcctcctg

SEQ ID NO: 2374532 - DNA, 25 bp, Homo sapien
tagccccgactgtccggaggcggag

SEQ ID NO: 2374533 - DNA, 25 bp, Homo sapien
tgtccggaggcggagaaatgccggt

SEQ ID NO: 2374534 - DNA, 25 bp, Homo sapien
cccgactgtccggaggcggagaaat

SEQ ID NO: 2374535 - DNA, 25 bp, Homo sapien
tccggaggcggagaaatgccggtgt

SEQ ID NO: 2374536 - DNA, 25 bp, Homo sapien
acaggtttgtctcccactgtgaact

SEQ ID NO: 2374537 - DNA, 25 bp, Homo sapien
tgaaacaggtttgtctcccactgtg

SEQ ID NO: 2374538 - DNA, 25 bp, Homo sapien
tttgaaacaggtttgtctcccactg

SEQ ID NO: 2374539 - DNA, 25 bp, Homo sapien
aaacaggtttgtctcccactgtgaa

SEQ ID NO: 2374540 - DNA, 25 bp, Homo sapien
cccggaaatagtgccgttcgatcat

SEQ ID NO: 2374541 - DNA, 25 bp, Homo sapien
tgttcccggaaatagtgccgttcga

SEQ ID NO: 2374542 - DNA, 25 bp, Homo sapien
tgacatcctccgaaagctggggaaa

SEQ ID NO: 2374543 - DNA, 25 bp, Homo sapien
gctggggaaactcatagatatgttc

SEQ ID NO: 2374544 - DNA, 25 bp, Homo sapien
cattgtgggaggccgaggagagtgg

SEQ ID NO: 2374545 - DNA, 25 bp, Homo sapien
cagcattgtgggaggccgaggagag

SEQ ID NO: 2374546 - DNA, 25 bp, Homo sapien
cacctgtaatcccagcattgtggga

SEQ ID NO: 2374547 - DNA, 25 bp, Homo sapien
caaaagggccgggggcagtggctca

SEQ ID NO: 2374548 - DNA, 25 bp, Homo sapien
tggcctccattataggcataatcag

SEQ ID NO: 2374549 - DNA, 25 bp, Homo sapien
taaggattttcaatcattagacgaa

SEQ ID NO: 2374550 - DNA, 25 bp, Homo sapien
gccttgttgtgcattatcagcttgt

SEQ ID NO: 2374551 - DNA, 25 bp, Homo sapien
tcagagcgggtctcgtaaggatttt

SEQ ID NO: 2374552 - DNA, 25 bp, Homo sapien
tgttgacaaactgcagcttcgatca

SEQ ID NO: 2374553 - DNA, 25 bp, Homo sapien
tcctttggcgcgcaggaaactgcca

SEQ ID NO: 2374554 - DNA, 25 bp, Homo sapien
gccaggatcttgtggccgcggcaaa

SEQ ID NO: 2374555 - DNA, 25 bp, Homo sapien
gcttcgatcatctccgtgtgccagg

SEQ ID NO: 2374556 - DNA, 25 bp, Homo sapien
tttactttactatagtacctctgca

SEQ ID NO: 2374557 - DNA, 25 bp, Homo sapien
ttttactttactatagtacctctgc

SEQ ID NO: 2374558 - DNA, 25 bp, Homo sapien
tactttactatagtacctctgcaac

SEQ ID NO: 2374559 - DNA, 25 bp, Homo sapien
ttactttactatagtacctctgcaa

SEQ ID NO: 2374560 - DNA, 25 bp, Homo sapien
gtcgtcaagacaaccaacaggcagc

SEQ ID NO: 2374561 - DNA, 25 bp, Homo sapien
ttaagagctgctgacctgctggtgg

SEQ ID NO: 2374562 - DNA, 25 bp, Homo sapien
cacccaggaaccttaagagctgctg

SEQ ID NO: 2374563 - DNA, 25 bp, Homo sapien
gccttctcaccaggcacagctatgc

SEQ ID NO: 2374564 - DNA, 25 bp, Homo sapien
gagccttctcaccaggcacagctat

SEQ ID NO: 2374565 - DNA, 25 bp, Homo sapien
ttaagacttcacacagaccgagggc

SEQ ID NO: 2374566 - DNA, 25 bp, Homo sapien
tatcacatatgctgggaacaccact

SEQ ID NO: 2374567 - DNA, 25 bp, Homo sapien
tacaaagagcttcggaggcaaatcc

SEQ ID NO: 2374568 - DNA, 25 bp, Homo sapien
tgaaaacttggtctattcccaggag

SEQ ID NO: 2374569 - DNA, 25 bp, Homo sapien
tagtgacatccttctactgatgcta

SEQ ID NO: 2374570 - DNA, 25 bp, Homo sapien
ctgatgctaactggaccctggccac

SEQ ID NO: 2374571 - DNA, 25 bp, Homo sapien
tggccacatcaatcgtctcatcaga

SEQ ID NO: 2374572 - DNA, 25 bp, Homo sapien
catcagagggtttgtggagtctgtc

SEQ ID NO: 2374573 - DNA, 25 bp, Homo sapien
gatttacagtggacgccagttctga

SEQ ID NO: 2374574 - DNA, 25 bp, Homo sapien
ccggtctggtgataaggaacccact

SEQ ID NO: 2374575 - DNA, 25 bp, Homo sapien
tgtggcattgccaagactctggcct

SEQ ID NO: 2374576 - DNA, 25 bp, Homo sapien
tacgcttgacaggaacatgcaaatc

SEQ ID NO: 2374577 - DNA, 25 bp, Homo sapien
tatccgcaaatggtctccagtgaga

SEQ ID NO: 2374578 - DNA, 25 bp, Homo sapien
caccccagagtggaatgcttctcaa

SEQ ID NO: 2374579 - DNA, 25 bp, Homo sapien
gggcaggacacactaaggcaggact

SEQ ID NO: 2374580 - DNA, 25 bp, Homo sapien
ggtgggcctgctactctgatgaaat

SEQ ID NO: 2374581 - DNA, 25 bp, Homo sapien
ctgtgaatttcaggacacactgtcc

SEQ ID NO: 2374582 - DNA, 25 bp, Homo sapien
ttaggctcctacaccaggtacagca

SEQ ID NO: 2374583 - DNA, 25 bp, Homo sapien
gccacaggaatcctcgtgcactggg

SEQ ID NO: 2374584 - DNA, 25 bp, Homo sapien
acctgatgccacaggaatcctcgtg

SEQ ID NO: 2374585 - DNA, 25 bp, Homo sapien
cagatcaggtcattgatgtttctta

SEQ ID NO: 2374586 - DNA, 25 bp, Homo sapien
gtgacatggaatgtgagtaacacaa

SEQ ID NO: 2374587 - DNA, 25 bp, Homo sapien
gaggaaggacagatcaggtcattga

SEQ ID NO: 2374588 - DNA, 25 bp, Homo sapien
aaatccttcttgaggctgatatgtt

SEQ ID NO: 2374589 - DNA, 25 bp, Homo sapien
ctgtctcatgtggcaaaataacatt

SEQ ID NO: 2374590 - DNA, 25 bp, Homo sapien
ttactgtctcatgtggcaaaataac

SEQ ID NO: 2374591 - DNA, 25 bp, Homo sapien
ttttattactgtctcatgtggcaaa

SEQ ID NO: 2374592 - DNA, 25 bp, Homo sapien
atctttcttttattactgtctcatg

SEQ ID NO: 2374593 - DNA, 25 bp, Homo sapien
aggcttcgcgacctcccgctgcgag

SEQ ID NO: 2374594 - DNA, 25 bp, Homo sapien
cgacctcccgctgcgagcgcgctgt

SEQ ID NO: 2374595 - DNA, 25 bp, Homo sapien
cccaggcttcgcgacctcccgctgc

SEQ ID NO: 2374596 - DNA, 25 bp, Homo sapien
gctgcgagcgcgctgttccggagtg

SEQ ID NO: 2374597 - DNA, 25 bp, Homo sapien
ctctgcgggcagggcccgaggcccg

SEQ ID NO: 2374598 - DNA, 25 bp, Homo sapien
gaggcccgggcgagcagcgcggcgg

SEQ ID NO: 2374599 - DNA, 25 bp, Homo sapien
gcccgaggcccgggcgagcagcgcg

SEQ ID NO: 2374600 - DNA, 25 bp, Homo sapien
gcagggcccgaggcccgggcgagca

SEQ ID NO: 2374601 - DNA, 25 bp, Homo sapien
gggctgcaatgggaaacaactcctt

SEQ ID NO: 2374602 - DNA, 25 bp, Homo sapien
gggcagttccacagactggtagatg

SEQ ID NO: 2374603 - DNA, 25 bp, Homo sapien
agatggtgtgtaactgccgccaggc

SEQ ID NO: 2374604 - DNA, 25 bp, Homo sapien
caaagtcccggcatgtctggagcaa

SEQ ID NO: 2374605 - DNA, 25 bp, Homo sapien
cagtaacatcttcaacgcgtagctg

SEQ ID NO: 2374606 - DNA, 25 bp, Homo sapien
tcttcaacgcgtagctgcagacaga

SEQ ID NO: 2374607 - DNA, 25 bp, Homo sapien
ttaggtcagcgtgtacggcagtaac

SEQ ID NO: 2374608 - DNA, 25 bp, Homo sapien
cagcgtgtacggcagtaacatcttc

SEQ ID NO: 2374609 - DNA, 25 bp, Homo sapien
cacgtcccgacaggtagcagaatga

SEQ ID NO: 2374610 - DNA, 25 bp, Homo sapien
gtcacacgtcccgacaggtagcaga

SEQ ID NO: 2374611 - DNA, 25 bp, Homo sapien
ttggtcacacgtcccgacaggtagc

SEQ ID NO: 2374612 - DNA, 25 bp, Homo sapien
gcttggtcacacgtcccgacaggta

SEQ ID NO: 2374613 - DNA, 25 bp, Homo sapien
ggcaccatttcagcaggcaggaacc

SEQ ID NO: 2374614 - DNA, 25 bp, Homo sapien
ttgtaagactctaagtgcggggcgg

SEQ ID NO: 2374615 - DNA, 25 bp, Homo sapien
ctctaagtgcggggcggagcgtcat

SEQ ID NO: 2374616 - DNA, 25 bp, Homo sapien
taagactctaagtgcggggcggagc

SEQ ID NO: 2374617 - DNA, 25 bp, Homo sapien
aagactctaagtgcggggcggagcg

SEQ ID NO: 2374618 - DNA, 25 bp, Homo sapien
cctgcagcacttctgtgacaacctg

SEQ ID NO: 2374619 - DNA, 25 bp, Homo sapien
tggcaataacgtatggaaaagaggg

SEQ ID NO: 2374620 - DNA, 25 bp, Homo sapien
caagcctagttcttactttggcaat

SEQ ID NO: 2374621 - DNA, 25 bp, Homo sapien
ccctcatgctgattagaggcacgag

SEQ ID NO: 2374622 - DNA, 25 bp, Homo sapien
atcccagcactttgtttgtttcttt

SEQ ID NO: 2374623 - DNA, 25 bp, Homo sapien
atgactccggtggaggcgcagccac

SEQ ID NO: 2374624 - DNA, 25 bp, Homo sapien
gttgacactcatgatgactccggtg

SEQ ID NO: 2374625 - DNA, 25 bp, Homo sapien
gtaatcgaggccagcaccgccaagc

SEQ ID NO: 2374626 - DNA, 25 bp, Homo sapien
cgtaggccaggtaatcgaggccagc

SEQ ID NO: 2374627 - DNA, 25 bp, Homo sapien
ggcctgttctgtccagggcctaccc

SEQ ID NO: 2374628 - DNA, 25 bp, Homo sapien
agcctgcccgctcacgggagcctcc

SEQ ID NO: 2374629 - DNA, 25 bp, Homo sapien
cagcggggagcggtcggaggcccca

SEQ ID NO: 2374630 - DNA, 25 bp, Homo sapien
ctgtccagggcctacccagtaggac

SEQ ID NO: 2374631 - DNA, 25 bp, Homo sapien
ctggtgaaaggcgtgacccacgcct

SEQ ID NO: 2374632 - DNA, 25 bp, Homo sapien
actggtgaaaggcgtgacccacgcc

SEQ ID NO: 2374633 - DNA, 25 bp, Homo sapien
ccactggtgaaaggcgtgacccacg

SEQ ID NO: 2374634 - DNA, 25 bp, Homo sapien
accactggtgaaaggcgtgacccac

SEQ ID NO: 2374635 - DNA, 25 bp, Homo sapien
ctgtcaccctaaggacaggtgaggg

SEQ ID NO: 2374636 - DNA, 25 bp, Homo sapien
tgtgcaggagctggcgtcttaaacc

SEQ ID NO: 2374637 - DNA, 25 bp, Homo sapien
agatgagggtcccaaagctctcagt

SEQ ID NO: 2374638 - DNA, 25 bp, Homo sapien
ctggcctccgaagcagtgggcagtt

SEQ ID NO: 2374639 - DNA, 25 bp, Homo sapien
tctgtccgtgctggcaaagaccacg

SEQ ID NO: 2374640 - DNA, 25 bp, Homo sapien
ttcagaacccatgagtcgccctcgg

SEQ ID NO: 2374641 - DNA, 25 bp, Homo sapien
cccaggcattggtgatccaggcttt

SEQ ID NO: 2374642 - DNA, 25 bp, Homo sapien
ggctttggttccattcagaacccat

SEQ ID NO: 2374643 - DNA, 25 bp, Homo sapien
cacttgccccagagcaaaaataggt

SEQ ID NO: 2374644 - DNA, 25 bp, Homo sapien
gagaggcgggtggttttctcagagc

SEQ ID NO: 2374645 - DNA, 25 bp, Homo sapien
gacagcagcccaggatccggctgaa

SEQ ID NO: 2374646 - DNA, 25 bp, Homo sapien
aataggtccagtcgggccaaggaga

SEQ ID NO: 2374647 - DNA, 25 bp, Homo sapien
ggctatcttgaagcccatccctggc

SEQ ID NO: 2374648 - DNA, 25 bp, Homo sapien
ctcaaagatgaggttggccgtggat

SEQ ID NO: 2374649 - DNA, 25 bp, Homo sapien
gtccttggggatgcgacagtcctca

SEQ ID NO: 2374650 - DNA, 25 bp, Homo sapien
tctttcttccccaacgtgagcccag

SEQ ID NO: 2374651 - DNA, 25 bp, Homo sapien
ttcacagcacaatcgagggcggtct

SEQ ID NO: 2374652 - DNA, 25 bp, Homo sapien
gggcgccccgaaggccatgcgattc

SEQ ID NO: 2374653 - DNA, 25 bp, Homo sapien
tctcagcgtagttcacagcacaatc

SEQ ID NO: 2374654 - DNA, 25 bp, Homo sapien
cgatgcggcccatgtccagggtttg

SEQ ID NO: 2374655 - DNA, 25 bp, Homo sapien
atggcagcgcgccaggtcagcagcc

SEQ ID NO: 2374656 - DNA, 25 bp, Homo sapien
catggcagcgcgccaggtcagcagc

SEQ ID NO: 2374657 - DNA, 25 bp, Homo sapien
tcgcggcctccgaggcggccagctt

SEQ ID NO: 2374658 - DNA, 25 bp, Homo sapien
ctggtggctgatggcggtcgcggcc

SEQ ID NO: 2374659 - DNA, 25 bp, Homo sapien
ctccgaggcggccagcttggccatg

SEQ ID NO: 2374660 - DNA, 25 bp, Homo sapien
gctgatggcggtcgcggcctccgag

SEQ ID NO: 2374661 - DNA, 25 bp, Homo sapien
ccatgccgcccaggatctggatggc

SEQ ID NO: 2374662 - DNA, 25 bp, Homo sapien
ggatttcgctggtgccctcgtagat

SEQ ID NO: 2374663 - DNA, 25 bp, Homo sapien
gcggtagtgccgctctgccggcatc

SEQ ID NO: 2374664 - DNA, 25 bp, Homo sapien
ggcatctctgtcacgtagcccatgc

SEQ ID NO: 2374665 - DNA, 25 bp, Homo sapien
tcagctccggtagctcctgagcaga

SEQ ID NO: 2374666 - DNA, 25 bp, Homo sapien
cagctccggtagctcctgagcagat

SEQ ID NO: 2374667 - DNA, 25 bp, Homo sapien
gctgccaatggtcggagggcctcat

SEQ ID NO: 2374668 - DNA, 25 bp, Homo sapien
gccagggccacttagatgaggaact

SEQ ID NO: 2374669 - DNA, 25 bp, Homo sapien
gggacaggtgtgtttattacccaca

SEQ ID NO: 2374670 - DNA, 25 bp, Homo sapien
gaggtgtccctgagtgtcgctcagc

SEQ ID NO: 2374671 - DNA, 25 bp, Homo sapien
caatggctgcttctcgaggttctgt

SEQ ID NO: 2374672 - DNA, 25 bp, Homo sapien
cgacactggcccagagggttaagag

SEQ ID NO: 2374673 - DNA, 25 bp, Homo sapien
ccgagcgcgctagtgagcacaatgg

SEQ ID NO: 2374674 - DNA, 25 bp, Homo sapien
agctgctgagatcgacactggccca

SEQ ID NO: 2374675 - DNA, 25 bp, Homo sapien
ctgctctgctacctttggcttgcac

SEQ ID NO: 2374676 - DNA, 25 bp, Homo sapien
tggaagcatcctgggtccccctctg

SEQ ID NO: 2374677 - DNA, 25 bp, Homo sapien
cgcagccctcccctgttgagtgtag

SEQ ID NO: 2374678 - DNA, 25 bp, Homo sapien
cctcccctgttgagtgtaggcgttc

SEQ ID NO: 2374679 - DNA, 25 bp, Homo sapien
gggcagtcgctgtgagagaggccat

SEQ ID NO: 2374680 - DNA, 25 bp, Homo sapien
agccctcccctgttgagtgtaggcg

SEQ ID NO: 2374681 - DNA, 25 bp, Homo sapien
tggagtgtagccaccacgtgagctt

SEQ ID NO: 2374682 - DNA, 25 bp, Homo sapien
gattgaatttcctcacacctgcggt

SEQ ID NO: 2374683 - DNA, 25 bp, Homo sapien
tagtaacatatcctgtgacagctcc

SEQ ID NO: 2374684 - DNA, 25 bp, Homo sapien
acctgcggttgctgtcgtgccttga

SEQ ID NO: 2374685 - DNA, 25 bp, Homo sapien
gattccaactgtctcatgcgcagag

SEQ ID NO: 2374686 - DNA, 25 bp, Homo sapien
catcacaaaattcttcccgctccag

SEQ ID NO: 2374687 - DNA, 25 bp, Homo sapien
tgcgcagagactctcccatcacaaa

SEQ ID NO: 2374688 - DNA, 25 bp, Homo sapien
tttctgcaggttcagattccaactg

SEQ ID NO: 2374689 - DNA, 25 bp, Homo sapien
caaagagaagcctgcggttggcatg

SEQ ID NO: 2374690 - DNA, 25 bp, Homo sapien
gaaatcctgctaagatcacgctgtg

SEQ ID NO: 2374691 - DNA, 25 bp, Homo sapien
tgatagactcatggacttcaggagc

SEQ ID NO: 2374692 - DNA, 25 bp, Homo sapien
tagtttcttctcgagccaatgcatg

SEQ ID NO: 2374693 - DNA, 25 bp, Homo sapien
gctgtacagtggagagtgccctccc

SEQ ID NO: 2374694 - DNA, 25 bp, Homo sapien
gaccccatgaagagtttctcaacag

SEQ ID NO: 2374695 - DNA, 25 bp, Homo sapien
ggagttggacattcatcccaccaca

SEQ ID NO: 2374696 - DNA, 25 bp, Homo sapien
ccacaggaatgcgtgttgagggctt

SEQ ID NO: 2374697 - DNA, 25 bp, Homo sapien
aatgcccatgttgataattggtccc

SEQ ID NO: 2374698 - DNA, 25 bp, Homo sapien
ggttactgaataaagtgtgcccact

SEQ ID NO: 2374699 - DNA, 25 bp, Homo sapien
gctgtggacgtttcactgctgctga

SEQ ID NO: 2374700 - DNA, 25 bp, Homo sapien
cagccatcacgaaataccaaaggag

SEQ ID NO: 2374701 - DNA, 25 bp, Homo sapien
ttcagggcattgtagttgacagtag

SEQ ID NO: 2374702 - DNA, 25 bp, Homo sapien
cattgtagttgacagtagtaatgca

SEQ ID NO: 2374703 - DNA, 25 bp, Homo sapien
gacagtagtaatgcaaggatctacc

SEQ ID NO: 2374704 - DNA, 25 bp, Homo sapien
ctgtgtggtatgtcttcagggcatt

SEQ ID NO: 2374705 - DNA, 25 bp, Homo sapien
tttgtagatgcacatttccatctgg

SEQ ID NO: 2374706 - DNA, 25 bp, Homo sapien
tctttttgtagatgcacatttccat

SEQ ID NO: 2374707 - DNA, 25 bp, Homo sapien
cacgcctggccatatttaccatttc

SEQ ID NO: 2374708 - DNA, 25 bp, Homo sapien
gattcgccttcctcggtcttcctaa

SEQ ID NO: 2374709 - DNA, 25 bp, Homo sapien
ccagaggtgaattgcatgtgactgc

SEQ ID NO: 2374710 - DNA, 25 bp, Homo sapien
taaatcctaactaggtgaagaagag

SEQ ID NO: 2374711 - DNA, 25 bp, Homo sapien
gaatcagtccgtagaattctctaac

SEQ ID NO: 2374712 - DNA, 25 bp, Homo sapien
ttctctaacacagaccaggtgtgca

SEQ ID NO: 2374713 - DNA, 25 bp, Homo sapien
gatagtctcctatatgttcctctaa

SEQ ID NO: 2374714 - DNA, 25 bp, Homo sapien
tcagaggagtcttgtgaacattctt

SEQ ID NO: 2374715 - DNA, 25 bp, Homo sapien
tctagcctgaagtcttgaagatagt

SEQ ID NO: 2374716 - DNA, 25 bp, Homo sapien
tccagtgctgtataatgttccatcc

SEQ ID NO: 2374717 - DNA, 25 bp, Homo sapien
tctccagccataagggtgtcagata

SEQ ID NO: 2374718 - DNA, 25 bp, Homo sapien
gctccaaattagttggaccagtagg

SEQ ID NO: 2374719 - DNA, 25 bp, Homo sapien
tggaagccttacttacactaaataa

SEQ ID NO: 2374720 - DNA, 25 bp, Homo sapien
ggtgtgacttgtcacccacttcaca

SEQ ID NO: 2374721 - DNA, 25 bp, Homo sapien
gaatcaggaaatctttagcgtgagg

SEQ ID NO: 2374722 - DNA, 25 bp, Homo sapien
tgttacggtttcttcgaatcaggaa

SEQ ID NO: 2374723 - DNA, 25 bp, Homo sapien
tgactgtgacctagccatgtcttag

SEQ ID NO: 2374724 - DNA, 25 bp, Homo sapien
tgaaatcttgagatatgagcacctc

SEQ ID NO: 2374725 - DNA, 25 bp, Homo sapien
ccctactgagtaaataccaagtggt

SEQ ID NO: 2374726 - DNA, 25 bp, Homo sapien
tgtagtacacatagaccctactgag

SEQ ID NO: 2374727 - DNA, 25 bp, Homo sapien
aacataaggaggatgctactgagtg

SEQ ID NO: 2374728 - DNA, 25 bp, Homo sapien
tataacccaagtacttatcaaagag

SEQ ID NO: 2374729 - DNA, 25 bp, Homo sapien
ctaactatattgtaaactccttgag

SEQ ID NO: 2374730 - DNA, 25 bp, Homo sapien
tctcatgtaaatgcctaatctaact

SEQ ID NO: 2374731 - DNA, 25 bp, Homo sapien
gcataattccttccttatctcatgt

SEQ ID NO: 2374732 - DNA, 25 bp, Homo sapien
ttaatacttacagttctgtctgcat

SEQ ID NO: 2374733 - DNA, 25 bp, Homo sapien
atgtcatctggctatgggcggagca

SEQ ID NO: 2374734 - DNA, 25 bp, Homo sapien
gaatcccacggatgggaagttgaat

SEQ ID NO: 2374735 - DNA, 25 bp, Homo sapien
aggcaccccggaactgactcgtggg

SEQ ID NO: 2374736 - DNA, 25 bp, Homo sapien
tgggaagttgaatccgacaggcacc

SEQ ID NO: 2374737 - DNA, 25 bp, Homo sapien
tagaacccaggagccgacgtctctg

SEQ ID NO: 2374738 - DNA, 25 bp, Homo sapien
cccaggagccgacgtctctgcgcat

SEQ ID NO: 2374739 - DNA, 25 bp, Homo sapien
ctagaacccaggagccgacgtctct

SEQ ID NO: 2374740 - DNA, 25 bp, Homo sapien
gagccgacgtctctgcgcatgggcc

SEQ ID NO: 2374741 - DNA, 25 bp, Homo sapien
gttcccgattggctggtgcagcagc

SEQ ID NO: 2374742 - DNA, 25 bp, Homo sapien
aagagggtacccgaggcgacatctc

SEQ ID NO: 2374743 - DNA, 25 bp, Homo sapien
gcccgtggccagcagactgttgact

SEQ ID NO: 2374744 - DNA, 25 bp, Homo sapien
gttgacagctgagtggcagccaaca

SEQ ID NO: 2374745 - DNA, 25 bp, Homo sapien
tgcagccctctgcctgttgactgac

SEQ ID NO: 2374746 - DNA, 25 bp, Homo sapien
aatgcagccctctgcctgttgactg

SEQ ID NO: 2374747 - DNA, 25 bp, Homo sapien
ggaatgcagccctctgcctgttgac

SEQ ID NO: 2374748 - DNA, 25 bp, Homo sapien
gaacgaaggaatgcagccctctgcc

SEQ ID NO: 2374749 - DNA, 25 bp, Homo sapien
ggcggttcccagtctcggccccatc

SEQ ID NO: 2374750 - DNA, 25 bp, Homo sapien
gcggttcccagtctcggccccatca

SEQ ID NO: 2374751 - DNA, 25 bp, Homo sapien
cggttcccagtctcggccccatcac

SEQ ID NO: 2374752 - DNA, 25 bp, Homo sapien
ggttcccagtctcggccccatcact

SEQ ID NO: 2374753 - DNA, 25 bp, Homo sapien
atggtggtaacgttgaaggtgactc

SEQ ID NO: 2374754 - DNA, 25 bp, Homo sapien
tgtcaatggtggtaacgttgaaggt

SEQ ID NO: 2374755 - DNA, 25 bp, Homo sapien
cttggtgtcaatggtggtaacgttg

SEQ ID NO: 2374756 - DNA, 25 bp, Homo sapien
ctcttggtgtcaatggtggtaacgt

SEQ ID NO: 2374757 - DNA, 25 bp, Homo sapien
gggcacagcttctgcactctctcag

SEQ ID NO: 2374758 - DNA, 25 bp, Homo sapien
agtactgcctccagaaattccacca

SEQ ID NO: 2374759 - DNA, 25 bp, Homo sapien
tggtgtctgtgtgcacttcagtgcc

SEQ ID NO: 2374760 - DNA, 25 bp, Homo sapien
tccagaaattccaccatcttgttgg

SEQ ID NO: 2374761 - DNA, 25 bp, Homo sapien
tctgcagattatcattgagtgctgg

SEQ ID NO: 2374762 - DNA, 25 bp, Homo sapien
ctgcagattatcattgagtgctggg

SEQ ID NO: 2374763 - DNA, 25 bp, Homo sapien
cgttcccgggaaggcctcagggatg

SEQ ID NO: 2374764 - DNA, 25 bp, Homo sapien
tcccgggaaggcctcagggatgtta

SEQ ID NO: 2374765 - DNA, 25 bp, Homo sapien
cgggaaggcctcagggatgttaaat

SEQ ID NO: 2374766 - DNA, 25 bp, Homo sapien
aggcctcagggatgttaaatccccg

SEQ ID NO: 2374767 - DNA, 25 bp, Homo sapien
acgggttcttcccatgcataagcat

SEQ ID NO: 2374768 - DNA, 25 bp, Homo sapien
atttgagggcattggccccttgctc

SEQ ID NO: 2374769 - DNA, 25 bp, Homo sapien
ggttcttcccatgcataagcattgc

SEQ ID NO: 2374770 - DNA, 25 bp, Homo sapien
gcattggccccttgctcataggcga

SEQ ID NO: 2374771 - DNA, 25 bp, Homo sapien
cattgggttgcaatatggaaaccac

SEQ ID NO: 2374772 - DNA, 25 bp, Homo sapien
gagtgtgtccattgggttgcaatat

SEQ ID NO: 2374773 - DNA, 25 bp, Homo sapien
gtccattgggttgcaatatggaaac

SEQ ID NO: 2374774 - DNA, 25 bp, Homo sapien
ttggagtgtgtccattgggttgcaa

SEQ ID NO: 2374775 - DNA, 25 bp, Homo sapien
tcttccaggattccctgtccactgg

SEQ ID NO: 2374776 - DNA, 25 bp, Homo sapien
catcccagaacaagtcttccaggat

SEQ ID NO: 2374777 - DNA, 25 bp, Homo sapien
ccaggattccctgtccactggccat

SEQ ID NO: 2374778 - DNA, 25 bp, Homo sapien
atcccagaacaagtcttccaggatt

SEQ ID NO: 2374779 - DNA, 25 bp, Homo sapien
ccagccccccatttatttccctcat

SEQ ID NO: 2374780 - DNA, 25 bp, Homo sapien
tttattactgaaatatgttgtcctg

SEQ ID NO: 2374781 - DNA, 25 bp, Homo sapien
ccatcccaccccacaataaaaatct

SEQ ID NO: 2374782 - DNA, 25 bp, Homo sapien
tcccaccccacaataaaaatctcac

SEQ ID NO: 2374783 - DNA, 25 bp, Homo sapien
actgaaatatgttgtcctgcccatc

SEQ ID NO: 2374784 - DNA, 25 bp, Homo sapien
ctgaagaaagttgcaccttggcctc

SEQ ID NO: 2374785 - DNA, 25 bp, Homo sapien
gtgttggatgaacccggattcgaga

SEQ ID NO: 2374786 - DNA, 25 bp, Homo sapien
ctggtgttggatgaacccggattcg

SEQ ID NO: 2374787 - DNA, 25 bp, Homo sapien
gttggatgaacccggattcgagaga

SEQ ID NO: 2374788 - DNA, 25 bp, Homo sapien
tggtgttggatgaacccggattcga

SEQ ID NO: 2374789 - DNA, 25 bp, Homo sapien
ctcattggggttgaactttggcggc

SEQ ID NO: 2374790 - DNA, 25 bp, Homo sapien
tgaactttggcggcgtggtggaggc

SEQ ID NO: 2374791 - DNA, 25 bp, Homo sapien
attggggttgaactttggcggcgtg

SEQ ID NO: 2374792 - DNA, 25 bp, Homo sapien
atctcattggggttgaactttggcg

SEQ ID NO: 2374793 - DNA, 25 bp, Homo sapien
tcagtactgcatctgtgaagcaatg

SEQ ID NO: 2374794 - DNA, 25 bp, Homo sapien
gtactgcatctgtgaagcaatgttg

SEQ ID NO: 2374795 - DNA, 25 bp, Homo sapien
actgcatctgtgaagcaatgttgac

SEQ ID NO: 2374796 - DNA, 25 bp, Homo sapien
cagtactgcatctgtgaagcaatgt

SEQ ID NO: 2374797 - DNA, 25 bp, Homo sapien
agatctctttaatggtaccagatag

SEQ ID NO: 2374798 - DNA, 25 bp, Homo sapien
tcaacattatagcccacaggctggg

SEQ ID NO: 2374799 - DNA, 25 bp, Homo sapien
gggtggtggccatcaacattatagc

SEQ ID NO: 2374800 - DNA, 25 bp, Homo sapien
caagatctctttaatggtaccagat

SEQ ID NO: 2374801 - DNA, 25 bp, Homo sapien
tatttctgagcacttacggccgagc

SEQ ID NO: 2374802 - DNA, 25 bp, Homo sapien
tcacagcgttgtgagaattcaacaa

SEQ ID NO: 2374803 - DNA, 25 bp, Homo sapien
cacagatgcggaaattaagacacag

SEQ ID NO: 2374804 - DNA, 25 bp, Homo sapien
tgtgaatgtagcaagccggcatttg

SEQ ID NO: 2374805 - DNA, 25 bp, Homo sapien
tttagtaagtgcagtaggtaggcca

SEQ ID NO: 2374806 - DNA, 25 bp, Homo sapien
gtgaacagttgtttagtaagtgcag

SEQ ID NO: 2374807 - DNA, 25 bp, Homo sapien
aaagtgaacagttgtttagtaagtg

SEQ ID NO: 2374808 - DNA, 25 bp, Homo sapien
ttagtaagtgcagtaggtaggccaa

SEQ ID NO: 2374809 - DNA, 25 bp, Homo sapien
ctacaggcacacaccaccatgcctg

SEQ ID NO: 2374810 - DNA, 25 bp, Homo sapien
gggttcgagcaatcctcctacctta

SEQ ID NO: 2374811 - DNA, 25 bp, Homo sapien
tgggttcgagcaatcctcctacctt

SEQ ID NO: 2374812 - DNA, 25 bp, Homo sapien
accttagcctcctgagtagctggga

SEQ ID NO: 2374813 - DNA, 25 bp, Homo sapien
gactgctcagagtccctcagagctg

SEQ ID NO: 2374814 - DNA, 25 bp, Homo sapien
ggctttaagtccacctgaggcaggc

SEQ ID NO: 2374815 - DNA, 25 bp, Homo sapien
ctgtgcaggacaagttggcagcccc

SEQ ID NO: 2374816 - DNA, 25 bp, Homo sapien
tcacctggccagtaatgtatttcac

SEQ ID NO: 2374817 - DNA, 25 bp, Homo sapien
gcctgttctgtttacattggagctg

SEQ ID NO: 2374818 - DNA, 25 bp, Homo sapien
aaccccactagccaagccctgtggg

SEQ ID NO: 2374819 - DNA, 25 bp, Homo sapien
ccaccgcgtgggttgcgtttgcctg

SEQ ID NO: 2374820 - DNA, 25 bp, Homo sapien
agcggcccgtgaatcagggcccctg

SEQ ID NO: 2374821 - DNA, 25 bp, Homo sapien
tttgctcagccctgactcgagcagg

SEQ ID NO: 2374822 - DNA, 25 bp, Homo sapien
tccaccacggctttctggtgggccg

SEQ ID NO: 2374823 - DNA, 25 bp, Homo sapien
gatgggtggcgtgaagtcttcccca

SEQ ID NO: 2374824 - DNA, 25 bp, Homo sapien
cagtgcctggatcagtgcctctttg

SEQ ID NO: 2374825 - DNA, 25 bp, Homo sapien
ccctctaggctctcctgggagcggg

SEQ ID NO: 2374826 - DNA, 25 bp, Homo sapien
caactaggctaaaggctgaaggtca

SEQ ID NO: 2374827 - DNA, 25 bp, Homo sapien
ggtcatggggactcaactcagaagg

SEQ ID NO: 2374828 - DNA, 25 bp, Homo sapien
tcaactcagaaggggggctcgttag

SEQ ID NO: 2374829 - DNA, 25 bp, Homo sapien
taaacgcatgagtccctaggaggcc

SEQ ID NO: 2374830 - DNA, 25 bp, Homo sapien
ggagcctacccactgaggactcagt

SEQ ID NO: 2374831 - DNA, 25 bp, Homo sapien
tctgcctcaggtaagaaagacctgg

SEQ ID NO: 2374832 - DNA, 25 bp, Homo sapien
gactgggctaaaggcctgggctcat

SEQ ID NO: 2374833 - DNA, 25 bp, Homo sapien
gggatgtagaacgggcagcctctaa

SEQ ID NO: 2374834 - DNA, 25 bp, Homo sapien
ttctccaggagacggggagtccgcc

SEQ ID NO: 2374835 - DNA, 25 bp, Homo sapien
gcagcctctaatggcgcctgctggt

SEQ ID NO: 2374836 - DNA, 25 bp, Homo sapien
aacgggcagcctctaatggcgcctg

SEQ ID NO: 2374837 - DNA, 25 bp, Homo sapien
gagtcaccaatagcttctgcccagg

SEQ ID NO: 2374838 - DNA, 25 bp, Homo sapien
taattagtaactaggtcagctctgc

SEQ ID NO: 2374839 - DNA, 25 bp, Homo sapien
cagcgcccaggaagtagtgaacctc

SEQ ID NO: 2374840 - DNA, 25 bp, Homo sapien
cctcctcaagcaggcgctgtagggt

SEQ ID NO: 2374841 - DNA, 25 bp, Homo sapien
tcaaatgctgtggatcaagcctccc

SEQ ID NO: 2374842 - DNA, 25 bp, Homo sapien
ccccagctgggatcaggaccttgga

SEQ ID NO: 2374843 - DNA, 25 bp, Homo sapien
gggctgctgaccgagagagctcact

SEQ ID NO: 2374844 - DNA, 25 bp, Homo sapien
ctcagccaggtaagaaagcatcccc

SEQ ID NO: 2374845 - DNA, 25 bp, Homo sapien
tttccagggtcaatcggatgtccaa

SEQ ID NO: 2374846 - DNA, 25 bp, Homo sapien
cagggtcaatcggatgtccaaggct

SEQ ID NO: 2374847 - DNA, 25 bp, Homo sapien
aggctttgagcctcttgccctctgg

SEQ ID NO: 2374848 - DNA, 25 bp, Homo sapien
aatcggatgtccaaggctttgagcc

SEQ ID NO: 2374849 - DNA, 25 bp, Homo sapien
gactcaaagggacctgatgccacct

SEQ ID NO: 2374850 - DNA, 25 bp, Homo sapien
ctcaaagggacctgatgccacctgt

SEQ ID NO: 2374851 - DNA, 25 bp, Homo sapien
agagactcaaagggacctgatgcca

SEQ ID NO: 2374852 - DNA, 25 bp, Homo sapien
gagactcaaagggacctgatgccac

SEQ ID NO: 2374853 - DNA, 25 bp, Homo sapien
gggagagggcaaggacgggatctgc

SEQ ID NO: 2374854 - DNA, 25 bp, Homo sapien
aggacgggatctgctcagcaagggc

SEQ ID NO: 2374855 - DNA, 25 bp, Homo sapien
tgggagagggcaaggacgggatctg

SEQ ID NO: 2374856 - DNA, 25 bp, Homo sapien
tctgcgtcttcatgggagtgccctt

SEQ ID NO: 2374857 - DNA, 25 bp, Homo sapien
tcccgctgtgggatgttgtgctgct

SEQ ID NO: 2374858 - DNA, 25 bp, Homo sapien
ggttgaggccagtggtatcgaccac

SEQ ID NO: 2374859 - DNA, 25 bp, Homo sapien
gctgcttgcggacgtaccaggtgta

SEQ ID NO: 2374860 - DNA, 25 bp, Homo sapien
tcttggttggtagctcatcacctgt

SEQ ID NO: 2374861 - DNA, 25 bp, Homo sapien
ctattgcactcctccactagcgtct

SEQ ID NO: 2374862 - DNA, 25 bp, Homo sapien
gcctctcataggcctggaacaggat

SEQ ID NO: 2374863 - DNA, 25 bp, Homo sapien
tcgctcctccttgctagggttcttc

SEQ ID NO: 2374864 - DNA, 25 bp, Homo sapien
cagcactgtttcccgcccgccgttg

SEQ ID NO: 2374865 - DNA, 25 bp, Homo sapien
agcactgtttcccgcccgccgttgt

SEQ ID NO: 2374866 - DNA, 25 bp, Homo sapien
gcactgtttcccgcccgccgttgta

SEQ ID NO: 2374867 - DNA, 25 bp, Homo sapien
gcagaaatagccacccatgagcctc

SEQ ID NO: 2374868 - DNA, 25 bp, Homo sapien
gttgtagacacgcacctccgtgacg

SEQ ID NO: 2374869 - DNA, 25 bp, Homo sapien
gaaggcttcttctttgcgccggttg

SEQ ID NO: 2374870 - DNA, 25 bp, Homo sapien
tggccagcttgtgccggaaggcttc

SEQ ID NO: 2374871 - DNA, 25 bp, Homo sapien
ctccgtgacgaggttggagcccagc

SEQ ID NO: 2374872 - DNA, 25 bp, Homo sapien
ttctgcagtctcactggtcgcaggc

SEQ ID NO: 2374873 - DNA, 25 bp, Homo sapien
cgccgctgcttgagggtacttctgc

SEQ ID NO: 2374874 - DNA, 25 bp, Homo sapien
agacactgtcactaagggaccgccg

SEQ ID NO: 2374875 - DNA, 25 bp, Homo sapien
tctcactggtcgcaggctgtccata

SEQ ID NO: 2374876 - DNA, 25 bp, Homo sapien
aggcccgatggtcatgaccccagga

SEQ ID NO: 2374877 - DNA, 25 bp, Homo sapien
cctggggatgtctgctccaagctgt

SEQ ID NO: 2374878 - DNA, 25 bp, Homo sapien
tgcagtgctgtcagggtgctgacag

SEQ ID NO: 2374879 - DNA, 25 bp, Homo sapien
gaccccaggaagtgaggccatgatg

SEQ ID NO: 2374880 - DNA, 25 bp, Homo sapien
tgttggtgaacgtaggacccaggga

SEQ ID NO: 2374881 - DNA, 25 bp, Homo sapien
gcacctgtgttggtgaacgtaggac

SEQ ID NO: 2374882 - DNA, 25 bp, Homo sapien
tggtgaacgtaggacccagggaggc

SEQ ID NO: 2374883 - DNA, 25 bp, Homo sapien
ggcacctgtgttggtgaacgtagga

SEQ ID NO: 2374884 - DNA, 25 bp, Homo sapien
gattctgcggttgccccatgagcct

SEQ ID NO: 2374885 - DNA, 25 bp, Homo sapien
ctcctggattctgcggttgccccat

SEQ ID NO: 2374886 - DNA, 25 bp, Homo sapien
gctcctggattctgcggttgcccca

SEQ ID NO: 2374887 - DNA, 25 bp, Homo sapien
ctggattctgcggttgccccatgag

SEQ ID NO: 2374888 - DNA, 25 bp, Homo sapien
tctatcttatgtactgggcttctgc

SEQ ID NO: 2374889 - DNA, 25 bp, Homo sapien
agttgtcaaactgcggttccctgga

SEQ ID NO: 2374890 - DNA, 25 bp, Homo sapien
gaggcaggcggtgacttgttcaaaa

SEQ ID NO: 2374891 - DNA, 25 bp, Homo sapien
tgtattatgcttagtgcctgcctcc

SEQ ID NO: 2374892 - DNA, 25 bp, Homo sapien
tggcatgagcggctgctggtaggag

SEQ ID NO: 2374893 - DNA, 25 bp, Homo sapien
catgctgttgatgaccggcacactc

SEQ ID NO: 2374894 - DNA, 25 bp, Homo sapien
cggcacactctgtgcctgcgtggag

SEQ ID NO: 2374895 - DNA, 25 bp, Homo sapien
gggtgcagcggctgggagaactgga

SEQ ID NO: 2374896 - DNA, 25 bp, Homo sapien
gaaacacacttgtcccagagacaca

SEQ ID NO: 2374897 - DNA, 25 bp, Homo sapien
tgcatccattgacagccaacctcta

SEQ ID NO: 2374898 - DNA, 25 bp, Homo sapien
catgcagactgcaatgcctgccagg

SEQ ID NO: 2374899 - DNA, 25 bp, Homo sapien
tccattgacagccaacctctatcat

SEQ ID NO: 2374900 - DNA, 25 bp, Homo sapien
aatgcatgcacaaccgatacacacc

SEQ ID NO: 2374901 - DNA, 25 bp, Homo sapien
cacacacagatacgtgcattcacat

SEQ ID NO: 2374902 - DNA, 25 bp, Homo sapien
catatggccctaagagtttcagaga

SEQ ID NO: 2374903 - DNA, 25 bp, Homo sapien
tagaaattcatatggccctaagagt

SEQ ID NO: 2374904 - DNA, 25 bp, Homo sapien
gtgtactgggccacctcgggcttgt

SEQ ID NO: 2374905 - DNA, 25 bp, Homo sapien
ggtgtcggtgatgagcatagtctgc

SEQ ID NO: 2374906 - DNA, 25 bp, Homo sapien
cagggcgctcaggttggtggtgtcg

SEQ ID NO: 2374907 - DNA, 25 bp, Homo sapien
gatgagcatagtctgcgggagcagg

SEQ ID NO: 2374908 - DNA, 25 bp, Homo sapien
ggtggtggcctgagatgccggcgtg

SEQ ID NO: 2374909 - DNA, 25 bp, Homo sapien
cctgagatgccggcgtgtgaagccc

SEQ ID NO: 2374910 - DNA, 25 bp, Homo sapien
cgctgagccggtgggccggctgcag

SEQ ID NO: 2374911 - DNA, 25 bp, Homo sapien
ccggcgtgtgaagcccggactcact

SEQ ID NO: 2374912 - DNA, 25 bp, Homo sapien
tctggtacagcaccaggctgctgga

SEQ ID NO: 2374913 - DNA, 25 bp, Homo sapien
tacagcaccaggctgctggaggaca

SEQ ID NO: 2374914 - DNA, 25 bp, Homo sapien
tggtacagcaccaggctgctggagg

SEQ ID NO: 2374915 - DNA, 25 bp, Homo sapien
ctctggtacagcaccaggctgctgg

SEQ ID NO: 2374916 - DNA, 25 bp, Homo sapien
cgatgacgctgtggttggatggcag

SEQ ID NO: 2374917 - DNA, 25 bp, Homo sapien
gtggagatgaaggtctcgatgacgc

SEQ ID NO: 2374918 - DNA, 25 bp, Homo sapien
ggagatgaaggtctcgatgacgctg

SEQ ID NO: 2374919 - DNA, 25 bp, Homo sapien
tcgatgacgctgtggttggatggca

SEQ ID NO: 2374920 - DNA, 25 bp, Homo sapien
taagaagactgtatcccacgaagca

SEQ ID NO: 2374921 - DNA, 25 bp, Homo sapien
tacaaatggcatgtgggtcactagc

SEQ ID NO: 2374922 - DNA, 25 bp, Homo sapien
ctgccagagtggtgtagcggtccca

SEQ ID NO: 2374923 - DNA, 25 bp, Homo sapien
ggtagacgcggtacactgaaggcca

SEQ ID NO: 2374924 - DNA, 25 bp, Homo sapien
ctgcatagcacttccgttacaccga

SEQ ID NO: 2374925 - DNA, 25 bp, Homo sapien
catagcacttccgttacaccgaccc

SEQ ID NO: 2374926 - DNA, 25 bp, Homo sapien
tagcacttccgttacaccgacccat

SEQ ID NO: 2374927 - DNA, 25 bp, Homo sapien
tgcatagcacttccgttacaccgac

SEQ ID NO: 2374928 - DNA, 25 bp, Homo sapien
cactactgagttcccgtagggagac

SEQ ID NO: 2374929 - DNA, 25 bp, Homo sapien
gggcagacactactgagttcccgta

SEQ ID NO: 2374930 - DNA, 25 bp, Homo sapien
gattccggggcagacactactgagt

SEQ ID NO: 2374931 - DNA, 25 bp, Homo sapien
tgagttcccgtagggagacaaggtc

SEQ ID NO: 2374932 - DNA, 25 bp, Homo sapien
aacctccgcctctggggtcaagtga

SEQ ID NO: 2374933 - DNA, 25 bp, Homo sapien
ttttgagacagtctggctggagtgc

SEQ ID NO: 2374934 - DNA, 25 bp, Homo sapien
cgcctctggggtcaagtgattttcc

SEQ ID NO: 2374935 - DNA, 25 bp, Homo sapien
cagtgatgccatctcggctcactgc

SEQ ID NO: 2374936 - DNA, 25 bp, Homo sapien
tcaatacgtatgctcccaacaaatg

SEQ ID NO: 2374937 - DNA, 25 bp, Homo sapien
cttagaaccctgagtggaaccgctt

SEQ ID NO: 2374938 - DNA, 25 bp, Homo sapien
tgagggcaacttcgaacttagaacc

SEQ ID NO: 2374939 - DNA, 25 bp, Homo sapien
agagtcacaagctccccaaacgtgc

SEQ ID NO: 2374940 - DNA, 25 bp, Homo sapien
acttggtattgccacaggagctgct

SEQ ID NO: 2374941 - DNA, 25 bp, Homo sapien
cagggcacttggtattgccacagga

SEQ ID NO: 2374942 - DNA, 25 bp, Homo sapien
ggcggcgacccctctctggccttgg

SEQ ID NO: 2374943 - DNA, 25 bp, Homo sapien
gcacttggtattgccacaggagctg

SEQ ID NO: 2374944 - DNA, 25 bp, Homo sapien
atgtgaaagtcaacttgctgcagct

SEQ ID NO: 2374945 - DNA, 25 bp, Homo sapien
gatgtgaaagtcaacttgctgcagc

SEQ ID NO: 2374946 - DNA, 25 bp, Homo sapien
tgtgaaagtcaacttgctgcagctg

SEQ ID NO: 2374947 - DNA, 25 bp, Homo sapien
tcaagagagctcacaagtactgggg

SEQ ID NO: 2374948 - DNA, 25 bp, Homo sapien
atcaagagagctcacaagtactggg

SEQ ID NO: 2374949 - DNA, 25 bp, Homo sapien
caagagagctcacaagtactggggc

SEQ ID NO: 2374950 - DNA, 25 bp, Homo sapien
caagtactggggcagtagggagcag

SEQ ID NO: 2374951 - DNA, 25 bp, Homo sapien
gtcttaggccacatgaaggtctcat

SEQ ID NO: 2374952 - DNA, 25 bp, Homo sapien
tctagctcgagtgggcaaaggttcc

SEQ ID NO: 2374953 - DNA, 25 bp, Homo sapien
tggaccttctcactgaacgaggcgt

SEQ ID NO: 2374954 - DNA, 25 bp, Homo sapien
gcagcatctagcgtgggaatcccag

SEQ ID NO: 2374955 - DNA, 25 bp, Homo sapien
tggccagggcagctgctcacactgt

SEQ ID NO: 2374956 - DNA, 25 bp, Homo sapien
gggcagctgctcacactgtagctcc

SEQ ID NO: 2374957 - DNA, 25 bp, Homo sapien
ggccagggcagctgctcacactgta

SEQ ID NO: 2374958 - DNA, 25 bp, Homo sapien
cagggcagctgctcacactgtagct

SEQ ID NO: 2374959 - DNA, 25 bp, Homo sapien
ggaatccagagatggccgctcagtg

SEQ ID NO: 2374960 - DNA, 25 bp, Homo sapien
ggtgaggacctcaatgctaaaagca

SEQ ID NO: 2374961 - DNA, 25 bp, Homo sapien
gatagaaggaagtcacaagggtccc

SEQ ID NO: 2374962 - DNA, 25 bp, Homo sapien
tcccagtggtgcttgagaaaaaacc

SEQ ID NO: 2374963 - DNA, 25 bp, Homo sapien
ggcgtctttgcccagaggagcagaa

SEQ ID NO: 2374964 - DNA, 25 bp, Homo sapien
tatggctcagcttagggtccgcagc

SEQ ID NO: 2374965 - DNA, 25 bp, Homo sapien
tctggtaatcagcagatggcgcccg

SEQ ID NO: 2374966 - DNA, 25 bp, Homo sapien
tagcaaatatgaccggagagccaga

SEQ ID NO: 2374967 - DNA, 25 bp, Homo sapien
tatttgcctttcgtagaaggctgag

SEQ ID NO: 2374968 - DNA, 25 bp, Homo sapien
gaggatccctgtctctcagtgcacg

SEQ ID NO: 2374969 - DNA, 25 bp, Homo sapien
cagcatgtgccttcggctcctggag

SEQ ID NO: 2374970 - DNA, 25 bp, Homo sapien
cggactccacttgcagccttaataa

SEQ ID NO: 2374971 - DNA, 25 bp, Homo sapien
catgaggcgaggaactcagccagct

SEQ ID NO: 2374972 - DNA, 25 bp, Homo sapien
cccatgaggcgaggaactcagccag

SEQ ID NO: 2374973 - DNA, 25 bp, Homo sapien
tgcacacgtcccccatgaggcgagg

SEQ ID NO: 2374974 - DNA, 25 bp, Homo sapien
ccattgcacacgtcccccatgaggc

SEQ ID NO: 2374975 - DNA, 25 bp, Homo sapien
cctacactggggtagtgcaaggtca

SEQ ID NO: 2374976 - DNA, 25 bp, Homo sapien
acactggggtagtgcaaggtcagag

SEQ ID NO: 2374977 - DNA, 25 bp, Homo sapien
ctttttggagcctacactggggtag

SEQ ID NO: 2374978 - DNA, 25 bp, Homo sapien
ttttggagcctacactggggtagtg

SEQ ID NO: 2374979 - DNA, 25 bp, Homo sapien
ttcatcttcactgaacttggtgaag

SEQ ID NO: 2374980 - DNA, 25 bp, Homo sapien
cttcactgaacttggtgaagaccca

SEQ ID NO: 2374981 - DNA, 25 bp, Homo sapien
tcactgaacttggtgaagacccact

SEQ ID NO: 2374982 - DNA, 25 bp, Homo sapien
aaattcatcttcactgaacttggtg

SEQ ID NO: 2374983 - DNA, 25 bp, Homo sapien
ggagctggaccagagctctactctt

SEQ ID NO: 2374984 - DNA, 25 bp, Homo sapien
ggaccagagctctactcttcctgac

SEQ ID NO: 2374985 - DNA, 25 bp, Homo sapien
ccagtaactgcaaaatgaaacgtac

SEQ ID NO: 2374986 - DNA, 25 bp, Homo sapien
ctgcgcggagctggaccagagctct

SEQ ID NO: 2374987 - DNA, 25 bp, Homo sapien
caaacgtaggaaaagatgatcacgt

SEQ ID NO: 2374988 - DNA, 25 bp, Homo sapien
gccataattcatgctctggatccga

SEQ ID NO: 2374989 - DNA, 25 bp, Homo sapien
catgctctggatccgagtgactttg

SEQ ID NO: 2374990 - DNA, 25 bp, Homo sapien
tgactttgttcgtctcatactggaa

SEQ ID NO: 2374991 - DNA, 25 bp, Homo sapien
tacacgaacttaaggcttcacagag

SEQ ID NO: 2374992 - DNA, 25 bp, Homo sapien
tgtactgtgagactccatttggcca

SEQ ID NO: 2374993 - DNA, 25 bp, Homo sapien
ttcacagagcaacttaaggcagcat

SEQ ID NO: 2374994 - DNA, 25 bp, Homo sapien
gatggctaagtcatggttacacgaa

SEQ ID NO: 2374995 - DNA, 25 bp, Homo sapien
ccataaagtcgttcttcagagtctc

SEQ ID NO: 2374996 - DNA, 25 bp, Homo sapien
ggtgcccaccataaagtcgttcttc

SEQ ID NO: 2374997 - DNA, 25 bp, Homo sapien
aaggtgcccaccataaagtcgttct

SEQ ID NO: 2374998 - DNA, 25 bp, Homo sapien
gatgaaggtgcccaccataaagtcg

SEQ ID NO: 2374999 - DNA, 25 bp, Homo sapien
ctctgctatccccttcaccttggtg

SEQ ID NO: 2375000 - DNA, 25 bp, Homo sapien
tctgcggtgtcaaagacactgtgca

SEQ ID NO: 2375001 - DNA, 25 bp, Homo sapien
aaggtgtagtctgcggtgtcaaaga

SEQ ID NO: 2375002 - DNA, 25 bp, Homo sapien
caaagggaaggtgtagtctgcggtg

SEQ ID NO: 2375003 - DNA, 25 bp, Homo sapien
aagcattttagctccccaagccgca

SEQ ID NO: 2375004 - DNA, 25 bp, Homo sapien
tgcaaatctagaagtcacacgcctt

SEQ ID NO: 2375005 - DNA, 25 bp, Homo sapien
taatgaaagggcactagggcatccc

SEQ ID NO: 2375006 - DNA, 25 bp, Homo sapien
tgtacccaagaatggtctcctggag

SEQ ID NO: 2375007 - DNA, 25 bp, Homo sapien
tcgggacacaaccgctgctcttggc

SEQ ID NO: 2375008 - DNA, 25 bp, Homo sapien
ctcgggacacaaccgctgctcttgg

SEQ ID NO: 2375009 - DNA, 25 bp, Homo sapien
cgggacacaaccgctgctcttggcc

SEQ ID NO: 2375010 - DNA, 25 bp, Homo sapien
aggaacagagcgtcctgcgggtggg

SEQ ID NO: 2375011 - DNA, 25 bp, Homo sapien
gtcagaggaacagagcgtcctgcgg

SEQ ID NO: 2375012 - DNA, 25 bp, Homo sapien
ttttacaacctcggtcagaggaaca

SEQ ID NO: 2375013 - DNA, 25 bp, Homo sapien
ttacaacctcggtcagaggaacaga

SEQ ID NO: 2375014 - DNA, 25 bp, Homo sapien
gggtcaaagcatcgtagaaccacag

SEQ ID NO: 2375015 - DNA, 25 bp, Homo sapien
tataggggtcaaagcatcgtagaac

SEQ ID NO: 2375016 - DNA, 25 bp, Homo sapien
tcgtagaaccacagatgtgaaagaa

SEQ ID NO: 2375017 - DNA, 25 bp, Homo sapien
aaagcatcgtagaaccacagatgtg

SEQ ID NO: 2375018 - DNA, 25 bp, Homo sapien
ttctggttcccttcatacactacac

SEQ ID NO: 2375019 - DNA, 25 bp, Homo sapien
atacactacacaccttccggtctga

SEQ ID NO: 2375020 - DNA, 25 bp, Homo sapien
tccactgcctcgatggggcaccagg

SEQ ID NO: 2375021 - DNA, 25 bp, Homo sapien
actacacaccttccggtctgaattc

SEQ ID NO: 2375022 - DNA, 25 bp, Homo sapien
tgagccttctacaggccagcttggg

SEQ ID NO: 2375023 - DNA, 25 bp, Homo sapien
cattgggaaaccttcgcctgagcct

SEQ ID NO: 2375024 - DNA, 25 bp, Homo sapien
gaatcacatcggtctagaactgcgc

SEQ ID NO: 2375025 - DNA, 25 bp, Homo sapien
cccacgatgctgagggaatgatcct

SEQ ID NO: 2375026 - DNA, 25 bp, Homo sapien
tggctaatttatgcattttttagta

SEQ ID NO: 2375027 - DNA, 25 bp, Homo sapien
acacctggctaatttatgcattttt

SEQ ID NO: 2375028 - DNA, 25 bp, Homo sapien
ctggctaatttatgcattttttagt

SEQ ID NO: 2375029 - DNA, 25 bp, Homo sapien
acctggctaatttatgcatttttta

SEQ ID NO: 2375030 - DNA, 25 bp, Homo sapien
gttgtggccggggaagtcgatattg

SEQ ID NO: 2375031 - DNA, 25 bp, Homo sapien
ccggggaagtcgatattgttcttga

SEQ ID NO: 2375032 - DNA, 25 bp, Homo sapien
tggccggggaagtcgatattgttct

SEQ ID NO: 2375033 - DNA, 25 bp, Homo sapien
tggtgtagttgtggccggggaagtc

SEQ ID NO: 2375034 - DNA, 25 bp, Homo sapien
cacgagcaactgtgtgagagcttgg

SEQ ID NO: 2375035 - DNA, 25 bp, Homo sapien
tcaagtggtctagggcgaggttcac

SEQ ID NO: 2375036 - DNA, 25 bp, Homo sapien
tgaaagccccaaatgatcactgcct

SEQ ID NO: 2375037 - DNA, 25 bp, Homo sapien
gtctctcttgggtcacttgctctgg

SEQ ID NO: 2375038 - DNA, 25 bp, Homo sapien
tcctagtcggaaaatgggacactgt

SEQ ID NO: 2375039 - DNA, 25 bp, Homo sapien
tctcggaagatgtctcctagtcgga

SEQ ID NO: 2375040 - DNA, 25 bp, Homo sapien
caagtgatgtttaaacctggcagga

SEQ ID NO: 2375041 - DNA, 25 bp, Homo sapien
aaattatcgcctgtttctcggaaga

SEQ ID NO: 2375042 - DNA, 25 bp, Homo sapien
tcaaggcgacggaaactgtatttgg

SEQ ID NO: 2375043 - DNA, 25 bp, Homo sapien
cggcagtgatggaaccaacggtcta

SEQ ID NO: 2375044 - DNA, 25 bp, Homo sapien
tgtagccagggtacaaggacacgtt

SEQ ID NO: 2375045 - DNA, 25 bp, Homo sapien
gacacgttggtggtcttgtcgtcaa

SEQ ID NO: 2375046 - DNA, 25 bp, Homo sapien
tatcagagtccgtttctcaacattg

SEQ ID NO: 2375047 - DNA, 25 bp, Homo sapien
aacggatcccgaagacttttatcag

SEQ ID NO: 2375048 - DNA, 25 bp, Homo sapien
caaaaaccaggatgtcaaaacggat

SEQ ID NO: 2375049 - DNA, 25 bp, Homo sapien
gatgtcaaaacggatcccgaagact

SEQ ID NO: 2375050 - DNA, 25 bp, Homo sapien
gagggttgagccgatgtacacaacc

SEQ ID NO: 2375051 - DNA, 25 bp, Homo sapien
gatgtacacaaccagctggataatg

SEQ ID NO: 2375052 - DNA, 25 bp, Homo sapien
gaccgaagtaggagagggttgagcc

SEQ ID NO: 2375053 - DNA, 25 bp, Homo sapien
tgagccgatgtacacaaccagctgg

SEQ ID NO: 2375054 - DNA, 25 bp, Homo sapien
tccaaaccattttcctaaagcatgg

SEQ ID NO: 2375055 - DNA, 25 bp, Homo sapien
aagcgctgcgttagtcacttccttc

SEQ ID NO: 2375056 - DNA, 25 bp, Homo sapien
ggagaatgcagacaagcgctgcgtt

SEQ ID NO: 2375057 - DNA, 25 bp, Homo sapien
caaaccattttcctaaagcatggaa

SEQ ID NO: 2375058 - DNA, 25 bp, Homo sapien
tactggagtaagtgtcgatgaggaa

SEQ ID NO: 2375059 - DNA, 25 bp, Homo sapien
caccagggataaatatgggagcgac

SEQ ID NO: 2375060 - DNA, 25 bp, Homo sapien
agtagtattcgttgaccacacaggg

SEQ ID NO: 2375061 - DNA, 25 bp, Homo sapien
aatggactcgcacttcttcctgtag

SEQ ID NO: 2375062 - DNA, 25 bp, Homo sapien
gtgggattcatccacaaaggacaca

SEQ ID NO: 2375063 - DNA, 25 bp, Homo sapien
tctccctagtagctgctggttcacc

SEQ ID NO: 2375064 - DNA, 25 bp, Homo sapien
cttcttggcccttgacatcttgcag

SEQ ID NO: 2375065 - DNA, 25 bp, Homo sapien
gacatcttgcagacttctccctagt

SEQ ID NO: 2375066 - DNA, 25 bp, Homo sapien
aagccaggcctctgttgagatgtca

SEQ ID NO: 2375067 - DNA, 25 bp, Homo sapien
caggcctctgttgagatgtcacctc

SEQ ID NO: 2375068 - DNA, 25 bp, Homo sapien
accctatctagcagcttttctccca

SEQ ID NO: 2375069 - DNA, 25 bp, Homo sapien
taggacttagcactattggaaatgg

SEQ ID NO: 2375070 - DNA, 25 bp, Homo sapien
tgtactgcccttcactcttcggaaa

SEQ ID NO: 2375071 - DNA, 25 bp, Homo sapien
aaactctttccggatcctccagcgg

SEQ ID NO: 2375072 - DNA, 25 bp, Homo sapien
caaatctgtgaagtccatcgcaggt

SEQ ID NO: 2375073 - DNA, 25 bp, Homo sapien
tggtggaatccacatccagcgccag

SEQ ID NO: 2375074 - DNA, 25 bp, Homo sapien
gcttccccgatagcaagagttccaa

SEQ ID NO: 2375075 - DNA, 25 bp, Homo sapien
tttaaatggcgtctggcttccccga

SEQ ID NO: 2375076 - DNA, 25 bp, Homo sapien
tcggaatgcattgggtagctcagca

SEQ ID NO: 2375077 - DNA, 25 bp, Homo sapien
cacttgggatgtatcatgcggtatc

SEQ ID NO: 2375078 - DNA, 25 bp, Homo sapien
tttgaagcagctagcacccagactg

SEQ ID NO: 2375079 - DNA, 25 bp, Homo sapien
tacagagtgttaatggcataaagcc

SEQ ID NO: 2375080 - DNA, 25 bp, Homo sapien
ccagactgcgtcagttctgattggc

SEQ ID NO: 2375081 - DNA, 25 bp, Homo sapien
gccaactctagtgaccaaaccagga

SEQ ID NO: 2375082 - DNA, 25 bp, Homo sapien
tccatctgcggcctcattaaggtga

SEQ ID NO: 2375083 - DNA, 25 bp, Homo sapien
gaatactggcaattaccgtagcaga

SEQ ID NO: 2375084 - DNA, 25 bp, Homo sapien
ttaaggacacttacattgccaggct

SEQ ID NO: 2375085 - DNA, 25 bp, Homo sapien
cctgttattgtaggacgtgtctgac

SEQ ID NO: 2375086 - DNA, 25 bp, Homo sapien
cgcaaatgtttcatggagtagggaa

SEQ ID NO: 2375087 - DNA, 25 bp, Homo sapien
tggagtagggaaagactgaaacaaa

SEQ ID NO: 2375088 - DNA, 25 bp, Homo sapien
tccatttggccgcatatatagcgca

SEQ ID NO: 2375089 - DNA, 25 bp, Homo sapien
tccacacagcgatcatagtgatctt

SEQ ID NO: 2375090 - DNA, 25 bp, Homo sapien
tactcataacttaccagactggaag

SEQ ID NO: 2375091 - DNA, 25 bp, Homo sapien
gaccatgacttttggtagaagccaa

SEQ ID NO: 2375092 - DNA, 25 bp, Homo sapien
gggtgaaaccccactcggtgcattc

SEQ ID NO: 2375093 - DNA, 25 bp, Homo sapien
gcagggctttgtgtagaccatgact

SEQ ID NO: 2375094 - DNA, 25 bp, Homo sapien
catggctagacatgagaagctgccc

SEQ ID NO: 2375095 - DNA, 25 bp, Homo sapien
gagagcaatgcttgggcaccatcca

SEQ ID NO: 2375096 - DNA, 25 bp, Homo sapien
tgaacagatgagattggacagaacg

SEQ ID NO: 2375097 - DNA, 25 bp, Homo sapien
ggttaaatatatgggcctggagctc

SEQ ID NO: 2375098 - DNA, 25 bp, Homo sapien
ccctctagggggcatggaactcgcg

SEQ ID NO: 2375099 - DNA, 25 bp, Homo sapien
tcgcccttgaggacgaaaggctcct

SEQ ID NO: 2375100 - DNA, 25 bp, Homo sapien
tggcggcgccgtcatcgcggaggag

SEQ ID NO: 2375101 - DNA, 25 bp, Homo sapien
cgtcgggaacgatgaccctctaggg

SEQ ID NO: 2375102 - DNA, 25 bp, Homo sapien
cgcggttcatgagccccactttgcg

SEQ ID NO: 2375103 - DNA, 25 bp, Homo sapien
acgatgcgcggcgtgtcgtactcga

SEQ ID NO: 2375104 - DNA, 25 bp, Homo sapien
cactttgcggctgcggatgagcacg

SEQ ID NO: 2375105 - DNA, 25 bp, Homo sapien
tgagcagttgcacggcgcggttcat

SEQ ID NO: 2375106 - DNA, 25 bp, Homo sapien
ttccacttctgccaaatggggatgg

SEQ ID NO: 2375107 - DNA, 25 bp, Homo sapien
catttccacttctgccaaatgggga

SEQ ID NO: 2375108 - DNA, 25 bp, Homo sapien
cttctaggggactccatttccactt

SEQ ID NO: 2375109 - DNA, 25 bp, Homo sapien
cttctgccaaatggggatggtagca

SEQ ID NO: 2375110 - DNA, 25 bp, Homo sapien
ctcttaaattgccattaggattcaa

SEQ ID NO: 2375111 - DNA, 25 bp, Homo sapien
taaattgccattaggattcaatgga

SEQ ID NO: 2375112 - DNA, 25 bp, Homo sapien
aattgccattaggattcaatggatt

SEQ ID NO: 2375113 - DNA, 25 bp, Homo sapien
cttaaattgccattaggattcaatg

SEQ ID NO: 2375114 - DNA, 25 bp, Homo sapien
agccacgcccttgaccttggtcgta

SEQ ID NO: 2375115 - DNA, 25 bp, Homo sapien
gagctgaccacggagtcagtttcct

SEQ ID NO: 2375116 - DNA, 25 bp, Homo sapien
tgagctggtatcacataatccgcca

SEQ ID NO: 2375117 - DNA, 25 bp, Homo sapien
cagatccggaatccaagtttagaag

SEQ ID NO: 2375118 - DNA, 25 bp, Homo sapien
catgctttcaagctgaggaaccaca

SEQ ID NO: 2375119 - DNA, 25 bp, Homo sapien
cagctgcctggatacactctgttag

SEQ ID NO: 2375120 - DNA, 25 bp, Homo sapien
ggactcaggccacgtcaatcattaa

SEQ ID NO: 2375121 - DNA, 25 bp, Homo sapien
ggctgcaccgttttcttggactaaa

SEQ ID NO: 2375122 - DNA, 25 bp, Homo sapien
tctttctcctatcctatcatttatc

SEQ ID NO: 2375123 - DNA, 25 bp, Homo sapien
acccatccaatcaagatggggtctc

SEQ ID NO: 2375124 - DNA, 25 bp, Homo sapien
ttctcctatcctatcatttatctat

SEQ ID NO: 2375125 - DNA, 25 bp, Homo sapien
cacccatccaatcaagatggggtct

SEQ ID NO: 2375126 - DNA, 25 bp, Homo sapien
tcatgacgaagagggagttttcctc

SEQ ID NO: 2375127 - DNA, 25 bp, Homo sapien
tggttcatggtgaggatcacgttgg

SEQ ID NO: 2375128 - DNA, 25 bp, Homo sapien
tctggttcatggtgaggatcacgtt

SEQ ID NO: 2375129 - DNA, 25 bp, Homo sapien
ctggttcatggtgaggatcacgttg

SEQ ID NO: 2375130 - DNA, 25 bp, Homo sapien
cgttgctgtgggtgccggcagagcc

SEQ ID NO: 2375131 - DNA, 25 bp, Homo sapien
cggcagagccggcagtacagctggc

SEQ ID NO: 2375132 - DNA, 25 bp, Homo sapien
ctgatttacacacagtggtcgcatc

SEQ ID NO: 2375133 - DNA, 25 bp, Homo sapien
tttacacacagtggtcgcatctgga

SEQ ID NO: 2375134 - DNA, 25 bp, Homo sapien
gatttctctatcagagacgctccac

SEQ ID NO: 2375135 - DNA, 25 bp, Homo sapien
cacccagggtcatgtgaaggaattg

SEQ ID NO: 2375136 - DNA, 25 bp, Homo sapien
ctctatcagagacgctccacagtgg

SEQ ID NO: 2375137 - DNA, 25 bp, Homo sapien
acgctccacagtgggggcgatctgc

SEQ ID NO: 2375138 - DNA, 25 bp, Homo sapien
ttagaatcggaggaagacagttacc

SEQ ID NO: 2375139 - DNA, 25 bp, Homo sapien
acagtgtcactgtccaggagttaga

SEQ ID NO: 2375140 - DNA, 25 bp, Homo sapien
caaatctgggatttagacagtgtca

SEQ ID NO: 2375141 - DNA, 25 bp, Homo sapien
ttacctgtgtgccagccacatctca

SEQ ID NO: 2375142 - DNA, 25 bp, Homo sapien
gtccacaggggtctcctattttcta

SEQ ID NO: 2375143 - DNA, 25 bp, Homo sapien
tccacaggggtctcctattttctac

SEQ ID NO: 2375144 - DNA, 25 bp, Homo sapien
aaagctacgcacctgcctgttgaga

SEQ ID NO: 2375145 - DNA, 25 bp, Homo sapien
cttgacagacccgttgaaagctacg

SEQ ID NO: 2375146 - DNA, 25 bp, Homo sapien
ctcacacgtcttgacagacccgttg

SEQ ID NO: 2375147 - DNA, 25 bp, Homo sapien
agacccgttgaaagctacgcacctg

SEQ ID NO: 2375148 - DNA, 25 bp, Homo sapien
cgcaccactgcactccaacctggga

SEQ ID NO: 2375149 - DNA, 25 bp, Homo sapien
aggcacagaaaatcacttgaacacg

SEQ ID NO: 2375150 - DNA, 25 bp, Homo sapien
ggtggaggttgtggtgagccaagat

SEQ ID NO: 2375151 - DNA, 25 bp, Homo sapien
cacagaaaatcacttgaacacggga

SEQ ID NO: 2375152 - DNA, 25 bp, Homo sapien
tattctagagcaaccttgaacctgg

SEQ ID NO: 2375153 - DNA, 25 bp, Homo sapien
gccaattacaaccacgaagaatgtt

SEQ ID NO: 2375154 - DNA, 25 bp, Homo sapien
ctctcggtgagaaaggccctaggct

SEQ ID NO: 2375155 - DNA, 25 bp, Homo sapien
cccaggatgaggttcagtggcttcc

SEQ ID NO: 2375156 - DNA, 25 bp, Homo sapien
gaaacacgtctagcattttctacac

SEQ ID NO: 2375157 - DNA, 25 bp, Homo sapien
tagacatgaagtcttcctacattgc

SEQ ID NO: 2375158 - DNA, 25 bp, Homo sapien
cccaaggcggtgaaaactgaattgc

SEQ ID NO: 2375159 - DNA, 25 bp, Homo sapien
tgcatgaacacagcttcttgtagcc

SEQ ID NO: 2375160 - DNA, 25 bp, Homo sapien
tgctgaaattaaatttgggatacca

SEQ ID NO: 2375161 - DNA, 25 bp, Homo sapien
gctgaaattaaatttgggataccag

SEQ ID NO: 2375162 - DNA, 25 bp, Homo sapien
tggaaactgtgtcctgcgttctcca

SEQ ID NO: 2375163 - DNA, 25 bp, Homo sapien
tcataaatgcacgacttgaggtaag

SEQ ID NO: 2375164 - DNA, 25 bp, Homo sapien
ctattttgccaagacggaatatggg

SEQ ID NO: 2375165 - DNA, 25 bp, Homo sapien
ggtgatgttgggaaggatattcctc

SEQ ID NO: 2375166 - DNA, 25 bp, Homo sapien
ggcacgagacgcctccagggctggg

SEQ ID NO: 2375167 - DNA, 25 bp, Homo sapien
gagacacggcaaggctttcctcagc

SEQ ID NO: 2375168 - DNA, 25 bp, Homo sapien
gcagagacacggcaaggctttcctc

SEQ ID NO: 2375169 - DNA, 25 bp, Homo sapien
ctcagcacctggcacgagacgcctc

SEQ ID NO: 2375170 - DNA, 25 bp, Homo sapien
tcaacgtcccgtgtatcgaggcggc

SEQ ID NO: 2375171 - DNA, 25 bp, Homo sapien
cagtcccagttgacctggatgccca

SEQ ID NO: 2375172 - DNA, 25 bp, Homo sapien
tgtagccaggagatacgttgtgctc

SEQ ID NO: 2375173 - DNA, 25 bp, Homo sapien
ggcggaaggagtacctgggcaagca

SEQ ID NO: 2375174 - DNA, 25 bp, Homo sapien
gctgaccgcgcccagggatggtcct

SEQ ID NO: 2375175 - DNA, 25 bp, Homo sapien
gagcgagcacgcgagagagcgcaca

SEQ ID NO: 2375176 - DNA, 25 bp, Homo sapien
gagcaagtcactcccttaaaaaaga

SEQ ID NO: 2375177 - DNA, 25 bp, Homo sapien
tggatggttggtgaagaaccgtcaa

SEQ ID NO: 2375178 - DNA, 25 bp, Homo sapien
aaccgtcaagacataccatctgctg

SEQ ID NO: 2375179 - DNA, 25 bp, Homo sapien
tggtgaagcctgcacttatctgtga

SEQ ID NO: 2375180 - DNA, 25 bp, Homo sapien
aaaacgtcgtctgtcaacacagcag

SEQ ID NO: 2375181 - DNA, 25 bp, Homo sapien
gaaccactcgttcgtcacacagata

SEQ ID NO: 2375182 - DNA, 25 bp, Homo sapien
ccataaaaagagacgaggtactgac

SEQ ID NO: 2375183 - DNA, 25 bp, Homo sapien
gagctggcacaggtgaatggtccac

SEQ ID NO: 2375184 - DNA, 25 bp, Homo sapien
gaacagtttgctctcaacatcccac

SEQ ID NO: 2375185 - DNA, 25 bp, Homo sapien
ccactctgccggctgaatggacgct

SEQ ID NO: 2375186 - DNA, 25 bp, Homo sapien
aagggaccctgacctccaacatcta

SEQ ID NO: 2375187 - DNA, 25 bp, Homo sapien
ggaggatggatcagggggagatggc

SEQ ID NO: 2375188 - DNA, 25 bp, Homo sapien
aggatggatcagggggagatggctg

SEQ ID NO: 2375189 - DNA, 25 bp, Homo sapien
gaggatggatcagggggagatggct

SEQ ID NO: 2375190 - DNA, 25 bp, Homo sapien
gccaggtctctgtagtacttggcaa

SEQ ID NO: 2375191 - DNA, 25 bp, Homo sapien
gaagcggatgccataggccttgatg

SEQ ID NO: 2375192 - DNA, 25 bp, Homo sapien
cccaaacacaatgatgtcgaagcgg

SEQ ID NO: 2375193 - DNA, 25 bp, Homo sapien
gatgagcgtgcgctgctcgttgcca

SEQ ID NO: 2375194 - DNA, 25 bp, Homo sapien
gggagtgacggaggggagccagtgg

SEQ ID NO: 2375195 - DNA, 25 bp, Homo sapien
agggagtgacggaggggagccagtg

SEQ ID NO: 2375196 - DNA, 25 bp, Homo sapien
catagtggggatgatgtcaaatttc

SEQ ID NO: 2375197 - DNA, 25 bp, Homo sapien
cagagccgatgttgatcatagtggg

SEQ ID NO: 2375198 - DNA, 25 bp, Homo sapien
caggccagagccgatgttgatcata

SEQ ID NO: 2375199 - DNA, 25 bp, Homo sapien
agtgccaggccagagccgatgttga

SEQ ID NO: 2375200 - DNA, 25 bp, Homo sapien
gtgaaggcagggcctaaaccactca

SEQ ID NO: 2375201 - DNA, 25 bp, Homo sapien
tctttaccggaatggaaaggcactc

SEQ ID NO: 2375202 - DNA, 25 bp, Homo sapien
acacatctgaggtctagggcctagg

SEQ ID NO: 2375203 - DNA, 25 bp, Homo sapien
catcttattctttgcgtgccccttc

SEQ ID NO: 2375204 - DNA, 25 bp, Homo sapien
gagagtgagccaggatgcttgcaac

SEQ ID NO: 2375205 - DNA, 25 bp, Homo sapien
ctatgatgtcacacagcacggtcgc

SEQ ID NO: 2375206 - DNA, 25 bp, Homo sapien
tatatttcttctcccgatagtagag

SEQ ID NO: 2375207 - DNA, 25 bp, Homo sapien
tcccgatagtagagtcttttcttca

SEQ ID NO: 2375208 - DNA, 25 bp, Homo sapien
ttcttcatgcagtagaggactatga

SEQ ID NO: 2375209 - DNA, 25 bp, Homo sapien
caacctgagatgtcgctcattgaaa

SEQ ID NO: 2375210 - DNA, 25 bp, Homo sapien
acggggacaccacgccacactggtg

SEQ ID NO: 2375211 - DNA, 25 bp, Homo sapien
gagtggcaggactgcccgggttaac

SEQ ID NO: 2375212 - DNA, 25 bp, Homo sapien
tgtcgctcattgaaacgaggctggg

SEQ ID NO: 2375213 - DNA, 25 bp, Homo sapien
gaaggacacaagcagatcaaggtgc

SEQ ID NO: 2375214 - DNA, 25 bp, Homo sapien
gcaaagaaggacacaagcagatcaa

SEQ ID NO: 2375215 - DNA, 25 bp, Homo sapien
aagcagatcaaggtgcccctgggac

SEQ ID NO: 2375216 - DNA, 25 bp, Homo sapien
gacacaagcagatcaaggtgcccct

SEQ ID NO: 2375217 - DNA, 25 bp, Homo sapien
taaagtgcttgaacagagccgccgt

SEQ ID NO: 2375218 - DNA, 25 bp, Homo sapien
gcccaggcctgctacaagtctagtg

SEQ ID NO: 2375219 - DNA, 25 bp, Homo sapien
aagcagagttgacccagccaagaac

SEQ ID NO: 2375220 - DNA, 25 bp, Homo sapien
gagtggagactcaatcagattccag

SEQ ID NO: 2375221 - DNA, 25 bp, Homo sapien
agaaaatcacgctttaatgtctggt

SEQ ID NO: 2375222 - DNA, 25 bp, Homo sapien
aaaatcacgctttaatgtctggtcc

SEQ ID NO: 2375223 - DNA, 25 bp, Homo sapien
gaaaatcacgctttaatgtctggtc

SEQ ID NO: 2375224 - DNA, 25 bp, Homo sapien
tattgagccccttgttgacacttgg

SEQ ID NO: 2375225 - DNA, 25 bp, Homo sapien
tcacgttgccgagtggaagaaccat

SEQ ID NO: 2375226 - DNA, 25 bp, Homo sapien
tgcacttgtggcctcgaaggaagca

SEQ ID NO: 2375227 - DNA, 25 bp, Homo sapien
tttggtgtaagcaacctgtggcctg

SEQ ID NO: 2375228 - DNA, 25 bp, Homo sapien
ggacaggtagtctagagagggtcgt

SEQ ID NO: 2375229 - DNA, 25 bp, Homo sapien
tttgaagagcaaaggacaggtagtc

SEQ ID NO: 2375230 - DNA, 25 bp, Homo sapien
gttcagaattagggaatgctggttt

SEQ ID NO: 2375231 - DNA, 25 bp, Homo sapien
ggtagtctagagagggtcgtctggc

SEQ ID NO: 2375232 - DNA, 25 bp, Homo sapien
ttgactccatgacgtcgaccgtggc

SEQ ID NO: 2375233 - DNA, 25 bp, Homo sapien
tgtggaaaggcgagcagaaaactcc

SEQ ID NO: 2375234 - DNA, 25 bp, Homo sapien
tagatgtggctcctagtgcaaaccg

SEQ ID NO: 2375235 - DNA, 25 bp, Homo sapien
tccaagcctggaagggtattcagca

SEQ ID NO: 2375236 - DNA, 25 bp, Homo sapien
ccgagtagctgcctggatcgctcga

SEQ ID NO: 2375237 - DNA, 25 bp, Homo sapien
catagcagcatgtcctacggaaacc

SEQ ID NO: 2375238 - DNA, 25 bp, Homo sapien
tacggaaacccagcacgtgtgtaga

SEQ ID NO: 2375239 - DNA, 25 bp, Homo sapien
gctgcaccgcgtttccatagcagca

SEQ ID NO: 2375240 - DNA, 25 bp, Homo sapien
tgtacgggtccttgctatttttggc

SEQ ID NO: 2375241 - DNA, 25 bp, Homo sapien
caaagactgggttacgtagatcacg

SEQ ID NO: 2375242 - DNA, 25 bp, Homo sapien
cagtccctgcgtggaaagttgctgg

SEQ ID NO: 2375243 - DNA, 25 bp, Homo sapien
catagttttggaactgttgtacggg

SEQ ID NO: 2375244 - DNA, 25 bp, Homo sapien
tcattgtggtcaccgagtgtgagcc

SEQ ID NO: 2375245 - DNA, 25 bp, Homo sapien
agcagcagcgaaagccagaagccct

SEQ ID NO: 2375246 - DNA, 25 bp, Homo sapien
ctggatgaagctggcgcatgcacca

SEQ ID NO: 2375247 - DNA, 25 bp, Homo sapien
atcatgtgtctctagccagcccagc

SEQ ID NO: 2375248 - DNA, 25 bp, Homo sapien
atggcacacaaagcccggaggctgg

SEQ ID NO: 2375249 - DNA, 25 bp, Homo sapien
cagcccctcgcgtttgacaggtggg

SEQ ID NO: 2375250 - DNA, 25 bp, Homo sapien
tggagggacacggtccccgacagcc

SEQ ID NO: 2375251 - DNA, 25 bp, Homo sapien
agaggaccagcggacttggagcacc

SEQ ID NO: 2375252 - DNA, 25 bp, Homo sapien
gagatggtttatcaagggtacccca

SEQ ID NO: 2375253 - DNA, 25 bp, Homo sapien
cccagggtatggtagagtctggcct

SEQ ID NO: 2375254 - DNA, 25 bp, Homo sapien
tctggcctggaagtaaacgacgtcc

SEQ ID NO: 2375255 - DNA, 25 bp, Homo sapien
cctgatgcagctgccggaagagcat

SEQ ID NO: 2375256 - DNA, 25 bp, Homo sapien
taaacgacgtccctgatgcgctctt

SEQ ID NO: 2375257 - DNA, 25 bp, Homo sapien
ggaagagcatcgcacaccggttcct

SEQ ID NO: 2375258 - DNA, 25 bp, Homo sapien
gaggaaccggtgtgcgatgctcttc

SEQ ID NO: 2375259 - DNA, 25 bp, Homo sapien
gctcttccggcagctgcatcaggag

SEQ ID NO: 2375260 - DNA, 25 bp, Homo sapien
ggacgtcgtttacttccaggccaga

SEQ ID NO: 2375261 - DNA, 25 bp, Homo sapien
ggtacccttgataaaccatctctag

SEQ ID NO: 2375262 - DNA, 25 bp, Homo sapien
caaaggttgactgcaaagagcgcat

SEQ ID NO: 2375263 - DNA, 25 bp, Homo sapien
gaacctcaatgaagccaagaactat

SEQ ID NO: 2375264 - DNA, 25 bp, Homo sapien
tcagactatgacaaatatagcaggg

SEQ ID NO: 2375265 - DNA, 25 bp, Homo sapien
caagagattccggttggtgttagta

SEQ ID NO: 2375266 - DNA, 25 bp, Homo sapien
taccttttacctgacatgtactacg

SEQ ID NO: 2375267 - DNA, 25 bp, Homo sapien
tgaactaggtgggagaaaggtaaca

SEQ ID NO: 2375268 - DNA, 25 bp, Homo sapien
gatccagcattaatatcctttagct

SEQ ID NO: 2375269 - DNA, 25 bp, Homo sapien
gacatgtactacgttaaaacaggaa

SEQ ID NO: 2375270 - DNA, 25 bp, Homo sapien
tactaacaccaaccggaatctcttg

SEQ ID NO: 2375271 - DNA, 25 bp, Homo sapien
tgttacctttctcccacctagttca

SEQ ID NO: 2375272 - DNA, 25 bp, Homo sapien
cctgctatatttgtcatagtctgaa

SEQ ID NO: 2375273 - DNA, 25 bp, Homo sapien
agttcaacccctcagaatcaccaag

SEQ ID NO: 2375274 - DNA, 25 bp, Homo sapien
taacgtagtacatgtcaggtaaaag

SEQ ID NO: 2375275 - DNA, 25 bp, Homo sapien
gctaaaggatattaatgctggatct

SEQ ID NO: 2375276 - DNA, 25 bp, Homo sapien
tgtgcaattagctgtctacccattg

SEQ ID NO: 2375277 - DNA, 25 bp, Homo sapien
cccatagatccaagaccagaaacaa

SEQ ID NO: 2375278 - DNA, 25 bp, Homo sapien
caagaaatccttttagctaagtgac

SEQ ID NO: 2375279 - DNA, 25 bp, Homo sapien
taaaaatctacctctcctcatttat

SEQ ID NO: 2375280 - DNA, 25 bp, Homo sapien
aagatttacacaggcccatagatcc

SEQ ID NO: 2375281 - DNA, 25 bp, Homo sapien
tgtaaacatagacaaattctgagat

SEQ ID NO: 2375282 - DNA, 25 bp, Homo sapien
cacttagctaaaaggatttcttgaa

SEQ ID NO: 2375283 - DNA, 25 bp, Homo sapien
ggatctatgggcctgtgtaaatctt

SEQ ID NO: 2375284 - DNA, 25 bp, Homo sapien
caatgggtagacagctaattgcaca

SEQ ID NO: 2375285 - DNA, 25 bp, Homo sapien
tttgtcacttagctaaaaggatttc

SEQ ID NO: 2375286 - DNA, 25 bp, Homo sapien
ttgtttctggtcttggatctatggg

SEQ ID NO: 2375287 - DNA, 25 bp, Homo sapien
tctcagaatttgtctatgtttacaa

SEQ ID NO: 2375288 - DNA, 25 bp, Homo sapien
gcagaacaatgatagacatgactta

SEQ ID NO: 2375289 - DNA, 25 bp, Homo sapien
tgtcaaactatcacatcaaccaata

SEQ ID NO: 2375290 - DNA, 25 bp, Homo sapien
tgaatgagaaaatcgaggtgcatat

SEQ ID NO: 2375291 - DNA, 25 bp, Homo sapien
tagaagagtttcatacctactacac

SEQ ID NO: 2375292 - DNA, 25 bp, Homo sapien
caaaaaactgttccatatccttcaa

SEQ ID NO: 2375293 - DNA, 25 bp, Homo sapien
ttcaactcgccttcagccatcagtt

SEQ ID NO: 2375294 - DNA, 25 bp, Homo sapien
aactgatggctgaaggcgagttgaa

SEQ ID NO: 2375295 - DNA, 25 bp, Homo sapien
aatatgcacctcgattttctcattc

SEQ ID NO: 2375296 - DNA, 25 bp, Homo sapien
taagtcatgtctatcattgttctgc

SEQ ID NO: 2375297 - DNA, 25 bp, Homo sapien
gtagtaggtatgaaactcttctaag

SEQ ID NO: 2375298 - DNA, 25 bp, Homo sapien
tattggttgatgtgatagtttgaca

SEQ ID NO: 2375299 - DNA, 25 bp, Homo sapien
ggtaattgaggaatatgaaacatga

SEQ ID NO: 2375300 - DNA, 25 bp, Homo sapien
ttagatagtggtggtcacaggcttc

SEQ ID NO: 2375301 - DNA, 25 bp, Homo sapien
tgaactaataggataccccacaggg

SEQ ID NO: 2375302 - DNA, 25 bp, Homo sapien
tctcagtggctctagctgctcacca

SEQ ID NO: 2375303 - DNA, 25 bp, Homo sapien
ccatttcgacttgggagtggcacga

SEQ ID NO: 2375304 - DNA, 25 bp, Homo sapien
atctacttcttcatccccttggccc

SEQ ID NO: 2375305 - DNA, 25 bp, Homo sapien
ccatctacttcttcatccccttggc

SEQ ID NO: 2375306 - DNA, 25 bp, Homo sapien
ctacttcttcatccccttggcccat

SEQ ID NO: 2375307 - DNA, 25 bp, Homo sapien
atccatctacttcttcatccccttg

SEQ ID NO: 2375308 - DNA, 25 bp, Homo sapien
tcttcatctgaatgcttaaaccagc

SEQ ID NO: 2375309 - DNA, 25 bp, Homo sapien
gctcccatctgaatccagactgtga

SEQ ID NO: 2375310 - DNA, 25 bp, Homo sapien
gaaatgacgaagtatctcttcatct

SEQ ID NO: 2375311 - DNA, 25 bp, Homo sapien
gaatgcttaaaccagctcccatctg

SEQ ID NO: 2375312 - DNA, 25 bp, Homo sapien
gtgctgagattagccaccgggccca

SEQ ID NO: 2375313 - DNA, 25 bp, Homo sapien
cgggcccagccgattttcctacact

SEQ ID NO: 2375314 - DNA, 25 bp, Homo sapien
cagttcgctcttcatgaggacctaa

SEQ ID NO: 2375315 - DNA, 25 bp, Homo sapien
tctcacctctaacttaaccagtatt

SEQ ID NO: 2375316 - DNA, 25 bp, Homo sapien
cagagccaatgaagcgacagggatt

SEQ ID NO: 2375317 - DNA, 25 bp, Homo sapien
gaggattcttttccgccccgagcga

SEQ ID NO: 2375318 - DNA, 25 bp, Homo sapien
cgaccaataggaagccgactttcgg

SEQ ID NO: 2375319 - DNA, 25 bp, Homo sapien
gcgtgccccggtaaaagcgcagagc

SEQ ID NO: 2375320 - DNA, 25 bp, Homo sapien
gccggctctaccaggaaactcagca

SEQ ID NO: 2375321 - DNA, 25 bp, Homo sapien
aggcgaccgagcgtccggacgtaag

SEQ ID NO: 2375322 - DNA, 25 bp, Homo sapien
cctccttccctctgggcggtgatta

SEQ ID NO: 2375323 - DNA, 25 bp, Homo sapien
tctgggcggtgattaccgcgccccg

SEQ ID NO: 2375324 - DNA, 25 bp, Homo sapien
cgaggagggtctgtccggctccacc

SEQ ID NO: 2375325 - DNA, 25 bp, Homo sapien
gattggcgaggagggtctgtccggc

SEQ ID NO: 2375326 - DNA, 25 bp, Homo sapien
caggataggattggcgaggagggtc

SEQ ID NO: 2375327 - DNA, 25 bp, Homo sapien
ctggcaggataggattggcgaggag

SEQ ID NO: 2375328 - DNA, 25 bp, Homo sapien
cagcgcagctctccgagatgacgac

SEQ ID NO: 2375329 - DNA, 25 bp, Homo sapien
gcactggaggagctcgagagggtcc

SEQ ID NO: 2375330 - DNA, 25 bp, Homo sapien
tgacgactaggtaaccgctaaggcg

SEQ ID NO: 2375331 - DNA, 25 bp, Homo sapien
ggcggaaagaaaggaggcgcttcag

SEQ ID NO: 2375332 - DNA, 25 bp, Homo sapien
gcgaacgctagggacgcccggcttc

SEQ ID NO: 2375333 - DNA, 25 bp, Homo sapien
gcgcgaacgctagggacgcccggct

SEQ ID NO: 2375334 - DNA, 25 bp, Homo sapien
cggcgcgaacgctagggacgcccgg

SEQ ID NO: 2375335 - DNA, 25 bp, Homo sapien
gaacgctagggacgcccggcttctc

SEQ ID NO: 2375336 - DNA, 25 bp, Homo sapien
gaatcatctctcagaagtaggccgg

SEQ ID NO: 2375337 - DNA, 25 bp, Homo sapien
ccttgctgcgtttacctagtggcga

SEQ ID NO: 2375338 - DNA, 25 bp, Homo sapien
tatggagacagcgttaatctagcag

SEQ ID NO: 2375339 - DNA, 25 bp, Homo sapien
catcccacttggtttgagttcggca

SEQ ID NO: 2375340 - DNA, 25 bp, Homo sapien
acccggccaggtatacttgcttagc

SEQ ID NO: 2375341 - DNA, 25 bp, Homo sapien
ttaacagcccaaatcctcaatggtg

SEQ ID NO: 2375342 - DNA, 25 bp, Homo sapien
cagatgagcatacccacaattaaac

SEQ ID NO: 2375343 - DNA, 25 bp, Homo sapien
catgacatcaggaatcagtctctgc

SEQ ID NO: 2375344 - DNA, 25 bp, Homo sapien
tctcattttgagcttggaagaaccc

SEQ ID NO: 2375345 - DNA, 25 bp, Homo sapien
ggtaagacctatttcaaaacatcag

SEQ ID NO: 2375346 - DNA, 25 bp, Homo sapien
ttaacacagggcaccaatttggatt

SEQ ID NO: 2375347 - DNA, 25 bp, Homo sapien
cgtacatatactaaaaccagctgct

SEQ ID NO: 2375348 - DNA, 25 bp, Homo sapien
ttgatccttagtaccactcccccac

SEQ ID NO: 2375349 - DNA, 25 bp, Homo sapien
ttttaacagtatacttgatccttag

SEQ ID NO: 2375350 - DNA, 25 bp, Homo sapien
tttaacagtatacttgatccttagt

SEQ ID NO: 2375351 - DNA, 25 bp, Homo sapien
ttcttttaacagtatacttgatcct

SEQ ID NO: 2375352 - DNA, 25 bp, Homo sapien
gtgtgtataatctaatatgttttca

SEQ ID NO: 2375353 - DNA, 25 bp, Homo sapien
tgtgtataatctaatatgttttcag

SEQ ID NO: 2375354 - DNA, 25 bp, Homo sapien
tgtataatctaatatgttttcagaa

SEQ ID NO: 2375355 - DNA, 25 bp, Homo sapien
atgacagtttccagccaataaggtt

SEQ ID NO: 2375356 - DNA, 25 bp, Homo sapien
aataaggttataaggactctctcag

SEQ ID NO: 2375357 - DNA, 25 bp, Homo sapien
gcccatgaaacatcattacagtcaa

SEQ ID NO: 2375358 - DNA, 25 bp, Homo sapien
taaataatctgcgtaagagtaggaa

SEQ ID NO: 2375359 - DNA, 25 bp, Homo sapien
acggaggttgcggtaagcagagatt

SEQ ID NO: 2375360 - DNA, 25 bp, Homo sapien
aggttgcggtaagcagagattgcac

SEQ ID NO: 2375361 - DNA, 25 bp, Homo sapien
ggagacggaggttgcggtaagcaga

SEQ ID NO: 2375362 - DNA, 25 bp, Homo sapien
ggttgcggtaagcagagattgcacc

SEQ ID NO: 2375363 - DNA, 25 bp, Homo sapien
tatgttgggcccttccgtagctgct

SEQ ID NO: 2375364 - DNA, 25 bp, Homo sapien
taaatctgaatggaccggtggctcc

SEQ ID NO: 2375365 - DNA, 25 bp, Homo sapien
ctcagggtttggtgtaaatctgaat

SEQ ID NO: 2375366 - DNA, 25 bp, Homo sapien
cagcacgaagcccacatagacgtgg

SEQ ID NO: 2375367 - DNA, 25 bp, Homo sapien
tcagaatgagatactgccgcaggtc

SEQ ID NO: 2375368 - DNA, 25 bp, Homo sapien
tcagagcctagtccatgatggcaca

SEQ ID NO: 2375369 - DNA, 25 bp, Homo sapien
taactgagggcgctgaaatgctgtc

SEQ ID NO: 2375370 - DNA, 25 bp, Homo sapien
gatggcacagtactagatccaccaa

SEQ ID NO: 2375371 - DNA, 25 bp, Homo sapien
cagagggggctgtatagtttgaaaa

SEQ ID NO: 2375372 - DNA, 25 bp, Homo sapien
tagcagagggggctgtatagtttga

SEQ ID NO: 2375373 - DNA, 25 bp, Homo sapien
gaaacgaagacatagtagcagaggg

SEQ ID NO: 2375374 - DNA, 25 bp, Homo sapien
ctgaaacgaagacatagtagcagag

SEQ ID NO: 2375375 - DNA, 25 bp, Homo sapien
gatgtttggtctccatccataagct

SEQ ID NO: 2375376 - DNA, 25 bp, Homo sapien
gtttggtctccatccataagctctc

SEQ ID NO: 2375377 - DNA, 25 bp, Homo sapien
tttggtctccatccataagctctcc

SEQ ID NO: 2375378 - DNA, 25 bp, Homo sapien
tgtttggtctccatccataagctct

SEQ ID NO: 2375379 - DNA, 25 bp, Homo sapien
gaagtcatcaagcactaaaggcccc

SEQ ID NO: 2375380 - DNA, 25 bp, Homo sapien
catatacggccaagaataagcgtgc

SEQ ID NO: 2375381 - DNA, 25 bp, Homo sapien
gatgagctattttgggacccttcag

SEQ ID NO: 2375382 - DNA, 25 bp, Homo sapien
tcagctgggtgtggaagcttcactc

SEQ ID NO: 2375383 - DNA, 25 bp, Homo sapien
gacaatctaattccaacgaaggctt

SEQ ID NO: 2375384 - DNA, 25 bp, Homo sapien
taaagctctgatgggtcagcccaag

SEQ ID NO: 2375385 - DNA, 25 bp, Homo sapien
tcagtcctaccacagcgtacttaga

SEQ ID NO: 2375386 - DNA, 25 bp, Homo sapien
tcttcagtttgggttatgtaccttc

SEQ ID NO: 2375387 - DNA, 25 bp, Homo sapien
taaggatatgggacagcactgtgtc

SEQ ID NO: 2375388 - DNA, 25 bp, Homo sapien
aatggaatgccaaagccattaagga

SEQ ID NO: 2375389 - DNA, 25 bp, Homo sapien
aaggtcccataatggaatgccaaag

SEQ ID NO: 2375390 - DNA, 25 bp, Homo sapien
tgcaaatggctagtttaactggagc

SEQ ID NO: 2375391 - DNA, 25 bp, Homo sapien
tatacaacgtatctgattaggtcag

SEQ ID NO: 2375392 - DNA, 25 bp, Homo sapien
gaaaaccttgtcattgatgctcccc

SEQ ID NO: 2375393 - DNA, 25 bp, Homo sapien
accagaaagccagcataatgcacat

SEQ ID NO: 2375394 - DNA, 25 bp, Homo sapien
gatgctccccatgatgaccagaaag

SEQ ID NO: 2375395 - DNA, 25 bp, Homo sapien
catcatcttctgtgtttgctgaagt

SEQ ID NO: 2375396 - DNA, 25 bp, Homo sapien
gatcctctgcgttttcttcttcatc

SEQ ID NO: 2375397 - DNA, 25 bp, Homo sapien
tgtgtttgctgaagtgatttcactt

SEQ ID NO: 2375398 - DNA, 25 bp, Homo sapien
ccgatcctctgcgttttcttcttca

SEQ ID NO: 2375399 - DNA, 25 bp, Homo sapien
tgtcccttcctgtcaggctgacatg

SEQ ID NO: 2375400 - DNA, 25 bp, Homo sapien
aaccagaagaaacatcctgtactaa

SEQ ID NO: 2375401 - DNA, 25 bp, Homo sapien
tcaggctgacatgtcagggaaacca

SEQ ID NO: 2375402 - DNA, 25 bp, Homo sapien
taatctagcgaatgtccacagggca

SEQ ID NO: 2375403 - DNA, 25 bp, Homo sapien
acagagcatccattagccctggtcc

SEQ ID NO: 2375404 - DNA, 25 bp, Homo sapien
taaactcatcactggccctgaatat

SEQ ID NO: 2375405 - DNA, 25 bp, Homo sapien
gccatctcagcagtcctagaagtgt

SEQ ID NO: 2375406 - DNA, 25 bp, Homo sapien
tagccctggtcccataagtccagac

SEQ ID NO: 2375407 - DNA, 25 bp, Homo sapien
agttgacaaaattccgagccagaat

SEQ ID NO: 2375408 - DNA, 25 bp, Homo sapien
gtcagacagtgaagctctcactctc

SEQ ID NO: 2375409 - DNA, 25 bp, Homo sapien
gaatttccttcagctggcgcacgct

SEQ ID NO: 2375410 - DNA, 25 bp, Homo sapien
tggcgcacgctcattccttccacat

SEQ ID NO: 2375411 - DNA, 25 bp, Homo sapien
catctgggctatagggaattttccc

SEQ ID NO: 2375412 - DNA, 25 bp, Homo sapien
tgagagaaccaaggtactggccggc

SEQ ID NO: 2375413 - DNA, 25 bp, Homo sapien
tcacttggcagtggtggtctcgcag

SEQ ID NO: 2375414 - DNA, 25 bp, Homo sapien
ggtctcgcagccataatgaacatca

SEQ ID NO: 2375415 - DNA, 25 bp, Homo sapien
tttgtgcatattctgggcataaacc

SEQ ID NO: 2375416 - DNA, 25 bp, Homo sapien
tattctgggcataaacctgttcatc

SEQ ID NO: 2375417 - DNA, 25 bp, Homo sapien
tcctgcatctaccactgtgacatca

SEQ ID NO: 2375418 - DNA, 25 bp, Homo sapien
agcctacgacctctgaaagctctga

SEQ ID NO: 2375419 - DNA, 25 bp, Homo sapien
ccagtcaagctaggaaagatgccag

SEQ ID NO: 2375420 - DNA, 25 bp, Homo sapien
ctaacttgaaagagatgggccgtcc

SEQ ID NO: 2375421 - DNA, 25 bp, Homo sapien
tagaacttaggaaagcagaggagcc

SEQ ID NO: 2375422 - DNA, 25 bp, Homo sapien
tcatctcagtaggaaaaggagcctt

SEQ ID NO: 2375423 - DNA, 25 bp, Homo sapien
catgcagatgcgacacaggctgtcg

SEQ ID NO: 2375424 - DNA, 25 bp, Homo sapien
catgtgcccacactccagtaggaca

SEQ ID NO: 2375425 - DNA, 25 bp, Homo sapien
taggacacagtcgatgacggcatcc

SEQ ID NO: 2375426 - DNA, 25 bp, Homo sapien
cgcttgccgcacttggtgcaggtaa

SEQ ID NO: 2375427 - DNA, 25 bp, Homo sapien
aggacttgaacacgtgcacggctcg

SEQ ID NO: 2375428 - DNA, 25 bp, Homo sapien
tcaggacttgaacacgtgcacggct

SEQ ID NO: 2375429 - DNA, 25 bp, Homo sapien
gtgcacggctcgcaccacatactgc

SEQ ID NO: 2375430 - DNA, 25 bp, Homo sapien
ttgaacacgtgcacggctcgcacca

SEQ ID NO: 2375431 - DNA, 25 bp, Homo sapien
gatgtgtgataaagcccagctgagc

SEQ ID NO: 2375432 - DNA, 25 bp, Homo sapien
ccacatggcgcaaacaggctgactt

SEQ ID NO: 2375433 - DNA, 25 bp, Homo sapien
taaggccctggcagtcgactagaga

SEQ ID NO: 2375434 - DNA, 25 bp, Homo sapien
taaaatcagctagcgggtagcactg

SEQ ID NO: 2375435 - DNA, 25 bp, Homo sapien
ctcttctgaagaggggtgctaggcc

SEQ ID NO: 2375436 - DNA, 25 bp, Homo sapien
tcacttgatttaggaactgaccaag

SEQ ID NO: 2375437 - DNA, 25 bp, Homo sapien
tgctaggccaggtcacttgatttag

SEQ ID NO: 2375438 - DNA, 25 bp, Homo sapien
aggaactgaccaagacaatgtaaac

SEQ ID NO: 2375439 - DNA, 25 bp, Homo sapien
gaaacaactgctctagtgaatctga

SEQ ID NO: 2375440 - DNA, 25 bp, Homo sapien
tgattgataagagcaatgtacgatg

SEQ ID NO: 2375441 - DNA, 25 bp, Homo sapien
gccacgtggagtggatccagcactt

SEQ ID NO: 2375442 - DNA, 25 bp, Homo sapien
gctggcgatgtcatattcacataca

SEQ ID NO: 2375443 - DNA, 25 bp, Homo sapien
cattccttgcaacaccgaggttttg

SEQ ID NO: 2375444 - DNA, 25 bp, Homo sapien
tgtgcccagatctaacaaagtaggc

SEQ ID NO: 2375445 - DNA, 25 bp, Homo sapien
tgggtgttgacataaagtggaccac

SEQ ID NO: 2375446 - DNA, 25 bp, Homo sapien
cctttgcactcaggaggttctgctc

SEQ ID NO: 2375447 - DNA, 25 bp, Homo sapien
gagaagctgttcaaccacccgtttg

SEQ ID NO: 2375448 - DNA, 25 bp, Homo sapien
cagggactggaatatgtagagctct

SEQ ID NO: 2375449 - DNA, 25 bp, Homo sapien
ttctggaccatttctaaggcggcct

SEQ ID NO: 2375450 - DNA, 25 bp, Homo sapien
tgcaagcaagtcaccaaggaaggct

SEQ ID NO: 2375451 - DNA, 25 bp, Homo sapien
tgtgaattgctccaaagcactgcgg

SEQ ID NO: 2375452 - DNA, 25 bp, Homo sapien
gcactgcggcctgcaaaagcaaaaa

SEQ ID NO: 2375453 - DNA, 25 bp, Homo sapien
tgcccctctgggaatttatctgaag

SEQ ID NO: 2375454 - DNA, 25 bp, Homo sapien
tcagtcctggagttagggccaaaca

SEQ ID NO: 2375455 - DNA, 25 bp, Homo sapien
cctgatgcaagcaccagagatggga

SEQ ID NO: 2375456 - DNA, 25 bp, Homo sapien
gatgggaaataagtctgtgccacaa

SEQ ID NO: 2375457 - DNA, 25 bp, Homo sapien
tagatgacagttgacatgcctcaag

SEQ ID NO: 2375458 - DNA, 25 bp, Homo sapien
ccctctcatcggtgtaaccagttga

SEQ ID NO: 2375459 - DNA, 25 bp, Homo sapien
ttgttggcacccttcgcactgaggc

SEQ ID NO: 2375460 - DNA, 25 bp, Homo sapien
cacacctgactggaggccttagacg

SEQ ID NO: 2375461 - DNA, 25 bp, Homo sapien
gcttctctggaagtagccgtgcttc

SEQ ID NO: 2375462 - DNA, 25 bp, Homo sapien
cgtctttagactctccagctccggg

SEQ ID NO: 2375463 - DNA, 25 bp, Homo sapien
gttgttgaaccaactcttgatgagc

SEQ ID NO: 2375464 - DNA, 25 bp, Homo sapien
tcattaggatcctgcgttgctctgt

SEQ ID NO: 2375465 - DNA, 25 bp, Homo sapien
gatcctgcgttgctctgttgttgaa

SEQ ID NO: 2375466 - DNA, 25 bp, Homo sapien
tgcgttgctctgttgttgaaccaac

SEQ ID NO: 2375467 - DNA, 25 bp, Homo sapien
caacaagtcgccttggtgttgggga

SEQ ID NO: 2375468 - DNA, 25 bp, Homo sapien
gggatgctggttcgtaaatgaatgt

SEQ ID NO: 2375469 - DNA, 25 bp, Homo sapien
gctggttcgtaaatgaatgtctggg

SEQ ID NO: 2375470 - DNA, 25 bp, Homo sapien
gatgctggttcgtaaatgaatgtct

SEQ ID NO: 2375471 - DNA, 25 bp, Homo sapien
cctttaacttactgtgatgggtcca

SEQ ID NO: 2375472 - DNA, 25 bp, Homo sapien
cagaatacagtcatgttgtgaagcc

SEQ ID NO: 2375473 - DNA, 25 bp, Homo sapien
cattgatagtatgacatcgggcgga

SEQ ID NO: 2375474 - DNA, 25 bp, Homo sapien
gatgggtccagttccctactgtggt

SEQ ID NO: 2375475 - DNA, 25 bp, Homo sapien
ttcgcaaagttgtgccaggaccctc

SEQ ID NO: 2375476 - DNA, 25 bp, Homo sapien
aataatacttggaacaggacgcagg

SEQ ID NO: 2375477 - DNA, 25 bp, Homo sapien
tctgtgtgtaaaacaaagccctggg

SEQ ID NO: 2375478 - DNA, 25 bp, Homo sapien
ccctgggtgtgtttacggcgtgaat

SEQ ID NO: 2375479 - DNA, 25 bp, Homo sapien
gccacagtgcctgacttaccttctg

SEQ ID NO: 2375480 - DNA, 25 bp, Homo sapien
tctattgagcagtgctcttctgcat

SEQ ID NO: 2375481 - DNA, 25 bp, Homo sapien
tgagcagtgctcttctgcataattc

SEQ ID NO: 2375482 - DNA, 25 bp, Homo sapien
cacagtgcctgacttaccttctgtt

SEQ ID NO: 2375483 - DNA, 25 bp, Homo sapien
gcatgcaaaacccttcagacaaggg

SEQ ID NO: 2375484 - DNA, 25 bp, Homo sapien
tgtgacttcagtagccccaagaggt

SEQ ID NO: 2375485 - DNA, 25 bp, Homo sapien
gacaagttacatagtgtcctgagcc

SEQ ID NO: 2375486 - DNA, 25 bp, Homo sapien
gctgacctgaggttagtgcactcta

SEQ ID NO: 2375487 - DNA, 25 bp, Homo sapien
gaacagtgccgcctggtggtcactt

SEQ ID NO: 2375488 - DNA, 25 bp, Homo sapien
tcctttaattgcttcatgggctgtc

SEQ ID NO: 2375489 - DNA, 25 bp, Homo sapien
tgagatgaaggcaccgcagttaaga

SEQ ID NO: 2375490 - DNA, 25 bp, Homo sapien
ctttacctagctgtgggaactgcga

SEQ ID NO: 2375491 - DNA, 25 bp, Homo sapien
taccctcttcactgcgaatctgctt

SEQ ID NO: 2375492 - DNA, 25 bp, Homo sapien
cagaacctttttatcactgtggaca

SEQ ID NO: 2375493 - DNA, 25 bp, Homo sapien
gtcccatacctaagagctgccacgt

SEQ ID NO: 2375494 - DNA, 25 bp, Homo sapien
ccggccaacaattcacaatcgtgtg

SEQ ID NO: 2375495 - DNA, 25 bp, Homo sapien
tcctctggtagacggatgacctgca

SEQ ID NO: 2375496 - DNA, 25 bp, Homo sapien
tgaagatgacttggacctccgagga

SEQ ID NO: 2375497 - DNA, 25 bp, Homo sapien
tccccaggcatgtggctgaaacctt

SEQ ID NO: 2375498 - DNA, 25 bp, Homo sapien
gaggctccgagtctgtcaacaaata

SEQ ID NO: 2375499 - DNA, 25 bp, Homo sapien
gatggtgatcagtgataacagtgaa

SEQ ID NO: 2375500 - DNA, 25 bp, Homo sapien
aagtaatgccattggaggtaatggc

SEQ ID NO: 2375501 - DNA, 25 bp, Homo sapien
cttttgcgccaatctaatagatatg

SEQ ID NO: 2375502 - DNA, 25 bp, Homo sapien
tgtagataatatgatcgatggtgat

SEQ ID NO: 2375503 - DNA, 25 bp, Homo sapien
tgaaggaaggaacaactgcggtcac

SEQ ID NO: 2375504 - DNA, 25 bp, Homo sapien
ctgcggtcacggaagcggccgtaat

SEQ ID NO: 2375505 - DNA, 25 bp, Homo sapien
cagggttagaactcagctgctgccc

SEQ ID NO: 2375506 - DNA, 25 bp, Homo sapien
aattagacagcaggcaatgattgag

SEQ ID NO: 2375507 - DNA, 25 bp, Homo sapien
gcttgtcattctcgcgcaagggcca

SEQ ID NO: 2375508 - DNA, 25 bp, Homo sapien
gccatgctaaagtgctatgtgcggt

SEQ ID NO: 2375509 - DNA, 25 bp, Homo sapien
aagggccatgctaaagtgctatgtg

SEQ ID NO: 2375510 - DNA, 25 bp, Homo sapien
gctaaagtgctatgtgcggtttcaa

SEQ ID NO: 2375511 - DNA, 25 bp, Homo sapien
ccggccggccgcacaggacgaggag

SEQ ID NO: 2375512 - DNA, 25 bp, Homo sapien
ccgcggcgccgctggcaaaagcccc

SEQ ID NO: 2375513 - DNA, 25 bp, Homo sapien
ccgcgaggcacctccgccggaggca

SEQ ID NO: 2375514 - DNA, 25 bp, Homo sapien
ggtcgaagaagtgcccgctgcccca

SEQ ID NO: 2375515 - DNA, 25 bp, Homo sapien
ctggccgatccagtccgggtaggtg

SEQ ID NO: 2375516 - DNA, 25 bp, Homo sapien
cgcttgggggaagctcgggactgct

SEQ ID NO: 2375517 - DNA, 25 bp, Homo sapien
ggccgatccagtccgggtaggtgac

SEQ ID NO: 2375518 - DNA, 25 bp, Homo sapien
aagctcgggactgctgcggctcggg

SEQ ID NO: 2375519 - DNA, 25 bp, Homo sapien
caggacagcgcctgcatggagtgct

SEQ ID NO: 2375520 - DNA, 25 bp, Homo sapien
tcaagtagagcttgcgccaggacag

SEQ ID NO: 2375521 - DNA, 25 bp, Homo sapien
tgcatggagtgctcgttgaggctca

SEQ ID NO: 2375522 - DNA, 25 bp, Homo sapien
gaggctttaagcttggcgcggctca

SEQ ID NO: 2375523 - DNA, 25 bp, Homo sapien
cgcccagagagccccgtcggggctg

SEQ ID NO: 2375524 - DNA, 25 bp, Homo sapien
ccggcccgcccagagagccccgtcg

SEQ ID NO: 2375525 - DNA, 25 bp, Homo sapien
ttcccctcactctggcccgcccggc

SEQ ID NO: 2375526 - DNA, 25 bp, Homo sapien
tcccctcactctggcccgcccggcc

SEQ ID NO: 2375527 - DNA, 25 bp, Homo sapien
ccacactcgccagccctgaggtttt

SEQ ID NO: 2375528 - DNA, 25 bp, Homo sapien
cccacactcgccagccctgaggttt

SEQ ID NO: 2375529 - DNA, 25 bp, Homo sapien
agtgcagctgttgggacgcacacgg

SEQ ID NO: 2375530 - DNA, 25 bp, Homo sapien
cagctgttgggacgcacacggcccg

SEQ ID NO: 2375531 - DNA, 25 bp, Homo sapien
tgagggtatctcagcacatgtgggt

SEQ ID NO: 2375532 - DNA, 25 bp, Homo sapien
aagatctttggtggccgaaagccag

SEQ ID NO: 2375533 - DNA, 25 bp, Homo sapien
gccatcaggatttctaccgtgttta

SEQ ID NO: 2375534 - DNA, 25 bp, Homo sapien
agaattctgagtccatgcgggtgag

SEQ ID NO: 2375535 - DNA, 25 bp, Homo sapien
aaggagccagcttatcagatctggg

SEQ ID NO: 2375536 - DNA, 25 bp, Homo sapien
ggagccagcttatcagatctgggcc

SEQ ID NO: 2375537 - DNA, 25 bp, Homo sapien
agccagcttatcagatctgggccag

SEQ ID NO: 2375538 - DNA, 25 bp, Homo sapien
gcaaaggagccagcttatcagatct

SEQ ID NO: 2375539 - DNA, 25 bp, Homo sapien
ctgtggacccgaggtcaccaggggc

SEQ ID NO: 2375540 - DNA, 25 bp, Homo sapien
tccgggccagacacccgctgctcct

SEQ ID NO: 2375541 - DNA, 25 bp, Homo sapien
catgctccgggccagacacccgctg

SEQ ID NO: 2375542 - DNA, 25 bp, Homo sapien
caggggcatgctccgggccagacac

SEQ ID NO: 2375543 - DNA, 25 bp, Homo sapien
gagattgtgcacgttgctcaccgcc

SEQ ID NO: 2375544 - DNA, 25 bp, Homo sapien
tagtcgtggtcagcgtccagctgca

SEQ ID NO: 2375545 - DNA, 25 bp, Homo sapien
tgatcatgagcgcaaacaggtgcac

SEQ ID NO: 2375546 - DNA, 25 bp, Homo sapien
ctaggaagagcagcgtgccgatgac

SEQ ID NO: 2375547 - DNA, 25 bp, Homo sapien
cgttggctgctgcgccactggcggg

SEQ ID NO: 2375548 - DNA, 25 bp, Homo sapien
ctgacgttggctgctgcgccactgg

SEQ ID NO: 2375549 - DNA, 25 bp, Homo sapien
tgacgttggctgctgcgccactggc

SEQ ID NO: 2375550 - DNA, 25 bp, Homo sapien
acgttggctgctgcgccactggcgg

SEQ ID NO: 2375551 - DNA, 25 bp, Homo sapien
tcttatggctaaccagtgagcggta

SEQ ID NO: 2375552 - DNA, 25 bp, Homo sapien
aagtggacggcgaagacgataaaga

SEQ ID NO: 2375553 - DNA, 25 bp, Homo sapien
acgataaagatcaggccgaagggca

SEQ ID NO: 2375554 - DNA, 25 bp, Homo sapien
ccagctggtcctgtaagcgggcaaa

SEQ ID NO: 2375555 - DNA, 25 bp, Homo sapien
tagcccaggcccaacaaatacaaga

SEQ ID NO: 2375556 - DNA, 25 bp, Homo sapien
tcctagaggctcacctaaccagggt

SEQ ID NO: 2375557 - DNA, 25 bp, Homo sapien
tacacactcaatgctggacgggagg

SEQ ID NO: 2375558 - DNA, 25 bp, Homo sapien
agggcgtaaggccaaagcactggaa

SEQ ID NO: 2375559 - DNA, 25 bp, Homo sapien
agtgattttacagatcgcgccactg

SEQ ID NO: 2375560 - DNA, 25 bp, Homo sapien
aaatatcacgaccaaagctcacagg

SEQ ID NO: 2375561 - DNA, 25 bp, Homo sapien
caacggtccagtatgtgctaagtca

SEQ ID NO: 2375562 - DNA, 25 bp, Homo sapien
catgtgttctagtcctgtgggctgt

SEQ ID NO: 2375563 - DNA, 25 bp, Homo sapien
ggaatgtcacccaaactctgttctg

SEQ ID NO: 2375564 - DNA, 25 bp, Homo sapien
gcgtgaatctcggagctgtgtgttc

SEQ ID NO: 2375565 - DNA, 25 bp, Homo sapien
gcattaacagtacttaccacctggg

SEQ ID NO: 2375566 - DNA, 25 bp, Homo sapien
cagatgttcttgcataatgggcagg

SEQ ID NO: 2375567 - DNA, 25 bp, Homo sapien
tatcattctagttcaatttatgttc

SEQ ID NO: 2375568 - DNA, 25 bp, Homo sapien
aagcaaccactattgtgaacttggg

SEQ ID NO: 2375569 - DNA, 25 bp, Homo sapien
gaagcaaccactattgtgaacttgg

SEQ ID NO: 2375570 - DNA, 25 bp, Homo sapien
tgaacttggggtatatcattctagt

SEQ ID NO: 2375571 - DNA, 25 bp, Homo sapien
aacgctccagctgcccggacatgat

SEQ ID NO: 2375572 - DNA, 25 bp, Homo sapien
tgcgatggtgcaaggcggcggtgcc

SEQ ID NO: 2375573 - DNA, 25 bp, Homo sapien
accgccctcggaggcaccagctgtt

SEQ ID NO: 2375574 - DNA, 25 bp, Homo sapien
agctcgtgccattcgcgctcgcaac

SEQ ID NO: 2375575 - DNA, 25 bp, Homo sapien
taagtaaggcatagtcacatgaccc

SEQ ID NO: 2375576 - DNA, 25 bp, Homo sapien
gggactgcctgagaataatgctgac

SEQ ID NO: 2375577 - DNA, 25 bp, Homo sapien
ctcgtttcatgtagtgtggtggcac

SEQ ID NO: 2375578 - DNA, 25 bp, Homo sapien
caggagcagatatgtgaccgtgacc

SEQ ID NO: 2375579 - DNA, 25 bp, Homo sapien
gattataggcatgaatgagcccctg

SEQ ID NO: 2375580 - DNA, 25 bp, Homo sapien
acctggcctgaagcattattattat

SEQ ID NO: 2375581 - DNA, 25 bp, Homo sapien
tgcacctggcctgaagcattattat

SEQ ID NO: 2375582 - DNA, 25 bp, Homo sapien
gaagtgcaatggcaagacctcagtt

SEQ ID NO: 2375583 - DNA, 25 bp, Homo sapien
tctgccaggtggacgagatacaatc

SEQ ID NO: 2375584 - DNA, 25 bp, Homo sapien
aaagcggagccctaatgattgcacc

SEQ ID NO: 2375585 - DNA, 25 bp, Homo sapien
tgtggcctcgaatggaaccagctgg

SEQ ID NO: 2375586 - DNA, 25 bp, Homo sapien
cagcaggtaattcagggatgggcat

SEQ ID NO: 2375587 - DNA, 25 bp, Homo sapien
ggagtgcagcggcccaatcctggct

SEQ ID NO: 2375588 - DNA, 25 bp, Homo sapien
cttcctcagcctcttgagtagctgg

SEQ ID NO: 2375589 - DNA, 25 bp, Homo sapien
cgcttcctgggttccagggattctc

SEQ ID NO: 2375590 - DNA, 25 bp, Homo sapien
ctggagtgcagcggcccaatcctgg

SEQ ID NO: 2375591 - DNA, 25 bp, Homo sapien
gccacgccgccctctggactgtcat

SEQ ID NO: 2375592 - DNA, 25 bp, Homo sapien
ggccacgccgccctctggactgtca

SEQ ID NO: 2375593 - DNA, 25 bp, Homo sapien
cctgggccacgccgccctctggact

SEQ ID NO: 2375594 - DNA, 25 bp, Homo sapien
tgggccacgccgccctctggactgt

SEQ ID NO: 2375595 - DNA, 25 bp, Homo sapien
gcctctgttctctctccttaaatct

SEQ ID NO: 2375596 - DNA, 25 bp, Homo sapien
tctgttctctctccttaaatctagg

SEQ ID NO: 2375597 - DNA, 25 bp, Homo sapien
gagaggcagtgcctctgttctctct

SEQ ID NO: 2375598 - DNA, 25 bp, Homo sapien
tgcctctgttctctctccttaaatc

SEQ ID NO: 2375599 - DNA, 25 bp, Homo sapien
ccagaaatggaagtcacatgatgca

SEQ ID NO: 2375600 - DNA, 25 bp, Homo sapien
ctgagattaagggtgcatgcaacca

SEQ ID NO: 2375601 - DNA, 25 bp, Homo sapien
tgagtcccaacgcaacctcatggga

SEQ ID NO: 2375602 - DNA, 25 bp, Homo sapien
gctgggaaatgcaacaaagggctca

SEQ ID NO: 2375603 - DNA, 25 bp, Homo sapien
tctgcttgtagatcctgtgcgtctc

SEQ ID NO: 2375604 - DNA, 25 bp, Homo sapien
tgcttactgatggaactgctacaca

SEQ ID NO: 2375605 - DNA, 25 bp, Homo sapien
gagtgtaagcttcaagtccttgagg

SEQ ID NO: 2375606 - DNA, 25 bp, Homo sapien
tacacagcgtctgcagcgcagccag

SEQ ID NO: 2375607 - DNA, 25 bp, Homo sapien
ctcctcccgactggcatggcgtttg

SEQ ID NO: 2375608 - DNA, 25 bp, Homo sapien
ctccttgatgttcgctgccatctgc

SEQ ID NO: 2375609 - DNA, 25 bp, Homo sapien
ccgcctcctcccgactggcatggcg

SEQ ID NO: 2375610 - DNA, 25 bp, Homo sapien
ctcccgactggcatggcgtttgcac

SEQ ID NO: 2375611 - DNA, 25 bp, Homo sapien
ggcctccatgtcgaagaagacgtcc

SEQ ID NO: 2375612 - DNA, 25 bp, Homo sapien
cttcttgggcaggtaggcctccatg

SEQ ID NO: 2375613 - DNA, 25 bp, Homo sapien
gggcaggtaggcctccatgtcgaag

SEQ ID NO: 2375614 - DNA, 25 bp, Homo sapien
gtaggcctccatgtcgaagaagacg

SEQ ID NO: 2375615 - DNA, 25 bp, Homo sapien
gagggtcacgttcacattgccgagg

SEQ ID NO: 2375616 - DNA, 25 bp, Homo sapien
ttgccgaggaccaggttcaagtaga

SEQ ID NO: 2375617 - DNA, 25 bp, Homo sapien
tcacgttcacattgccgaggaccag

SEQ ID NO: 2375618 - DNA, 25 bp, Homo sapien
tcacattgccgaggaccaggttcaa

SEQ ID NO: 2375619 - DNA, 25 bp, Homo sapien
tgtagtgaaggacaaatcgacatgc

SEQ ID NO: 2375620 - DNA, 25 bp, Homo sapien
tgaaggacaaatcgacatgccacgg

SEQ ID NO: 2375621 - DNA, 25 bp, Homo sapien
tagtgaaggacaaatcgacatgcca

SEQ ID NO: 2375622 - DNA, 25 bp, Homo sapien
aggacaaatcgacatgccacggcac

SEQ ID NO: 2375623 - DNA, 25 bp, Homo sapien
cgtactggtgacagtacttcatttc

SEQ ID NO: 2375624 - DNA, 25 bp, Homo sapien
gctgaatgatatgccactgtacaga

SEQ ID NO: 2375625 - DNA, 25 bp, Homo sapien
ctgcagcctggctccgtactggtga

SEQ ID NO: 2375626 - DNA, 25 bp, Homo sapien
tacagatagaccacagtgaactcct

SEQ ID NO: 2375627 - DNA, 25 bp, Homo sapien
ccaggctgggagaacattcttatta

SEQ ID NO: 2375628 - DNA, 25 bp, Homo sapien
tgtacccagtagcagtcatgccctc

SEQ ID NO: 2375629 - DNA, 25 bp, Homo sapien
gtacaaccattacctaactccagaa

SEQ ID NO: 2375630 - DNA, 25 bp, Homo sapien
aaccttgtacccagtagcagtcatg

SEQ ID NO: 2375631 - DNA, 25 bp, Homo sapien
ccctgtgcaagggactgtggctgca

SEQ ID NO: 2375632 - DNA, 25 bp, Homo sapien
ggccaaatgcccaaaccgtacttga

SEQ ID NO: 2375633 - DNA, 25 bp, Homo sapien
tgtgcagcctttgccctcgtggaaa

SEQ ID NO: 2375634 - DNA, 25 bp, Homo sapien
cctttgtttgggcattcaagtggcc

SEQ ID NO: 2375635 - DNA, 25 bp, Homo sapien
gagacagaggcgagtgaaacacagc

SEQ ID NO: 2375636 - DNA, 25 bp, Homo sapien
ccttacactagggaaggaggccgtg

SEQ ID NO: 2375637 - DNA, 25 bp, Homo sapien
cttccaaaattcacgtccactggga

SEQ ID NO: 2375638 - DNA, 25 bp, Homo sapien
caatacgggcttgctggcaattccc

SEQ ID NO: 2375639 - DNA, 25 bp, Homo sapien
cattttgcatagatgatcgctctgg

SEQ ID NO: 2375640 - DNA, 25 bp, Homo sapien
gatcattattcagcactaggcagag

SEQ ID NO: 2375641 - DNA, 25 bp, Homo sapien
taaggtaacttattcacgggctctg

SEQ ID NO: 2375642 - DNA, 25 bp, Homo sapien
gattcttggacactacagaactggt

SEQ ID NO: 2375643 - DNA, 25 bp, Homo sapien
gctgtggagcatgctgtacctggtc

SEQ ID NO: 2375644 - DNA, 25 bp, Homo sapien
gctgggccgatccagctttgaaggc

SEQ ID NO: 2375645 - DNA, 25 bp, Homo sapien
ctgtacctggtcagcatggagggcc

SEQ ID NO: 2375646 - DNA, 25 bp, Homo sapien
gatccagctttgaaggcgacagacc

SEQ ID NO: 2375647 - DNA, 25 bp, Homo sapien
cagcgtggagctaggccatcctcct

SEQ ID NO: 2375648 - DNA, 25 bp, Homo sapien
acagcgtggagctaggccatcctcc

SEQ ID NO: 2375649 - DNA, 25 bp, Homo sapien
cgtggagctaggccatcctcctcca

SEQ ID NO: 2375650 - DNA, 25 bp, Homo sapien
catggtgaccacagcgcggggctgg

SEQ ID NO: 2375651 - DNA, 25 bp, Homo sapien
ctaggccgtcctcctccatggtgac

SEQ ID NO: 2375652 - DNA, 25 bp, Homo sapien
gggactatgggtgcacaccatgatg

SEQ ID NO: 2375653 - DNA, 25 bp, Homo sapien
attacaggggtgagttatcgcaccc

SEQ ID NO: 2375654 - DNA, 25 bp, Homo sapien
actatgggtgcacaccatgatgccc

SEQ ID NO: 2375655 - DNA, 25 bp, Homo sapien
gattacaggggtgagttatcgcacc

SEQ ID NO: 2375656 - DNA, 25 bp, Homo sapien
tgcaaatgcctctgaacctcctcat

SEQ ID NO: 2375657 - DNA, 25 bp, Homo sapien
ccacagcacgcgctgcctctggaag

SEQ ID NO: 2375658 - DNA, 25 bp, Homo sapien
ttggtctcttgagcgtcttccccgg

SEQ ID NO: 2375659 - DNA, 25 bp, Homo sapien
tctggaagcccttatgacaccaggg

SEQ ID NO: 2375660 - DNA, 25 bp, Homo sapien
gaagttgaagacttcgtcagtcacc

SEQ ID NO: 2375661 - DNA, 25 bp, Homo sapien
ggaagttgaagacttcgtcagtcac

SEQ ID NO: 2375662 - DNA, 25 bp, Homo sapien
ttaactcctcttgtgctccccacaa

SEQ ID NO: 2375663 - DNA, 25 bp, Homo sapien
tcctcttgtgctccccacaaagcca

SEQ ID NO: 2375664 - DNA, 25 bp, Homo sapien
ttgtgctccccacaaagccaggtgc

SEQ ID NO: 2375665 - DNA, 25 bp, Homo sapien
ctcttgtgctccccacaaagccagg

SEQ ID NO: 2375666 - DNA, 25 bp, Homo sapien
ggaatgcagcctgagggtgtcggcc

SEQ ID NO: 2375667 - DNA, 25 bp, Homo sapien
aatgcagcctgagggtgtcggcccc

SEQ ID NO: 2375668 - DNA, 25 bp, Homo sapien
ctgacgcccctcgtgacatttccct

SEQ ID NO: 2375669 - DNA, 25 bp, Homo sapien
tgtcggcccccatctgacgcccctc

SEQ ID NO: 2375670 - DNA, 25 bp, Homo sapien
aggctctacgttcagtgtagggcag

SEQ ID NO: 2375671 - DNA, 25 bp, Homo sapien
acagcatgtcccaatatctggaaat

SEQ ID NO: 2375672 - DNA, 25 bp, Homo sapien
gaaattgcaagggtagacttctccc

SEQ ID NO: 2375673 - DNA, 25 bp, Homo sapien
tcccttcaggacacattaacatggc

SEQ ID NO: 2375674 - DNA, 25 bp, Homo sapien
tgcatcaatggccagacgtagggac

SEQ ID NO: 2375675 - DNA, 25 bp, Homo sapien
tgccaccagcgcagaggtgacagga

SEQ ID NO: 2375676 - DNA, 25 bp, Homo sapien
cagcagctaatctggatgccaccag

SEQ ID NO: 2375677 - DNA, 25 bp, Homo sapien
taacagcaccaggtaaacaacaggc

SEQ ID NO: 2375678 - DNA, 25 bp, Homo sapien
ccttgacggcccatgcaacagttct

SEQ ID NO: 2375679 - DNA, 25 bp, Homo sapien
tggagacgtagtggtgagacaccca

SEQ ID NO: 2375680 - DNA, 25 bp, Homo sapien
tgtggagacgtagtggtgagacacc

SEQ ID NO: 2375681 - DNA, 25 bp, Homo sapien
gacgtagtggtgagacacccaccag

SEQ ID NO: 2375682 - DNA, 25 bp, Homo sapien
gaatgtggagacgtagtggtgagac

SEQ ID NO: 2375683 - DNA, 25 bp, Homo sapien
tggaggggcccagcgaggggctact

SEQ ID NO: 2375684 - DNA, 25 bp, Homo sapien
gggaggctggaggggcccagcgagg

SEQ ID NO: 2375685 - DNA, 25 bp, Homo sapien
ggctggaggggcccagcgaggggct

SEQ ID NO: 2375686 - DNA, 25 bp, Homo sapien
gaggggcccagcgaggggctactca

SEQ ID NO: 2375687 - DNA, 25 bp, Homo sapien
gggctgggtggggcccgcgcagccc

SEQ ID NO: 2375688 - DNA, 25 bp, Homo sapien
gtggggcccgcgcagcccggcgcag

SEQ ID NO: 2375689 - DNA, 25 bp, Homo sapien
cgcagcccggcgcagctgcaggctc

SEQ ID NO: 2375690 - DNA, 25 bp, Homo sapien
cagcccggcgcagctgcaggctcat

SEQ ID NO: 2375691 - DNA, 25 bp, Homo sapien
aaatgctaagaactggttgcgaaac

SEQ ID NO: 2375692 - DNA, 25 bp, Homo sapien
tggaaaatgctaagaactggttgcg

SEQ ID NO: 2375693 - DNA, 25 bp, Homo sapien
gaaaatgctaagaactggttgcgaa

SEQ ID NO: 2375694 - DNA, 25 bp, Homo sapien
atgctaagaactggttgcgaaactt

SEQ ID NO: 2375695 - DNA, 25 bp, Homo sapien
ccccagggcccgcagccggtagagg

SEQ ID NO: 2375696 - DNA, 25 bp, Homo sapien
cgcagccggtagaggcagcccctct

SEQ ID NO: 2375697 - DNA, 25 bp, Homo sapien
taatattgcaggaactggacgcagc

SEQ ID NO: 2375698 - DNA, 25 bp, Homo sapien
cactgtgagatccaggtggttcctc

SEQ ID NO: 2375699 - DNA, 25 bp, Homo sapien
aaaggtgaggccccgccacatccag

SEQ ID NO: 2375700 - DNA, 25 bp, Homo sapien
ggccccgccacatccaggactggaa

SEQ ID NO: 2375701 - DNA, 25 bp, Homo sapien
cccgccacatccaggactggaaccc

SEQ ID NO: 2375702 - DNA, 25 bp, Homo sapien
aggagaaaggtgaggccccgccaca

SEQ ID NO: 2375703 - DNA, 25 bp, Homo sapien
cattctctgcattcctcgtggctgg

SEQ ID NO: 2375704 - DNA, 25 bp, Homo sapien
ctggagagctcaaacagcgtgacgg

SEQ ID NO: 2375705 - DNA, 25 bp, Homo sapien
caaacagcgtgacggcattgtagag

SEQ ID NO: 2375706 - DNA, 25 bp, Homo sapien
tgacggcattgtagagctgccagaa

SEQ ID NO: 2375707 - DNA, 25 bp, Homo sapien
gggggagtccagagaggagggcgag

SEQ ID NO: 2375708 - DNA, 25 bp, Homo sapien
ctgggggagtccagagaggagggcg

SEQ ID NO: 2375709 - DNA, 25 bp, Homo sapien
tgggggagtccagagaggagggcga

SEQ ID NO: 2375710 - DNA, 25 bp, Homo sapien
ggggagtccagagaggagggcgagg

SEQ ID NO: 2375711 - DNA, 25 bp, Homo sapien
cagacgcggtgggtctctgagaact

SEQ ID NO: 2375712 - DNA, 25 bp, Homo sapien
tcataaataggtgggcggacactgt

SEQ ID NO: 2375713 - DNA, 25 bp, Homo sapien
gaggaaggtgaacgccagtacgaac

SEQ ID NO: 2375714 - DNA, 25 bp, Homo sapien
ggagcttggcatgcacgactttgag

SEQ ID NO: 2375715 - DNA, 25 bp, Homo sapien
cctagggatttgtagggccacagtt

SEQ ID NO: 2375716 - DNA, 25 bp, Homo sapien
gcctcccgtcgaatgcagaatctca

SEQ ID NO: 2375717 - DNA, 25 bp, Homo sapien
gagggctaaacaaggcatgcctgtg

SEQ ID NO: 2375718 - DNA, 25 bp, Homo sapien
aagggtcttggtcccactctccaag

SEQ ID NO: 2375719 - DNA, 25 bp, Homo sapien
tgtgccacgggaatgttgccaggtc

SEQ ID NO: 2375720 - DNA, 25 bp, Homo sapien
aactggagagtaggcgtcctgtgcc

SEQ ID NO: 2375721 - DNA, 25 bp, Homo sapien
cctaatctagggcaaacgcaggtgc

SEQ ID NO: 2375722 - DNA, 25 bp, Homo sapien
ggtgaagagtagctgccacaaacca

SEQ ID NO: 2375723 - DNA, 25 bp, Homo sapien
ggtccaacaactacagcctgtgggc

SEQ ID NO: 2375724 - DNA, 25 bp, Homo sapien
caaggagttcttgttctcgaagaac

SEQ ID NO: 2375725 - DNA, 25 bp, Homo sapien
agttcttgttctcgaagaaccccag

SEQ ID NO: 2375726 - DNA, 25 bp, Homo sapien
caggcctcatgatggtctacggtag

SEQ ID NO: 2375727 - DNA, 25 bp, Homo sapien
tcagctaaacctgagcttccaagaa

SEQ ID NO: 2375728 - DNA, 25 bp, Homo sapien
ctaagatgggataatggcttcaggc

SEQ ID NO: 2375729 - DNA, 25 bp, Homo sapien
tggcttcaggcaactcctagccttc

SEQ ID NO: 2375730 - DNA, 25 bp, Homo sapien
cagtgctggggcgtcagctaaacct

SEQ ID NO: 2375731 - DNA, 25 bp, Homo sapien
cagaagtcgcaagctgcttggctct

SEQ ID NO: 2375732 - DNA, 25 bp, Homo sapien
tctgttgtcgggactcgcaagtgcc

SEQ ID NO: 2375733 - DNA, 25 bp, Homo sapien
tagtgggtaaacgtagacctggcac

SEQ ID NO: 2375734 - DNA, 25 bp, Homo sapien
tgtggtaggacaggactggcccact

SEQ ID NO: 2375735 - DNA, 25 bp, Homo sapien
ccagtgtggtcatgagcaagttttc

SEQ ID NO: 2375736 - DNA, 25 bp, Homo sapien
gaatgttccgccaagtttcgggaga

SEQ ID NO: 2375737 - DNA, 25 bp, Homo sapien
cgggagaatgtggaggacgtcttcc

SEQ ID NO: 2375738 - DNA, 25 bp, Homo sapien
ctggaatgttccgccaagtttcggg

SEQ ID NO: 2375739 - DNA, 25 bp, Homo sapien
ggccgccaaggtggctctcagcgct

SEQ ID NO: 2375740 - DNA, 25 bp, Homo sapien
tttgcctaaatggtactttcagaga

SEQ ID NO: 2375741 - DNA, 25 bp, Homo sapien
agacagacaggcccaaaccaaggcc

SEQ ID NO: 2375742 - DNA, 25 bp, Homo sapien
cctgcgaacagatccgagctgctct

SEQ ID NO: 2375743 - DNA, 25 bp, Homo sapien
gacagggcttcttccaacctgcggg

SEQ ID NO: 2375744 - DNA, 25 bp, Homo sapien
caattgaccgtgcaactctttgggt

SEQ ID NO: 2375745 - DNA, 25 bp, Homo sapien
ccaatccttaggactcggaggcagg

SEQ ID NO: 2375746 - DNA, 25 bp, Homo sapien
cattaataagggcaaatccggccgg

SEQ ID NO: 2375747 - DNA, 25 bp, Homo sapien
caaagtctgtgctatgagccgccgt

SEQ ID NO: 2375748 - DNA, 25 bp, Homo sapien
tttctgccgcgggatccccatggtg

SEQ ID NO: 2375749 - DNA, 25 bp, Homo sapien
tccctgaggtcacgcatttctgccg

SEQ ID NO: 2375750 - DNA, 25 bp, Homo sapien
tatgacgtcatgaatcccaccagct

SEQ ID NO: 2375751 - DNA, 25 bp, Homo sapien
tacgacaacgtcctcatcaaggtga

SEQ ID NO: 2375752 - DNA, 25 bp, Homo sapien
gaataggcagggaactcagctgact

SEQ ID NO: 2375753 - DNA, 25 bp, Homo sapien
gtatttggattcagctcgtctcggg

SEQ ID NO: 2375754 - DNA, 25 bp, Homo sapien
catcagaacctgagaagctggaggc

SEQ ID NO: 2375755 - DNA, 25 bp, Homo sapien
gcaagaagactatgaccggctgcgg

SEQ ID NO: 2375756 - DNA, 25 bp, Homo sapien
acatggcctggtggtactccgtgga

SEQ ID NO: 2375757 - DNA, 25 bp, Homo sapien
gattagaatgcagagtccatgcggt

SEQ ID NO: 2375758 - DNA, 25 bp, Homo sapien
taagtgcagtgtagaaccctgggct

SEQ ID NO: 2375759 - DNA, 25 bp, Homo sapien
gatgtctacagttaccgtgccctga

SEQ ID NO: 2375760 - DNA, 25 bp, Homo sapien
caggtcaggaagtggaatgcccttg

SEQ ID NO: 2375761 - DNA, 25 bp, Homo sapien
tattgagctcgcctgtgttcccagg

SEQ ID NO: 2375762 - DNA, 25 bp, Homo sapien
ctgaggcccagaggttaattcccgg

SEQ ID NO: 2375763 - DNA, 25 bp, Homo sapien
gaactggtgcttttagaatggcctg

SEQ ID NO: 2375764 - DNA, 25 bp, Homo sapien
tgctctgggccttagagacccctgt

SEQ ID NO: 2375765 - DNA, 25 bp, Homo sapien
acccagaaggtggtctcaactccca

SEQ ID NO: 2375766 - DNA, 25 bp, Homo sapien
cctgtgtgtcctcctgcagatttga

SEQ ID NO: 2375767 - DNA, 25 bp, Homo sapien
tgaccaacgccgcagctggagctgg

SEQ ID NO: 2375768 - DNA, 25 bp, Homo sapien
gggctcgcagggctcagaagggaag

SEQ ID NO: 2375769 - DNA, 25 bp, Homo sapien
ggctcgcagggctcagaagggaagg

SEQ ID NO: 2375770 - DNA, 25 bp, Homo sapien
gagggagggcagatcgggtgacggg

SEQ ID NO: 2375771 - DNA, 25 bp, Homo sapien
cagatcgggtgacggggctcgcagg

SEQ ID NO: 2375772 - DNA, 25 bp, Homo sapien
aggaccaaacgctggtcctgggcag

SEQ ID NO: 2375773 - DNA, 25 bp, Homo sapien
caggaccaaacgctggtcctgggca

SEQ ID NO: 2375774 - DNA, 25 bp, Homo sapien
gaaggcccgtgtggctgtctccctc

SEQ ID NO: 2375775 - DNA, 25 bp, Homo sapien
cacaggggccctcgtggaaggcccg

SEQ ID NO: 2375776 - DNA, 25 bp, Homo sapien
ttggccggctcttcactcctggagg

SEQ ID NO: 2375777 - DNA, 25 bp, Homo sapien
catcggtgttcgagaagtacacggc

SEQ ID NO: 2375778 - DNA, 25 bp, Homo sapien
gaggccaagccctatacgtaagtgg

SEQ ID NO: 2375779 - DNA, 25 bp, Homo sapien
agtacacggccagcgtgaccgttgg

SEQ ID NO: 2375780 - DNA, 25 bp, Homo sapien
tgacgacgtcttgcgtggttcacgc

SEQ ID NO: 2375781 - DNA, 25 bp, Homo sapien
ccaggagagggaccaagttgacttc

SEQ ID NO: 2375782 - DNA, 25 bp, Homo sapien
tatctgaggaaactacgaaggccac

SEQ ID NO: 2375783 - DNA, 25 bp, Homo sapien
gggttacgggtaattcagccagcag

SEQ ID NO: 2375784 - DNA, 25 bp, Homo sapien
cgcgcctggccggacaataatgttt

SEQ ID NO: 2375785 - DNA, 25 bp, Homo sapien
tttgtgacgggaacttttagcactc

SEQ ID NO: 2375786 - DNA, 25 bp, Homo sapien
gcactcaaggagtggccttgtctct

SEQ ID NO: 2375787 - DNA, 25 bp, Homo sapien
tttgagctgttgctgagtctggctt

SEQ ID NO: 2375788 - DNA, 25 bp, Homo sapien
ggccaacgcggttctcctctggagt

SEQ ID NO: 2375789 - DNA, 25 bp, Homo sapien
tctggagtggttgagtccagctgca

SEQ ID NO: 2375790 - DNA, 25 bp, Homo sapien
ggcaaaggggaatctggcgctccct

SEQ ID NO: 2375791 - DNA, 25 bp, Homo sapien
gaaggcggccaacgcggttctcctc

SEQ ID NO: 2375792 - DNA, 25 bp, Homo sapien
gagtgtctccctgtaaagtgataag

SEQ ID NO: 2375793 - DNA, 25 bp, Homo sapien
cctgttcggattaacaaggagatct

SEQ ID NO: 2375794 - DNA, 25 bp, Homo sapien
ctgtgagggctacaccgagctctgg

SEQ ID NO: 2375795 - DNA, 25 bp, Homo sapien
gctaagttaagggagatagttcgcc

SEQ ID NO: 2375796 - DNA, 25 bp, Homo sapien
gctctgggcgcccaggtccgacctc

SEQ ID NO: 2375797 - DNA, 25 bp, Homo sapien
cagtcgccctctgagagccgagtca

SEQ ID NO: 2375798 - DNA, 25 bp, Homo sapien
tcccggcgaagcctcagatctccgg

SEQ ID NO: 2375799 - DNA, 25 bp, Homo sapien
tttcgtctttgtcctgcgcgggcgc

SEQ ID NO: 2375800 - DNA, 25 bp, Homo sapien
cgcgcctgcgctggcaacgcgaagg

SEQ ID NO: 2375801 - DNA, 25 bp, Homo sapien
ctggcaacgcgaaggaggacaaaag

SEQ ID NO: 2375802 - DNA, 25 bp, Homo sapien
cctgcgctggcaacgcgaaggagga

SEQ ID NO: 2375803 - DNA, 25 bp, Homo sapien
cgctggcaacgcgaaggaggacaaa

SEQ ID NO: 2375804 - DNA, 25 bp, Homo sapien
taggactagcgaaatggcagcaaca

SEQ ID NO: 2375805 - DNA, 25 bp, Homo sapien
tccattctgtcctgacgcagtacag

SEQ ID NO: 2375806 - DNA, 25 bp, Homo sapien
gccagttaagatgcttgagacgatc

SEQ ID NO: 2375807 - DNA, 25 bp, Homo sapien
gagactaaagccgtcacaggaaact

SEQ ID NO: 2375808 - DNA, 25 bp, Homo sapien
tgtgagttcaactccgaggctcccg

SEQ ID NO: 2375809 - DNA, 25 bp, Homo sapien
cagcgcgcggcttccattttgtgag

SEQ ID NO: 2375810 - DNA, 25 bp, Homo sapien
tcagcgcgcggcttctatagggctt

SEQ ID NO: 2375811 - DNA, 25 bp, Homo sapien
gggagcgccctgtaattgtcctgaa

SEQ ID NO: 2375812 - DNA, 25 bp, Homo sapien
atcgaggtatctgcgctccggcttc

SEQ ID NO: 2375813 - DNA, 25 bp, Homo sapien
ccggcgtcgactcagaggagttgca

SEQ ID NO: 2375814 - DNA, 25 bp, Homo sapien
ggttcaccacgttagcattcgcatt

SEQ ID NO: 2375815 - DNA, 25 bp, Homo sapien
ttagcattcgcattcctgggaggat

SEQ ID NO: 2375816 - DNA, 25 bp, Homo sapien
cctccctgcgccgccagccagtaca

SEQ ID NO: 2375817 - DNA, 25 bp, Homo sapien
ggcctccctgcgccgccagccagta

SEQ ID NO: 2375818 - DNA, 25 bp, Homo sapien
gccggcctccctgcgccgccagcca

SEQ ID NO: 2375819 - DNA, 25 bp, Homo sapien
ctccctgcgccgccagccagtacat

SEQ ID NO: 2375820 - DNA, 25 bp, Homo sapien
gcgagagaataacccttccgggaga

SEQ ID NO: 2375821 - DNA, 25 bp, Homo sapien
aaaggagctgtctcgctggctcccc

SEQ ID NO: 2375822 - DNA, 25 bp, Homo sapien
caagaatggagcgagagaataaccc

SEQ ID NO: 2375823 - DNA, 25 bp, Homo sapien
cagcgcgccccgaaaggagctgtct

SEQ ID NO: 2375824 - DNA, 25 bp, Homo sapien
cgtagcggtacagtttatgatgccc

SEQ ID NO: 2375825 - DNA, 25 bp, Homo sapien
catcaacttgtaacttctccaatgg

SEQ ID NO: 2375826 - DNA, 25 bp, Homo sapien
ccctttttcagagccgggtcaatca

SEQ ID NO: 2375827 - DNA, 25 bp, Homo sapien
aggctgaaatgctgcccatcgtagc

SEQ ID NO: 2375828 - DNA, 25 bp, Homo sapien
tgtttttggtccagatcccgacgac

SEQ ID NO: 2375829 - DNA, 25 bp, Homo sapien
cttgaatttgggcaccgacagctcc

SEQ ID NO: 2375830 - DNA, 25 bp, Homo sapien
tcgacaatttccaccgggcggttgc

SEQ ID NO: 2375831 - DNA, 25 bp, Homo sapien
tccttgtttttggtccagatcccga

SEQ ID NO: 2375832 - DNA, 25 bp, Homo sapien
tgtgcaagtgctgaacggcatcctt

SEQ ID NO: 2375833 - DNA, 25 bp, Homo sapien
caaatgtcacctgcttcggaggcac

SEQ ID NO: 2375834 - DNA, 25 bp, Homo sapien
tacttcttgcacatgtccctcagga

SEQ ID NO: 2375835 - DNA, 25 bp, Homo sapien
tgcccatgacggaagtgctgtgcaa

SEQ ID NO: 2375836 - DNA, 25 bp, Homo sapien
tctcattcacgattggagagacagc

SEQ ID NO: 2375837 - DNA, 25 bp, Homo sapien
tcatagaaccgcattcgggtttccc

SEQ ID NO: 2375838 - DNA, 25 bp, Homo sapien
gggtgtatcggccagtgaccaacag

SEQ ID NO: 2375839 - DNA, 25 bp, Homo sapien
ctgcagggtctcattcacgattgga

SEQ ID NO: 2375840 - DNA, 25 bp, Homo sapien
gacaggcctccatccttgaggcgct

SEQ ID NO: 2375841 - DNA, 25 bp, Homo sapien
tccttgaggcgcttcagggcatctg

SEQ ID NO: 2375842 - DNA, 25 bp, Homo sapien
ctccatccttgaggcgcttcagggc

SEQ ID NO: 2375843 - DNA, 25 bp, Homo sapien
ctgcagacaggcctccatccttgag

SEQ ID NO: 2375844 - DNA, 25 bp, Homo sapien
agctggaataagctgtgtcctggga

SEQ ID NO: 2375845 - DNA, 25 bp, Homo sapien
ggtgcccaggcgcggtgtgagcggg

SEQ ID NO: 2375846 - DNA, 25 bp, Homo sapien
tgccctgtccataggagttgggtgt

SEQ ID NO: 2375847 - DNA, 25 bp, Homo sapien
gcggcagctggaataagctgtgtcc

SEQ ID NO: 2375848 - DNA, 25 bp, Homo sapien
tacataatgatgttcgtggcggcgg

SEQ ID NO: 2375849 - DNA, 25 bp, Homo sapien
cggttgtaggcgtccgtgaacttgc

SEQ ID NO: 2375850 - DNA, 25 bp, Homo sapien
gaccgcgggagaattgtgtacataa

SEQ ID NO: 2375851 - DNA, 25 bp, Homo sapien
acttgctctcgtggcgccgggcctt

SEQ ID NO: 2375852 - DNA, 25 bp, Homo sapien
ctcaggactccagccgaaggtgggc

SEQ ID NO: 2375853 - DNA, 25 bp, Homo sapien
ctgatacggagagaaagcagacttg

SEQ ID NO: 2375854 - DNA, 25 bp, Homo sapien
gcgtgggcgtgccagggctgtcaca

SEQ ID NO: 2375855 - DNA, 25 bp, Homo sapien
tgtcgcgggccccaaaagcggctgt

SEQ ID NO: 2375856 - DNA, 25 bp, Homo sapien
aagagcagcttggtgcgctgctcct

SEQ ID NO: 2375857 - DNA, 25 bp, Homo sapien
tcctcgtcctcgtcggagtctggga

SEQ ID NO: 2375858 - DNA, 25 bp, Homo sapien
tcgatgcgcgagtccaggctgtcgt

SEQ ID NO: 2375859 - DNA, 25 bp, Homo sapien
tccgagtccggctccctcaggaaga

SEQ ID NO: 2375860 - DNA, 25 bp, Homo sapien
gacaaaaccagtcccagacagatgg

SEQ ID NO: 2375861 - DNA, 25 bp, Homo sapien
tgtaagttccacctgttatattggc

SEQ ID NO: 2375862 - DNA, 25 bp, Homo sapien
gctagtcatgctaaatgcttgaagg

SEQ ID NO: 2375863 - DNA, 25 bp, Homo sapien
tgcttccgcatcttagctagtcatg

SEQ ID NO: 2375864 - DNA, 25 bp, Homo sapien
tggaccgtggtcagcatggtaaaca

SEQ ID NO: 2375865 - DNA, 25 bp, Homo sapien
cgcctaatcaaagggcccaagaagg

SEQ ID NO: 2375866 - DNA, 25 bp, Homo sapien
aagttcctctcgttcctccctgatg

SEQ ID NO: 2375867 - DNA, 25 bp, Homo sapien
gacgcagagctctgtctaagcccct

SEQ ID NO: 2375868 - DNA, 25 bp, Homo sapien
cttggggcagtcagcgctggtgatg

SEQ ID NO: 2375869 - DNA, 25 bp, Homo sapien
atgtcctcgcctgaggactgctggc

SEQ ID NO: 2375870 - DNA, 25 bp, Homo sapien
tgatgggggccgagggcatctcgtc

SEQ ID NO: 2375871 - DNA, 25 bp, Homo sapien
atgggcttggggcagtcagcgctgg

SEQ ID NO: 2375872 - DNA, 25 bp, Homo sapien
gccacggctgccgctcctggggtca

SEQ ID NO: 2375873 - DNA, 25 bp, Homo sapien
ccacggctgccgctcctggggtcac

SEQ ID NO: 2375874 - DNA, 25 bp, Homo sapien
gcggcagggttggggctagcacaga

SEQ ID NO: 2375875 - DNA, 25 bp, Homo sapien
agcggcagggttggggctagcacag

SEQ ID NO: 2375876 - DNA, 25 bp, Homo sapien
tcacagggaacaggcccggcggaaa

SEQ ID NO: 2375877 - DNA, 25 bp, Homo sapien
cacagggaacaggcccggcggaaag

SEQ ID NO: 2375878 - DNA, 25 bp, Homo sapien
tcctcctggcgtggcatgtagcctg

SEQ ID NO: 2375879 - DNA, 25 bp, Homo sapien
gcactgacgggtcaaacttgggcag

SEQ ID NO: 2375880 - DNA, 25 bp, Homo sapien
gttcaggtcacgcttcatgatggcc

SEQ ID NO: 2375881 - DNA, 25 bp, Homo sapien
agccggctgagcacctgcgtttgca

SEQ ID NO: 2375882 - DNA, 25 bp, Homo sapien
tgtcctcgtccttgtgctcgcccga

SEQ ID NO: 2375883 - DNA, 25 bp, Homo sapien
tccagcaggcacgaggcgatgcggt

SEQ ID NO: 2375884 - DNA, 25 bp, Homo sapien
cgatgcggtccttgggcttcggcct

SEQ ID NO: 2375885 - DNA, 25 bp, Homo sapien
aggagggcaggcgaatggccccacg

SEQ ID NO: 2375886 - DNA, 25 bp, Homo sapien
gcagccgcttctggtcgccagatga

SEQ ID NO: 2375887 - DNA, 25 bp, Homo sapien
ggtcgccagatgaggtggtgtctgg

SEQ ID NO: 2375888 - DNA, 25 bp, Homo sapien
ggccgcagccgcttctggtcgccag

SEQ ID NO: 2375889 - DNA, 25 bp, Homo sapien
ccgcagccgcttctggtcgccagat

SEQ ID NO: 2375890 - DNA, 25 bp, Homo sapien
cccttggggtcccgcttggcgagct

SEQ ID NO: 2375891 - DNA, 25 bp, Homo sapien
cagggggtgtctgccatatcccggt

SEQ ID NO: 2375892 - DNA, 25 bp, Homo sapien
gtgtctgccatatcccggtctcgct

SEQ ID NO: 2375893 - DNA, 25 bp, Homo sapien
tcacagggggtgtctgccatatccc

SEQ ID NO: 2375894 - DNA, 25 bp, Homo sapien
tcctccttgtcggaggccgaggacg

SEQ ID NO: 2375895 - DNA, 25 bp, Homo sapien
ccgaggacgagggtgaggtggttga

SEQ ID NO: 2375896 - DNA, 25 bp, Homo sapien
ttgaggaccccgaggatgatgacgc

SEQ ID NO: 2375897 - DNA, 25 bp, Homo sapien
gacgaggacgccgacaatgactcct

SEQ ID NO: 2375898 - DNA, 25 bp, Homo sapien
ggtcatcactgtcgtcatcgtcgtc

SEQ ID NO: 2375899 - DNA, 25 bp, Homo sapien
tcactcgcctctgacagggctgtgt

SEQ ID NO: 2375900 - DNA, 25 bp, Homo sapien
tgtgtcctcgtcatcgttctcagac

SEQ ID NO: 2375901 - DNA, 25 bp, Homo sapien
gttctcagactcgtcccggtcatca

SEQ ID NO: 2375902 - DNA, 25 bp, Homo sapien
tcaggctctgccccggggaaagagg

SEQ ID NO: 2375903 - DNA, 25 bp, Homo sapien
agagggactccgggagggccaggca

SEQ ID NO: 2375904 - DNA, 25 bp, Homo sapien
gggccaggcagccacggcctccctg

SEQ ID NO: 2375905 - DNA, 25 bp, Homo sapien
caggctctgccccggggaaagaggg

SEQ ID NO: 2375906 - DNA, 25 bp, Homo sapien
tccctgaagatggaaccgtacgcca

SEQ ID NO: 2375907 - DNA, 25 bp, Homo sapien
tccggccaactgctcgttacaaagt

SEQ ID NO: 2375908 - DNA, 25 bp, Homo sapien
gctttctatttctatggacatgcca

SEQ ID NO: 2375909 - DNA, 25 bp, Homo sapien
ggacatgccattatgttcacggcac

SEQ ID NO: 2375910 - DNA, 25 bp, Homo sapien
ttcggccttggaggttacaatgctc

SEQ ID NO: 2375911 - DNA, 25 bp, Homo sapien
tggacgacgtggcttcggccttgga

SEQ ID NO: 2375912 - DNA, 25 bp, Homo sapien
cttcggccttggaggttacaatgct

SEQ ID NO: 2375913 - DNA, 25 bp, Homo sapien
gcttcggccttggaggttacaatgc

SEQ ID NO: 2375914 - DNA, 25 bp, Homo sapien
catcctccgaggatgagggcgagga

SEQ ID NO: 2375915 - DNA, 25 bp, Homo sapien
aaactcagaagactcggaactctca

SEQ ID NO: 2375916 - DNA, 25 bp, Homo sapien
gaggatgagggcgaggactcggagc

SEQ ID NO: 2375917 - DNA, 25 bp, Homo sapien
ctcggagcttgactcaaactcagaa

SEQ ID NO: 2375918 - DNA, 25 bp, Homo sapien
tcttccatgcccaacgagtccactg

SEQ ID NO: 2375919 - DNA, 25 bp, Homo sapien
tgcccaacgagtccactgcaggtgc

SEQ ID NO: 2375920 - DNA, 25 bp, Homo sapien
ctcctcttccatgcccaacgagtcc

SEQ ID NO: 2375921 - DNA, 25 bp, Homo sapien
catgcccaacgagtccactgcaggt

SEQ ID NO: 2375922 - DNA, 25 bp, Homo sapien
ggacaatgggggtcgagcctccacc

SEQ ID NO: 2375923 - DNA, 25 bp, Homo sapien
agacagcaacatggccccttcctgg

SEQ ID NO: 2375924 - DNA, 25 bp, Homo sapien
gccacagcctcagtctcgatgtcca

SEQ ID NO: 2375925 - DNA, 25 bp, Homo sapien
ctggagtccgctggctcttcaacac

SEQ ID NO: 2375926 - DNA, 25 bp, Homo sapien
tgcctccctcccaccaccctcccag

SEQ ID NO: 2375927 - DNA, 25 bp, Homo sapien
ctgcctccctcccaccaccctccca

SEQ ID NO: 2375928 - DNA, 25 bp, Homo sapien
ccaccaccctcccagggggttgcag

SEQ ID NO: 2375929 - DNA, 25 bp, Homo sapien
caccctcccagggggttgcaggtgt

SEQ ID NO: 2375930 - DNA, 25 bp, Homo sapien
agggacagatgggtgtgaggcatct

SEQ ID NO: 2375931 - DNA, 25 bp, Homo sapien
ttgcagcggcaaggggagcatcata

SEQ ID NO: 2375932 - DNA, 25 bp, Homo sapien
gggctccccgcctggtgtggctggc

SEQ ID NO: 2375933 - DNA, 25 bp, Homo sapien
tgtgctctgcgacttggccaggctg

SEQ ID NO: 2375934 - DNA, 25 bp, Homo sapien
cccggagcgttcatcgcgtcggcca

SEQ ID NO: 2375935 - DNA, 25 bp, Homo sapien
ggcccggagcgttcatcgcgtcggc

SEQ ID NO: 2375936 - DNA, 25 bp, Homo sapien
cggagcgttcatcgcgtcggccagt

SEQ ID NO: 2375937 - DNA, 25 bp, Homo sapien
cagtggggagtgggcagacgggcag

SEQ ID NO: 2375938 - DNA, 25 bp, Homo sapien
ccgcaagacggcgggcaatgccaag

SEQ ID NO: 2375939 - DNA, 25 bp, Homo sapien
gcccgcaagacggcgggcaatgcca

SEQ ID NO: 2375940 - DNA, 25 bp, Homo sapien
gggtgggcgcacgagcctgggcccg

SEQ ID NO: 2375941 - DNA, 25 bp, Homo sapien
caagaggccaggggggcgggcagca

SEQ ID NO: 2375942 - DNA, 25 bp, Homo sapien
cggcaggagcaggagttcccttcca

SEQ ID NO: 2375943 - DNA, 25 bp, Homo sapien
accaagggcccatccaaggagagca

SEQ ID NO: 2375944 - DNA, 25 bp, Homo sapien
ctggtggtcggaccaagggcccatc

SEQ ID NO: 2375945 - DNA, 25 bp, Homo sapien
agcaggagttcccttccaagggcgg

SEQ ID NO: 2375946 - DNA, 25 bp, Homo sapien
tggaggggctgggatccccgcgttc

SEQ ID NO: 2375947 - DNA, 25 bp, Homo sapien
gtggtggaggggctgggatccccgc

SEQ ID NO: 2375948 - DNA, 25 bp, Homo sapien
tggtggaggggctgggatccccgcg

SEQ ID NO: 2375949 - DNA, 25 bp, Homo sapien
gcccggaggaatggcctcggagggc

SEQ ID NO: 2375950 - DNA, 25 bp, Homo sapien
gtcctcatggcgcttcttaggtggc

SEQ ID NO: 2375951 - DNA, 25 bp, Homo sapien
gagagttcgggcgagcccgcaggtg

SEQ ID NO: 2375952 - DNA, 25 bp, Homo sapien
cggagggccactggttgtctagctc

SEQ ID NO: 2375953 - DNA, 25 bp, Homo sapien
caaactccgagcggggccggaagag

SEQ ID NO: 2375954 - DNA, 25 bp, Homo sapien
ctcaaactccgagcggggccggaag

SEQ ID NO: 2375955 - DNA, 25 bp, Homo sapien
tcaaactccgagcggggccggaaga

SEQ ID NO: 2375956 - DNA, 25 bp, Homo sapien
tcctgctgtagcagtcgctcgtagg

SEQ ID NO: 2375957 - DNA, 25 bp, Homo sapien
cagagcgtgtcgttaagccagtcca

SEQ ID NO: 2375958 - DNA, 25 bp, Homo sapien
ctcgtaggtgacacacaggaagcgg

SEQ ID NO: 2375959 - DNA, 25 bp, Homo sapien
tcgatgccaccgttccagatgtcat

SEQ ID NO: 2375960 - DNA, 25 bp, Homo sapien
ttcctgcatcccagaaggtgcagag

SEQ ID NO: 2375961 - DNA, 25 bp, Homo sapien
tcctgcatcccagaaggtgcagagc

SEQ ID NO: 2375962 - DNA, 25 bp, Homo sapien
ggtgcagagccccccatgccagcag

SEQ ID NO: 2375963 - DNA, 25 bp, Homo sapien
agagccccccatgccagcaggatat

SEQ ID NO: 2375964 - DNA, 25 bp, Homo sapien
cgggctgctacagactgggtggtgg

SEQ ID NO: 2375965 - DNA, 25 bp, Homo sapien
tcatgggcaccgcgggctgctacag

SEQ ID NO: 2375966 - DNA, 25 bp, Homo sapien
gcgggctgctacagactgggtggtg

SEQ ID NO: 2375967 - DNA, 25 bp, Homo sapien
cttcatgggcaccgcgggctgctac

SEQ ID NO: 2375968 - DNA, 25 bp, Homo sapien
tgccaatgattcactcgggagcctg

SEQ ID NO: 2375969 - DNA, 25 bp, Homo sapien
tcttcaccaggctaccgggattacc

SEQ ID NO: 2375970 - DNA, 25 bp, Homo sapien
gggagtccttaaaacgtgccaatga

SEQ ID NO: 2375971 - DNA, 25 bp, Homo sapien
tgttacatgtgaccctgagacctgc

SEQ ID NO: 2375972 - DNA, 25 bp, Homo sapien
cgcggatgccatcgtcccgtttctt

SEQ ID NO: 2375973 - DNA, 25 bp, Homo sapien
ctcgcggatgccatcgtcccgtttc

SEQ ID NO: 2375974 - DNA, 25 bp, Homo sapien
tcgcggatgccatcgtcccgtttct

SEQ ID NO: 2375975 - DNA, 25 bp, Homo sapien
cttcttgtcgatggtgtagaagccc

SEQ ID NO: 2375976 - DNA, 25 bp, Homo sapien
ccttcttgtcgatggtgtagaagcc

SEQ ID NO: 2375977 - DNA, 25 bp, Homo sapien
ttcttgtcgatggtgtagaagccct

SEQ ID NO: 2375978 - DNA, 25 bp, Homo sapien
tctgcggggggctcatcggtgctgg

SEQ ID NO: 2375979 - DNA, 25 bp, Homo sapien
tgcggggggctcatcggtgctggca

SEQ ID NO: 2375980 - DNA, 25 bp, Homo sapien
gcggggggctcatcggtgctggcac

SEQ ID NO: 2375981 - DNA, 25 bp, Homo sapien
ctgcggggggctcatcggtgctggc

SEQ ID NO: 2375982 - DNA, 25 bp, Homo sapien
aggcggcgctgctccgaacgccgct

SEQ ID NO: 2375983 - DNA, 25 bp, Homo sapien
ttgagcaggtcactgtcacagctgc

SEQ ID NO: 2375984 - DNA, 25 bp, Homo sapien
acgccgctccgagcctgcccgggtg

SEQ ID NO: 2375985 - DNA, 25 bp, Homo sapien
cttgagctggttgaacttgagcagg

SEQ ID NO: 2375986 - DNA, 25 bp, Homo sapien
tattctggcccacgtactcgatgac

SEQ ID NO: 2375987 - DNA, 25 bp, Homo sapien
gaccatctcgtcagccgcgatgggc

SEQ ID NO: 2375988 - DNA, 25 bp, Homo sapien
gaacaagccccagtcgtgaatgtgg

SEQ ID NO: 2375989 - DNA, 25 bp, Homo sapien
cgatgggctccatggcgaacaagcc

SEQ ID NO: 2375990 - DNA, 25 bp, Homo sapien
cccggaacatgtagctgctcccgat

SEQ ID NO: 2375991 - DNA, 25 bp, Homo sapien
aagttgccgcacttggtggcgtcga

SEQ ID NO: 2375992 - DNA, 25 bp, Homo sapien
tgtggttgatgaagcgcgcgaagtt

SEQ ID NO: 2375993 - DNA, 25 bp, Homo sapien
cgatgccctcgtcctcataacgctt

SEQ ID NO: 2375994 - DNA, 25 bp, Homo sapien
gcttcgagtagatgactatcttctt

SEQ ID NO: 2375995 - DNA, 25 bp, Homo sapien
tccaccgtgatcaccttggcatagc

SEQ ID NO: 2375996 - DNA, 25 bp, Homo sapien
ttatagtcataggtaatctcctcat

SEQ ID NO: 2375997 - DNA, 25 bp, Homo sapien
cattgacgttaatgtgctgcttcga

SEQ ID NO: 2375998 - DNA, 25 bp, Homo sapien
tatggatgatggagtctacccgcac

SEQ ID NO: 2375999 - DNA, 25 bp, Homo sapien
cgaggttaacactgggcacgatggc

SEQ ID NO: 2376000 - DNA, 25 bp, Homo sapien
caagctgagataccagaggctccgg

SEQ ID NO: 2376001 - DNA, 25 bp, Homo sapien
tccttgatcttgaaaccggcgggca

SEQ ID NO: 2376002 - DNA, 25 bp, Homo sapien
aacacggtgacggagtgaaggacat

SEQ ID NO: 2376003 - DNA, 25 bp, Homo sapien
gtaagaaagcacctgggtggactga

SEQ ID NO: 2376004 - DNA, 25 bp, Homo sapien
cattgcgttcgaggtggaagattgt

SEQ ID NO: 2376005 - DNA, 25 bp, Homo sapien
gactacatcgtgcaggtaagaaagc

SEQ ID NO: 2376006 - DNA, 25 bp, Homo sapien
tctcctcagcgctcaacccctggaa

SEQ ID NO: 2376007 - DNA, 25 bp, Homo sapien
cctatcttagattgtgtttgtcctc

SEQ ID NO: 2376008 - DNA, 25 bp, Homo sapien
gctcaacccctggaacaaaggtgag

SEQ ID NO: 2376009 - DNA, 25 bp, Homo sapien
gggtggacgcatggctccgtgggtg

SEQ ID NO: 2376010 - DNA, 25 bp, Homo sapien
tgcaacacggcccttcctagtttcg

SEQ ID NO: 2376011 - DNA, 25 bp, Homo sapien
ccaacactgaccccacaggtgctca

SEQ ID NO: 2376012 - DNA, 25 bp, Homo sapien
gacccctccgctggcatctttgtac

SEQ ID NO: 2376013 - DNA, 25 bp, Homo sapien
tacagccatgcaacacggcccttcc

SEQ ID NO: 2376014 - DNA, 25 bp, Homo sapien
ggtgcacagcgagggtggatttgtg

SEQ ID NO: 2376015 - DNA, 25 bp, Homo sapien
aaaggctacatactgcttgattcat

SEQ ID NO: 2376016 - DNA, 25 bp, Homo sapien
ggacaaaggtgcacagcgagggtgg

SEQ ID NO: 2376017 - DNA, 25 bp, Homo sapien
ggctacatactgcttgattcattta

SEQ ID NO: 2376018 - DNA, 25 bp, Homo sapien
gcgtctgccaccatgtccggttaat

SEQ ID NO: 2376019 - DNA, 25 bp, Homo sapien
ataggcgtctgccaccatgtccggt

SEQ ID NO: 2376020 - DNA, 25 bp, Homo sapien
aggcgtctgccaccatgtccggtta

SEQ ID NO: 2376021 - DNA, 25 bp, Homo sapien
ggcgtctgccaccatgtccggttaa

SEQ ID NO: 2376022 - DNA, 25 bp, Homo sapien
agaacaagttatttgggcaattctt

SEQ ID NO: 2376023 - DNA, 25 bp, Homo sapien
tttggatgatcacaaacatagtaat

SEQ ID NO: 2376024 - DNA, 25 bp, Homo sapien
tggtgagttccatgtaagcattttc

SEQ ID NO: 2376025 - DNA, 25 bp, Homo sapien
tatgaatgtggcctggtgagttcca

SEQ ID NO: 2376026 - DNA, 25 bp, Homo sapien
tgcccttgccaacgatgaaagtcag

SEQ ID NO: 2376027 - DNA, 25 bp, Homo sapien
gagcccacggtcaattctccaggaa

SEQ ID NO: 2376028 - DNA, 25 bp, Homo sapien
taccctccgcttatgcaagtgatgg

SEQ ID NO: 2376029 - DNA, 25 bp, Homo sapien
caagtgatggagctactgacgtgat

SEQ ID NO: 2376030 - DNA, 25 bp, Homo sapien
cagtcgaccgtaactacggctccgc

SEQ ID NO: 2376031 - DNA, 25 bp, Homo sapien
gggccgcgactccagagacccggct

SEQ ID NO: 2376032 - DNA, 25 bp, Homo sapien
acggctccgcccatgcgccaaaaca

SEQ ID NO: 2376033 - DNA, 25 bp, Homo sapien
ggctagggacgacgccccagtcgac

SEQ ID NO: 2376034 - DNA, 25 bp, Homo sapien
agctcctggacgtcgctgacagtca

SEQ ID NO: 2376035 - DNA, 25 bp, Homo sapien
gctttccagcacgtcatagttggcc

SEQ ID NO: 2376036 - DNA, 25 bp, Homo sapien
tgatctgcgcttctatctcctcctt

SEQ ID NO: 2376037 - DNA, 25 bp, Homo sapien
tgacagtcacgacgccggcctgcga

SEQ ID NO: 2376038 - DNA, 25 bp, Homo sapien
gccatgtacaagctgggcatcctta

SEQ ID NO: 2376039 - DNA, 25 bp, Homo sapien
tacctgctgcaagaactaacgagct

SEQ ID NO: 2376040 - DNA, 25 bp, Homo sapien
tacacagcatagtgggttgaagagc

SEQ ID NO: 2376041 - DNA, 25 bp, Homo sapien
aaatgggaataggagcactcgcctc

SEQ ID NO: 2376042 - DNA, 25 bp, Homo sapien
tggtacaggtccacgtctgaccggg

SEQ ID NO: 2376043 - DNA, 25 bp, Homo sapien
tctgaccgggggtagccctcacagt

SEQ ID NO: 2376044 - DNA, 25 bp, Homo sapien
ctggcggtgcggacttggtacaggt

SEQ ID NO: 2376045 - DNA, 25 bp, Homo sapien
gcggctcgttcatcccaatgccttt

SEQ ID NO: 2376046 - DNA, 25 bp, Homo sapien
actgccttgtgatcattctgcaggc

SEQ ID NO: 2376047 - DNA, 25 bp, Homo sapien
tgcttctccttgtcgcgagcgtgca

SEQ ID NO: 2376048 - DNA, 25 bp, Homo sapien
tccttgtcgcgagcgtgcagctggt

SEQ ID NO: 2376049 - DNA, 25 bp, Homo sapien
tctccttgtcgcgagcgtgcagctg

SEQ ID NO: 2376050 - DNA, 25 bp, Homo sapien
ctctgacccagtttgcggctcatgg

SEQ ID NO: 2376051 - DNA, 25 bp, Homo sapien
gagccggggctgatgctgttcactt

SEQ ID NO: 2376052 - DNA, 25 bp, Homo sapien
ggctctcactctgacccagtttgcg

SEQ ID NO: 2376053 - DNA, 25 bp, Homo sapien
ttcactttggcgaaggcccgtggag

SEQ ID NO: 2376054 - DNA, 25 bp, Homo sapien
cgtgtcccctgggcatggacttgag

SEQ ID NO: 2376055 - DNA, 25 bp, Homo sapien
gtgtcccctgggcatggacttgagt

SEQ ID NO: 2376056 - DNA, 25 bp, Homo sapien
tgcaacttcgacttcctgagcccaa

SEQ ID NO: 2376057 - DNA, 25 bp, Homo sapien
gggctgacccctctctaaaactctg

SEQ ID NO: 2376058 - DNA, 25 bp, Homo sapien
ggatacacgacaggcctcagtcagt

SEQ ID NO: 2376059 - DNA, 25 bp, Homo sapien
cccaccaatgtagtgggcagccggg

SEQ ID NO: 2376060 - DNA, 25 bp, Homo sapien
gacaagacacttgccctagaagccc

SEQ ID NO: 2376061 - DNA, 25 bp, Homo sapien
cataagttacttcaggtctgcaagg

SEQ ID NO: 2376062 - DNA, 25 bp, Homo sapien
cacagggcgcatccaagactagagt

SEQ ID NO: 2376063 - DNA, 25 bp, Homo sapien
tcaagggtaagagaaggcaagccag

SEQ ID NO: 2376064 - DNA, 25 bp, Homo sapien
gcagctctagtaaagatgaccaggt

SEQ ID NO: 2376065 - DNA, 25 bp, Homo sapien
tgagagctggcagttaccagacact

SEQ ID NO: 2376066 - DNA, 25 bp, Homo sapien
ccaggtctgcccaatgtctgagagc

SEQ ID NO: 2376067 - DNA, 25 bp, Homo sapien
gagctggcagttaccagacactgtg

SEQ ID NO: 2376068 - DNA, 25 bp, Homo sapien
tgcaggaaggggcagtgggtaacgg

SEQ ID NO: 2376069 - DNA, 25 bp, Homo sapien
catgcaggaaggggcagtgggtaac

SEQ ID NO: 2376070 - DNA, 25 bp, Homo sapien
atgcaggaaggggcagtgggtaacg

SEQ ID NO: 2376071 - DNA, 25 bp, Homo sapien
tcatgcaggaaggggcagtgggtaa

SEQ ID NO: 2376072 - DNA, 25 bp, Homo sapien
aaaatggaaaatcaggctagaggtt

SEQ ID NO: 2376073 - DNA, 25 bp, Homo sapien
caggctagaggttcagtgtgctcct

SEQ ID NO: 2376074 - DNA, 25 bp, Homo sapien
atcaggctagaggttcagtgtgctc

SEQ ID NO: 2376075 - DNA, 25 bp, Homo sapien
aaaatcaggctagaggttcagtgtg

SEQ ID NO: 2376076 - DNA, 25 bp, Homo sapien
ccctcactgtgctgcaccacactgc

SEQ ID NO: 2376077 - DNA, 25 bp, Homo sapien
gggtgttcacagagccgaactccac

SEQ ID NO: 2376078 - DNA, 25 bp, Homo sapien
tatgcagtgactggaagttctgggt

SEQ ID NO: 2376079 - DNA, 25 bp, Homo sapien
cacactgccaatgttatgcagtgac

SEQ ID NO: 2376080 - DNA, 25 bp, Homo sapien
cccaagtagctggagagtaccacca

SEQ ID NO: 2376081 - DNA, 25 bp, Homo sapien
atgggagagtctcgctgtgcggccc

SEQ ID NO: 2376082 - DNA, 25 bp, Homo sapien
gctggagagtaccaccacacctaat

SEQ ID NO: 2376083 - DNA, 25 bp, Homo sapien
aagtagctggagagtaccaccacac

SEQ ID NO: 2376084 - DNA, 25 bp, Homo sapien
cttaatgccactaaagtgtagattt

SEQ ID NO: 2376085 - DNA, 25 bp, Homo sapien
ttaatgccactaaagtgtagatttt

SEQ ID NO: 2376086 - DNA, 25 bp, Homo sapien
agatgaggtccctggagtagtcaaa

SEQ ID NO: 2376087 - DNA, 25 bp, Homo sapien
aaagtaggatggtgggtgccagggc

SEQ ID NO: 2376088 - DNA, 25 bp, Homo sapien
ctagatgaggtccctggagtagtca

SEQ ID NO: 2376089 - DNA, 25 bp, Homo sapien
gacagaaagtaggatggtgggtgcc

SEQ ID NO: 2376090 - DNA, 25 bp, Homo sapien
gaaaacagtaatggagggtcctcca

SEQ ID NO: 2376091 - DNA, 25 bp, Homo sapien
tgaaacggtgcacggcagtggaaaa

SEQ ID NO: 2376092 - DNA, 25 bp, Homo sapien
gagattctaccacacactgattatg

SEQ ID NO: 2376093 - DNA, 25 bp, Homo sapien
tgggaatgtgaaacggtgcacggca

SEQ ID NO: 2376094 - DNA, 25 bp, Homo sapien
taagctcatttcgtgttcagcctcg

SEQ ID NO: 2376095 - DNA, 25 bp, Homo sapien
tactcagagatgcaggctaaaatgc

SEQ ID NO: 2376096 - DNA, 25 bp, Homo sapien
gaaatgttcattccaggactgtgta

SEQ ID NO: 2376097 - DNA, 25 bp, Homo sapien
cagcataatcctgtggttggcgaga

SEQ ID NO: 2376098 - DNA, 25 bp, Homo sapien
cttttcctgcccagcgtgttggaac

SEQ ID NO: 2376099 - DNA, 25 bp, Homo sapien
gcccagcgtgttggaacaagtctaa

SEQ ID NO: 2376100 - DNA, 25 bp, Homo sapien
gaacaagtctaagctggtgtttttc

SEQ ID NO: 2376101 - DNA, 25 bp, Homo sapien
tgtttttcccccctgcggatcactg

SEQ ID NO: 2376102 - DNA, 25 bp, Homo sapien
tggagagactcccaggagagactct

SEQ ID NO: 2376103 - DNA, 25 bp, Homo sapien
gaatggcgtaagtttggaggctccc

SEQ ID NO: 2376104 - DNA, 25 bp, Homo sapien
tgagcccttctgaccttttcaccaa

SEQ ID NO: 2376105 - DNA, 25 bp, Homo sapien
tagagctgtagtctcgttcctacca

SEQ ID NO: 2376106 - DNA, 25 bp, Homo sapien
tcatctttgcagaggaataatgttg

SEQ ID NO: 2376107 - DNA, 25 bp, Homo sapien
atctttgcagaggaataatgttgca

SEQ ID NO: 2376108 - DNA, 25 bp, Homo sapien
tctttgcagaggaataatgttgcag

SEQ ID NO: 2376109 - DNA, 25 bp, Homo sapien
catctttgcagaggaataatgttgc

SEQ ID NO: 2376110 - DNA, 25 bp, Homo sapien
taataatcacaccagtacctgccag

SEQ ID NO: 2376111 - DNA, 25 bp, Homo sapien
tagggccgtggcctaatttgtgaaa

SEQ ID NO: 2376112 - DNA, 25 bp, Homo sapien
tagacccaagtccagggcaagggaa

SEQ ID NO: 2376113 - DNA, 25 bp, Homo sapien
cagatccttatgcttcagggagaga

SEQ ID NO: 2376114 - DNA, 25 bp, Homo sapien
aatagagtttgagggaattcgccca

SEQ ID NO: 2376115 - DNA, 25 bp, Homo sapien
tactagcgaagtgaaaggagcttgc

SEQ ID NO: 2376116 - DNA, 25 bp, Homo sapien
catttccgtatccacagcagcaagg

SEQ ID NO: 2376117 - DNA, 25 bp, Homo sapien
tacctcagcggtttacaaaatagcg

SEQ ID NO: 2376118 - DNA, 25 bp, Homo sapien
ccactaacatctcatggaagacggc

SEQ ID NO: 2376119 - DNA, 25 bp, Homo sapien
tcaaagtggctctccactaacatct

SEQ ID NO: 2376120 - DNA, 25 bp, Homo sapien
tcattccacgtcaaagtggctctcc

SEQ ID NO: 2376121 - DNA, 25 bp, Homo sapien
atggaagacggcaacaggtggccac

SEQ ID NO: 2376122 - DNA, 25 bp, Homo sapien
gcagatatgacacagggtgcaccag

SEQ ID NO: 2376123 - DNA, 25 bp, Homo sapien
cgggcaccgcgtgttgcagacaatt

SEQ ID NO: 2376124 - DNA, 25 bp, Homo sapien
agcacaaagcgtttccgcaaaaccg

SEQ ID NO: 2376125 - DNA, 25 bp, Homo sapien
cttgcggttctcagcacaaagcgtt

SEQ ID NO: 2376126 - DNA, 25 bp, Homo sapien
ctagttctggttgccacccaagctc

SEQ ID NO: 2376127 - DNA, 25 bp, Homo sapien
ggccagagtcgtcccgccgcctgga

SEQ ID NO: 2376128 - DNA, 25 bp, Homo sapien
caaaaggccagagtcgtcccgccgc

SEQ ID NO: 2376129 - DNA, 25 bp, Homo sapien
accagctccctagttctggttgcca

SEQ ID NO: 2376130 - DNA, 25 bp, Homo sapien
gatactttatccctaaagagttgga

SEQ ID NO: 2376131 - DNA, 25 bp, Homo sapien
gaataagagaactcaacactttgaa

SEQ ID NO: 2376132 - DNA, 25 bp, Homo sapien
gaaaagcaaccctaatgtgcaaaga

SEQ ID NO: 2376133 - DNA, 25 bp, Homo sapien
ctaggaaaacaataaggatggatac

SEQ ID NO: 2376134 - DNA, 25 bp, Homo sapien
tataatttggattaggttcctcctc

SEQ ID NO: 2376135 - DNA, 25 bp, Homo sapien
tctcctgttgcttctcggggagctt

SEQ ID NO: 2376136 - DNA, 25 bp, Homo sapien
tgctattgtgtcatcttttgattcc

SEQ ID NO: 2376137 - DNA, 25 bp, Homo sapien
tccatgctattgtgtcatcttttga

SEQ ID NO: 2376138 - DNA, 25 bp, Homo sapien
ttgattcctgttgtggatcttctac

SEQ ID NO: 2376139 - DNA, 25 bp, Homo sapien
ctcctgagactctctccatgctatt

SEQ ID NO: 2376140 - DNA, 25 bp, Homo sapien
aaattcctgatgtgattgactggga

SEQ ID NO: 2376141 - DNA, 25 bp, Homo sapien
tccaaacggatcatggacgctgtga

SEQ ID NO: 2376142 - DNA, 25 bp, Homo sapien
gacgctgtgacttcttggggctcta

SEQ ID NO: 2376143 - DNA, 25 bp, Homo sapien
gtgattgactgggaatcagtaatct

SEQ ID NO: 2376144 - DNA, 25 bp, Homo sapien
gctttgacttgctacctctttgggt

SEQ ID NO: 2376145 - DNA, 25 bp, Homo sapien
caatttgtgtgctcaggtctcttaa

SEQ ID NO: 2376146 - DNA, 25 bp, Homo sapien
ggatgtcggatactctcctttcttg

SEQ ID NO: 2376147 - DNA, 25 bp, Homo sapien
tccctgctttggactggatgtcgga

SEQ ID NO: 2376148 - DNA, 25 bp, Homo sapien
agatgatcgcagtgtgagcacaaac

SEQ ID NO: 2376149 - DNA, 25 bp, Homo sapien
cctctcgaatatagtaaacaggaag

SEQ ID NO: 2376150 - DNA, 25 bp, Homo sapien
tctgcctttcctctcgaatatagta

SEQ ID NO: 2376151 - DNA, 25 bp, Homo sapien
gaaggtggtattgattgttcctgaa

SEQ ID NO: 2376152 - DNA, 25 bp, Homo sapien
tctaggcatcagctaaggacactcc

SEQ ID NO: 2376153 - DNA, 25 bp, Homo sapien
tgaattccttaagttgcacccagac

SEQ ID NO: 2376154 - DNA, 25 bp, Homo sapien
gaggtcggcaccctgctgaatagct

SEQ ID NO: 2376155 - DNA, 25 bp, Homo sapien
cactgagtactgactgggtccttgg

SEQ ID NO: 2376156 - DNA, 25 bp, Homo sapien
gaaggagtcccatataatcaccagg

SEQ ID NO: 2376157 - DNA, 25 bp, Homo sapien
cgcagaggcaggagataatattggc

SEQ ID NO: 2376158 - DNA, 25 bp, Homo sapien
tttgtctgctgtggcgatccaccgc

SEQ ID NO: 2376159 - DNA, 25 bp, Homo sapien
accgcctgtcttcactgacgcagag

SEQ ID NO: 2376160 - DNA, 25 bp, Homo sapien
gccatagaaaggacacgtgccacac

SEQ ID NO: 2376161 - DNA, 25 bp, Homo sapien
ggatgaaccttcaagcacgatgcta

SEQ ID NO: 2376162 - DNA, 25 bp, Homo sapien
atcagggttgggtaatgagatcccc

SEQ ID NO: 2376163 - DNA, 25 bp, Homo sapien
ctggtcacctgtgggagagcagttc

SEQ ID NO: 2376164 - DNA, 25 bp, Homo sapien
ccaggctcagtggcatgtatccatg

SEQ ID NO: 2376165 - DNA, 25 bp, Homo sapien
caggctcagtggcatgtatccatgg

SEQ ID NO: 2376166 - DNA, 25 bp, Homo sapien
aggctcagtggcatgtatccatggt

SEQ ID NO: 2376167 - DNA, 25 bp, Homo sapien
cccagattggagtgcaatggcacga

SEQ ID NO: 2376168 - DNA, 25 bp, Homo sapien
ttttagatgaattctcgctctgtcg

SEQ ID NO: 2376169 - DNA, 25 bp, Homo sapien
ttttttttagatgaattctcgctct

SEQ ID NO: 2376170 - DNA, 25 bp, Homo sapien
tttttttagatgaattctcgctctg

SEQ ID NO: 2376171 - DNA, 25 bp, Homo sapien
tactgcatgagataatacccttccc

SEQ ID NO: 2376172 - DNA, 25 bp, Homo sapien
gatgtgccagtacttgcagctgaga

SEQ ID NO: 2376173 - DNA, 25 bp, Homo sapien
cagctgagagcgtgtagcagccaca

SEQ ID NO: 2376174 - DNA, 25 bp, Homo sapien
cccttgtggttaagttggatgtgcc

SEQ ID NO: 2376175 - DNA, 25 bp, Homo sapien
ccatgatgccattcccttcagggca

SEQ ID NO: 2376176 - DNA, 25 bp, Homo sapien
tacttggcgtcgtgggtcatggcca

SEQ ID NO: 2376177 - DNA, 25 bp, Homo sapien
gagatggttgccagatacttggcgt

SEQ ID NO: 2376178 - DNA, 25 bp, Homo sapien
tcagggcagctgtcaaatattgtgt

SEQ ID NO: 2376179 - DNA, 25 bp, Homo sapien
ctcgctgatgctgacccaaagggcc

SEQ ID NO: 2376180 - DNA, 25 bp, Homo sapien
aggtcggccagctcgctgatgctga

SEQ ID NO: 2376181 - DNA, 25 bp, Homo sapien
gcacaggtcggccagctcgctgatg

SEQ ID NO: 2376182 - DNA, 25 bp, Homo sapien
gccagctcgctgatgctgacccaaa

SEQ ID NO: 2376183 - DNA, 25 bp, Homo sapien
actctgtgctgtggagtctggtctt

SEQ ID NO: 2376184 - DNA, 25 bp, Homo sapien
tgtgaagtctgctgaagtaacttac

SEQ ID NO: 2376185 - DNA, 25 bp, Homo sapien
taggtgacagtagagagaggggcat

SEQ ID NO: 2376186 - DNA, 25 bp, Homo sapien
gcatgagaaggtctgtgaagtctgc

SEQ ID NO: 2376187 - DNA, 25 bp, Homo sapien
gggcatgagaaggtctgtgaagtct

SEQ ID NO: 2376188 - DNA, 25 bp, Homo sapien
acaccgtactctgtggggagttcga

SEQ ID NO: 2376189 - DNA, 25 bp, Homo sapien
cgagagtgcatgctggcgtttccac

SEQ ID NO: 2376190 - DNA, 25 bp, Homo sapien
gcatgctggcgtttccactgccaaa

SEQ ID NO: 2376191 - DNA, 25 bp, Homo sapien
agttcgagagtgcatgctggcgttt

SEQ ID NO: 2376192 - DNA, 25 bp, Homo sapien
tcatatcagaacagcacaaaagcct

SEQ ID NO: 2376193 - DNA, 25 bp, Homo sapien
gattagattaagctgaccactctgc

SEQ ID NO: 2376194 - DNA, 25 bp, Homo sapien
aaatcagcctcaaacgacctcaagc

SEQ ID NO: 2376195 - DNA, 25 bp, Homo sapien
caagatggtgaatagcatgggctgc

SEQ ID NO: 2376196 - DNA, 25 bp, Homo sapien
tatattgcccgtgttttactattgc

SEQ ID NO: 2376197 - DNA, 25 bp, Homo sapien
gcataatatattgcccgtgttttac

SEQ ID NO: 2376198 - DNA, 25 bp, Homo sapien
ccatgcataatatattgcccgtgtt

SEQ ID NO: 2376199 - DNA, 25 bp, Homo sapien
atatattgcccgtgttttactattg

SEQ ID NO: 2376200 - DNA, 25 bp, Homo sapien
gaacacatacttctacccacattta

SEQ ID NO: 2376201 - DNA, 25 bp, Homo sapien
cattactgaaacatttgtactcaaa

SEQ ID NO: 2376202 - DNA, 25 bp, Homo sapien
cattgcttcctaagtagagatacta

SEQ ID NO: 2376203 - DNA, 25 bp, Homo sapien
gagatactatattgttacattactg

SEQ ID NO: 2376204 - DNA, 25 bp, Homo sapien
ggcactgtgagccagtgtatccctc

SEQ ID NO: 2376205 - DNA, 25 bp, Homo sapien
gagccagtgtatccctctcttcata

SEQ ID NO: 2376206 - DNA, 25 bp, Homo sapien
actgtgagccagtgtatccctctct

SEQ ID NO: 2376207 - DNA, 25 bp, Homo sapien
tgtgagccagtgtatccctctcttc

SEQ ID NO: 2376208 - DNA, 25 bp, Homo sapien
agtatttgtgttaaattcaagtgaa

SEQ ID NO: 2376209 - DNA, 25 bp, Homo sapien
taaattcaagtgaaagatggactgg

SEQ ID NO: 2376210 - DNA, 25 bp, Homo sapien
gagagtatttgtgttaaattcaagt

SEQ ID NO: 2376211 - DNA, 25 bp, Homo sapien
gagtatttgtgttaaattcaagtga

SEQ ID NO: 2376212 - DNA, 25 bp, Homo sapien
cagatgagggtgggcggtgtatgtc

SEQ ID NO: 2376213 - DNA, 25 bp, Homo sapien
cttgatatagggaaagcccaaaaag

SEQ ID NO: 2376214 - DNA, 25 bp, Homo sapien
agtaccgtgataccctctttctgca

SEQ ID NO: 2376215 - DNA, 25 bp, Homo sapien
ccgtgataccctctttctgcaaatg

SEQ ID NO: 2376216 - DNA, 25 bp, Homo sapien
taccgtgataccctctttctgcaaa

SEQ ID NO: 2376217 - DNA, 25 bp, Homo sapien
accgtgataccctctttctgcaaat

SEQ ID NO: 2376218 - DNA, 25 bp, Homo sapien
ttcttggactcccaggtcctgactg

SEQ ID NO: 2376219 - DNA, 25 bp, Homo sapien
tttgtaaaaccatgtcaagacctca

SEQ ID NO: 2376220 - DNA, 25 bp, Homo sapien
ggttgattgcatggccaactgcagt

SEQ ID NO: 2376221 - DNA, 25 bp, Homo sapien
tattaacttggagaacccaggcctg

SEQ ID NO: 2376222 - DNA, 25 bp, Homo sapien
gccagatttagcaggtaacaataca

SEQ ID NO: 2376223 - DNA, 25 bp, Homo sapien
tacagatacccagttactttgaaaa

SEQ ID NO: 2376224 - DNA, 25 bp, Homo sapien
gaaatttgctcagggcattgtgttg

SEQ ID NO: 2376225 - DNA, 25 bp, Homo sapien
ctcccaacgagaatgattttactgt

SEQ ID NO: 2376226 - DNA, 25 bp, Homo sapien
tgtaccagttaacaatagacagggt

SEQ ID NO: 2376227 - DNA, 25 bp, Homo sapien
tagacagggtgtgatcatagaactt

SEQ ID NO: 2376228 - DNA, 25 bp, Homo sapien
tgttccccttaatgtcacctgtgac

SEQ ID NO: 2376229 - DNA, 25 bp, Homo sapien
gacagagttcttatggcgcccagtt

SEQ ID NO: 2376230 - DNA, 25 bp, Homo sapien
tgcagtcaggaggatagtttgattt

SEQ ID NO: 2376231 - DNA, 25 bp, Homo sapien
cagtcaggaggatagtttgattttt

SEQ ID NO: 2376232 - DNA, 25 bp, Homo sapien
agtgcagtcaggaggatagtttgat

SEQ ID NO: 2376233 - DNA, 25 bp, Homo sapien
gtgcagtcaggaggatagtttgatt

SEQ ID NO: 2376234 - DNA, 25 bp, Homo sapien
ccaaacaatatcagtgtttgcaggg

SEQ ID NO: 2376235 - DNA, 25 bp, Homo sapien
caaacaatatcagtgtttgcaggga

SEQ ID NO: 2376236 - DNA, 25 bp, Homo sapien
aacaatatcagtgtttgcagggaat

SEQ ID NO: 2376237 - DNA, 25 bp, Homo sapien
aaacaatatcagtgtttgcagggaa

SEQ ID NO: 2376238 - DNA, 25 bp, Homo sapien
tgttgttaagtggtacaccgcggca

SEQ ID NO: 2376239 - DNA, 25 bp, Homo sapien
cagatgctcccgatggcaatgaggg

SEQ ID NO: 2376240 - DNA, 25 bp, Homo sapien
ggcatccttgggctctacaaataac

SEQ ID NO: 2376241 - DNA, 25 bp, Homo sapien
ggagatggcacaaatggcatccttg

SEQ ID NO: 2376242 - DNA, 25 bp, Homo sapien
gaaaagcttatatgagtcacactgg

SEQ ID NO: 2376243 - DNA, 25 bp, Homo sapien
cattgcatcaagaatgtaaactgtc

SEQ ID NO: 2376244 - DNA, 25 bp, Homo sapien
taaactgtcccctctgtaaagccag

SEQ ID NO: 2376245 - DNA, 25 bp, Homo sapien
tggaatatttgaaaggctctgggct

SEQ ID NO: 2376246 - DNA, 25 bp, Homo sapien
ggagtttagcgaagaccactgcttt

SEQ ID NO: 2376247 - DNA, 25 bp, Homo sapien
gtacacaaaccggaggagtggccgc

SEQ ID NO: 2376248 - DNA, 25 bp, Homo sapien
taaaattgctaagccactggatggg

SEQ ID NO: 2376249 - DNA, 25 bp, Homo sapien
tgaaggctgcaagtgaacccagttg

SEQ ID NO: 2376250 - DNA, 25 bp, Homo sapien
tgctgtccaggtaaaccccaaacag

SEQ ID NO: 2376251 - DNA, 25 bp, Homo sapien
tcgaatgcttttgcgatgagagcga

SEQ ID NO: 2376252 - DNA, 25 bp, Homo sapien
ccccaaacaggagacttcgaatgct

SEQ ID NO: 2376253 - DNA, 25 bp, Homo sapien
gcgaagtcttgctaagtactcccag

SEQ ID NO: 2376254 - DNA, 25 bp, Homo sapien
ccctggtcggtgtggtgaatgtcca

SEQ ID NO: 2376255 - DNA, 25 bp, Homo sapien
gaccatgcaggtgggatagcagccc

SEQ ID NO: 2376256 - DNA, 25 bp, Homo sapien
tgtagctcctgagaagatcatactc

SEQ ID NO: 2376257 - DNA, 25 bp, Homo sapien
tgcaaataagcaggaagagttccct

SEQ ID NO: 2376258 - DNA, 25 bp, Homo sapien
tactaccttgctacttgttcacgcc

SEQ ID NO: 2376259 - DNA, 25 bp, Homo sapien
agcattagcaactttcccagggccc

SEQ ID NO: 2376260 - DNA, 25 bp, Homo sapien
taaaacggtacctggctcacgcagg

SEQ ID NO: 2376261 - DNA, 25 bp, Homo sapien
caaacaattgttagtagccaggtaa

SEQ ID NO: 2376262 - DNA, 25 bp, Homo sapien
tctcactgggaggacttgtgtctgc

SEQ ID NO: 2376263 - DNA, 25 bp, Homo sapien
tcaataggggaaccataagctggcc

SEQ ID NO: 2376264 - DNA, 25 bp, Homo sapien
taaacaccaagtagcgtttctgtag

SEQ ID NO: 2376265 - DNA, 25 bp, Homo sapien
gtagctccgccatgcttctcactgg

SEQ ID NO: 2376266 - DNA, 25 bp, Homo sapien
cagatgtcttatgtggattgccgtc

SEQ ID NO: 2376267 - DNA, 25 bp, Homo sapien
ggattgccgtcaactggtaagatct

SEQ ID NO: 2376268 - DNA, 25 bp, Homo sapien
ctcccgcagtgaaggcgtagcagcc

SEQ ID NO: 2376269 - DNA, 25 bp, Homo sapien
ccgttcgggtggcaaacaatagcag

SEQ ID NO: 2376270 - DNA, 25 bp, Homo sapien
caggaaccggctgccacatggttga

SEQ ID NO: 2376271 - DNA, 25 bp, Homo sapien
cagcatgccggatttgggtagatga

SEQ ID NO: 2376272 - DNA, 25 bp, Homo sapien
gattctgagctcataagcaaatgcc

SEQ ID NO: 2376273 - DNA, 25 bp, Homo sapien
gacagtgtgggtgcttgtcccctct

SEQ ID NO: 2376274 - DNA, 25 bp, Homo sapien
cccaacactttaggtgcccaaggct

SEQ ID NO: 2376275 - DNA, 25 bp, Homo sapien
tccccaccacagattaaattgaaat

SEQ ID NO: 2376276 - DNA, 25 bp, Homo sapien
cgaaagctattggaaagcagaggcc

SEQ ID NO: 2376277 - DNA, 25 bp, Homo sapien
cattccagatcccacgacgactgag

SEQ ID NO: 2376278 - DNA, 25 bp, Homo sapien
ggtgtagctacatgcgatcccaacg

SEQ ID NO: 2376279 - DNA, 25 bp, Homo sapien
tgaaatttgggaactgtcagcagcc

SEQ ID NO: 2376280 - DNA, 25 bp, Homo sapien
catggaaatgggtatcagcacactc

SEQ ID NO: 2376281 - DNA, 25 bp, Homo sapien
cctgctgagtaaggaaacccagttc

SEQ ID NO: 2376282 - DNA, 25 bp, Homo sapien
tgtctgatggggataatattggtgc

SEQ ID NO: 2376283 - DNA, 25 bp, Homo sapien
ttagcttcttgatgtgtctgatggg

SEQ ID NO: 2376284 - DNA, 25 bp, Homo sapien
gataatattggtgcctggctcccag

SEQ ID NO: 2376285 - DNA, 25 bp, Homo sapien
atggggataatattggtgcctggct

SEQ ID NO: 2376286 - DNA, 25 bp, Homo sapien
tacacgggaattatcggagtacaat

SEQ ID NO: 2376287 - DNA, 25 bp, Homo sapien
ttgggcagtcatcagaccccttgga

SEQ ID NO: 2376288 - DNA, 25 bp, Homo sapien
tcacaaagattggagacaaaagtcc

SEQ ID NO: 2376289 - DNA, 25 bp, Homo sapien
tcctccattgcttgggcagtcatca

SEQ ID NO: 2376290 - DNA, 25 bp, Homo sapien
cagcagaccatagaatggggtcaag

SEQ ID NO: 2376291 - DNA, 25 bp, Homo sapien
ccatagaatggggtcaagtcttcac

SEQ ID NO: 2376292 - DNA, 25 bp, Homo sapien
aagagaaaccgctgcctccaggaca

SEQ ID NO: 2376293 - DNA, 25 bp, Homo sapien
ccccaagagaaaccgctgcctccag

SEQ ID NO: 2376294 - DNA, 25 bp, Homo sapien
cgatgccttgactgcggagctgaga

SEQ ID NO: 2376295 - DNA, 25 bp, Homo sapien
gaagctctgacaggcaaatgtgttc

SEQ ID NO: 2376296 - DNA, 25 bp, Homo sapien
caattgctctcatgacaaaaggaag

SEQ ID NO: 2376297 - DNA, 25 bp, Homo sapien
tcagatgggtaaaagccaattgctc

SEQ ID NO: 2376298 - DNA, 25 bp, Homo sapien
tccacagtccagacaagcacccagc

SEQ ID NO: 2376299 - DNA, 25 bp, Homo sapien
atgagggacggctgcaccctccgtg

SEQ ID NO: 2376300 - DNA, 25 bp, Homo sapien
gagggacggctgcaccctccgtgct

SEQ ID NO: 2376301 - DNA, 25 bp, Homo sapien
acagtccagacaagcacccagcttc

SEQ ID NO: 2376302 - DNA, 25 bp, Homo sapien
ccttgtgaaggagaacctctccctg

SEQ ID NO: 2376303 - DNA, 25 bp, Homo sapien
tttggtgactttcatagaagtgtga

SEQ ID NO: 2376304 - DNA, 25 bp, Homo sapien
tcatagaagtgtgaacctcaggtgc

SEQ ID NO: 2376305 - DNA, 25 bp, Homo sapien
ggccttgtgaaggagaacctctccc

SEQ ID NO: 2376306 - DNA, 25 bp, Homo sapien
aggaactgcgagaggcacggcccac

SEQ ID NO: 2376307 - DNA, 25 bp, Homo sapien
cccacaggaactgcgagaggcacgg

SEQ ID NO: 2376308 - DNA, 25 bp, Homo sapien
aactgcgagaggcacggcccacgat

SEQ ID NO: 2376309 - DNA, 25 bp, Homo sapien
gagagctgccggaatactcctcacc

SEQ ID NO: 2376310 - DNA, 25 bp, Homo sapien
gtgttttgctcctgagcacagcttt

SEQ ID NO: 2376311 - DNA, 25 bp, Homo sapien
ccactttggctgtgttttgctcctg

SEQ ID NO: 2376312 - DNA, 25 bp, Homo sapien
ctaggagcagcccaccatgaccact

SEQ ID NO: 2376313 - DNA, 25 bp, Homo sapien
accatgaccactttggctgtgtttt

SEQ ID NO: 2376314 - DNA, 25 bp, Homo sapien
cccctgcatctcctcgctgacccgg

SEQ ID NO: 2376315 - DNA, 25 bp, Homo sapien
cctgcatctcctcgctgacccgggg

SEQ ID NO: 2376316 - DNA, 25 bp, Homo sapien
tgcatctcctcgctgacccggggca

SEQ ID NO: 2376317 - DNA, 25 bp, Homo sapien
atctcctcgctgacccggggcaggg

SEQ ID NO: 2376318 - DNA, 25 bp, Homo sapien
atttccttcctgagccgacttcgca

SEQ ID NO: 2376319 - DNA, 25 bp, Homo sapien
gaggaacctcggagctggaaataga

SEQ ID NO: 2376320 - DNA, 25 bp, Homo sapien
tcgcaagtgttcgttgaaaaggcag

SEQ ID NO: 2376321 - DNA, 25 bp, Homo sapien
tcaacaagcacggagttggcagctt

SEQ ID NO: 2376322 - DNA, 25 bp, Homo sapien
tgtaatcataacataagataaatta

SEQ ID NO: 2376323 - DNA, 25 bp, Homo sapien
gggtagatcgttttaggagcttgag

SEQ ID NO: 2376324 - DNA, 25 bp, Homo sapien
cgttttaggagcttgagacagcctg

SEQ ID NO: 2376325 - DNA, 25 bp, Homo sapien
gctggagtgggtagatcgttttagg

SEQ ID NO: 2376326 - DNA, 25 bp, Homo sapien
ggtctccaccaaaaccagtcaggcg

SEQ ID NO: 2376327 - DNA, 25 bp, Homo sapien
cggtctccaccaaaaccagtcaggc

SEQ ID NO: 2376328 - DNA, 25 bp, Homo sapien
ccggtctccaccaaaaccagtcagg

SEQ ID NO: 2376329 - DNA, 25 bp, Homo sapien
cccggtctccaccaaaaccagtcag

SEQ ID NO: 2376330 - DNA, 25 bp, Homo sapien
ttctcagacggggtggttgccaggc

SEQ ID NO: 2376331 - DNA, 25 bp, Homo sapien
tcagacggggtggttgccaggcaga

SEQ ID NO: 2376332 - DNA, 25 bp, Homo sapien
ctcagacggggtggttgccaggcag

SEQ ID NO: 2376333 - DNA, 25 bp, Homo sapien
tctcagacggggtggttgccaggca

SEQ ID NO: 2376334 - DNA, 25 bp, Homo sapien
tgctctcgagttgtcacccgcaggt

SEQ ID NO: 2376335 - DNA, 25 bp, Homo sapien
aacccagtcacttgttgctctcgag

SEQ ID NO: 2376336 - DNA, 25 bp, Homo sapien
gcgcgtggatccctaacacacatgc

SEQ ID NO: 2376337 - DNA, 25 bp, Homo sapien
tatgtggttcatcacatgcgcgtgg

SEQ ID NO: 2376338 - DNA, 25 bp, Homo sapien
ctcgccccatgtactggctactgaa

SEQ ID NO: 2376339 - DNA, 25 bp, Homo sapien
ctcctcgccccatgtactggctact

SEQ ID NO: 2376340 - DNA, 25 bp, Homo sapien
tcgccccatgtactggctactgaat

SEQ ID NO: 2376341 - DNA, 25 bp, Homo sapien
gccccatgtactggctactgaattt

SEQ ID NO: 2376342 - DNA, 25 bp, Homo sapien
gatgatggtcaggaacggtgactca

SEQ ID NO: 2376343 - DNA, 25 bp, Homo sapien
tgtgctgttccctcgtgccatctca

SEQ ID NO: 2376344 - DNA, 25 bp, Homo sapien
cggtgactcacaccttgccatctca

SEQ ID NO: 2376345 - DNA, 25 bp, Homo sapien
tgtggcgtacgcctttgcattcacg

SEQ ID NO: 2376346 - DNA, 25 bp, Homo sapien
cacctcaaagctcttgtggatgcca

SEQ ID NO: 2376347 - DNA, 25 bp, Homo sapien
tagtaacgagcagtctcaggaagtc

SEQ ID NO: 2376348 - DNA, 25 bp, Homo sapien
tgtcgattagctttccagtgtccac

SEQ ID NO: 2376349 - DNA, 25 bp, Homo sapien
ggagttggtataaccgagcacctca

SEQ ID NO: 2376350 - DNA, 25 bp, Homo sapien
gggattcaggccaaacagtgaagca

SEQ ID NO: 2376351 - DNA, 25 bp, Homo sapien
tccctcgggattcaggccaaacagt

SEQ ID NO: 2376352 - DNA, 25 bp, Homo sapien
gtgaagcaaagcaatccaacatctc

SEQ ID NO: 2376353 - DNA, 25 bp, Homo sapien
gttgcaggctcggatttccatccct

SEQ ID NO: 2376354 - DNA, 25 bp, Homo sapien
ttcagtcgcgaatatttctgcagtg

SEQ ID NO: 2376355 - DNA, 25 bp, Homo sapien
tcctggccggaatcttctgaaatgg

SEQ ID NO: 2376356 - DNA, 25 bp, Homo sapien
atggttaagccaagaatttcagtcg

SEQ ID NO: 2376357 - DNA, 25 bp, Homo sapien
cagtgatttcgtctggaagttcttc

SEQ ID NO: 2376358 - DNA, 25 bp, Homo sapien
acacacacccaaagtcctttgtgct

SEQ ID NO: 2376359 - DNA, 25 bp, Homo sapien
cacacacacccaaagtcctttgtgc

SEQ ID NO: 2376360 - DNA, 25 bp, Homo sapien
gcacacacacccaaagtcctttgtg

SEQ ID NO: 2376361 - DNA, 25 bp, Homo sapien
agaaacttgctttaatgtctaaatg

SEQ ID NO: 2376362 - DNA, 25 bp, Homo sapien
cagaaacttgctttaatgtctaaat

SEQ ID NO: 2376363 - DNA, 25 bp, Homo sapien
aaacttgctttaatgtctaaatgtt

SEQ ID NO: 2376364 - DNA, 25 bp, Homo sapien
gaaacttgctttaatgtctaaatgt

SEQ ID NO: 2376365 - DNA, 25 bp, Homo sapien
gatttccagctggaccccacgtagt

SEQ ID NO: 2376366 - DNA, 25 bp, Homo sapien
ggaatgttccttccgagaaaggcac

SEQ ID NO: 2376367 - DNA, 25 bp, Homo sapien
gaaaggcactttaagtggatcagaa

SEQ ID NO: 2376368 - DNA, 25 bp, Homo sapien
cttcgtgcatgagtaaggatgtggt

SEQ ID NO: 2376369 - DNA, 25 bp, Homo sapien
tccggggcgttccaaagattctcac

SEQ ID NO: 2376370 - DNA, 25 bp, Homo sapien
tcacagtgacacagcctggtttggg

SEQ ID NO: 2376371 - DNA, 25 bp, Homo sapien
ttccggggcgttccaaagattctca

SEQ ID NO: 2376372 - DNA, 25 bp, Homo sapien
tcagtgaacataaccgtaaccatga

SEQ ID NO: 2376373 - DNA, 25 bp, Homo sapien
taaccatgatccataaccaggacct

SEQ ID NO: 2376374 - DNA, 25 bp, Homo sapien
gaacataaccgtaaccatgatccat

SEQ ID NO: 2376375 - DNA, 25 bp, Homo sapien
aaccgtaaccatgatccataaccag

SEQ ID NO: 2376376 - DNA, 25 bp, Homo sapien
atgtaagagtcagccggccacaagc

SEQ ID NO: 2376377 - DNA, 25 bp, Homo sapien
gatccagaactcacaaaccgggatg

SEQ ID NO: 2376378 - DNA, 25 bp, Homo sapien
gaccgggtctggagcagagagctgg

SEQ ID NO: 2376379 - DNA, 25 bp, Homo sapien
acaagccccgtgtgaaacgcacagg

SEQ ID NO: 2376380 - DNA, 25 bp, Homo sapien
gaacaccagcttcggggcaccgaga

SEQ ID NO: 2376381 - DNA, 25 bp, Homo sapien
cgagacccgcagctcactgtcccac

SEQ ID NO: 2376382 - DNA, 25 bp, Homo sapien
agcttcggggcaccgagacccgcag

SEQ ID NO: 2376383 - DNA, 25 bp, Homo sapien
tcgggagaacaccagcttcggggca

SEQ ID NO: 2376384 - DNA, 25 bp, Homo sapien
cagtgctggacgactttcctggggc

SEQ ID NO: 2376385 - DNA, 25 bp, Homo sapien
tttcacactctcagggagggcagtg

SEQ ID NO: 2376386 - DNA, 25 bp, Homo sapien
gatgcctcacgcctgggcactgata

SEQ ID NO: 2376387 - DNA, 25 bp, Homo sapien
gataaatgtgagtccgccttggcat

SEQ ID NO: 2376388 - DNA, 25 bp, Homo sapien
gtggaggctcgttcaccactgcggg

SEQ ID NO: 2376389 - DNA, 25 bp, Homo sapien
cggggtggaggctcgttcaccactg

SEQ ID NO: 2376390 - DNA, 25 bp, Homo sapien
gggtggaggctcgttcaccactgcg

SEQ ID NO: 2376391 - DNA, 25 bp, Homo sapien
ggtggaggctcgttcaccactgcgg

SEQ ID NO: 2376392 - DNA, 25 bp, Homo sapien
tgatcagcatcgtaacagggactct

SEQ ID NO: 2376393 - DNA, 25 bp, Homo sapien
tgttcaaatgcgagctaggacgtcg

SEQ ID NO: 2376394 - DNA, 25 bp, Homo sapien
gaaagagttgggcatcgcgcatctc

SEQ ID NO: 2376395 - DNA, 25 bp, Homo sapien
gacttctccgagttgaaggcaccgg

SEQ ID NO: 2376396 - DNA, 25 bp, Homo sapien
gatcgccgccatgaccctcttgata

SEQ ID NO: 2376397 - DNA, 25 bp, Homo sapien
tgaccctcttgatatcatctttggc

SEQ ID NO: 2376398 - DNA, 25 bp, Homo sapien
ggctcctcgtctcggctcgaaccga

SEQ ID NO: 2376399 - DNA, 25 bp, Homo sapien
tgatatcatctttggcccggctcct

SEQ ID NO: 2376400 - DNA, 25 bp, Homo sapien
agcctgccccaaatgagagggaggc

SEQ ID NO: 2376401 - DNA, 25 bp, Homo sapien
tgccccaaatgagagggaggccaca

SEQ ID NO: 2376402 - DNA, 25 bp, Homo sapien
agaacaggaggcagcctgccccaaa

SEQ ID NO: 2376403 - DNA, 25 bp, Homo sapien
aaaaagagaacaggaggcagcctgc

SEQ ID NO: 2376404 - DNA, 25 bp, Homo sapien
ccaagcttacgctgcagcccaagct

SEQ ID NO: 2376405 - DNA, 25 bp, Homo sapien
cgggcctccaagcttacgctgcagc

SEQ ID NO: 2376406 - DNA, 25 bp, Homo sapien
agcccaagctttcgtctcctaccat

SEQ ID NO: 2376407 - DNA, 25 bp, Homo sapien
gctttcgtctcctaccatcgccctg

SEQ ID NO: 2376408 - DNA, 25 bp, Homo sapien
agccactgcgtccagactaattttt

SEQ ID NO: 2376409 - DNA, 25 bp, Homo sapien
cacctcctgggttcccgccattctc

SEQ ID NO: 2376410 - DNA, 25 bp, Homo sapien
actgcgtccagactaatttttcttt

SEQ ID NO: 2376411 - DNA, 25 bp, Homo sapien
ccacctcctgggttcccgccattct

SEQ ID NO: 2376412 - DNA, 25 bp, Homo sapien
tccatcccagattctccaggctaag

SEQ ID NO: 2376413 - DNA, 25 bp, Homo sapien
gaaaaaatgaggtcccagcagtagg

SEQ ID NO: 2376414 - DNA, 25 bp, Homo sapien
caggctaaggccaatttcgaatgtt

SEQ ID NO: 2376415 - DNA, 25 bp, Homo sapien
ggttagccaacaagaccatcttagg

SEQ ID NO: 2376416 - DNA, 25 bp, Homo sapien
cacctttcccttcccattacacttg

SEQ ID NO: 2376417 - DNA, 25 bp, Homo sapien
ttcccttcccattacacttgagctt

SEQ ID NO: 2376418 - DNA, 25 bp, Homo sapien
tgacttcaacacctttcccttccca

SEQ ID NO: 2376419 - DNA, 25 bp, Homo sapien
tcaacacctttcccttcccattaca

SEQ ID NO: 2376420 - DNA, 25 bp, Homo sapien
caggtgcagaaatccccacaaccac

SEQ ID NO: 2376421 - DNA, 25 bp, Homo sapien
tgtgccccgcgcctcctgtcttggc

SEQ ID NO: 2376422 - DNA, 25 bp, Homo sapien
ccaggtgcagaaatccccacaacca

SEQ ID NO: 2376423 - DNA, 25 bp, Homo sapien
cctgggtgtgccccgcgcctcctgt

SEQ ID NO: 2376424 - DNA, 25 bp, Homo sapien
ggacatgggatttcacagccacaga

SEQ ID NO: 2376425 - DNA, 25 bp, Homo sapien
gagttctcaagttaccccagtgatg

SEQ ID NO: 2376426 - DNA, 25 bp, Homo sapien
cagctgaggtttcccacaattgccc

SEQ ID NO: 2376427 - DNA, 25 bp, Homo sapien
cacacgggttcagcggagcagctga

SEQ ID NO: 2376428 - DNA, 25 bp, Homo sapien
gatgtgtcaccaacggtcacccatt

SEQ ID NO: 2376429 - DNA, 25 bp, Homo sapien
tgtagattcgtagggatgtgtcacc

SEQ ID NO: 2376430 - DNA, 25 bp, Homo sapien
ggctccgtcacagggacccatttgt

SEQ ID NO: 2376431 - DNA, 25 bp, Homo sapien
gtcatcaaccttgggctccgtcaca

SEQ ID NO: 2376432 - DNA, 25 bp, Homo sapien
ccagtggtaagcaaaggatgtgtgt

SEQ ID NO: 2376433 - DNA, 25 bp, Homo sapien
aaacctggcaacactggttgcctcc

SEQ ID NO: 2376434 - DNA, 25 bp, Homo sapien
gcgaagtctccctttagaaggataa

SEQ ID NO: 2376435 - DNA, 25 bp, Homo sapien
tacatgcatgtttgcgagcgaagtc

SEQ ID NO: 2376436 - DNA, 25 bp, Homo sapien
cttggctgaactgtaggagactcgt

SEQ ID NO: 2376437 - DNA, 25 bp, Homo sapien
catgttagaaacaaccttggctgaa

SEQ ID NO: 2376438 - DNA, 25 bp, Homo sapien
gtggttcttcacagactaacatggg

SEQ ID NO: 2376439 - DNA, 25 bp, Homo sapien
ggagactcgttaaatcaatcgtggt

SEQ ID NO: 2376440 - DNA, 25 bp, Homo sapien
tcacctctgagccacacttctcgtc

SEQ ID NO: 2376441 - DNA, 25 bp, Homo sapien
cctctgagccacacttctcgtcctt

SEQ ID NO: 2376442 - DNA, 25 bp, Homo sapien
cacttctcgtccttgccttttttct

SEQ ID NO: 2376443 - DNA, 25 bp, Homo sapien
gtggtcacctctgagccacacttct

SEQ ID NO: 2376444 - DNA, 25 bp, Homo sapien
aacatgaccgagtgcttggccaagg

SEQ ID NO: 2376445 - DNA, 25 bp, Homo sapien
acaaaaacatgaccgagtgcttggc

SEQ ID NO: 2376446 - DNA, 25 bp, Homo sapien
acatgaccgagtgcttggccaaggc

SEQ ID NO: 2376447 - DNA, 25 bp, Homo sapien
aacaaaaacatgaccgagtgcttgg

SEQ ID NO: 2376448 - DNA, 25 bp, Homo sapien
ttggtacgctgggaaaagaaacatc

SEQ ID NO: 2376449 - DNA, 25 bp, Homo sapien
agggtctaatttctatgtctctggc

SEQ ID NO: 2376450 - DNA, 25 bp, Homo sapien
ggctgagagaaacatctcctgcggg

SEQ ID NO: 2376451 - DNA, 25 bp, Homo sapien
catacgcccaaacaatcttcctgga

SEQ ID NO: 2376452 - DNA, 25 bp, Homo sapien
taggtgtagacgtggaagggcagtt

SEQ ID NO: 2376453 - DNA, 25 bp, Homo sapien
ttaggtgtagacgtggaagggcagt

SEQ ID NO: 2376454 - DNA, 25 bp, Homo sapien
aggtgtagacgtggaagggcagttc

SEQ ID NO: 2376455 - DNA, 25 bp, Homo sapien
ggtgtagacgtggaagggcagttcc

SEQ ID NO: 2376456 - DNA, 25 bp, Homo sapien
gggactatagatacgaaccacctat

SEQ ID NO: 2376457 - DNA, 25 bp, Homo sapien
gactatagatacgaaccacctattg

SEQ ID NO: 2376458 - DNA, 25 bp, Homo sapien
ggactatagatacgaaccacctatt

SEQ ID NO: 2376459 - DNA, 25 bp, Homo sapien
tgaaaatcaaggtggagtgtacagg

SEQ ID NO: 2376460 - DNA, 25 bp, Homo sapien
tacagggggatcgtattcctctctc

SEQ ID NO: 2376461 - DNA, 25 bp, Homo sapien
tctactgttcttgacaacaaaaccc

SEQ ID NO: 2376462 - DNA, 25 bp, Homo sapien
cctaggagagtcgttttaaacagca

SEQ ID NO: 2376463 - DNA, 25 bp, Homo sapien
cacacccggccactagctgtgtatt

SEQ ID NO: 2376464 - DNA, 25 bp, Homo sapien
tacaaaaatctaacacattgaaaaa

SEQ ID NO: 2376465 - DNA, 25 bp, Homo sapien
atcacacccggccactagctgtgta

SEQ ID NO: 2376466 - DNA, 25 bp, Homo sapien
atctaacacattgaaaaaatagatg

SEQ ID NO: 2376467 - DNA, 25 bp, Homo sapien
ggacgggtaggtcagagggctcagc

SEQ ID NO: 2376468 - DNA, 25 bp, Homo sapien
acgggtaggtcagagggctcagcat

SEQ ID NO: 2376469 - DNA, 25 bp, Homo sapien
ctgccaaggacgggtaggtcagagg

SEQ ID NO: 2376470 - DNA, 25 bp, Homo sapien
gccaaggacgggtaggtcagagggc

SEQ ID NO: 2376471 - DNA, 25 bp, Homo sapien
gggtgggaacagaaccacaggatga

SEQ ID NO: 2376472 - DNA, 25 bp, Homo sapien
agaaccacaggatgaaatcccacag

SEQ ID NO: 2376473 - DNA, 25 bp, Homo sapien
cagaaccacaggatgaaatcccaca

SEQ ID NO: 2376474 - DNA, 25 bp, Homo sapien
gaacagaaccacaggatgaaatccc

SEQ ID NO: 2376475 - DNA, 25 bp, Homo sapien
gatggagctctggttgctgttatcg

SEQ ID NO: 2376476 - DNA, 25 bp, Homo sapien
tgggcacagccgagttgggctctgg

SEQ ID NO: 2376477 - DNA, 25 bp, Homo sapien
aggcatctgcgatggagctctggtt

SEQ ID NO: 2376478 - DNA, 25 bp, Homo sapien
cttggcctcggtgccgtcgctgggc

SEQ ID NO: 2376479 - DNA, 25 bp, Homo sapien
gccggttacagggaggccgtcagag

SEQ ID NO: 2376480 - DNA, 25 bp, Homo sapien
aggccggttacagggaggccgtcag

SEQ ID NO: 2376481 - DNA, 25 bp, Homo sapien
ccggttacagggaggccgtcagagc

SEQ ID NO: 2376482 - DNA, 25 bp, Homo sapien
ggccggttacagggaggccgtcaga

SEQ ID NO: 2376483 - DNA, 25 bp, Homo sapien
tcctggaacacctagccacagactg

SEQ ID NO: 2376484 - DNA, 25 bp, Homo sapien
acctctctttactgtctccttgctg

SEQ ID NO: 2376485 - DNA, 25 bp, Homo sapien
ggcctcctggaacacctagccacag

SEQ ID NO: 2376486 - DNA, 25 bp, Homo sapien
gggctggcacatgacagggcctcct

SEQ ID NO: 2376487 - DNA, 25 bp, Homo sapien
taattcccccacgagaccatgtact

SEQ ID NO: 2376488 - DNA, 25 bp, Homo sapien
tttaattcccccacgagaccatgta

SEQ ID NO: 2376489 - DNA, 25 bp, Homo sapien
ccccacgagaccatgtactccaggt

SEQ ID NO: 2376490 - DNA, 25 bp, Homo sapien
tcccccacgagaccatgtactccag

SEQ ID NO: 2376491 - DNA, 25 bp, Homo sapien
catgtttagggatgaaatgtcctga

SEQ ID NO: 2376492 - DNA, 25 bp, Homo sapien
tcagcaggtggatatataggacagt

SEQ ID NO: 2376493 - DNA, 25 bp, Homo sapien
tttttaaaagacacgtgctgacatg

SEQ ID NO: 2376494 - DNA, 25 bp, Homo sapien
gccaacaattgccaagttcagcagg

SEQ ID NO: 2376495 - DNA, 25 bp, Homo sapien
gaaagaagcaggaacgcggctgcac

SEQ ID NO: 2376496 - DNA, 25 bp, Homo sapien
aaagaagcaggaacgcggctgcaca

SEQ ID NO: 2376497 - DNA, 25 bp, Homo sapien
ggtggaggtcccacctgcgtcccac

SEQ ID NO: 2376498 - DNA, 25 bp, Homo sapien
cacctgcgtcccaccaatttagcat

SEQ ID NO: 2376499 - DNA, 25 bp, Homo sapien
tggtggaggtcccacctgcgtccca

SEQ ID NO: 2376500 - DNA, 25 bp, Homo sapien
ctggtggaggtcccacctgcgtccc

SEQ ID NO: 2376501 - DNA, 25 bp, Homo sapien
ggccacacgggtctgtccttgtgcc

SEQ ID NO: 2376502 - DNA, 25 bp, Homo sapien
aggccacacgggtctgtccttgtgc

SEQ ID NO: 2376503 - DNA, 25 bp, Homo sapien
gccacacgggtctgtccttgtgccc

SEQ ID NO: 2376504 - DNA, 25 bp, Homo sapien
ccccatcccggcagacagcacgcac

SEQ ID NO: 2376505 - DNA, 25 bp, Homo sapien
catcccggcagacagcacgcaccca

SEQ ID NO: 2376506 - DNA, 25 bp, Homo sapien
cccatcccggcagacagcacgcacc

SEQ ID NO: 2376507 - DNA, 25 bp, Homo sapien
atcccggcagacagcacgcacccac

SEQ ID NO: 2376508 - DNA, 25 bp, Homo sapien
cccatggagacagaaagtttcgtgg

SEQ ID NO: 2376509 - DNA, 25 bp, Homo sapien
acacaaaaggccacagagtatatga

SEQ ID NO: 2376510 - DNA, 25 bp, Homo sapien
ggcaaacccatggagacagaaagtt

SEQ ID NO: 2376511 - DNA, 25 bp, Homo sapien
aaaaggccacagagtatatgattcc

SEQ ID NO: 2376512 - DNA, 25 bp, Homo sapien
cgagtctccagacggctgccgatct

SEQ ID NO: 2376513 - DNA, 25 bp, Homo sapien
cgaatgttccatcgaggactgtgaa

SEQ ID NO: 2376514 - DNA, 25 bp, Homo sapien
tgccgatctactttctctgagctgt

SEQ ID NO: 2376515 - DNA, 25 bp, Homo sapien
gattgcagacgtctctgcggccaga

SEQ ID NO: 2376516 - DNA, 25 bp, Homo sapien
acccaatgggctcccggccgatctg

SEQ ID NO: 2376517 - DNA, 25 bp, Homo sapien
aacccaatgggctcccggccgatct

SEQ ID NO: 2376518 - DNA, 25 bp, Homo sapien
acaacccaatgggctcccggccgat

SEQ ID NO: 2376519 - DNA, 25 bp, Homo sapien
cgacaacccaatgggctcccggccg

SEQ ID NO: 2376520 - DNA, 25 bp, Homo sapien
ccattcgctagccctctcctcaccc

SEQ ID NO: 2376521 - DNA, 25 bp, Homo sapien
cattcgctagccctctcctcaccct

SEQ ID NO: 2376522 - DNA, 25 bp, Homo sapien
tcctcaccctctgtgggaaggccat

SEQ ID NO: 2376523 - DNA, 25 bp, Homo sapien
ctctcctcaccctctgtgggaaggc

SEQ ID NO: 2376524 - DNA, 25 bp, Homo sapien
tggcctcaccggtggtacagcaggc

SEQ ID NO: 2376525 - DNA, 25 bp, Homo sapien
ggcagctacggaatcagacagccac

SEQ ID NO: 2376526 - DNA, 25 bp, Homo sapien
tgtgtcatggcgtacctgctgccta

SEQ ID NO: 2376527 - DNA, 25 bp, Homo sapien
ggtaaaatcagaatgacgcctcctc

SEQ ID NO: 2376528 - DNA, 25 bp, Homo sapien
ctgaaaggcaaggcaaagcggggag

SEQ ID NO: 2376529 - DNA, 25 bp, Homo sapien
gaaaggcaaggcaaagcggggagac

SEQ ID NO: 2376530 - DNA, 25 bp, Homo sapien
aaagcggggagactcagtggttact

SEQ ID NO: 2376531 - DNA, 25 bp, Homo sapien
caaagcggggagactcagtggttac

SEQ ID NO: 2376532 - DNA, 25 bp, Homo sapien
gatggcattattgagccggatcttg

SEQ ID NO: 2376533 - DNA, 25 bp, Homo sapien
atggcattattgagccggatcttgt

SEQ ID NO: 2376534 - DNA, 25 bp, Homo sapien
agatggcattattgagccggatctt

SEQ ID NO: 2376535 - DNA, 25 bp, Homo sapien
gggtgtcacaaagtggcacacagga

SEQ ID NO: 2376536 - DNA, 25 bp, Homo sapien
cggcggtgctcgtctacgtccacag

SEQ ID NO: 2376537 - DNA, 25 bp, Homo sapien
ggtgtcacaaagtggcacacaggat

SEQ ID NO: 2376538 - DNA, 25 bp, Homo sapien
tgctcgtctacgtccacagagccgt

SEQ ID NO: 2376539 - DNA, 25 bp, Homo sapien
tccacttgtgatactcccggatcac

SEQ ID NO: 2376540 - DNA, 25 bp, Homo sapien
gatactcccggatcacaatctcgat

SEQ ID NO: 2376541 - DNA, 25 bp, Homo sapien
tcgatgcggctcttccagtacttcc

SEQ ID NO: 2376542 - DNA, 25 bp, Homo sapien
cacaatctcgatgcggctcttccag

SEQ ID NO: 2376543 - DNA, 25 bp, Homo sapien
cctcggccagggccctgaaccaggg

SEQ ID NO: 2376544 - DNA, 25 bp, Homo sapien
gctgcctgaacactccagccagata

SEQ ID NO: 2376545 - DNA, 25 bp, Homo sapien
aggcgggctgcctgaacactccagc

SEQ ID NO: 2376546 - DNA, 25 bp, Homo sapien
cccactccctccctaggcgggctgc

SEQ ID NO: 2376547 - DNA, 25 bp, Homo sapien
gacacggcggtcaccaatggcccta

SEQ ID NO: 2376548 - DNA, 25 bp, Homo sapien
acacggcggtcaccaatggccctag

SEQ ID NO: 2376549 - DNA, 25 bp, Homo sapien
ggtcctcatccttgtgctgctgtag

SEQ ID NO: 2376550 - DNA, 25 bp, Homo sapien
ggaccaggctggagaggtcctcatc

SEQ ID NO: 2376551 - DNA, 25 bp, Homo sapien
tggagaggtcctcatccttgtgctg

SEQ ID NO: 2376552 - DNA, 25 bp, Homo sapien
aggctggagaggtcctcatccttgt

SEQ ID NO: 2376553 - DNA, 25 bp, Homo sapien
ggacgaagaattcccacgcctgtca

SEQ ID NO: 2376554 - DNA, 25 bp, Homo sapien
gagagctggactgcttcttgagcca

SEQ ID NO: 2376555 - DNA, 25 bp, Homo sapien
ggaagcatcaaagagtaacagtggg

SEQ ID NO: 2376556 - DNA, 25 bp, Homo sapien
agggcccatggcctgccgccttttg

SEQ ID NO: 2376557 - DNA, 25 bp, Homo sapien
gggtcttccatccatccccgtgctt

SEQ ID NO: 2376558 - DNA, 25 bp, Homo sapien
agaagagggtgtcgctgaattccga

SEQ ID NO: 2376559 - DNA, 25 bp, Homo sapien
tgtccagcaggggatcctcctccat

SEQ ID NO: 2376560 - DNA, 25 bp, Homo sapien
catccccgtgcttgtgccaatacag

SEQ ID NO: 2376561 - DNA, 25 bp, Homo sapien
aaaggaatcagtcccggctggatca

SEQ ID NO: 2376562 - DNA, 25 bp, Homo sapien
aggctcaaaggtgtccatgaagtcc

SEQ ID NO: 2376563 - DNA, 25 bp, Homo sapien
gttaggctgcaaaggaatcagtccc

SEQ ID NO: 2376564 - DNA, 25 bp, Homo sapien
cctggaaaggctcaaaggtgtccat

SEQ ID NO: 2376565 - DNA, 25 bp, Homo sapien
tagcatggagccaaaaatggagcgg

SEQ ID NO: 2376566 - DNA, 25 bp, Homo sapien
tgcaggtagcatggagccaaaaatg

SEQ ID NO: 2376567 - DNA, 25 bp, Homo sapien
caggtgggttgttgggatctggtac

SEQ ID NO: 2376568 - DNA, 25 bp, Homo sapien
gtacaggtgctgaggcagatgcagg

SEQ ID NO: 2376569 - DNA, 25 bp, Homo sapien
gaagcacacctggaccaagagtctc

SEQ ID NO: 2376570 - DNA, 25 bp, Homo sapien
agaagcacacctggaccaagagtct

SEQ ID NO: 2376571 - DNA, 25 bp, Homo sapien
cagaagcacacctggaccaagagtc

SEQ ID NO: 2376572 - DNA, 25 bp, Homo sapien
gaatccccgaggacaatttcacgtg

SEQ ID NO: 2376573 - DNA, 25 bp, Homo sapien
tgcagtagcaattcttcccggagcc

SEQ ID NO: 2376574 - DNA, 25 bp, Homo sapien
taattagtcggagcagagctagctg

SEQ ID NO: 2376575 - DNA, 25 bp, Homo sapien
tgtctaactggtcatgggcataagc

SEQ ID NO: 2376576 - DNA, 25 bp, Homo sapien
agcaatgctggggtcagacaattcc

SEQ ID NO: 2376577 - DNA, 25 bp, Homo sapien
ggagccaggaagcaatgctggggtc

SEQ ID NO: 2376578 - DNA, 25 bp, Homo sapien
aggaagcaatgctggggtcagacaa

SEQ ID NO: 2376579 - DNA, 25 bp, Homo sapien
atgctggggtcagacaattcctttc

SEQ ID NO: 2376580 - DNA, 25 bp, Homo sapien
gggagggctgtggtcggcaggatgc

SEQ ID NO: 2376581 - DNA, 25 bp, Homo sapien
gagggctgtggtcggcaggatgctc

SEQ ID NO: 2376582 - DNA, 25 bp, Homo sapien
ggcgcgatgaggctgtcaggaaggc

SEQ ID NO: 2376583 - DNA, 25 bp, Homo sapien
gatggggcggtagggggcgcgatga

SEQ ID NO: 2376584 - DNA, 25 bp, Homo sapien
gcgggacactcagtggcggctctga

SEQ ID NO: 2376585 - DNA, 25 bp, Homo sapien
cctcagtccgggaggtgtgttcaca

SEQ ID NO: 2376586 - DNA, 25 bp, Homo sapien
cgtgggctggataaacgggtcctca

SEQ ID NO: 2376587 - DNA, 25 bp, Homo sapien
tctgagggaccgaagtccgtgggct

SEQ ID NO: 2376588 - DNA, 25 bp, Homo sapien
agcaggggcatggtgaagacaggga

SEQ ID NO: 2376589 - DNA, 25 bp, Homo sapien
gacggcgctttgttgactccagcaa

SEQ ID NO: 2376590 - DNA, 25 bp, Homo sapien
tgcacaaaagttaaccgtggctggg

SEQ ID NO: 2376591 - DNA, 25 bp, Homo sapien
cgggcattcttcaacaccaaggaca

SEQ ID NO: 2376592 - DNA, 25 bp, Homo sapien
caggaggaggaactaatggtaacac

SEQ ID NO: 2376593 - DNA, 25 bp, Homo sapien
catgcacgtgcacaccagggtggtg

SEQ ID NO: 2376594 - DNA, 25 bp, Homo sapien
cgcactgagtctccccgcctggctc

SEQ ID NO: 2376595 - DNA, 25 bp, Homo sapien
ggtggtggtcacaagtttgaaagcc

SEQ ID NO: 2376596 - DNA, 25 bp, Homo sapien
gatgggaaaacatccctctgggtcg

SEQ ID NO: 2376597 - DNA, 25 bp, Homo sapien
ggcacctaaaaccatttgtgtgact

SEQ ID NO: 2376598 - DNA, 25 bp, Homo sapien
cactgtaggttgtgactaactttaa

SEQ ID NO: 2376599 - DNA, 25 bp, Homo sapien
cttgaaggagacatgttatagaccc

SEQ ID NO: 2376600 - DNA, 25 bp, Homo sapien
gagacatgttatagacccaggaaag

SEQ ID NO: 2376601 - DNA, 25 bp, Homo sapien
gacgtcatgatcaccgcttgtggtt

SEQ ID NO: 2376602 - DNA, 25 bp, Homo sapien
gacacggtggaggccaacatccctt

SEQ ID NO: 2376603 - DNA, 25 bp, Homo sapien
tggcagcaggcgcaatgaccacgtt

SEQ ID NO: 2376604 - DNA, 25 bp, Homo sapien
tgaccacgttggactgggacacggt

SEQ ID NO: 2376605 - DNA, 25 bp, Homo sapien
acatgggagacaggtcacccctgac

SEQ ID NO: 2376606 - DNA, 25 bp, Homo sapien
catgggagacaggtcacccctgact

SEQ ID NO: 2376607 - DNA, 25 bp, Homo sapien
tgacatgggagacaggtcacccctg

SEQ ID NO: 2376608 - DNA, 25 bp, Homo sapien
gacatgggagacaggtcacccctga

SEQ ID NO: 2376609 - DNA, 25 bp, Homo sapien
gggcaggcgggctgctcgtgccatg

SEQ ID NO: 2376610 - DNA, 25 bp, Homo sapien
ggctgctcgtgccatggccgagatc

SEQ ID NO: 2376611 - DNA, 25 bp, Homo sapien
catggccgagatctgtcaccaggat

SEQ ID NO: 2376612 - DNA, 25 bp, Homo sapien
tcttgcgctgtgcttgggaagagcc

SEQ ID NO: 2376613 - DNA, 25 bp, Homo sapien
cccctggatggcctaagagtggaca

SEQ ID NO: 2376614 - DNA, 25 bp, Homo sapien
gagatcagcagctcagtaccaggcc

SEQ ID NO: 2376615 - DNA, 25 bp, Homo sapien
tggacatgggccacagacctgtagt

SEQ ID NO: 2376616 - DNA, 25 bp, Homo sapien
tcccagactgtgttatcagcaggcc

SEQ ID NO: 2376617 - DNA, 25 bp, Homo sapien
agattgaggactggggctctgctcc

SEQ ID NO: 2376618 - DNA, 25 bp, Homo sapien
ggctctgctccgatgcacacggaga

SEQ ID NO: 2376619 - DNA, 25 bp, Homo sapien
cgatgcacacggagaggcctgccct

SEQ ID NO: 2376620 - DNA, 25 bp, Homo sapien
cctgagcagttgttctggggagatt

SEQ ID NO: 2376621 - DNA, 25 bp, Homo sapien
tggagaacccgctggtcactaagac

SEQ ID NO: 2376622 - DNA, 25 bp, Homo sapien
ctacgctgatcctgggtgcccaagg

SEQ ID NO: 2376623 - DNA, 25 bp, Homo sapien
aacccgctggtcactaagacaggca

SEQ ID NO: 2376624 - DNA, 25 bp, Homo sapien
tggtcactaagacaggcacattgca

SEQ ID NO: 2376625 - DNA, 25 bp, Homo sapien
gagcatgtcgaagcacatcttgatg

SEQ ID NO: 2376626 - DNA, 25 bp, Homo sapien
cgaagcacatcttgatgttgaagcg

SEQ ID NO: 2376627 - DNA, 25 bp, Homo sapien
gctgttgagcatgtcgaagcacatc

SEQ ID NO: 2376628 - DNA, 25 bp, Homo sapien
agatgaggctgttgagcatgtcgaa

SEQ ID NO: 2376629 - DNA, 25 bp, Homo sapien
gcaatgaccacgcagggagcacgtc

SEQ ID NO: 2376630 - DNA, 25 bp, Homo sapien
aatgaccacgcagggagcacgtcct

SEQ ID NO: 2376631 - DNA, 25 bp, Homo sapien
caatgaccacgcagggagcacgtcc

SEQ ID NO: 2376632 - DNA, 25 bp, Homo sapien
ggtgatgtactccacagtcttctgc

SEQ ID NO: 2376633 - DNA, 25 bp, Homo sapien
cttggtgatgtactccacagtcttc

SEQ ID NO: 2376634 - DNA, 25 bp, Homo sapien
cagtcttctgcagtgtgatggcgtg

SEQ ID NO: 2376635 - DNA, 25 bp, Homo sapien
tctgcagtgtgatggcgtgactggt

SEQ ID NO: 2376636 - DNA, 25 bp, Homo sapien
ggtggcattgagctcctcgatctcc

SEQ ID NO: 2376637 - DNA, 25 bp, Homo sapien
tggtggcattgagctcctcgatctc

SEQ ID NO: 2376638 - DNA, 25 bp, Homo sapien
atgatggtggcattgagctcctcga

SEQ ID NO: 2376639 - DNA, 25 bp, Homo sapien
gatggtggcattgagctcctcgatc

SEQ ID NO: 2376640 - DNA, 25 bp, Homo sapien
ggagccgtgggagctgtggagcagc

SEQ ID NO: 2376641 - DNA, 25 bp, Homo sapien
gagcagccagtggccaataaggacc

SEQ ID NO: 2376642 - DNA, 25 bp, Homo sapien
ctgaaatgacaggagccgtgggagc

SEQ ID NO: 2376643 - DNA, 25 bp, Homo sapien
gacaggagccgtgggagctgtggag

SEQ ID NO: 2376644 - DNA, 25 bp, Homo sapien
tgtgatcaaactggcgccgggtaac

SEQ ID NO: 2376645 - DNA, 25 bp, Homo sapien
tctttcatgtgatcaaactggcgcc

SEQ ID NO: 2376646 - DNA, 25 bp, Homo sapien
tgtctttcatgtgatcaaactggcg

SEQ ID NO: 2376647 - DNA, 25 bp, Homo sapien
ttcatgtgatcaaactggcgccggg

SEQ ID NO: 2376648 - DNA, 25 bp, Homo sapien
caattctgcaaggtccgggttttca

SEQ ID NO: 2376649 - DNA, 25 bp, Homo sapien
ccacctggaaggctgagtgcaaggt

SEQ ID NO: 2376650 - DNA, 25 bp, Homo sapien
tccattaggcttcaaattgggctct

SEQ ID NO: 2376651 - DNA, 25 bp, Homo sapien
tgccacggtcaacccaacacatgtg

SEQ ID NO: 2376652 - DNA, 25 bp, Homo sapien
catgtgccgaccgtttactcagagg

SEQ ID NO: 2376653 - DNA, 25 bp, Homo sapien
ctccacctcggcctgatgatgggga

SEQ ID NO: 2376654 - DNA, 25 bp, Homo sapien
cacctcggcctgatgatggggagta

SEQ ID NO: 2376655 - DNA, 25 bp, Homo sapien
gggagtatgccatttcatcaaagaa

SEQ ID NO: 2376656 - DNA, 25 bp, Homo sapien
aagaagctctgattcattccagacg

SEQ ID NO: 2376657 - DNA, 25 bp, Homo sapien
actgcagacccgaaggtggttggac

SEQ ID NO: 2376658 - DNA, 25 bp, Homo sapien
tggactggcgtactcctttcccctg

SEQ ID NO: 2376659 - DNA, 25 bp, Homo sapien
gcagtgtgtggttaaagaaaaggca

SEQ ID NO: 2376660 - DNA, 25 bp, Homo sapien
ctgcagtgtgtggttaaagaaaagg

SEQ ID NO: 2376661 - DNA, 25 bp, Homo sapien
caaacagcggcttgatgatgatgct

SEQ ID NO: 2376662 - DNA, 25 bp, Homo sapien
caggagagcgccgtccggtgcagct

SEQ ID NO: 2376663 - DNA, 25 bp, Homo sapien
gaacgactcaaacagcggcttgatg

SEQ ID NO: 2376664 - DNA, 25 bp, Homo sapien
accatgcccttgaacgactcaaaca

SEQ ID NO: 2376665 - DNA, 25 bp, Homo sapien
gctgtgccgggtctgtgaggatgga

SEQ ID NO: 2376666 - DNA, 25 bp, Homo sapien
ggtgacagccttggacgcctgctct

SEQ ID NO: 2376667 - DNA, 25 bp, Homo sapien
ctcagctgccgcagcgtgctcaata

SEQ ID NO: 2376668 - DNA, 25 bp, Homo sapien
agctgccgcagcgtgctcaatacca

SEQ ID NO: 2376669 - DNA, 25 bp, Homo sapien
atgcggccacatgccagctaagcag

SEQ ID NO: 2376670 - DNA, 25 bp, Homo sapien
tgcttcagacctgagcatggcctcc

SEQ ID NO: 2376671 - DNA, 25 bp, Homo sapien
gcgcagcctactctccatgggcagg

SEQ ID NO: 2376672 - DNA, 25 bp, Homo sapien
caaaggcgggctattgctgtcagca

SEQ ID NO: 2376673 - DNA, 25 bp, Homo sapien
taaagtgcattctttccacgaggag

SEQ ID NO: 2376674 - DNA, 25 bp, Homo sapien
agaggtcgcctgaaagcctgggctc

SEQ ID NO: 2376675 - DNA, 25 bp, Homo sapien
tctgagagatgcctagaaacagctc

SEQ ID NO: 2376676 - DNA, 25 bp, Homo sapien
tctttggtccgagaactgtcctggt

SEQ ID NO: 2376677 - DNA, 25 bp, Homo sapien
cagggatttatacgccagcaggcct

SEQ ID NO: 2376678 - DNA, 25 bp, Homo sapien
tgagagcctaacgtactgtccagca

SEQ ID NO: 2376679 - DNA, 25 bp, Homo sapien
ggaacatggtgcttccgccgtgaac

SEQ ID NO: 2376680 - DNA, 25 bp, Homo sapien
caaagacatgcatctcctggacagt

SEQ ID NO: 2376681 - DNA, 25 bp, Homo sapien
tggtggaaacgtgcttcttgacagc

SEQ ID NO: 2376682 - DNA, 25 bp, Homo sapien
tcttgacagcagagcaatcagaggg

SEQ ID NO: 2376683 - DNA, 25 bp, Homo sapien
ggtttgttcttcagaccacgaggtg

SEQ ID NO: 2376684 - DNA, 25 bp, Homo sapien
aaaccgccatttacacaacaaactg

SEQ ID NO: 2376685 - DNA, 25 bp, Homo sapien
ggataagttcaatcacaccacccta

SEQ ID NO: 2376686 - DNA, 25 bp, Homo sapien
tcattgttaaactggatagtggtca

SEQ ID NO: 2376687 - DNA, 25 bp, Homo sapien
gaatcgagtccacatcaagatgaaa

SEQ ID NO: 2376688 - DNA, 25 bp, Homo sapien
gggaaaccatgttctacagaatcga

SEQ ID NO: 2376689 - DNA, 25 bp, Homo sapien
tgagaccgcggcaatgcaatcagac

SEQ ID NO: 2376690 - DNA, 25 bp, Homo sapien
ggtggcaattgcaacaagatcccct

SEQ ID NO: 2376691 - DNA, 25 bp, Homo sapien
gacttcaaatcagacgctggtgaca

SEQ ID NO: 2376692 - DNA, 25 bp, Homo sapien
ttagctaggttgtgggcctgagacc

SEQ ID NO: 2376693 - DNA, 25 bp, Homo sapien
gtggcgacctcattggatagcacag

SEQ ID NO: 2376694 - DNA, 25 bp, Homo sapien
atcttgcgtgctcgacagctgcagt

SEQ ID NO: 2376695 - DNA, 25 bp, Homo sapien
cagctgcagtggctagtggcgacct

SEQ ID NO: 2376696 - DNA, 25 bp, Homo sapien
tgcgtgctcgacagctgcagtggct

SEQ ID NO: 2376697 - DNA, 25 bp, Homo sapien
gcctcagactcggactcggactcgg

SEQ ID NO: 2376698 - DNA, 25 bp, Homo sapien
gactcggactcggactcggactcgt

SEQ ID NO: 2376699 - DNA, 25 bp, Homo sapien
tcggactcgtacgacgcctccatgg

SEQ ID NO: 2376700 - DNA, 25 bp, Homo sapien
gtcccgggccgctgagtcccaggcc

SEQ ID NO: 2376701 - DNA, 25 bp, Homo sapien
cacgggaactcgcgcagacacagct

SEQ ID NO: 2376702 - DNA, 25 bp, Homo sapien
ctgccggcaccgcacgggaactcgc

SEQ ID NO: 2376703 - DNA, 25 bp, Homo sapien
gggaactcgcgcagacacagcttcc

SEQ ID NO: 2376704 - DNA, 25 bp, Homo sapien
tgccggcaccgcacgggaactcgcg

SEQ ID NO: 2376705 - DNA, 25 bp, Homo sapien
tccaagttcgccaagtttgaggaag

SEQ ID NO: 2376706 - DNA, 25 bp, Homo sapien
cgtcagcgggttccggatggccaat

SEQ ID NO: 2376707 - DNA, 25 bp, Homo sapien
gatggccaattctctcaggaaactg

SEQ ID NO: 2376708 - DNA, 25 bp, Homo sapien
tcttgtctattacccgcagggaccg

SEQ ID NO: 2376709 - DNA, 25 bp, Homo sapien
cttgattcgattggcgctcagtacc

SEQ ID NO: 2376710 - DNA, 25 bp, Homo sapien
tcaggaggtctttatccaccagggt

SEQ ID NO: 2376711 - DNA, 25 bp, Homo sapien
gggcagattggtggcatccacctcc

SEQ ID NO: 2376712 - DNA, 25 bp, Homo sapien
cacctccttgattcgattggcgctc

SEQ ID NO: 2376713 - DNA, 25 bp, Homo sapien
taggaatgcgtctctgggaggccaa

SEQ ID NO: 2376714 - DNA, 25 bp, Homo sapien
ttgtgaaagacacttcaacatctgg

SEQ ID NO: 2376715 - DNA, 25 bp, Homo sapien
tgggggagctgcataacatctggca

SEQ ID NO: 2376716 - DNA, 25 bp, Homo sapien
cttctcaacccataggaatgcgtct

SEQ ID NO: 2376717 - DNA, 25 bp, Homo sapien
gtggcctaaccccaagtgctgcagg

SEQ ID NO: 2376718 - DNA, 25 bp, Homo sapien
gcctagaagtttgttgtggcctaac

SEQ ID NO: 2376719 - DNA, 25 bp, Homo sapien
cggtgacgtagagactttccaaggg

SEQ ID NO: 2376720 - DNA, 25 bp, Homo sapien
cagtgattagcggtgacgtagagac

SEQ ID NO: 2376721 - DNA, 25 bp, Homo sapien
agaaaaacacaagcggccgctgtca

SEQ ID NO: 2376722 - DNA, 25 bp, Homo sapien
atctcccaatcccagcctcactctt

SEQ ID NO: 2376723 - DNA, 25 bp, Homo sapien
aattgatctcggctctgagaacaga

SEQ ID NO: 2376724 - DNA, 25 bp, Homo sapien
actagaaagcaaattgatctcggct

SEQ ID NO: 2376725 - DNA, 25 bp, Homo sapien
tcacagttggagtcacagagacgcc

SEQ ID NO: 2376726 - DNA, 25 bp, Homo sapien
ttcatctccactctccgtagcactg

SEQ ID NO: 2376727 - DNA, 25 bp, Homo sapien
gtcgggaacgagtgcctggctcttc

SEQ ID NO: 2376728 - DNA, 25 bp, Homo sapien
ggctaaggattctgcccatccacgg

SEQ ID NO: 2376729 - DNA, 25 bp, Homo sapien
ctgggggtcaagaagccaggtgagc

SEQ ID NO: 2376730 - DNA, 25 bp, Homo sapien
gccaggtgagcagggggcaagcagc

SEQ ID NO: 2376731 - DNA, 25 bp, Homo sapien
gggggtcaagaagccaggtgagcag

SEQ ID NO: 2376732 - DNA, 25 bp, Homo sapien
aagccaggtgagcagggggcaagca

SEQ ID NO: 2376733 - DNA, 25 bp, Homo sapien
gagacacggtgatgtcgtccagcac

SEQ ID NO: 2376734 - DNA, 25 bp, Homo sapien
aggctggtgaccatgctctgcaggt

SEQ ID NO: 2376735 - DNA, 25 bp, Homo sapien
tgtcaggtcgttgaagcccaggtcc

SEQ ID NO: 2376736 - DNA, 25 bp, Homo sapien
aagagatgcttctcattgggagaca

SEQ ID NO: 2376737 - DNA, 25 bp, Homo sapien
gaatcaaagcctggtggaaagctct

SEQ ID NO: 2376738 - DNA, 25 bp, Homo sapien
cctgaatagggtctgggtcaaatgg

SEQ ID NO: 2376739 - DNA, 25 bp, Homo sapien
gtctccaaatcccaatcacaggaat

SEQ ID NO: 2376740 - DNA, 25 bp, Homo sapien
ttgcaggacagacgggtacacggac

SEQ ID NO: 2376741 - DNA, 25 bp, Homo sapien
cacaaactgcgcctcctgtgccaag

SEQ ID NO: 2376742 - DNA, 25 bp, Homo sapien
aaaatcataggtcacgtaatagttg

SEQ ID NO: 2376743 - DNA, 25 bp, Homo sapien
tccgggtctaagacagaggtgtcca

SEQ ID NO: 2376744 - DNA, 25 bp, Homo sapien
tttccgatggtcaccacaaactgcg

SEQ ID NO: 2376745 - DNA, 25 bp, Homo sapien
cgcggactcattcatttcgccttct

SEQ ID NO: 2376746 - DNA, 25 bp, Homo sapien
gcggactcattcatttcgccttctt

SEQ ID NO: 2376747 - DNA, 25 bp, Homo sapien
ggactcattcatttcgccttcttca

SEQ ID NO: 2376748 - DNA, 25 bp, Homo sapien
cccgcggactcattcatttcgcctt

SEQ ID NO: 2376749 - DNA, 25 bp, Homo sapien
gagacccttcgacctcttcagtaac

SEQ ID NO: 2376750 - DNA, 25 bp, Homo sapien
gacctcttcaggagattcctcaact

SEQ ID NO: 2376751 - DNA, 25 bp, Homo sapien
aatgtcttcgatgacgtcttccacg

SEQ ID NO: 2376752 - DNA, 25 bp, Homo sapien
tcagtaacctcttcaacaatgtctt

SEQ ID NO: 2376753 - DNA, 25 bp, Homo sapien
tctgcagaggccctcggcatctgca

SEQ ID NO: 2376754 - DNA, 25 bp, Homo sapien
gggatctatacgcagcctcaacttg

SEQ ID NO: 2376755 - DNA, 25 bp, Homo sapien
tatacgcagcctcaacttggccagc

SEQ ID NO: 2376756 - DNA, 25 bp, Homo sapien
aagatggtcgaaggccccgagatga

SEQ ID NO: 2376757 - DNA, 25 bp, Homo sapien
cttctcctccacgatggtcacggtg

SEQ ID NO: 2376758 - DNA, 25 bp, Homo sapien
gagagtgctgcatctcgtaactgca

SEQ ID NO: 2376759 - DNA, 25 bp, Homo sapien
gatggtcacggtggtccccgccagc

SEQ ID NO: 2376760 - DNA, 25 bp, Homo sapien
gagtgctgcatctcgtaactgcagg

SEQ ID NO: 2376761 - DNA, 25 bp, Homo sapien
aacagcaggtagcaccacaggccag

SEQ ID NO: 2376762 - DNA, 25 bp, Homo sapien
tggcagacaggggactgtcaacagc

SEQ ID NO: 2376763 - DNA, 25 bp, Homo sapien
gacaggggactgtcaacagcaggta

SEQ ID NO: 2376764 - DNA, 25 bp, Homo sapien
gggactgtcaacagcaggtagcacc

SEQ ID NO: 2376765 - DNA, 25 bp, Homo sapien
tcaatgtgcggaccacgccgaagtt

SEQ ID NO: 2376766 - DNA, 25 bp, Homo sapien
cctggccaacgtcagcctgtcagat

SEQ ID NO: 2376767 - DNA, 25 bp, Homo sapien
tcctgccggagctccttgggcggct

SEQ ID NO: 2376768 - DNA, 25 bp, Homo sapien
cacgccgaagttgcacacggtggac

SEQ ID NO: 2376769 - DNA, 25 bp, Homo sapien
ggaggatgtggctagggcccggctg

SEQ ID NO: 2376770 - DNA, 25 bp, Homo sapien
ttgcttgcccgcggggttcccatgg

SEQ ID NO: 2376771 - DNA, 25 bp, Homo sapien
gcccacagcccttgcttgcccgcgg

SEQ ID NO: 2376772 - DNA, 25 bp, Homo sapien
aggatgtggctagggcccggctgta

SEQ ID NO: 2376773 - DNA, 25 bp, Homo sapien
cacaaaacgagatgcttactggaga

SEQ ID NO: 2376774 - DNA, 25 bp, Homo sapien
aaaacgagatgcttactggagaggg

SEQ ID NO: 2376775 - DNA, 25 bp, Homo sapien
gaaccacaaaacgagatgcttactg

SEQ ID NO: 2376776 - DNA, 25 bp, Homo sapien
agaaagaaccacaaaacgagatgct

SEQ ID NO: 2376777 - DNA, 25 bp, Homo sapien
ttggcaactttcttaatcttctttg

SEQ ID NO: 2376778 - DNA, 25 bp, Homo sapien
tggcaactttcttaatcttctttga

SEQ ID NO: 2376779 - DNA, 25 bp, Homo sapien
caactttcttaatcttctttgaatc

SEQ ID NO: 2376780 - DNA, 25 bp, Homo sapien
ggcaactttcttaatcttctttgaa

SEQ ID NO: 2376781 - DNA, 25 bp, Homo sapien
tcttttccaattatgggcctgaggt

SEQ ID NO: 2376782 - DNA, 25 bp, Homo sapien
tctttgtgcacgtcaattacagcaa

SEQ ID NO: 2376783 - DNA, 25 bp, Homo sapien
gcagcatatgccctccaacgtttac

SEQ ID NO: 2376784 - DNA, 25 bp, Homo sapien
caacgtttacttcttcaggctggcg

SEQ ID NO: 2376785 - DNA, 25 bp, Homo sapien
ggctcagggtggtaatcgccttcgt

SEQ ID NO: 2376786 - DNA, 25 bp, Homo sapien
tggatctgcacctctacggtcaggg

SEQ ID NO: 2376787 - DNA, 25 bp, Homo sapien
acggcgaacatgcgcagagcctcct

SEQ ID NO: 2376788 - DNA, 25 bp, Homo sapien
tagatcggaatcacggctttcggct

SEQ ID NO: 2376789 - DNA, 25 bp, Homo sapien
gctgggaacagcctttactgcccac

SEQ ID NO: 2376790 - DNA, 25 bp, Homo sapien
ctgggaacagcctttactgcccacg

SEQ ID NO: 2376791 - DNA, 25 bp, Homo sapien
tgggaacagcctttactgcccacgc

SEQ ID NO: 2376792 - DNA, 25 bp, Homo sapien
gggaacagcctttactgcccacgcc

SEQ ID NO: 2376793 - DNA, 25 bp, Homo sapien
gacccagccgcgggtctccgcagcg

SEQ ID NO: 2376794 - DNA, 25 bp, Homo sapien
tggagctcgtgcagcggagccaggg

SEQ ID NO: 2376795 - DNA, 25 bp, Homo sapien
ctggggtccgcacgagccgggtcgg

SEQ ID NO: 2376796 - DNA, 25 bp, Homo sapien
ggaggctggacgcacgcgtcccgcg

SEQ ID NO: 2376797 - DNA, 25 bp, Homo sapien
tcgaagcgagatgagtctcaggtgt

SEQ ID NO: 2376798 - DNA, 25 bp, Homo sapien
tgagtctcaggtgtgcgagcaccgc

SEQ ID NO: 2376799 - DNA, 25 bp, Homo sapien
tgtctccgtgctcaggatgccgggc

SEQ ID NO: 2376800 - DNA, 25 bp, Homo sapien
gctggagactgtctccgtgctcagg

SEQ ID NO: 2376801 - DNA, 25 bp, Homo sapien
cactcctaccgccccttccctggtg

SEQ ID NO: 2376802 - DNA, 25 bp, Homo sapien
ccctggtgggctgcggaaggctggg

SEQ ID NO: 2376803 - DNA, 25 bp, Homo sapien
ccttccctggtgggctgcggaaggc

SEQ ID NO: 2376804 - DNA, 25 bp, Homo sapien
ttccctggtgggctgcggaaggctg

SEQ ID NO: 2376805 - DNA, 25 bp, Homo sapien
agtgcactgcttccctcggaggaga

SEQ ID NO: 2376806 - DNA, 25 bp, Homo sapien
tgttgggcgtctccaagatgaccag

SEQ ID NO: 2376807 - DNA, 25 bp, Homo sapien
gcacaaaacgcataggaaccaggta

SEQ ID NO: 2376808 - DNA, 25 bp, Homo sapien
gccagcccggctagtgaaagagcta

SEQ ID NO: 2376809 - DNA, 25 bp, Homo sapien
ggtctcctgcgggcttggccgcctt

SEQ ID NO: 2376810 - DNA, 25 bp, Homo sapien
caagctgtacgagaccagccagcac

SEQ ID NO: 2376811 - DNA, 25 bp, Homo sapien
agccaagctgtacgagaccagccag

SEQ ID NO: 2376812 - DNA, 25 bp, Homo sapien
agcacagccaagctgtacgagacca

SEQ ID NO: 2376813 - DNA, 25 bp, Homo sapien
acagagaggcgctagacactgtgtg

SEQ ID NO: 2376814 - DNA, 25 bp, Homo sapien
gacagagaggcgctagacactgtgt

SEQ ID NO: 2376815 - DNA, 25 bp, Homo sapien
ggacagagaggcgctagacactgtg

SEQ ID NO: 2376816 - DNA, 25 bp, Homo sapien
agagaggcgctagacactgtgtggt

SEQ ID NO: 2376817 - DNA, 25 bp, Homo sapien
agatagagaaatttcggcagtgacg

SEQ ID NO: 2376818 - DNA, 25 bp, Homo sapien
cgataggtcaagaagagacggtgac

SEQ ID NO: 2376819 - DNA, 25 bp, Homo sapien
aaatttcggcagtgacgataggtca

SEQ ID NO: 2376820 - DNA, 25 bp, Homo sapien
cagtgacgataggtcaagaagagac

SEQ ID NO: 2376821 - DNA, 25 bp, Homo sapien
gtcgctccacgtgaccaggctgtga

SEQ ID NO: 2376822 - DNA, 25 bp, Homo sapien
ggccaggagcaagaaggtatccttg

SEQ ID NO: 2376823 - DNA, 25 bp, Homo sapien
ccacgtgctgcggatagccgcacgt

SEQ ID NO: 2376824 - DNA, 25 bp, Homo sapien
agcaagaaggtatccttggaacagc

SEQ ID NO: 2376825 - DNA, 25 bp, Homo sapien
tgtggctctggacatgacatatcct

SEQ ID NO: 2376826 - DNA, 25 bp, Homo sapien
cagggcttggcggatgacatctccc

SEQ ID NO: 2376827 - DNA, 25 bp, Homo sapien
catccaggaactctaacacgttggg

SEQ ID NO: 2376828 - DNA, 25 bp, Homo sapien
catctccctttagcatgaaatgggc

SEQ ID NO: 2376829 - DNA, 25 bp, Homo sapien
ccagcatggtgcatagggctcagcc

SEQ ID NO: 2376830 - DNA, 25 bp, Homo sapien
ccagccgcctcaggcacatacccac

SEQ ID NO: 2376831 - DNA, 25 bp, Homo sapien
cagcaggagccccctatacaggcag

SEQ ID NO: 2376832 - DNA, 25 bp, Homo sapien
ccctatacaggcaggggtctaaggg

SEQ ID NO: 2376833 - DNA, 25 bp, Homo sapien
ccacatggtccacatctcgaggggg

SEQ ID NO: 2376834 - DNA, 25 bp, Homo sapien
tatggggccagctgcacacttgagc

SEQ ID NO: 2376835 - DNA, 25 bp, Homo sapien
ctgcacacttgagcccctcatctgt

SEQ ID NO: 2376836 - DNA, 25 bp, Homo sapien
cagcgctggggtatggggccagctg

SEQ ID NO: 2376837 - DNA, 25 bp, Homo sapien
ggccagctgcacacttgagcccctc

SEQ ID NO: 2376838 - DNA, 25 bp, Homo sapien
caacactgagtccactctcaggctg

SEQ ID NO: 2376839 - DNA, 25 bp, Homo sapien
gcaggcatcaatttcgcatcacgat

SEQ ID NO: 2376840 - DNA, 25 bp, Homo sapien
taatcagagctaacagggtgagagg

SEQ ID NO: 2376841 - DNA, 25 bp, Homo sapien
gcatcacgatagagaatcaacactg

SEQ ID NO: 2376842 - DNA, 25 bp, Homo sapien
gcatttgctacactttggctcccat

SEQ ID NO: 2376843 - DNA, 25 bp, Homo sapien
ttcaacatatgctggacaagttagc

SEQ ID NO: 2376844 - DNA, 25 bp, Homo sapien
tctctcctggggtcctatgcagcct

SEQ ID NO: 2376845 - DNA, 25 bp, Homo sapien
gccccgacaggttcctggcagcatt

SEQ ID NO: 2376846 - DNA, 25 bp, Homo sapien
tcaacaggacttaacacaggcctct

SEQ ID NO: 2376847 - DNA, 25 bp, Homo sapien
tcaacaggacttaacatcaacagga

SEQ ID NO: 2376848 - DNA, 25 bp, Homo sapien
gaagagtgtaagattttgtttgcat

SEQ ID NO: 2376849 - DNA, 25 bp, Homo sapien
tctattgtatccaaaggagaagagt

SEQ ID NO: 2376850 - DNA, 25 bp, Homo sapien
gaagagctccgtcagaaaacacagg

SEQ ID NO: 2376851 - DNA, 25 bp, Homo sapien
ggacctggttcttagcccttgggca

SEQ ID NO: 2376852 - DNA, 25 bp, Homo sapien
cgagacgcctttgtgagctgtgagt

SEQ ID NO: 2376853 - DNA, 25 bp, Homo sapien
gactgtctgtgcaccgagaagaggc

SEQ ID NO: 2376854 - DNA, 25 bp, Homo sapien
gatcaggcctctataaccgccagga

SEQ ID NO: 2376855 - DNA, 25 bp, Homo sapien
aataattgtgatgttggccgctgac

SEQ ID NO: 2376856 - DNA, 25 bp, Homo sapien
tgcacggctgctcaacccgattgtc

SEQ ID NO: 2376857 - DNA, 25 bp, Homo sapien
taaatccagacctgaacatagaggt

SEQ ID NO: 2376858 - DNA, 25 bp, Homo sapien
aatgaatggcgatgccatttagtag

SEQ ID NO: 2376859 - DNA, 25 bp, Homo sapien
catttagtaggatggagaggagtgg

SEQ ID NO: 2376860 - DNA, 25 bp, Homo sapien
ttttaaaggccttagcaactgaatg

SEQ ID NO: 2376861 - DNA, 25 bp, Homo sapien
ggatggagaggagtgggttttgaaa

SEQ ID NO: 2376862 - DNA, 25 bp, Homo sapien
gcagcgtaacttcattcttcaggta

SEQ ID NO: 2376863 - DNA, 25 bp, Homo sapien
tcacttccggcgtgtgcgtctggcg

SEQ ID NO: 2376864 - DNA, 25 bp, Homo sapien
aagagttggctgtcgcgcagcgtaa

SEQ ID NO: 2376865 - DNA, 25 bp, Homo sapien
gcacaatggcggctctgaagagttg

SEQ ID NO: 2376866 - DNA, 25 bp, Homo sapien
gccgagatcgcagaatacacacaag

SEQ ID NO: 2376867 - DNA, 25 bp, Homo sapien
acacaagctacctttgggcaccaga

SEQ ID NO: 2376868 - DNA, 25 bp, Homo sapien
tgagcccaggatcggattgatgccc

SEQ ID NO: 2376869 - DNA, 25 bp, Homo sapien
cacacctagttgttgagtgccgctg

SEQ ID NO: 2376870 - DNA, 25 bp, Homo sapien
tgccactaggtaggacacggaagat

SEQ ID NO: 2376871 - DNA, 25 bp, Homo sapien
gtaattactactcactggcttcctg

SEQ ID NO: 2376872 - DNA, 25 bp, Homo sapien
taaaagggaacagaatcaggcctat

SEQ ID NO: 2376873 - DNA, 25 bp, Homo sapien
taagttcctccgttgctgtaaaaca

SEQ ID NO: 2376874 - DNA, 25 bp, Homo sapien
tggagttctgatgggcacggtaaat

SEQ ID NO: 2376875 - DNA, 25 bp, Homo sapien
gtgcccggcccattagtggagttct

SEQ ID NO: 2376876 - DNA, 25 bp, Homo sapien
ctgatgggcacggtaaatattatta

SEQ ID NO: 2376877 - DNA, 25 bp, Homo sapien
cattagtggagttctgatgggcacg

SEQ ID NO: 2376878 - DNA, 25 bp, Homo sapien
gatggtgggggtagataatccattc

SEQ ID NO: 2376879 - DNA, 25 bp, Homo sapien
atccattcagccagacaaacggggc

SEQ ID NO: 2376880 - DNA, 25 bp, Homo sapien
tagaagaaaatcaacctgagtaaaa

SEQ ID NO: 2376881 - DNA, 25 bp, Homo sapien
gagacctctggaaatacattaagga

SEQ ID NO: 2376882 - DNA, 25 bp, Homo sapien
tatatgcctttgatgtattttcccc

SEQ ID NO: 2376883 - DNA, 25 bp, Homo sapien
cctgaacagtttatcgaccagtttg

SEQ ID NO: 2376884 - DNA, 25 bp, Homo sapien
gaaggacctcaaagcacctgaacag

SEQ ID NO: 2376885 - DNA, 25 bp, Homo sapien
caagattatcaactgtgtgttcgac

SEQ ID NO: 2376886 - DNA, 25 bp, Homo sapien
gatcattaggacataacagactagg

SEQ ID NO: 2376887 - DNA, 25 bp, Homo sapien
caggcttgataatacttaggtgtga

SEQ ID NO: 2376888 - DNA, 25 bp, Homo sapien
gagctctttgcactacctgttatca

SEQ ID NO: 2376889 - DNA, 25 bp, Homo sapien
tgctgcacccacttaatctactgtg

SEQ ID NO: 2376890 - DNA, 25 bp, Homo sapien
gagaactgggcttgctcagacgcac

SEQ ID NO: 2376891 - DNA, 25 bp, Homo sapien
ttgatctccacgacacagaggattg

SEQ ID NO: 2376892 - DNA, 25 bp, Homo sapien
agaggattgtcctacccaggcacag

SEQ ID NO: 2376893 - DNA, 25 bp, Homo sapien
gggccaccaactgcaatgacgacga

SEQ ID NO: 2376894 - DNA, 25 bp, Homo sapien
attttaaatgtgaggctggcgtggt

SEQ ID NO: 2376895 - DNA, 25 bp, Homo sapien
tctaggggattgtaaaaagacgcaa

SEQ ID NO: 2376896 - DNA, 25 bp, Homo sapien
agaggagactacaaatgctttgaca

SEQ ID NO: 2376897 - DNA, 25 bp, Homo sapien
aaaaccatactgattggaaccttag

SEQ ID NO: 2376898 - DNA, 25 bp, Homo sapien
gatagtaatagaatcactatggcca

SEQ ID NO: 2376899 - DNA, 25 bp, Homo sapien
tattcaagtgcagaacttactccca

SEQ ID NO: 2376900 - DNA, 25 bp, Homo sapien
agaaattagaatccggctgggtgcg

SEQ ID NO: 2376901 - DNA, 25 bp, Homo sapien
caactgtaggattaaactggttatc

SEQ ID NO: 2376902 - DNA, 25 bp, Homo sapien
ttactgaaacctccagctataaggc

SEQ ID NO: 2376903 - DNA, 25 bp, Homo sapien
tctctaccttgtttgccctgcatgt

SEQ ID NO: 2376904 - DNA, 25 bp, Homo sapien
ttaactcttggccactcgtctacgc

SEQ ID NO: 2376905 - DNA, 25 bp, Homo sapien
tcgtctacgctgtactcccattcat

SEQ ID NO: 2376906 - DNA, 25 bp, Homo sapien
gaaatgactgccagagtctaggcca

SEQ ID NO: 2376907 - DNA, 25 bp, Homo sapien
caagcagtattaagggaagagtagc

SEQ ID NO: 2376908 - DNA, 25 bp, Homo sapien
tctgtgggaatcatcctttggcgca

SEQ ID NO: 2376909 - DNA, 25 bp, Homo sapien
cagaagatgcacttcggctgcacta

SEQ ID NO: 2376910 - DNA, 25 bp, Homo sapien
gaggcccctaaactgtgattatcag

SEQ ID NO: 2376911 - DNA, 25 bp, Homo sapien
gaatgaggccccttcatattgaatg

SEQ ID NO: 2376912 - DNA, 25 bp, Homo sapien
gagcccttccaagttatacatcgaa

SEQ ID NO: 2376913 - DNA, 25 bp, Homo sapien
ccctctgttggcgaggcaggatgct

SEQ ID NO: 2376914 - DNA, 25 bp, Homo sapien
ttttttaaacattagctgtagtggc

SEQ ID NO: 2376915 - DNA, 25 bp, Homo sapien
agtggtctggtctcggctcacccaa

SEQ ID NO: 2376916 - DNA, 25 bp, Homo sapien
cagccagagaccccatctgtaaaaa

SEQ ID NO: 2376917 - DNA, 25 bp, Homo sapien
cgtgcctgtaatctccgctgcttag

SEQ ID NO: 2376918 - DNA, 25 bp, Homo sapien
gaaaataatggctcaaccatgtgaa

SEQ ID NO: 2376919 - DNA, 25 bp, Homo sapien
aatttaagcttagctccagtctata

SEQ ID NO: 2376920 - DNA, 25 bp, Homo sapien
cactatggtgttaagatgaatgaat

SEQ ID NO: 2376921 - DNA, 25 bp, Homo sapien
ttttggttgcctgttatctgggtac

SEQ ID NO: 2376922 - DNA, 25 bp, Homo sapien
gcttgagttgaacccaggtcccttg

SEQ ID NO: 2376923 - DNA, 25 bp, Homo sapien
atgtgctccatacgcacattatttc

SEQ ID NO: 2376924 - DNA, 25 bp, Homo sapien
ttgagttgaacccaggtcccttgct

SEQ ID NO: 2376925 - DNA, 25 bp, Homo sapien
gagttgaacccaggtcccttgctct

SEQ ID NO: 2376926 - DNA, 25 bp, Homo sapien
aggcatgcattaccctttcctgtgt

SEQ ID NO: 2376927 - DNA, 25 bp, Homo sapien
caggcatgcattaccctttcctgtg

SEQ ID NO: 2376928 - DNA, 25 bp, Homo sapien
tcttggggtcctggatcctgtggaa

SEQ ID NO: 2376929 - DNA, 25 bp, Homo sapien
cttgatattcttggggtcctggatc

SEQ ID NO: 2376930 - DNA, 25 bp, Homo sapien
ggcacgagctcaacacttgttatac

SEQ ID NO: 2376931 - DNA, 25 bp, Homo sapien
ttacaggcacgagctcaacacttgt

SEQ ID NO: 2376932 - DNA, 25 bp, Homo sapien
tacaggtctttgatactgtgaaagg

SEQ ID NO: 2376933 - DNA, 25 bp, Homo sapien
taactataatttatccagtatgtgc

SEQ ID NO: 2376934 - DNA, 25 bp, Homo sapien
ctccctgttggggactcaaactcca

SEQ ID NO: 2376935 - DNA, 25 bp, Homo sapien
gtctccacatgacaggcagaaacac

SEQ ID NO: 2376936 - DNA, 25 bp, Homo sapien
cttgtcttgaggatagtaaattgcc

SEQ ID NO: 2376937 - DNA, 25 bp, Homo sapien
gatttaatccagagactgacttcac

SEQ ID NO: 2376938 - DNA, 25 bp, Homo sapien
gacttcactatagaacccacagttg

SEQ ID NO: 2376939 - DNA, 25 bp, Homo sapien
cagcctggagatggattattgtcaa

SEQ ID NO: 2376940 - DNA, 25 bp, Homo sapien
tcctgggctcatgaaatccttcccc

SEQ ID NO: 2376941 - DNA, 25 bp, Homo sapien
tacagtggtgtgatcgatcatggct

SEQ ID NO: 2376942 - DNA, 25 bp, Homo sapien
ctgggctcatgaaatccttccccct

SEQ ID NO: 2376943 - DNA, 25 bp, Homo sapien
gggctcatgaaatccttccccctca

SEQ ID NO: 2376944 - DNA, 25 bp, Homo sapien
gttccatccgctggagtgggctgca

SEQ ID NO: 2376945 - DNA, 25 bp, Homo sapien
tcatccctggccagattctttgcca

SEQ ID NO: 2376946 - DNA, 25 bp, Homo sapien
ggtcacttcttcttatagggatgct

SEQ ID NO: 2376947 - DNA, 25 bp, Homo sapien
gaaagtgaggtctgtgcttcatcat

SEQ ID NO: 2376948 - DNA, 25 bp, Homo sapien
ctgatgctggtcagcagtggagaaa

SEQ ID NO: 2376949 - DNA, 25 bp, Homo sapien
tgtgttgctgatgctggtcagcagt

SEQ ID NO: 2376950 - DNA, 25 bp, Homo sapien
tggtcagcagtggagaaaactgaga

SEQ ID NO: 2376951 - DNA, 25 bp, Homo sapien
ctgtgttgctgatgctggtcagcag

SEQ ID NO: 2376952 - DNA, 25 bp, Homo sapien
cctggcttggctgtactgcactctt

SEQ ID NO: 2376953 - DNA, 25 bp, Homo sapien
tcttcactctttcggttgaagccgt

SEQ ID NO: 2376954 - DNA, 25 bp, Homo sapien
gaagccgttttactgtggctcaaaa

SEQ ID NO: 2376955 - DNA, 25 bp, Homo sapien
agaaagcagctcagtagagtctgtt

SEQ ID NO: 2376956 - DNA, 25 bp, Homo sapien
tttgaagctcttatcagatctgggt

SEQ ID NO: 2376957 - DNA, 25 bp, Homo sapien
tgatgccgctctatgtgtgccagga

SEQ ID NO: 2376958 - DNA, 25 bp, Homo sapien
gatttgatacccaaaacaggactag

SEQ ID NO: 2376959 - DNA, 25 bp, Homo sapien
caaagttagagccacagtctttcct

SEQ ID NO: 2376960 - DNA, 25 bp, Homo sapien
gttgtagctaccacgcagcctgttt

SEQ ID NO: 2376961 - DNA, 25 bp, Homo sapien
cctttgggtcttgaagcagggccgc

SEQ ID NO: 2376962 - DNA, 25 bp, Homo sapien
ttctggacgttgtagctaccacgca

SEQ ID NO: 2376963 - DNA, 25 bp, Homo sapien
tctggaagcttggtgttaaactccc

SEQ ID NO: 2376964 - DNA, 25 bp, Homo sapien
ttaagatagatttccgttgctctca

SEQ ID NO: 2376965 - DNA, 25 bp, Homo sapien
gcattttagaattaggtgggggctc

SEQ ID NO: 2376966 - DNA, 25 bp, Homo sapien
gttgctctcagaacgtctctcccct

SEQ ID NO: 2376967 - DNA, 25 bp, Homo sapien
tctgcgagtgcagctgtgcacaggt

SEQ ID NO: 2376968 - DNA, 25 bp, Homo sapien
ccttctgtgtggcagtatgctgcgc

SEQ ID NO: 2376969 - DNA, 25 bp, Homo sapien
tatgctgcgcgtggcagtagcgtat

SEQ ID NO: 2376970 - DNA, 25 bp, Homo sapien
aagcccttctgtgtggcagtatgct

SEQ ID NO: 2376971 - DNA, 25 bp, Homo sapien
ttctgtgtggcagtatgctgcgcgt

SEQ ID NO: 2376972 - DNA, 25 bp, Homo sapien
tggtcttccttgaatagatatatca

SEQ ID NO: 2376973 - DNA, 25 bp, Homo sapien
cccttgcagaattctgtggagttcc

SEQ ID NO: 2376974 - DNA, 25 bp, Homo sapien
aatagatatatcaaggccagggtct

SEQ ID NO: 2376975 - DNA, 25 bp, Homo sapien
tcgggacccttgcagaattctgtgg

SEQ ID NO: 2376976 - DNA, 25 bp, Homo sapien
cttcggaagcgccttgcagcctgtt

SEQ ID NO: 2376977 - DNA, 25 bp, Homo sapien
ctgcttcggaagcgccttgcagcct

SEQ ID NO: 2376978 - DNA, 25 bp, Homo sapien
cggaagcgccttgcagcctgtttca

SEQ ID NO: 2376979 - DNA, 25 bp, Homo sapien
gaagcgccttgcagcctgtttcaaa

SEQ ID NO: 2376980 - DNA, 25 bp, Homo sapien
agcattttctccagggacgcctcat

SEQ ID NO: 2376981 - DNA, 25 bp, Homo sapien
gggacgcctcatccagggtctttcc

SEQ ID NO: 2376982 - DNA, 25 bp, Homo sapien
ttttctccagggacgcctcatccag

SEQ ID NO: 2376983 - DNA, 25 bp, Homo sapien
ctgctctacagttcctttcagcatt

SEQ ID NO: 2376984 - DNA, 25 bp, Homo sapien
ggggagcagatacagttcttcccaa

SEQ ID NO: 2376985 - DNA, 25 bp, Homo sapien
gggagcagatacagttcttcccaag

SEQ ID NO: 2376986 - DNA, 25 bp, Homo sapien
aacttcatccttcatatatgcttgc

SEQ ID NO: 2376987 - DNA, 25 bp, Homo sapien
gtttcaactcctacaaccaaatgag

SEQ ID NO: 2376988 - DNA, 25 bp, Homo sapien
ttcatatatgcttgctatacaggta

SEQ ID NO: 2376989 - DNA, 25 bp, Homo sapien
ccgtcgagagtgatggtttttatct

SEQ ID NO: 2376990 - DNA, 25 bp, Homo sapien
taccctggtgtggttgtgcgttcat

SEQ ID NO: 2376991 - DNA, 25 bp, Homo sapien
tgtggttgtgcgttcatgtagtacc

SEQ ID NO: 2376992 - DNA, 25 bp, Homo sapien
gttgtgcgttcatgtagtaccagct

SEQ ID NO: 2376993 - DNA, 25 bp, Homo sapien
cagcctaccctggtgtggttgtgcg

SEQ ID NO: 2376994 - DNA, 25 bp, Homo sapien
tgtctaggccagagtatcacctctc

SEQ ID NO: 2376995 - DNA, 25 bp, Homo sapien
cagccagtcctcataagctcttatc

SEQ ID NO: 2376996 - DNA, 25 bp, Homo sapien
taaatcctaaatgccaggagacctg

SEQ ID NO: 2376997 - DNA, 25 bp, Homo sapien
tacctaccctagaaagatattcaca

SEQ ID NO: 2376998 - DNA, 25 bp, Homo sapien
tcggcgacgcggagctacgggagcg

SEQ ID NO: 2376999 - DNA, 25 bp, Homo sapien
tacgggagcggcttcggcagtgcga

SEQ ID NO: 2377000 - DNA, 25 bp, Homo sapien
aggagaccatcgagcagctccgcgc

SEQ ID NO: 2377001 - DNA, 25 bp, Homo sapien
ttcggcagtgcgaggagaccatcga

SEQ ID NO: 2377002 - DNA, 25 bp, Homo sapien
tgtggcacgcacaccagaatctgtg

SEQ ID NO: 2377003 - DNA, 25 bp, Homo sapien
gcctaacaggaacatcccatactgg

SEQ ID NO: 2377004 - DNA, 25 bp, Homo sapien
tctgtgagaagctatgcgtcgtgct

SEQ ID NO: 2377005 - DNA, 25 bp, Homo sapien
tacttgggactacaatcgcccagct

SEQ ID NO: 2377006 - DNA, 25 bp, Homo sapien
taaggccagttaactatactacagt

SEQ ID NO: 2377007 - DNA, 25 bp, Homo sapien
cagacttggtattcagtatttgtca

SEQ ID NO: 2377008 - DNA, 25 bp, Homo sapien
tactacagtcaataccgtggtgagc

SEQ ID NO: 2377009 - DNA, 25 bp, Homo sapien
catttggcaattgctgttagaaaac

SEQ ID NO: 2377010 - DNA, 25 bp, Homo sapien
tagctattagccctcctgcactgtt

SEQ ID NO: 2377011 - DNA, 25 bp, Homo sapien
tggtctttactcaggtgtcagcgtt

SEQ ID NO: 2377012 - DNA, 25 bp, Homo sapien
taaggtgagtttcacatgtgccagg

SEQ ID NO: 2377013 - DNA, 25 bp, Homo sapien
ggacaaatcccaatctgctgaaata

SEQ ID NO: 2377014 - DNA, 25 bp, Homo sapien
aatttgtgtttcatgttactagttc

SEQ ID NO: 2377015 - DNA, 25 bp, Homo sapien
atgaatttgtgtttcatgttactag

SEQ ID NO: 2377016 - DNA, 25 bp, Homo sapien
tcatttttgttttgggatgaatttg

SEQ ID NO: 2377017 - DNA, 25 bp, Homo sapien
aattcatttttgttttgggatgaat

SEQ ID NO: 2377018 - DNA, 25 bp, Homo sapien
cttgccaagcctgcgacctacattt

SEQ ID NO: 2377019 - DNA, 25 bp, Homo sapien
gcctgcgacctacattttattgtta

SEQ ID NO: 2377020 - DNA, 25 bp, Homo sapien
aagtcaagtctatgttatgccttcc

SEQ ID NO: 2377021 - DNA, 25 bp, Homo sapien
tatgttatgccttccatgcatatgt

SEQ ID NO: 2377022 - DNA, 25 bp, Homo sapien
gaacactcagatatctggcccctct

SEQ ID NO: 2377023 - DNA, 25 bp, Homo sapien
gcctctagtctttaggttccatgcc

SEQ ID NO: 2377024 - DNA, 25 bp, Homo sapien
aggaacactcagatatctggcccct

SEQ ID NO: 2377025 - DNA, 25 bp, Homo sapien
ttcctgactcacacaaccgcctcta

SEQ ID NO: 2377026 - DNA, 25 bp, Homo sapien
acaacataaaattagacaccatatt

SEQ ID NO: 2377027 - DNA, 25 bp, Homo sapien
aacaacataaaattagacaccatat

SEQ ID NO: 2377028 - DNA, 25 bp, Homo sapien
caacataaaattagacaccatatta

SEQ ID NO: 2377029 - DNA, 25 bp, Homo sapien
aacataaaattagacaccatattat

SEQ ID NO: 2377030 - DNA, 25 bp, Homo sapien
tcctgagtcaggaaccactgtcttt

SEQ ID NO: 2377031 - DNA, 25 bp, Homo sapien
cctgagtcaggaaccactgtctttc

SEQ ID NO: 2377032 - DNA, 25 bp, Homo sapien
ttcttttcttgaaccgacactcagg

SEQ ID NO: 2377033 - DNA, 25 bp, Homo sapien
gatcttcactagcaaatctacttga

SEQ ID NO: 2377034 - DNA, 25 bp, Homo sapien
cttgatataaagcagttccatgttc

SEQ ID NO: 2377035 - DNA, 25 bp, Homo sapien
gacactcaggtacccacttccggta

SEQ ID NO: 2377036 - DNA, 25 bp, Homo sapien
taataaacccatcacttaagctgca

SEQ ID NO: 2377037 - DNA, 25 bp, Homo sapien
caagcaatatcactgattggtcggc

SEQ ID NO: 2377038 - DNA, 25 bp, Homo sapien
ttgaagtgatctacaaatactgtca

SEQ ID NO: 2377039 - DNA, 25 bp, Homo sapien
aaagacaagatgcaattgaagtgat

SEQ ID NO: 2377040 - DNA, 25 bp, Homo sapien
aagatgtaggttgccacttctctcg

SEQ ID NO: 2377041 - DNA, 25 bp, Homo sapien
catgaataagatgtaggttgccact

SEQ ID NO: 2377042 - DNA, 25 bp, Homo sapien
tccttcttgacaaaggccaactaca

SEQ ID NO: 2377043 - DNA, 25 bp, Homo sapien
aaggccaactacatccacttcagta

SEQ ID NO: 2377044 - DNA, 25 bp, Homo sapien
tccttctcaatgacaagattctggt

SEQ ID NO: 2377045 - DNA, 25 bp, Homo sapien
aagtccgccgattttcatcgttagc

SEQ ID NO: 2377046 - DNA, 25 bp, Homo sapien
gattctggtaagtccgccgattttc

SEQ ID NO: 2377047 - DNA, 25 bp, Homo sapien
tcatcgttagctttctgaacaaatg

SEQ ID NO: 2377048 - DNA, 25 bp, Homo sapien
tgagctgaaattgcgtcattgctct

SEQ ID NO: 2377049 - DNA, 25 bp, Homo sapien
gctgaaattgcgtcattgctctcca

SEQ ID NO: 2377050 - DNA, 25 bp, Homo sapien
agtgagctgaaattgcgtcattgct

SEQ ID NO: 2377051 - DNA, 25 bp, Homo sapien
agctgaaattgcgtcattgctctcc

SEQ ID NO: 2377052 - DNA, 25 bp, Homo sapien
gtaagaagtagcatataataggtac

SEQ ID NO: 2377053 - DNA, 25 bp, Homo sapien
agattcagggcaccagccagtacct

SEQ ID NO: 2377054 - DNA, 25 bp, Homo sapien
gcacaggcctggcaagtcagtattt

SEQ ID NO: 2377055 - DNA, 25 bp, Homo sapien
tatacccaagacgtagcacaggcct

SEQ ID NO: 2377056 - DNA, 25 bp, Homo sapien
gagaattaagttttgcccctgacca

SEQ ID NO: 2377057 - DNA, 25 bp, Homo sapien
ttgctgtactgaagtctacattctc

SEQ ID NO: 2377058 - DNA, 25 bp, Homo sapien
ttttttgctgtactgaagtctacat

SEQ ID NO: 2377059 - DNA, 25 bp, Homo sapien
cttttttgctgtactgaagtctaca

SEQ ID NO: 2377060 - DNA, 25 bp, Homo sapien
ttttgctgtactgaagtctacattc

SEQ ID NO: 2377061 - DNA, 25 bp, Homo sapien
ggacaatatggatttattttcttac

SEQ ID NO: 2377062 - DNA, 25 bp, Homo sapien
agaggacaatatggatttattttct

SEQ ID NO: 2377063 - DNA, 25 bp, Homo sapien
gaggacaatatggatttattttctt

SEQ ID NO: 2377064 - DNA, 25 bp, Homo sapien
aggacaatatggatttattttctta

SEQ ID NO: 2377065 - DNA, 25 bp, Homo sapien
gagacaaccaagagtatgataattt

SEQ ID NO: 2377066 - DNA, 25 bp, Homo sapien
agccacaagactgagacaaccaaga

SEQ ID NO: 2377067 - DNA, 25 bp, Homo sapien
cccaattatcacaggaacttcactt

SEQ ID NO: 2377068 - DNA, 25 bp, Homo sapien
ttatcacaggaacttcacttgctaa

SEQ ID NO: 2377069 - DNA, 25 bp, Homo sapien
tcattcctttcttggaagaatctgg

SEQ ID NO: 2377070 - DNA, 25 bp, Homo sapien
ttgagaatgcacaattaccggttcc

SEQ ID NO: 2377071 - DNA, 25 bp, Homo sapien
tctctgcatcaataaggttcttaac

SEQ ID NO: 2377072 - DNA, 25 bp, Homo sapien
tcttggaagaatctggttcccattt

SEQ ID NO: 2377073 - DNA, 25 bp, Homo sapien
ttgtctatcagctggaacttctttg

SEQ ID NO: 2377074 - DNA, 25 bp, Homo sapien
gaacaaaaagtagattgtctatcag

SEQ ID NO: 2377075 - DNA, 25 bp, Homo sapien
tagattgtctatcagctggaacttc

SEQ ID NO: 2377076 - DNA, 25 bp, Homo sapien
aagtagattgtctatcagctggaac

SEQ ID NO: 2377077 - DNA, 25 bp, Homo sapien
caggagttagagtgtaaatatccca

SEQ ID NO: 2377078 - DNA, 25 bp, Homo sapien
agtctgcttctgtagtaagaagaaa

SEQ ID NO: 2377079 - DNA, 25 bp, Homo sapien
aactcttctacgtgaagagagggcc

SEQ ID NO: 2377080 - DNA, 25 bp, Homo sapien
taaatatcccataaactcagcacgt

SEQ ID NO: 2377081 - DNA, 25 bp, Homo sapien
aagctgtcagagctattaatttgag

SEQ ID NO: 2377082 - DNA, 25 bp, Homo sapien
agctgtcagagctattaatttgaga

SEQ ID NO: 2377083 - DNA, 25 bp, Homo sapien
gctgtcagagctattaatttgagat

SEQ ID NO: 2377084 - DNA, 25 bp, Homo sapien
gagaagaaacactagatacttccaa

SEQ ID NO: 2377085 - DNA, 25 bp, Homo sapien
tatagtatttccattgtaggtaatg

SEQ ID NO: 2377086 - DNA, 25 bp, Homo sapien
taattcctgtttggaccagagaaga

SEQ ID NO: 2377087 - DNA, 25 bp, Homo sapien
tgtaggtaatgaataaaccatgagg

SEQ ID NO: 2377088 - DNA, 25 bp, Homo sapien
ttgcaaactccttctaaaaggtata

SEQ ID NO: 2377089 - DNA, 25 bp, Homo sapien
tgcaaactccttctaaaaggtatat

SEQ ID NO: 2377090 - DNA, 25 bp, Homo sapien
ggtaaagcttccgtaagacatctga

SEQ ID NO: 2377091 - DNA, 25 bp, Homo sapien
ttccgtaagacatctgagtactaac

SEQ ID NO: 2377092 - DNA, 25 bp, Homo sapien
aaagcttccgtaagacatctgagta

SEQ ID NO: 2377093 - DNA, 25 bp, Homo sapien
tttctggtaaagcttccgtaagaca

SEQ ID NO: 2377094 - DNA, 25 bp, Homo sapien
atgcttattattcagggaatttaag

SEQ ID NO: 2377095 - DNA, 25 bp, Homo sapien
ttttgttaaatgcttattattcagg

SEQ ID NO: 2377096 - DNA, 25 bp, Homo sapien
gttaaatgcttattattcagggaat

SEQ ID NO: 2377097 - DNA, 25 bp, Homo sapien
ttattcagggaatttaagttattca

SEQ ID NO: 2377098 - DNA, 25 bp, Homo sapien
tcaacatctagtccaaactgaatgg

SEQ ID NO: 2377099 - DNA, 25 bp, Homo sapien
gtgtttgtgaagtaaccgactcaat

SEQ ID NO: 2377100 - DNA, 25 bp, Homo sapien
ggcaaaactctcagcttcagcaaat

SEQ ID NO: 2377101 - DNA, 25 bp, Homo sapien
tctgtgtttgtgaagtaaccgactc

SEQ ID NO: 2377102 - DNA, 25 bp, Homo sapien
aggttatctgcctgtctctgtctcc

SEQ ID NO: 2377103 - DNA, 25 bp, Homo sapien
cagtatttttaggtttcaccatatt

SEQ ID NO: 2377104 - DNA, 25 bp, Homo sapien
ctcaggttatctgcctgtctctgtc

SEQ ID NO: 2377105 - DNA, 25 bp, Homo sapien
ttgtattgttagtacagtattttta

SEQ ID NO: 2377106 - DNA, 25 bp, Homo sapien
tatgatttgacttgaccttgtaaac

SEQ ID NO: 2377107 - DNA, 25 bp, Homo sapien
tttccttagcgtcgtctacaagttg

SEQ ID NO: 2377108 - DNA, 25 bp, Homo sapien
tctacaagttgttgccattcggtct

SEQ ID NO: 2377109 - DNA, 25 bp, Homo sapien
tgttgccattcggtctgttcactgg

SEQ ID NO: 2377110 - DNA, 25 bp, Homo sapien
ttttggcataattcagcatctcttg

SEQ ID NO: 2377111 - DNA, 25 bp, Homo sapien
tcataggttatccactgagctttca

SEQ ID NO: 2377112 - DNA, 25 bp, Homo sapien
cttgagtggtttcataggttatcca

SEQ ID NO: 2377113 - DNA, 25 bp, Homo sapien
ggttttggcataattcagcatctct

SEQ ID NO: 2377114 - DNA, 25 bp, Homo sapien
ctctttcaagccatcagaataaatg

SEQ ID NO: 2377115 - DNA, 25 bp, Homo sapien
ggtccaaatgctccataaaaagtag

SEQ ID NO: 2377116 - DNA, 25 bp, Homo sapien
tccaaatgctccataaaaagtagtc

SEQ ID NO: 2377117 - DNA, 25 bp, Homo sapien
tggtccaaatgctccataaaaagta

SEQ ID NO: 2377118 - DNA, 25 bp, Homo sapien
ccaaatgctccataaaaagtagtca

SEQ ID NO: 2377119 - DNA, 25 bp, Homo sapien
aagccaaagatactgtgcacaaaca

SEQ ID NO: 2377120 - DNA, 25 bp, Homo sapien
cgatgtcgaagccaaagatactgtg

SEQ ID NO: 2377121 - DNA, 25 bp, Homo sapien
tttagaaattcaatccaagaactgc

SEQ ID NO: 2377122 - DNA, 25 bp, Homo sapien
tagaaattcaatccaagaactgcca

SEQ ID NO: 2377123 - DNA, 25 bp, Homo sapien
gttgagcaagctctccagcattttc

SEQ ID NO: 2377124 - DNA, 25 bp, Homo sapien
gcagacattgagttgagcaagctct

SEQ ID NO: 2377125 - DNA, 25 bp, Homo sapien
tgcagacattgagttgagcaagctc

SEQ ID NO: 2377126 - DNA, 25 bp, Homo sapien
ttttcacatcaaatctgctttcaaa

SEQ ID NO: 2377127 - DNA, 25 bp, Homo sapien
tatcagttaattcaaggttcctggc

SEQ ID NO: 2377128 - DNA, 25 bp, Homo sapien
tggctgcttgttccaaccattttgc

SEQ ID NO: 2377129 - DNA, 25 bp, Homo sapien
ttcctggctgcttgttccaaccatt

SEQ ID NO: 2377130 - DNA, 25 bp, Homo sapien
cttatcagttaattcaaggttcctg

SEQ ID NO: 2377131 - DNA, 25 bp, Homo sapien
agatgccaatcccaactcgtctgtt

SEQ ID NO: 2377132 - DNA, 25 bp, Homo sapien
gatgccaatcccaactcgtctgttt

SEQ ID NO: 2377133 - DNA, 25 bp, Homo sapien
tgccaatcccaactcgtctgttttt

SEQ ID NO: 2377134 - DNA, 25 bp, Homo sapien
atgccaatcccaactcgtctgtttt

SEQ ID NO: 2377135 - DNA, 25 bp, Homo sapien
ctgacatacttcctctgtgttctga

SEQ ID NO: 2377136 - DNA, 25 bp, Homo sapien
tacttcctctgtgttctgataatct

SEQ ID NO: 2377137 - DNA, 25 bp, Homo sapien
catacttcctctgtgttctgataat

SEQ ID NO: 2377138 - DNA, 25 bp, Homo sapien
cttcctctgtgttctgataatcttt

SEQ ID NO: 2377139 - DNA, 25 bp, Homo sapien
tgcaacgtgatcaactctcgcaagt

SEQ ID NO: 2377140 - DNA, 25 bp, Homo sapien
agagagggctaatttgcagttgtac

SEQ ID NO: 2377141 - DNA, 25 bp, Homo sapien
tctcgcaagttatttaccaaagtcc

SEQ ID NO: 2377142 - DNA, 25 bp, Homo sapien
gcagttgtacttcctatgcaacgtg

SEQ ID NO: 2377143 - DNA, 25 bp, Homo sapien
ttctctaagatggagggaataagct

SEQ ID NO: 2377144 - DNA, 25 bp, Homo sapien
cattcggaacactatggtggttgta

SEQ ID NO: 2377145 - DNA, 25 bp, Homo sapien
cactttatcaaacattcggaacact

SEQ ID NO: 2377146 - DNA, 25 bp, Homo sapien
ctctaagatggagggaataagctct

SEQ ID NO: 2377147 - DNA, 25 bp, Homo sapien
gttcctcctcttgcaagtcatgttc

SEQ ID NO: 2377148 - DNA, 25 bp, Homo sapien
tcctcttgcaagtcatgttctctca

SEQ ID NO: 2377149 - DNA, 25 bp, Homo sapien
cttgcaagtcatgttctctcatgta

SEQ ID NO: 2377150 - DNA, 25 bp, Homo sapien
caagtcatgttctctcatgtaaact

SEQ ID NO: 2377151 - DNA, 25 bp, Homo sapien
taaacacgctattactgccatggcc

SEQ ID NO: 2377152 - DNA, 25 bp, Homo sapien
gactttgagctgcatctattcagta

SEQ ID NO: 2377153 - DNA, 25 bp, Homo sapien
gtccgtgtcagataaacacgctatt

SEQ ID NO: 2377154 - DNA, 25 bp, Homo sapien
ctgtttcaaagagtgatgtggactt

SEQ ID NO: 2377155 - DNA, 25 bp, Homo sapien
catttccaggtgctgtttcaccagt

SEQ ID NO: 2377156 - DNA, 25 bp, Homo sapien
gccgcatacatgatcttgagcacgg

SEQ ID NO: 2377157 - DNA, 25 bp, Homo sapien
caaggaaccactgccgcatacatga

SEQ ID NO: 2377158 - DNA, 25 bp, Homo sapien
tcttgagcacggcatcaaatatgag

SEQ ID NO: 2377159 - DNA, 25 bp, Homo sapien
ttaacatggattgtcttttttatga

SEQ ID NO: 2377160 - DNA, 25 bp, Homo sapien
ttacccatattaacatggattgtct

SEQ ID NO: 2377161 - DNA, 25 bp, Homo sapien
catattaacatggattgtctttttt

SEQ ID NO: 2377162 - DNA, 25 bp, Homo sapien
cccatattaacatggattgtctttt

SEQ ID NO: 2377163 - DNA, 25 bp, Homo sapien
tcttattccatagcctcgtaaaagt

SEQ ID NO: 2377164 - DNA, 25 bp, Homo sapien
tctcttattccatagcctcgtaaaa

SEQ ID NO: 2377165 - DNA, 25 bp, Homo sapien
ctcttattccatagcctcgtaaaag

SEQ ID NO: 2377166 - DNA, 25 bp, Homo sapien
ctctcttattccatagcctcgtaaa

SEQ ID NO: 2377167 - DNA, 25 bp, Homo sapien
cattatttccttgtttaagagattt

SEQ ID NO: 2377168 - DNA, 25 bp, Homo sapien
cctttaaagcatcttctaaagaaga

SEQ ID NO: 2377169 - DNA, 25 bp, Homo sapien
tcatcagataacataaacgcttggg

SEQ ID NO: 2377170 - DNA, 25 bp, Homo sapien
ttagactgtagatctcatcatcaga

SEQ ID NO: 2377171 - DNA, 25 bp, Homo sapien
tgtttgagaatgtatctaaccactc

SEQ ID NO: 2377172 - DNA, 25 bp, Homo sapien
gcccatatgatgactctttctgcag

SEQ ID NO: 2377173 - DNA, 25 bp, Homo sapien
ctctttagaatgatctggctcttct

SEQ ID NO: 2377174 - DNA, 25 bp, Homo sapien
tcttcttgtaatgccagtcgtgccc

SEQ ID NO: 2377175 - DNA, 25 bp, Homo sapien
ttagaatgatctggctcttcttgta

SEQ ID NO: 2377176 - DNA, 25 bp, Homo sapien
tgaatgtcacatagtatcttaagaa

SEQ ID NO: 2377177 - DNA, 25 bp, Homo sapien
gtcttcgctacagacattctccagg

SEQ ID NO: 2377178 - DNA, 25 bp, Homo sapien
tcttaagaatgtccacggatgtctt

SEQ ID NO: 2377179 - DNA, 25 bp, Homo sapien
ctttctgaatgtcacatagtatctt

SEQ ID NO: 2377180 - DNA, 25 bp, Homo sapien
cacattcgtccttcttctgcagatt

SEQ ID NO: 2377181 - DNA, 25 bp, Homo sapien
ttcacattcgtccttcttctgcaga

SEQ ID NO: 2377182 - DNA, 25 bp, Homo sapien
tcacattcgtccttcttctgcagat

SEQ ID NO: 2377183 - DNA, 25 bp, Homo sapien
gtgctgctcacggagatctgctacc

SEQ ID NO: 2377184 - DNA, 25 bp, Homo sapien
ccagtgcctgtctgtgcagctttga

SEQ ID NO: 2377185 - DNA, 25 bp, Homo sapien
tgctaccagggaactattgctataa

SEQ ID NO: 2377186 - DNA, 25 bp, Homo sapien
tgtttcgcctgtgcaacttcgtgag

SEQ ID NO: 2377187 - DNA, 25 bp, Homo sapien
gctagatcatgtatcatggaaggaa

SEQ ID NO: 2377188 - DNA, 25 bp, Homo sapien
tggtggcagcttggcttgctagatc

SEQ ID NO: 2377189 - DNA, 25 bp, Homo sapien
cacaggcactgtcactgggacatta

SEQ ID NO: 2377190 - DNA, 25 bp, Homo sapien
aaggaagattcagtcccacaggcac

SEQ ID NO: 2377191 - DNA, 25 bp, Homo sapien
ttgtctggaaagctctacagccatt

SEQ ID NO: 2377192 - DNA, 25 bp, Homo sapien
acatagttctaaagcatctagtaaa

SEQ ID NO: 2377193 - DNA, 25 bp, Homo sapien
cagccattaaagtatgtttacatag

SEQ ID NO: 2377194 - DNA, 25 bp, Homo sapien
tccacagtcatccatttggcattgt

SEQ ID NO: 2377195 - DNA, 25 bp, Homo sapien
actgaagaagtcactgtaagaccac

SEQ ID NO: 2377196 - DNA, 25 bp, Homo sapien
ttcatatggatctttatgtgtccca

SEQ ID NO: 2377197 - DNA, 25 bp, Homo sapien
tgtaagaccactcttcatatggatc

SEQ ID NO: 2377198 - DNA, 25 bp, Homo sapien
ggatctttatgtgtcccaaaagaag

SEQ ID NO: 2377199 - DNA, 25 bp, Homo sapien
cagctagaggcacaagagatgaaat

SEQ ID NO: 2377200 - DNA, 25 bp, Homo sapien
gagatgaaatcagttcataaatcac

SEQ ID NO: 2377201 - DNA, 25 bp, Homo sapien
gttcataaatcactggaagcaccat

SEQ ID NO: 2377202 - DNA, 25 bp, Homo sapien
aatcagttcataaatcactggaagc

SEQ ID NO: 2377203 - DNA, 25 bp, Homo sapien
ttaagggagcagtatggcaaactgg

SEQ ID NO: 2377204 - DNA, 25 bp, Homo sapien
aagggagcagtatggcaaactggta

SEQ ID NO: 2377205 - DNA, 25 bp, Homo sapien
tggcaaactggtagactccaaggga

SEQ ID NO: 2377206 - DNA, 25 bp, Homo sapien
cattaagggagcagtatggcaaact

SEQ ID NO: 2377207 - DNA, 25 bp, Homo sapien
cttttcactcaaagtggcattcatg

SEQ ID NO: 2377208 - DNA, 25 bp, Homo sapien
aatcttagggctagctcccactggc

SEQ ID NO: 2377209 - DNA, 25 bp, Homo sapien
gaagacaggtaccaaatgaaccaac

SEQ ID NO: 2377210 - DNA, 25 bp, Homo sapien
gcattcatgaagtttgacacagagt

SEQ ID NO: 2377211 - DNA, 25 bp, Homo sapien
atttaactaatgtagtctctccaaa

SEQ ID NO: 2377212 - DNA, 25 bp, Homo sapien
tgatttaactaatgtagtctctcca

SEQ ID NO: 2377213 - DNA, 25 bp, Homo sapien
taactaatgtagtctctccaaataa

SEQ ID NO: 2377214 - DNA, 25 bp, Homo sapien
cttgatttaactaatgtagtctctc

SEQ ID NO: 2377215 - DNA, 25 bp, Homo sapien
tttgtgcagtagtgttgtagcattt

SEQ ID NO: 2377216 - DNA, 25 bp, Homo sapien
gcattttccctgataaatataacag

SEQ ID NO: 2377217 - DNA, 25 bp, Homo sapien
tttctttcaattccataacaacatg

SEQ ID NO: 2377218 - DNA, 25 bp, Homo sapien
cattttccctgataaatataacagc

SEQ ID NO: 2377219 - DNA, 25 bp, Homo sapien
aattctgccatgctttatctatgag

SEQ ID NO: 2377220 - DNA, 25 bp, Homo sapien
gatctaccaagcgacaattaaatac

SEQ ID NO: 2377221 - DNA, 25 bp, Homo sapien
gtgcagtaacccaacgccaggtcaa

SEQ ID NO: 2377222 - DNA, 25 bp, Homo sapien
ctgccatgctttatctatgagcttc

SEQ ID NO: 2377223 - DNA, 25 bp, Homo sapien
caagtttaccaagacgaatgcccca

SEQ ID NO: 2377224 - DNA, 25 bp, Homo sapien
tcagtactgagttcacggaacttaa

SEQ ID NO: 2377225 - DNA, 25 bp, Homo sapien
tatttcctgatagagacttgccagc

SEQ ID NO: 2377226 - DNA, 25 bp, Homo sapien
cacggaacttaagccccatttctat

SEQ ID NO: 2377227 - DNA, 25 bp, Homo sapien
ttaacagaatcgatgacagcagtac

SEQ ID NO: 2377228 - DNA, 25 bp, Homo sapien
cgggtaattaacagaatcgatgaca

SEQ ID NO: 2377229 - DNA, 25 bp, Homo sapien
taattaacagaatcgatgacagcag

SEQ ID NO: 2377230 - DNA, 25 bp, Homo sapien
aacagaatcgatgacagcagtacaa

SEQ ID NO: 2377231 - DNA, 25 bp, Homo sapien
tcaaaaataaagctcaaggctgggc

SEQ ID NO: 2377232 - DNA, 25 bp, Homo sapien
gatttgaggtgtacatgggtccgaa

SEQ ID NO: 2377233 - DNA, 25 bp, Homo sapien
tgtcaaagacaagattgcgccctgc

SEQ ID NO: 2377234 - DNA, 25 bp, Homo sapien
tgggtccgaaactcctcttagtcat

SEQ ID NO: 2377235 - DNA, 25 bp, Homo sapien
atattccaaaatgaggcttgtgtcc

SEQ ID NO: 2377236 - DNA, 25 bp, Homo sapien
gagctttaatgaggtctttcttggt

SEQ ID NO: 2377237 - DNA, 25 bp, Homo sapien
caaaatgaggcttgtgtccatatct

SEQ ID NO: 2377238 - DNA, 25 bp, Homo sapien
aaatgttgcctgaaaactggttgaa

SEQ ID NO: 2377239 - DNA, 25 bp, Homo sapien
cattgtccagtctcaaaatcagaca

SEQ ID NO: 2377240 - DNA, 25 bp, Homo sapien
cctgtcatcaaagctaattattgcc

SEQ ID NO: 2377241 - DNA, 25 bp, Homo sapien
aaaaatcagatattaggccgggtgc

SEQ ID NO: 2377242 - DNA, 25 bp, Homo sapien
cttgggtacatgcttccattgttga

SEQ ID NO: 2377243 - DNA, 25 bp, Homo sapien
ccaaatcttttgtgctcgtcagtaa

SEQ ID NO: 2377244 - DNA, 25 bp, Homo sapien
catttgtgttgtggagcagcgtttc

SEQ ID NO: 2377245 - DNA, 25 bp, Homo sapien
tgcatcgcagtccaactgaaatgtg

SEQ ID NO: 2377246 - DNA, 25 bp, Homo sapien
gatgccgccgctttgcagagtccat

SEQ ID NO: 2377247 - DNA, 25 bp, Homo sapien
tcccttaaaaatgagctacaatcgg

SEQ ID NO: 2377248 - DNA, 25 bp, Homo sapien
tgtcactgcactacattgttaaatt

SEQ ID NO: 2377249 - DNA, 25 bp, Homo sapien
agactttgccatgttgaaattttat

SEQ ID NO: 2377250 - DNA, 25 bp, Homo sapien
aaaatgagctacaatcggccgggca

SEQ ID NO: 2377251 - DNA, 25 bp, Homo sapien
catcagctcgttctataactttcaa

SEQ ID NO: 2377252 - DNA, 25 bp, Homo sapien
agctcgttctataactttcaagaca

SEQ ID NO: 2377253 - DNA, 25 bp, Homo sapien
tcatttcatagtcataaggatccaa

SEQ ID NO: 2377254 - DNA, 25 bp, Homo sapien
tttcatcagctcgttctataacttt

SEQ ID NO: 2377255 - DNA, 25 bp, Homo sapien
tggataatttggaaaggccctggat

SEQ ID NO: 2377256 - DNA, 25 bp, Homo sapien
gagtttaaagggaattcaatggata

SEQ ID NO: 2377257 - DNA, 25 bp, Homo sapien
attcaatggataatttggaaaggcc

SEQ ID NO: 2377258 - DNA, 25 bp, Homo sapien
gataatgatatgatttatgatccaa

SEQ ID NO: 2377259 - DNA, 25 bp, Homo sapien
tcagaaagaggatcaaaaccttttc

SEQ ID NO: 2377260 - DNA, 25 bp, Homo sapien
gtttccattcctgagaccatcttgt

SEQ ID NO: 2377261 - DNA, 25 bp, Homo sapien
taatagtataccatcaaaagtttcc

SEQ ID NO: 2377262 - DNA, 25 bp, Homo sapien
tgtccagtaagagtaacccaatcct

SEQ ID NO: 2377263 - DNA, 25 bp, Homo sapien
aaggcagtctagtttgggcagctga

SEQ ID NO: 2377264 - DNA, 25 bp, Homo sapien
tatactgatattctagatccacggg

SEQ ID NO: 2377265 - DNA, 25 bp, Homo sapien
ggcaaagttatgacatgttccaaca

SEQ ID NO: 2377266 - DNA, 25 bp, Homo sapien
gatccacgggaggagaaattcttct

SEQ ID NO: 2377267 - DNA, 25 bp, Homo sapien
tcgaaattaagagcaatgttgggaa

SEQ ID NO: 2377268 - DNA, 25 bp, Homo sapien
taagagcaatgttgggaaagattct

SEQ ID NO: 2377269 - DNA, 25 bp, Homo sapien
aatttcgaaattaagagcaatgttg

SEQ ID NO: 2377270 - DNA, 25 bp, Homo sapien
tcattaatttcgaaattaagagcaa

SEQ ID NO: 2377271 - DNA, 25 bp, Homo sapien
aaaggaaggttatggctgaagcaca

SEQ ID NO: 2377272 - DNA, 25 bp, Homo sapien
cagaattaattgcaggatacagaaa

SEQ ID NO: 2377273 - DNA, 25 bp, Homo sapien
cacatataaggttttacatgaaagc

SEQ ID NO: 2377274 - DNA, 25 bp, Homo sapien
gaaaaatcttctatacggggtcaga

SEQ ID NO: 2377275 - DNA, 25 bp, Homo sapien
tgctgtagacacgtacagagtgtcc

SEQ ID NO: 2377276 - DNA, 25 bp, Homo sapien
gcccactctgggttgactatagaga

SEQ ID NO: 2377277 - DNA, 25 bp, Homo sapien
gattcgatggtctgcgtgatcttag

SEQ ID NO: 2377278 - DNA, 25 bp, Homo sapien
ggcaaggctgatggcaatagctaca

SEQ ID NO: 2377279 - DNA, 25 bp, Homo sapien
gcagaatttcaaagcagatatcttg

SEQ ID NO: 2377280 - DNA, 25 bp, Homo sapien
ctaaataaaggcagaatttcaaagc

SEQ ID NO: 2377281 - DNA, 25 bp, Homo sapien
taaaggcagaatttcaaagcagata

SEQ ID NO: 2377282 - DNA, 25 bp, Homo sapien
aggcagaatttcaaagcagatatct

SEQ ID NO: 2377283 - DNA, 25 bp, Homo sapien
ctgcgatgggatattctgtagccat

SEQ ID NO: 2377284 - DNA, 25 bp, Homo sapien
tgcgatgggatattctgtagccatc

SEQ ID NO: 2377285 - DNA, 25 bp, Homo sapien
gcgatgggatattctgtagccatct

SEQ ID NO: 2377286 - DNA, 25 bp, Homo sapien
gctaggatgttcgtagagactgaca

SEQ ID NO: 2377287 - DNA, 25 bp, Homo sapien
tcagcttgtgggctatgagcacagc

SEQ ID NO: 2377288 - DNA, 25 bp, Homo sapien
cgatcgccggtactggatatgaagc

SEQ ID NO: 2377289 - DNA, 25 bp, Homo sapien
gcttcttcaacaaagcctcggcttt

SEQ ID NO: 2377290 - DNA, 25 bp, Homo sapien
accaggttttgttgaagggcatagc

SEQ ID NO: 2377291 - DNA, 25 bp, Homo sapien
ttcaccaggttttgttgaagggcat

SEQ ID NO: 2377292 - DNA, 25 bp, Homo sapien
tttgttgaagggcatagccattttt

SEQ ID NO: 2377293 - DNA, 25 bp, Homo sapien
ggttttgttgaagggcatagccatt

SEQ ID NO: 2377294 - DNA, 25 bp, Homo sapien
aaaaaacctaatatacgatattatg

SEQ ID NO: 2377295 - DNA, 25 bp, Homo sapien
aaaaacctaatatacgatattatgt

SEQ ID NO: 2377296 - DNA, 25 bp, Homo sapien
aaacctaatatacgatattatgttt

SEQ ID NO: 2377297 - DNA, 25 bp, Homo sapien
agataaaaaacctaatatacgatat

SEQ ID NO: 2377298 - DNA, 25 bp, Homo sapien
cttgaagttcaaataattctgatgg

SEQ ID NO: 2377299 - DNA, 25 bp, Homo sapien
gaagttcaaataattctgatggttt

SEQ ID NO: 2377300 - DNA, 25 bp, Homo sapien
cttcgtagggcttcatcttcttgaa

SEQ ID NO: 2377301 - DNA, 25 bp, Homo sapien
tcttcttgaagttcaaataattctg

SEQ ID NO: 2377302 - DNA, 25 bp, Homo sapien
tcaattggacgagacaggaggagat

SEQ ID NO: 2377303 - DNA, 25 bp, Homo sapien
tataatcaattggacgagacaggag

SEQ ID NO: 2377304 - DNA, 25 bp, Homo sapien
tgaactataatcaattggacgagac

SEQ ID NO: 2377305 - DNA, 25 bp, Homo sapien
gacgagacaggaggagatactgcac

SEQ ID NO: 2377306 - DNA, 25 bp, Homo sapien
cagtggaaactgtcaataggtgcac

SEQ ID NO: 2377307 - DNA, 25 bp, Homo sapien
tgcttgcttaggagatgagacagac

SEQ ID NO: 2377308 - DNA, 25 bp, Homo sapien
tgtgaatgcagacagccagtggaaa

SEQ ID NO: 2377309 - DNA, 25 bp, Homo sapien
tgtggactgaccagggagttaacca

SEQ ID NO: 2377310 - DNA, 25 bp, Homo sapien
gacactgaagagctcgagttctatg

SEQ ID NO: 2377311 - DNA, 25 bp, Homo sapien
tccttgtcagccaaatagaagagac

SEQ ID NO: 2377312 - DNA, 25 bp, Homo sapien
aaagagagattctatagtttccttg

SEQ ID NO: 2377313 - DNA, 25 bp, Homo sapien
gcaaaagttaactgatgcataccta

SEQ ID NO: 2377314 - DNA, 25 bp, Homo sapien
tgcaaaataattcatatgtgatggg

SEQ ID NO: 2377315 - DNA, 25 bp, Homo sapien
tcaaagtctcaaatgatgccagaaa

SEQ ID NO: 2377316 - DNA, 25 bp, Homo sapien
tgccagaaaagttatacatctcaaa

SEQ ID NO: 2377317 - DNA, 25 bp, Homo sapien
tgtgatggggatattcaaagtctca

SEQ ID NO: 2377318 - DNA, 25 bp, Homo sapien
catggactcgtggctgtggtttttc

SEQ ID NO: 2377319 - DNA, 25 bp, Homo sapien
atggactcgtggctgtggtttttcc

SEQ ID NO: 2377320 - DNA, 25 bp, Homo sapien
tggtttttccacagacccttaatca

SEQ ID NO: 2377321 - DNA, 25 bp, Homo sapien
acagacccttaatcattccttcttt

SEQ ID NO: 2377322 - DNA, 25 bp, Homo sapien
tgcaagagtccattccaaagctgca

SEQ ID NO: 2377323 - DNA, 25 bp, Homo sapien
ccagaagcttttgcaagagtccatt

SEQ ID NO: 2377324 - DNA, 25 bp, Homo sapien
gcttttgcaagagtccattccaaag

SEQ ID NO: 2377325 - DNA, 25 bp, Homo sapien
gctgcaggtcatagattttgtattc

SEQ ID NO: 2377326 - DNA, 25 bp, Homo sapien
aagaatggatactggagatggcttt

SEQ ID NO: 2377327 - DNA, 25 bp, Homo sapien
aggattgtttcagctcaggagttct

SEQ ID NO: 2377328 - DNA, 25 bp, Homo sapien
ttgtttcagctcaggagttctaaga

SEQ ID NO: 2377329 - DNA, 25 bp, Homo sapien
gtttcagctcaggagttctaagacc

SEQ ID NO: 2377330 - DNA, 25 bp, Homo sapien
gattgtttcagctcaggagttctaa

SEQ ID NO: 2377331 - DNA, 25 bp, Homo sapien
ggtatctgtatcacacgctgccacg

SEQ ID NO: 2377332 - DNA, 25 bp, Homo sapien
gcagtggtatctgtatcacacgctg

SEQ ID NO: 2377333 - DNA, 25 bp, Homo sapien
gtatcacacgctgccacgctttgct

SEQ ID NO: 2377334 - DNA, 25 bp, Homo sapien
ctgaaagcagtggtatctgtatcac

SEQ ID NO: 2377335 - DNA, 25 bp, Homo sapien
tcgaggacagcgatgagactctcag

SEQ ID NO: 2377336 - DNA, 25 bp, Homo sapien
gacagcgatgagactctcagaacaa

SEQ ID NO: 2377337 - DNA, 25 bp, Homo sapien
tcagaacaatctgacagctgatcag

SEQ ID NO: 2377338 - DNA, 25 bp, Homo sapien
cagctgatcaggacttaaaggacaa

SEQ ID NO: 2377339 - DNA, 25 bp, Homo sapien
gggcatgagcatcagacaagctaat

SEQ ID NO: 2377340 - DNA, 25 bp, Homo sapien
tgcaaaagccggaagttctaactgg

SEQ ID NO: 2377341 - DNA, 25 bp, Homo sapien
ttctaactggatatactgcctggcg

SEQ ID NO: 2377342 - DNA, 25 bp, Homo sapien
tggcgactccgatcaggtcaagatc

SEQ ID NO: 2377343 - DNA, 25 bp, Homo sapien
ctggcccgtgttcatatgctcttcc

SEQ ID NO: 2377344 - DNA, 25 bp, Homo sapien
ctagctggcccgtgttcatatgctc

SEQ ID NO: 2377345 - DNA, 25 bp, Homo sapien
gtgaaaatcctgctagctggcccgt

SEQ ID NO: 2377346 - DNA, 25 bp, Homo sapien
tagctggcccgtgttcatatgctct

SEQ ID NO: 2377347 - DNA, 25 bp, Homo sapien
atattgttggtattcatcgcatgca

SEQ ID NO: 2377348 - DNA, 25 bp, Homo sapien
tcgcatgcatcttcaacatttgaaa

SEQ ID NO: 2377349 - DNA, 25 bp, Homo sapien
tgccaaatagttcactagctcagtg

SEQ ID NO: 2377350 - DNA, 25 bp, Homo sapien
gtatttggtctttgccaaaatccca

SEQ ID NO: 2377351 - DNA, 25 bp, Homo sapien
tctatcccaagaagcttattgtttc

SEQ ID NO: 2377352 - DNA, 25 bp, Homo sapien
ccagctctatcccaagaagcttatt

SEQ ID NO: 2377353 - DNA, 25 bp, Homo sapien
tcccaagaagcttattgtttctaaa

SEQ ID NO: 2377354 - DNA, 25 bp, Homo sapien
tcccgttcagtttccatatccaccc

SEQ ID NO: 2377355 - DNA, 25 bp, Homo sapien
tatcaagactgaagcttcatctaaa

SEQ ID NO: 2377356 - DNA, 25 bp, Homo sapien
tgaatattcagttatcaagactgaa

SEQ ID NO: 2377357 - DNA, 25 bp, Homo sapien
gctttgaatattcagttatcaagac

SEQ ID NO: 2377358 - DNA, 25 bp, Homo sapien
agtgctttgaatattcagttatcaa

SEQ ID NO: 2377359 - DNA, 25 bp, Homo sapien
cttcagaatttcacagggagcagtg

SEQ ID NO: 2377360 - DNA, 25 bp, Homo sapien
acagggagcagtgtctggaggcaca

SEQ ID NO: 2377361 - DNA, 25 bp, Homo sapien
gcagtgtctggaggcacaggtttcc

SEQ ID NO: 2377362 - DNA, 25 bp, Homo sapien
gaatttcacagggagcagtgtctgg

SEQ ID NO: 2377363 - DNA, 25 bp, Homo sapien
tggaaagcacctgagagaccatggg

SEQ ID NO: 2377364 - DNA, 25 bp, Homo sapien
cagggctgagattagaactgtggtc

SEQ ID NO: 2377365 - DNA, 25 bp, Homo sapien
taaaaacaccaccttatgaggaatg

SEQ ID NO: 2377366 - DNA, 25 bp, Homo sapien
gaggaatggtaatgctggaaagcac

SEQ ID NO: 2377367 - DNA, 25 bp, Homo sapien
atagcagactccaaaattcttgtcc

SEQ ID NO: 2377368 - DNA, 25 bp, Homo sapien
cttcttgaaaaaaaggttcagtgat

SEQ ID NO: 2377369 - DNA, 25 bp, Homo sapien
gactccaaaattcttgtccttcttg

SEQ ID NO: 2377370 - DNA, 25 bp, Homo sapien
ttaatagcagactccaaaattcttg

SEQ ID NO: 2377371 - DNA, 25 bp, Homo sapien
catgtggggtaatgttagacaaata

SEQ ID NO: 2377372 - DNA, 25 bp, Homo sapien
gacaaatagctataatacagagatt

SEQ ID NO: 2377373 - DNA, 25 bp, Homo sapien
acaaatagctataatacagagattg

SEQ ID NO: 2377374 - DNA, 25 bp, Homo sapien
attacatgtggggtaatgttagaca

SEQ ID NO: 2377375 - DNA, 25 bp, Homo sapien
tattaattcaggacatgagttcttt

SEQ ID NO: 2377376 - DNA, 25 bp, Homo sapien
ttattaattcaggacatgagttctt

SEQ ID NO: 2377377 - DNA, 25 bp, Homo sapien
gcagctccgacagctcagtggcaaa

SEQ ID NO: 2377378 - DNA, 25 bp, Homo sapien
tcttcccttttgtctggctcccgct

SEQ ID NO: 2377379 - DNA, 25 bp, Homo sapien
cagcagctccgacagctcagtggca

SEQ ID NO: 2377380 - DNA, 25 bp, Homo sapien
actggcaaagagactcctgggcttc

SEQ ID NO: 2377381 - DNA, 25 bp, Homo sapien
tatggcaaaggactacaaagtcaga

SEQ ID NO: 2377382 - DNA, 25 bp, Homo sapien
tcccagacttctagccaggtggctt

SEQ ID NO: 2377383 - DNA, 25 bp, Homo sapien
gtaattaacacttctgtgtgctggc

SEQ ID NO: 2377384 - DNA, 25 bp, Homo sapien
taagttattcgcaagtatggcaaag

SEQ ID NO: 2377385 - DNA, 25 bp, Homo sapien
agttgggtcaaaaggtatgcatatt

SEQ ID NO: 2377386 - DNA, 25 bp, Homo sapien
gattgtcaaattgtcctccaaagaa

SEQ ID NO: 2377387 - DNA, 25 bp, Homo sapien
aacgtttcctccgagaataatggca

SEQ ID NO: 2377388 - DNA, 25 bp, Homo sapien
taacttacaagtgtgtgttcctaga

SEQ ID NO: 2377389 - DNA, 25 bp, Homo sapien
tatacacactatttcgcacatcttg

SEQ ID NO: 2377390 - DNA, 25 bp, Homo sapien
taggtggctgttataagtgtttcac

SEQ ID NO: 2377391 - DNA, 25 bp, Homo sapien
tcaatgtgcaatcagtgagaaaaac

SEQ ID NO: 2377392 - DNA, 25 bp, Homo sapien
gataagacataactgaggagctcgg

SEQ ID NO: 2377393 - DNA, 25 bp, Homo sapien
tgttgcccaggccacctgggttcaa

SEQ ID NO: 2377394 - DNA, 25 bp, Homo sapien
cttgctgttgcccaggccacctggg

SEQ ID NO: 2377395 - DNA, 25 bp, Homo sapien
tgctgttgcccaggccacctgggtt

SEQ ID NO: 2377396 - DNA, 25 bp, Homo sapien
gctgttgcccaggccacctgggttc

SEQ ID NO: 2377397 - DNA, 25 bp, Homo sapien
ctagacccttgttactttaagtgtg

SEQ ID NO: 2377398 - DNA, 25 bp, Homo sapien
tggtatcacctgatgcttgttagaa

SEQ ID NO: 2377399 - DNA, 25 bp, Homo sapien
caccatgggccattatttgctgacc

SEQ ID NO: 2377400 - DNA, 25 bp, Homo sapien
tttaagtgtgatcagtgaacaagca

SEQ ID NO: 2377401 - DNA, 25 bp, Homo sapien
caatagcaggacgttcttagtggag

SEQ ID NO: 2377402 - DNA, 25 bp, Homo sapien
ggccaaccggtatttcagagcaaag

SEQ ID NO: 2377403 - DNA, 25 bp, Homo sapien
tatacagcatcttggaatcagggtc

SEQ ID NO: 2377404 - DNA, 25 bp, Homo sapien
taaattaagaatatgtgtcccggcc

SEQ ID NO: 2377405 - DNA, 25 bp, Homo sapien
ttttgtaagtaaaaaggcacctgca

SEQ ID NO: 2377406 - DNA, 25 bp, Homo sapien
gaaaccggtgatttactcctgcaac

SEQ ID NO: 2377407 - DNA, 25 bp, Homo sapien
ccagtgcacgcactttgaggtttgt

SEQ ID NO: 2377408 - DNA, 25 bp, Homo sapien
ccggctcacccatcatgcaggagag

SEQ ID NO: 2377409 - DNA, 25 bp, Homo sapien
ctggaggccagtggcacaattttag

SEQ ID NO: 2377410 - DNA, 25 bp, Homo sapien
gaggccagtggcacaattttagctc

SEQ ID NO: 2377411 - DNA, 25 bp, Homo sapien
agctcactgcaacctctgcctccgg

SEQ ID NO: 2377412 - DNA, 25 bp, Homo sapien
ctcccaaagtgattacagccatgag

SEQ ID NO: 2377413 - DNA, 25 bp, Homo sapien
cctaaccatgaatgagtctcaagct

SEQ ID NO: 2377414 - DNA, 25 bp, Homo sapien
taagccaggcttgggcttaaggacc

SEQ ID NO: 2377415 - DNA, 25 bp, Homo sapien
catgaatgagtctcaagctctgaat

SEQ ID NO: 2377416 - DNA, 25 bp, Homo sapien
ttcccccagctcctaaccatgaatg

SEQ ID NO: 2377417 - DNA, 25 bp, Homo sapien
tctgacttggactcaataaaattgc

SEQ ID NO: 2377418 - DNA, 25 bp, Homo sapien
ggctgtcctgaagcttacctaacta

SEQ ID NO: 2377419 - DNA, 25 bp, Homo sapien
aggcctagcccgtgtgcaatgccac

SEQ ID NO: 2377420 - DNA, 25 bp, Homo sapien
ttgactgcacctttaactatggctg

SEQ ID NO: 2377421 - DNA, 25 bp, Homo sapien
agatggccctgcaggaattaaactt

SEQ ID NO: 2377422 - DNA, 25 bp, Homo sapien
atggccctgcaggaattaaacttta

SEQ ID NO: 2377423 - DNA, 25 bp, Homo sapien
tggccctgcaggaattaaactttat

SEQ ID NO: 2377424 - DNA, 25 bp, Homo sapien
gatggccctgcaggaattaaacttt

SEQ ID NO: 2377425 - DNA, 25 bp, Homo sapien
cagagacctttatgggttgttaact

SEQ ID NO: 2377426 - DNA, 25 bp, Homo sapien
cagtctggcgttgctatatctgggt

SEQ ID NO: 2377427 - DNA, 25 bp, Homo sapien
aattttgataggagacagtctggcg

SEQ ID NO: 2377428 - DNA, 25 bp, Homo sapien
ataaattttgataggagacagtctg

SEQ ID NO: 2377429 - DNA, 25 bp, Homo sapien
agactggttgcaaggtgtgaccgca

SEQ ID NO: 2377430 - DNA, 25 bp, Homo sapien
tgttgcatcgagtaatgtcactgga

SEQ ID NO: 2377431 - DNA, 25 bp, Homo sapien
gactcggcctaagatttcctggaac

SEQ ID NO: 2377432 - DNA, 25 bp, Homo sapien
ttgtcaccaagaaccagcatctctg

SEQ ID NO: 2377433 - DNA, 25 bp, Homo sapien
gacatgacataaaggcaggcacgga

SEQ ID NO: 2377434 - DNA, 25 bp, Homo sapien
aactgctgtgtgttccgagatgact

SEQ ID NO: 2377435 - DNA, 25 bp, Homo sapien
tgcactcatgaatcggcaccatctg

SEQ ID NO: 2377436 - DNA, 25 bp, Homo sapien
gatgacttcattgccaaggtgttgc

SEQ ID NO: 2377437 - DNA, 25 bp, Homo sapien
aatattacactctccagcaggcttt

SEQ ID NO: 2377438 - DNA, 25 bp, Homo sapien
agcactccatgtttgtacagaaagg

SEQ ID NO: 2377439 - DNA, 25 bp, Homo sapien
gaaaggtagcataggaaaagtggtc

SEQ ID NO: 2377440 - DNA, 25 bp, Homo sapien
gcagagttctgatatggaaaagcac

SEQ ID NO: 2377441 - DNA, 25 bp, Homo sapien
tctctgcgtgcaagagacggccgtc

SEQ ID NO: 2377442 - DNA, 25 bp, Homo sapien
gtgaacactatctccacccgggtgg

SEQ ID NO: 2377443 - DNA, 25 bp, Homo sapien
cagtctgatgggcaatgggatcccc

SEQ ID NO: 2377444 - DNA, 25 bp, Homo sapien
aacctcggtcgcaggagttgcatca

SEQ ID NO: 2377445 - DNA, 25 bp, Homo sapien
ctagattggacctgaattgcttggc

SEQ ID NO: 2377446 - DNA, 25 bp, Homo sapien
gttgtctagattggacctgaattgc

SEQ ID NO: 2377447 - DNA, 25 bp, Homo sapien
tctcaatatgttgtctagattggac

SEQ ID NO: 2377448 - DNA, 25 bp, Homo sapien
caatatgttgtctagattggacctg

SEQ ID NO: 2377449 - DNA, 25 bp, Homo sapien
ccgccacaggtcgattctcagtgga

SEQ ID NO: 2377450 - DNA, 25 bp, Homo sapien
gggatgacccgccacaggtcgattc

SEQ ID NO: 2377451 - DNA, 25 bp, Homo sapien
gaagctgggatgacccgccacaggt

SEQ ID NO: 2377452 - DNA, 25 bp, Homo sapien
tgacccgccacaggtcgattctcag

SEQ ID NO: 2377453 - DNA, 25 bp, Homo sapien
tgactccctattaatgagtccgagg

SEQ ID NO: 2377454 - DNA, 25 bp, Homo sapien
aaatgactccctattaatgagtccg

SEQ ID NO: 2377455 - DNA, 25 bp, Homo sapien
ccctattaatgagtccgaggatcat

SEQ ID NO: 2377456 - DNA, 25 bp, Homo sapien
ctccctattaatgagtccgaggatc

SEQ ID NO: 2377457 - DNA, 25 bp, Homo sapien
gctgaaccaacacatgcaactcgtc

SEQ ID NO: 2377458 - DNA, 25 bp, Homo sapien
ccgctcccgccgctatcgccagctg

SEQ ID NO: 2377459 - DNA, 25 bp, Homo sapien
acatgcaactcgtctccccggccag

SEQ ID NO: 2377460 - DNA, 25 bp, Homo sapien
gctcccgccgctatcgccagctgaa

SEQ ID NO: 2377461 - DNA, 25 bp, Homo sapien
cccgctggattcagaaatgtcagca

SEQ ID NO: 2377462 - DNA, 25 bp, Homo sapien
ttagccgaggaccttatacatcaga

SEQ ID NO: 2377463 - DNA, 25 bp, Homo sapien
tatatgcctccacagaacttagccg

SEQ ID NO: 2377464 - DNA, 25 bp, Homo sapien
tggaagcctgtactgttctggagag

SEQ ID NO: 2377465 - DNA, 25 bp, Homo sapien
ttatatgtagacagacagggcctct

SEQ ID NO: 2377466 - DNA, 25 bp, Homo sapien
gcgcctggcctatttcttgtctctt

SEQ ID NO: 2377467 - DNA, 25 bp, Homo sapien
accgcgcctggcctatttcttgtct

SEQ ID NO: 2377468 - DNA, 25 bp, Homo sapien
gcctggcctatttcttgtctctttc

SEQ ID NO: 2377469 - DNA, 25 bp, Homo sapien
cgcgcctggcctatttcttgtctct

SEQ ID NO: 2377470 - DNA, 25 bp, Homo sapien
tgagtgcagtggcacgatcttggct

SEQ ID NO: 2377471 - DNA, 25 bp, Homo sapien
tctccgcctcccaggtttaagcgat

SEQ ID NO: 2377472 - DNA, 25 bp, Homo sapien
atctccgcctcccaggtttaagcga

SEQ ID NO: 2377473 - DNA, 25 bp, Homo sapien
tttgctctcaaaggctgagtgcagt

SEQ ID NO: 2377474 - DNA, 25 bp, Homo sapien
gaaaccccagactttagctgagagc

SEQ ID NO: 2377475 - DNA, 25 bp, Homo sapien
tatctacaaatcaggtgccccagaa

SEQ ID NO: 2377476 - DNA, 25 bp, Homo sapien
ttatagcctggccaataagcctgcc

SEQ ID NO: 2377477 - DNA, 25 bp, Homo sapien
gagcagatgcttaaaacgtgtttcc

SEQ ID NO: 2377478 - DNA, 25 bp, Homo sapien
ttttactaccatctttttgcaatat

SEQ ID NO: 2377479 - DNA, 25 bp, Homo sapien
cactttttattcatactgacacatt

SEQ ID NO: 2377480 - DNA, 25 bp, Homo sapien
tcttttgatggttctaccaaaacag

SEQ ID NO: 2377481 - DNA, 25 bp, Homo sapien
tttagcagcatttttactaccatct

SEQ ID NO: 2377482 - DNA, 25 bp, Homo sapien
gaaggattaggtacctcttcacagt

SEQ ID NO: 2377483 - DNA, 25 bp, Homo sapien
gaaatctgtattcaaccacgatatg

SEQ ID NO: 2377484 - DNA, 25 bp, Homo sapien
gacttcttatccacaggaaatctgt

SEQ ID NO: 2377485 - DNA, 25 bp, Homo sapien
taaaacaaaccactcccatctgact

SEQ ID NO: 2377486 - DNA, 25 bp, Homo sapien
tgtctacatttagcaacatcaggca

SEQ ID NO: 2377487 - DNA, 25 bp, Homo sapien
tctctaaccattgtctacatttagc

SEQ ID NO: 2377488 - DNA, 25 bp, Homo sapien
tttagcaacatcaggcatatattca

SEQ ID NO: 2377489 - DNA, 25 bp, Homo sapien
ttcttctctaaccattgtctacatt

SEQ ID NO: 2377490 - DNA, 25 bp, Homo sapien
cagagagaacttaaacagctaacag

SEQ ID NO: 2377491 - DNA, 25 bp, Homo sapien
tgtctcaggtacagaagtttaatgc

SEQ ID NO: 2377492 - DNA, 25 bp, Homo sapien
agacctatcctatctcagagagaac

SEQ ID NO: 2377493 - DNA, 25 bp, Homo sapien
tctttagaataatgccatacatgca

SEQ ID NO: 2377494 - DNA, 25 bp, Homo sapien
ttgaccctcactaattccagcttct

SEQ ID NO: 2377495 - DNA, 25 bp, Homo sapien
ccttgaccctcactaattccagctt

SEQ ID NO: 2377496 - DNA, 25 bp, Homo sapien
tccttgaccctcactaattccagct

SEQ ID NO: 2377497 - DNA, 25 bp, Homo sapien
tgttccttgaccctcactaattcca

SEQ ID NO: 2377498 - DNA, 25 bp, Homo sapien
aatgaaacaggtgggtacaggatcc

SEQ ID NO: 2377499 - DNA, 25 bp, Homo sapien
gaggaacgatcattgcatactacag

SEQ ID NO: 2377500 - DNA, 25 bp, Homo sapien
gagtcaagtgtatgcaacagccgta

SEQ ID NO: 2377501 - DNA, 25 bp, Homo sapien
ccattgtgcctagctttgggaacca

SEQ ID NO: 2377502 - DNA, 25 bp, Homo sapien
aattactaaacacatccaagtattc

SEQ ID NO: 2377503 - DNA, 25 bp, Homo sapien
attactaaacacatccaagtattca

SEQ ID NO: 2377504 - DNA, 25 bp, Homo sapien
ttgacataagagaatactgtcttta

SEQ ID NO: 2377505 - DNA, 25 bp, Homo sapien
ttttgacataagagaatactgtctt

SEQ ID NO: 2377506 - DNA, 25 bp, Homo sapien
gctctgggaattttggctatagtaa

SEQ ID NO: 2377507 - DNA, 25 bp, Homo sapien
tgctctgggaattttggctatagta

SEQ ID NO: 2377508 - DNA, 25 bp, Homo sapien
ttgctctgggaattttggctatagt

SEQ ID NO: 2377509 - DNA, 25 bp, Homo sapien
tgttgtctcatagaggcatcatagt

SEQ ID NO: 2377510 - DNA, 25 bp, Homo sapien
tcactactcattcaaggcttccagg

SEQ ID NO: 2377511 - DNA, 25 bp, Homo sapien
gatgagccattttgcaaccttttgc

SEQ ID NO: 2377512 - DNA, 25 bp, Homo sapien
taaaatgtgcccaagcaggaattcc

SEQ ID NO: 2377513 - DNA, 25 bp, Homo sapien
atgtaagtggttgtgatcatttagc

SEQ ID NO: 2377514 - DNA, 25 bp, Homo sapien
gaaatatgtaagtggttgtgatcat

SEQ ID NO: 2377515 - DNA, 25 bp, Homo sapien
atatgtaagtggttgtgatcattta

SEQ ID NO: 2377516 - DNA, 25 bp, Homo sapien
atcatttagctgtaaacaccactgt

SEQ ID NO: 2377517 - DNA, 25 bp, Homo sapien
gccatcacgcctggcctcttttttc

SEQ ID NO: 2377518 - DNA, 25 bp, Homo sapien
catcacgcctggcctcttttttctt

SEQ ID NO: 2377519 - DNA, 25 bp, Homo sapien
gagccatcacgcctggcctcttttt

SEQ ID NO: 2377520 - DNA, 25 bp, Homo sapien
agccatcacgcctggcctctttttt

SEQ ID NO: 2377521 - DNA, 25 bp, Homo sapien
aaatctttgtgcttctttaagatca

SEQ ID NO: 2377522 - DNA, 25 bp, Homo sapien
aatctttgtgcttctttaagatcaa

SEQ ID NO: 2377523 - DNA, 25 bp, Homo sapien
tctgtaaaatctccctgaatgataa

SEQ ID NO: 2377524 - DNA, 25 bp, Homo sapien
aaatctccctgaatgataatttcat

SEQ ID NO: 2377525 - DNA, 25 bp, Homo sapien
tgtaaaatctccctgaatgataatt

SEQ ID NO: 2377526 - DNA, 25 bp, Homo sapien
catctgtaaaatctccctgaatgat

SEQ ID NO: 2377527 - DNA, 25 bp, Homo sapien
caagatcttcgatgctgtcatcatc

SEQ ID NO: 2377528 - DNA, 25 bp, Homo sapien
tccaagatcttcgatgctgtcatca

SEQ ID NO: 2377529 - DNA, 25 bp, Homo sapien
gatcttcgatgctgtcatcatctac

SEQ ID NO: 2377530 - DNA, 25 bp, Homo sapien
ttctccaagatcttcgatgctgtca

SEQ ID NO: 2377531 - DNA, 25 bp, Homo sapien
ccaaggacgaggacagtctacagtt

SEQ ID NO: 2377532 - DNA, 25 bp, Homo sapien
gcatgagcatgacagtctcccgttt

SEQ ID NO: 2377533 - DNA, 25 bp, Homo sapien
gactaaattctattcatgcatgagc

SEQ ID NO: 2377534 - DNA, 25 bp, Homo sapien
gttcaggccattaaatacagacaaa

SEQ ID NO: 2377535 - DNA, 25 bp, Homo sapien
ggcttacgggttcaaacagcgcaca

SEQ ID NO: 2377536 - DNA, 25 bp, Homo sapien
ccacagggtggacttcataacaaca

SEQ ID NO: 2377537 - DNA, 25 bp, Homo sapien
ttgcatggcgataaacaagggttcc

SEQ ID NO: 2377538 - DNA, 25 bp, Homo sapien
cagttatgttattgtgcccacaggg

SEQ ID NO: 2377539 - DNA, 25 bp, Homo sapien
cagcaacagactacatacataacgc

SEQ ID NO: 2377540 - DNA, 25 bp, Homo sapien
gactacatacataacgcataccaga

SEQ ID NO: 2377541 - DNA, 25 bp, Homo sapien
gcaacagactacatacataacgcat

SEQ ID NO: 2377542 - DNA, 25 bp, Homo sapien
taattctatttagtaaaatccacag

SEQ ID NO: 2377543 - DNA, 25 bp, Homo sapien
caaagcagcttggccctattagtac

SEQ ID NO: 2377544 - DNA, 25 bp, Homo sapien
cagcttggccctattagtacatttt

SEQ ID NO: 2377545 - DNA, 25 bp, Homo sapien
cagagattaaactatgttgcatttt

SEQ ID NO: 2377546 - DNA, 25 bp, Homo sapien
gattatagccatgcatcaaagcagc

SEQ ID NO: 2377547 - DNA, 25 bp, Homo sapien
gaagcccggtgtgggcggcgtcacc

SEQ ID NO: 2377548 - DNA, 25 bp, Homo sapien
gtgtgggcggcgtcacctcagaaac

SEQ ID NO: 2377549 - DNA, 25 bp, Homo sapien
ggcgtcacctcagaaacgccatcgg

SEQ ID NO: 2377550 - DNA, 25 bp, Homo sapien
ccatcggcgcgcctgccccgagcgg

SEQ ID NO: 2377551 - DNA, 25 bp, Homo sapien
ggcgcccggcaaggaaggctgccgg

SEQ ID NO: 2377552 - DNA, 25 bp, Homo sapien
tggcgcccggcaaggaaggctgccg

SEQ ID NO: 2377553 - DNA, 25 bp, Homo sapien
ctggcgcccggcaaggaaggctgcc

SEQ ID NO: 2377554 - DNA, 25 bp, Homo sapien
tacaggtaaacatgaaatagtggcc

SEQ ID NO: 2377555 - DNA, 25 bp, Homo sapien
gaaagcggtttcacatcaaaataga

SEQ ID NO: 2377556 - DNA, 25 bp, Homo sapien
tacgtaccatgcctaaaaagtggga

SEQ ID NO: 2377557 - DNA, 25 bp, Homo sapien
ttttgcggccaattctaagtagttc

SEQ ID NO: 2377558 - DNA, 25 bp, Homo sapien
gcagctccttccgttgtttctcgat

SEQ ID NO: 2377559 - DNA, 25 bp, Homo sapien
tctgccgatcctcttcccatgaaag

SEQ ID NO: 2377560 - DNA, 25 bp, Homo sapien
tgcaacgttcttccagtgtcaacac

SEQ ID NO: 2377561 - DNA, 25 bp, Homo sapien
tagtggaaatctcaacttctgaccc

SEQ ID NO: 2377562 - DNA, 25 bp, Homo sapien
ccgtacctggcctaccaaagcttat

SEQ ID NO: 2377563 - DNA, 25 bp, Homo sapien
tcctgaccccatgattcatcctcct

SEQ ID NO: 2377564 - DNA, 25 bp, Homo sapien
tgaccccatgattcatcctcctcag

SEQ ID NO: 2377565 - DNA, 25 bp, Homo sapien
cgtacctggcctaccaaagcttatt

SEQ ID NO: 2377566 - DNA, 25 bp, Homo sapien
cttcttcgtgagtgacctgattatt

SEQ ID NO: 2377567 - DNA, 25 bp, Homo sapien
gaagctgtagttgggtcttttggag

SEQ ID NO: 2377568 - DNA, 25 bp, Homo sapien
gctgtagttgggtcttttggagagc

SEQ ID NO: 2377569 - DNA, 25 bp, Homo sapien
ttggcattccatttgattggattca

SEQ ID NO: 2377570 - DNA, 25 bp, Homo sapien
ctcaaggtcttcagagagaagagaa

SEQ ID NO: 2377571 - DNA, 25 bp, Homo sapien
tcttcagagagaagagaagaatgcg

SEQ ID NO: 2377572 - DNA, 25 bp, Homo sapien
cagagagaagagaagaatgcgttgc

SEQ ID NO: 2377573 - DNA, 25 bp, Homo sapien
ttcagagagaagagaagaatgcgtt

SEQ ID NO: 2377574 - DNA, 25 bp, Homo sapien
cactaacgtgttgctgagagtttcg

SEQ ID NO: 2377575 - DNA, 25 bp, Homo sapien
gagcttgtagctgtcctacctgggc

SEQ ID NO: 2377576 - DNA, 25 bp, Homo sapien
ttagctttatcattgtcgtaagagc

SEQ ID NO: 2377577 - DNA, 25 bp, Homo sapien
tgggcagaaagttccactaacgtgt

SEQ ID NO: 2377578 - DNA, 25 bp, Homo sapien
aaatttacccgaacaatctgcaatg

SEQ ID NO: 2377579 - DNA, 25 bp, Homo sapien
ttaaatttacccgaacaatctgcaa

SEQ ID NO: 2377580 - DNA, 25 bp, Homo sapien
gcaatgtgattaactgcctcaataa

SEQ ID NO: 2377581 - DNA, 25 bp, Homo sapien
atctgcaatgtgattaactgcctca

SEQ ID NO: 2377582 - DNA, 25 bp, Homo sapien
tctccgccatcttggcatcacgtag

SEQ ID NO: 2377583 - DNA, 25 bp, Homo sapien
tttgttgacttcaatcttaagtgcc

SEQ ID NO: 2377584 - DNA, 25 bp, Homo sapien
tttcacaatacaagtctccgccatc

SEQ ID NO: 2377585 - DNA, 25 bp, Homo sapien
catcacgtagggcatgctctagcat

SEQ ID NO: 2377586 - DNA, 25 bp, Homo sapien
tctcttgcttgaggcgaatgatctc

SEQ ID NO: 2377587 - DNA, 25 bp, Homo sapien
gcgaatgatctcttctcgttgctca

SEQ ID NO: 2377588 - DNA, 25 bp, Homo sapien
ttctgtcgtcttttcattgaggtcc

SEQ ID NO: 2377589 - DNA, 25 bp, Homo sapien
aaaagcaattcatcgtgcaggcaac

SEQ ID NO: 2377590 - DNA, 25 bp, Homo sapien
caaatacattcgatcatctgtttta

SEQ ID NO: 2377591 - DNA, 25 bp, Homo sapien
aaatacattcgatcatctgttttac

SEQ ID NO: 2377592 - DNA, 25 bp, Homo sapien
tacaaatacattcgatcatctgttt

SEQ ID NO: 2377593 - DNA, 25 bp, Homo sapien
ttacaaatacattcgatcatctgtt

SEQ ID NO: 2377594 - DNA, 25 bp, Homo sapien
tgtgcgttcttgctttgacttcgca

SEQ ID NO: 2377595 - DNA, 25 bp, Homo sapien
gctttgacttcgcaatattaagcaa

SEQ ID NO: 2377596 - DNA, 25 bp, Homo sapien
gcgttcttgctttgacttcgcaata

SEQ ID NO: 2377597 - DNA, 25 bp, Homo sapien
ctgaatttgtgcgttcttgctttga

SEQ ID NO: 2377598 - DNA, 25 bp, Homo sapien
gaaactgcagatcactctgttgttt

SEQ ID NO: 2377599 - DNA, 25 bp, Homo sapien
gagtcatacatctgtattaattcct

SEQ ID NO: 2377600 - DNA, 25 bp, Homo sapien
aattaagaaactgcagatcactctg

SEQ ID NO: 2377601 - DNA, 25 bp, Homo sapien
ttcctccatctttgagtcatacatc

SEQ ID NO: 2377602 - DNA, 25 bp, Homo sapien
caaatttctggtccttaaacagtga

SEQ ID NO: 2377603 - DNA, 25 bp, Homo sapien
tcaaatttctggtccttaaacagtg

SEQ ID NO: 2377604 - DNA, 25 bp, Homo sapien
tctttgcattcatcgcaagagctct

SEQ ID NO: 2377605 - DNA, 25 bp, Homo sapien
cttgtctgacctattttgctgaacc

SEQ ID NO: 2377606 - DNA, 25 bp, Homo sapien
cccaaacacagtatcgatctgttgt

SEQ ID NO: 2377607 - DNA, 25 bp, Homo sapien
tctccccaaacacagtatcgatctg

SEQ ID NO: 2377608 - DNA, 25 bp, Homo sapien
gacagttggtcaggcccaggtaaac

SEQ ID NO: 2377609 - DNA, 25 bp, Homo sapien
tatgaagttactcgggtggcagcac

SEQ ID NO: 2377610 - DNA, 25 bp, Homo sapien
tctttggtgaatatggatgacagcg

SEQ ID NO: 2377611 - DNA, 25 bp, Homo sapien
ttctggcagcatgagatttcggacc

SEQ ID NO: 2377612 - DNA, 25 bp, Homo sapien
gggagtcatgttgtgtgccacagat

SEQ ID NO: 2377613 - DNA, 25 bp, Homo sapien
gagtcatgttgtgtgccacagatgc

SEQ ID NO: 2377614 - DNA, 25 bp, Homo sapien
ccggggagtcatgttgtgtgccaca

SEQ ID NO: 2377615 - DNA, 25 bp, Homo sapien
catgttgtgtgccacagatgctttc

SEQ ID NO: 2377616 - DNA, 25 bp, Homo sapien
ttggaagaggactccgtctcatctt

SEQ ID NO: 2377617 - DNA, 25 bp, Homo sapien
taggtgagttctttttattggaaga

SEQ ID NO: 2377618 - DNA, 25 bp, Homo sapien
ggaatcttggatggcaattagctca

SEQ ID NO: 2377619 - DNA, 25 bp, Homo sapien
gtagattaacaaactcgtaggtgag

SEQ ID NO: 2377620 - DNA, 25 bp, Homo sapien
gtaagctggggatgtctaagcaaaa

SEQ ID NO: 2377621 - DNA, 25 bp, Homo sapien
agctggggatgtctaagcaaaatac

SEQ ID NO: 2377622 - DNA, 25 bp, Homo sapien
ggggatgtctaagcaaaatacgaac

SEQ ID NO: 2377623 - DNA, 25 bp, Homo sapien
ctggggatgtctaagcaaaatacga

SEQ ID NO: 2377624 - DNA, 25 bp, Homo sapien
acgagattccgccagcaaacgctgg

SEQ ID NO: 2377625 - DNA, 25 bp, Homo sapien
gagattccgccagcaaacgctggag

SEQ ID NO: 2377626 - DNA, 25 bp, Homo sapien
catctgacgagattccgccagcaaa

SEQ ID NO: 2377627 - DNA, 25 bp, Homo sapien
tctgacgagattccgccagcaaacg

SEQ ID NO: 2377628 - DNA, 25 bp, Homo sapien
ccagtgagattctcatggctgatgg

SEQ ID NO: 2377629 - DNA, 25 bp, Homo sapien
agattctcatggctgatgggcagca

SEQ ID NO: 2377630 - DNA, 25 bp, Homo sapien
ggcactgccagtgagattctcatgg

SEQ ID NO: 2377631 - DNA, 25 bp, Homo sapien
atttgtggcactgccagtgagattc

SEQ ID NO: 2377632 - DNA, 25 bp, Homo sapien
tgtgtttggatgtgacaaatatagt

SEQ ID NO: 2377633 - DNA, 25 bp, Homo sapien
caaatatagtcaagagaaaatgaaa

SEQ ID NO: 2377634 - DNA, 25 bp, Homo sapien
tgtttggatgtgacaaatatagtca

SEQ ID NO: 2377635 - DNA, 25 bp, Homo sapien
tcagtggtgtgtttggatgtgacaa

SEQ ID NO: 2377636 - DNA, 25 bp, Homo sapien
caaaggtatttttttgagctgactc

SEQ ID NO: 2377637 - DNA, 25 bp, Homo sapien
tgagctgactcttctgggacctctg

SEQ ID NO: 2377638 - DNA, 25 bp, Homo sapien
gctgactcttctgggacctctgact

SEQ ID NO: 2377639 - DNA, 25 bp, Homo sapien
ttttttgagctgactcttctgggac

SEQ ID NO: 2377640 - DNA, 25 bp, Homo sapien
gatgaatactgaagttgccttttgt

SEQ ID NO: 2377641 - DNA, 25 bp, Homo sapien
cacgatgaatactgaagttgccttt

SEQ ID NO: 2377642 - DNA, 25 bp, Homo sapien
gatcacgatgaatactgaagttgcc

SEQ ID NO: 2377643 - DNA, 25 bp, Homo sapien
tcgtgatcacgatgaatactgaagt

SEQ ID NO: 2377644 - DNA, 25 bp, Homo sapien
cattcagtattggtgtctgctttct

SEQ ID NO: 2377645 - DNA, 25 bp, Homo sapien
tcattcagtattggtgtctgctttc

SEQ ID NO: 2377646 - DNA, 25 bp, Homo sapien
taactttctagttctgctcccagct

SEQ ID NO: 2377647 - DNA, 25 bp, Homo sapien
tggttaacttgaaaatgaagtgtag

SEQ ID NO: 2377648 - DNA, 25 bp, Homo sapien
tcccagctggaattaagtgccgttt

SEQ ID NO: 2377649 - DNA, 25 bp, Homo sapien
tgaagaactagaatcctctttcagt

SEQ ID NO: 2377650 - DNA, 25 bp, Homo sapien
tgctcagcttgggacagaaggacct

SEQ ID NO: 2377651 - DNA, 25 bp, Homo sapien
cagtaggtgggactaatatagaccc

SEQ ID NO: 2377652 - DNA, 25 bp, Homo sapien
gaaggacctcgagctattttccagt

SEQ ID NO: 2377653 - DNA, 25 bp, Homo sapien
gtctaaaactcgatcttccagcaag

SEQ ID NO: 2377654 - DNA, 25 bp, Homo sapien
taaagtgatgaacgttccttcctta

SEQ ID NO: 2377655 - DNA, 25 bp, Homo sapien
gaactttgatatctgcaatgcttaa

SEQ ID NO: 2377656 - DNA, 25 bp, Homo sapien
tttattcagcacaatagaactttga

SEQ ID NO: 2377657 - DNA, 25 bp, Homo sapien
acttgccaggttcagtttaaagtga

SEQ ID NO: 2377658 - DNA, 25 bp, Homo sapien
ttctccgttttgctctagacagccc

SEQ ID NO: 2377659 - DNA, 25 bp, Homo sapien
ctccgttttgctctagacagcccag

SEQ ID NO: 2377660 - DNA, 25 bp, Homo sapien
ctttctccgttttgctctagacagc

SEQ ID NO: 2377661 - DNA, 25 bp, Homo sapien
tccgttttgctctagacagcccagc

SEQ ID NO: 2377662 - DNA, 25 bp, Homo sapien
ctggttaattggagaaaatctggcc

SEQ ID NO: 2377663 - DNA, 25 bp, Homo sapien
catgagtctggtcggtggcagcaca

SEQ ID NO: 2377664 - DNA, 25 bp, Homo sapien
gaaggcaggcggatctgaacagcaa

SEQ ID NO: 2377665 - DNA, 25 bp, Homo sapien
tagctgcagctgttatccatgcggg

SEQ ID NO: 2377666 - DNA, 25 bp, Homo sapien
cccagcctaggcaccgcgaggccac

SEQ ID NO: 2377667 - DNA, 25 bp, Homo sapien
gtccgcgcgactcacagcctcacgg

SEQ ID NO: 2377668 - DNA, 25 bp, Homo sapien
taggcaccgcgaggccaccgcgccg

SEQ ID NO: 2377669 - DNA, 25 bp, Homo sapien
ccgcttttgtccggctccgtccgcg

SEQ ID NO: 2377670 - DNA, 25 bp, Homo sapien
ccgcgccggcacgttcttgatgctg

SEQ ID NO: 2377671 - DNA, 25 bp, Homo sapien
gcgccggcacgttcttgatgctgtt

SEQ ID NO: 2377672 - DNA, 25 bp, Homo sapien
gccggcacgttcttgatgctgttca

SEQ ID NO: 2377673 - DNA, 25 bp, Homo sapien
ccggcacgttcttgatgctgttcat

SEQ ID NO: 2377674 - DNA, 25 bp, Homo sapien
tgtggcccggcctgcggctcagcac

SEQ ID NO: 2377675 - DNA, 25 bp, Homo sapien
cggcctccaggctgtggcccggcct

SEQ ID NO: 2377676 - DNA, 25 bp, Homo sapien
caggctgtggcccggcctgcggctc

SEQ ID NO: 2377677 - DNA, 25 bp, Homo sapien
tcgcgctcggcctccaggctgtggc

SEQ ID NO: 2377678 - DNA, 25 bp, Homo sapien
gggttccagcacttcgcatttctaa

SEQ ID NO: 2377679 - DNA, 25 bp, Homo sapien
taaaatgacgggctatccgggctga

SEQ ID NO: 2377680 - DNA, 25 bp, Homo sapien
tctaaagccttgatatcctcaggat

SEQ ID NO: 2377681 - DNA, 25 bp, Homo sapien
aaattggtaatttgcagccacctgg

SEQ ID NO: 2377682 - DNA, 25 bp, Homo sapien
gcaggcacatgatcgcctctcttca

SEQ ID NO: 2377683 - DNA, 25 bp, Homo sapien
gcgtattacaaaggaagccaggtcc

SEQ ID NO: 2377684 - DNA, 25 bp, Homo sapien
gggtgtgtcctgtcaaaaaagctca

SEQ ID NO: 2377685 - DNA, 25 bp, Homo sapien
tcctgagcgctaaccccacagatat

SEQ ID NO: 2377686 - DNA, 25 bp, Homo sapien
tcctgggtgttgatggctttgctga

SEQ ID NO: 2377687 - DNA, 25 bp, Homo sapien
gcctcctgggtgttgatggctttgc

SEQ ID NO: 2377688 - DNA, 25 bp, Homo sapien
gccgggcgtgcttctccttcacggg

SEQ ID NO: 2377689 - DNA, 25 bp, Homo sapien
ctgggtgttgatggctttgctgatg

SEQ ID NO: 2377690 - DNA, 25 bp, Homo sapien
agcactacgctgctcccacatccac

SEQ ID NO: 2377691 - DNA, 25 bp, Homo sapien
tgggtccaagagccggccaaggata

SEQ ID NO: 2377692 - DNA, 25 bp, Homo sapien
tgcagcactacgctgctcccacatc

SEQ ID NO: 2377693 - DNA, 25 bp, Homo sapien
cacatccacacccaactcctgggtc

SEQ ID NO: 2377694 - DNA, 25 bp, Homo sapien
ctggagcacgggggctcagcaaacc

SEQ ID NO: 2377695 - DNA, 25 bp, Homo sapien
ggagcacgggggctcagcaaacccg

SEQ ID NO: 2377696 - DNA, 25 bp, Homo sapien
tggagcacgggggctcagcaaaccc

SEQ ID NO: 2377697 - DNA, 25 bp, Homo sapien
gagcacgggggctcagcaaacccgg

SEQ ID NO: 2377698 - DNA, 25 bp, Homo sapien
caatgtcaaggccaagtgtggaagc

SEQ ID NO: 2377699 - DNA, 25 bp, Homo sapien
aatgtcaaggccaagtgtggaagca

SEQ ID NO: 2377700 - DNA, 25 bp, Homo sapien
tgtcaaggccaagtgtggaagcaga

SEQ ID NO: 2377701 - DNA, 25 bp, Homo sapien
tcaaggccaagtgtggaagcagaga

SEQ ID NO: 2377702 - DNA, 25 bp, Homo sapien
ggtgcccgtctcgaaggaccttgtg

SEQ ID NO: 2377703 - DNA, 25 bp, Homo sapien
caatggcgtaggaccagaaggtgaa

SEQ ID NO: 2377704 - DNA, 25 bp, Homo sapien
ccccttctcgtggtgtgtgcccaga

SEQ ID NO: 2377705 - DNA, 25 bp, Homo sapien
cggcagcccaatggcgtaggaccag

SEQ ID NO: 2377706 - DNA, 25 bp, Homo sapien
caatctcccggatgttgctgcggta

SEQ ID NO: 2377707 - DNA, 25 bp, Homo sapien
ggtaccgctggcagtcatgcagcac

SEQ ID NO: 2377708 - DNA, 25 bp, Homo sapien
gttgctgcggtaccgctggcagtca

SEQ ID NO: 2377709 - DNA, 25 bp, Homo sapien
cacaggtctccaatctcccggatgt

SEQ ID NO: 2377710 - DNA, 25 bp, Homo sapien
attcaccagctgtccgtagcggtca

SEQ ID NO: 2377711 - DNA, 25 bp, Homo sapien
cagctgtccgtagcggtcatgcaaa

SEQ ID NO: 2377712 - DNA, 25 bp, Homo sapien
accagctgtccgtagcggtcatgca

SEQ ID NO: 2377713 - DNA, 25 bp, Homo sapien
gtccgtagcggtcatgcaaatgtcc

SEQ ID NO: 2377714 - DNA, 25 bp, Homo sapien
cagccccatgactcccccgaggaaa

SEQ ID NO: 2377715 - DNA, 25 bp, Homo sapien
tcagccccatgactcccccgaggaa

SEQ ID NO: 2377716 - DNA, 25 bp, Homo sapien
tgttgacatcggtcccagctgcctt

SEQ ID NO: 2377717 - DNA, 25 bp, Homo sapien
ttgttgacatcggtcccagctgcct

SEQ ID NO: 2377718 - DNA, 25 bp, Homo sapien
tgttgttgacatcggtcccagctgc

SEQ ID NO: 2377719 - DNA, 25 bp, Homo sapien
atgttgttgacatcggtcccagctg

SEQ ID NO: 2377720 - DNA, 25 bp, Homo sapien
actggctatgtagccatgcagagtg

SEQ ID NO: 2377721 - DNA, 25 bp, Homo sapien
tatgtagccatgcagagtgactcac

SEQ ID NO: 2377722 - DNA, 25 bp, Homo sapien
gggaactggctatgtagccatgcag

SEQ ID NO: 2377723 - DNA, 25 bp, Homo sapien
gccgaggggaactggctatgtagcc

SEQ ID NO: 2377724 - DNA, 25 bp, Homo sapien
agaaagcttcagctcacaatccatg

SEQ ID NO: 2377725 - DNA, 25 bp, Homo sapien
gcttcagctcacaatccatgtaatc

SEQ ID NO: 2377726 - DNA, 25 bp, Homo sapien
cagctcacaatccatgtaatcaaac

SEQ ID NO: 2377727 - DNA, 25 bp, Homo sapien
aagcttcagctcacaatccatgtaa

SEQ ID NO: 2377728 - DNA, 25 bp, Homo sapien
ggacttagcaatacactcagacccc

SEQ ID NO: 2377729 - DNA, 25 bp, Homo sapien
catttcatagtgatcagttggtctg

SEQ ID NO: 2377730 - DNA, 25 bp, Homo sapien
ggaggccccattacctatccctgga

SEQ ID NO: 2377731 - DNA, 25 bp, Homo sapien
agtgtagcggcatgatctccgccgc

SEQ ID NO: 2377732 - DNA, 25 bp, Homo sapien
ggatgtacccgctggggcctgccat

SEQ ID NO: 2377733 - DNA, 25 bp, Homo sapien
ctgtatcctggatgtacccgctggg

SEQ ID NO: 2377734 - DNA, 25 bp, Homo sapien
tggatggaagagatggctgaacctg

SEQ ID NO: 2377735 - DNA, 25 bp, Homo sapien
gaacctgtatcctggatgtacccgc

SEQ ID NO: 2377736 - DNA, 25 bp, Homo sapien
caccaggtgggaagcgtgcctgtga

SEQ ID NO: 2377737 - DNA, 25 bp, Homo sapien
tgccaggggtaactggctcctacct

SEQ ID NO: 2377738 - DNA, 25 bp, Homo sapien
ctctgtgctgagaggctcaggctca

SEQ ID NO: 2377739 - DNA, 25 bp, Homo sapien
ccagcgtcaccaggtgggaagcgtg

SEQ ID NO: 2377740 - DNA, 25 bp, Homo sapien
gcagatgctggtacaccccatttgt

SEQ ID NO: 2377741 - DNA, 25 bp, Homo sapien
ctggtacaccccatttgtgcttcat

SEQ ID NO: 2377742 - DNA, 25 bp, Homo sapien
gctggtacaccccatttgtgcttca

SEQ ID NO: 2377743 - DNA, 25 bp, Homo sapien
gatgctggtacaccccatttgtgct

SEQ ID NO: 2377744 - DNA, 25 bp, Homo sapien
tgcctgtgatgggaccacttgcaaa

SEQ ID NO: 2377745 - DNA, 25 bp, Homo sapien
tgtgatgggaccacttgcaaatctc

SEQ ID NO: 2377746 - DNA, 25 bp, Homo sapien
gatgggaccacttgcaaatctctgc

SEQ ID NO: 2377747 - DNA, 25 bp, Homo sapien
tggccagcacgggagagcggccaga

SEQ ID NO: 2377748 - DNA, 25 bp, Homo sapien
acccacgctgaatgttagagcagga

SEQ ID NO: 2377749 - DNA, 25 bp, Homo sapien
ggctcacgatggagcaccccaaatg

SEQ ID NO: 2377750 - DNA, 25 bp, Homo sapien
caagtaacacggcactagggtcaca

SEQ ID NO: 2377751 - DNA, 25 bp, Homo sapien
ctttacagatgtgggaacaggcagg

SEQ ID NO: 2377752 - DNA, 25 bp, Homo sapien
agcccaggacgaggtgcccgactga

SEQ ID NO: 2377753 - DNA, 25 bp, Homo sapien
gcccgactgacaagggtgacggata

SEQ ID NO: 2377754 - DNA, 25 bp, Homo sapien
ccaggacgaggtgcccgactgacaa

SEQ ID NO: 2377755 - DNA, 25 bp, Homo sapien
actgacaagggtgacggatagctcc

SEQ ID NO: 2377756 - DNA, 25 bp, Homo sapien
tccaagacgggagcctcatgtgctg

SEQ ID NO: 2377757 - DNA, 25 bp, Homo sapien
ggtcaacggcaacaacaaggtcagg

SEQ ID NO: 2377758 - DNA, 25 bp, Homo sapien
caagaccagatgctcccatgaagga

SEQ ID NO: 2377759 - DNA, 25 bp, Homo sapien
ccaaggtggtccaactgtgaagcag

SEQ ID NO: 2377760 - DNA, 25 bp, Homo sapien
acaggagcttgaccgtgtagtggta

SEQ ID NO: 2377761 - DNA, 25 bp, Homo sapien
acatctgggatacggcgatggccgt

SEQ ID NO: 2377762 - DNA, 25 bp, Homo sapien
ttgaacaggagcttgaccgtgtagt

SEQ ID NO: 2377763 - DNA, 25 bp, Homo sapien
cctgaggacatctgggatacggcga

SEQ ID NO: 2377764 - DNA, 25 bp, Homo sapien
tatttctattaatgggcagtgggtt

SEQ ID NO: 2377765 - DNA, 25 bp, Homo sapien
agtgaatgtctaagccatataaaca

SEQ ID NO: 2377766 - DNA, 25 bp, Homo sapien
ataaacacagccttccgggccaggg

SEQ ID NO: 2377767 - DNA, 25 bp, Homo sapien
gaatgtctaagccatataaacacag

SEQ ID NO: 2377768 - DNA, 25 bp, Homo sapien
ctcgtggaaccggtccctgtggcct

SEQ ID NO: 2377769 - DNA, 25 bp, Homo sapien
ccttgcagggtgtccgcagggagac

SEQ ID NO: 2377770 - DNA, 25 bp, Homo sapien
aactgctcgtggaaccggtccctgt

SEQ ID NO: 2377771 - DNA, 25 bp, Homo sapien
gccttgcagggtgtccgcagggaga

SEQ ID NO: 2377772 - DNA, 25 bp, Homo sapien
cttgaagtacagcatgtcggaggct

SEQ ID NO: 2377773 - DNA, 25 bp, Homo sapien
agccgcttgaagtacagcatgtcgg

SEQ ID NO: 2377774 - DNA, 25 bp, Homo sapien
catgtcggaggctctgcggaagaag

SEQ ID NO: 2377775 - DNA, 25 bp, Homo sapien
aagtacagcatgtcggaggctctgc

SEQ ID NO: 2377776 - DNA, 25 bp, Homo sapien
ccaccggcttgatgtgctcagccag

SEQ ID NO: 2377777 - DNA, 25 bp, Homo sapien
caatgagattctccggctcctcatc

SEQ ID NO: 2377778 - DNA, 25 bp, Homo sapien
gggccctgtgctgatctcaatgaga

SEQ ID NO: 2377779 - DNA, 25 bp, Homo sapien
gggatcaccaccaccggcttgatgt

SEQ ID NO: 2377780 - DNA, 25 bp, Homo sapien
gggtccaaacgtctgatcgaagagg

SEQ ID NO: 2377781 - DNA, 25 bp, Homo sapien
cattggggggtccaaacgtctgatc

SEQ ID NO: 2377782 - DNA, 25 bp, Homo sapien
tgtcgtccttcacagacccattggg

SEQ ID NO: 2377783 - DNA, 25 bp, Homo sapien
acgtctgatcgaagaggtcagccac

SEQ ID NO: 2377784 - DNA, 25 bp, Homo sapien
tcagagcggagcatttccacctctc

SEQ ID NO: 2377785 - DNA, 25 bp, Homo sapien
cagttcagagcggagcatttccacc

SEQ ID NO: 2377786 - DNA, 25 bp, Homo sapien
gagcggagcatttccacctctctct

SEQ ID NO: 2377787 - DNA, 25 bp, Homo sapien
gttcagagcggagcatttccacctc

SEQ ID NO: 2377788 - DNA, 25 bp, Homo sapien
tgggccagctcgtggcggagctgct

SEQ ID NO: 2377789 - DNA, 25 bp, Homo sapien
gctcttcagctgcgcgatgtaccgc

SEQ ID NO: 2377790 - DNA, 25 bp, Homo sapien
tcttcagctgcgcgatgtaccgctg

SEQ ID NO: 2377791 - DNA, 25 bp, Homo sapien
tcagctgcgcgatgtaccgctgggc

SEQ ID NO: 2377792 - DNA, 25 bp, Homo sapien
gagcagctccgcgtgcacatggacg

SEQ ID NO: 2377793 - DNA, 25 bp, Homo sapien
ccttcagcttgttgtagcgcgcctc

SEQ ID NO: 2377794 - DNA, 25 bp, Homo sapien
cgtgcacatggacgagctcactgtg

SEQ ID NO: 2377795 - DNA, 25 bp, Homo sapien
ttgtagcgcgcctccgtggcactgg

SEQ ID NO: 2377796 - DNA, 25 bp, Homo sapien
tcctggctttgctgcgtcaccgtca

SEQ ID NO: 2377797 - DNA, 25 bp, Homo sapien
ctggctttgctgcgtcaccgtcagc

SEQ ID NO: 2377798 - DNA, 25 bp, Homo sapien
cctcctggctttgctgcgtcaccgt

SEQ ID NO: 2377799 - DNA, 25 bp, Homo sapien
cctggctttgctgcgtcaccgtcag

SEQ ID NO: 2377800 - DNA, 25 bp, Homo sapien
ctcagggcctcctgcgcgcgggcca

SEQ ID NO: 2377801 - DNA, 25 bp, Homo sapien
cgcgcgggccagctctccggccttg

SEQ ID NO: 2377802 - DNA, 25 bp, Homo sapien
gcgggccagctctccggccttggcc

SEQ ID NO: 2377803 - DNA, 25 bp, Homo sapien
agggcctcctgcgcgcgggccagct

SEQ ID NO: 2377804 - DNA, 25 bp, Homo sapien
ccacgcttataaactgggccctggg

SEQ ID NO: 2377805 - DNA, 25 bp, Homo sapien
tgtctcccatgtagcccctgggtct

SEQ ID NO: 2377806 - DNA, 25 bp, Homo sapien
aggatcaccgagtggcacccaggtg

SEQ ID NO: 2377807 - DNA, 25 bp, Homo sapien
cttccattagactcagggctccctg

SEQ ID NO: 2377808 - DNA, 25 bp, Homo sapien
tcagagcatccttctccgcactcag

SEQ ID NO: 2377809 - DNA, 25 bp, Homo sapien
tctgcgccgccagcaggtctgcctc

SEQ ID NO: 2377810 - DNA, 25 bp, Homo sapien
gccgcctctgtctcgcgcaccaggc

SEQ ID NO: 2377811 - DNA, 25 bp, Homo sapien
gtgtccagccgtgagctcagctccg

SEQ ID NO: 2377812 - DNA, 25 bp, Homo sapien
gctgctgcatctggggaggccatac

SEQ ID NO: 2377813 - DNA, 25 bp, Homo sapien
tcagtggtgctgctgcatctgggga

SEQ ID NO: 2377814 - DNA, 25 bp, Homo sapien
ggtgctgctgcatctggggaggcca

SEQ ID NO: 2377815 - DNA, 25 bp, Homo sapien
cagtggtgctgctgcatctggggag

SEQ ID NO: 2377816 - DNA, 25 bp, Homo sapien
tcacggagacagatcgatggttgcc

SEQ ID NO: 2377817 - DNA, 25 bp, Homo sapien
gacccttgacaacgtgatgctgagt

SEQ ID NO: 2377818 - DNA, 25 bp, Homo sapien
taacagaggtgagacccagcagttc

SEQ ID NO: 2377819 - DNA, 25 bp, Homo sapien
cagaaacttgtgctcaaaggcccac

SEQ ID NO: 2377820 - DNA, 25 bp, Homo sapien
cagccctggaatgacccatgggcca

SEQ ID NO: 2377821 - DNA, 25 bp, Homo sapien
cctggaatgacccatgggccaccag

SEQ ID NO: 2377822 - DNA, 25 bp, Homo sapien
ggaatgacccatgggccaccagttg

SEQ ID NO: 2377823 - DNA, 25 bp, Homo sapien
tgacccatgggccaccagttggagc

SEQ ID NO: 2377824 - DNA, 25 bp, Homo sapien
tggggagctggtacagcgcaggtgc

SEQ ID NO: 2377825 - DNA, 25 bp, Homo sapien
gcttgctcacggcatcctgcaggat

SEQ ID NO: 2377826 - DNA, 25 bp, Homo sapien
acactgcgaactgctcgtccagcag

SEQ ID NO: 2377827 - DNA, 25 bp, Homo sapien
gcagcgccccgcaacactgcgaact

SEQ ID NO: 2377828 - DNA, 25 bp, Homo sapien
caaggaggtcaggtactgggcgtgg

SEQ ID NO: 2377829 - DNA, 25 bp, Homo sapien
cagggtgctcacggcatccaaggcc

SEQ ID NO: 2377830 - DNA, 25 bp, Homo sapien
tcaggtactgggcgtggccctcctc

SEQ ID NO: 2377831 - DNA, 25 bp, Homo sapien
gggtgctcacggcatccaaggcctc

SEQ ID NO: 2377832 - DNA, 25 bp, Homo sapien
ttgatgatggtatccgcagccaggt

SEQ ID NO: 2377833 - DNA, 25 bp, Homo sapien
cattgatgatggtatccgcagccag

SEQ ID NO: 2377834 - DNA, 25 bp, Homo sapien
aggtggcaccgccattgatgatggt

SEQ ID NO: 2377835 - DNA, 25 bp, Homo sapien
ggtggcaccgccattgatgatggta

SEQ ID NO: 2377836 - DNA, 25 bp, Homo sapien
ctgaaggatgccctgcaggggtgtc

SEQ ID NO: 2377837 - DNA, 25 bp, Homo sapien
cactccctgcaggtgtctatgaggc

SEQ ID NO: 2377838 - DNA, 25 bp, Homo sapien
tcctcctgccgcacatctaggctct

SEQ ID NO: 2377839 - DNA, 25 bp, Homo sapien
tcaatcctccgcacagcatcttcaa

SEQ ID NO: 2377840 - DNA, 25 bp, Homo sapien
ggctgcggatgtggccgccatctcc

SEQ ID NO: 2377841 - DNA, 25 bp, Homo sapien
cacatctaggctcttgggtttcagt

SEQ ID NO: 2377842 - DNA, 25 bp, Homo sapien
agctggcgtggcgtgcctggttcat

SEQ ID NO: 2377843 - DNA, 25 bp, Homo sapien
ctggcgtggcgtgcctggttcatca

SEQ ID NO: 2377844 - DNA, 25 bp, Homo sapien
cgtggcgtgcctggttcatcatgtc

SEQ ID NO: 2377845 - DNA, 25 bp, Homo sapien
cacccccgagctggcgtggcgtgcc

SEQ ID NO: 2377846 - DNA, 25 bp, Homo sapien
tcatcaggtctgtgcaggagttgag

SEQ ID NO: 2377847 - DNA, 25 bp, Homo sapien
cttcatcaggtctgtgcaggagttg

SEQ ID NO: 2377848 - DNA, 25 bp, Homo sapien
caggtctgtgcaggagttgaggatc

SEQ ID NO: 2377849 - DNA, 25 bp, Homo sapien
atcaggtctgtgcaggagttgagga

SEQ ID NO: 2377850 - DNA, 25 bp, Homo sapien
agacagcaatgactggtggccctcc

SEQ ID NO: 2377851 - DNA, 25 bp, Homo sapien
gagaccaagacagcaatgactggtg

SEQ ID NO: 2377852 - DNA, 25 bp, Homo sapien
ctgccgagaccaagacagcaatgac

SEQ ID NO: 2377853 - DNA, 25 bp, Homo sapien
accaagacagcaatgactggtggcc

SEQ ID NO: 2377854 - DNA, 25 bp, Homo sapien
tgcaggctagtggatgtcgtcacca

SEQ ID NO: 2377855 - DNA, 25 bp, Homo sapien
ttctgcaggctagtggatgtcgtca

SEQ ID NO: 2377856 - DNA, 25 bp, Homo sapien
tagtggatgtcgtcaccaggagccg

SEQ ID NO: 2377857 - DNA, 25 bp, Homo sapien
tctccttctgcaggctagtggatgt

SEQ ID NO: 2377858 - DNA, 25 bp, Homo sapien
gggtggagggtctcatgcccagggt

SEQ ID NO: 2377859 - DNA, 25 bp, Homo sapien
ggctccttgtggactgtgccctgct

SEQ ID NO: 2377860 - DNA, 25 bp, Homo sapien
ctccttgtggactgtgccctgctgc

SEQ ID NO: 2377861 - DNA, 25 bp, Homo sapien
ccttgtggactgtgccctgctgccg

SEQ ID NO: 2377862 - DNA, 25 bp, Homo sapien
ccttggaggccgagatgaggccttc

SEQ ID NO: 2377863 - DNA, 25 bp, Homo sapien
ccagcgcgagttcttggcgtaaaat

SEQ ID NO: 2377864 - DNA, 25 bp, Homo sapien
agttcttggcgtaaaattcctgctg

SEQ ID NO: 2377865 - DNA, 25 bp, Homo sapien
ggccttcggtccagcgcgagttctt

SEQ ID NO: 2377866 - DNA, 25 bp, Homo sapien
ggtcaagggccagtcagggccaggg

SEQ ID NO: 2377867 - DNA, 25 bp, Homo sapien
ggtctctgaccccacggacggctgg

SEQ ID NO: 2377868 - DNA, 25 bp, Homo sapien
cggacggctggcaccactccacacc

SEQ ID NO: 2377869 - DNA, 25 bp, Homo sapien
cctctactccctgcaccctgttgaa

SEQ ID NO: 2377870 - DNA, 25 bp, Homo sapien
tcatacttgcccgtgtgaagcacca

SEQ ID NO: 2377871 - DNA, 25 bp, Homo sapien
cgtgtgaagcaccaccttgtcagct

SEQ ID NO: 2377872 - DNA, 25 bp, Homo sapien
tctcgtgggagcagacgatgagctc

SEQ ID NO: 2377873 - DNA, 25 bp, Homo sapien
gctggctgcgatctcgtgggagcag

SEQ ID NO: 2377874 - DNA, 25 bp, Homo sapien
ccctctcattgactgtgcgagaaca

SEQ ID NO: 2377875 - DNA, 25 bp, Homo sapien
tctcattgactgtgcgagaacattc

SEQ ID NO: 2377876 - DNA, 25 bp, Homo sapien
cagccctctcattgactgtgcgaga

SEQ ID NO: 2377877 - DNA, 25 bp, Homo sapien
cattgactgtgcgagaacattcctg

SEQ ID NO: 2377878 - DNA, 25 bp, Homo sapien
cctcaatctgctcctggcctgactt

SEQ ID NO: 2377879 - DNA, 25 bp, Homo sapien
ctctgtcctcaatctgctcctggcc

SEQ ID NO: 2377880 - DNA, 25 bp, Homo sapien
caatctgctcctggcctgacttggt

SEQ ID NO: 2377881 - DNA, 25 bp, Homo sapien
tgtcctcaatctgctcctggcctga

SEQ ID NO: 2377882 - DNA, 25 bp, Homo sapien
ggacaggccggagaaatccatggtg

SEQ ID NO: 2377883 - DNA, 25 bp, Homo sapien
gggacaggccggagaaatccatggt

SEQ ID NO: 2377884 - DNA, 25 bp, Homo sapien
ccccagccagcacgtagtgttgctt

SEQ ID NO: 2377885 - DNA, 25 bp, Homo sapien
cgcatgcgttcagcctccagcgtct

SEQ ID NO: 2377886 - DNA, 25 bp, Homo sapien
ccagccgcatgcgttcagcctccag

SEQ ID NO: 2377887 - DNA, 25 bp, Homo sapien
cagcacgtagtgttgcttccgcaac

SEQ ID NO: 2377888 - DNA, 25 bp, Homo sapien
agtagttcacgagttgagctgggta

SEQ ID NO: 2377889 - DNA, 25 bp, Homo sapien
tagtagttcacgagttgagctgggt

SEQ ID NO: 2377890 - DNA, 25 bp, Homo sapien
gtagttcacgagttgagctgggtag

SEQ ID NO: 2377891 - DNA, 25 bp, Homo sapien
ctagtagttcacgagttgagctggg

SEQ ID NO: 2377892 - DNA, 25 bp, Homo sapien
tgtcaccagccaccctgctggaccc

SEQ ID NO: 2377893 - DNA, 25 bp, Homo sapien
ctgtcagggcagttgcagaggccca

SEQ ID NO: 2377894 - DNA, 25 bp, Homo sapien
cctgtcaccagccaccctgctggac

SEQ ID NO: 2377895 - DNA, 25 bp, Homo sapien
aggcctgtcaccagccaccctgctg

SEQ ID NO: 2377896 - DNA, 25 bp, Homo sapien
ccctgcaggctcagtaagggccagg

SEQ ID NO: 2377897 - DNA, 25 bp, Homo sapien
ttgaggacattgatccagacggtgg

SEQ ID NO: 2377898 - DNA, 25 bp, Homo sapien
gggccttgaggacattgatccagac

SEQ ID NO: 2377899 - DNA, 25 bp, Homo sapien
caggaccctgcaggctcagtaaggg

SEQ ID NO: 2377900 - DNA, 25 bp, Homo sapien
agttccttctgcagataaataagag

SEQ ID NO: 2377901 - DNA, 25 bp, Homo sapien
ttctgcagataaataagagactcac

SEQ ID NO: 2377902 - DNA, 25 bp, Homo sapien
gcaccccaaagttccttctgcagat

SEQ ID NO: 2377903 - DNA, 25 bp, Homo sapien
tggctgcaccccaaagttccttctg

SEQ ID NO: 2377904 - DNA, 25 bp, Homo sapien
gctctagctcggaatattaaaaaca

SEQ ID NO: 2377905 - DNA, 25 bp, Homo sapien
gaagaagagctctagctcggaatat

SEQ ID NO: 2377906 - DNA, 25 bp, Homo sapien
gaagagctctagctcggaatattaa

SEQ ID NO: 2377907 - DNA, 25 bp, Homo sapien
agagctctagctcggaatattaaaa

SEQ ID NO: 2377908 - DNA, 25 bp, Homo sapien
ctggagggcctagggccaagcccac

SEQ ID NO: 2377909 - DNA, 25 bp, Homo sapien
gcctgaggagtaatgggcgacattc

SEQ ID NO: 2377910 - DNA, 25 bp, Homo sapien
cacgaccttcaggagtccagaaggc

SEQ ID NO: 2377911 - DNA, 25 bp, Homo sapien
tggtagaatcggtgccccagaaggc

SEQ ID NO: 2377912 - DNA, 25 bp, Homo sapien
aacagtcaaagtgcattttattgcc

SEQ ID NO: 2377913 - DNA, 25 bp, Homo sapien
acagtcaaagtgcattttattgcca

SEQ ID NO: 2377914 - DNA, 25 bp, Homo sapien
cttagcttagcaactgtcagtcagg

SEQ ID NO: 2377915 - DNA, 25 bp, Homo sapien
tcctccaggagacgtgagcacaggt

SEQ ID NO: 2377916 - DNA, 25 bp, Homo sapien
tctggcatggtgctcctgggtaaag

SEQ ID NO: 2377917 - DNA, 25 bp, Homo sapien
gtgtggccatggctcaagtccaagc

SEQ ID NO: 2377918 - DNA, 25 bp, Homo sapien
atgtacaggagaaatttctgtggtt

SEQ ID NO: 2377919 - DNA, 25 bp, Homo sapien
tgtacaggagaaatttctgtggttt

SEQ ID NO: 2377920 - DNA, 25 bp, Homo sapien
aatgtacaggagaaatttctgtggt

SEQ ID NO: 2377921 - DNA, 25 bp, Homo sapien
tcctgtaatagctgccattcctggc

SEQ ID NO: 2377922 - DNA, 25 bp, Homo sapien
gtaatagctgccattcctggcacat

SEQ ID NO: 2377923 - DNA, 25 bp, Homo sapien
gttgctgtctcctgtaatagctgcc

SEQ ID NO: 2377924 - DNA, 25 bp, Homo sapien
ctgttgctgtctcctgtaatagctg

SEQ ID NO: 2377925 - DNA, 25 bp, Homo sapien
tcttggtcaccagtctcataaacag

SEQ ID NO: 2377926 - DNA, 25 bp, Homo sapien
tcataaacagcagtcacgtacaggg

SEQ ID NO: 2377927 - DNA, 25 bp, Homo sapien
cagtctcataaacagcagtcacgta

SEQ ID NO: 2377928 - DNA, 25 bp, Homo sapien
acagcagtcacgtacagggcatgtt

SEQ ID NO: 2377929 - DNA, 25 bp, Homo sapien
ccgtgtccggtgctgtggctgtaaa

SEQ ID NO: 2377930 - DNA, 25 bp, Homo sapien
attgaagttgcaaagcggcccctgg

SEQ ID NO: 2377931 - DNA, 25 bp, Homo sapien
acggtcgcagccagacgtgagcttg

SEQ ID NO: 2377932 - DNA, 25 bp, Homo sapien
accggccgctgtcggggatgccaca

SEQ ID NO: 2377933 - DNA, 25 bp, Homo sapien
tgtacaggacgattcactgccatgc

SEQ ID NO: 2377934 - DNA, 25 bp, Homo sapien
tgaagctgtacaggacgattcactg

SEQ ID NO: 2377935 - DNA, 25 bp, Homo sapien
caggacgattcactgccatgccagt

SEQ ID NO: 2377936 - DNA, 25 bp, Homo sapien
gctgtacaggacgattcactgccat

SEQ ID NO: 2377937 - DNA, 25 bp, Homo sapien
agtgaccgtacattcctgctctcgg

SEQ ID NO: 2377938 - DNA, 25 bp, Homo sapien
gctctcggacttgaactctactgta

SEQ ID NO: 2377939 - DNA, 25 bp, Homo sapien
tcctcagtgaccgtacattcctgct

SEQ ID NO: 2377940 - DNA, 25 bp, Homo sapien
cgtacattcctgctctcggacttga

SEQ ID NO: 2377941 - DNA, 25 bp, Homo sapien
tcccctgtcacttgtcgggcatcca

SEQ ID NO: 2377942 - DNA, 25 bp, Homo sapien
cctgtcacttgtcgggcatccaggg

SEQ ID NO: 2377943 - DNA, 25 bp, Homo sapien
ccctcccctgtcacttgtcgggcat

SEQ ID NO: 2377944 - DNA, 25 bp, Homo sapien
acttgtcgggcatccagggccccga

SEQ ID NO: 2377945 - DNA, 25 bp, Homo sapien
ctgttgacggaaaaggccgaggtgc

SEQ ID NO: 2377946 - DNA, 25 bp, Homo sapien
ttgacggaaaaggccgaggtgctta

SEQ ID NO: 2377947 - DNA, 25 bp, Homo sapien
tgacggaaaaggccgaggtgcttac

SEQ ID NO: 2377948 - DNA, 25 bp, Homo sapien
tgttgacggaaaaggccgaggtgct

SEQ ID NO: 2377949 - DNA, 25 bp, Homo sapien
gctgaaggcccagggcccagcaggg

SEQ ID NO: 2377950 - DNA, 25 bp, Homo sapien
tcacgtgccatgtgtgctgaaggcc

SEQ ID NO: 2377951 - DNA, 25 bp, Homo sapien
gcccagggcccagcagggggcagtg

SEQ ID NO: 2377952 - DNA, 25 bp, Homo sapien
cagggcccagcagggggcagtggca

SEQ ID NO: 2377953 - DNA, 25 bp, Homo sapien
cccatgggattgagggacggggctg

SEQ ID NO: 2377954 - DNA, 25 bp, Homo sapien
gctgcactccaaccgtctgcacctg

SEQ ID NO: 2377955 - DNA, 25 bp, Homo sapien
tgggattgagggacggggctgcact

SEQ ID NO: 2377956 - DNA, 25 bp, Homo sapien
ggacggggctgcactccaaccgtct

SEQ ID NO: 2377957 - DNA, 25 bp, Homo sapien
gctttctctgaagggcttgtccaag

SEQ ID NO: 2377958 - DNA, 25 bp, Homo sapien
tcgggtgtccgtgctgtgccttagc

SEQ ID NO: 2377959 - DNA, 25 bp, Homo sapien
tgtcttgagcagatcgaaatgccga

SEQ ID NO: 2377960 - DNA, 25 bp, Homo sapien
ttacaggtggtcaagacgtccggcc

SEQ ID NO: 2377961 - DNA, 25 bp, Homo sapien
cggcctggaagagcgccgtggctgg

SEQ ID NO: 2377962 - DNA, 25 bp, Homo sapien
accacctgtggctgcgttgttgctc

SEQ ID NO: 2377963 - DNA, 25 bp, Homo sapien
tgtggctgcgttgttgctcactgaa

SEQ ID NO: 2377964 - DNA, 25 bp, Homo sapien
acctgtggctgcgttgttgctcact

SEQ ID NO: 2377965 - DNA, 25 bp, Homo sapien
aaactggcccacatgcgacgggtga

SEQ ID NO: 2377966 - DNA, 25 bp, Homo sapien
tgcctctttcagaacatggcagaga

SEQ ID NO: 2377967 - DNA, 25 bp, Homo sapien
tatcagagcaaacggaaactggccc

SEQ ID NO: 2377968 - DNA, 25 bp, Homo sapien
tggctgtccctgtaaccaggtttct

SEQ ID NO: 2377969 - DNA, 25 bp, Homo sapien
gatgaaagcatttctaccacccaca

SEQ ID NO: 2377970 - DNA, 25 bp, Homo sapien
tccagagtggccatacagtggtttt

SEQ ID NO: 2377971 - DNA, 25 bp, Homo sapien
tgaaactgcgtctttccagtcccaa

SEQ ID NO: 2377972 - DNA, 25 bp, Homo sapien
tgcttaccagaaacccgagtgaaac

SEQ ID NO: 2377973 - DNA, 25 bp, Homo sapien
cagtgtgattccctagagcgttctc

SEQ ID NO: 2377974 - DNA, 25 bp, Homo sapien
ttaaaagacacctgggctgcgtcca

SEQ ID NO: 2377975 - DNA, 25 bp, Homo sapien
tgccaggacacagaacatcaggacg

SEQ ID NO: 2377976 - DNA, 25 bp, Homo sapien
tctcagtcccgccagtcaagtttct

SEQ ID NO: 2377977 - DNA, 25 bp, Homo sapien
cagttattctgaagccagttaggac

SEQ ID NO: 2377978 - DNA, 25 bp, Homo sapien
tcagaaccattgacacctgttagta

SEQ ID NO: 2377979 - DNA, 25 bp, Homo sapien
tctttattactgacaccattatcca

SEQ ID NO: 2377980 - DNA, 25 bp, Homo sapien
tccacattataagtccaagaagaag

SEQ ID NO: 2377981 - DNA, 25 bp, Homo sapien
taaaacaaatacgttaaagtgatca

SEQ ID NO: 2377982 - DNA, 25 bp, Homo sapien
caaatacgttaaagtgatcaacatt

SEQ ID NO: 2377983 - DNA, 25 bp, Homo sapien
aacaaatacgttaaagtgatcaaca

SEQ ID NO: 2377984 - DNA, 25 bp, Homo sapien
acaaatacgttaaagtgatcaacat

SEQ ID NO: 2377985 - DNA, 25 bp, Homo sapien
tctctagaatacgttacagtgtgtc

SEQ ID NO: 2377986 - DNA, 25 bp, Homo sapien
gattgtgaggaacgtagtccattac

SEQ ID NO: 2377987 - DNA, 25 bp, Homo sapien
tctgcagcccagtgtctaggatagt

SEQ ID NO: 2377988 - DNA, 25 bp, Homo sapien
caaggttaactaatggcacctcgag

SEQ ID NO: 2377989 - DNA, 25 bp, Homo sapien
cacctaaagttgtttccccatgaag

SEQ ID NO: 2377990 - DNA, 25 bp, Homo sapien
ggatcgcggtatctctcttcctgga

SEQ ID NO: 2377991 - DNA, 25 bp, Homo sapien
ttagacgccaccttctccgaaagtg

SEQ ID NO: 2377992 - DNA, 25 bp, Homo sapien
tgcaccaagttagtcctgtcccagg

SEQ ID NO: 2377993 - DNA, 25 bp, Homo sapien
aaggcggcatgatcttccatatgca

SEQ ID NO: 2377994 - DNA, 25 bp, Homo sapien
caaggcggcatgatcttccatatgc

SEQ ID NO: 2377995 - DNA, 25 bp, Homo sapien
aggcggcatgatcttccatatgcat

SEQ ID NO: 2377996 - DNA, 25 bp, Homo sapien
tcaacctggttagcggtcttctctc

SEQ ID NO: 2377997 - DNA, 25 bp, Homo sapien
tatgtcaacctggttagcggtcttc

SEQ ID NO: 2377998 - DNA, 25 bp, Homo sapien
ggaagaggaatatgtcaacctggtt

SEQ ID NO: 2377999 - DNA, 25 bp, Homo sapien
gaggaatatgtcaacctggttagcg

SEQ ID NO: 2378000 - DNA, 25 bp, Homo sapien
cggtctcatcgccaaaccttctgca

SEQ ID NO: 2378001 - DNA, 25 bp, Homo sapien
cccactctgtagataaggaaatgct

SEQ ID NO: 2378002 - DNA, 25 bp, Homo sapien
aaccttctgcaacccttattcagca

SEQ ID NO: 2378003 - DNA, 25 bp, Homo sapien
tagataaggaaatgctgcctgcaga

SEQ ID NO: 2378004 - DNA, 25 bp, Homo sapien
actctgtgtcggcaggttcaaaagc

SEQ ID NO: 2378005 - DNA, 25 bp, Homo sapien
tcactctgtgtcggcaggttcaaaa

SEQ ID NO: 2378006 - DNA, 25 bp, Homo sapien
cactctgtgtcggcaggttcaaaag

SEQ ID NO: 2378007 - DNA, 25 bp, Homo sapien
ttccagagtcgtatgtatatgtgta

SEQ ID NO: 2378008 - DNA, 25 bp, Homo sapien
tgtatatgaatgtgcaatcatatgt

SEQ ID NO: 2378009 - DNA, 25 bp, Homo sapien
tgattccagagtcgtatgtatatgt

SEQ ID NO: 2378010 - DNA, 25 bp, Homo sapien
atgtatatgaatgtgcaatcatatg

SEQ ID NO: 2378011 - DNA, 25 bp, Homo sapien
taccagcaagtactgaatcaacatg

SEQ ID NO: 2378012 - DNA, 25 bp, Homo sapien
cgcctggcctgcttatcagtttaga

SEQ ID NO: 2378013 - DNA, 25 bp, Homo sapien
actctgggctcagtcaccgaaggga

SEQ ID NO: 2378014 - DNA, 25 bp, Homo sapien
cagccagcgctgacatgtatctttg

SEQ ID NO: 2378015 - DNA, 25 bp, Homo sapien
ctcagattgccccagtgagtgtctc

SEQ ID NO: 2378016 - DNA, 25 bp, Homo sapien
tcagattgccccagtgagtgtctcc

SEQ ID NO: 2378017 - DNA, 25 bp, Homo sapien
gattgccccagtgagtgtctccacc

SEQ ID NO: 2378018 - DNA, 25 bp, Homo sapien
cagattgccccagtgagtgtctcca

SEQ ID NO: 2378019 - DNA, 25 bp, Homo sapien
aaacggtctgcggagaaagatgctc

SEQ ID NO: 2378020 - DNA, 25 bp, Homo sapien
cactacgaggcagggactaatggct

SEQ ID NO: 2378021 - DNA, 25 bp, Homo sapien
tggatttagcatctaccccgggtcc

SEQ ID NO: 2378022 - DNA, 25 bp, Homo sapien
tgaactgggtcgtgccttcacagga

SEQ ID NO: 2378023 - DNA, 25 bp, Homo sapien
ctcggaagcgcacgtgcagcccata

SEQ ID NO: 2378024 - DNA, 25 bp, Homo sapien
ccatagcgcgccacgtacaagttat

SEQ ID NO: 2378025 - DNA, 25 bp, Homo sapien
aagttatcggtgcagaagcaggcgc

SEQ ID NO: 2378026 - DNA, 25 bp, Homo sapien
aagcgcacgtgcagcccatagcgcg

SEQ ID NO: 2378027 - DNA, 25 bp, Homo sapien
ggccgtagtcccggcgcagctgctg

SEQ ID NO: 2378028 - DNA, 25 bp, Homo sapien
cgtagtcccggcgcagctgctgctc

SEQ ID NO: 2378029 - DNA, 25 bp, Homo sapien
gtagtcccggcgcagctgctgctcg

SEQ ID NO: 2378030 - DNA, 25 bp, Homo sapien
cgggccgtagtcccggcgcagctgc

SEQ ID NO: 2378031 - DNA, 25 bp, Homo sapien
gtccttggcgctaacacagcctcgg

SEQ ID NO: 2378032 - DNA, 25 bp, Homo sapien
aagtccttggcgctaacacagcctc

SEQ ID NO: 2378033 - DNA, 25 bp, Homo sapien
tgctggaagtccttggcgctaacac

SEQ ID NO: 2378034 - DNA, 25 bp, Homo sapien
ctggaagtccttggcgctaacacag

SEQ ID NO: 2378035 - DNA, 25 bp, Homo sapien
tctgctcctgctgtaaaagcttggg

SEQ ID NO: 2378036 - DNA, 25 bp, Homo sapien
tcaagctgcggacacaaatctaacg

SEQ ID NO: 2378037 - DNA, 25 bp, Homo sapien
aaatctaacgaggaggagctgtgca

SEQ ID NO: 2378038 - DNA, 25 bp, Homo sapien
tcacagagctgttaagaacggcatg

SEQ ID NO: 2378039 - DNA, 25 bp, Homo sapien
gtgttccagaggttgctgaggactc

SEQ ID NO: 2378040 - DNA, 25 bp, Homo sapien
cagtcatggccaagtcctgtgttcc

SEQ ID NO: 2378041 - DNA, 25 bp, Homo sapien
gaggactctcctgggaagcttccca

SEQ ID NO: 2378042 - DNA, 25 bp, Homo sapien
cacagggacaggagacagtcatggc

SEQ ID NO: 2378043 - DNA, 25 bp, Homo sapien
ggtggcacagggttgttaccaggtg

SEQ ID NO: 2378044 - DNA, 25 bp, Homo sapien
ctgcagtgagtcgtagacctcaggc

SEQ ID NO: 2378045 - DNA, 25 bp, Homo sapien
gtaggaactcgcgatgagggctttc

SEQ ID NO: 2378046 - DNA, 25 bp, Homo sapien
cgcgatgagggctttcctagctgct

SEQ ID NO: 2378047 - DNA, 25 bp, Homo sapien
tcgtagacctcaggccgtgccgggt

SEQ ID NO: 2378048 - DNA, 25 bp, Homo sapien
acgctgtactcagtcacggccagga

SEQ ID NO: 2378049 - DNA, 25 bp, Homo sapien
tgtactcagtcacggccaggaactc

SEQ ID NO: 2378050 - DNA, 25 bp, Homo sapien
gctgtactcagtcacggccaggaac

SEQ ID NO: 2378051 - DNA, 25 bp, Homo sapien
aaggcccttgaggtctgcgtctggg

SEQ ID NO: 2378052 - DNA, 25 bp, Homo sapien
attccctggtcctgccaggtctcag

SEQ ID NO: 2378053 - DNA, 25 bp, Homo sapien
tgaatgaatgcggatgtcctgctcc

SEQ ID NO: 2378054 - DNA, 25 bp, Homo sapien
aggttggtcccactgacccttccag

SEQ ID NO: 2378055 - DNA, 25 bp, Homo sapien
caggctcatggcaggtattgaatga

SEQ ID NO: 2378056 - DNA, 25 bp, Homo sapien
taaacatttcttggcggacgcacca

SEQ ID NO: 2378057 - DNA, 25 bp, Homo sapien
ggtttagccaataagtgagcccagc

SEQ ID NO: 2378058 - DNA, 25 bp, Homo sapien
tgagcccagcaagaaatccgaagag

SEQ ID NO: 2378059 - DNA, 25 bp, Homo sapien
cctgtttgagtgtgccagctgtccc

SEQ ID NO: 2378060 - DNA, 25 bp, Homo sapien
cccaactcagaagtggctctgggag

SEQ ID NO: 2378061 - DNA, 25 bp, Homo sapien
gcaggaaggccagaaggggctgttc

SEQ ID NO: 2378062 - DNA, 25 bp, Homo sapien
gccagaaggggctgttctttcttgc

SEQ ID NO: 2378063 - DNA, 25 bp, Homo sapien
gaaggccagaaggggctgttctttc

SEQ ID NO: 2378064 - DNA, 25 bp, Homo sapien
tctgatgagccaccgaagtctgtac

SEQ ID NO: 2378065 - DNA, 25 bp, Homo sapien
atctgatgagccaccgaagtctgta

SEQ ID NO: 2378066 - DNA, 25 bp, Homo sapien
catctgatgagccaccgaagtctgt

SEQ ID NO: 2378067 - DNA, 25 bp, Homo sapien
cagccaagtcgggatcacagagcca

SEQ ID NO: 2378068 - DNA, 25 bp, Homo sapien
aggccagtgacagccaagtcgggat

SEQ ID NO: 2378069 - DNA, 25 bp, Homo sapien
cagtgacagccaagtcgggatcaca

SEQ ID NO: 2378070 - DNA, 25 bp, Homo sapien
tgacagccaagtcgggatcacagag

SEQ ID NO: 2378071 - DNA, 25 bp, Homo sapien
gcaggggaggccgattcccatgccc

SEQ ID NO: 2378072 - DNA, 25 bp, Homo sapien
tattgtgatgacttaaggaagtaac

SEQ ID NO: 2378073 - DNA, 25 bp, Homo sapien
ccagactctacaagtgtccacaggg

SEQ ID NO: 2378074 - DNA, 25 bp, Homo sapien
ttaaggaagtaacatgaggagcagg

SEQ ID NO: 2378075 - DNA, 25 bp, Homo sapien
gagatgaggcctttgcttttcaggg

SEQ ID NO: 2378076 - DNA, 25 bp, Homo sapien
ctgtgccatggagatgaggcctttg

SEQ ID NO: 2378077 - DNA, 25 bp, Homo sapien
gccatggagatgaggcctttgcttt

SEQ ID NO: 2378078 - DNA, 25 bp, Homo sapien
gtgccatggagatgaggcctttgct

SEQ ID NO: 2378079 - DNA, 25 bp, Homo sapien
ggtctgttggcctgaatgtggccgt

SEQ ID NO: 2378080 - DNA, 25 bp, Homo sapien
aaggagggatggtctgttggcctga

SEQ ID NO: 2378081 - DNA, 25 bp, Homo sapien
tggaaggagggatggtctgttggcc

SEQ ID NO: 2378082 - DNA, 25 bp, Homo sapien
gggatggtctgttggcctgaatgtg

SEQ ID NO: 2378083 - DNA, 25 bp, Homo sapien
aaaacaggcacccggtagatgcgct

SEQ ID NO: 2378084 - DNA, 25 bp, Homo sapien
aaacaggcacccggtagatgcgctt

SEQ ID NO: 2378085 - DNA, 25 bp, Homo sapien
gaaaacaggcacccggtagatgcgc

SEQ ID NO: 2378086 - DNA, 25 bp, Homo sapien
ggcatgtccgattgctcgaagtgct

SEQ ID NO: 2378087 - DNA, 25 bp, Homo sapien
ttgggcctccccttaggcatgtccg

SEQ ID NO: 2378088 - DNA, 25 bp, Homo sapien
tccccttaggcatgtccgattgctc

SEQ ID NO: 2378089 - DNA, 25 bp, Homo sapien
agttgttcatggtgttgggcctccc

SEQ ID NO: 2378090 - DNA, 25 bp, Homo sapien
ggcccggtgcgtatttgaccacaaa

SEQ ID NO: 2378091 - DNA, 25 bp, Homo sapien
cattgagggtgagctcggcattatc

SEQ ID NO: 2378092 - DNA, 25 bp, Homo sapien
gcattatcatagtggcagcccagct

SEQ ID NO: 2378093 - DNA, 25 bp, Homo sapien
agtggtgtcatcagcggctcgtcca

SEQ ID NO: 2378094 - DNA, 25 bp, Homo sapien
caggccctgccgcatgggtcacaca

SEQ ID NO: 2378095 - DNA, 25 bp, Homo sapien
tgccccaggccctgccgcatgggtc

SEQ ID NO: 2378096 - DNA, 25 bp, Homo sapien
ggccctgccgcatgggtcacacact

SEQ ID NO: 2378097 - DNA, 25 bp, Homo sapien
ctgcagatggcacgactcaggcctg

SEQ ID NO: 2378098 - DNA, 25 bp, Homo sapien
gacagaggctgttgcgcacagcaga

SEQ ID NO: 2378099 - DNA, 25 bp, Homo sapien
gacaaggttccaacgctcaccagtg

SEQ ID NO: 2378100 - DNA, 25 bp, Homo sapien
aggctcggagccagacgacaaggtt

SEQ ID NO: 2378101 - DNA, 25 bp, Homo sapien
ggtgaagccatcaccgaagccctca

SEQ ID NO: 2378102 - DNA, 25 bp, Homo sapien
ccccagaccaaggcaacggagccct

SEQ ID NO: 2378103 - DNA, 25 bp, Homo sapien
agaccaaggcaacggagccctcacc

SEQ ID NO: 2378104 - DNA, 25 bp, Homo sapien
taggctgcggggattttatttctgc

SEQ ID NO: 2378105 - DNA, 25 bp, Homo sapien
ccagaccaaggcaacggagccctca

SEQ ID NO: 2378106 - DNA, 25 bp, Homo sapien
tcagaggtcgcaaactcgtgtccgt

SEQ ID NO: 2378107 - DNA, 25 bp, Homo sapien
tgtgtaacccaaagcgtggctgtgc

SEQ ID NO: 2378108 - DNA, 25 bp, Homo sapien
tctagaagatgctactggtggccca

SEQ ID NO: 2378109 - DNA, 25 bp, Homo sapien
gctgtgcgcttcatccaatctcggg

SEQ ID NO: 2378110 - DNA, 25 bp, Homo sapien
ggcgccgctgcctttcgttctgacg

SEQ ID NO: 2378111 - DNA, 25 bp, Homo sapien
gtgtctgccgaagctgcgcccactt

SEQ ID NO: 2378112 - DNA, 25 bp, Homo sapien
cccgcgccttctcgagaggaagcgg

SEQ ID NO: 2378113 - DNA, 25 bp, Homo sapien
gccctgggaagaaggcgaccctcgc

SEQ ID NO: 2378114 - DNA, 25 bp, Homo sapien
agccccgcgcccttcgcggcctcgc

SEQ ID NO: 2378115 - DNA, 25 bp, Homo sapien
gcggcctcgccgcctcaagggggcc

SEQ ID NO: 2378116 - DNA, 25 bp, Homo sapien
tccagccccgcgcccttcgcggcct

SEQ ID NO: 2378117 - DNA, 25 bp, Homo sapien
ccccgcgcccttcgcggcctcgccg

SEQ ID NO: 2378118 - DNA, 25 bp, Homo sapien
cgtctggggcgctttcccgcgctct

SEQ ID NO: 2378119 - DNA, 25 bp, Homo sapien
ccgccgtccgccgcgagtggcgtct

SEQ ID NO: 2378120 - DNA, 25 bp, Homo sapien
cgagtggcgtctggggcgctttccc

SEQ ID NO: 2378121 - DNA, 25 bp, Homo sapien
ccgtccgccgcgagtggcgtctggg

SEQ ID NO: 2378122 - DNA, 25 bp, Homo sapien
tgcctgttaagggcccgccccgtgc

SEQ ID NO: 2378123 - DNA, 25 bp, Homo sapien
cgcagcggtgcctgttaagggcccg

SEQ ID NO: 2378124 - DNA, 25 bp, Homo sapien
cagcggtgcctgttaagggcccgcc

SEQ ID NO: 2378125 - DNA, 25 bp, Homo sapien
tttctccgccgactccagtccccgc

SEQ ID NO: 2378126 - DNA, 25 bp, Homo sapien
tcaccgtcccgggaaaatgagcgac

SEQ ID NO: 2378127 - DNA, 25 bp, Homo sapien
gaagaagacgcgcttgagccgaagc

SEQ ID NO: 2378128 - DNA, 25 bp, Homo sapien
cgcgggcgggctccaagggtggctc

SEQ ID NO: 2378129 - DNA, 25 bp, Homo sapien
gggaaaatgagcgaccctcacccac

SEQ ID NO: 2378130 - DNA, 25 bp, Homo sapien
aggccgagcagttcctcgaggtgtc

SEQ ID NO: 2378131 - DNA, 25 bp, Homo sapien
gggaccggctgcgactcctcgagcg

SEQ ID NO: 2378132 - DNA, 25 bp, Homo sapien
gagcagttcctcgaggtgtctttcc

SEQ ID NO: 2378133 - DNA, 25 bp, Homo sapien
ttcctcgaggtgtctttcctgctct

SEQ ID NO: 2378134 - DNA, 25 bp, Homo sapien
cgccccaggggccgtgctggccttg

SEQ ID NO: 2378135 - DNA, 25 bp, Homo sapien
tccgccccaggggccgtgctggcct

SEQ ID NO: 2378136 - DNA, 25 bp, Homo sapien
cctccgccccaggggccgtgctggc

SEQ ID NO: 2378137 - DNA, 25 bp, Homo sapien
ccgccccaggggccgtgctggcctt

SEQ ID NO: 2378138 - DNA, 25 bp, Homo sapien
gctgcacagaggcatgactgagcgt

SEQ ID NO: 2378139 - DNA, 25 bp, Homo sapien
aggcatgactgagcgtccccgacca

SEQ ID NO: 2378140 - DNA, 25 bp, Homo sapien
ccgggtagtaactgcgcctcctctc

SEQ ID NO: 2378141 - DNA, 25 bp, Homo sapien
acagaccggctacagggtgagcgct

SEQ ID NO: 2378142 - DNA, 25 bp, Homo sapien
gatcttgttctcctccgggccttct

SEQ ID NO: 2378143 - DNA, 25 bp, Homo sapien
ggatcttgttctcctccgggccttc

SEQ ID NO: 2378144 - DNA, 25 bp, Homo sapien
ttccggccatcactggaggaagagg

SEQ ID NO: 2378145 - DNA, 25 bp, Homo sapien
ttcttccggccatcactggaggaag

SEQ ID NO: 2378146 - DNA, 25 bp, Homo sapien
cccgcttcttccggccatcactgga

SEQ ID NO: 2378147 - DNA, 25 bp, Homo sapien
cccccgcttcttccggccatcactg

SEQ ID NO: 2378148 - DNA, 25 bp, Homo sapien
tccccagctgatcggtgccactggt

SEQ ID NO: 2378149 - DNA, 25 bp, Homo sapien
tgatcggtgccactggtccagcgag

SEQ ID NO: 2378150 - DNA, 25 bp, Homo sapien
ccagctgatcggtgccactggtcca

SEQ ID NO: 2378151 - DNA, 25 bp, Homo sapien
ttcctccccagctgatcggtgccac

SEQ ID NO: 2378152 - DNA, 25 bp, Homo sapien
tggattcgggacttctgctcatccg

SEQ ID NO: 2378153 - DNA, 25 bp, Homo sapien
gcctggattcgggacttctgctcat

SEQ ID NO: 2378154 - DNA, 25 bp, Homo sapien
atggcctggattcgggacttctgct

SEQ ID NO: 2378155 - DNA, 25 bp, Homo sapien
ttcgggacttctgctcatccgtcag

SEQ ID NO: 2378156 - DNA, 25 bp, Homo sapien
cactcccagatcctgtggtgtaagt

SEQ ID NO: 2378157 - DNA, 25 bp, Homo sapien
gatcctgtggtgtaagtcaggccga

SEQ ID NO: 2378158 - DNA, 25 bp, Homo sapien
tcccagatcctgtggtgtaagtcag

SEQ ID NO: 2378159 - DNA, 25 bp, Homo sapien
tggtgtaagtcaggccgaaagctcc

SEQ ID NO: 2378160 - DNA, 25 bp, Homo sapien
ttcagcaaggaataggcaggtcccc

SEQ ID NO: 2378161 - DNA, 25 bp, Homo sapien
accccgcagccttgagtggacagac

SEQ ID NO: 2378162 - DNA, 25 bp, Homo sapien
tgcaactacttactccaagtgaccg

SEQ ID NO: 2378163 - DNA, 25 bp, Homo sapien
caggtcccctaatgccagaggagca

SEQ ID NO: 2378164 - DNA, 25 bp, Homo sapien
acgatttcctctaggacctcgccat

SEQ ID NO: 2378165 - DNA, 25 bp, Homo sapien
ctgtgtcgttctttggttacgattt

SEQ ID NO: 2378166 - DNA, 25 bp, Homo sapien
tgtgtcgttctttggttacgatttc

SEQ ID NO: 2378167 - DNA, 25 bp, Homo sapien
gatttcctctaggacctcgccatct

SEQ ID NO: 2378168 - DNA, 25 bp, Homo sapien
tcacaaacagagctgggggcggatg

SEQ ID NO: 2378169 - DNA, 25 bp, Homo sapien
atggcaggcagaggggccacaccca

SEQ ID NO: 2378170 - DNA, 25 bp, Homo sapien
ctgggggcggatggcaggcagaggg

SEQ ID NO: 2378171 - DNA, 25 bp, Homo sapien
caaacagagctgggggcggatggca

SEQ ID NO: 2378172 - DNA, 25 bp, Homo sapien
gaaagcacacaggaggaggggtaca

SEQ ID NO: 2378173 - DNA, 25 bp, Homo sapien
ctggggaagaaagcacacaggagga

SEQ ID NO: 2378174 - DNA, 25 bp, Homo sapien
gggaagaaagcacacaggaggaggg

SEQ ID NO: 2378175 - DNA, 25 bp, Homo sapien
agaaagcacacaggaggaggggtac

SEQ ID NO: 2378176 - DNA, 25 bp, Homo sapien
gaagcaacccagctcgcatctggaa

SEQ ID NO: 2378177 - DNA, 25 bp, Homo sapien
aacccagctcgcatctggaaggcca

SEQ ID NO: 2378178 - DNA, 25 bp, Homo sapien
gggaagcaacccagctcgcatctgg

SEQ ID NO: 2378179 - DNA, 25 bp, Homo sapien
agcaacccagctcgcatctggaagg

SEQ ID NO: 2378180 - DNA, 25 bp, Homo sapien
agcgtcgtccacaggccttggccag

SEQ ID NO: 2378181 - DNA, 25 bp, Homo sapien
gggtgccaagcaggccggtgacccc

SEQ ID NO: 2378182 - DNA, 25 bp, Homo sapien
gggcctttaatagctgagaagtgct

SEQ ID NO: 2378183 - DNA, 25 bp, Homo sapien
ggccagagaccaatccacgggggaa

SEQ ID NO: 2378184 - DNA, 25 bp, Homo sapien
tgcccccccatgggaagtctcttct

SEQ ID NO: 2378185 - DNA, 25 bp, Homo sapien
agattccttttggcacattctcctc

SEQ ID NO: 2378186 - DNA, 25 bp, Homo sapien
attctcctcttgaggaagtaccagt

SEQ ID NO: 2378187 - DNA, 25 bp, Homo sapien
ttctcctcttgaggaagtaccagtc

SEQ ID NO: 2378188 - DNA, 25 bp, Homo sapien
ttttcccgtgtgtagatatgtacag

SEQ ID NO: 2378189 - DNA, 25 bp, Homo sapien
cagccaaagggtcgtgtaaatgttc

SEQ ID NO: 2378190 - DNA, 25 bp, Homo sapien
tctggtgttgggacgcatggaccgg

SEQ ID NO: 2378191 - DNA, 25 bp, Homo sapien
cagagtgatgttaactttttcccgt

SEQ ID NO: 2378192 - DNA, 25 bp, Homo sapien
tcatgccgaatctaagaagccacaa

SEQ ID NO: 2378193 - DNA, 25 bp, Homo sapien
tttctcgcctgaacaaggaccatgc

SEQ ID NO: 2378194 - DNA, 25 bp, Homo sapien
tgctcctcggctttcccggaagtgg

SEQ ID NO: 2378195 - DNA, 25 bp, Homo sapien
tcggcctttgtccagcgaccaggct

SEQ ID NO: 2378196 - DNA, 25 bp, Homo sapien
tatcctctttagtgcacatgggctg

SEQ ID NO: 2378197 - DNA, 25 bp, Homo sapien
catctttcagaccagccagcatgct

SEQ ID NO: 2378198 - DNA, 25 bp, Homo sapien
catggtgacgctatgcttgatgtct

SEQ ID NO: 2378199 - DNA, 25 bp, Homo sapien
gcacagccacctatgcatacaggta

SEQ ID NO: 2378200 - DNA, 25 bp, Homo sapien
acacgggatctcacagacctggaag

SEQ ID NO: 2378201 - DNA, 25 bp, Homo sapien
agacagggcacacgggatctcacag

SEQ ID NO: 2378202 - DNA, 25 bp, Homo sapien
aggcagacagggcacacgggatctc

SEQ ID NO: 2378203 - DNA, 25 bp, Homo sapien
cacgggatctcacagacctggaagc

SEQ ID NO: 2378204 - DNA, 25 bp, Homo sapien
gctccatgaaaagtctgagtcacag

SEQ ID NO: 2378205 - DNA, 25 bp, Homo sapien
tcacagacgctgtcaagaaacaggg

SEQ ID NO: 2378206 - DNA, 25 bp, Homo sapien
cctgtttgacgtttatgccctgcac

SEQ ID NO: 2378207 - DNA, 25 bp, Homo sapien
cctgcacatgctcttgaggagggca

SEQ ID NO: 2378208 - DNA, 25 bp, Homo sapien
gggcttcaggttctggccgggcgcc

SEQ ID NO: 2378209 - DNA, 25 bp, Homo sapien
gctttggtgtccataggcccattgc

SEQ ID NO: 2378210 - DNA, 25 bp, Homo sapien
cccagctttggtgtccataggccca

SEQ ID NO: 2378211 - DNA, 25 bp, Homo sapien
tggccgggcgccccagctttggtgt

SEQ ID NO: 2378212 - DNA, 25 bp, Homo sapien
cctcctctgtggttaataattcagg

SEQ ID NO: 2378213 - DNA, 25 bp, Homo sapien
cccttggatctgcaaaagggttcca

SEQ ID NO: 2378214 - DNA, 25 bp, Homo sapien
cagctggcacggagggtcacattcc

SEQ ID NO: 2378215 - DNA, 25 bp, Homo sapien
caggacaagccagatggctctgctt

SEQ ID NO: 2378216 - DNA, 25 bp, Homo sapien
agccgtccaggggcctccagcggct

SEQ ID NO: 2378217 - DNA, 25 bp, Homo sapien
agctgtcccaatgggagactctgag

SEQ ID NO: 2378218 - DNA, 25 bp, Homo sapien
aatgggggctgtagctcagctgtcc

SEQ ID NO: 2378219 - DNA, 25 bp, Homo sapien
cagccgtccaggggcctccagcggc

SEQ ID NO: 2378220 - DNA, 25 bp, Homo sapien
tcagaccccgccctgttggagaagt

SEQ ID NO: 2378221 - DNA, 25 bp, Homo sapien
cagacagacttttgcctacccggca

SEQ ID NO: 2378222 - DNA, 25 bp, Homo sapien
tttgcatctgcgaagtgagagggct

SEQ ID NO: 2378223 - DNA, 25 bp, Homo sapien
aagcagcttcgtggctatgtgaaac

SEQ ID NO: 2378224 - DNA, 25 bp, Homo sapien
gagttgtcaaatgcacagcgacaga

SEQ ID NO: 2378225 - DNA, 25 bp, Homo sapien
gtcaaatgcacagcgacagacagta

SEQ ID NO: 2378226 - DNA, 25 bp, Homo sapien
gcacagcgacagacagtagaacagt

SEQ ID NO: 2378227 - DNA, 25 bp, Homo sapien
ctagagttgtcaaatgcacagcgac

SEQ ID NO: 2378228 - DNA, 25 bp, Homo sapien
tgtcaaggttgtaccccagctcctg

SEQ ID NO: 2378229 - DNA, 25 bp, Homo sapien
gactcgaagcagttagccatctggg

SEQ ID NO: 2378230 - DNA, 25 bp, Homo sapien
tgggagaagcctaccatcaagtggg

SEQ ID NO: 2378231 - DNA, 25 bp, Homo sapien
ggtgagggacataactccaggccag

SEQ ID NO: 2378232 - DNA, 25 bp, Homo sapien
taaaggtacagctgtttttccactg

SEQ ID NO: 2378233 - DNA, 25 bp, Homo sapien
taaccgaagatgcaaacagcttcag

SEQ ID NO: 2378234 - DNA, 25 bp, Homo sapien
aataaccgaagatgcaaacagcttc

SEQ ID NO: 2378235 - DNA, 25 bp, Homo sapien
aaaataaccgaagatgcaaacagct

SEQ ID NO: 2378236 - DNA, 25 bp, Homo sapien
tctgggaaaaaggactacgtgcctc

SEQ ID NO: 2378237 - DNA, 25 bp, Homo sapien
gaaaatctgctttaattgctgctgg

SEQ ID NO: 2378238 - DNA, 25 bp, Homo sapien
gaggtagtaggctaagcgttcgtct

SEQ ID NO: 2378239 - DNA, 25 bp, Homo sapien
gcaaatgttcaaagttgcagccttg

SEQ ID NO: 2378240 - DNA, 25 bp, Homo sapien
cgtatagttcattggcataagtaca

SEQ ID NO: 2378241 - DNA, 25 bp, Homo sapien
tgtgtgctgaccctataccaggtgc

SEQ ID NO: 2378242 - DNA, 25 bp, Homo sapien
ctgccgtactctttgtctctatgga

SEQ ID NO: 2378243 - DNA, 25 bp, Homo sapien
gatgtttcataggaacagagtcttg

SEQ ID NO: 2378244 - DNA, 25 bp, Homo sapien
gacacagtcagttcttagagcagta

SEQ ID NO: 2378245 - DNA, 25 bp, Homo sapien
agacccctgagactctaggacttgg

SEQ ID NO: 2378246 - DNA, 25 bp, Homo sapien
gatgaagcatgggtattcgagatct

SEQ ID NO: 2378247 - DNA, 25 bp, Homo sapien
tgacctgagtttgaaggctgatagg

SEQ ID NO: 2378248 - DNA, 25 bp, Homo sapien
tatcattttcgacatgtcccctgca

SEQ ID NO: 2378249 - DNA, 25 bp, Homo sapien
cattccaggcctctttaggacccaa

SEQ ID NO: 2378250 - DNA, 25 bp, Homo sapien
aatgggcccatgattccgttgtaca

SEQ ID NO: 2378251 - DNA, 25 bp, Homo sapien
tctgattagcacactgacgtcagga

SEQ ID NO: 2378252 - DNA, 25 bp, Homo sapien
gttgtcgtctttacactcctcagta

SEQ ID NO: 2378253 - DNA, 25 bp, Homo sapien
agttgtcgtctttacactcctcagt

SEQ ID NO: 2378254 - DNA, 25 bp, Homo sapien
tcagttgtcgtctttacactcctca

SEQ ID NO: 2378255 - DNA, 25 bp, Homo sapien
cagttgtcgtctttacactcctcag

SEQ ID NO: 2378256 - DNA, 25 bp, Homo sapien
accgggccctggtagcgagagtcat

SEQ ID NO: 2378257 - DNA, 25 bp, Homo sapien
taagaacgagatctttccttctcct

SEQ ID NO: 2378258 - DNA, 25 bp, Homo sapien
tttgtggcatagtgaccaccgggcc

SEQ ID NO: 2378259 - DNA, 25 bp, Homo sapien
cactccctggggttcgctaagaacg

SEQ ID NO: 2378260 - DNA, 25 bp, Homo sapien
tcacggcatactgcttggacctcag

SEQ ID NO: 2378261 - DNA, 25 bp, Homo sapien
cctttcctctaaatttctttgcaag

SEQ ID NO: 2378262 - DNA, 25 bp, Homo sapien
tggacctcagaattcttggcatcat

SEQ ID NO: 2378263 - DNA, 25 bp, Homo sapien
tttgcaaggcctgggtccgcattag

SEQ ID NO: 2378264 - DNA, 25 bp, Homo sapien
ggaagcactgttgctctaagacaca

SEQ ID NO: 2378265 - DNA, 25 bp, Homo sapien
gattcaagccaatgcaacaggctag

SEQ ID NO: 2378266 - DNA, 25 bp, Homo sapien
tgtctgttgcaagacaagcatgcct

SEQ ID NO: 2378267 - DNA, 25 bp, Homo sapien
acacagaatgctcctgggtattgca

SEQ ID NO: 2378268 - DNA, 25 bp, Homo sapien
cagccagagccagcttagtctccat

SEQ ID NO: 2378269 - DNA, 25 bp, Homo sapien
agtgccggtgccagggcgaggaagg

SEQ ID NO: 2378270 - DNA, 25 bp, Homo sapien
tggcctcagtgagtcgccggccctg

SEQ ID NO: 2378271 - DNA, 25 bp, Homo sapien
tgatttccgaatttccgtcggtcgc

SEQ ID NO: 2378272 - DNA, 25 bp, Homo sapien
ggatccgtgcccgaaacgctgattt

SEQ ID NO: 2378273 - DNA, 25 bp, Homo sapien
ctcggcctccccggcttcatctgga

SEQ ID NO: 2378274 - DNA, 25 bp, Homo sapien
ctgccgtgaccccaggaggtgagca

SEQ ID NO: 2378275 - DNA, 25 bp, Homo sapien
gcctccccggcttcatctggagtca

SEQ ID NO: 2378276 - DNA, 25 bp, Homo sapien
gagcagctgtcaggggctcggcctc

SEQ ID NO: 2378277 - DNA, 25 bp, Homo sapien
tggccttcctggcccgttcagttgg

SEQ ID NO: 2378278 - DNA, 25 bp, Homo sapien
ctggaggcgagtcgggaacgatggc

SEQ ID NO: 2378279 - DNA, 25 bp, Homo sapien
cgagtcgggaacgatggccttcctg

SEQ ID NO: 2378280 - DNA, 25 bp, Homo sapien
gaggcgagtcgggaacgatggcctt

SEQ ID NO: 2378281 - DNA, 25 bp, Homo sapien
cgttctaggtgatggtggtacgcct

SEQ ID NO: 2378282 - DNA, 25 bp, Homo sapien
aggagcacagttcccgttgggactc

SEQ ID NO: 2378283 - DNA, 25 bp, Homo sapien
tctggatggatcctagggcacctct

SEQ ID NO: 2378284 - DNA, 25 bp, Homo sapien
tgtgggctccgcagatctttctgga

SEQ ID NO: 2378285 - DNA, 25 bp, Homo sapien
caatgtgccacttgtgctatgagtc

SEQ ID NO: 2378286 - DNA, 25 bp, Homo sapien
gaccatgtatggttgacagttgcag

SEQ ID NO: 2378287 - DNA, 25 bp, Homo sapien
tgtagccttttaccattcagacagg

SEQ ID NO: 2378288 - DNA, 25 bp, Homo sapien
tatatttacctgtcatgagggacca

SEQ ID NO: 2378289 - DNA, 25 bp, Homo sapien
tcatagctgtgaagagggataccaa

SEQ ID NO: 2378290 - DNA, 25 bp, Homo sapien
tagcagctattatccccgggtataa

SEQ ID NO: 2378291 - DNA, 25 bp, Homo sapien
ggataccaaggaaagttctttctgc

SEQ ID NO: 2378292 - DNA, 25 bp, Homo sapien
gatggcaattctaaatagcagctat

SEQ ID NO: 2378293 - DNA, 25 bp, Homo sapien
agagtattccatctttactggccag

SEQ ID NO: 2378294 - DNA, 25 bp, Homo sapien
attccaggtgcagagtattccatct

SEQ ID NO: 2378295 - DNA, 25 bp, Homo sapien
gagtattccatctttactggccagc

SEQ ID NO: 2378296 - DNA, 25 bp, Homo sapien
gtattccatctttactggccagcct

SEQ ID NO: 2378297 - DNA, 25 bp, Homo sapien
gttccctaggttggtctccagctcc

SEQ ID NO: 2378298 - DNA, 25 bp, Homo sapien
tcgctctgttccctaggttggtctc

SEQ ID NO: 2378299 - DNA, 25 bp, Homo sapien
gctctgttccctaggttggtctcca

SEQ ID NO: 2378300 - DNA, 25 bp, Homo sapien
tctgttccctaggttggtctccagc

SEQ ID NO: 2378301 - DNA, 25 bp, Homo sapien
atagatggggttgcaggttcatctc

SEQ ID NO: 2378302 - DNA, 25 bp, Homo sapien
catggtgattggaatccaggtattt

SEQ ID NO: 2378303 - DNA, 25 bp, Homo sapien
ctggtgtaatagcatggtgattgga

SEQ ID NO: 2378304 - DNA, 25 bp, Homo sapien
tgtaatagcatggtgattggaatcc

SEQ ID NO: 2378305 - DNA, 25 bp, Homo sapien
ggcggagcgcccagttaactttcat

SEQ ID NO: 2378306 - DNA, 25 bp, Homo sapien
gctttccgtagcttaggcgactgca

SEQ ID NO: 2378307 - DNA, 25 bp, Homo sapien
ccattgcgggctgactgtgagctca

SEQ ID NO: 2378308 - DNA, 25 bp, Homo sapien
tcagaatgtcgggatctggcctcat

SEQ ID NO: 2378309 - DNA, 25 bp, Homo sapien
gtgacggctgccgattggcctgacc

SEQ ID NO: 2378310 - DNA, 25 bp, Homo sapien
tcttagcggccccttgagtgtggtg

SEQ ID NO: 2378311 - DNA, 25 bp, Homo sapien
caggagacgagacttaggagacact

SEQ ID NO: 2378312 - DNA, 25 bp, Homo sapien
cgcggtgcgccttttctagactcgg

SEQ ID NO: 2378313 - DNA, 25 bp, Homo sapien
ctgcgcatgcgagaaactgaagctt

SEQ ID NO: 2378314 - DNA, 25 bp, Homo sapien
gaggctcatgtttactcactgcgca

SEQ ID NO: 2378315 - DNA, 25 bp, Homo sapien
gatcgcggtttctcttatctaccag

SEQ ID NO: 2378316 - DNA, 25 bp, Homo sapien
cctcagcggaggattcgcaatcgcg

SEQ ID NO: 2378317 - DNA, 25 bp, Homo sapien
cctttgacagtcgtcggcagccgta

SEQ ID NO: 2378318 - DNA, 25 bp, Homo sapien
tacatgaggatccttccgtttcgcc

SEQ ID NO: 2378319 - DNA, 25 bp, Homo sapien
tgggcctccgtggaaccgttatctc

SEQ ID NO: 2378320 - DNA, 25 bp, Homo sapien
cctcaggtaaactggctgcgccact

SEQ ID NO: 2378321 - DNA, 25 bp, Homo sapien
tctactacgtgccaggcctgaaaca

SEQ ID NO: 2378322 - DNA, 25 bp, Homo sapien
ctacgtgccaggcctgaaacagcac

SEQ ID NO: 2378323 - DNA, 25 bp, Homo sapien
tactacgtgccaggcctgaaacagc

SEQ ID NO: 2378324 - DNA, 25 bp, Homo sapien
ctctactacgtgccaggcctgaaac

SEQ ID NO: 2378325 - DNA, 25 bp, Homo sapien
tccgcaaaagcctagcaagggcagt

SEQ ID NO: 2378326 - DNA, 25 bp, Homo sapien
aaaagcctagcaagggcagtgctga

SEQ ID NO: 2378327 - DNA, 25 bp, Homo sapien
aaaacgagtatctccgcaaaagcct

SEQ ID NO: 2378328 - DNA, 25 bp, Homo sapien
tatctccgcaaaagcctagcaaggg

SEQ ID NO: 2378329 - DNA, 25 bp, Homo sapien
aacaagaagtttgatctgtgactgt

SEQ ID NO: 2378330 - DNA, 25 bp, Homo sapien
gactagtcaagtacagtagagaagg

SEQ ID NO: 2378331 - DNA, 25 bp, Homo sapien
gtgactgtgaacaattaattaagat

SEQ ID NO: 2378332 - DNA, 25 bp, Homo sapien
caagtacagtagagaagggggaaag

SEQ ID NO: 2378333 - DNA, 25 bp, Homo sapien
ctagtattctggcacataggactgt

SEQ ID NO: 2378334 - DNA, 25 bp, Homo sapien
tattctggcacataggactgttcat

SEQ ID NO: 2378335 - DNA, 25 bp, Homo sapien
ggcacataggactgttcattgcttg

SEQ ID NO: 2378336 - DNA, 25 bp, Homo sapien
gactgttcattgcttgatgagatcc

SEQ ID NO: 2378337 - DNA, 25 bp, Homo sapien
tgggcaactgcacgaatccagcatg

SEQ ID NO: 2378338 - DNA, 25 bp, Homo sapien
tgggatccagtaggcaaagctagct

SEQ ID NO: 2378339 - DNA, 25 bp, Homo sapien
gctaagtcagactcagcagagcgaa

SEQ ID NO: 2378340 - DNA, 25 bp, Homo sapien
cactgcaagtttggctcataggaag

SEQ ID NO: 2378341 - DNA, 25 bp, Homo sapien
taaggagagctttcagtaagaggca

SEQ ID NO: 2378342 - DNA, 25 bp, Homo sapien
ggaacgtggctctgctggctgagga

SEQ ID NO: 2378343 - DNA, 25 bp, Homo sapien
aggaacgtggctctgctggctgagg

SEQ ID NO: 2378344 - DNA, 25 bp, Homo sapien
gaacgtggctctgctggctgaggac

SEQ ID NO: 2378345 - DNA, 25 bp, Homo sapien
aaggaacgtggctctgctggctgag

SEQ ID NO: 2378346 - DNA, 25 bp, Homo sapien
catggcgccgggcatattcgggtca

SEQ ID NO: 2378347 - DNA, 25 bp, Homo sapien
gtcagcttctcccaaagccggagtc

SEQ ID NO: 2378348 - DNA, 25 bp, Homo sapien
gggataacaacgtcagcttctccca

SEQ ID NO: 2378349 - DNA, 25 bp, Homo sapien
gtcagtggtgtaggaaaatgaaata

SEQ ID NO: 2378350 - DNA, 25 bp, Homo sapien
ctttacaacgatgcctgaggggatg

SEQ ID NO: 2378351 - DNA, 25 bp, Homo sapien
ttcagcaccacgcagttgctggttt

SEQ ID NO: 2378352 - DNA, 25 bp, Homo sapien
gctggttttgttggttgcctggccc

SEQ ID NO: 2378353 - DNA, 25 bp, Homo sapien
actgctcttcgagttcattctcatc

SEQ ID NO: 2378354 - DNA, 25 bp, Homo sapien
cacacttgggagaaatctctggagg

SEQ ID NO: 2378355 - DNA, 25 bp, Homo sapien
ccctcagcggccttctgtgatctac

SEQ ID NO: 2378356 - DNA, 25 bp, Homo sapien
tcacacttgggagaaatctctggag

SEQ ID NO: 2378357 - DNA, 25 bp, Homo sapien
acttgggagaaatctctggaggctg

SEQ ID NO: 2378358 - DNA, 25 bp, Homo sapien
tcagggatgggacgagatctgcggt

SEQ ID NO: 2378359 - DNA, 25 bp, Homo sapien
ttctgccttagggaggaatggctca

SEQ ID NO: 2378360 - DNA, 25 bp, Homo sapien
tgcggtgctctctactgcctggctg

SEQ ID NO: 2378361 - DNA, 25 bp, Homo sapien
tctctactgcctggctggtagaggg

SEQ ID NO: 2378362 - DNA, 25 bp, Homo sapien
gaacggatttgaaagaaccatgctg

SEQ ID NO: 2378363 - DNA, 25 bp, Homo sapien
gctttgtcaagacgttgcttccggg

SEQ ID NO: 2378364 - DNA, 25 bp, Homo sapien
ccaaattcaaggatggcagccatac

SEQ ID NO: 2378365 - DNA, 25 bp, Homo sapien
cctgcctttatcagccactgcttag

SEQ ID NO: 2378366 - DNA, 25 bp, Homo sapien
tcagggacttggatcccatagcaat

SEQ ID NO: 2378367 - DNA, 25 bp, Homo sapien
ctcagggacttggatcccatagcaa

SEQ ID NO: 2378368 - DNA, 25 bp, Homo sapien
cagggacttggatcccatagcaatg

SEQ ID NO: 2378369 - DNA, 25 bp, Homo sapien
cctcagggacttggatcccatagca

SEQ ID NO: 2378370 - DNA, 25 bp, Homo sapien
ggaagactcctataggcagctgtgc

SEQ ID NO: 2378371 - DNA, 25 bp, Homo sapien
ccctaatgttaaccagccatgacag

SEQ ID NO: 2378372 - DNA, 25 bp, Homo sapien
tctgtccagaagaggaggtatcacc

SEQ ID NO: 2378373 - DNA, 25 bp, Homo sapien
cagaagaggaggtatcaccgacatt

SEQ ID NO: 2378374 - DNA, 25 bp, Homo sapien
aaccactttgtgtgcaccattcata

SEQ ID NO: 2378375 - DNA, 25 bp, Homo sapien
accactttgtgtgcaccattcataa

SEQ ID NO: 2378376 - DNA, 25 bp, Homo sapien
caaccactttgtgtgcaccattcat

SEQ ID NO: 2378377 - DNA, 25 bp, Homo sapien
ccactttgtgtgcaccattcataag

SEQ ID NO: 2378378 - DNA, 25 bp, Homo sapien
tctgttctgatcaactgatcttgtc

SEQ ID NO: 2378379 - DNA, 25 bp, Homo sapien
ttttccgagctagctttctgttctg

SEQ ID NO: 2378380 - DNA, 25 bp, Homo sapien
actttctcttgtaggattttccgag

SEQ ID NO: 2378381 - DNA, 25 bp, Homo sapien
tcttgtaggattttccgagctagct

SEQ ID NO: 2378382 - DNA, 25 bp, Homo sapien
cttgttttttcttcgccgcttctcg

SEQ ID NO: 2378383 - DNA, 25 bp, Homo sapien
tcttgttttttcttcgccgcttctc

SEQ ID NO: 2378384 - DNA, 25 bp, Homo sapien
tattcttgaatcgtgcatgtctctg

SEQ ID NO: 2378385 - DNA, 25 bp, Homo sapien
tataataatgctggtgatggaactc

SEQ ID NO: 2378386 - DNA, 25 bp, Homo sapien
gaactcgccaccattattccctggg

SEQ ID NO: 2378387 - DNA, 25 bp, Homo sapien
actacagtttagtgcaccatttaaa

SEQ ID NO: 2378388 - DNA, 25 bp, Homo sapien
tgtcacccaggtgttgcccaggctt

SEQ ID NO: 2378389 - DNA, 25 bp, Homo sapien
gtgcccgccaccatgcctggctaat

SEQ ID NO: 2378390 - DNA, 25 bp, Homo sapien
aggtgcccgccaccatgcctggcta

SEQ ID NO: 2378391 - DNA, 25 bp, Homo sapien
tctgtcacccaggtgttgcccaggc

SEQ ID NO: 2378392 - DNA, 25 bp, Homo sapien
agaactttgtcaggcaccccagaac

SEQ ID NO: 2378393 - DNA, 25 bp, Homo sapien
catacaatctcacaaaggtacaatt

SEQ ID NO: 2378394 - DNA, 25 bp, Homo sapien
tccaagtgcctcatcacaatgacaa

SEQ ID NO: 2378395 - DNA, 25 bp, Homo sapien
taggcgtgtgtcattgcacttgaac

SEQ ID NO: 2378396 - DNA, 25 bp, Homo sapien
tacatcagaggcacaactgggcatc

SEQ ID NO: 2378397 - DNA, 25 bp, Homo sapien
tgcaactggcaatctcccaatggct

SEQ ID NO: 2378398 - DNA, 25 bp, Homo sapien
tggacagactgcacaactgaggccc

SEQ ID NO: 2378399 - DNA, 25 bp, Homo sapien
tatgcactggacatgccacctaggc

SEQ ID NO: 2378400 - DNA, 25 bp, Homo sapien
gaagggtcctgtacactcgcaacag

SEQ ID NO: 2378401 - DNA, 25 bp, Homo sapien
gaatgtgtaagcatccaaagctgtc

SEQ ID NO: 2378402 - DNA, 25 bp, Homo sapien
caacaggaggtgtagaatgagccct

SEQ ID NO: 2378403 - DNA, 25 bp, Homo sapien
gtttcttaggtgttgttctagagcc

SEQ ID NO: 2378404 - DNA, 25 bp, Homo sapien
tgaacctacagtctcaaagattgag

SEQ ID NO: 2378405 - DNA, 25 bp, Homo sapien
tagtagccggttcccatttgccata

SEQ ID NO: 2378406 - DNA, 25 bp, Homo sapien
ttttgaacgcatattgacagcacgc

SEQ ID NO: 2378407 - DNA, 25 bp, Homo sapien
gacagcacgctttacttagtagccg

SEQ ID NO: 2378408 - DNA, 25 bp, Homo sapien
tgagaagttacagttcatctcccct

SEQ ID NO: 2378409 - DNA, 25 bp, Homo sapien
aacggaacggaatgccagatcctag

SEQ ID NO: 2378410 - DNA, 25 bp, Homo sapien
actggttcgggagtgcttggcagaa

SEQ ID NO: 2378411 - DNA, 25 bp, Homo sapien
tcctagctgccttgttggttttgaa

SEQ ID NO: 2378412 - DNA, 25 bp, Homo sapien
gattcatcgggcagaaggtagctgc

SEQ ID NO: 2378413 - DNA, 25 bp, Homo sapien
gccggtcaagccctgtctagaattc

SEQ ID NO: 2378414 - DNA, 25 bp, Homo sapien
cccgcgtgggtagtagtcagttctc

SEQ ID NO: 2378415 - DNA, 25 bp, Homo sapien
tctcttgcttacttacgccggtcaa

SEQ ID NO: 2378416 - DNA, 25 bp, Homo sapien
aaatacgcggagctgctggccatca

SEQ ID NO: 2378417 - DNA, 25 bp, Homo sapien
caggtgccccaaagcaaatacgcgg

SEQ ID NO: 2378418 - DNA, 25 bp, Homo sapien
gggaaggagatcagacccacgtacg

SEQ ID NO: 2378419 - DNA, 25 bp, Homo sapien
gacccacgtacgcagggagcaagag

SEQ ID NO: 2378420 - DNA, 25 bp, Homo sapien
caccagcatggcaacgtcttcacag

SEQ ID NO: 2378421 - DNA, 25 bp, Homo sapien
ctgctcagtgactacgggccaccgt

SEQ ID NO: 2378422 - DNA, 25 bp, Homo sapien
tacgggccaccgtccctaggctaca

SEQ ID NO: 2378423 - DNA, 25 bp, Homo sapien
aacgtcttcacagtaccgccagctg

SEQ ID NO: 2378424 - DNA, 25 bp, Homo sapien
ggtgtagtgaccaggatcagaaccc

SEQ ID NO: 2378425 - DNA, 25 bp, Homo sapien
gaggtgtagtgaccaggatcagaac

SEQ ID NO: 2378426 - DNA, 25 bp, Homo sapien
gtgtagtgaccaggatcagaaccca

SEQ ID NO: 2378427 - DNA, 25 bp, Homo sapien
gcagagcctgtgttcgccatgccat

SEQ ID NO: 2378428 - DNA, 25 bp, Homo sapien
acccctgaagtcctgttctgggctg

SEQ ID NO: 2378429 - DNA, 25 bp, Homo sapien
gtcacagggacagcggcactcacgg

SEQ ID NO: 2378430 - DNA, 25 bp, Homo sapien
ggggtcacagggacagcggcactca

SEQ ID NO: 2378431 - DNA, 25 bp, Homo sapien
gacccctgaagtcctgttctgggct

SEQ ID NO: 2378432 - DNA, 25 bp, Homo sapien
cttacaaagacgggctttgttgcca

SEQ ID NO: 2378433 - DNA, 25 bp, Homo sapien
ctggggtccgcagaccttacaaaga

SEQ ID NO: 2378434 - DNA, 25 bp, Homo sapien
ttacaaagacgggctttgttgccag

SEQ ID NO: 2378435 - DNA, 25 bp, Homo sapien
tcctctggggtccgcagaccttaca

SEQ ID NO: 2378436 - DNA, 25 bp, Homo sapien
gacaacaaaaagtgcgcgggcgctc

SEQ ID NO: 2378437 - DNA, 25 bp, Homo sapien
caaaccgaacttggccgcgcacatg

SEQ ID NO: 2378438 - DNA, 25 bp, Homo sapien
ggatgtcttacaaaccgaacttggc

SEQ ID NO: 2378439 - DNA, 25 bp, Homo sapien
acaacaaaaagtgcgcgggcgctcg

SEQ ID NO: 2378440 - DNA, 25 bp, Homo sapien
gaaatcaatgtcaagcatcggttat

SEQ ID NO: 2378441 - DNA, 25 bp, Homo sapien
aagcatcggttattctaatcctggg

SEQ ID NO: 2378442 - DNA, 25 bp, Homo sapien
cctgggcgtctggaatgatctacgt

SEQ ID NO: 2378443 - DNA, 25 bp, Homo sapien
taaatacaccactcgccaccatttt

SEQ ID NO: 2378444 - DNA, 25 bp, Homo sapien
tagagaatgtacattggccgggtgc

SEQ ID NO: 2378445 - DNA, 25 bp, Homo sapien
gaggcaggcctagtgtgttattgac

SEQ ID NO: 2378446 - DNA, 25 bp, Homo sapien
ggatatttatagcaggcaggaggca

SEQ ID NO: 2378447 - DNA, 25 bp, Homo sapien
ttatttaagaagtcgggcctatgct

SEQ ID NO: 2378448 - DNA, 25 bp, Homo sapien
tgttgtctcagcattccaggtagcc

SEQ ID NO: 2378449 - DNA, 25 bp, Homo sapien
caaacctggctgaaagcttagggcg

SEQ ID NO: 2378450 - DNA, 25 bp, Homo sapien
aagtggactcttgtttaggccctca

SEQ ID NO: 2378451 - DNA, 25 bp, Homo sapien
ttgttagggccgctagacccggctg

SEQ ID NO: 2378452 - DNA, 25 bp, Homo sapien
taaggacaaacctggaatagatagc

SEQ ID NO: 2378453 - DNA, 25 bp, Homo sapien
ggttaacgcagtacatccatgccat

SEQ ID NO: 2378454 - DNA, 25 bp, Homo sapien
tgtgagtgtgttaaaggctacagac

SEQ ID NO: 2378455 - DNA, 25 bp, Homo sapien
tgccattgctgtgggaggtatcccc

SEQ ID NO: 2378456 - DNA, 25 bp, Homo sapien
ccaaggcacccagatggagttagca

SEQ ID NO: 2378457 - DNA, 25 bp, Homo sapien
gaagtccttttggtagattagcaca

SEQ ID NO: 2378458 - DNA, 25 bp, Homo sapien
gacataccagttagaggtgttcatc

SEQ ID NO: 2378459 - DNA, 25 bp, Homo sapien
gttagcatttttcactaggaagtcc

SEQ ID NO: 2378460 - DNA, 25 bp, Homo sapien
tgagcaacgaatgaagaagtccatg

SEQ ID NO: 2378461 - DNA, 25 bp, Homo sapien
tatcttcagtgggtcatcgccagag

SEQ ID NO: 2378462 - DNA, 25 bp, Homo sapien
gccagagagcggtttcagcaagctg

SEQ ID NO: 2378463 - DNA, 25 bp, Homo sapien
caactgtgtgagtatcctgagaaat

SEQ ID NO: 2378464 - DNA, 25 bp, Homo sapien
cgactcgcttagttctgcctcggcg

SEQ ID NO: 2378465 - DNA, 25 bp, Homo sapien
aaatctgaaccccacagcgcggtct

SEQ ID NO: 2378466 - DNA, 25 bp, Homo sapien
ggtctcgtacatgccccgctcttgg

SEQ ID NO: 2378467 - DNA, 25 bp, Homo sapien
gacgcggtcgtccttcctaaatctg

SEQ ID NO: 2378468 - DNA, 25 bp, Homo sapien
tggcggcggggaggtaggcagagca

SEQ ID NO: 2378469 - DNA, 25 bp, Homo sapien
atggcggcggggaggtaggcagagc

SEQ ID NO: 2378470 - DNA, 25 bp, Homo sapien
tccccgaatactttgtctctggaag

SEQ ID NO: 2378471 - DNA, 25 bp, Homo sapien
tcacccaggcgtgcttattacccaa

SEQ ID NO: 2378472 - DNA, 25 bp, Homo sapien
tgtaacctccaactgttccagctac

SEQ ID NO: 2378473 - DNA, 25 bp, Homo sapien
tgctttcagcactaggcttgtagga

SEQ ID NO: 2378474 - DNA, 25 bp, Homo sapien
aatttcagctactcgggacactgag

SEQ ID NO: 2378475 - DNA, 25 bp, Homo sapien
tccaggctgggtggcggagtgagat

SEQ ID NO: 2378476 - DNA, 25 bp, Homo sapien
ggctgggtggcggagtgagatgctg

SEQ ID NO: 2378477 - DNA, 25 bp, Homo sapien
caggctgggtggcggagtgagatgc

SEQ ID NO: 2378478 - DNA, 25 bp, Homo sapien
cgacctctccagcagtttgatccat

SEQ ID NO: 2378479 - DNA, 25 bp, Homo sapien
ttctctgtgggcttgaccggaaccc

SEQ ID NO: 2378480 - DNA, 25 bp, Homo sapien
tgacccctcgatcttcccttaagag

SEQ ID NO: 2378481 - DNA, 25 bp, Homo sapien
cggatctgggacttccggttctctg

SEQ ID NO: 2378482 - DNA, 25 bp, Homo sapien
cagacgttgaatggctgcgatggaa

SEQ ID NO: 2378483 - DNA, 25 bp, Homo sapien
gcaggctgcccgtagtgataggcca

SEQ ID NO: 2378484 - DNA, 25 bp, Homo sapien
tgtttaaatttgaccgtcgccagac

SEQ ID NO: 2378485 - DNA, 25 bp, Homo sapien
taactgcaaacgctttcccgacagg

SEQ ID NO: 2378486 - DNA, 25 bp, Homo sapien
gacatatggatctgctgccgtggag

SEQ ID NO: 2378487 - DNA, 25 bp, Homo sapien
gcaggtgttcacttcatagaaggga

SEQ ID NO: 2378488 - DNA, 25 bp, Homo sapien
agaagggaaacagaagcacggcagt

SEQ ID NO: 2378489 - DNA, 25 bp, Homo sapien
aagcacggcagtgggaagggtttct

SEQ ID NO: 2378490 - DNA, 25 bp, Homo sapien
tagggagcatactgcactaaagcaa

SEQ ID NO: 2378491 - DNA, 25 bp, Homo sapien
ggagatctctttgccgcatacctgg

SEQ ID NO: 2378492 - DNA, 25 bp, Homo sapien
gacgcagtggctggaaatgaccaag

SEQ ID NO: 2378493 - DNA, 25 bp, Homo sapien
tgtcctgacagccaactaagtatgc

SEQ ID NO: 2378494 - DNA, 25 bp, Homo sapien
ctgggcgagtctcttgccgttatct

SEQ ID NO: 2378495 - DNA, 25 bp, Homo sapien
gagccaggggttataatgatcggtt

SEQ ID NO: 2378496 - DNA, 25 bp, Homo sapien
taatgatcggtttcctgggcgagtc

SEQ ID NO: 2378497 - DNA, 25 bp, Homo sapien
gggcgagtctcttgccgttatctca

SEQ ID NO: 2378498 - DNA, 25 bp, Homo sapien
ccggcacccgcgcaccgcggcagcc

SEQ ID NO: 2378499 - DNA, 25 bp, Homo sapien
cggcacccgcgcaccgcggcagccc

SEQ ID NO: 2378500 - DNA, 25 bp, Homo sapien
cctccaccgcgcggggcttggacat

SEQ ID NO: 2378501 - DNA, 25 bp, Homo sapien
cgccgcctccaccgcgcggggcttg

SEQ ID NO: 2378502 - DNA, 25 bp, Homo sapien
gcccggggccgtcgctgccaccgcc

SEQ ID NO: 2378503 - DNA, 25 bp, Homo sapien
gcccctccgctccaccatctccggg

SEQ ID NO: 2378504 - DNA, 25 bp, Homo sapien
tagatctttgactgcccggtaaata

SEQ ID NO: 2378505 - DNA, 25 bp, Homo sapien
tgaagggggaaacgcattccagagc

SEQ ID NO: 2378506 - DNA, 25 bp, Homo sapien
cattccagagcatttgttcgggctc

SEQ ID NO: 2378507 - DNA, 25 bp, Homo sapien
cgggctcatgtaggaatagatcttt

SEQ ID NO: 2378508 - DNA, 25 bp, Homo sapien
ctttgatcttctgttcctcggactt

SEQ ID NO: 2378509 - DNA, 25 bp, Homo sapien
ttttcagggcttgcttggcgatggc

SEQ ID NO: 2378510 - DNA, 25 bp, Homo sapien
gctccgtactgcgttcccagcattt

SEQ ID NO: 2378511 - DNA, 25 bp, Homo sapien
caggggacctttcctggcgtctttg

SEQ ID NO: 2378512 - DNA, 25 bp, Homo sapien
gctccttcggacagggtagaaatcc

SEQ ID NO: 2378513 - DNA, 25 bp, Homo sapien
tagaaatccgtaagtttgcgattct

SEQ ID NO: 2378514 - DNA, 25 bp, Homo sapien
agtttgcgattctgttgcgtttttc

SEQ ID NO: 2378515 - DNA, 25 bp, Homo sapien
ccgtaagtttgcgattctgttgcgt

SEQ ID NO: 2378516 - DNA, 25 bp, Homo sapien
aagcactgcttggtgggccaccctg

SEQ ID NO: 2378517 - DNA, 25 bp, Homo sapien
agcactgcttggtgggccaccctgc

SEQ ID NO: 2378518 - DNA, 25 bp, Homo sapien
ccaagcactgcttggtgggccaccc

SEQ ID NO: 2378519 - DNA, 25 bp, Homo sapien
actggaatttaaagcacgtgactac

SEQ ID NO: 2378520 - DNA, 25 bp, Homo sapien
ccagccggtgctgctcactggtctg

SEQ ID NO: 2378521 - DNA, 25 bp, Homo sapien
gccgcatagctcaaccctctgcaaa

SEQ ID NO: 2378522 - DNA, 25 bp, Homo sapien
aaatattgactgcctgccgcatagc

SEQ ID NO: 2378523 - DNA, 25 bp, Homo sapien
ctgcaaacatggcagcggaggcccg

SEQ ID NO: 2378524 - DNA, 25 bp, Homo sapien
cacctgaaaatcaggcctctgactt

SEQ ID NO: 2378525 - DNA, 25 bp, Homo sapien
tctgttgcccatgcagcacgttaaa

SEQ ID NO: 2378526 - DNA, 25 bp, Homo sapien
ggctcgtagatatgttctgttgccc

SEQ ID NO: 2378527 - DNA, 25 bp, Homo sapien
aaaatcaggtacagtgggccaggcg

SEQ ID NO: 2378528 - DNA, 25 bp, Homo sapien
agtgatggcaaagcccccaagtatc

SEQ ID NO: 2378529 - DNA, 25 bp, Homo sapien
gccacaatcggcctcatttggcatc

SEQ ID NO: 2378530 - DNA, 25 bp, Homo sapien
atcggcctcatttggcatcactggg

SEQ ID NO: 2378531 - DNA, 25 bp, Homo sapien
cgggccacaatcggcctcatttggc

SEQ ID NO: 2378532 - DNA, 25 bp, Homo sapien
ccttcccactttcaatcaattcatc

SEQ ID NO: 2378533 - DNA, 25 bp, Homo sapien
cttcccactttcaatcaattcatct

SEQ ID NO: 2378534 - DNA, 25 bp, Homo sapien
tagtacatgtagcagcccgtggaag

SEQ ID NO: 2378535 - DNA, 25 bp, Homo sapien
cctcccgtttcttggcgtcggtgat

SEQ ID NO: 2378536 - DNA, 25 bp, Homo sapien
gatgaggtccccgtggtattccacc

SEQ ID NO: 2378537 - DNA, 25 bp, Homo sapien
tgcttggtggcaatcacacccctgc

SEQ ID NO: 2378538 - DNA, 25 bp, Homo sapien
aaattagctgggctactctggaggc

SEQ ID NO: 2378539 - DNA, 25 bp, Homo sapien
cagaaaagccactctaagcaacagt

SEQ ID NO: 2378540 - DNA, 25 bp, Homo sapien
agaattctttgagcctgagaggagg

SEQ ID NO: 2378541 - DNA, 25 bp, Homo sapien
aaacagaatcaggagttcctggccc

SEQ ID NO: 2378542 - DNA, 25 bp, Homo sapien
gctatttttgagagcctgcacaggc

SEQ ID NO: 2378543 - DNA, 25 bp, Homo sapien
ggaaatggtagagtttcacaaaata

SEQ ID NO: 2378544 - DNA, 25 bp, Homo sapien
caaagggctctttatggaggcacag

SEQ ID NO: 2378545 - DNA, 25 bp, Homo sapien
taggacccaaagggctctttatgga

SEQ ID NO: 2378546 - DNA, 25 bp, Homo sapien
cgatgtcgtgcagtttggtttggca

SEQ ID NO: 2378547 - DNA, 25 bp, Homo sapien
gggcttcaatggaagccttgctgcg

SEQ ID NO: 2378548 - DNA, 25 bp, Homo sapien
tcaatggaagccttgctgcggtccc

SEQ ID NO: 2378549 - DNA, 25 bp, Homo sapien
ggatgaggtgaggtacgccgtcgat

SEQ ID NO: 2378550 - DNA, 25 bp, Homo sapien
tataaggccatctgttcaagtccac

SEQ ID NO: 2378551 - DNA, 25 bp, Homo sapien
gcttggaaacatcccgtccaggcca

SEQ ID NO: 2378552 - DNA, 25 bp, Homo sapien
tgagtctttgactgcatgcacggga

SEQ ID NO: 2378553 - DNA, 25 bp, Homo sapien
tgcacgggaagcacaaacgttcggc

SEQ ID NO: 2378554 - DNA, 25 bp, Homo sapien
aaaaagcagccacttcactcacttc

SEQ ID NO: 2378555 - DNA, 25 bp, Homo sapien
tgacaaacacaaggcctcgacagca

SEQ ID NO: 2378556 - DNA, 25 bp, Homo sapien
aaaaaaagcagccacttcactcact

SEQ ID NO: 2378557 - DNA, 25 bp, Homo sapien
aggaggacactgggtgtctgacaaa

SEQ ID NO: 2378558 - DNA, 25 bp, Homo sapien
cagcggccggggtcaggggtcctgg

SEQ ID NO: 2378559 - DNA, 25 bp, Homo sapien
gcacacctgggtgcctttctgaggc

SEQ ID NO: 2378560 - DNA, 25 bp, Homo sapien
cagcagcggccggggtcaggggtcc

SEQ ID NO: 2378561 - DNA, 25 bp, Homo sapien
cctgcacacctgggtgcctttctga

SEQ ID NO: 2378562 - DNA, 25 bp, Homo sapien
tcacagttaaggtgaaaaccttagc

SEQ ID NO: 2378563 - DNA, 25 bp, Homo sapien
tcccatcggatcctcttccaatttg

SEQ ID NO: 2378564 - DNA, 25 bp, Homo sapien
tcttccaatttgctgaccactgacc

SEQ ID NO: 2378565 - DNA, 25 bp, Homo sapien
atttacactcccatcggatcctctt

SEQ ID NO: 2378566 - DNA, 25 bp, Homo sapien
caatttgctgaccactgaccaggct

SEQ ID NO: 2378567 - DNA, 25 bp, Homo sapien
cctggcaataaatattttaatttgt

SEQ ID NO: 2378568 - DNA, 25 bp, Homo sapien
gcctggcaataaatattttaatttg

SEQ ID NO: 2378569 - DNA, 25 bp, Homo sapien
ccgtgttggttccacgatgttctga

SEQ ID NO: 2378570 - DNA, 25 bp, Homo sapien
cacgatgttctgaatgaaatgcttc

SEQ ID NO: 2378571 - DNA, 25 bp, Homo sapien
cacaattggacatccgtgttggttc

SEQ ID NO: 2378572 - DNA, 25 bp, Homo sapien
aatgtaatagtaatgacaatattga

SEQ ID NO: 2378573 - DNA, 25 bp, Homo sapien
aacacagtggaaggacgttcgctcg

SEQ ID NO: 2378574 - DNA, 25 bp, Homo sapien
aaagctgtgaaagagataattcctc

SEQ ID NO: 2378575 - DNA, 25 bp, Homo sapien
ctcttggtagatggattttgggaac

SEQ ID NO: 2378576 - DNA, 25 bp, Homo sapien
gccgttataggaatatgtgcctccc

SEQ ID NO: 2378577 - DNA, 25 bp, Homo sapien
ttctctctggcgcagacagcatcag

SEQ ID NO: 2378578 - DNA, 25 bp, Homo sapien
cagacagcatcagcgacggctcaca

SEQ ID NO: 2378579 - DNA, 25 bp, Homo sapien
cagcatcagcgacggctcacactgt

SEQ ID NO: 2378580 - DNA, 25 bp, Homo sapien
tctggcgcagacagcatcagcgacg

SEQ ID NO: 2378581 - DNA, 25 bp, Homo sapien
tcaatgtcaacagtggggagtctgt

SEQ ID NO: 2378582 - DNA, 25 bp, Homo sapien
taacatcactactttctttcaatgt

SEQ ID NO: 2378583 - DNA, 25 bp, Homo sapien
ggtaacatcactactttctttcaat

SEQ ID NO: 2378584 - DNA, 25 bp, Homo sapien
ctggtaagggaacacagatttaaag

SEQ ID NO: 2378585 - DNA, 25 bp, Homo sapien
gatgagagtgggcttctgtgggcag

SEQ ID NO: 2378586 - DNA, 25 bp, Homo sapien
gtgggcagaccctgatcatataaaa

SEQ ID NO: 2378587 - DNA, 25 bp, Homo sapien
gagtgggcttctgtgggcagaccct

SEQ ID NO: 2378588 - DNA, 25 bp, Homo sapien
tcacagatacttcaggatgagagtg

SEQ ID NO: 2378589 - DNA, 25 bp, Homo sapien
ccgccgccgccccgctgccttctca

SEQ ID NO: 2378590 - DNA, 25 bp, Homo sapien
cgccgccgccgccccgctgccttct

SEQ ID NO: 2378591 - DNA, 25 bp, Homo sapien
gccgccgccccgctgccttctcagc

SEQ ID NO: 2378592 - DNA, 25 bp, Homo sapien
ctgcggcctccacagccgccgccgc

SEQ ID NO: 2378593 - DNA, 25 bp, Homo sapien
gggctgaggccgaagccaggacccg

SEQ ID NO: 2378594 - DNA, 25 bp, Homo sapien
gtggggctgaggccgaagccaggac

SEQ ID NO: 2378595 - DNA, 25 bp, Homo sapien
ggggctgaggccgaagccaggaccc

SEQ ID NO: 2378596 - DNA, 25 bp, Homo sapien
gctgaggccgaagccaggacccgga

SEQ ID NO: 2378597 - DNA, 25 bp, Homo sapien
aaatagcccgagaccgtggccagga

SEQ ID NO: 2378598 - DNA, 25 bp, Homo sapien
gcgtcgatgctaacgaaatagcccg

SEQ ID NO: 2378599 - DNA, 25 bp, Homo sapien
gaagcaccagcagttcagcaagcgt

SEQ ID NO: 2378600 - DNA, 25 bp, Homo sapien
ggtgacccgctcaaagaagcactct

SEQ ID NO: 2378601 - DNA, 25 bp, Homo sapien
ggccacgcgaccaagcctcagctgc

SEQ ID NO: 2378602 - DNA, 25 bp, Homo sapien
agcctcagctgcgggcagctagccc

SEQ ID NO: 2378603 - DNA, 25 bp, Homo sapien
ctcagctgcgggcagctagcccgca

SEQ ID NO: 2378604 - DNA, 25 bp, Homo sapien
ccacgcgaccaagcctcagctgcgg

SEQ ID NO: 2378605 - DNA, 25 bp, Homo sapien
aagaatttctgcatccctggttgac

SEQ ID NO: 2378606 - DNA, 25 bp, Homo sapien
caagtcagtcgctctttcaaagtgc

SEQ ID NO: 2378607 - DNA, 25 bp, Homo sapien
taaatgtggtctctaactggcctaa

SEQ ID NO: 2378608 - DNA, 25 bp, Homo sapien
gcatgtcacttgcataacttcgaga

SEQ ID NO: 2378609 - DNA, 25 bp, Homo sapien
gtccttttggagcctccccaatatc

SEQ ID NO: 2378610 - DNA, 25 bp, Homo sapien
catggtggacatccggttactaaaa

SEQ ID NO: 2378611 - DNA, 25 bp, Homo sapien
gagtcatggtggacatccggttact

SEQ ID NO: 2378612 - DNA, 25 bp, Homo sapien
aaaatttgtatgttccatccatgtg

SEQ ID NO: 2378613 - DNA, 25 bp, Homo sapien
tgagctagcagtggcgatgacagct

SEQ ID NO: 2378614 - DNA, 25 bp, Homo sapien
tggcgatgacagctgtaaagcacga

SEQ ID NO: 2378615 - DNA, 25 bp, Homo sapien
gtaaagcacgaacaggaatacatgg

SEQ ID NO: 2378616 - DNA, 25 bp, Homo sapien
gctgtaaagcacgaacaggaataca

SEQ ID NO: 2378617 - DNA, 25 bp, Homo sapien
cgatgacagctgtaaagcacgaaca

SEQ ID NO: 2378618 - DNA, 25 bp, Homo sapien
gacagctgtaaagcacgaacaggaa

SEQ ID NO: 2378619 - DNA, 25 bp, Homo sapien
tattcctgttcgtgctttacagctg

SEQ ID NO: 2378620 - DNA, 25 bp, Homo sapien
tcctgttcgtgctttacagctgtca

SEQ ID NO: 2378621 - DNA, 25 bp, Homo sapien
tgttcgtgctttacagctgtcatcg

SEQ ID NO: 2378622 - DNA, 25 bp, Homo sapien
tcgtgctttacagctgtcatcgcca

SEQ ID NO: 2378623 - DNA, 25 bp, Homo sapien
agctgtcatcgccactgctagctca

SEQ ID NO: 2378624 - DNA, 25 bp, Homo sapien
ccatgtattcctgttcgtgctttac

SEQ ID NO: 2378625 - DNA, 25 bp, Homo sapien
cgtcactttgcagcagtgtctgatg

SEQ ID NO: 2378626 - DNA, 25 bp, Homo sapien
agtgaatgccgtcactttgcagcag

SEQ ID NO: 2378627 - DNA, 25 bp, Homo sapien
taagtgaatgccgtcactttgcagc

SEQ ID NO: 2378628 - DNA, 25 bp, Homo sapien
gccgtcactttgcagcagtgtctga

SEQ ID NO: 2378629 - DNA, 25 bp, Homo sapien
tgaatgccgtcactttgcagcagtg

SEQ ID NO: 2378630 - DNA, 25 bp, Homo sapien
aatgccgtcactttgcagcagtgtc

SEQ ID NO: 2378631 - DNA, 25 bp, Homo sapien
catcagacactgctgcaaagtgacg

SEQ ID NO: 2378632 - DNA, 25 bp, Homo sapien
cactgctgcaaagtgacggcattca

SEQ ID NO: 2378633 - DNA, 25 bp, Homo sapien
gacactgctgcaaagtgacggcatt

SEQ ID NO: 2378634 - DNA, 25 bp, Homo sapien
tcagacactgctgcaaagtgacggc

SEQ ID NO: 2378635 - DNA, 25 bp, Homo sapien
cagacactgctgcaaagtgacggca

SEQ ID NO: 2378636 - DNA, 25 bp, Homo sapien
gctgcaaagtgacggcattcactta

SEQ ID NO: 2378637 - DNA, 25 bp, Homo sapien
gtagttcttggggagatgaaaagag

SEQ ID NO: 2378638 - DNA, 25 bp, Homo sapien
gttcttggggagatgaaaagagcaa

SEQ ID NO: 2378639 - DNA, 25 bp, Homo sapien
ttcttggggagatgaaaagagcaag

SEQ ID NO: 2378640 - DNA, 25 bp, Homo sapien
tagttcttggggagatgaaaagagc

SEQ ID NO: 2378641 - DNA, 25 bp, Homo sapien
agttcttggggagatgaaaagagca

SEQ ID NO: 2378642 - DNA, 25 bp, Homo sapien
cttgctcttttcatctccccaagaa

SEQ ID NO: 2378643 - DNA, 25 bp, Homo sapien
gctcttttcatctccccaagaacta

SEQ ID NO: 2378644 - DNA, 25 bp, Homo sapien
tgctcttttcatctccccaagaact

SEQ ID NO: 2378645 - DNA, 25 bp, Homo sapien
ttgctcttttcatctccccaagaac

SEQ ID NO: 2378646 - DNA, 25 bp, Homo sapien
ctcttttcatctccccaagaactac

SEQ ID NO: 2378647 - DNA, 25 bp, Homo sapien
tctagttgccatgacattgggacag

SEQ ID NO: 2378648 - DNA, 25 bp, Homo sapien
gagtggtcctttggtccttctttga

SEQ ID NO: 2378649 - DNA, 25 bp, Homo sapien
tcaacgacaacacaaacagcagagt

SEQ ID NO: 2378650 - DNA, 25 bp, Homo sapien
aaacagcagagtggtcctttggtcc

SEQ ID NO: 2378651 - DNA, 25 bp, Homo sapien
tgggacagatctactacctgaagag

SEQ ID NO: 2378652 - DNA, 25 bp, Homo sapien
aagagattttttgaagtccggagag

SEQ ID NO: 2378653 - DNA, 25 bp, Homo sapien
tcaaagaaggaccaaaggaccactc

SEQ ID NO: 2378654 - DNA, 25 bp, Homo sapien
actctgctgtttgtgttgtcgttga

SEQ ID NO: 2378655 - DNA, 25 bp, Homo sapien
tagatctgtcccaatgtcatggcaa

SEQ ID NO: 2378656 - DNA, 25 bp, Homo sapien
ctcttcaggtagtagatctgtccca

SEQ ID NO: 2378657 - DNA, 25 bp, Homo sapien
ggaccaaaggaccactctgctgttt

SEQ ID NO: 2378658 - DNA, 25 bp, Homo sapien
tcatggcaactagaacaagagcttc

SEQ ID NO: 2378659 - DNA, 25 bp, Homo sapien
tctgatgccaaagggttaaagcttc

SEQ ID NO: 2378660 - DNA, 25 bp, Homo sapien
cctttgggccactgttcagggtact

SEQ ID NO: 2378661 - DNA, 25 bp, Homo sapien
taaagccaattctctgggtgtccca

SEQ ID NO: 2378662 - DNA, 25 bp, Homo sapien
tctctgacttgggtgtatgctgcca

SEQ ID NO: 2378663 - DNA, 25 bp, Homo sapien
ccaccttgggtgagaacacttgcaa

SEQ ID NO: 2378664 - DNA, 25 bp, Homo sapien
ccgtcctaatggcagagctctctga

SEQ ID NO: 2378665 - DNA, 25 bp, Homo sapien
tcagagagctctgccattaggacgg

SEQ ID NO: 2378666 - DNA, 25 bp, Homo sapien
gaagctttaaccctttggcatcaga

SEQ ID NO: 2378667 - DNA, 25 bp, Homo sapien
agtaccctgaacagtggcccaaagg

SEQ ID NO: 2378668 - DNA, 25 bp, Homo sapien
tggcagcatacacccaagtcagaga

SEQ ID NO: 2378669 - DNA, 25 bp, Homo sapien
ttgcaagtgttctcacccaaggtgg

SEQ ID NO: 2378670 - DNA, 25 bp, Homo sapien
agtatgaaagtacccagcctggcag

SEQ ID NO: 2378671 - DNA, 25 bp, Homo sapien
cggagactagatcaccacctgtaga

SEQ ID NO: 2378672 - DNA, 25 bp, Homo sapien
tgaaaggtggaaccggagactagat

SEQ ID NO: 2378673 - DNA, 25 bp, Homo sapien
gatggatcagtgctaaaatcttaag

SEQ ID NO: 2378674 - DNA, 25 bp, Homo sapien
cggcctgctggtaataaaagtagct

SEQ ID NO: 2378675 - DNA, 25 bp, Homo sapien
gaattattttcacttgcccacgtag

SEQ ID NO: 2378676 - DNA, 25 bp, Homo sapien
tctgtgaaactaacggcctgctggt

SEQ ID NO: 2378677 - DNA, 25 bp, Homo sapien
gctacttttattaccagcaggccgt

SEQ ID NO: 2378678 - DNA, 25 bp, Homo sapien
gaagaacagtttctacaggtggtga

SEQ ID NO: 2378679 - DNA, 25 bp, Homo sapien
cagcaggccgttagtttcacagagg

SEQ ID NO: 2378680 - DNA, 25 bp, Homo sapien
cattcataaactacgtgggcaagtg

SEQ ID NO: 2378681 - DNA, 25 bp, Homo sapien
taagattttagcactgatccatcag

SEQ ID NO: 2378682 - DNA, 25 bp, Homo sapien
caggtggtgatctagtctccggttc

SEQ ID NO: 2378683 - DNA, 25 bp, Homo sapien
ccgctgctcgaacgcgccttgtgca

SEQ ID NO: 2378684 - DNA, 25 bp, Homo sapien
gcgccttgtgcacccccaacgagca

SEQ ID NO: 2378685 - DNA, 25 bp, Homo sapien
ggtcgccgctgctcgaacgcgcctt

SEQ ID NO: 2378686 - DNA, 25 bp, Homo sapien
ctccttcgccgcgtcggtcgccgct

SEQ ID NO: 2378687 - DNA, 25 bp, Homo sapien
gcacaggcagcgactcccaggagcc

SEQ ID NO: 2378688 - DNA, 25 bp, Homo sapien
acctgcgggtgcagcggcacaggca

SEQ ID NO: 2378689 - DNA, 25 bp, Homo sapien
ctgcaccggcgtcatgtacgggaag

SEQ ID NO: 2378690 - DNA, 25 bp, Homo sapien
cgtcatgtacgggaagcccagctcc

SEQ ID NO: 2378691 - DNA, 25 bp, Homo sapien
caatagtgccaacagtgaggaccct

SEQ ID NO: 2378692 - DNA, 25 bp, Homo sapien
gattccagtgatgttgttaaacatc

SEQ ID NO: 2378693 - DNA, 25 bp, Homo sapien
aatacaaccagggttgggaggtgat

SEQ ID NO: 2378694 - DNA, 25 bp, Homo sapien
cagagtacactttgatttggacaaa

SEQ ID NO: 2378695 - DNA, 25 bp, Homo sapien
gagagagattgcaaagcactggtta

SEQ ID NO: 2378696 - DNA, 25 bp, Homo sapien
aaagcactggttaaaggatgccatc

SEQ ID NO: 2378697 - DNA, 25 bp, Homo sapien
aaaggatgccatcaattcacaggtg

SEQ ID NO: 2378698 - DNA, 25 bp, Homo sapien
gattgcaaagcactggttaaaggat

SEQ ID NO: 2378699 - DNA, 25 bp, Homo sapien
tttcgcatgaacagagggatggttg

SEQ ID NO: 2378700 - DNA, 25 bp, Homo sapien
gcagcgacatctttgtttcgcatga

SEQ ID NO: 2378701 - DNA, 25 bp, Homo sapien
gcttctgcagcgacatctttgtttc

SEQ ID NO: 2378702 - DNA, 25 bp, Homo sapien
tctttgtttcgcatgaacagaggga

SEQ ID NO: 2378703 - DNA, 25 bp, Homo sapien
tttccctttcttcctcagagttcat

SEQ ID NO: 2378704 - DNA, 25 bp, Homo sapien
ctgcaaacagagagttttggtttcc

SEQ ID NO: 2378705 - DNA, 25 bp, Homo sapien
gtttccctttcttcctcagagttca

SEQ ID NO: 2378706 - DNA, 25 bp, Homo sapien
tgcaaacagagagttttggtttccc

SEQ ID NO: 2378707 - DNA, 25 bp, Homo sapien
gggatgacaaaagcgagtgttttgc

SEQ ID NO: 2378708 - DNA, 25 bp, Homo sapien
agcgagtgttttgccactacctgtg

SEQ ID NO: 2378709 - DNA, 25 bp, Homo sapien
gacaaaagcgagtgttttgccacta

SEQ ID NO: 2378710 - DNA, 25 bp, Homo sapien
aaagcgagtgttttgccactacctg

SEQ ID NO: 2378711 - DNA, 25 bp, Homo sapien
acagaagcaccgaggatccactggg

SEQ ID NO: 2378712 - DNA, 25 bp, Homo sapien
ggactcccagagaggaactcatagg

SEQ ID NO: 2378713 - DNA, 25 bp, Homo sapien
gttccagagaaacagtagttcccag

SEQ ID NO: 2378714 - DNA, 25 bp, Homo sapien
tctcattgaactcgtggccaacagc

SEQ ID NO: 2378715 - DNA, 25 bp, Homo sapien
gggaagtgcttcgtgaaatgcgaca

SEQ ID NO: 2378716 - DNA, 25 bp, Homo sapien
gacaggacctcgtctatttgaatgg

SEQ ID NO: 2378717 - DNA, 25 bp, Homo sapien
gtctatttgaatggccagctctcga

SEQ ID NO: 2378718 - DNA, 25 bp, Homo sapien
tcgtgaaatgcgacaggacctcgtc

SEQ ID NO: 2378719 - DNA, 25 bp, Homo sapien
ccatgactaacagggacactgcatc

SEQ ID NO: 2378720 - DNA, 25 bp, Homo sapien
aaaacagcccatgactaacagggac

SEQ ID NO: 2378721 - DNA, 25 bp, Homo sapien
caagaaaacagcctttgattaagtt

SEQ ID NO: 2378722 - DNA, 25 bp, Homo sapien
tgattaagttcgacaaaacagccca

SEQ ID NO: 2378723 - DNA, 25 bp, Homo sapien
gttgcttaaacctctcaacatcttc

SEQ ID NO: 2378724 - DNA, 25 bp, Homo sapien
tgcttaaacctctcaacatcttctc

SEQ ID NO: 2378725 - DNA, 25 bp, Homo sapien
ggattcctgcctccgatccaaagaa

SEQ ID NO: 2378726 - DNA, 25 bp, Homo sapien
ccttgttgcttaaacctctcaacat

SEQ ID NO: 2378727 - DNA, 25 bp, Homo sapien
aaagcacaatgggaagctggcctgg

SEQ ID NO: 2378728 - DNA, 25 bp, Homo sapien
ccctagtgaagagaacgaagagcat

SEQ ID NO: 2378729 - DNA, 25 bp, Homo sapien
taggtcccaggtaactcacttgtaa

SEQ ID NO: 2378730 - DNA, 25 bp, Homo sapien
cagttgagtaagtgcgatggagacc

SEQ ID NO: 2378731 - DNA, 25 bp, Homo sapien
aaaccccatgtccagaagtctgtct

SEQ ID NO: 2378732 - DNA, 25 bp, Homo sapien
aacatgtcctccaagcggcctggag

SEQ ID NO: 2378733 - DNA, 25 bp, Homo sapien
ggacatccagggatcgcacacagct

SEQ ID NO: 2378734 - DNA, 25 bp, Homo sapien
tggccagatccaagccttcggcctt

SEQ ID NO: 2378735 - DNA, 25 bp, Homo sapien
gagaaaaggcctgttctcctctgct

SEQ ID NO: 2378736 - DNA, 25 bp, Homo sapien
tggcaaaaactccagaatggtgttg

SEQ ID NO: 2378737 - DNA, 25 bp, Homo sapien
tggcagagaaaaggcctgttctcct

SEQ ID NO: 2378738 - DNA, 25 bp, Homo sapien
gctttggcaaaaactccagaatggt

SEQ ID NO: 2378739 - DNA, 25 bp, Homo sapien
gacagggttccggaggcccgctctc

SEQ ID NO: 2378740 - DNA, 25 bp, Homo sapien
cagggttccggaggcccgctctcac

SEQ ID NO: 2378741 - DNA, 25 bp, Homo sapien
ggttccggaggcccgctctcaccag

SEQ ID NO: 2378742 - DNA, 25 bp, Homo sapien
ctgagacccggacagggttccggag

SEQ ID NO: 2378743 - DNA, 25 bp, Homo sapien
cttatgattgcgaagaaaatggacc

SEQ ID NO: 2378744 - DNA, 25 bp, Homo sapien
tccatgaagatcttattgcgtttat

SEQ ID NO: 2378745 - DNA, 25 bp, Homo sapien
ccatgaagatcttattgcgtttata

SEQ ID NO: 2378746 - DNA, 25 bp, Homo sapien
atatttcatctttccgtgaatgcac

SEQ ID NO: 2378747 - DNA, 25 bp, Homo sapien
cacataatcttcacgcccttcacca

SEQ ID NO: 2378748 - DNA, 25 bp, Homo sapien
ggaaagacaacacatgcggacagca

SEQ ID NO: 2378749 - DNA, 25 bp, Homo sapien
gccacagacagtttctacccagaca

SEQ ID NO: 2378750 - DNA, 25 bp, Homo sapien
gaaatgacatagcaaaaggcaaagc

SEQ ID NO: 2378751 - DNA, 25 bp, Homo sapien
gctccttgctgcttgacagtcatca

SEQ ID NO: 2378752 - DNA, 25 bp, Homo sapien
tagtcacaagcctaataagccacag

SEQ ID NO: 2378753 - DNA, 25 bp, Homo sapien
cataactgaggcctagcagtcaggt

SEQ ID NO: 2378754 - DNA, 25 bp, Homo sapien
tcattggtagacacaagttgcctgc

SEQ ID NO: 2378755 - DNA, 25 bp, Homo sapien
tacagcactgccatttgaaaaccaa

SEQ ID NO: 2378756 - DNA, 25 bp, Homo sapien
tctgagtaaggaggccaccatcttc

SEQ ID NO: 2378757 - DNA, 25 bp, Homo sapien
agtaaggaggccaccatcttcatca

SEQ ID NO: 2378758 - DNA, 25 bp, Homo sapien
cattctgagtaaggaggccaccatc

SEQ ID NO: 2378759 - DNA, 25 bp, Homo sapien
gcattctgagtaaggaggccaccat

SEQ ID NO: 2378760 - DNA, 25 bp, Homo sapien
gcattgctgggagggtcatactgca

SEQ ID NO: 2378761 - DNA, 25 bp, Homo sapien
ggaatatcaattccccgggccatca

SEQ ID NO: 2378762 - DNA, 25 bp, Homo sapien
gggagggtcatactgcaaaacccag

SEQ ID NO: 2378763 - DNA, 25 bp, Homo sapien
cgggccatcacatcagtgcacacta

SEQ ID NO: 2378764 - DNA, 25 bp, Homo sapien
ggcaagccctgtaggaatccacggg

SEQ ID NO: 2378765 - DNA, 25 bp, Homo sapien
ttctggcaagccctgtaggaatcca

SEQ ID NO: 2378766 - DNA, 25 bp, Homo sapien
tccacggggtcactgcagacccaag

SEQ ID NO: 2378767 - DNA, 25 bp, Homo sapien
ttgctctacatggagcacggcaagg

SEQ ID NO: 2378768 - DNA, 25 bp, Homo sapien
tcatacaggtgggacatagtcccca

SEQ ID NO: 2378769 - DNA, 25 bp, Homo sapien
tgtgaactcttaagtaaaacttgta

SEQ ID NO: 2378770 - DNA, 25 bp, Homo sapien
tacaggtgggacatagtccccagtg

SEQ ID NO: 2378771 - DNA, 25 bp, Homo sapien
ctgatcatacaggtgggacatagtc

SEQ ID NO: 2378772 - DNA, 25 bp, Homo sapien
ccacagctcagtgtggactcggcca

SEQ ID NO: 2378773 - DNA, 25 bp, Homo sapien
tggaaatgggtacccaggtgatgac

SEQ ID NO: 2378774 - DNA, 25 bp, Homo sapien
tgctgcagctaaaacgctctgggga

SEQ ID NO: 2378775 - DNA, 25 bp, Homo sapien
gggtacccaggtgatgacagctgaa

SEQ ID NO: 2378776 - DNA, 25 bp, Homo sapien
ctgtgcgaccgcagcgatgcacgaa

SEQ ID NO: 2378777 - DNA, 25 bp, Homo sapien
aatgcgagctgtgcgaccgcagcga

SEQ ID NO: 2378778 - DNA, 25 bp, Homo sapien
cgtggccaatgcgagctgtgcgacc

SEQ ID NO: 2378779 - DNA, 25 bp, Homo sapien
ccccgtggccaatgcgagctgtgcg

SEQ ID NO: 2378780 - DNA, 25 bp, Homo sapien
tccccatcacaaccaagaaaaacaa

SEQ ID NO: 2378781 - DNA, 25 bp, Homo sapien
ctccccatcacaaccaagaaaaaca

SEQ ID NO: 2378782 - DNA, 25 bp, Homo sapien
acacacataccacattctcaccttc

SEQ ID NO: 2378783 - DNA, 25 bp, Homo sapien
accttccctggctggcatcatatcc

SEQ ID NO: 2378784 - DNA, 25 bp, Homo sapien
cctggctggcatcatatccccaggg

SEQ ID NO: 2378785 - DNA, 25 bp, Homo sapien
acacataccacattctcaccttccc

SEQ ID NO: 2378786 - DNA, 25 bp, Homo sapien
tctgaaaatcaggttgcattcatgc

SEQ ID NO: 2378787 - DNA, 25 bp, Homo sapien
tttcaaacacagctctgtcagccag

SEQ ID NO: 2378788 - DNA, 25 bp, Homo sapien
cagaaggtccgctgtgtttctctgg

SEQ ID NO: 2378789 - DNA, 25 bp, Homo sapien
gctttgcataagcttggacatatga

SEQ ID NO: 2378790 - DNA, 25 bp, Homo sapien
gcagccagtggccagtttattctgt

SEQ ID NO: 2378791 - DNA, 25 bp, Homo sapien
gaccaccacatagttaagatggaga

SEQ ID NO: 2378792 - DNA, 25 bp, Homo sapien
aacacttccttttatgagacaaagc

SEQ ID NO: 2378793 - DNA, 25 bp, Homo sapien
gagacaaagcaatctcatacttgta

SEQ ID NO: 2378794 - DNA, 25 bp, Homo sapien
agaacaatcagtaatggcttacaat

SEQ ID NO: 2378795 - DNA, 25 bp, Homo sapien
tagaacaatcagtaatggcttacaa

SEQ ID NO: 2378796 - DNA, 25 bp, Homo sapien
tctggcatcttgggcatcctcagca

SEQ ID NO: 2378797 - DNA, 25 bp, Homo sapien
ttctggcatcttgggcatcctcagc

SEQ ID NO: 2378798 - DNA, 25 bp, Homo sapien
tctgctttgaccaagctttattttt

SEQ ID NO: 2378799 - DNA, 25 bp, Homo sapien
ttaaatggaatcgtgtcggtattaa

SEQ ID NO: 2378800 - DNA, 25 bp, Homo sapien
taaatggaatcgtgtcggtattaac

SEQ ID NO: 2378801 - DNA, 25 bp, Homo sapien
ccttctgctttgaccaagctttatt

SEQ ID NO: 2378802 - DNA, 25 bp, Homo sapien
tcttcccttttccttttctcattca

SEQ ID NO: 2378803 - DNA, 25 bp, Homo sapien
gagatccctaaatccactgtcttga

SEQ ID NO: 2378804 - DNA, 25 bp, Homo sapien
taaatccactgtcttgattgttctt

SEQ ID NO: 2378805 - DNA, 25 bp, Homo sapien
aagttttttcaagagtcttgtgtca

SEQ ID NO: 2378806 - DNA, 25 bp, Homo sapien
tgtcctcatcttcaatatcagaacc

SEQ ID NO: 2378807 - DNA, 25 bp, Homo sapien
tgtgggttcatctgtggcactggaa

SEQ ID NO: 2378808 - DNA, 25 bp, Homo sapien
tttcgttaaaagcaaactggagcca

SEQ ID NO: 2378809 - DNA, 25 bp, Homo sapien
ccaagttagggaacagctatgtcct

SEQ ID NO: 2378810 - DNA, 25 bp, Homo sapien
cacccggccaagactggaatgtttt

SEQ ID NO: 2378811 - DNA, 25 bp, Homo sapien
cagggccaagcacattcaggaggtc

SEQ ID NO: 2378812 - DNA, 25 bp, Homo sapien
caggaggtcaaatgcctgaagatac

SEQ ID NO: 2378813 - DNA, 25 bp, Homo sapien
ctgttagactactccaagactggaa

SEQ ID NO: 2378814 - DNA, 25 bp, Homo sapien
tattaacacagaaaaaccccagcac

SEQ ID NO: 2378815 - DNA, 25 bp, Homo sapien
actaccaagagaacacgaggaaggc

SEQ ID NO: 2378816 - DNA, 25 bp, Homo sapien
gatgtggtgttgcatcaatactgca

SEQ ID NO: 2378817 - DNA, 25 bp, Homo sapien
ctctatgaaagacgctgatgtggtg

SEQ ID NO: 2378818 - DNA, 25 bp, Homo sapien
gtccagctacatttacacacttaag

SEQ ID NO: 2378819 - DNA, 25 bp, Homo sapien
gaagatttatggagtaaggacttaa

SEQ ID NO: 2378820 - DNA, 25 bp, Homo sapien
gtcagctattctaaatcccaactta

SEQ ID NO: 2378821 - DNA, 25 bp, Homo sapien
gagtcaggccaaaactgagatgtgt

SEQ ID NO: 2378822 - DNA, 25 bp, Homo sapien
tttcagtcccatctaaaaatgtgtc

SEQ ID NO: 2378823 - DNA, 25 bp, Homo sapien
gagctcatcaagctctatctgtaac

SEQ ID NO: 2378824 - DNA, 25 bp, Homo sapien
tgagctcatcaagctctatctgtaa

SEQ ID NO: 2378825 - DNA, 25 bp, Homo sapien
tctatctgtaacctgtgagcccttt

SEQ ID NO: 2378826 - DNA, 25 bp, Homo sapien
gctctatctgtaacctgtgagccct

SEQ ID NO: 2378827 - DNA, 25 bp, Homo sapien
tttctatatcctttgagaaacattt

SEQ ID NO: 2378828 - DNA, 25 bp, Homo sapien
atttatacaaaattggcttgaattg

SEQ ID NO: 2378829 - DNA, 25 bp, Homo sapien
ttatacaaaattggcttgaattgga

SEQ ID NO: 2378830 - DNA, 25 bp, Homo sapien
tacaaaattggcttgaattggaatt

SEQ ID NO: 2378831 - DNA, 25 bp, Homo sapien
tatatttatacaaaattggcttgaa

SEQ ID NO: 2378832 - DNA, 25 bp, Homo sapien
aggggagcgtctcaaatcctgcgca

SEQ ID NO: 2378833 - DNA, 25 bp, Homo sapien
gcacctcagcgcagagcaagtggtg

SEQ ID NO: 2378834 - DNA, 25 bp, Homo sapien
ggtcaggggagcgtctcaaatcctg

SEQ ID NO: 2378835 - DNA, 25 bp, Homo sapien
tcccagcacctcagcgcagagcaag

SEQ ID NO: 2378836 - DNA, 25 bp, Homo sapien
catcctctacccgcaagctctccat

SEQ ID NO: 2378837 - DNA, 25 bp, Homo sapien
acttctctatcacggccaataaggc

SEQ ID NO: 2378838 - DNA, 25 bp, Homo sapien
gttcctgaaaggactcccctatctc

SEQ ID NO: 2378839 - DNA, 25 bp, Homo sapien
tgtctttgtattgcacctaaaaata

SEQ ID NO: 2378840 - DNA, 25 bp, Homo sapien
tgcaaaccagatcataacactttct

SEQ ID NO: 2378841 - DNA, 25 bp, Homo sapien
catcaactacaataaccagaagatt

SEQ ID NO: 2378842 - DNA, 25 bp, Homo sapien
tgagattcctttaatgcttgctttc

SEQ ID NO: 2378843 - DNA, 25 bp, Homo sapien
gagattcctttaatgcttgctttcc

SEQ ID NO: 2378844 - DNA, 25 bp, Homo sapien
gttggcatcaactacaataaccaga

SEQ ID NO: 2378845 - DNA, 25 bp, Homo sapien
tttttggtactcatatgttcagaga

SEQ ID NO: 2378846 - DNA, 25 bp, Homo sapien
ttttggtactcatatgttcagagaa

SEQ ID NO: 2378847 - DNA, 25 bp, Homo sapien
tttggtactcatatgttcagagaaa

SEQ ID NO: 2378848 - DNA, 25 bp, Homo sapien
cggcatctatgcatttggataaagt

SEQ ID NO: 2378849 - DNA, 25 bp, Homo sapien
cacggcatctatgcatttggataaa

SEQ ID NO: 2378850 - DNA, 25 bp, Homo sapien
catctatgcatttggataaagtgaa

SEQ ID NO: 2378851 - DNA, 25 bp, Homo sapien
gcatctatgcatttggataaagtga

SEQ ID NO: 2378852 - DNA, 25 bp, Homo sapien
gaataaatgcgaatttcccagcacc

SEQ ID NO: 2378853 - DNA, 25 bp, Homo sapien
tcacagcaagtttgttggaacgatt

SEQ ID NO: 2378854 - DNA, 25 bp, Homo sapien
gaatgtgacttgctatcacagcaag

SEQ ID NO: 2378855 - DNA, 25 bp, Homo sapien
tgttggaacgattcatgaataaatg

SEQ ID NO: 2378856 - DNA, 25 bp, Homo sapien
gtaattcaactcttctgtcagtgca

SEQ ID NO: 2378857 - DNA, 25 bp, Homo sapien
tgtgagaagtaaatatggcccaaat

SEQ ID NO: 2378858 - DNA, 25 bp, Homo sapien
acatttacacatcagctgcaggcta

SEQ ID NO: 2378859 - DNA, 25 bp, Homo sapien
aaactttgctgtatctgcggtcaca

SEQ ID NO: 2378860 - DNA, 25 bp, Homo sapien
cagggtctccgaagaagtctccaag

SEQ ID NO: 2378861 - DNA, 25 bp, Homo sapien
ctttaatctcttcaacaataacttc

SEQ ID NO: 2378862 - DNA, 25 bp, Homo sapien
tactcccagagggattaaattcagg

SEQ ID NO: 2378863 - DNA, 25 bp, Homo sapien
ttccatctttactcccagagggatt

SEQ ID NO: 2378864 - DNA, 25 bp, Homo sapien
tgagctgagacttaatcctggaggc

SEQ ID NO: 2378865 - DNA, 25 bp, Homo sapien
tgcagttcaagagggcaaggagctc

SEQ ID NO: 2378866 - DNA, 25 bp, Homo sapien
cataagtctagcagcctggacaggg

SEQ ID NO: 2378867 - DNA, 25 bp, Homo sapien
tttcctcgagccatgagaagcaggg

SEQ ID NO: 2378868 - DNA, 25 bp, Homo sapien
gcaaagtttctgtatgttgaccctt

SEQ ID NO: 2378869 - DNA, 25 bp, Homo sapien
cagcaaagtttctgtatgttgaccc

SEQ ID NO: 2378870 - DNA, 25 bp, Homo sapien
agtttctgtatgttgaccctttatg

SEQ ID NO: 2378871 - DNA, 25 bp, Homo sapien
tgccagcaaagtttctgtatgttga

SEQ ID NO: 2378872 - DNA, 25 bp, Homo sapien
gacaccttctaaatgattcagacac

SEQ ID NO: 2378873 - DNA, 25 bp, Homo sapien
aagacaccttctaaatgattcagac

SEQ ID NO: 2378874 - DNA, 25 bp, Homo sapien
gaagacaccttctaaatgattcaga

SEQ ID NO: 2378875 - DNA, 25 bp, Homo sapien
cagaagacaccttctaaatgattca

SEQ ID NO: 2378876 - DNA, 25 bp, Homo sapien
aatatccttgatttcatttcctgat

SEQ ID NO: 2378877 - DNA, 25 bp, Homo sapien
tatccttgatttcatttcctgattg

SEQ ID NO: 2378878 - DNA, 25 bp, Homo sapien
caatatccttgatttcatttcctga

SEQ ID NO: 2378879 - DNA, 25 bp, Homo sapien
atccttgatttcatttcctgattgt

SEQ ID NO: 2378880 - DNA, 25 bp, Homo sapien
tattctgactgagattgtaaattga

SEQ ID NO: 2378881 - DNA, 25 bp, Homo sapien
tggctctccacttattcttctatcg

SEQ ID NO: 2378882 - DNA, 25 bp, Homo sapien
tgatattctgactgagattgtaaat

SEQ ID NO: 2378883 - DNA, 25 bp, Homo sapien
actgacatccaagaacaaaatatgg

SEQ ID NO: 2378884 - DNA, 25 bp, Homo sapien
tcatatactgcaacgcactgtcttc

SEQ ID NO: 2378885 - DNA, 25 bp, Homo sapien
aagatgacattcatgaagttcatat

SEQ ID NO: 2378886 - DNA, 25 bp, Homo sapien
gacattcatgaagttcatatactgc

SEQ ID NO: 2378887 - DNA, 25 bp, Homo sapien
agttcatatactgcaacgcactgtc

SEQ ID NO: 2378888 - DNA, 25 bp, Homo sapien
gagtcggagtctaaaacacaggcat

SEQ ID NO: 2378889 - DNA, 25 bp, Homo sapien
gccctgagtcggagtctaaaacaca

SEQ ID NO: 2378890 - DNA, 25 bp, Homo sapien
gaggagccctgagtcggagtctaaa

SEQ ID NO: 2378891 - DNA, 25 bp, Homo sapien
ctgagtcggagtctaaaacacaggc

SEQ ID NO: 2378892 - DNA, 25 bp, Homo sapien
aactgcactgccacttagggagatg

SEQ ID NO: 2378893 - DNA, 25 bp, Homo sapien
agagtcaggtttttgcttgagttgc

SEQ ID NO: 2378894 - DNA, 25 bp, Homo sapien
aagatgcctgccagacgtccaagag

SEQ ID NO: 2378895 - DNA, 25 bp, Homo sapien
tctctgcttttgacacatgacactg

SEQ ID NO: 2378896 - DNA, 25 bp, Homo sapien
gagtgaagtaatagctcattgtggt

SEQ ID NO: 2378897 - DNA, 25 bp, Homo sapien
agcagcaatgtaggagggatccaat

SEQ ID NO: 2378898 - DNA, 25 bp, Homo sapien
tttgattacatgtgtcctagtggag

SEQ ID NO: 2378899 - DNA, 25 bp, Homo sapien
tgcacttccctggtcggtaatgata

SEQ ID NO: 2378900 - DNA, 25 bp, Homo sapien
gaggatatgacactgcagattatta

SEQ ID NO: 2378901 - DNA, 25 bp, Homo sapien
gatatgacactgcagattattatta

SEQ ID NO: 2378902 - DNA, 25 bp, Homo sapien
ggaatgaggttctcatgagcaatgc

SEQ ID NO: 2378903 - DNA, 25 bp, Homo sapien
cagaggaatgaggttctcatgagca

SEQ ID NO: 2378904 - DNA, 25 bp, Homo sapien
tagggtttccagaggaatgaggttc

SEQ ID NO: 2378905 - DNA, 25 bp, Homo sapien
gaggttctcatgagcaatgccttgg

SEQ ID NO: 2378906 - DNA, 25 bp, Homo sapien
aggcggcttgctgccaaactcgcac

SEQ ID NO: 2378907 - DNA, 25 bp, Homo sapien
ctgcaagacacaggcggcttgctgc

SEQ ID NO: 2378908 - DNA, 25 bp, Homo sapien
ggcttgctgccaaactcgcacttac

SEQ ID NO: 2378909 - DNA, 25 bp, Homo sapien
gcggcttgctgccaaactcgcactt

SEQ ID NO: 2378910 - DNA, 25 bp, Homo sapien
tcaggtacagtcctcccgtgatgtc

SEQ ID NO: 2378911 - DNA, 25 bp, Homo sapien
gtacagtcctcccgtgatgtcacaa

SEQ ID NO: 2378912 - DNA, 25 bp, Homo sapien
acagtcctcccgtgatgtcacaagc

SEQ ID NO: 2378913 - DNA, 25 bp, Homo sapien
aggtacagtcctcccgtgatgtcac

SEQ ID NO: 2378914 - DNA, 25 bp, Homo sapien
gcaaatactgcagaagagaaggcat

SEQ ID NO: 2378915 - DNA, 25 bp, Homo sapien
agaagagaaggcatctgaggcacct

SEQ ID NO: 2378916 - DNA, 25 bp, Homo sapien
aaatactgcagaagagaaggcatct

SEQ ID NO: 2378917 - DNA, 25 bp, Homo sapien
cagcaaatactgcagaagagaaggc

SEQ ID NO: 2378918 - DNA, 25 bp, Homo sapien
gaacagacataaccaatttcaatga

SEQ ID NO: 2378919 - DNA, 25 bp, Homo sapien
aagcagccctgtagtcaacatgaac

SEQ ID NO: 2378920 - DNA, 25 bp, Homo sapien
atttcgatgacagaagcaagcagcc

SEQ ID NO: 2378921 - DNA, 25 bp, Homo sapien
gcagccctgtagtcaacatgaactg

SEQ ID NO: 2378922 - DNA, 25 bp, Homo sapien
aggcagagaaattttaaaggctgtc

SEQ ID NO: 2378923 - DNA, 25 bp, Homo sapien
ctggaggcagagaaattttaaaggc

SEQ ID NO: 2378924 - DNA, 25 bp, Homo sapien
gaggcagagaaattttaaaggctgt

SEQ ID NO: 2378925 - DNA, 25 bp, Homo sapien
tggaggcagagaaattttaaaggct

SEQ ID NO: 2378926 - DNA, 25 bp, Homo sapien
tcagtttctttttcttggctttcag

SEQ ID NO: 2378927 - DNA, 25 bp, Homo sapien
cagtttctttttcttggctttcagc

SEQ ID NO: 2378928 - DNA, 25 bp, Homo sapien
ttcagtttctttttcttggctttca

SEQ ID NO: 2378929 - DNA, 25 bp, Homo sapien
agtttctttttcttggctttcagca

SEQ ID NO: 2378930 - DNA, 25 bp, Homo sapien
gattcagggagtaggttagaaagcc

SEQ ID NO: 2378931 - DNA, 25 bp, Homo sapien
tcacaatgaggacccggattcaggg

SEQ ID NO: 2378932 - DNA, 25 bp, Homo sapien
gccacaaacatggacagaaaccagt

SEQ ID NO: 2378933 - DNA, 25 bp, Homo sapien
tacgttcaaatttcgtatggcatgc

SEQ ID NO: 2378934 - DNA, 25 bp, Homo sapien
tctccctcaaaaccagtcataagct

SEQ ID NO: 2378935 - DNA, 25 bp, Homo sapien
gaaaaccatacttaacatagagtcc

SEQ ID NO: 2378936 - DNA, 25 bp, Homo sapien
ggaaagaattctatctgaaaaccat

SEQ ID NO: 2378937 - DNA, 25 bp, Homo sapien
tttgcttctgtacacgttctcctta

SEQ ID NO: 2378938 - DNA, 25 bp, Homo sapien
gccaccattccttaaactctttgta

SEQ ID NO: 2378939 - DNA, 25 bp, Homo sapien
cgcccggcctcgtcagtaaacattt

SEQ ID NO: 2378940 - DNA, 25 bp, Homo sapien
caggcacctgctacttcgcatggct

SEQ ID NO: 2378941 - DNA, 25 bp, Homo sapien
tgggattcagtccaaagcttctaga

SEQ ID NO: 2378942 - DNA, 25 bp, Homo sapien
tacacaatgggttttatcagtacag

SEQ ID NO: 2378943 - DNA, 25 bp, Homo sapien
ggttcagtagagtagtaatcccagc

SEQ ID NO: 2378944 - DNA, 25 bp, Homo sapien
gaaattatctaagccaacatcaaat

SEQ ID NO: 2378945 - DNA, 25 bp, Homo sapien
aaaagacaggttctcaaactcaagg

SEQ ID NO: 2378946 - DNA, 25 bp, Homo sapien
taaaataactcataagggcaacagt

SEQ ID NO: 2378947 - DNA, 25 bp, Homo sapien
cagaactaaccaaatatataagata

SEQ ID NO: 2378948 - DNA, 25 bp, Homo sapien
aacagaactaaccaaatatataaga

SEQ ID NO: 2378949 - DNA, 25 bp, Homo sapien
aataactcataagggcaacagttaa

SEQ ID NO: 2378950 - DNA, 25 bp, Homo sapien
ctttataagggcctgacactgggtg

SEQ ID NO: 2378951 - DNA, 25 bp, Homo sapien
aagtaactggcaatacaccaccaca

SEQ ID NO: 2378952 - DNA, 25 bp, Homo sapien
tgtgggtcactacagttgtaacatg

SEQ ID NO: 2378953 - DNA, 25 bp, Homo sapien
tctaacattgtgaaaggattctgaa

SEQ ID NO: 2378954 - DNA, 25 bp, Homo sapien
ctcattagaacccaggaaggactca

SEQ ID NO: 2378955 - DNA, 25 bp, Homo sapien
agcgaacgcccggagctatggcaac

SEQ ID NO: 2378956 - DNA, 25 bp, Homo sapien
cgcgccctcattagaacccaggaag

SEQ ID NO: 2378957 - DNA, 25 bp, Homo sapien
gaaggactcagacacgaaaacgcag

SEQ ID NO: 2378958 - DNA, 25 bp, Homo sapien
gaagagcggccggaggctggaagcc

SEQ ID NO: 2378959 - DNA, 25 bp, Homo sapien
aaagcctcaaaagaagagcggccgg

SEQ ID NO: 2378960 - DNA, 25 bp, Homo sapien
ctcaaaagaagagcggccggaggct

SEQ ID NO: 2378961 - DNA, 25 bp, Homo sapien
agcctcaaaagaagagcggccggag

SEQ ID NO: 2378962 - DNA, 25 bp, Homo sapien
ccccccacagaagcctcaggatgcc

SEQ ID NO: 2378963 - DNA, 25 bp, Homo sapien
gtccccccacagaagcctcaggatg

SEQ ID NO: 2378964 - DNA, 25 bp, Homo sapien
ccaggtccccccacagaagcctcag

SEQ ID NO: 2378965 - DNA, 25 bp, Homo sapien
aggtccccccacagaagcctcagga

SEQ ID NO: 2378966 - DNA, 25 bp, Homo sapien
aatcaccgcctaaggtgtgtgtggc

SEQ ID NO: 2378967 - DNA, 25 bp, Homo sapien
caagtctggcccttttaacgcccag

SEQ ID NO: 2378968 - DNA, 25 bp, Homo sapien
ggttagcagtggaagaatcaccgcc

SEQ ID NO: 2378969 - DNA, 25 bp, Homo sapien
tttggcgttgtcgactcccgaagct

SEQ ID NO: 2378970 - DNA, 25 bp, Homo sapien
cggacattcggataaaaggagggat

SEQ ID NO: 2378971 - DNA, 25 bp, Homo sapien
gtgtctccgaccagggacgcgctga

SEQ ID NO: 2378972 - DNA, 25 bp, Homo sapien
cgcgctgaccgcagggccggacatt

SEQ ID NO: 2378973 - DNA, 25 bp, Homo sapien
agggacacggtcacaccctcggtgt

SEQ ID NO: 2378974 - DNA, 25 bp, Homo sapien
tcagcactccacacgtcggaattgg

SEQ ID NO: 2378975 - DNA, 25 bp, Homo sapien
gggatcacagtcacgctccagtctt

SEQ ID NO: 2378976 - DNA, 25 bp, Homo sapien
ccacacgtcggaattggcaatattc

SEQ ID NO: 2378977 - DNA, 25 bp, Homo sapien
attgttcagcactccacacgtcgga

SEQ ID NO: 2378978 - DNA, 25 bp, Homo sapien
tcaatctcccaaagcgctatgagta

SEQ ID NO: 2378979 - DNA, 25 bp, Homo sapien
aactggtgaccctctcatcagaaaa

SEQ ID NO: 2378980 - DNA, 25 bp, Homo sapien
tacaatttcatagagttcacagacc

SEQ ID NO: 2378981 - DNA, 25 bp, Homo sapien
cactgacccatttgatgatctaaag

SEQ ID NO: 2378982 - DNA, 25 bp, Homo sapien
tgaaaggaaaacattgctgtatttt

SEQ ID NO: 2378983 - DNA, 25 bp, Homo sapien
tgtatttttaaagtgactcaaaaca

SEQ ID NO: 2378984 - DNA, 25 bp, Homo sapien
ctgaaaggaaaacattgctgtattt

SEQ ID NO: 2378985 - DNA, 25 bp, Homo sapien
ttgctgtatttttaaagtgactcaa

SEQ ID NO: 2378986 - DNA, 25 bp, Homo sapien
ttatgggtcagagaagagttggcat

SEQ ID NO: 2378987 - DNA, 25 bp, Homo sapien
tgtctcattggaggaacaccagtcc

SEQ ID NO: 2378988 - DNA, 25 bp, Homo sapien
cttgaatgagtagatgtgctgaaca

SEQ ID NO: 2378989 - DNA, 25 bp, Homo sapien
gagatgctgaaaccagaagggtctg

SEQ ID NO: 2378990 - DNA, 25 bp, Homo sapien
gacaagggccaaggggctgatacac

SEQ ID NO: 2378991 - DNA, 25 bp, Homo sapien
cctggttaggaatgacagtcacgtt

SEQ ID NO: 2378992 - DNA, 25 bp, Homo sapien
tgttaaattacaaggacaagggcca

SEQ ID NO: 2378993 - DNA, 25 bp, Homo sapien
ggctgatacacctggttaggaatga

SEQ ID NO: 2378994 - DNA, 25 bp, Homo sapien
acagcagcagcgaacatcacaggct

SEQ ID NO: 2378995 - DNA, 25 bp, Homo sapien
cagcagcgaacatcacaggctccag

SEQ ID NO: 2378996 - DNA, 25 bp, Homo sapien
agcagcagcgaacatcacaggctcc

SEQ ID NO: 2378997 - DNA, 25 bp, Homo sapien
ctggtcacagcagcagcgaacatca

SEQ ID NO: 2378998 - DNA, 25 bp, Homo sapien
ggattgacgtctcctccaaacacgc

SEQ ID NO: 2378999 - DNA, 25 bp, Homo sapien
gggacaccacgtgtcgtcgtcccag

SEQ ID NO: 2379000 - DNA, 25 bp, Homo sapien
gagcagagctgatcaaaaggaggat

SEQ ID NO: 2379001 - DNA, 25 bp, Homo sapien
tgaagcaggaccgtctgaacagcgt

SEQ ID NO: 2379002 - DNA, 25 bp, Homo sapien
acagcaccatgatagaagtaaccaa

SEQ ID NO: 2379003 - DNA, 25 bp, Homo sapien
ccatgatagaagtaaccaaggaagg

SEQ ID NO: 2379004 - DNA, 25 bp, Homo sapien
tgatagaagtaaccaaggaagggtg

SEQ ID NO: 2379005 - DNA, 25 bp, Homo sapien
gcaccatgatagaagtaaccaagga

SEQ ID NO: 2379006 - DNA, 25 bp, Homo sapien
tgcaaagtcttttgcgtcagtatcc

SEQ ID NO: 2379007 - DNA, 25 bp, Homo sapien
gcgtcagtatccacatatacttcaa

SEQ ID NO: 2379008 - DNA, 25 bp, Homo sapien
tacagtcataatgggatctccttgt

SEQ ID NO: 2379009 - DNA, 25 bp, Homo sapien
ctttacagtcataatgggatctcct

SEQ ID NO: 2379010 - DNA, 25 bp, Homo sapien
tctttatcttcgcattgataatacc

SEQ ID NO: 2379011 - DNA, 25 bp, Homo sapien
tctcgttcttggtatagttccaaat

SEQ ID NO: 2379012 - DNA, 25 bp, Homo sapien
ccaaattagtaacgcatttaacatc

SEQ ID NO: 2379013 - DNA, 25 bp, Homo sapien
aagaaatgccactggggcgttctgc

SEQ ID NO: 2379014 - DNA, 25 bp, Homo sapien
tcctcatagatcacttttggtgtaa

SEQ ID NO: 2379015 - DNA, 25 bp, Homo sapien
tttgtctaggtcagttgcttcctca

SEQ ID NO: 2379016 - DNA, 25 bp, Homo sapien
ctgtattggtgatgaatttgtctag

SEQ ID NO: 2379017 - DNA, 25 bp, Homo sapien
gatgaatttgtctaggtcagttgct

SEQ ID NO: 2379018 - DNA, 25 bp, Homo sapien
ttcacaattctaggggttgatccgt

SEQ ID NO: 2379019 - DNA, 25 bp, Homo sapien
tcttccacattcacaattctagggg

SEQ ID NO: 2379020 - DNA, 25 bp, Homo sapien
ggtgggcattaatctctgccctaaa

SEQ ID NO: 2379021 - DNA, 25 bp, Homo sapien
ctttctggtgggcattaatctctgc

SEQ ID NO: 2379022 - DNA, 25 bp, Homo sapien
gaaattattctccatagtgtttacc

SEQ ID NO: 2379023 - DNA, 25 bp, Homo sapien
ttgtcatacaaagtgtactctcgtt

SEQ ID NO: 2379024 - DNA, 25 bp, Homo sapien
aatataatgtgcaccatttcactag

SEQ ID NO: 2379025 - DNA, 25 bp, Homo sapien
taaatcataaatgcacataagaaac

SEQ ID NO: 2379026 - DNA, 25 bp, Homo sapien
tcttcattaccactattatagctta

SEQ ID NO: 2379027 - DNA, 25 bp, Homo sapien
ttcttcttcattaccactattatag

SEQ ID NO: 2379028 - DNA, 25 bp, Homo sapien
cttcttcattaccactattatagct

SEQ ID NO: 2379029 - DNA, 25 bp, Homo sapien
aattcttcttcattaccactattat

SEQ ID NO: 2379030 - DNA, 25 bp, Homo sapien
gagttacttataaccatcctgatgg

SEQ ID NO: 2379031 - DNA, 25 bp, Homo sapien
aatgactggcatatactcatcttac

SEQ ID NO: 2379032 - DNA, 25 bp, Homo sapien
tatgtttgtaagatcaatgactggc

SEQ ID NO: 2379033 - DNA, 25 bp, Homo sapien
tgttgaactaaagtatgtttgtaag

SEQ ID NO: 2379034 - DNA, 25 bp, Homo sapien
catcctgttgatatttagagctcgg

SEQ ID NO: 2379035 - DNA, 25 bp, Homo sapien
gtcgtgacattattcatcctgttga

SEQ ID NO: 2379036 - DNA, 25 bp, Homo sapien
tgtaaagtcgtgacattattcatcc

SEQ ID NO: 2379037 - DNA, 25 bp, Homo sapien
tttagagctcggacaggcttgccaa

SEQ ID NO: 2379038 - DNA, 25 bp, Homo sapien
tcaggtgcaaacaatgttagcattc

SEQ ID NO: 2379039 - DNA, 25 bp, Homo sapien
tcactgttattcagcagcatgtacc

SEQ ID NO: 2379040 - DNA, 25 bp, Homo sapien
taaaaagctgtagaagcaggaaaaa

SEQ ID NO: 2379041 - DNA, 25 bp, Homo sapien
gcaggaaaaaccatcatcactgtta

SEQ ID NO: 2379042 - DNA, 25 bp, Homo sapien
ctttatcagacttctcagatcctga

SEQ ID NO: 2379043 - DNA, 25 bp, Homo sapien
gccagttttcaaaaactgagatcac

SEQ ID NO: 2379044 - DNA, 25 bp, Homo sapien
caaaggtgcctttatcagacttctc

SEQ ID NO: 2379045 - DNA, 25 bp, Homo sapien
gctgaacaaaggtgcctttatcaga

SEQ ID NO: 2379046 - DNA, 25 bp, Homo sapien
taatcccgacttctaacaggcatcc

SEQ ID NO: 2379047 - DNA, 25 bp, Homo sapien
gggtttgaaagttgctgatgtacac

SEQ ID NO: 2379048 - DNA, 25 bp, Homo sapien
gctgatgtacacagaccccttccag

SEQ ID NO: 2379049 - DNA, 25 bp, Homo sapien
ctgagctgagtacaattttcattaa

SEQ ID NO: 2379050 - DNA, 25 bp, Homo sapien
taatgaatcaagtctttcaacagca

SEQ ID NO: 2379051 - DNA, 25 bp, Homo sapien
gaatcaagtctttcaacagcattct

SEQ ID NO: 2379052 - DNA, 25 bp, Homo sapien
cttgtattaatgaatcaagtctttc

SEQ ID NO: 2379053 - DNA, 25 bp, Homo sapien
gtattaatgaatcaagtctttcaac

SEQ ID NO: 2379054 - DNA, 25 bp, Homo sapien
gccatcactaagatcagcgtaatcg

SEQ ID NO: 2379055 - DNA, 25 bp, Homo sapien
cagcgtaatcggagttgcctctcat

SEQ ID NO: 2379056 - DNA, 25 bp, Homo sapien
taagatcagcgtaatcggagttgcc

SEQ ID NO: 2379057 - DNA, 25 bp, Homo sapien
gtattatttcgagccagccatcact

SEQ ID NO: 2379058 - DNA, 25 bp, Homo sapien
aggatgaggaggcaatgagctgtga

SEQ ID NO: 2379059 - DNA, 25 bp, Homo sapien
ggaggatgaggaggcaatgagctgt

SEQ ID NO: 2379060 - DNA, 25 bp, Homo sapien
ctgggaggatgaggaggcaatgagc

SEQ ID NO: 2379061 - DNA, 25 bp, Homo sapien
tgggaggatgaggaggcaatgagct

SEQ ID NO: 2379062 - DNA, 25 bp, Homo sapien
gggcaaagcagatgcgcacactcat

SEQ ID NO: 2379063 - DNA, 25 bp, Homo sapien
accgcgccagcatccgagatgagga

SEQ ID NO: 2379064 - DNA, 25 bp, Homo sapien
ttcacactgctagccagcgggtctg

SEQ ID NO: 2379065 - DNA, 25 bp, Homo sapien
tgagcaggaatatccaggcacatgc

SEQ ID NO: 2379066 - DNA, 25 bp, Homo sapien
tgtctctacaccgagtatctcctgc

SEQ ID NO: 2379067 - DNA, 25 bp, Homo sapien
ggtaagcccacactggtactgccag

SEQ ID NO: 2379068 - DNA, 25 bp, Homo sapien
tttaataaactggacggatgcactg

SEQ ID NO: 2379069 - DNA, 25 bp, Homo sapien
aactggacggatgcactgataggga

SEQ ID NO: 2379070 - DNA, 25 bp, Homo sapien
gagaaggtcggccttgtgctcacag

SEQ ID NO: 2379071 - DNA, 25 bp, Homo sapien
tcaactaggtgagcaactggagtac

SEQ ID NO: 2379072 - DNA, 25 bp, Homo sapien
tctgttgcagtcatactctgtataa

SEQ ID NO: 2379073 - DNA, 25 bp, Homo sapien
ctgttgcagtcatactctgtataat

SEQ ID NO: 2379074 - DNA, 25 bp, Homo sapien
tttctgttgcagtcatactctgtat

SEQ ID NO: 2379075 - DNA, 25 bp, Homo sapien
gttgcagtcatactctgtataattg

SEQ ID NO: 2379076 - DNA, 25 bp, Homo sapien
ttgataatactgagtccatggatat

SEQ ID NO: 2379077 - DNA, 25 bp, Homo sapien
atactgagtccatggatatagaagc

SEQ ID NO: 2379078 - DNA, 25 bp, Homo sapien
atggatatagaagctgcggccaaca

SEQ ID NO: 2379079 - DNA, 25 bp, Homo sapien
ggatatagaagctgcggccaacaca

SEQ ID NO: 2379080 - DNA, 25 bp, Homo sapien
ataacataattggtcatagaaatct

SEQ ID NO: 2379081 - DNA, 25 bp, Homo sapien
taacataattggtcatagaaatctg

SEQ ID NO: 2379082 - DNA, 25 bp, Homo sapien
cataacataattggtcatagaaatc

SEQ ID NO: 2379083 - DNA, 25 bp, Homo sapien
aacataattggtcatagaaatctgt

SEQ ID NO: 2379084 - DNA, 25 bp, Homo sapien
taagcccttagcaacacactgagaa

SEQ ID NO: 2379085 - DNA, 25 bp, Homo sapien
aggctttgcatattctggtccaggg

SEQ ID NO: 2379086 - DNA, 25 bp, Homo sapien
aactataggctttgcatattctggt

SEQ ID NO: 2379087 - DNA, 25 bp, Homo sapien
caacagtaagcccttagcaacacac

SEQ ID NO: 2379088 - DNA, 25 bp, Homo sapien
tttaccaaaaatacagccaggcatg

SEQ ID NO: 2379089 - DNA, 25 bp, Homo sapien
tagagaagcatacaagactacaaca

SEQ ID NO: 2379090 - DNA, 25 bp, Homo sapien
catacaagactacaacaaatcactg

SEQ ID NO: 2379091 - DNA, 25 bp, Homo sapien
ctacaacaaatcactgaagtcaagg

SEQ ID NO: 2379092 - DNA, 25 bp, Homo sapien
agaagtcagatggaccggacgcagt

SEQ ID NO: 2379093 - DNA, 25 bp, Homo sapien
atgaattaaagtcacagggcactta

SEQ ID NO: 2379094 - DNA, 25 bp, Homo sapien
attaaagtcacagggcacttaataa

SEQ ID NO: 2379095 - DNA, 25 bp, Homo sapien
gaattaaagtcacagggcacttaat

SEQ ID NO: 2379096 - DNA, 25 bp, Homo sapien
taaagtcacagggcacttaataaaa

SEQ ID NO: 2379097 - DNA, 25 bp, Homo sapien
caggccagcgatgagaatattcatt

SEQ ID NO: 2379098 - DNA, 25 bp, Homo sapien
agttcaggccagcgatgagaatatt

SEQ ID NO: 2379099 - DNA, 25 bp, Homo sapien
ttcaggccagcgatgagaatattca

SEQ ID NO: 2379100 - DNA, 25 bp, Homo sapien
tcaggccagcgatgagaatattcat

SEQ ID NO: 2379101 - DNA, 25 bp, Homo sapien
tttctaacatttttgagttcttctc

SEQ ID NO: 2379102 - DNA, 25 bp, Homo sapien
atttctaacatttttgagttcttct

SEQ ID NO: 2379103 - DNA, 25 bp, Homo sapien
tcctatgactttaactaatttgtga

SEQ ID NO: 2379104 - DNA, 25 bp, Homo sapien
tcgccgcacgacgtggcggcagggc

SEQ ID NO: 2379105 - DNA, 25 bp, Homo sapien
ctgccgccacagcagtccgcgaggt

SEQ ID NO: 2379106 - DNA, 25 bp, Homo sapien
gcccgcacactcagccggtgcggcc

SEQ ID NO: 2379107 - DNA, 25 bp, Homo sapien
ccgaccaatggacgcccgaggttgt

SEQ ID NO: 2379108 - DNA, 25 bp, Homo sapien
ctcgtaggccgtgcccgactgcagg

SEQ ID NO: 2379109 - DNA, 25 bp, Homo sapien
gcctttctcgcccagggcgctgagg

SEQ ID NO: 2379110 - DNA, 25 bp, Homo sapien
ggcgctgaggcactcgtaggccgtg

SEQ ID NO: 2379111 - DNA, 25 bp, Homo sapien
tgaggcactcgtaggccgtgcccga

SEQ ID NO: 2379112 - DNA, 25 bp, Homo sapien
cacaacttttcttgagagcaatttg

SEQ ID NO: 2379113 - DNA, 25 bp, Homo sapien
cactcttgtatactattgaatgaaa

SEQ ID NO: 2379114 - DNA, 25 bp, Homo sapien
actgacacaacttttcttgagagca

SEQ ID NO: 2379115 - DNA, 25 bp, Homo sapien
agtttgggggatgtacactcttgta

SEQ ID NO: 2379116 - DNA, 25 bp, Homo sapien
atattcgctctagctcttcacacct

SEQ ID NO: 2379117 - DNA, 25 bp, Homo sapien
tagctcttcacacctcttcacctca

SEQ ID NO: 2379118 - DNA, 25 bp, Homo sapien
ttcacacctcttcacctcaccaaca

SEQ ID NO: 2379119 - DNA, 25 bp, Homo sapien
ccaatattcgctctagctcttcaca

SEQ ID NO: 2379120 - DNA, 25 bp, Homo sapien
aacctgtttcaggggtggcgcagga

SEQ ID NO: 2379121 - DNA, 25 bp, Homo sapien
ggaatatcagctctattaatttcct

SEQ ID NO: 2379122 - DNA, 25 bp, Homo sapien
gaatatcagctctattaatttcctg

SEQ ID NO: 2379123 - DNA, 25 bp, Homo sapien
tcaatggctgcaaccagcttcgtca

SEQ ID NO: 2379124 - DNA, 25 bp, Homo sapien
catgaaataagtaagtaagcagccc

SEQ ID NO: 2379125 - DNA, 25 bp, Homo sapien
taagcagcccccaagatcaatggct

SEQ ID NO: 2379126 - DNA, 25 bp, Homo sapien
cagaaaagcattagacaacatgaaa

SEQ ID NO: 2379127 - DNA, 25 bp, Homo sapien
ggacacatgtatccccagcacacca

SEQ ID NO: 2379128 - DNA, 25 bp, Homo sapien
cccgagacaacccatggactgcata

SEQ ID NO: 2379129 - DNA, 25 bp, Homo sapien
catggactgcataccagcttccaaa

SEQ ID NO: 2379130 - DNA, 25 bp, Homo sapien
tcagggtgacagaacgctgcttgct

SEQ ID NO: 2379131 - DNA, 25 bp, Homo sapien
aaaattcatgacaattggccaggcg

SEQ ID NO: 2379132 - DNA, 25 bp, Homo sapien
tcctagtctctagcatatgagttac

SEQ ID NO: 2379133 - DNA, 25 bp, Homo sapien
acatttacacaattaattgaggata

SEQ ID NO: 2379134 - DNA, 25 bp, Homo sapien
gagttactatgcactcacatttaca

SEQ ID NO: 2379135 - DNA, 25 bp, Homo sapien
gaagttcacaccacatattagctaa

SEQ ID NO: 2379136 - DNA, 25 bp, Homo sapien
tctgtgaagttcacaccacatatta

SEQ ID NO: 2379137 - DNA, 25 bp, Homo sapien
attccgaaggctgtgatgagcgtga

SEQ ID NO: 2379138 - DNA, 25 bp, Homo sapien
catattagctaaaacattccgaagg

SEQ ID NO: 2379139 - DNA, 25 bp, Homo sapien
gagtgtactctatcagttccagcaa

SEQ ID NO: 2379140 - DNA, 25 bp, Homo sapien
ccttgttcttagtgacttctctcag

SEQ ID NO: 2379141 - DNA, 25 bp, Homo sapien
gttcaacctcgagcttctgcaactg

SEQ ID NO: 2379142 - DNA, 25 bp, Homo sapien
ctcaacattgcgtttcacaaaggtc

SEQ ID NO: 2379143 - DNA, 25 bp, Homo sapien
tctatatgaactaatagcaaaatac

SEQ ID NO: 2379144 - DNA, 25 bp, Homo sapien
aaagaagcaacatatctatatgaac

SEQ ID NO: 2379145 - DNA, 25 bp, Homo sapien
acacagcctatgggaatgagatttt

SEQ ID NO: 2379146 - DNA, 25 bp, Homo sapien
gggaattcttcataagtgggttcaa

SEQ ID NO: 2379147 - DNA, 25 bp, Homo sapien
ggaattcttcataagtgggttcaaa

SEQ ID NO: 2379148 - DNA, 25 bp, Homo sapien
gagacagtaaagtcaacctgtagtc

SEQ ID NO: 2379149 - DNA, 25 bp, Homo sapien
tgtgagacagtaaagtcaacctgta

SEQ ID NO: 2379150 - DNA, 25 bp, Homo sapien
gacagtaaagtcaacctgtagtcaa

SEQ ID NO: 2379151 - DNA, 25 bp, Homo sapien
ctgtgagacagtaaagtcaacctgt

SEQ ID NO: 2379152 - DNA, 25 bp, Homo sapien
cagggtcttcaagggattcatccag

SEQ ID NO: 2379153 - DNA, 25 bp, Homo sapien
catccagttctgcataggacacgat

SEQ ID NO: 2379154 - DNA, 25 bp, Homo sapien
tgcagactctccacaacattttttc

SEQ ID NO: 2379155 - DNA, 25 bp, Homo sapien
cgatggtgtaccctttgcagactct

SEQ ID NO: 2379156 - DNA, 25 bp, Homo sapien
ttgtggccaatctgctctccccaaa

SEQ ID NO: 2379157 - DNA, 25 bp, Homo sapien
ccttgtggccaatctgctctcccca

SEQ ID NO: 2379158 - DNA, 25 bp, Homo sapien
taaccttgtggccaatctgctctcc

SEQ ID NO: 2379159 - DNA, 25 bp, Homo sapien
tcttaaccttgtggccaatctgctc

SEQ ID NO: 2379160 - DNA, 25 bp, Homo sapien
tccgctcctcggctgtgtttggata

SEQ ID NO: 2379161 - DNA, 25 bp, Homo sapien
tagagatcctggatgcgggtgttca

SEQ ID NO: 2379162 - DNA, 25 bp, Homo sapien
tttggataggggtacacgtggcagt

SEQ ID NO: 2379163 - DNA, 25 bp, Homo sapien
ggatgcgggtgttcagcccctcctg

SEQ ID NO: 2379164 - DNA, 25 bp, Homo sapien
gcacttgcctcaaatagtcctcggt

SEQ ID NO: 2379165 - DNA, 25 bp, Homo sapien
gatcacacggctgtagacagactcg

SEQ ID NO: 2379166 - DNA, 25 bp, Homo sapien
gggacaccagacctcagcaatgagg

SEQ ID NO: 2379167 - DNA, 25 bp, Homo sapien
cagactcggcggctttacatagcac

SEQ ID NO: 2379168 - DNA, 25 bp, Homo sapien
tgaatttatcagttccatcagtctc

SEQ ID NO: 2379169 - DNA, 25 bp, Homo sapien
aatttatcagttccatcagtctctc

SEQ ID NO: 2379170 - DNA, 25 bp, Homo sapien
atcagttccatcagtctctcttctg

SEQ ID NO: 2379171 - DNA, 25 bp, Homo sapien
ttatcagttccatcagtctctcttc

SEQ ID NO: 2379172 - DNA, 25 bp, Homo sapien
gcattctcattactctatgaaattc

SEQ ID NO: 2379173 - DNA, 25 bp, Homo sapien
aaaacaaaagaagagtcaacacact

SEQ ID NO: 2379174 - DNA, 25 bp, Homo sapien
caacacactgcattctcattactct

SEQ ID NO: 2379175 - DNA, 25 bp, Homo sapien
caaaagaagagtcaacacactgcat

SEQ ID NO: 2379176 - DNA, 25 bp, Homo sapien
gaatgaattactcaaaagagcaatt

SEQ ID NO: 2379177 - DNA, 25 bp, Homo sapien
gaatgaccagctcaccataatttca

SEQ ID NO: 2379178 - DNA, 25 bp, Homo sapien
cacatgtactcacatacagctttga

SEQ ID NO: 2379179 - DNA, 25 bp, Homo sapien
gtactcacatacagctttgaatgac

SEQ ID NO: 2379180 - DNA, 25 bp, Homo sapien
aagcggaaactacctaaatgaccag

SEQ ID NO: 2379181 - DNA, 25 bp, Homo sapien
tccccttcactcacaatgagagaaa

SEQ ID NO: 2379182 - DNA, 25 bp, Homo sapien
tgagagaaatacaatagctgacaac

SEQ ID NO: 2379183 - DNA, 25 bp, Homo sapien
gaatttaccctacaaatagatttga

SEQ ID NO: 2379184 - DNA, 25 bp, Homo sapien
tcagtaaaagaagaatcatctgtgt

SEQ ID NO: 2379185 - DNA, 25 bp, Homo sapien
ctcagtaaaagaagaatcatctgtg

SEQ ID NO: 2379186 - DNA, 25 bp, Homo sapien
tgaggaaaccaccaacagctacaag

SEQ ID NO: 2379187 - DNA, 25 bp, Homo sapien
tgcaaccagctagcaagacctaaag

SEQ ID NO: 2379188 - DNA, 25 bp, Homo sapien
gacctaaagcctacggatggcattt

SEQ ID NO: 2379189 - DNA, 25 bp, Homo sapien
aagtaagcaatgtggcctccaaggg

SEQ ID NO: 2379190 - DNA, 25 bp, Homo sapien
aggggattgtagcaccactctctct

SEQ ID NO: 2379191 - DNA, 25 bp, Homo sapien
gaatgaggggattgtagcaccactc

SEQ ID NO: 2379192 - DNA, 25 bp, Homo sapien
aatgaggggattgtagcaccactct

SEQ ID NO: 2379193 - DNA, 25 bp, Homo sapien
tgaggggattgtagcaccactctct

SEQ ID NO: 2379194 - DNA, 25 bp, Homo sapien
tcggtgaatttgttggtgcggatcc

SEQ ID NO: 2379195 - DNA, 25 bp, Homo sapien
tgaatttgttggtgcggatccgagt

SEQ ID NO: 2379196 - DNA, 25 bp, Homo sapien
tgaaatccctcggtgaatttgttgg

SEQ ID NO: 2379197 - DNA, 25 bp, Homo sapien
ccctcggtgaatttgttggtgcgga

SEQ ID NO: 2379198 - DNA, 25 bp, Homo sapien
ctctgtagcttccgactccataagc

SEQ ID NO: 2379199 - DNA, 25 bp, Homo sapien
tgtagcttccgactccataagcatc

SEQ ID NO: 2379200 - DNA, 25 bp, Homo sapien
ttctctgtagcttccgactccataa

SEQ ID NO: 2379201 - DNA, 25 bp, Homo sapien
ctgtagcttccgactccataagcat

SEQ ID NO: 2379202 - DNA, 25 bp, Homo sapien
tcatttaacaccaacaagagggcaa

SEQ ID NO: 2379203 - DNA, 25 bp, Homo sapien
ctcttgtgactgatttagtctggga

SEQ ID NO: 2379204 - DNA, 25 bp, Homo sapien
acaaagccatgtccgaagtctccaa

SEQ ID NO: 2379205 - DNA, 25 bp, Homo sapien
catcacagcaaataaaaacgggaag

SEQ ID NO: 2379206 - DNA, 25 bp, Homo sapien
ttgaaaagcagtcgttgtagatgag

SEQ ID NO: 2379207 - DNA, 25 bp, Homo sapien
cacccagagccgaacaggttgactg

SEQ ID NO: 2379208 - DNA, 25 bp, Homo sapien
tcttcttatgctctgcgggtgggtg

SEQ ID NO: 2379209 - DNA, 25 bp, Homo sapien
agctgtacatggccgacacgttcca

SEQ ID NO: 2379210 - DNA, 25 bp, Homo sapien
gggataagggcctcggaacactcca

SEQ ID NO: 2379211 - DNA, 25 bp, Homo sapien
taagggcctcggaacactccaggaa

SEQ ID NO: 2379212 - DNA, 25 bp, Homo sapien
aggatcaatgccaaggggataaggg

SEQ ID NO: 2379213 - DNA, 25 bp, Homo sapien
gctgttgtgtctaacgacgctgtca

SEQ ID NO: 2379214 - DNA, 25 bp, Homo sapien
gaatgattcctaaaatcacggacat

SEQ ID NO: 2379215 - DNA, 25 bp, Homo sapien
agtggttaaatattcccagaatgac

SEQ ID NO: 2379216 - DNA, 25 bp, Homo sapien
gaggcgatttgtggccaagttccaa

SEQ ID NO: 2379217 - DNA, 25 bp, Homo sapien
tgaaagagtttagaaaagtgaggcg

SEQ ID NO: 2379218 - DNA, 25 bp, Homo sapien
taaattcaatcagaatgctgggagc

SEQ ID NO: 2379219 - DNA, 25 bp, Homo sapien
gtttctgctgaaaaaaccagccact

SEQ ID NO: 2379220 - DNA, 25 bp, Homo sapien
tgggagcaactctggaggtttctgc

SEQ ID NO: 2379221 - DNA, 25 bp, Homo sapien
tacagagcatgaagagaagttccgg

SEQ ID NO: 2379222 - DNA, 25 bp, Homo sapien
cacagaaaatcgtggaagagaattc

SEQ ID NO: 2379223 - DNA, 25 bp, Homo sapien
tgaggactatgagtgtgaatcagca

SEQ ID NO: 2379224 - DNA, 25 bp, Homo sapien
tgatgattataaagaccgtctgagg

SEQ ID NO: 2379225 - DNA, 25 bp, Homo sapien
tgaatcagcaagtggatttacctcc

SEQ ID NO: 2379226 - DNA, 25 bp, Homo sapien
agggacagacaatgctgtgacaacc

SEQ ID NO: 2379227 - DNA, 25 bp, Homo sapien
gcccattgtgaagccacaacaaaaa

SEQ ID NO: 2379228 - DNA, 25 bp, Homo sapien
tgtgacaaccagcagcactctctgg

SEQ ID NO: 2379229 - DNA, 25 bp, Homo sapien
cccgaagcaactacgcccattgtga

SEQ ID NO: 2379230 - DNA, 25 bp, Homo sapien
gcacagagtcagtgcctgtaaaacc

SEQ ID NO: 2379231 - DNA, 25 bp, Homo sapien
gagtcagtgcctgtaaaaccacaag

SEQ ID NO: 2379232 - DNA, 25 bp, Homo sapien
cagagtcagtgcctgtaaaaccaca

SEQ ID NO: 2379233 - DNA, 25 bp, Homo sapien
cacagagtcagtgcctgtaaaacca

SEQ ID NO: 2379234 - DNA, 25 bp, Homo sapien
ctatctttccttataagtgtgtagc

SEQ ID NO: 2379235 - DNA, 25 bp, Homo sapien
atcttggcttcccagcaatgaaact

SEQ ID NO: 2379236 - DNA, 25 bp, Homo sapien
tatctttccttataagtgtgtagcc

SEQ ID NO: 2379237 - DNA, 25 bp, Homo sapien
ccctcttctatatcttggcttccca

SEQ ID NO: 2379238 - DNA, 25 bp, Homo sapien
gctggatgctggtaagaacacgcta

SEQ ID NO: 2379239 - DNA, 25 bp, Homo sapien
gaaggtagaccagaggaactgccgt

SEQ ID NO: 2379240 - DNA, 25 bp, Homo sapien
cattctaagtagagccaaccaggga

SEQ ID NO: 2379241 - DNA, 25 bp, Homo sapien
gattacaatgaaagagctgccggct

SEQ ID NO: 2379242 - DNA, 25 bp, Homo sapien
gtgcgtgagccaggctaagcgccca

SEQ ID NO: 2379243 - DNA, 25 bp, Homo sapien
cgtgagccaggctaagcgcccagag

SEQ ID NO: 2379244 - DNA, 25 bp, Homo sapien
gacagtactcgatggaatggattac

SEQ ID NO: 2379245 - DNA, 25 bp, Homo sapien
tgcatcccagacagtactcgatgga

SEQ ID NO: 2379246 - DNA, 25 bp, Homo sapien
caaagttaaaatatcccacagtgcc

SEQ ID NO: 2379247 - DNA, 25 bp, Homo sapien
gagtctgctggcactacagggcatt

SEQ ID NO: 2379248 - DNA, 25 bp, Homo sapien
tagtgtaagttcacgtggcagctga

SEQ ID NO: 2379249 - DNA, 25 bp, Homo sapien
gcagctgaaagatggtgctatgact

SEQ ID NO: 2379250 - DNA, 25 bp, Homo sapien
tggcctgtcctattcttttctacgt

SEQ ID NO: 2379251 - DNA, 25 bp, Homo sapien
tttgcacaaaccttcaacgtcctga

SEQ ID NO: 2379252 - DNA, 25 bp, Homo sapien
aaacattgccgagcaccactggtgg

SEQ ID NO: 2379253 - DNA, 25 bp, Homo sapien
tctacgtctgaacccacttgcaaca

SEQ ID NO: 2379254 - DNA, 25 bp, Homo sapien
agtgcagcctgcacaggtcatgctc

SEQ ID NO: 2379255 - DNA, 25 bp, Homo sapien
tgagctacctggactgagtttcccc

SEQ ID NO: 2379256 - DNA, 25 bp, Homo sapien
ctcgcttatgtacagtgggtccctc

SEQ ID NO: 2379257 - DNA, 25 bp, Homo sapien
ggccctgaactattatcccataaaa

SEQ ID NO: 2379258 - DNA, 25 bp, Homo sapien
aaactgcaaagagcgcgataaccgg

SEQ ID NO: 2379259 - DNA, 25 bp, Homo sapien
acgccataggtggtgtcaacgcgga

SEQ ID NO: 2379260 - DNA, 25 bp, Homo sapien
cgataaccgggagcagtagcaagac

SEQ ID NO: 2379261 - DNA, 25 bp, Homo sapien
cgtgaagaaacgcagaaagcccttc

SEQ ID NO: 2379262 - DNA, 25 bp, Homo sapien
ctgcaccaacgtagaatttgttctg

SEQ ID NO: 2379263 - DNA, 25 bp, Homo sapien
tgtcgtcgttattgaactttgatga

SEQ ID NO: 2379264 - DNA, 25 bp, Homo sapien
tttggtgcctgcaccaacgtagaat

SEQ ID NO: 2379265 - DNA, 25 bp, Homo sapien
tgatgaaagtagactgaatgagaaa

SEQ ID NO: 2379266 - DNA, 25 bp, Homo sapien
tgccttgaaatcagctgcacagcca

SEQ ID NO: 2379267 - DNA, 25 bp, Homo sapien
tacttgtaattctaggtagcacagg

SEQ ID NO: 2379268 - DNA, 25 bp, Homo sapien
aagtgccaagctctctacctcgaaa

SEQ ID NO: 2379269 - DNA, 25 bp, Homo sapien
gtcacggctgtgtcaacgctgttca

SEQ ID NO: 2379270 - DNA, 25 bp, Homo sapien
cagtaagtccaaactggccttgggt

SEQ ID NO: 2379271 - DNA, 25 bp, Homo sapien
agtccaaactggccttgggtaacat

SEQ ID NO: 2379272 - DNA, 25 bp, Homo sapien
tgataatttaatatgagggacaaaa

SEQ ID NO: 2379273 - DNA, 25 bp, Homo sapien
tgaccacggcaattacagtctccag

SEQ ID NO: 2379274 - DNA, 25 bp, Homo sapien
cagcattcagcgaaagaggagttcc

SEQ ID NO: 2379275 - DNA, 25 bp, Homo sapien
actggagcccatcgctttatagaga

SEQ ID NO: 2379276 - DNA, 25 bp, Homo sapien
gataactctggtaacatgacactgg

SEQ ID NO: 2379277 - DNA, 25 bp, Homo sapien
catggacatcgtaaggctgacctat

SEQ ID NO: 2379278 - DNA, 25 bp, Homo sapien
ggatatattccctgtggcacgcaag

SEQ ID NO: 2379279 - DNA, 25 bp, Homo sapien
gcaaaaatggcctgactgtgggaag

SEQ ID NO: 2379280 - DNA, 25 bp, Homo sapien
tcccatcaaagaacaggtggagtgt

SEQ ID NO: 2379281 - DNA, 25 bp, Homo sapien
ggcgccgcgcagtgcagagggagcc

SEQ ID NO: 2379282 - DNA, 25 bp, Homo sapien
gcgcagtgcagagggagccgggcgc

SEQ ID NO: 2379283 - DNA, 25 bp, Homo sapien
gcgggcgtccgtggcaacggcggcc

SEQ ID NO: 2379284 - DNA, 25 bp, Homo sapien
cagggcgggcgtccgtggcaacggc

SEQ ID NO: 2379285 - DNA, 25 bp, Homo sapien
ttgagcaggtcctcgaaaagctggg

SEQ ID NO: 2379286 - DNA, 25 bp, Homo sapien
tgcaagatgaggtcctcgccctggc

SEQ ID NO: 2379287 - DNA, 25 bp, Homo sapien
tcggtgatgccgaaagccgcataca

SEQ ID NO: 2379288 - DNA, 25 bp, Homo sapien
catagtgcggtagatgaagagcgcc

SEQ ID NO: 2379289 - DNA, 25 bp, Homo sapien
ccctcttcagacaggacaggtatct

SEQ ID NO: 2379290 - DNA, 25 bp, Homo sapien
tccactttttgagaataagtctctt

SEQ ID NO: 2379291 - DNA, 25 bp, Homo sapien
tcttcagacaggacaggtatctcat

SEQ ID NO: 2379292 - DNA, 25 bp, Homo sapien
tccacggactccactttttgagaat

SEQ ID NO: 2379293 - DNA, 25 bp, Homo sapien
tagaggttggcctagagattcggtt

SEQ ID NO: 2379294 - DNA, 25 bp, Homo sapien
tcatcctctctgtttagaggttggc

SEQ ID NO: 2379295 - DNA, 25 bp, Homo sapien
tcctctctgtttagaggttggccta

SEQ ID NO: 2379296 - DNA, 25 bp, Homo sapien
tggcctagagattcggttctcagtg

SEQ ID NO: 2379297 - DNA, 25 bp, Homo sapien
tcgggaagaggggtacagagcatgt

SEQ ID NO: 2379298 - DNA, 25 bp, Homo sapien
tttccatgatgtgcttcgcagttct

SEQ ID NO: 2379299 - DNA, 25 bp, Homo sapien
tggagatgcatcttttccatgatgt

SEQ ID NO: 2379300 - DNA, 25 bp, Homo sapien
ggtacagagcatgtggagatgcatc

SEQ ID NO: 2379301 - DNA, 25 bp, Homo sapien
tggtatttctgaggaaaaacaccac

SEQ ID NO: 2379302 - DNA, 25 bp, Homo sapien
ttggtatttctgaggaaaaacacca

SEQ ID NO: 2379303 - DNA, 25 bp, Homo sapien
tcccaagctgctacaaggaatgttc

SEQ ID NO: 2379304 - DNA, 25 bp, Homo sapien
ccaatgcactgtggttcgtggatta

SEQ ID NO: 2379305 - DNA, 25 bp, Homo sapien
gattagtatgaacagtgcacaagag

SEQ ID NO: 2379306 - DNA, 25 bp, Homo sapien
gagctgcacacatttgctgatctgg

SEQ ID NO: 2379307 - DNA, 25 bp, Homo sapien
catgtcggtagcttcagagattgcc

SEQ ID NO: 2379308 - DNA, 25 bp, Homo sapien
taattccatactccagtgtttctgg

SEQ ID NO: 2379309 - DNA, 25 bp, Homo sapien
ttcatgtcggtagcttcagagattg

SEQ ID NO: 2379310 - DNA, 25 bp, Homo sapien
aatggagcacattagcgtttataat

SEQ ID NO: 2379311 - DNA, 25 bp, Homo sapien
gagcctaaataaccatcacccttga

SEQ ID NO: 2379312 - DNA, 25 bp, Homo sapien
agatcccggtcattagcaagtccca

SEQ ID NO: 2379313 - DNA, 25 bp, Homo sapien
gcaaccttcccgtctagaatgcaaa

SEQ ID NO: 2379314 - DNA, 25 bp, Homo sapien
gtggcatgaccaccatactctgcaa

SEQ ID NO: 2379315 - DNA, 25 bp, Homo sapien
ctgattgaaggacaatgctggcaaa

SEQ ID NO: 2379316 - DNA, 25 bp, Homo sapien
attgaaggacaatgctggcaaaaaa

SEQ ID NO: 2379317 - DNA, 25 bp, Homo sapien
tgaaggacaatgctggcaaaaaaac

SEQ ID NO: 2379318 - DNA, 25 bp, Homo sapien
gattgaaggacaatgctggcaaaaa

SEQ ID NO: 2379319 - DNA, 25 bp, Homo sapien
gaggaattagagacttctccagatg

SEQ ID NO: 2379320 - DNA, 25 bp, Homo sapien
gactcccacggttgtactcgtcctg

SEQ ID NO: 2379321 - DNA, 25 bp, Homo sapien
tccagatgtgactcccacggttgta

SEQ ID NO: 2379322 - DNA, 25 bp, Homo sapien
aggtctgattcatgctcagaggaat

SEQ ID NO: 2379323 - DNA, 25 bp, Homo sapien
ctgtgatattctactgcctccccag

SEQ ID NO: 2379324 - DNA, 25 bp, Homo sapien
gatattctactgcctccccaggcat

SEQ ID NO: 2379325 - DNA, 25 bp, Homo sapien
tgtgatattctactgcctccccagg

SEQ ID NO: 2379326 - DNA, 25 bp, Homo sapien
gtgatattctactgcctccccaggc

SEQ ID NO: 2379327 - DNA, 25 bp, Homo sapien
caagttgctgcatggttctttgaat

SEQ ID NO: 2379328 - DNA, 25 bp, Homo sapien
ttacttgcaaatttctgcacgttca

SEQ ID NO: 2379329 - DNA, 25 bp, Homo sapien
gcaaatttctgcacgttcattaaaa

SEQ ID NO: 2379330 - DNA, 25 bp, Homo sapien
aaaattcatcccgtattaattgaat

SEQ ID NO: 2379331 - DNA, 25 bp, Homo sapien
ggtttccgggtcagctgccaggtca

SEQ ID NO: 2379332 - DNA, 25 bp, Homo sapien
gctccaagatgtcaacggtttccgg

SEQ ID NO: 2379333 - DNA, 25 bp, Homo sapien
ggcctcaaccgctgtggatatctga

SEQ ID NO: 2379334 - DNA, 25 bp, Homo sapien
tgtcttcttcagttgggcctcaacc

SEQ ID NO: 2379335 - DNA, 25 bp, Homo sapien
tagccacaagcatggagtcggattc

SEQ ID NO: 2379336 - DNA, 25 bp, Homo sapien
gagaaagcgcacattgtctgaggcc

SEQ ID NO: 2379337 - DNA, 25 bp, Homo sapien
gaataactcggtgaacactggctgc

SEQ ID NO: 2379338 - DNA, 25 bp, Homo sapien
tctgaggcctccgtgtggaacttga

SEQ ID NO: 2379339 - DNA, 25 bp, Homo sapien
cagactctctcagcgatttcccagg

SEQ ID NO: 2379340 - DNA, 25 bp, Homo sapien
gtggaagccagacccgtgcgttatg

SEQ ID NO: 2379341 - DNA, 25 bp, Homo sapien
gaacaaagtccgcaggttgaccact

SEQ ID NO: 2379342 - DNA, 25 bp, Homo sapien
tttcccaggcgatgcgctccatgag

SEQ ID NO: 2379343 - DNA, 25 bp, Homo sapien
tttttccacagcctgagggtgttcc

SEQ ID NO: 2379344 - DNA, 25 bp, Homo sapien
tcttggcccgggtgtcaaaataggc

SEQ ID NO: 2379345 - DNA, 25 bp, Homo sapien
gatggtggccatataatccgtcctc

SEQ ID NO: 2379346 - DNA, 25 bp, Homo sapien
gctttgggcactcgctcgattttct

SEQ ID NO: 2379347 - DNA, 25 bp, Homo sapien
cgtccactctgcataggacatcatc

SEQ ID NO: 2379348 - DNA, 25 bp, Homo sapien
tgggggtgactaggccgtccactct

SEQ ID NO: 2379349 - DNA, 25 bp, Homo sapien
cttgatgctgaaggggtcaaaggtc

SEQ ID NO: 2379350 - DNA, 25 bp, Homo sapien
tgcctttagttctggaccaaatatg

SEQ ID NO: 2379351 - DNA, 25 bp, Homo sapien
aacacagagaaaacatggtgtcgac

SEQ ID NO: 2379352 - DNA, 25 bp, Homo sapien
taacacagagaaaacatggtgtcga

SEQ ID NO: 2379353 - DNA, 25 bp, Homo sapien
ttaacacagagaaaacatggtgtcg

SEQ ID NO: 2379354 - DNA, 25 bp, Homo sapien
cctcccgtgaacgaatgtgcttaaa

SEQ ID NO: 2379355 - DNA, 25 bp, Homo sapien
gctgcttcagcagatcgaagcgtct

SEQ ID NO: 2379356 - DNA, 25 bp, Homo sapien
tttgtcgattaacagcctcccgtga

SEQ ID NO: 2379357 - DNA, 25 bp, Homo sapien
ttacagtactgtgcaagaatatcat

SEQ ID NO: 2379358 - DNA, 25 bp, Homo sapien
caattgttcacattttgccaagtgt

SEQ ID NO: 2379359 - DNA, 25 bp, Homo sapien
gctatggcagctatcgatttttcaa

SEQ ID NO: 2379360 - DNA, 25 bp, Homo sapien
gaaagacagacaatagtgggattca

SEQ ID NO: 2379361 - DNA, 25 bp, Homo sapien
cgggttacgtgtattacgtaacatg

SEQ ID NO: 2379362 - DNA, 25 bp, Homo sapien
taaacatcgccaggttagccaagaa

SEQ ID NO: 2379363 - DNA, 25 bp, Homo sapien
gataaacatcgccaggttagccaag

SEQ ID NO: 2379364 - DNA, 25 bp, Homo sapien
taagtgataaacatcgccaggttag

SEQ ID NO: 2379365 - DNA, 25 bp, Homo sapien
acatcgccaggttagccaagaaaga

SEQ ID NO: 2379366 - DNA, 25 bp, Homo sapien
gacaaagattttattaatgatgtca

SEQ ID NO: 2379367 - DNA, 25 bp, Homo sapien
caaagattttattaatgatgtcaat

SEQ ID NO: 2379368 - DNA, 25 bp, Homo sapien
ctggacaaagattttattaatgatg

SEQ ID NO: 2379369 - DNA, 25 bp, Homo sapien
ggacaaagattttattaatgatgtc

SEQ ID NO: 2379370 - DNA, 25 bp, Homo sapien
tatattgcacctgctactggagggt

SEQ ID NO: 2379371 - DNA, 25 bp, Homo sapien
agagatcgttcccagtatattgcac

SEQ ID NO: 2379372 - DNA, 25 bp, Homo sapien
gatggtatgcttaatccgaaagaac

SEQ ID NO: 2379373 - DNA, 25 bp, Homo sapien
ctcttgaaatcggaggatggtatgc

SEQ ID NO: 2379374 - DNA, 25 bp, Homo sapien
tactttctgtcttcatactccttca

SEQ ID NO: 2379375 - DNA, 25 bp, Homo sapien
tcttcatgagagctggcagcacctg

SEQ ID NO: 2379376 - DNA, 25 bp, Homo sapien
tgctccgtcacctccatccactgct

SEQ ID NO: 2379377 - DNA, 25 bp, Homo sapien
tggtcaaaaggctcttcttcatgag

SEQ ID NO: 2379378 - DNA, 25 bp, Homo sapien
ggcaatcgggaatgagggcgtgggc

SEQ ID NO: 2379379 - DNA, 25 bp, Homo sapien
cggcaatcgggaatgagggcgtggg

SEQ ID NO: 2379380 - DNA, 25 bp, Homo sapien
gcaatcgggaatgagggcgtgggca

SEQ ID NO: 2379381 - DNA, 25 bp, Homo sapien
gcggcaatcgggaatgagggcgtgg

SEQ ID NO: 2379382 - DNA, 25 bp, Homo sapien
cggccagggcagtccaagagacagt

SEQ ID NO: 2379383 - DNA, 25 bp, Homo sapien
gcgcggccagggcagtccaagagac

SEQ ID NO: 2379384 - DNA, 25 bp, Homo sapien
ggccagggcagtccaagagacagtt

SEQ ID NO: 2379385 - DNA, 25 bp, Homo sapien
cgcggccagggcagtccaagagaca

SEQ ID NO: 2379386 - DNA, 25 bp, Homo sapien
ctaaagtcgaaggctcctctgtggc

SEQ ID NO: 2379387 - DNA, 25 bp, Homo sapien
aaagtcgaaggctcctctgtggcga

SEQ ID NO: 2379388 - DNA, 25 bp, Homo sapien
taaagtcgaaggctcctctgtggcg

SEQ ID NO: 2379389 - DNA, 25 bp, Homo sapien
tctctgagagccggtgaaaagttga

SEQ ID NO: 2379390 - DNA, 25 bp, Homo sapien
ctgagagccggtgaaaagttgattg

SEQ ID NO: 2379391 - DNA, 25 bp, Homo sapien
gaatttgtcttcctggagagcaaca

SEQ ID NO: 2379392 - DNA, 25 bp, Homo sapien
ctctgagagccggtgaaaagttgat

SEQ ID NO: 2379393 - DNA, 25 bp, Homo sapien
taaacactcggagcagttcctggga

SEQ ID NO: 2379394 - DNA, 25 bp, Homo sapien
cctatgagcatgtgataatgatcca

SEQ ID NO: 2379395 - DNA, 25 bp, Homo sapien
taatgatccaacatgcgctgtatcc

SEQ ID NO: 2379396 - DNA, 25 bp, Homo sapien
tttgagaagcacagactccgcatcg

SEQ ID NO: 2379397 - DNA, 25 bp, Homo sapien
tgcaaccagttatatagtcaccgat

SEQ ID NO: 2379398 - DNA, 25 bp, Homo sapien
tatgaatctggtggacgagagactc

SEQ ID NO: 2379399 - DNA, 25 bp, Homo sapien
gcctctattaatgtcagcctggaag

SEQ ID NO: 2379400 - DNA, 25 bp, Homo sapien
tcccaatggcctgtttgcaaccagt

SEQ ID NO: 2379401 - DNA, 25 bp, Homo sapien
tcagcagtggtccaatggcaagata

SEQ ID NO: 2379402 - DNA, 25 bp, Homo sapien
tgttggtgtggacgaccaggccctc

SEQ ID NO: 2379403 - DNA, 25 bp, Homo sapien
tggcaagataccaccggaccatgtg

SEQ ID NO: 2379404 - DNA, 25 bp, Homo sapien
gctggccctttctcgctcaatgtgt

SEQ ID NO: 2379405 - DNA, 25 bp, Homo sapien
gcacatcttgtcgatctcatttgtg

SEQ ID NO: 2379406 - DNA, 25 bp, Homo sapien
tggtgatctccacgcaattccggac

SEQ ID NO: 2379407 - DNA, 25 bp, Homo sapien
tcaggtgccgtcagaatggtttcag

SEQ ID NO: 2379408 - DNA, 25 bp, Homo sapien
tccggacacaatggaagcacatctt

SEQ ID NO: 2379409 - DNA, 25 bp, Homo sapien
tatcatttccacttagtagaggagg

SEQ ID NO: 2379410 - DNA, 25 bp, Homo sapien
ccaacagcacgcactagaaggtgaa

SEQ ID NO: 2379411 - DNA, 25 bp, Homo sapien
gagctactgattgccaaacactgca

SEQ ID NO: 2379412 - DNA, 25 bp, Homo sapien
tttttgccacgaaataggaatcctg

SEQ ID NO: 2379413 - DNA, 25 bp, Homo sapien
gcagctgccattcatccaacgaaca

SEQ ID NO: 2379414 - DNA, 25 bp, Homo sapien
ttattataacaacttcctcttcctc

SEQ ID NO: 2379415 - DNA, 25 bp, Homo sapien
cttctgaggtgggcattctatgcag

SEQ ID NO: 2379416 - DNA, 25 bp, Homo sapien
tcagagagatatcattgtaaaagtt

SEQ ID NO: 2379417 - DNA, 25 bp, Homo sapien
gggtggcgcataacctcataagcta

SEQ ID NO: 2379418 - DNA, 25 bp, Homo sapien
caatttccagagaggtcgataccgc

SEQ ID NO: 2379419 - DNA, 25 bp, Homo sapien
tcatcatatgctacacaaggaggtt

SEQ ID NO: 2379420 - DNA, 25 bp, Homo sapien
tgtttgccagatgcctgagctgaag

SEQ ID NO: 2379421 - DNA, 25 bp, Homo sapien
cagtaatggcgcaaatgaagaccca

SEQ ID NO: 2379422 - DNA, 25 bp, Homo sapien
agaaaaaacagtaatggcgcaaatg

SEQ ID NO: 2379423 - DNA, 25 bp, Homo sapien
tggcgcaaatgaagacccaacttac

SEQ ID NO: 2379424 - DNA, 25 bp, Homo sapien
atgaagacccaacttacacgaaaag

SEQ ID NO: 2379425 - DNA, 25 bp, Homo sapien
tctgcaattgttgcaaggacaaact

SEQ ID NO: 2379426 - DNA, 25 bp, Homo sapien
catggtacggtatcgctcctggacg

SEQ ID NO: 2379427 - DNA, 25 bp, Homo sapien
gacgtccctatatctgagttccatg

SEQ ID NO: 2379428 - DNA, 25 bp, Homo sapien
gaggttatacattgccatggtacgg

SEQ ID NO: 2379429 - DNA, 25 bp, Homo sapien
tattctaaataacagtggcattgct

SEQ ID NO: 2379430 - DNA, 25 bp, Homo sapien
tcaatggcagtatacttgagaagca

SEQ ID NO: 2379431 - DNA, 25 bp, Homo sapien
ccatttgagccatacagattgaaaa

SEQ ID NO: 2379432 - DNA, 25 bp, Homo sapien
catttctgaaaagggtcgttagtgg

SEQ ID NO: 2379433 - DNA, 25 bp, Homo sapien
ttctctttatgtccccaagagcatg

SEQ ID NO: 2379434 - DNA, 25 bp, Homo sapien
ttggaccatatgctctcaatcttat

SEQ ID NO: 2379435 - DNA, 25 bp, Homo sapien
cacattcactgaatcattaaacaga

SEQ ID NO: 2379436 - DNA, 25 bp, Homo sapien
gctctcaatcttatcaaccagttct

SEQ ID NO: 2379437 - DNA, 25 bp, Homo sapien
aactcctctatctgaactctgtagt

SEQ ID NO: 2379438 - DNA, 25 bp, Homo sapien
tttgcaaactcctctatctgaactc

SEQ ID NO: 2379439 - DNA, 25 bp, Homo sapien
caagatcatcaccaacagaaccagg

SEQ ID NO: 2379440 - DNA, 25 bp, Homo sapien
ctgtagttcattatttcgcctcgag

SEQ ID NO: 2379441 - DNA, 25 bp, Homo sapien
cagcagctctgggtacattgtaata

SEQ ID NO: 2379442 - DNA, 25 bp, Homo sapien
tagagctcgtaaatcatcctcagcc

SEQ ID NO: 2379443 - DNA, 25 bp, Homo sapien
gaaaagtttctcagcgttagccagt

SEQ ID NO: 2379444 - DNA, 25 bp, Homo sapien
agttcctgacggctcttttcatgtc

SEQ ID NO: 2379445 - DNA, 25 bp, Homo sapien
caaacaagaggttgactacaaggat

SEQ ID NO: 2379446 - DNA, 25 bp, Homo sapien
caagaggttgactacaaggatctaa

SEQ ID NO: 2379447 - DNA, 25 bp, Homo sapien
aaattcacaaacaagaggttgacta

SEQ ID NO: 2379448 - DNA, 25 bp, Homo sapien
ggttgactacaaggatctaaaacaa

SEQ ID NO: 2379449 - DNA, 25 bp, Homo sapien
ctggaaacgtgcaaggaacagctcc

SEQ ID NO: 2379450 - DNA, 25 bp, Homo sapien
ttagtgcctcgtttttcaagtcaag

SEQ ID NO: 2379451 - DNA, 25 bp, Homo sapien
tcactgataagccacggactggccg

SEQ ID NO: 2379452 - DNA, 25 bp, Homo sapien
cacattcaggttgatccaaagggtc

SEQ ID NO: 2379453 - DNA, 25 bp, Homo sapien
gactggccgaggtagctttctgaga

SEQ ID NO: 2379454 - DNA, 25 bp, Homo sapien
tgtgacaatctcattgagaacatct

SEQ ID NO: 2379455 - DNA, 25 bp, Homo sapien
caatggcaacctccttgattgctgc

SEQ ID NO: 2379456 - DNA, 25 bp, Homo sapien
caaggtgaacgtttcggtcatttca

SEQ ID NO: 2379457 - DNA, 25 bp, Homo sapien
atggcaacctccttgattgctgctg

SEQ ID NO: 2379458 - DNA, 25 bp, Homo sapien
tgacttcccctattagagaaagcgt

SEQ ID NO: 2379459 - DNA, 25 bp, Homo sapien
tttcgtcaacagaacccaggatgta

SEQ ID NO: 2379460 - DNA, 25 bp, Homo sapien
aggatgtagcctcgctcctgtgtgc

SEQ ID NO: 2379461 - DNA, 25 bp, Homo sapien
gaaagtgttgtcatcaagagactga

SEQ ID NO: 2379462 - DNA, 25 bp, Homo sapien
tgtgatcttatatctccaccaataa

SEQ ID NO: 2379463 - DNA, 25 bp, Homo sapien
tcttccggaagttgtgatcttatat

SEQ ID NO: 2379464 - DNA, 25 bp, Homo sapien
gatcttatatctccaccaataaaaa

SEQ ID NO: 2379465 - DNA, 25 bp, Homo sapien
gaagttgtgatcttatatctccacc

SEQ ID NO: 2379466 - DNA, 25 bp, Homo sapien
gaatgctaagcaactcatcgtcaga

SEQ ID NO: 2379467 - DNA, 25 bp, Homo sapien
caggccctcgctgacgttctgtagg

SEQ ID NO: 2379468 - DNA, 25 bp, Homo sapien
tgatcatgtgctcctggacgcagag

SEQ ID NO: 2379469 - DNA, 25 bp, Homo sapien
gcttcacagcacctcttgatcacgg

SEQ ID NO: 2379470 - DNA, 25 bp, Homo sapien
ctcattcaaaactgccgtcatccag

SEQ ID NO: 2379471 - DNA, 25 bp, Homo sapien
tctgctgaaatcatcgcggacacca

SEQ ID NO: 2379472 - DNA, 25 bp, Homo sapien
tatcgccgtcattaaacctcagtga

SEQ ID NO: 2379473 - DNA, 25 bp, Homo sapien
cttcagcccgcaagatcttccgaaa

SEQ ID NO: 2379474 - DNA, 25 bp, Homo sapien
ccctttttgcgctttgtggaagacg

SEQ ID NO: 2379475 - DNA, 25 bp, Homo sapien
caactcatcgatctgccggtgcatt

SEQ ID NO: 2379476 - DNA, 25 bp, Homo sapien
ggtgatgcgcgttaccaactcatcg

SEQ ID NO: 2379477 - DNA, 25 bp, Homo sapien
cctggtacaggagcatccagtcgac

SEQ ID NO: 2379478 - DNA, 25 bp, Homo sapien
agccgtagccaaaggttcccgtgca

SEQ ID NO: 2379479 - DNA, 25 bp, Homo sapien
ttcccgtgcactggcggatgttcag

SEQ ID NO: 2379480 - DNA, 25 bp, Homo sapien
ggtgagcgtcaggtaaatccgatcg

SEQ ID NO: 2379481 - DNA, 25 bp, Homo sapien
ggatgttcagctcatccggctcccg

SEQ ID NO: 2379482 - DNA, 25 bp, Homo sapien
cggcgggggccccacctagatacat

SEQ ID NO: 2379483 - DNA, 25 bp, Homo sapien
cgggggccccacctagatacatgga

SEQ ID NO: 2379484 - DNA, 25 bp, Homo sapien
gccccacctagatacatggacagcg

SEQ ID NO: 2379485 - DNA, 25 bp, Homo sapien
gggccccacctagatacatggacag

SEQ ID NO: 2379486 - DNA, 25 bp, Homo sapien
gcaagcccaaggctttcgccaggtc

SEQ ID NO: 2379487 - DNA, 25 bp, Homo sapien
cgccacagttggtgacaacacagag

SEQ ID NO: 2379488 - DNA, 25 bp, Homo sapien
tgtaatccatgccttcgccacagtt

SEQ ID NO: 2379489 - DNA, 25 bp, Homo sapien
caacacagagcaagcccaaggcttt

SEQ ID NO: 2379490 - DNA, 25 bp, Homo sapien
ggaacgtggttaactgatggatcag

SEQ ID NO: 2379491 - DNA, 25 bp, Homo sapien
catttcggatcgtctggatctggga

SEQ ID NO: 2379492 - DNA, 25 bp, Homo sapien
tgtgccaggccagagaaaatcttcc

SEQ ID NO: 2379493 - DNA, 25 bp, Homo sapien
gagatcacggagagcacagaagcat

SEQ ID NO: 2379494 - DNA, 25 bp, Homo sapien
aagatgcccatgcgggagtccaggg

SEQ ID NO: 2379495 - DNA, 25 bp, Homo sapien
atgcccatgcgggagtccagggaaa

SEQ ID NO: 2379496 - DNA, 25 bp, Homo sapien
ggagtccagggaaatctcctgccct

SEQ ID NO: 2379497 - DNA, 25 bp, Homo sapien
tgaagatgcccatgcgggagtccag

SEQ ID NO: 2379498 - DNA, 25 bp, Homo sapien
ggaagccctcagagaagagcatgat

SEQ ID NO: 2379499 - DNA, 25 bp, Homo sapien
acgatcacgaccacaggcctgaaca

SEQ ID NO: 2379500 - DNA, 25 bp, Homo sapien
tgaacagcgccttcaccgactcggg

SEQ ID NO: 2379501 - DNA, 25 bp, Homo sapien
tctgctgcaggtcgggcacgatcac

SEQ ID NO: 2379502 - DNA, 25 bp, Homo sapien
gaaccgtcatctttttcgccagagt

SEQ ID NO: 2379503 - DNA, 25 bp, Homo sapien
gggccagcttatacagaaccgtcat

SEQ ID NO: 2379504 - DNA, 25 bp, Homo sapien
cagggctctgagtccaaaatcatag

SEQ ID NO: 2379505 - DNA, 25 bp, Homo sapien
gaccagcaccgatttcagggctctg

SEQ ID NO: 2379506 - DNA, 25 bp, Homo sapien
ctccctaaggtcagaggagcctctc

SEQ ID NO: 2379507 - DNA, 25 bp, Homo sapien
ggtcagaggagcctctcttcagctc

SEQ ID NO: 2379508 - DNA, 25 bp, Homo sapien
ccctaaggtcagaggagcctctctt

SEQ ID NO: 2379509 - DNA, 25 bp, Homo sapien
tcagaggagcctctcttcagctcac

SEQ ID NO: 2379510 - DNA, 25 bp, Homo sapien
ctgctatttgcttaattgtaacgac

SEQ ID NO: 2379511 - DNA, 25 bp, Homo sapien
tattccaaacaagactaaataaatg

SEQ ID NO: 2379512 - DNA, 25 bp, Homo sapien
gacatcatgttgcaagctgaagcct

SEQ ID NO: 2379513 - DNA, 25 bp, Homo sapien
ggcaagtacagctgacttcatgggc

SEQ ID NO: 2379514 - DNA, 25 bp, Homo sapien
ggacctgctctaccgcatcgttgaa

SEQ ID NO: 2379515 - DNA, 25 bp, Homo sapien
gaaacagatccgaaatcaaaccaag

SEQ ID NO: 2379516 - DNA, 25 bp, Homo sapien
catcgttgaagtcagggtagcggac

SEQ ID NO: 2379517 - DNA, 25 bp, Homo sapien
gcaagttcatgtctcgcaaggccct

SEQ ID NO: 2379518 - DNA, 25 bp, Homo sapien
gtgttaatgacgacggacttgcccc

SEQ ID NO: 2379519 - DNA, 25 bp, Homo sapien
caccatcgtcgtgtggcgggttaac

SEQ ID NO: 2379520 - DNA, 25 bp, Homo sapien
ggtctcgaacatttgaaccacttta

SEQ ID NO: 2379521 - DNA, 25 bp, Homo sapien
tgggcctgacacagagtgttaatga

SEQ ID NO: 2379522 - DNA, 25 bp, Homo sapien
catctgtccagtctcgggtggttgg

SEQ ID NO: 2379523 - DNA, 25 bp, Homo sapien
gttctatgacactcacggctttggg

SEQ ID NO: 2379524 - DNA, 25 bp, Homo sapien
tgtacaactttgtcgtcagcccaag

SEQ ID NO: 2379525 - DNA, 25 bp, Homo sapien
tgggtccaggatgccgtagagttct

SEQ ID NO: 2379526 - DNA, 25 bp, Homo sapien
gcttgatggcggctgtgtttgagaa

SEQ ID NO: 2379527 - DNA, 25 bp, Homo sapien
catagaacgtggtgatcaggcagct

SEQ ID NO: 2379528 - DNA, 25 bp, Homo sapien
aacgtggtgatcaggcagcttgatg

SEQ ID NO: 2379529 - DNA, 25 bp, Homo sapien
tcaggcagcttgatggcggctgtgt

SEQ ID NO: 2379530 - DNA, 25 bp, Homo sapien
ctttccatggccctttgctaccttt

SEQ ID NO: 2379531 - DNA, 25 bp, Homo sapien
atggccctttgctacctttccttga

SEQ ID NO: 2379532 - DNA, 25 bp, Homo sapien
tctacagatggaaagccgtggctca

SEQ ID NO: 2379533 - DNA, 25 bp, Homo sapien
agggcaccatcaaccacgtctacag

SEQ ID NO: 2379534 - DNA, 25 bp, Homo sapien
tgttttccacccatagagcatccac

SEQ ID NO: 2379535 - DNA, 25 bp, Homo sapien
atgtcaacaacctgttgtcatccat

SEQ ID NO: 2379536 - DNA, 25 bp, Homo sapien
tgcgttccccgttggccaatgtcaa

SEQ ID NO: 2379537 - DNA, 25 bp, Homo sapien
gggcacagtgtgcttggagccggat

SEQ ID NO: 2379538 - DNA, 25 bp, Homo sapien
cattttttccagtatggtcgatatt

SEQ ID NO: 2379539 - DNA, 25 bp, Homo sapien
attccacatcgagagacagttgcag

SEQ ID NO: 2379540 - DNA, 25 bp, Homo sapien
taggatccacataaaccattccaca

SEQ ID NO: 2379541 - DNA, 25 bp, Homo sapien
tatttcaagtttttaggatccacat

SEQ ID NO: 2379542 - DNA, 25 bp, Homo sapien
ctaggtgtggttgagccacaacccg

SEQ ID NO: 2379543 - DNA, 25 bp, Homo sapien
tggttgagccacaacccgcacgtga

SEQ ID NO: 2379544 - DNA, 25 bp, Homo sapien
gtgtggttgagccacaacccgcacg

SEQ ID NO: 2379545 - DNA, 25 bp, Homo sapien
ccgcacgtgactgtcacatccatct

SEQ ID NO: 2379546 - DNA, 25 bp, Homo sapien
cagaacacctgtgttcctttgagaa

SEQ ID NO: 2379547 - DNA, 25 bp, Homo sapien
ccagaacacctgtgttcctttgaga

SEQ ID NO: 2379548 - DNA, 25 bp, Homo sapien
agaacacctgtgttcctttgagaag

SEQ ID NO: 2379549 - DNA, 25 bp, Homo sapien
gaggtctgtctgaggaactattgtc

SEQ ID NO: 2379550 - DNA, 25 bp, Homo sapien
tctcaaagagactattcaaattgta

SEQ ID NO: 2379551 - DNA, 25 bp, Homo sapien
tccttccactatcacatccatgaga

SEQ ID NO: 2379552 - DNA, 25 bp, Homo sapien
tgagatagggcacatacttctcaaa

SEQ ID NO: 2379553 - DNA, 25 bp, Homo sapien
ccaacatgttggttcagacagatgg

SEQ ID NO: 2379554 - DNA, 25 bp, Homo sapien
ttcagacagatggaacccagtatct

SEQ ID NO: 2379555 - DNA, 25 bp, Homo sapien
ttgcacaaaagcaagcacggcgccc

SEQ ID NO: 2379556 - DNA, 25 bp, Homo sapien
cagtatcttgacttgcacaaaagca

SEQ ID NO: 2379557 - DNA, 25 bp, Homo sapien
tattcgtcaaatttcatccttccat

SEQ ID NO: 2379558 - DNA, 25 bp, Homo sapien
agagagcagtacaaagcctccagga

SEQ ID NO: 2379559 - DNA, 25 bp, Homo sapien
cactccagcaggtcaaggtcttcta

SEQ ID NO: 2379560 - DNA, 25 bp, Homo sapien
gcaaggcgtttgatatattcgtcaa

SEQ ID NO: 2379561 - DNA, 25 bp, Homo sapien
tctcgggggcatgaatatactctgg

SEQ ID NO: 2379562 - DNA, 25 bp, Homo sapien
tgatgaatttcctctcgggggcatg

SEQ ID NO: 2379563 - DNA, 25 bp, Homo sapien
tttactccatgggacccattgattc

SEQ ID NO: 2379564 - DNA, 25 bp, Homo sapien
gacccattgattccgtttgttatca

SEQ ID NO: 2379565 - DNA, 25 bp, Homo sapien
gggcatctcagcaactccaataggg

SEQ ID NO: 2379566 - DNA, 25 bp, Homo sapien
caactccaatagggtgagcactggg

SEQ ID NO: 2379567 - DNA, 25 bp, Homo sapien
ggaacaggggcatctcagcaactcc

SEQ ID NO: 2379568 - DNA, 25 bp, Homo sapien
gcactgggggcaacatggagttgtc

SEQ ID NO: 2379569 - DNA, 25 bp, Homo sapien
tgttccaatatccaggtagtccgag

SEQ ID NO: 2379570 - DNA, 25 bp, Homo sapien
tagtccgagtggtatccactgtgtg

SEQ ID NO: 2379571 - DNA, 25 bp, Homo sapien
gaagtgccagattcaccaacaaaaa

SEQ ID NO: 2379572 - DNA, 25 bp, Homo sapien
ggtagtggctgtcttagaagtgcca

SEQ ID NO: 2379573 - DNA, 25 bp, Homo sapien
agtatctttggttcgcttttccaca

SEQ ID NO: 2379574 - DNA, 25 bp, Homo sapien
tttggatatccatggacgtggtgcg

SEQ ID NO: 2379575 - DNA, 25 bp, Homo sapien
catgggtgggccgtaagtatctttg

SEQ ID NO: 2379576 - DNA, 25 bp, Homo sapien
catccatgaacaccagcaggcgttt

SEQ ID NO: 2379577 - DNA, 25 bp, Homo sapien
gccaaggtctcgaatgcttttacag

SEQ ID NO: 2379578 - DNA, 25 bp, Homo sapien
ggcacattgaagacactgaatagcg

SEQ ID NO: 2379579 - DNA, 25 bp, Homo sapien
aatcttgggtcaacttcattgcggc

SEQ ID NO: 2379580 - DNA, 25 bp, Homo sapien
tgggctgctgcgtgccatattcatc

SEQ ID NO: 2379581 - DNA, 25 bp, Homo sapien
tgggaggtaggtcttgcacaatatt

SEQ ID NO: 2379582 - DNA, 25 bp, Homo sapien
taaaaacccgtgagagatctcgaag

SEQ ID NO: 2379583 - DNA, 25 bp, Homo sapien
tttttgtaaagtgctagcgtgcaga

SEQ ID NO: 2379584 - DNA, 25 bp, Homo sapien
gaagatgtaatggaactttgacgga

SEQ ID NO: 2379585 - DNA, 25 bp, Homo sapien
tcagacactcattcctccagactct

SEQ ID NO: 2379586 - DNA, 25 bp, Homo sapien
tgtctgtttcactgatcagccggtc

SEQ ID NO: 2379587 - DNA, 25 bp, Homo sapien
tgatcagccggtcgtggaagactct

SEQ ID NO: 2379588 - DNA, 25 bp, Homo sapien
gccggtcgtggaagactctcagaca

SEQ ID NO: 2379589 - DNA, 25 bp, Homo sapien
tgcaagacgcttaataacccaccca

SEQ ID NO: 2379590 - DNA, 25 bp, Homo sapien
cctgagaagaatttcctgagaagaa

SEQ ID NO: 2379591 - DNA, 25 bp, Homo sapien
ccacaattcgcgtcctaatataaaa

SEQ ID NO: 2379592 - DNA, 25 bp, Homo sapien
tcctttgccccattgacctttcgtg

SEQ ID NO: 2379593 - DNA, 25 bp, Homo sapien
tcaccacctccacgtcatctttaaa

SEQ ID NO: 2379594 - DNA, 25 bp, Homo sapien
gtggttctccttcgtgcagagccat

SEQ ID NO: 2379595 - DNA, 25 bp, Homo sapien
ggaagtctccaaacaatatgggatc

SEQ ID NO: 2379596 - DNA, 25 bp, Homo sapien
ataaatgcgtggttctccttcgtgc

SEQ ID NO: 2379597 - DNA, 25 bp, Homo sapien
gagcatcgtcgaagagaaccaagtt

SEQ ID NO: 2379598 - DNA, 25 bp, Homo sapien
cggtgcacccgggttaaatgctcca

SEQ ID NO: 2379599 - DNA, 25 bp, Homo sapien
ccatgcggatgatacggtgcacccg

SEQ ID NO: 2379600 - DNA, 25 bp, Homo sapien
gaaccaagttcattttggtgttgct

SEQ ID NO: 2379601 - DNA, 25 bp, Homo sapien
aggcagccagcctcgaaagagactg

SEQ ID NO: 2379602 - DNA, 25 bp, Homo sapien
aaggcagccagcctcgaaagagact

SEQ ID NO: 2379603 - DNA, 25 bp, Homo sapien
agccagcctcgaaagagactgcttc

SEQ ID NO: 2379604 - DNA, 25 bp, Homo sapien
gcagccagcctcgaaagagactgct

SEQ ID NO: 2379605 - DNA, 25 bp, Homo sapien
aacatcatgctatgatctgctgtgg

SEQ ID NO: 2379606 - DNA, 25 bp, Homo sapien
acgaactaccaactgcagaaactgg

SEQ ID NO: 2379607 - DNA, 25 bp, Homo sapien
ctatttctgggagggtacgtggact

SEQ ID NO: 2379608 - DNA, 25 bp, Homo sapien
gaacacctgtacttagatgctctgg

SEQ ID NO: 2379609 - DNA, 25 bp, Homo sapien
tataatcttgacaaatatcagcatg

SEQ ID NO: 2379610 - DNA, 25 bp, Homo sapien
tggaagctggattcattgaatgaac

SEQ ID NO: 2379611 - DNA, 25 bp, Homo sapien
gaatgaactgtgattgctctcctat

SEQ ID NO: 2379612 - DNA, 25 bp, Homo sapien
tcagatttaaagctagatcaagcat

SEQ ID NO: 2379613 - DNA, 25 bp, Homo sapien
agcacatgggcgtcaccaccaccag

SEQ ID NO: 2379614 - DNA, 25 bp, Homo sapien
cagacacagagcacatgggcgtcac

SEQ ID NO: 2379615 - DNA, 25 bp, Homo sapien
acacagagcacatgggcgtcaccac

SEQ ID NO: 2379616 - DNA, 25 bp, Homo sapien
atgcagacacagagcacatgggcgt

SEQ ID NO: 2379617 - DNA, 25 bp, Homo sapien
tagcctcggctcagcaggatctcaa

SEQ ID NO: 2379618 - DNA, 25 bp, Homo sapien
tcccggaaactgttctccgagtagc

SEQ ID NO: 2379619 - DNA, 25 bp, Homo sapien
gggcatccgtgaacagaaagatcat

SEQ ID NO: 2379620 - DNA, 25 bp, Homo sapien
cagaaagatcatcgctttgttctca

SEQ ID NO: 2379621 - DNA, 25 bp, Homo sapien
tactgcaaggatactgccatcatcg

SEQ ID NO: 2379622 - DNA, 25 bp, Homo sapien
tctggaggtggtaactgctgaagaa

SEQ ID NO: 2379623 - DNA, 25 bp, Homo sapien
gaagaaagtgaactcccttaagagc

SEQ ID NO: 2379624 - DNA, 25 bp, Homo sapien
gccaaggaagataatgagacctatc

SEQ ID NO: 2379625 - DNA, 25 bp, Homo sapien
aaaggtgtccatggcatcctaagcc

SEQ ID NO: 2379626 - DNA, 25 bp, Homo sapien
gacctacaaggttccacgccataga

SEQ ID NO: 2379627 - DNA, 25 bp, Homo sapien
gcgtgctctcaattacccaggtggg

SEQ ID NO: 2379628 - DNA, 25 bp, Homo sapien
gactctgtggatgtgacgcagccaa

SEQ ID NO: 2379629 - DNA, 25 bp, Homo sapien
gagctcagaaggaacgggctctgcc

SEQ ID NO: 2379630 - DNA, 25 bp, Homo sapien
ggtcattgagatgggccctaatgca

SEQ ID NO: 2379631 - DNA, 25 bp, Homo sapien
atgacaggtacccttataaaggagg

SEQ ID NO: 2379632 - DNA, 25 bp, Homo sapien
gactggagttctgtgcctacaagcc

SEQ ID NO: 2379633 - DNA, 25 bp, Homo sapien
gaagtactgccacacagactccttg

SEQ ID NO: 2379634 - DNA, 25 bp, Homo sapien
cttgcttcagagcttcctgtccaat

SEQ ID NO: 2379635 - DNA, 25 bp, Homo sapien
tgcacttttgttcacgaagtactgc

SEQ ID NO: 2379636 - DNA, 25 bp, Homo sapien
tctgactcaggatagactctttctc

SEQ ID NO: 2379637 - DNA, 25 bp, Homo sapien
tcagggtgtcccccactggcgacat

SEQ ID NO: 2379638 - DNA, 25 bp, Homo sapien
actttgcgaccgcatggagggcttg

SEQ ID NO: 2379639 - DNA, 25 bp, Homo sapien
ctagaaaggactttgcgaccgcatg

SEQ ID NO: 2379640 - DNA, 25 bp, Homo sapien
gcatgaaccagtcaataccagtgtt

SEQ ID NO: 2379641 - DNA, 25 bp, Homo sapien
gaaccagtcaataccagtgttattt

SEQ ID NO: 2379642 - DNA, 25 bp, Homo sapien
tctgccgggatcattggattatacc

SEQ ID NO: 2379643 - DNA, 25 bp, Homo sapien
gagtgacatagttgctgcgcctcaa

SEQ ID NO: 2379644 - DNA, 25 bp, Homo sapien
tgtagtggtccacggattggtgaac

SEQ ID NO: 2379645 - DNA, 25 bp, Homo sapien
ttggtgaaccaagacaacatgcttc

SEQ ID NO: 2379646 - DNA, 25 bp, Homo sapien
agtcccccatccagacgcttgcact

SEQ ID NO: 2379647 - DNA, 25 bp, Homo sapien
tcccccatccagacgcttgcactga

SEQ ID NO: 2379648 - DNA, 25 bp, Homo sapien
gtcccccatccagacgcttgcactg

SEQ ID NO: 2379649 - DNA, 25 bp, Homo sapien
cccccatccagacgcttgcactgag

SEQ ID NO: 2379650 - DNA, 25 bp, Homo sapien
ttctccgccagcacgatcttctgct

SEQ ID NO: 2379651 - DNA, 25 bp, Homo sapien
gcacgatcttctgctcggccagctt

SEQ ID NO: 2379652 - DNA, 25 bp, Homo sapien
tccgccagcacgatcttctgctcgg

SEQ ID NO: 2379653 - DNA, 25 bp, Homo sapien
gccagcacgatcttctgctcggcca

SEQ ID NO: 2379654 - DNA, 25 bp, Homo sapien
ctacagcggtgttgacggcgatctc

SEQ ID NO: 2379655 - DNA, 25 bp, Homo sapien
acagcggtgttgacggcgatctcct

SEQ ID NO: 2379656 - DNA, 25 bp, Homo sapien
tacagcggtgttgacggcgatctcc

SEQ ID NO: 2379657 - DNA, 25 bp, Homo sapien
agcggtgttgacggcgatctcctcc

SEQ ID NO: 2379658 - DNA, 25 bp, Homo sapien
tggcacgctcagtgcctacaagcag

SEQ ID NO: 2379659 - DNA, 25 bp, Homo sapien
agcagtttcacagggacggcctggc

SEQ ID NO: 2379660 - DNA, 25 bp, Homo sapien
cacagggacggcctggcagagccct

SEQ ID NO: 2379661 - DNA, 25 bp, Homo sapien
tgcagggtcaaagatggcacgctca

SEQ ID NO: 2379662 - DNA, 25 bp, Homo sapien
catggcaatgactttgttctgctcc

SEQ ID NO: 2379663 - DNA, 25 bp, Homo sapien
tctcagtcacgtccgacttgtccag

SEQ ID NO: 2379664 - DNA, 25 bp, Homo sapien
ctaatctcagtcacgtccgacttgt

SEQ ID NO: 2379665 - DNA, 25 bp, Homo sapien
tccaggatgggcatgacctctgcca

SEQ ID NO: 2379666 - DNA, 25 bp, Homo sapien
aagccacaggagtctcccagaccac

SEQ ID NO: 2379667 - DNA, 25 bp, Homo sapien
ctgccaggcaaggtcagtgaaagcc

SEQ ID NO: 2379668 - DNA, 25 bp, Homo sapien
caggagtctcccagaccacgccatg

SEQ ID NO: 2379669 - DNA, 25 bp, Homo sapien
agaggtcccggagggcatggatgca

SEQ ID NO: 2379670 - DNA, 25 bp, Homo sapien
agaaaccaaggcacgtgggtcacaa

SEQ ID NO: 2379671 - DNA, 25 bp, Homo sapien
ctggcaagaaaccaaggcacgtggg

SEQ ID NO: 2379672 - DNA, 25 bp, Homo sapien
cacaaccccgggatgtggccaggat

SEQ ID NO: 2379673 - DNA, 25 bp, Homo sapien
caaggcacgtgggtcacaaccccgg

SEQ ID NO: 2379674 - DNA, 25 bp, Homo sapien
catcagagaccgcaggaaattcggg

SEQ ID NO: 2379675 - DNA, 25 bp, Homo sapien
acttggctctgggtaatcgaatcaa

SEQ ID NO: 2379676 - DNA, 25 bp, Homo sapien
ggacatcacgcccttggctgttttc

SEQ ID NO: 2379677 - DNA, 25 bp, Homo sapien
cagctctttgtaccctttcatgatg

SEQ ID NO: 2379678 - DNA, 25 bp, Homo sapien
ttcttcagttgtggtattaagagtc

SEQ ID NO: 2379679 - DNA, 25 bp, Homo sapien
ttcagttgtggtattaagagtcttc

SEQ ID NO: 2379680 - DNA, 25 bp, Homo sapien
gaaaacatcacagtagcccattaca

SEQ ID NO: 2379681 - DNA, 25 bp, Homo sapien
gtagcccattacagcttcaacaaat

SEQ ID NO: 2379682 - DNA, 25 bp, Homo sapien
gtatggcggcctcatatttggcacc

SEQ ID NO: 2379683 - DNA, 25 bp, Homo sapien
gatgagtttgtctgcggcaatcagc

SEQ ID NO: 2379684 - DNA, 25 bp, Homo sapien
ttctgaattgctgccaactcattct

SEQ ID NO: 2379685 - DNA, 25 bp, Homo sapien
gatgttttctgaccccagacccgag

SEQ ID NO: 2379686 - DNA, 25 bp, Homo sapien
tctcgtcacggaactcccaggtgaa

SEQ ID NO: 2379687 - DNA, 25 bp, Homo sapien
tgccaaatccgattgaccatctcgt

SEQ ID NO: 2379688 - DNA, 25 bp, Homo sapien
ctcgtagctgaggaaagccgcgcag

SEQ ID NO: 2379689 - DNA, 25 bp, Homo sapien
catcatccgtgagcaggctttccag

SEQ ID NO: 2379690 - DNA, 25 bp, Homo sapien
cattctgaacggagagctcatcggg

SEQ ID NO: 2379691 - DNA, 25 bp, Homo sapien
ggctggcccgggtggtgaggatgcc

SEQ ID NO: 2379692 - DNA, 25 bp, Homo sapien
ctgctgctgggggtcgatacacaga

SEQ ID NO: 2379693 - DNA, 25 bp, Homo sapien
ttttctcttgatccagttgagggcc

SEQ ID NO: 2379694 - DNA, 25 bp, Homo sapien
acacgaagctaaggttgctcacagc

SEQ ID NO: 2379695 - DNA, 25 bp, Homo sapien
gaacacgaagctaaggttgctcaca

SEQ ID NO: 2379696 - DNA, 25 bp, Homo sapien
ggaacacgaagctaaggttgctcac

SEQ ID NO: 2379697 - DNA, 25 bp, Homo sapien
aacacgaagctaaggttgctcacag

SEQ ID NO: 2379698 - DNA, 25 bp, Homo sapien
tatggacatctctagctgcttgagg

SEQ ID NO: 2379699 - DNA, 25 bp, Homo sapien
tttctaagacgttgtcaatcacagg

SEQ ID NO: 2379700 - DNA, 25 bp, Homo sapien
tgtctcccaggataataaactgccg

SEQ ID NO: 2379701 - DNA, 25 bp, Homo sapien
tattcatcaacatcgcggaacagga

SEQ ID NO: 2379702 - DNA, 25 bp, Homo sapien
cccaacaacagtctctcccgctgcc

SEQ ID NO: 2379703 - DNA, 25 bp, Homo sapien
aacaacagtctctcccgctgccctg

SEQ ID NO: 2379704 - DNA, 25 bp, Homo sapien
caacaacagtctctcccgctgccct

SEQ ID NO: 2379705 - DNA, 25 bp, Homo sapien
ccaacaacagtctctcccgctgccc

SEQ ID NO: 2379706 - DNA, 25 bp, Homo sapien
ctctgttgccttggatttggtctcc

SEQ ID NO: 2379707 - DNA, 25 bp, Homo sapien
caggttcttgttctcgctggtctcc

SEQ ID NO: 2379708 - DNA, 25 bp, Homo sapien
ctctcgtaagccaccagcacgctca

SEQ ID NO: 2379709 - DNA, 25 bp, Homo sapien
gtggacgtggccagctcccgaagga

SEQ ID NO: 2379710 - DNA, 25 bp, Homo sapien
gggccatctcagacaggacgaagaa

SEQ ID NO: 2379711 - DNA, 25 bp, Homo sapien
tctaagaaggcaatcagggagtact

SEQ ID NO: 2379712 - DNA, 25 bp, Homo sapien
ggtacatggagttcaccagggccat

SEQ ID NO: 2379713 - DNA, 25 bp, Homo sapien
catgaggatggaatcaggcagcgac

SEQ ID NO: 2379714 - DNA, 25 bp, Homo sapien
tgccccagtctgtagtgacatgctc

SEQ ID NO: 2379715 - DNA, 25 bp, Homo sapien
tgtctacaggaggtaaaatcacacc

SEQ ID NO: 2379716 - DNA, 25 bp, Homo sapien
tgtatgtaacggaaatggccatgtc

SEQ ID NO: 2379717 - DNA, 25 bp, Homo sapien
tgacatgctcctgtatgtaacggaa

SEQ ID NO: 2379718 - DNA, 25 bp, Homo sapien
agtagcttgtgcctctcaaacagcc

SEQ ID NO: 2379719 - DNA, 25 bp, Homo sapien
tctatcttgatggtcatattaaaag

SEQ ID NO: 2379720 - DNA, 25 bp, Homo sapien
ctcccttctgcttgttctatcttga

SEQ ID NO: 2379721 - DNA, 25 bp, Homo sapien
gaaaagagtagcttgtgcctctcaa

SEQ ID NO: 2379722 - DNA, 25 bp, Homo sapien
gctgctccgatttcaaccagagcca

SEQ ID NO: 2379723 - DNA, 25 bp, Homo sapien
gaggctggctgctccgatttcaacc

SEQ ID NO: 2379724 - DNA, 25 bp, Homo sapien
gctggctgctccgatttcaaccaga

SEQ ID NO: 2379725 - DNA, 25 bp, Homo sapien
agtgacaccaaccaggcgctcagtg

SEQ ID NO: 2379726 - DNA, 25 bp, Homo sapien
gaagtggcccaggcttgccctcgtc

SEQ ID NO: 2379727 - DNA, 25 bp, Homo sapien
aagtggcccaggcttgccctcgtca

SEQ ID NO: 2379728 - DNA, 25 bp, Homo sapien
agtggcccaggcttgccctcgtcac

SEQ ID NO: 2379729 - DNA, 25 bp, Homo sapien
aaagcaagcaactctgcttcgactt

SEQ ID NO: 2379730 - DNA, 25 bp, Homo sapien
aagcaactctgcttcgacttctccc

SEQ ID NO: 2379731 - DNA, 25 bp, Homo sapien
gcaagcaactctgcttcgacttctc

SEQ ID NO: 2379732 - DNA, 25 bp, Homo sapien
agcaagcaactctgcttcgacttct

SEQ ID NO: 2379733 - DNA, 25 bp, Homo sapien
ttcccatccttggtcagacaaccaa

SEQ ID NO: 2379734 - DNA, 25 bp, Homo sapien
catccttggtcagacaaccaagcgc

SEQ ID NO: 2379735 - DNA, 25 bp, Homo sapien
tggtcagacaaccaagcgcagggct

SEQ ID NO: 2379736 - DNA, 25 bp, Homo sapien
gacagtctgattattctcaacatca

SEQ ID NO: 2379737 - DNA, 25 bp, Homo sapien
gacgggaaactgctccagtgaatcc

SEQ ID NO: 2379738 - DNA, 25 bp, Homo sapien
caaaataagcaacttctggaaaggg

SEQ ID NO: 2379739 - DNA, 25 bp, Homo sapien
tgatgttgttatcgtaacccaaggg

SEQ ID NO: 2379740 - DNA, 25 bp, Homo sapien
gatagacccgatccacacggaaaca

SEQ ID NO: 2379741 - DNA, 25 bp, Homo sapien
tcataagatcagtggcagggtcgga

SEQ ID NO: 2379742 - DNA, 25 bp, Homo sapien
caaggaatttgaggcgatttcctcc

SEQ ID NO: 2379743 - DNA, 25 bp, Homo sapien
gactcaggataaacacaatgggcga

SEQ ID NO: 2379744 - DNA, 25 bp, Homo sapien
gcgaatgtggagtgctctgctcaaa

SEQ ID NO: 2379745 - DNA, 25 bp, Homo sapien
ggtctttgctgacccgcggcggcag

SEQ ID NO: 2379746 - DNA, 25 bp, Homo sapien
ctgccgccgcgggtcagcaaagacc

SEQ ID NO: 2379747 - DNA, 25 bp, Homo sapien
gcaattggggccataataatcctga

SEQ ID NO: 2379748 - DNA, 25 bp, Homo sapien
tcctgaatggtcctgggctcagcct

SEQ ID NO: 2379749 - DNA, 25 bp, Homo sapien
acccactcccttggccatgcaattg

SEQ ID NO: 2379750 - DNA, 25 bp, Homo sapien
taataatcctgatccacaatgaggc

SEQ ID NO: 2379751 - DNA, 25 bp, Homo sapien
aagctttgtcccacattgtactgaa

SEQ ID NO: 2379752 - DNA, 25 bp, Homo sapien
gtgtagcaagttctagcagggagca

SEQ ID NO: 2379753 - DNA, 25 bp, Homo sapien
cttgtgtagcaagttctagcaggga

SEQ ID NO: 2379754 - DNA, 25 bp, Homo sapien
cattgtactgaacttgtgtagcaag

SEQ ID NO: 2379755 - DNA, 25 bp, Homo sapien
agctacaggtggagccttcaaataa

SEQ ID NO: 2379756 - DNA, 25 bp, Homo sapien
ccacagaagggcgatggcagctcca

SEQ ID NO: 2379757 - DNA, 25 bp, Homo sapien
cccatgggccccgtgggtgcactga

SEQ ID NO: 2379758 - DNA, 25 bp, Homo sapien
aaagcaagccgaggatccaggagct

SEQ ID NO: 2379759 - DNA, 25 bp, Homo sapien
tctgcagaatcccaatggggaagcc

SEQ ID NO: 2379760 - DNA, 25 bp, Homo sapien
ggaggtggcagttctgcagcatcag

SEQ ID NO: 2379761 - DNA, 25 bp, Homo sapien
tggtgagccacaggcggaagtctgg

SEQ ID NO: 2379762 - DNA, 25 bp, Homo sapien
tctttcagccacttgaccaggaggt

SEQ ID NO: 2379763 - DNA, 25 bp, Homo sapien
cccggccccagagcagcatgcaggt

SEQ ID NO: 2379764 - DNA, 25 bp, Homo sapien
gttctgagaagctgcgtgctggcat

SEQ ID NO: 2379765 - DNA, 25 bp, Homo sapien
tgctggcatgttgatgtccatcctg

SEQ ID NO: 2379766 - DNA, 25 bp, Homo sapien
gctgcgtgctggcatgttgatgtcc

SEQ ID NO: 2379767 - DNA, 25 bp, Homo sapien
ggcactggtccagcatttcgtgaga

SEQ ID NO: 2379768 - DNA, 25 bp, Homo sapien
gaagtcatagtacacgttccagcca

SEQ ID NO: 2379769 - DNA, 25 bp, Homo sapien
tgaaagaacgccagcacgtagacca

SEQ ID NO: 2379770 - DNA, 25 bp, Homo sapien
cagcccattgggtggctcggtgaca

SEQ ID NO: 2379771 - DNA, 25 bp, Homo sapien
gaagtgggccgcctaaggaagccat

SEQ ID NO: 2379772 - DNA, 25 bp, Homo sapien
gttatactgaaacccaccaagctgt

SEQ ID NO: 2379773 - DNA, 25 bp, Homo sapien
gaagagaacacgctcagttatactg

SEQ ID NO: 2379774 - DNA, 25 bp, Homo sapien
aaaggctgctgggaacggtgcaacc

SEQ ID NO: 2379775 - DNA, 25 bp, Homo sapien
tccttgggtcccgttgctggaaggc

SEQ ID NO: 2379776 - DNA, 25 bp, Homo sapien
ctggaaggctttcgttaagtacgtg

SEQ ID NO: 2379777 - DNA, 25 bp, Homo sapien
ttgaggctgccccacgggatccttg

SEQ ID NO: 2379778 - DNA, 25 bp, Homo sapien
ctctccaattaggtacttgaggctg

SEQ ID NO: 2379779 - DNA, 25 bp, Homo sapien
cagccatggatccagctcagggaac

SEQ ID NO: 2379780 - DNA, 25 bp, Homo sapien
tgacttgcataacctttcgggccac

SEQ ID NO: 2379781 - DNA, 25 bp, Homo sapien
ttaggacaaagaacaaccaggtgag

SEQ ID NO: 2379782 - DNA, 25 bp, Homo sapien
tcagaacctactgtgtgcaccctgg

SEQ ID NO: 2379783 - DNA, 25 bp, Homo sapien
tgtagtccacttccttgttccggaa

SEQ ID NO: 2379784 - DNA, 25 bp, Homo sapien
gaatggctggaaagtatcaaaaatg

SEQ ID NO: 2379785 - DNA, 25 bp, Homo sapien
gatgcggcgatcaaagctgtcgatg

SEQ ID NO: 2379786 - DNA, 25 bp, Homo sapien
gtcgatggcccgtcctccatacatg

SEQ ID NO: 2379787 - DNA, 25 bp, Homo sapien
ccaagacatgcaagactaatttcca

SEQ ID NO: 2379788 - DNA, 25 bp, Homo sapien
agtgcactgacatggtcattgatca

SEQ ID NO: 2379789 - DNA, 25 bp, Homo sapien
cacagagaacaacggaggtggcact

SEQ ID NO: 2379790 - DNA, 25 bp, Homo sapien
taatttccactgtttagagggtgac

SEQ ID NO: 2379791 - DNA, 25 bp, Homo sapien
ccacatgtctcgagccgcctgcgtg

SEQ ID NO: 2379792 - DNA, 25 bp, Homo sapien
tgtaatagccaatctcagcgttggg

SEQ ID NO: 2379793 - DNA, 25 bp, Homo sapien
gcgtgttggcaagcgggagggcctc

SEQ ID NO: 2379794 - DNA, 25 bp, Homo sapien
gggtggagaccaaacacttctggcg

SEQ ID NO: 2379795 - DNA, 25 bp, Homo sapien
cgtcatccggaccacaagcttgttg

SEQ ID NO: 2379796 - DNA, 25 bp, Homo sapien
tcgcggctgataccactgctggatt

SEQ ID NO: 2379797 - DNA, 25 bp, Homo sapien
ggagagtcctgttccgaggcgcttc

SEQ ID NO: 2379798 - DNA, 25 bp, Homo sapien
ttcagccagagacttcgtcatccgg

SEQ ID NO: 2379799 - DNA, 25 bp, Homo sapien
gatatgcccgataaaaagagacctg

SEQ ID NO: 2379800 - DNA, 25 bp, Homo sapien
taaggtgtcaggagcaagccttctc

SEQ ID NO: 2379801 - DNA, 25 bp, Homo sapien
acaacatgtactggctgaaccgccg

SEQ ID NO: 2379802 - DNA, 25 bp, Homo sapien
tctccagatattagggatatgcccg

SEQ ID NO: 2379803 - DNA, 25 bp, Homo sapien
caaaatgttaagaacgcagcattgc

SEQ ID NO: 2379804 - DNA, 25 bp, Homo sapien
ctatcagggagacagtgatccaaaa

SEQ ID NO: 2379805 - DNA, 25 bp, Homo sapien
gttaagaacgcagcattgcagcgga

SEQ ID NO: 2379806 - DNA, 25 bp, Homo sapien
cagggagacagtgatccaaaatgtt

SEQ ID NO: 2379807 - DNA, 25 bp, Homo sapien
gagagccacatcacgctgggctcgc

SEQ ID NO: 2379808 - DNA, 25 bp, Homo sapien
tcacttgtgtgaacaaggtggagcg

SEQ ID NO: 2379809 - DNA, 25 bp, Homo sapien
ccgttcttccggcaggtggcctgca

SEQ ID NO: 2379810 - DNA, 25 bp, Homo sapien
tgcaccagcgccgtgaggtaggact

SEQ ID NO: 2379811 - DNA, 25 bp, Homo sapien
tttctatatcccagtcagcaccttc

SEQ ID NO: 2379812 - DNA, 25 bp, Homo sapien
gggtttgctcttgataagacatcct

SEQ ID NO: 2379813 - DNA, 25 bp, Homo sapien
ctttttctatatcccagtcagcacc

SEQ ID NO: 2379814 - DNA, 25 bp, Homo sapien
gcaggtccacaaccagcaccttggg

SEQ ID NO: 2379815 - DNA, 25 bp, Homo sapien
tgcctcgtggtaaagagatcagctt

SEQ ID NO: 2379816 - DNA, 25 bp, Homo sapien
cgttccttctcatggaggtggtgta

SEQ ID NO: 2379817 - DNA, 25 bp, Homo sapien
acccagtgagaaatgtgcctcgtgg

SEQ ID NO: 2379818 - DNA, 25 bp, Homo sapien
agatcagcttcaaaaaccaagccga

SEQ ID NO: 2379819 - DNA, 25 bp, Homo sapien
ttaatcagaattcagggtgaggcat

SEQ ID NO: 2379820 - DNA, 25 bp, Homo sapien
taatcagaattcagggtgaggcata

SEQ ID NO: 2379821 - DNA, 25 bp, Homo sapien
aatcagaattcagggtgaggcatac

SEQ ID NO: 2379822 - DNA, 25 bp, Homo sapien
tcactctgacaaccccaggctccga

SEQ ID NO: 2379823 - DNA, 25 bp, Homo sapien
aatgacagcagacccgatcactctg

SEQ ID NO: 2379824 - DNA, 25 bp, Homo sapien
agaaatgacagcagacccgatcact

SEQ ID NO: 2379825 - DNA, 25 bp, Homo sapien
ccaggctccgaattcattaagcagt

SEQ ID NO: 2379826 - DNA, 25 bp, Homo sapien
taaacactaagctcaacaacttcac

SEQ ID NO: 2379827 - DNA, 25 bp, Homo sapien
tcaacaacttcacagtcgccgtagc

SEQ ID NO: 2379828 - DNA, 25 bp, Homo sapien
actaagctcaacaacttcacagtcg

SEQ ID NO: 2379829 - DNA, 25 bp, Homo sapien
ttcacagtcgccgtagcaggtcaga

SEQ ID NO: 2379830 - DNA, 25 bp, Homo sapien
gaccttatcctcaagctccagggca

SEQ ID NO: 2379831 - DNA, 25 bp, Homo sapien
gccgtgcgtgtatctcaaggaacta

SEQ ID NO: 2379832 - DNA, 25 bp, Homo sapien
gatgacgctactcctcatagcacca

SEQ ID NO: 2379833 - DNA, 25 bp, Homo sapien
caaggaactaaataagatgacgcta

SEQ ID NO: 2379834 - DNA, 25 bp, Homo sapien
ctgctaattggtagagcccagtggc

SEQ ID NO: 2379835 - DNA, 25 bp, Homo sapien
acacaaaggttcaccacctccccat

SEQ ID NO: 2379836 - DNA, 25 bp, Homo sapien
gcccagtggcctgttttgacagggt

SEQ ID NO: 2379837 - DNA, 25 bp, Homo sapien
gatacagagtatccacacaaaggtt

SEQ ID NO: 2379838 - DNA, 25 bp, Homo sapien
taaggcacgggagttacgtgtgact

SEQ ID NO: 2379839 - DNA, 25 bp, Homo sapien
taacgaagggcagaactggaatgca

SEQ ID NO: 2379840 - DNA, 25 bp, Homo sapien
atgcaaaccgtggaggtctggatcc

SEQ ID NO: 2379841 - DNA, 25 bp, Homo sapien
gaaagttccattggacagcatctgt

SEQ ID NO: 2379842 - DNA, 25 bp, Homo sapien
tctgtgctgcccaacatggtagaca

SEQ ID NO: 2379843 - DNA, 25 bp, Homo sapien
tattccagcagtacaaggtgagcac

SEQ ID NO: 2379844 - DNA, 25 bp, Homo sapien
taagcgacctacctttagatagtga

SEQ ID NO: 2379845 - DNA, 25 bp, Homo sapien
tttatctgggagcaaatgaaacctg

SEQ ID NO: 2379846 - DNA, 25 bp, Homo sapien
tcccaaaagtgccatacgctgcgtt

SEQ ID NO: 2379847 - DNA, 25 bp, Homo sapien
gccatacgctgcgtttactagccat

SEQ ID NO: 2379848 - DNA, 25 bp, Homo sapien
tggtgagagtttgccctcccaaaag

SEQ ID NO: 2379849 - DNA, 25 bp, Homo sapien
tctggtacgggagggatgctgcatg

SEQ ID NO: 2379850 - DNA, 25 bp, Homo sapien
gccatgggacactggagcaagatga

SEQ ID NO: 2379851 - DNA, 25 bp, Homo sapien
tacttcccacaacatgaatggacgg

SEQ ID NO: 2379852 - DNA, 25 bp, Homo sapien
tttagagtcccttctacgatgtggg

SEQ ID NO: 2379853 - DNA, 25 bp, Homo sapien
gaatggacgggtcaaacaactcaca

SEQ ID NO: 2379854 - DNA, 25 bp, Homo sapien
cagagttccatttggacattttacc

SEQ ID NO: 2379855 - DNA, 25 bp, Homo sapien
cttctgattgtggacaagacagtga

SEQ ID NO: 2379856 - DNA, 25 bp, Homo sapien
ttccatttggacattttaccacctc

SEQ ID NO: 2379857 - DNA, 25 bp, Homo sapien
taccacctcttctgattgtggacaa

SEQ ID NO: 2379858 - DNA, 25 bp, Homo sapien
cagagctttggatgacgactggcta

SEQ ID NO: 2379859 - DNA, 25 bp, Homo sapien
ccttggagataggttgacagctgtc

SEQ ID NO: 2379860 - DNA, 25 bp, Homo sapien
cgactggctaattctagaacactgc

SEQ ID NO: 2379861 - DNA, 25 bp, Homo sapien
tgtggtatcaggacccagttcagag

SEQ ID NO: 2379862 - DNA, 25 bp, Homo sapien
gatgcctttgcaacgatactaacgt

SEQ ID NO: 2379863 - DNA, 25 bp, Homo sapien
aatacatcggtctaacaaatagggt

SEQ ID NO: 2379864 - DNA, 25 bp, Homo sapien
tagtttctaatacatagtgggcaca

SEQ ID NO: 2379865 - DNA, 25 bp, Homo sapien
agtgggcacacatttggtaactaag

SEQ ID NO: 2379866 - DNA, 25 bp, Homo sapien
acacccagacgcctccgggggacag

SEQ ID NO: 2379867 - DNA, 25 bp, Homo sapien
gcgtgcgcacgcacgaggccgggga

SEQ ID NO: 2379868 - DNA, 25 bp, Homo sapien
gcgcgctccgcacacccagacgcct

SEQ ID NO: 2379869 - DNA, 25 bp, Homo sapien
ctcacaggtgcgcctccgagccgcg

SEQ ID NO: 2379870 - DNA, 25 bp, Homo sapien
gggagtcagcgccccaggccgcggg

SEQ ID NO: 2379871 - DNA, 25 bp, Homo sapien
agtcagcgccccaggccgcgggcgc

SEQ ID NO: 2379872 - DNA, 25 bp, Homo sapien
gagtcagcgccccaggccgcgggcg

SEQ ID NO: 2379873 - DNA, 25 bp, Homo sapien
aggggagtcagcgccccaggccgcg

SEQ ID NO: 2379874 - DNA, 25 bp, Homo sapien
cttccccgccatcccgaggcccatc

SEQ ID NO: 2379875 - DNA, 25 bp, Homo sapien
tcccgaggcccatcctccgggatgg

SEQ ID NO: 2379876 - DNA, 25 bp, Homo sapien
ccgaggcccatcctccgggatgggt

SEQ ID NO: 2379877 - DNA, 25 bp, Homo sapien
catcccgaggcccatcctccgggat

SEQ ID NO: 2379878 - DNA, 25 bp, Homo sapien
ttccctcggctccaacaacaatgga

SEQ ID NO: 2379879 - DNA, 25 bp, Homo sapien
ctggaagggctccaagacgcggctc

SEQ ID NO: 2379880 - DNA, 25 bp, Homo sapien
ggcggcttctcagcccgggacccgc

SEQ ID NO: 2379881 - DNA, 25 bp, Homo sapien
tggagcctggctcgggagtccggct

SEQ ID NO: 2379882 - DNA, 25 bp, Homo sapien
ctcgcctcctctgccggacgcaggg

SEQ ID NO: 2379883 - DNA, 25 bp, Homo sapien
tcgcctcctctgccggacgcagggc

SEQ ID NO: 2379884 - DNA, 25 bp, Homo sapien
cctcctctgccggacgcagggcgcc

SEQ ID NO: 2379885 - DNA, 25 bp, Homo sapien
cgcctcctctgccggacgcagggcg

SEQ ID NO: 2379886 - DNA, 25 bp, Homo sapien
ctgggtgcgcgaggggttcctcatc

SEQ ID NO: 2379887 - DNA, 25 bp, Homo sapien
gggtgcgcgaggggttcctcatcac

SEQ ID NO: 2379888 - DNA, 25 bp, Homo sapien
tgggtgcgcgaggggttcctcatca

SEQ ID NO: 2379889 - DNA, 25 bp, Homo sapien
tcaaacaatggaggcgtccggcggc

SEQ ID NO: 2379890 - DNA, 25 bp, Homo sapien
tggtcaaacaatggaggcgtccggc

SEQ ID NO: 2379891 - DNA, 25 bp, Homo sapien
ctgggtgagaatccggcccttgttg

SEQ ID NO: 2379892 - DNA, 25 bp, Homo sapien
ttgtggtcaaacaatggaggcgtcc

SEQ ID NO: 2379893 - DNA, 25 bp, Homo sapien
tcagagggaagtggacagcgccggc

SEQ ID NO: 2379894 - DNA, 25 bp, Homo sapien
cagagggaagtggacagcgccggca

SEQ ID NO: 2379895 - DNA, 25 bp, Homo sapien
gaaaactgcagtcgagtcctggaag

SEQ ID NO: 2379896 - DNA, 25 bp, Homo sapien
tgagaagccggggacagtgagaaaa

SEQ ID NO: 2379897 - DNA, 25 bp, Homo sapien
aagccggggacagtgagaaaactgc

SEQ ID NO: 2379898 - DNA, 25 bp, Homo sapien
tgagaaaactgcagtcgagtcctgg

SEQ ID NO: 2379899 - DNA, 25 bp, Homo sapien
tagagttcggcaagaaaggtttcac

SEQ ID NO: 2379900 - DNA, 25 bp, Homo sapien
gatggatccggacgggaaaatgtct

SEQ ID NO: 2379901 - DNA, 25 bp, Homo sapien
ggtgatgtggcggagagatggatcc

SEQ ID NO: 2379902 - DNA, 25 bp, Homo sapien
aacagttcagttcggagcaggctcc

SEQ ID NO: 2379903 - DNA, 25 bp, Homo sapien
tcagaaatcttttttcggtatctgg

SEQ ID NO: 2379904 - DNA, 25 bp, Homo sapien
cagaaatcttttttcggtatctggt

SEQ ID NO: 2379905 - DNA, 25 bp, Homo sapien
atcttttttcggtatctggtctcct

SEQ ID NO: 2379906 - DNA, 25 bp, Homo sapien
ttaacctgcgggttgaacaaggtca

SEQ ID NO: 2379907 - DNA, 25 bp, Homo sapien
atgcgtctatgaaggaaataggagc

SEQ ID NO: 2379908 - DNA, 25 bp, Homo sapien
tgtaaatatcagaaaacgttccttg

SEQ ID NO: 2379909 - DNA, 25 bp, Homo sapien
tcctgctctaaaaaactatgcgtct

SEQ ID NO: 2379910 - DNA, 25 bp, Homo sapien
gaaactatggaacatggtgcagcag

SEQ ID NO: 2379911 - DNA, 25 bp, Homo sapien
cacacataatagtcggcatccctga

SEQ ID NO: 2379912 - DNA, 25 bp, Homo sapien
gaaagttacggtgcaacagtccttg

SEQ ID NO: 2379913 - DNA, 25 bp, Homo sapien
gataattagcgtagatctgtgctcc

SEQ ID NO: 2379914 - DNA, 25 bp, Homo sapien
tatttcctggcctgcccctacgtgg

SEQ ID NO: 2379915 - DNA, 25 bp, Homo sapien
tggaagggaccagtttaccaagatg

SEQ ID NO: 2379916 - DNA, 25 bp, Homo sapien
agagaaatcactcccagaagtcagg

SEQ ID NO: 2379917 - DNA, 25 bp, Homo sapien
acatggatgaaagggcaccactctg

SEQ ID NO: 2379918 - DNA, 25 bp, Homo sapien
gcaggcactttctccgctacctttt

SEQ ID NO: 2379919 - DNA, 25 bp, Homo sapien
ttggcaggcactttctccgctacct

SEQ ID NO: 2379920 - DNA, 25 bp, Homo sapien
accttttctccacttgtccttcaag

SEQ ID NO: 2379921 - DNA, 25 bp, Homo sapien
tccacttgtccttcaaggtacccat

SEQ ID NO: 2379922 - DNA, 25 bp, Homo sapien
gaagcatagggcagacacacagtga

SEQ ID NO: 2379923 - DNA, 25 bp, Homo sapien
cacgtgttatttactgccaagcgag

SEQ ID NO: 2379924 - DNA, 25 bp, Homo sapien
gctgcaacagtaaaaccgatacggt

SEQ ID NO: 2379925 - DNA, 25 bp, Homo sapien
gaatctgctcctgtaagcgctgcaa

SEQ ID NO: 2379926 - DNA, 25 bp, Homo sapien
gacaggatcaaaacccccaagacat

SEQ ID NO: 2379927 - DNA, 25 bp, Homo sapien
gaaggactacaaaggccttaggatc

SEQ ID NO: 2379928 - DNA, 25 bp, Homo sapien
gagaaagtatgtgccctccagctta

SEQ ID NO: 2379929 - DNA, 25 bp, Homo sapien
tatcaggacgtacataccgccaaag

SEQ ID NO: 2379930 - DNA, 25 bp, Homo sapien
tccatctggcacaattcactaaggt

SEQ ID NO: 2379931 - DNA, 25 bp, Homo sapien
tgggctgtgcatctatctgacactg

SEQ ID NO: 2379932 - DNA, 25 bp, Homo sapien
tactcattccggcactaattcgtca

SEQ ID NO: 2379933 - DNA, 25 bp, Homo sapien
gtgctgatactcattccggcactaa

SEQ ID NO: 2379934 - DNA, 25 bp, Homo sapien
actaattcgtcaatgttgcatctgg

SEQ ID NO: 2379935 - DNA, 25 bp, Homo sapien
ttccggcactaattcgtcaatgttg

SEQ ID NO: 2379936 - DNA, 25 bp, Homo sapien
gagtgaccaaggcatctctgtaggg

SEQ ID NO: 2379937 - DNA, 25 bp, Homo sapien
tgtatacagaggtcatcagatgcca

SEQ ID NO: 2379938 - DNA, 25 bp, Homo sapien
cagaaactcttatctggagtgacca

SEQ ID NO: 2379939 - DNA, 25 bp, Homo sapien
tgaagtccagcaggcagaaacagga

SEQ ID NO: 2379940 - DNA, 25 bp, Homo sapien
gcataagggcacactttctgggaaa

SEQ ID NO: 2379941 - DNA, 25 bp, Homo sapien
tacagcaggcaattgtgtcataggg

SEQ ID NO: 2379942 - DNA, 25 bp, Homo sapien
gggaagatgacatgtcggcctccaa

SEQ ID NO: 2379943 - DNA, 25 bp, Homo sapien
gagtacaggtcttcctatgaagcac

SEQ ID NO: 2379944 - DNA, 25 bp, Homo sapien
ggactggtacccatctgtggcccac

SEQ ID NO: 2379945 - DNA, 25 bp, Homo sapien
tggtacccatctgtggcccacaggt

SEQ ID NO: 2379946 - DNA, 25 bp, Homo sapien
ggcttagaaaatccctgtatgacaa

SEQ ID NO: 2379947 - DNA, 25 bp, Homo sapien
cccctggcttagaaaatccctgtat

SEQ ID NO: 2379948 - DNA, 25 bp, Homo sapien
caatgggtgaaaaaagcggctggaa

SEQ ID NO: 2379949 - DNA, 25 bp, Homo sapien
gagtagcacttacaaaatgagcctg

SEQ ID NO: 2379950 - DNA, 25 bp, Homo sapien
tatgccagaaagcaagagggccgtg

SEQ ID NO: 2379951 - DNA, 25 bp, Homo sapien
taagaagcgatagcaatgagcacac

SEQ ID NO: 2379952 - DNA, 25 bp, Homo sapien
tatacccggttattcactgaggcag

SEQ ID NO: 2379953 - DNA, 25 bp, Homo sapien
ctggtggagcagataaaggtacatt

SEQ ID NO: 2379954 - DNA, 25 bp, Homo sapien
aataggaaatgactgatatacccgg

SEQ ID NO: 2379955 - DNA, 25 bp, Homo sapien
taaactggactgcttataggtgaaa

SEQ ID NO: 2379956 - DNA, 25 bp, Homo sapien
cttatcttccaaagatgtgtctctt

SEQ ID NO: 2379957 - DNA, 25 bp, Homo sapien
ttttggtcttgaagaagctctctta

SEQ ID NO: 2379958 - DNA, 25 bp, Homo sapien
tatcttccaaagatgtgtctcttgg

SEQ ID NO: 2379959 - DNA, 25 bp, Homo sapien
tttggtcttgaagaagctctcttat

SEQ ID NO: 2379960 - DNA, 25 bp, Homo sapien
caggtatggcaagccctgctttggg

SEQ ID NO: 2379961 - DNA, 25 bp, Homo sapien
tatcgaaggatgagatactgctggc

SEQ ID NO: 2379962 - DNA, 25 bp, Homo sapien
ttccctacatgggtatcatgccgtc

SEQ ID NO: 2379963 - DNA, 25 bp, Homo sapien
cagttgccccttgaagagtcagttt

SEQ ID NO: 2379964 - DNA, 25 bp, Homo sapien
tcctatttggtatcgtgatttcaag

SEQ ID NO: 2379965 - DNA, 25 bp, Homo sapien
ttcctatttggtatcgtgatttcaa

SEQ ID NO: 2379966 - DNA, 25 bp, Homo sapien
ttttcctatttggtatcgtgatttc

SEQ ID NO: 2379967 - DNA, 25 bp, Homo sapien
atttccttatgattactacagttac

SEQ ID NO: 2379968 - DNA, 25 bp, Homo sapien
tgaaagaaacccttatcacacttgt

SEQ ID NO: 2379969 - DNA, 25 bp, Homo sapien
gctcgaactctgactgaacgccttc

SEQ ID NO: 2379970 - DNA, 25 bp, Homo sapien
tggactctctggtggatgcacaggc

SEQ ID NO: 2379971 - DNA, 25 bp, Homo sapien
taaaaagatctgctctctcagagaa

SEQ ID NO: 2379972 - DNA, 25 bp, Homo sapien
tctaggactagctggaaactcggaa

SEQ ID NO: 2379973 - DNA, 25 bp, Homo sapien
gaagcgacgtctgtgactgggacct

SEQ ID NO: 2379974 - DNA, 25 bp, Homo sapien
tctttcaactatggaggcatcgtgc

SEQ ID NO: 2379975 - DNA, 25 bp, Homo sapien
cgtacttgtggaattcaggcctgga

SEQ ID NO: 2379976 - DNA, 25 bp, Homo sapien
attaaattgatttggacatactgta

SEQ ID NO: 2379977 - DNA, 25 bp, Homo sapien
tattaaattgatttggacatactgt

SEQ ID NO: 2379978 - DNA, 25 bp, Homo sapien
ttattaaattgatttggacatactg

SEQ ID NO: 2379979 - DNA, 25 bp, Homo sapien
ttttattaaattgatttggacatac

SEQ ID NO: 2379980 - DNA, 25 bp, Homo sapien
cgagtaaccatatgccagccagtgt

SEQ ID NO: 2379981 - DNA, 25 bp, Homo sapien
tagagtcacaaacataaggaaagcc

SEQ ID NO: 2379982 - DNA, 25 bp, Homo sapien
tcatgatgcagagaagacctggatc

SEQ ID NO: 2379983 - DNA, 25 bp, Homo sapien
cactaactggaactcttaggcaccc

SEQ ID NO: 2379984 - DNA, 25 bp, Homo sapien
tgacccacgtcccaggaaacaaaca

SEQ ID NO: 2379985 - DNA, 25 bp, Homo sapien
cattccgtctactggtgctcctgga

SEQ ID NO: 2379986 - DNA, 25 bp, Homo sapien
tagggatgcaggaacccctgccagt

SEQ ID NO: 2379987 - DNA, 25 bp, Homo sapien
caggagaaatgcttgtgacagggca

SEQ ID NO: 2379988 - DNA, 25 bp, Homo sapien
gaccttcatcaagagcacacggagg

SEQ ID NO: 2379989 - DNA, 25 bp, Homo sapien
cttggaagcctaggattccagggac

SEQ ID NO: 2379990 - DNA, 25 bp, Homo sapien
cttcatcaagagcacacggagggtg

SEQ ID NO: 2379991 - DNA, 25 bp, Homo sapien
tctggttgcctcatactgccttgga

SEQ ID NO: 2379992 - DNA, 25 bp, Homo sapien
tggtacgcagcaatcacggcctgtt

SEQ ID NO: 2379993 - DNA, 25 bp, Homo sapien
ctttgtttctcatgcgttgtgcttg

SEQ ID NO: 2379994 - DNA, 25 bp, Homo sapien
cccttgctggtacgcagcaatcacg

SEQ ID NO: 2379995 - DNA, 25 bp, Homo sapien
ctcatgcgttgtgcttgactgcccc

SEQ ID NO: 2379996 - DNA, 25 bp, Homo sapien
tggaatcccctgctctttcgactcc

SEQ ID NO: 2379997 - DNA, 25 bp, Homo sapien
gaatcccctgctctttcgactcccc

SEQ ID NO: 2379998 - DNA, 25 bp, Homo sapien
tcccctgctctttcgactcccccat

SEQ ID NO: 2379999 - DNA, 25 bp, Homo sapien
ctggaatcccctgctctttcgactc

SEQ ID NO: 2380000 - DNA, 25 bp, Homo sapien
tggcactcacctgtggcaaaaggtg

SEQ ID NO: 2380001 - DNA, 25 bp, Homo sapien
cactcacctgtggcaaaaggtgagg

SEQ ID NO: 2380002 - DNA, 25 bp, Homo sapien
ctggcactcacctgtggcaaaaggt

SEQ ID NO: 2380003 - DNA, 25 bp, Homo sapien
ggcactcacctgtggcaaaaggtga

SEQ ID NO: 2380004 - DNA, 25 bp, Homo sapien
ctctccatctgcacactcccgtgta

SEQ ID NO: 2380005 - DNA, 25 bp, Homo sapien
tctccatctgcacactcccgtgtac

SEQ ID NO: 2380006 - DNA, 25 bp, Homo sapien
cctctccatctgcacactcccgtgt

SEQ ID NO: 2380007 - DNA, 25 bp, Homo sapien
ctgaaggaggaaaaaggtgacagag

SEQ ID NO: 2380008 - DNA, 25 bp, Homo sapien
aggaaaaaggtgacagagagaggca

SEQ ID NO: 2380009 - DNA, 25 bp, Homo sapien
ggaggaaaaaggtgacagagagagg

SEQ ID NO: 2380010 - DNA, 25 bp, Homo sapien
gaaggaggaaaaaggtgacagagag

SEQ ID NO: 2380011 - DNA, 25 bp, Homo sapien
ggctgctctgagaaggtgatgctgg

SEQ ID NO: 2380012 - DNA, 25 bp, Homo sapien
tgctctgagaaggtgatgctgggct

SEQ ID NO: 2380013 - DNA, 25 bp, Homo sapien
ctaggggatggatgcaggctgctct

SEQ ID NO: 2380014 - DNA, 25 bp, Homo sapien
ctgagaaggtgatgctgggctgaga

SEQ ID NO: 2380015 - DNA, 25 bp, Homo sapien
gacattcaattgcaacctgtcttga

SEQ ID NO: 2380016 - DNA, 25 bp, Homo sapien
tgtgggtgccatgaggttatttgaa

SEQ ID NO: 2380017 - DNA, 25 bp, Homo sapien
ttgcaacctgtcttgaggtgtgggt

SEQ ID NO: 2380018 - DNA, 25 bp, Homo sapien
gatgtgagcacatccgttctttgcc

SEQ ID NO: 2380019 - DNA, 25 bp, Homo sapien
catggacatgggtgccgaagagaac

SEQ ID NO: 2380020 - DNA, 25 bp, Homo sapien
aagagactgcctgtcacggctggaa

SEQ ID NO: 2380021 - DNA, 25 bp, Homo sapien
aaagtagcaatacggccaggctggc

SEQ ID NO: 2380022 - DNA, 25 bp, Homo sapien
gaatcctatactatgggccagcagg

SEQ ID NO: 2380023 - DNA, 25 bp, Homo sapien
catattccatatgtccggccacgtg

SEQ ID NO: 2380024 - DNA, 25 bp, Homo sapien
cagggcctgttttattgggagagca

SEQ ID NO: 2380025 - DNA, 25 bp, Homo sapien
gattatccaaaaagctcctggaccg

SEQ ID NO: 2380026 - DNA, 25 bp, Homo sapien
cacggcgaagaagctactgggtttc

SEQ ID NO: 2380027 - DNA, 25 bp, Homo sapien
tcctggttgtgacatggcgctattg

SEQ ID NO: 2380028 - DNA, 25 bp, Homo sapien
gacatggcgctattgttgacatacc

SEQ ID NO: 2380029 - DNA, 25 bp, Homo sapien
ggcgctattgttgacatacctgtgt

SEQ ID NO: 2380030 - DNA, 25 bp, Homo sapien
tggcgctattgttgacatacctgtg

SEQ ID NO: 2380031 - DNA, 25 bp, Homo sapien
ctagaagctgaagggcttgacgaca

SEQ ID NO: 2380032 - DNA, 25 bp, Homo sapien
ctgaagggcttgacgacagaggcat

SEQ ID NO: 2380033 - DNA, 25 bp, Homo sapien
agctgaagggcttgacgacagaggc

SEQ ID NO: 2380034 - DNA, 25 bp, Homo sapien
gaagggcttgacgacagaggcatac

SEQ ID NO: 2380035 - DNA, 25 bp, Homo sapien
tggagactgaataagacaaaggaca

SEQ ID NO: 2380036 - DNA, 25 bp, Homo sapien
catgcacagttggaacagctttctc

SEQ ID NO: 2380037 - DNA, 25 bp, Homo sapien
caaatggtgcctagcaaggtcagga

SEQ ID NO: 2380038 - DNA, 25 bp, Homo sapien
gccatgtgcagattgaccacggaat

SEQ ID NO: 2380039 - DNA, 25 bp, Homo sapien
ggtttggaagctctcggagccccac

SEQ ID NO: 2380040 - DNA, 25 bp, Homo sapien
tcctccttcttatccattggtttgg

SEQ ID NO: 2380041 - DNA, 25 bp, Homo sapien
tacatgggacaaactgtggtcggca

SEQ ID NO: 2380042 - DNA, 25 bp, Homo sapien
ggatggatgaacaaggcattgctct

SEQ ID NO: 2380043 - DNA, 25 bp, Homo sapien
gggcagccttaggtgaactgtgctc

SEQ ID NO: 2380044 - DNA, 25 bp, Homo sapien
tttccccgctcctgacaagggcagc

SEQ ID NO: 2380045 - DNA, 25 bp, Homo sapien
gccttaggtgaactgtgctcctcac

SEQ ID NO: 2380046 - DNA, 25 bp, Homo sapien
cagccttaggtgaactgtgctcctc

SEQ ID NO: 2380047 - DNA, 25 bp, Homo sapien
tctgtggataaggacatggacctat

SEQ ID NO: 2380048 - DNA, 25 bp, Homo sapien
tactgggtaacctaacgtattcaca

SEQ ID NO: 2380049 - DNA, 25 bp, Homo sapien
tatttcctggatgccttatgctgtg

SEQ ID NO: 2380050 - DNA, 25 bp, Homo sapien
gcagttaagtaactcatgtgaggtc

SEQ ID NO: 2380051 - DNA, 25 bp, Homo sapien
tattgcccttcgtgtattaggttcc

SEQ ID NO: 2380052 - DNA, 25 bp, Homo sapien
taccacaagctcagggacttaaaac

SEQ ID NO: 2380053 - DNA, 25 bp, Homo sapien
taattcatgtaaagctcacagccac

SEQ ID NO: 2380054 - DNA, 25 bp, Homo sapien
tgttctaagtgctgccatgtcataa

SEQ ID NO: 2380055 - DNA, 25 bp, Homo sapien
tccacatcagcaggacgttcaccag

SEQ ID NO: 2380056 - DNA, 25 bp, Homo sapien
ttggcggtgtccacatcagcaggac

SEQ ID NO: 2380057 - DNA, 25 bp, Homo sapien
tccagtgacccacactccacttggc

SEQ ID NO: 2380058 - DNA, 25 bp, Homo sapien
tgacccacactccacttggcggtgt

SEQ ID NO: 2380059 - DNA, 25 bp, Homo sapien
ttgtgtgtgtctccgaggccgttgt

SEQ ID NO: 2380060 - DNA, 25 bp, Homo sapien
tcctgggattccagtgagggcatct

SEQ ID NO: 2380061 - DNA, 25 bp, Homo sapien
atctggagggaagccgtcacagccg

SEQ ID NO: 2380062 - DNA, 25 bp, Homo sapien
ggccgttgtgtgtgcaggacctcac

SEQ ID NO: 2380063 - DNA, 25 bp, Homo sapien
acggattggtaggaagaatgcagcc

SEQ ID NO: 2380064 - DNA, 25 bp, Homo sapien
cagggatagggaatttctcggaagc

SEQ ID NO: 2380065 - DNA, 25 bp, Homo sapien
cctgtcacttacagagaaccctggg

SEQ ID NO: 2380066 - DNA, 25 bp, Homo sapien
cctaagtaaagctctgacggattgg

SEQ ID NO: 2380067 - DNA, 25 bp, Homo sapien
ctgcagggagcacacattgatgtta

SEQ ID NO: 2380068 - DNA, 25 bp, Homo sapien
tattaatcgaatcagagtcggcttc

SEQ ID NO: 2380069 - DNA, 25 bp, Homo sapien
tataattattaatcgaatcagagtc

SEQ ID NO: 2380070 - DNA, 25 bp, Homo sapien
ggagcacacattgatgttataatta

SEQ ID NO: 2380071 - DNA, 25 bp, Homo sapien
tggggtccgcggttctcctccgtga

SEQ ID NO: 2380072 - DNA, 25 bp, Homo sapien
tcaccattgttcctgtgcggctcag

SEQ ID NO: 2380073 - DNA, 25 bp, Homo sapien
tagggttcgtcctaatcaagctgaa

SEQ ID NO: 2380074 - DNA, 25 bp, Homo sapien
cattgactgcatggccgaggttcca

SEQ ID NO: 2380075 - DNA, 25 bp, Homo sapien
cacacatacagagagctgtctgcag

SEQ ID NO: 2380076 - DNA, 25 bp, Homo sapien
cgcctctgggtgcatgtttctgtca

SEQ ID NO: 2380077 - DNA, 25 bp, Homo sapien
cacaaccaatgggatacagagcaga

SEQ ID NO: 2380078 - DNA, 25 bp, Homo sapien
gtactaaatctcatgcagcccagct

SEQ ID NO: 2380079 - DNA, 25 bp, Homo sapien
tcatgtctatagctgtcacactgtg

SEQ ID NO: 2380080 - DNA, 25 bp, Homo sapien
caattcaacaaagccactcacatcg

SEQ ID NO: 2380081 - DNA, 25 bp, Homo sapien
ggaaaatatgacaatactacagatg

SEQ ID NO: 2380082 - DNA, 25 bp, Homo sapien
ctcacatcgctgatgaatgcatgaa

SEQ ID NO: 2380083 - DNA, 25 bp, Homo sapien
gcgaagatgtgaggcaaaggccctg

SEQ ID NO: 2380084 - DNA, 25 bp, Homo sapien
acgccaggcgaagatgtgaggcaaa

SEQ ID NO: 2380085 - DNA, 25 bp, Homo sapien
tggttggccgaagacgccaggcgaa

SEQ ID NO: 2380086 - DNA, 25 bp, Homo sapien
caaaggccctgtgtgtctctagcat

SEQ ID NO: 2380087 - DNA, 25 bp, Homo sapien
tcattcatggccctcggtcaccttc

SEQ ID NO: 2380088 - DNA, 25 bp, Homo sapien
tggccctcggtcaccttccacttct

SEQ ID NO: 2380089 - DNA, 25 bp, Homo sapien
tggtaaccaggaggcttccatccac

SEQ ID NO: 2380090 - DNA, 25 bp, Homo sapien
ttggtaaccaggaggcttccatcca

SEQ ID NO: 2380091 - DNA, 25 bp, Homo sapien
ggattatgggagatatggaccattt

SEQ ID NO: 2380092 - DNA, 25 bp, Homo sapien
aacaaaatgtaaacagggattatgg

SEQ ID NO: 2380093 - DNA, 25 bp, Homo sapien
aatgtaaacagggattatgggagat

SEQ ID NO: 2380094 - DNA, 25 bp, Homo sapien
agggattatgggagatatggaccat

SEQ ID NO: 2380095 - DNA, 25 bp, Homo sapien
caaggagatgtcactgaatgatctt

SEQ ID NO: 2380096 - DNA, 25 bp, Homo sapien
ttccatttgccccattagccaagga

SEQ ID NO: 2380097 - DNA, 25 bp, Homo sapien
aatgatcttgaagtgcctggatcaa

SEQ ID NO: 2380098 - DNA, 25 bp, Homo sapien
tcaagctggggtttaatctggttct

SEQ ID NO: 2380099 - DNA, 25 bp, Homo sapien
cacggccattaactggattactggg

SEQ ID NO: 2380100 - DNA, 25 bp, Homo sapien
catgcacggccattaactggattac

SEQ ID NO: 2380101 - DNA, 25 bp, Homo sapien
attgcctccatgcacggccattaac

SEQ ID NO: 2380102 - DNA, 25 bp, Homo sapien
tccatgcacggccattaactggatt

SEQ ID NO: 2380103 - DNA, 25 bp, Homo sapien
tccgcaagcagacaactcgtccaag

SEQ ID NO: 2380104 - DNA, 25 bp, Homo sapien
actgtggtccgtgaagactctcacc

SEQ ID NO: 2380105 - DNA, 25 bp, Homo sapien
ttctgctcgtcagcatgtgtcttgc

SEQ ID NO: 2380106 - DNA, 25 bp, Homo sapien
caatcacctcgtgcaacactgtggt

SEQ ID NO: 2380107 - DNA, 25 bp, Homo sapien
tggcagaaattggaagcatcaagac

SEQ ID NO: 2380108 - DNA, 25 bp, Homo sapien
caggccccggagaaacaactgaaca

SEQ ID NO: 2380109 - DNA, 25 bp, Homo sapien
ccaaatgctcccgatatggcagaaa

SEQ ID NO: 2380110 - DNA, 25 bp, Homo sapien
tttgggaatccaacagaccaaggcc

SEQ ID NO: 2380111 - DNA, 25 bp, Homo sapien
ggtctgtacttcttggcagtgccct

SEQ ID NO: 2380112 - DNA, 25 bp, Homo sapien
gcagctggaagtatctccttcggtc

SEQ ID NO: 2380113 - DNA, 25 bp, Homo sapien
tgccatttgcacaatatcccaaggg

SEQ ID NO: 2380114 - DNA, 25 bp, Homo sapien
tctcattgtcaccagaaggacagca

SEQ ID NO: 2380115 - DNA, 25 bp, Homo sapien
tagagggaggacatagttacaggca

SEQ ID NO: 2380116 - DNA, 25 bp, Homo sapien
catcctatgaccaggcctaagaggg

SEQ ID NO: 2380117 - DNA, 25 bp, Homo sapien
tatttttagctacgtacagcaggac

SEQ ID NO: 2380118 - DNA, 25 bp, Homo sapien
cagaggccacctcatgagtcctggg

SEQ ID NO: 2380119 - DNA, 25 bp, Homo sapien
taaggtggcattccataacttggca

SEQ ID NO: 2380120 - DNA, 25 bp, Homo sapien
gcatgggaccattccacaataaggt

SEQ ID NO: 2380121 - DNA, 25 bp, Homo sapien
gtgtgttctgcatgggaccattcca

SEQ ID NO: 2380122 - DNA, 25 bp, Homo sapien
tctccggagcctcttgagcaaagcc

SEQ ID NO: 2380123 - DNA, 25 bp, Homo sapien
gcggttgggcccaatagcttcacca

SEQ ID NO: 2380124 - DNA, 25 bp, Homo sapien
cggttgggcccaatagcttcaccat

SEQ ID NO: 2380125 - DNA, 25 bp, Homo sapien
ggttgggcccaatagcttcaccatc

SEQ ID NO: 2380126 - DNA, 25 bp, Homo sapien
tcccctggtactgtccacatggcag

SEQ ID NO: 2380127 - DNA, 25 bp, Homo sapien
taacgagctgtgcaactgtctgcag

SEQ ID NO: 2380128 - DNA, 25 bp, Homo sapien
gccacaagttccctcaaaaacgaga

SEQ ID NO: 2380129 - DNA, 25 bp, Homo sapien
ggctgctgagacatatcccctggta

SEQ ID NO: 2380130 - DNA, 25 bp, Homo sapien
tccgctcgtctcaagtcctgcttgc

SEQ ID NO: 2380131 - DNA, 25 bp, Homo sapien
gactccgctcgtctcaagtcctgct

SEQ ID NO: 2380132 - DNA, 25 bp, Homo sapien
caagtcctgcttgccgagagttctc

SEQ ID NO: 2380133 - DNA, 25 bp, Homo sapien
tggactccgctcgtctcaagtcctg

SEQ ID NO: 2380134 - DNA, 25 bp, Homo sapien
tccagctacttatgagtgggtggct

SEQ ID NO: 2380135 - DNA, 25 bp, Homo sapien
cacgagtgtacggtggagtttccag

SEQ ID NO: 2380136 - DNA, 25 bp, Homo sapien
gaaaagattattcgaaccctgcggc

SEQ ID NO: 2380137 - DNA, 25 bp, Homo sapien
tttccagaggctacgtggtgcatcc

SEQ ID NO: 2380138 - DNA, 25 bp, Homo sapien
tacaacagcttatagggtcagtgga

SEQ ID NO: 2380139 - DNA, 25 bp, Homo sapien
tagtaagaatgacatgccaggcacc

SEQ ID NO: 2380140 - DNA, 25 bp, Homo sapien
gaatgatgccatccaaccctgttga

SEQ ID NO: 2380141 - DNA, 25 bp, Homo sapien
ggaagagcgtatcactgttcaccaa

SEQ ID NO: 2380142 - DNA, 25 bp, Homo sapien
gccgcctctgacagcctctggtaac

SEQ ID NO: 2380143 - DNA, 25 bp, Homo sapien
gagccgcctctgacagcctctggta

SEQ ID NO: 2380144 - DNA, 25 bp, Homo sapien
ccgagccgcctctgacagcctctgg

SEQ ID NO: 2380145 - DNA, 25 bp, Homo sapien
ctgacagcctctggtaacccgtcat

SEQ ID NO: 2380146 - DNA, 25 bp, Homo sapien
tgtcctcgccgaaggatgtgagcct

SEQ ID NO: 2380147 - DNA, 25 bp, Homo sapien
acattcgcggctgtttgtgggctga

SEQ ID NO: 2380148 - DNA, 25 bp, Homo sapien
cagcgaagcagaacagaaaccgatt

SEQ ID NO: 2380149 - DNA, 25 bp, Homo sapien
ccagggtgtaagcatatgcaaggtc

SEQ ID NO: 2380150 - DNA, 25 bp, Homo sapien
atcagatgcttcatcgtagatattg

SEQ ID NO: 2380151 - DNA, 25 bp, Homo sapien
gaatcagatgcttcatcgtagatat

SEQ ID NO: 2380152 - DNA, 25 bp, Homo sapien
gatgcttcatcgtagatattgttca

SEQ ID NO: 2380153 - DNA, 25 bp, Homo sapien
cagatgcttcatcgtagatattgtt

SEQ ID NO: 2380154 - DNA, 25 bp, Homo sapien
cggaatctctcacccggaggcctga

SEQ ID NO: 2380155 - DNA, 25 bp, Homo sapien
aattgctgctggattttgcagggag

SEQ ID NO: 2380156 - DNA, 25 bp, Homo sapien
cggaggcctgaagacggtgcagatg

SEQ ID NO: 2380157 - DNA, 25 bp, Homo sapien
cctgaagacggtgcagatgcgctgt

SEQ ID NO: 2380158 - DNA, 25 bp, Homo sapien
tgggcagccaaaccagtgccgttgt

SEQ ID NO: 2380159 - DNA, 25 bp, Homo sapien
agccaaaccagtgccgttgtccaag

SEQ ID NO: 2380160 - DNA, 25 bp, Homo sapien
ttgtccaaggtcgggacatctgagc

SEQ ID NO: 2380161 - DNA, 25 bp, Homo sapien
tcgagctgggcagccaaaccagtgc

SEQ ID NO: 2380162 - DNA, 25 bp, Homo sapien
cctgaggtacgttgcaggtcctggc

SEQ ID NO: 2380163 - DNA, 25 bp, Homo sapien
accctgaggtacgttgcaggtcctg

SEQ ID NO: 2380164 - DNA, 25 bp, Homo sapien
tgaggtacgttgcaggtcctggcag

SEQ ID NO: 2380165 - DNA, 25 bp, Homo sapien
cttccagtttgaccctgaggtacgt

SEQ ID NO: 2380166 - DNA, 25 bp, Homo sapien
gaataacattggtaataagatgcct

SEQ ID NO: 2380167 - DNA, 25 bp, Homo sapien
tggtaataagatgcctcgtgtccgt

SEQ ID NO: 2380168 - DNA, 25 bp, Homo sapien
tgtccgttttatgaactgcaaatac

SEQ ID NO: 2380169 - DNA, 25 bp, Homo sapien
aagatgcctcgtgtccgttttatga

SEQ ID NO: 2380170 - DNA, 25 bp, Homo sapien
gtggcattcctggacgtcaccctcg

SEQ ID NO: 2380171 - DNA, 25 bp, Homo sapien
gcagacagatcaccaaattggattt

SEQ ID NO: 2380172 - DNA, 25 bp, Homo sapien
tccctaatgagacgaagcagtttca

SEQ ID NO: 2380173 - DNA, 25 bp, Homo sapien
agcagtttcacaggggaaccgtggc

SEQ ID NO: 2380174 - DNA, 25 bp, Homo sapien
aacactccaccctcaccacgatgtt

SEQ ID NO: 2380175 - DNA, 25 bp, Homo sapien
ctgtgttcccaacactccaccctca

SEQ ID NO: 2380176 - DNA, 25 bp, Homo sapien
gtgttcccaacactccaccctcacc

SEQ ID NO: 2380177 - DNA, 25 bp, Homo sapien
ccaacactccaccctcaccacgatg

SEQ ID NO: 2380178 - DNA, 25 bp, Homo sapien
tcaattgattgagaaccaatataac

SEQ ID NO: 2380179 - DNA, 25 bp, Homo sapien
ccaatataactggtcacatagggta

SEQ ID NO: 2380180 - DNA, 25 bp, Homo sapien
ctttaactggtaggtgggtctcaat

SEQ ID NO: 2380181 - DNA, 25 bp, Homo sapien
tctacccccaaaatatcagaacctg

SEQ ID NO: 2380182 - DNA, 25 bp, Homo sapien
cccgagggcagggatgatttctata

SEQ ID NO: 2380183 - DNA, 25 bp, Homo sapien
gaaggtgacattagaacccaggtgt

SEQ ID NO: 2380184 - DNA, 25 bp, Homo sapien
acacgcatcatctcattgaaccttg

SEQ ID NO: 2380185 - DNA, 25 bp, Homo sapien
tggacaaggtccacgctaaccacat

SEQ ID NO: 2380186 - DNA, 25 bp, Homo sapien
agtgcccttatgagacatgagagct

SEQ ID NO: 2380187 - DNA, 25 bp, Homo sapien
agccaagaagcaagtcctcaccaag

SEQ ID NO: 2380188 - DNA, 25 bp, Homo sapien
cttagccaggtatatcaatgtagag

SEQ ID NO: 2380189 - DNA, 25 bp, Homo sapien
tgaactagaacagggaggtgatacc

SEQ ID NO: 2380190 - DNA, 25 bp, Homo sapien
tcttcccggctggaaacttgccgct

SEQ ID NO: 2380191 - DNA, 25 bp, Homo sapien
gacgcctacggctgagaggcttctt

SEQ ID NO: 2380192 - DNA, 25 bp, Homo sapien
ccggctgtaaggagcttttagctga

SEQ ID NO: 2380193 - DNA, 25 bp, Homo sapien
gagcacttaattaagccagggcagg

SEQ ID NO: 2380194 - DNA, 25 bp, Homo sapien
ttagcccgtgtcctctcggagcctg

SEQ ID NO: 2380195 - DNA, 25 bp, Homo sapien
catttttagcccgtgtcctctcgga

SEQ ID NO: 2380196 - DNA, 25 bp, Homo sapien
cttcatttttagcccgtgtcctctc

SEQ ID NO: 2380197 - DNA, 25 bp, Homo sapien
ttttagcccgtgtcctctcggagcc

SEQ ID NO: 2380198 - DNA, 25 bp, Homo sapien
agtactggcgtctcggttacccgca

SEQ ID NO: 2380199 - DNA, 25 bp, Homo sapien
ggagggccaccacagccctagtact

SEQ ID NO: 2380200 - DNA, 25 bp, Homo sapien
gtggaaagcattgggtggaacctgt

SEQ ID NO: 2380201 - DNA, 25 bp, Homo sapien
agggccagctctttgggccttaagg

SEQ ID NO: 2380202 - DNA, 25 bp, Homo sapien
gcttctccaccgcgctccggggccc

SEQ ID NO: 2380203 - DNA, 25 bp, Homo sapien
gggcttctccaccgcgctccggggc

SEQ ID NO: 2380204 - DNA, 25 bp, Homo sapien
ggcttctccaccgcgctccggggcc

SEQ ID NO: 2380205 - DNA, 25 bp, Homo sapien
ccgcgcgcgcgtcgaggatgccggg

SEQ ID NO: 2380206 - DNA, 25 bp, Homo sapien
cgcgcgtcgaggatgccgggcgcca

SEQ ID NO: 2380207 - DNA, 25 bp, Homo sapien
gcgcgcgcgtcgaggatgccgggcg

SEQ ID NO: 2380208 - DNA, 25 bp, Homo sapien
cgcgcgcgtcgaggatgccgggcgc

SEQ ID NO: 2380209 - DNA, 25 bp, Homo sapien
cgctctggcctcgctgggtcccggg

SEQ ID NO: 2380210 - DNA, 25 bp, Homo sapien
ctcgctgggtcccgggggctccgag

SEQ ID NO: 2380211 - DNA, 25 bp, Homo sapien
ctctggcctcgctgggtcccggggg

SEQ ID NO: 2380212 - DNA, 25 bp, Homo sapien
tggcctcgctgggtcccgggggctc

SEQ ID NO: 2380213 - DNA, 25 bp, Homo sapien
tcagggcaacacagtttcatacctg

SEQ ID NO: 2380214 - DNA, 25 bp, Homo sapien
agggcaacacagtttcatacctggc

SEQ ID NO: 2380215 - DNA, 25 bp, Homo sapien
gggcaacacagtttcatacctggca

SEQ ID NO: 2380216 - DNA, 25 bp, Homo sapien
ggcaacacagtttcatacctggcat

SEQ ID NO: 2380217 - DNA, 25 bp, Homo sapien
ccttagggaagctctcacgtacact

SEQ ID NO: 2380218 - DNA, 25 bp, Homo sapien
tggcttctcttgcaatgtgggtcca

SEQ ID NO: 2380219 - DNA, 25 bp, Homo sapien
aagctctcacgtacactcttcagaa

SEQ ID NO: 2380220 - DNA, 25 bp, Homo sapien
cagggatccagcacgtcttccttag

SEQ ID NO: 2380221 - DNA, 25 bp, Homo sapien
caggccggcgaggaaagatagccgc

SEQ ID NO: 2380222 - DNA, 25 bp, Homo sapien
tgaacactcgctggctggaagtcaa

SEQ ID NO: 2380223 - DNA, 25 bp, Homo sapien
gggctcctcggagctccccaccttc

SEQ ID NO: 2380224 - DNA, 25 bp, Homo sapien
agtacacaggggctcctcggagctc

SEQ ID NO: 2380225 - DNA, 25 bp, Homo sapien
cgaacatcgaaacggtcgtggcgcc

SEQ ID NO: 2380226 - DNA, 25 bp, Homo sapien
tggcagccaccagttcatcctgagg

SEQ ID NO: 2380227 - DNA, 25 bp, Homo sapien
gccgtgaaagcccagaccgatatag

SEQ ID NO: 2380228 - DNA, 25 bp, Homo sapien
ggctgcagggctattcgaacatcga

SEQ ID NO: 2380229 - DNA, 25 bp, Homo sapien
ctaaagtccacccaagctggaagcg

SEQ ID NO: 2380230 - DNA, 25 bp, Homo sapien
gctggaagcgctgggcaggagacac

SEQ ID NO: 2380231 - DNA, 25 bp, Homo sapien
taaagtccacccaagctggaagcgc

SEQ ID NO: 2380232 - DNA, 25 bp, Homo sapien
agtccacccaagctggaagcgctgg

SEQ ID NO: 2380233 - DNA, 25 bp, Homo sapien
cattttcccaagtgcgtgcaggtgt

SEQ ID NO: 2380234 - DNA, 25 bp, Homo sapien
ctatatgattccatgtttttagaaa

SEQ ID NO: 2380235 - DNA, 25 bp, Homo sapien
caaaagatgttatctgaagctcggc

SEQ ID NO: 2380236 - DNA, 25 bp, Homo sapien
tgaccccagctgcaagactctatat

SEQ ID NO: 2380237 - DNA, 25 bp, Homo sapien
cagtctgtggacaaacatcaccagg

SEQ ID NO: 2380238 - DNA, 25 bp, Homo sapien
ccccatccctgctagtcacggtcac

SEQ ID NO: 2380239 - DNA, 25 bp, Homo sapien
gcagtctgtggacaaacatcaccag

SEQ ID NO: 2380240 - DNA, 25 bp, Homo sapien
ctagtcacggtcaccccagaacaag

SEQ ID NO: 2380241 - DNA, 25 bp, Homo sapien
cagagagccccgagtatgggcccat

SEQ ID NO: 2380242 - DNA, 25 bp, Homo sapien
gagagccccgagtatgggcccatac

SEQ ID NO: 2380243 - DNA, 25 bp, Homo sapien
agagagccccgagtatgggcccata

SEQ ID NO: 2380244 - DNA, 25 bp, Homo sapien
cccagagagccccgagtatgggccc

SEQ ID NO: 2380245 - DNA, 25 bp, Homo sapien
taaaaaacaatttttgcagagacag

SEQ ID NO: 2380246 - DNA, 25 bp, Homo sapien
ctcaaagagctggaactgcaggcgt

SEQ ID NO: 2380247 - DNA, 25 bp, Homo sapien
ggctagagtacggtagtgcaatcat

SEQ ID NO: 2380248 - DNA, 25 bp, Homo sapien
catgccccagccaatttaaaaaaca

SEQ ID NO: 2380249 - DNA, 25 bp, Homo sapien
gggttatgcagccccttgttgcagt

SEQ ID NO: 2380250 - DNA, 25 bp, Homo sapien
ggttatgcagccccttgttgcagtg

SEQ ID NO: 2380251 - DNA, 25 bp, Homo sapien
aacactggcagcatccggggcctca

SEQ ID NO: 2380252 - DNA, 25 bp, Homo sapien
gggttccgggttcaccttgatgctc

SEQ ID NO: 2380253 - DNA, 25 bp, Homo sapien
tgatgctctccccaaagaacactgg

SEQ ID NO: 2380254 - DNA, 25 bp, Homo sapien
gatctcatgcgtgggttccgggttc

SEQ ID NO: 2380255 - DNA, 25 bp, Homo sapien
tggaaatgcttctccgaggcgtact

SEQ ID NO: 2380256 - DNA, 25 bp, Homo sapien
gccacgtgcagttgggtgctgccac

SEQ ID NO: 2380257 - DNA, 25 bp, Homo sapien
ggcgtacttgacctcagagttgcag

SEQ ID NO: 2380258 - DNA, 25 bp, Homo sapien
cgatggtctcgctgtaggccgtgac

SEQ ID NO: 2380259 - DNA, 25 bp, Homo sapien
gtggtgctgcggaagcgcagggcgc

SEQ ID NO: 2380260 - DNA, 25 bp, Homo sapien
gtggtccggaaagtgctcctggcat

SEQ ID NO: 2380261 - DNA, 25 bp, Homo sapien
cggaaagtgctcctggcatgcttgg

SEQ ID NO: 2380262 - DNA, 25 bp, Homo sapien
ctgcagtgcagggtggtccggaaag

SEQ ID NO: 2380263 - DNA, 25 bp, Homo sapien
ctggcaaagctgcagctgcacgctg

SEQ ID NO: 2380264 - DNA, 25 bp, Homo sapien
cagctgcacgctggcggtgaaccag

SEQ ID NO: 2380265 - DNA, 25 bp, Homo sapien
aaagctgcagctgcacgctggcggt

SEQ ID NO: 2380266 - DNA, 25 bp, Homo sapien
gcagctgcacgctggcggtgaacca

SEQ ID NO: 2380267 - DNA, 25 bp, Homo sapien
gcgtggcagggcccaggaggctggg

SEQ ID NO: 2380268 - DNA, 25 bp, Homo sapien
tggcagggcccaggaggctgggggc

SEQ ID NO: 2380269 - DNA, 25 bp, Homo sapien
cagggcccaggaggctgggggcagg

SEQ ID NO: 2380270 - DNA, 25 bp, Homo sapien
ggcccaggaggctgggggcagggtc

SEQ ID NO: 2380271 - DNA, 25 bp, Homo sapien
agggctcccggctcctccagcaccc

SEQ ID NO: 2380272 - DNA, 25 bp, Homo sapien
tccagcaccccgggccggccccagc

SEQ ID NO: 2380273 - DNA, 25 bp, Homo sapien
ggctcctccagcaccccgggccggc

SEQ ID NO: 2380274 - DNA, 25 bp, Homo sapien
cagggctcccggctcctccagcacc

SEQ ID NO: 2380275 - DNA, 25 bp, Homo sapien
ggccgagctcatcgtgtccatcctc

SEQ ID NO: 2380276 - DNA, 25 bp, Homo sapien
ccaggccgagctcatcgtgtccatc

SEQ ID NO: 2380277 - DNA, 25 bp, Homo sapien
aggccgagctcatcgtgtccatcct

SEQ ID NO: 2380278 - DNA, 25 bp, Homo sapien
ctgcccgagtgccaggccgagctca

SEQ ID NO: 2380279 - DNA, 25 bp, Homo sapien
tctctgcttcaagggcactccatgg

SEQ ID NO: 2380280 - DNA, 25 bp, Homo sapien
gacctctcggtgcaacctgcatgtg

SEQ ID NO: 2380281 - DNA, 25 bp, Homo sapien
ttggccaccagcctaggacacatgg

SEQ ID NO: 2380282 - DNA, 25 bp, Homo sapien
tgttttggaaataccccaggccagc

SEQ ID NO: 2380283 - DNA, 25 bp, Homo sapien
catttcgacgggcagtgccccaaat

SEQ ID NO: 2380284 - DNA, 25 bp, Homo sapien
tttcgacgggcagtgccccaaatct

SEQ ID NO: 2380285 - DNA, 25 bp, Homo sapien
tgccccaaatctttgacactggagg

SEQ ID NO: 2380286 - DNA, 25 bp, Homo sapien
ctttccatttcgacgggcagtgccc

SEQ ID NO: 2380287 - DNA, 25 bp, Homo sapien
gatgggtgttagctggggacgccct

SEQ ID NO: 2380288 - DNA, 25 bp, Homo sapien
tgcgtggatgggtgttagctgggga

SEQ ID NO: 2380289 - DNA, 25 bp, Homo sapien
tggatgggtgttagctggggacgcc

SEQ ID NO: 2380290 - DNA, 25 bp, Homo sapien
gtggatgggtgttagctggggacgc

SEQ ID NO: 2380291 - DNA, 25 bp, Homo sapien
tggttttgacatcaagggttctcgt

SEQ ID NO: 2380292 - DNA, 25 bp, Homo sapien
cacaggtggcagcatttccgagagc

SEQ ID NO: 2380293 - DNA, 25 bp, Homo sapien
ggttttgacatcaagggttctcgtc

SEQ ID NO: 2380294 - DNA, 25 bp, Homo sapien
agcatttccgagagcttcaccgcct

SEQ ID NO: 2380295 - DNA, 25 bp, Homo sapien
cccaactgtggagtgcattcaggtc

SEQ ID NO: 2380296 - DNA, 25 bp, Homo sapien
gaatcgattgcgcacaggaatgcag

SEQ ID NO: 2380297 - DNA, 25 bp, Homo sapien
tcctggatgtgaacggaatctcccc

SEQ ID NO: 2380298 - DNA, 25 bp, Homo sapien
taaggtgctgtcattgcggaatcga

SEQ ID NO: 2380299 - DNA, 25 bp, Homo sapien
catgggcctctccaagggcgagatg

SEQ ID NO: 2380300 - DNA, 25 bp, Homo sapien
aacagattgtaaggtgcgtcccagc

SEQ ID NO: 2380301 - DNA, 25 bp, Homo sapien
gcttgccagagctgacgaccaggat

SEQ ID NO: 2380302 - DNA, 25 bp, Homo sapien
tatggagctgcagatatgcacgcca

SEQ ID NO: 2380303 - DNA, 25 bp, Homo sapien
gccactgcaggaggtccacaaattg

SEQ ID NO: 2380304 - DNA, 25 bp, Homo sapien
gcgacaaccatttgtgtggtagagc

SEQ ID NO: 2380305 - DNA, 25 bp, Homo sapien
attgcaggctctcagaggcgggcgt

SEQ ID NO: 2380306 - DNA, 25 bp, Homo sapien
tcagcaaaggcgacaaccatttgtg

SEQ ID NO: 2380307 - DNA, 25 bp, Homo sapien
cccgcttagcgctctggacagatgg

SEQ ID NO: 2380308 - DNA, 25 bp, Homo sapien
ttttcacacatcgttgccgcagcgg

SEQ ID NO: 2380309 - DNA, 25 bp, Homo sapien
taccgttcaagaggcgtgtgcaggc

SEQ ID NO: 2380310 - DNA, 25 bp, Homo sapien
caaagtctaaactgagctcgcagcc

SEQ ID NO: 2380311 - DNA, 25 bp, Homo sapien
caccctggtgaaccgtggggcctct

SEQ ID NO: 2380312 - DNA, 25 bp, Homo sapien
ccgggccctctgtttgtacaattca

SEQ ID NO: 2380313 - DNA, 25 bp, Homo sapien
tgggccagatctagcccgggccctc

SEQ ID NO: 2380314 - DNA, 25 bp, Homo sapien
taatgtgtgtgcgaggacagacatg

SEQ ID NO: 2380315 - DNA, 25 bp, Homo sapien
tcacgggcaatgaggccttcctggt

SEQ ID NO: 2380316 - DNA, 25 bp, Homo sapien
gagccgatggcatcttcacgggcaa

SEQ ID NO: 2380317 - DNA, 25 bp, Homo sapien
aaggttctgtcaggagagtgctgcc

SEQ ID NO: 2380318 - DNA, 25 bp, Homo sapien
tcaaaggtcaccagcgggtggtcac

SEQ ID NO: 2380319 - DNA, 25 bp, Homo sapien
cactggctccaaaaagcacgacgta

SEQ ID NO: 2380320 - DNA, 25 bp, Homo sapien
cccgggcactggaacgtgcctgcta

SEQ ID NO: 2380321 - DNA, 25 bp, Homo sapien
atgtgatggccgacgcccgggcact

SEQ ID NO: 2380322 - DNA, 25 bp, Homo sapien
cgtgcctgctacgaggagagcctga

SEQ ID NO: 2380323 - DNA, 25 bp, Homo sapien
aggagctgcggcacacgcccgagct

SEQ ID NO: 2380324 - DNA, 25 bp, Homo sapien
atcccgcgcgaggagctgcggcaca

SEQ ID NO: 2380325 - DNA, 25 bp, Homo sapien
gagatcccgcgcgaggagctgcggc

SEQ ID NO: 2380326 - DNA, 25 bp, Homo sapien
ccatgagatcccgcgcgaggagctg

SEQ ID NO: 2380327 - DNA, 25 bp, Homo sapien
cagaggcgctaccttggttcacaga

SEQ ID NO: 2380328 - DNA, 25 bp, Homo sapien
ccagggcgtttgcaggatctccaga

SEQ ID NO: 2380329 - DNA, 25 bp, Homo sapien
catttgtgtagggtcagccagggct

SEQ ID NO: 2380330 - DNA, 25 bp, Homo sapien
taggactcgggtcactaatgaggac

SEQ ID NO: 2380331 - DNA, 25 bp, Homo sapien
tgttcatagagaaaatacagctgat

SEQ ID NO: 2380332 - DNA, 25 bp, Homo sapien
tacgtcgaaccctttatggctagca

SEQ ID NO: 2380333 - DNA, 25 bp, Homo sapien
ggctagcatatagtatggtcctcat

SEQ ID NO: 2380334 - DNA, 25 bp, Homo sapien
aaagcgtatcatttaggctaggcac

SEQ ID NO: 2380335 - DNA, 25 bp, Homo sapien
ggcgcctcttgaacggtgcgtgcag

SEQ ID NO: 2380336 - DNA, 25 bp, Homo sapien
ctgagtttgaacgtaggctctgcca

SEQ ID NO: 2380337 - DNA, 25 bp, Homo sapien
gccttggggaagtgacctgtgctct

SEQ ID NO: 2380338 - DNA, 25 bp, Homo sapien
gcctcttgaacggtgcgtgcaggca

SEQ ID NO: 2380339 - DNA, 25 bp, Homo sapien
gggccatgcttaaggcaccctgttg

SEQ ID NO: 2380340 - DNA, 25 bp, Homo sapien
accctgttgagtgtggtgaccacca

SEQ ID NO: 2380341 - DNA, 25 bp, Homo sapien
gtgaccaccagtgaagccgctggcg

SEQ ID NO: 2380342 - DNA, 25 bp, Homo sapien
tggcgtggacgaacatgcagccaga

SEQ ID NO: 2380343 - DNA, 25 bp, Homo sapien
ggagggcgacgtgccctagttactc

SEQ ID NO: 2380344 - DNA, 25 bp, Homo sapien
actcttactgctgtggttattgtta

SEQ ID NO: 2380345 - DNA, 25 bp, Homo sapien
tgaacgagtgattacctgtgaggtc

SEQ ID NO: 2380346 - DNA, 25 bp, Homo sapien
gccctagttactcttactgctgtgg

SEQ ID NO: 2380347 - DNA, 25 bp, Homo sapien
tctgaggtggttcatccaggatgac

SEQ ID NO: 2380348 - DNA, 25 bp, Homo sapien
taacacttgctgaagtcccttgtgg

SEQ ID NO: 2380349 - DNA, 25 bp, Homo sapien
tggctgaatgtgcagaaccccgtcc

SEQ ID NO: 2380350 - DNA, 25 bp, Homo sapien
acttccagttaagcagtgccccgcg

SEQ ID NO: 2380351 - DNA, 25 bp, Homo sapien
actgccaacagccagggaagacgca

SEQ ID NO: 2380352 - DNA, 25 bp, Homo sapien
taatgaggccaacagcgaggaggcc

SEQ ID NO: 2380353 - DNA, 25 bp, Homo sapien
cgcatcacccgctcaatggctaatg

SEQ ID NO: 2380354 - DNA, 25 bp, Homo sapien
tccaaaggccgcaaaactgccaaca

SEQ ID NO: 2380355 - DNA, 25 bp, Homo sapien
caaggaagacctcctcaagtaaggc

SEQ ID NO: 2380356 - DNA, 25 bp, Homo sapien
gaagccggaggtggagaacgacaag

SEQ ID NO: 2380357 - DNA, 25 bp, Homo sapien
agacctcctcaagtaaggcagcctg

SEQ ID NO: 2380358 - DNA, 25 bp, Homo sapien
ggtggagaacgacaaggaagacctc

SEQ ID NO: 2380359 - DNA, 25 bp, Homo sapien
tcaagcgctggcacagtggtttata

SEQ ID NO: 2380360 - DNA, 25 bp, Homo sapien
ctagtgaattgcaaaaccagagccc

SEQ ID NO: 2380361 - DNA, 25 bp, Homo sapien
ggcttttggaatgctagcccctcca

SEQ ID NO: 2380362 - DNA, 25 bp, Homo sapien
ggaagggccgcgttatcctagtgaa

SEQ ID NO: 2380363 - DNA, 25 bp, Homo sapien
gagaggctgtatagggaatggtttg

SEQ ID NO: 2380364 - DNA, 25 bp, Homo sapien
ggaatggagaggctgtatagggaat

SEQ ID NO: 2380365 - DNA, 25 bp, Homo sapien
gacagtgtgctataattccggggaa

SEQ ID NO: 2380366 - DNA, 25 bp, Homo sapien
aaccccacagtgagaatctgcgatg

SEQ ID NO: 2380367 - DNA, 25 bp, Homo sapien
aggaaagacctctccaccagcgagg

SEQ ID NO: 2380368 - DNA, 25 bp, Homo sapien
ttcctgcagtgctttatggcgcttg

SEQ ID NO: 2380369 - DNA, 25 bp, Homo sapien
tggtttcgcgttttccctgctctgg

SEQ ID NO: 2380370 - DNA, 25 bp, Homo sapien
aaagggaagattcatggctcccctc

SEQ ID NO: 2380371 - DNA, 25 bp, Homo sapien
tacattgtgataagtgactgccgcc

SEQ ID NO: 2380372 - DNA, 25 bp, Homo sapien
gactgccgccatgggacaatgagat

SEQ ID NO: 2380373 - DNA, 25 bp, Homo sapien
gatttcggacgcgttggagtcgccc

SEQ ID NO: 2380374 - DNA, 25 bp, Homo sapien
taatttcacgcttgacttcctgccg

SEQ ID NO: 2380375 - DNA, 25 bp, Homo sapien
tgaggtaggcatatacccacaggtt

SEQ ID NO: 2380376 - DNA, 25 bp, Homo sapien
tgatgcccttcttgaagcgaccacc

SEQ ID NO: 2380377 - DNA, 25 bp, Homo sapien
tagctgggtctctgtaggtgtccca

SEQ ID NO: 2380378 - DNA, 25 bp, Homo sapien
gggctcaggcttgaatccaggccca

SEQ ID NO: 2380379 - DNA, 25 bp, Homo sapien
gattctgcattgtagccagccccag

SEQ ID NO: 2380380 - DNA, 25 bp, Homo sapien
cagcaagagttctgcgatcggccag

SEQ ID NO: 2380381 - DNA, 25 bp, Homo sapien
ttcatggtaccacggaggtgtccca

SEQ ID NO: 2380382 - DNA, 25 bp, Homo sapien
cattcacttgggatcggtaggccac

SEQ ID NO: 2380383 - DNA, 25 bp, Homo sapien
gcagggaagtcggtgggaaccttgc

SEQ ID NO: 2380384 - DNA, 25 bp, Homo sapien
aagcgggaggaggcgtttccggcag

SEQ ID NO: 2380385 - DNA, 25 bp, Homo sapien
cagctgtggatgtgtttgccagatg

SEQ ID NO: 2380386 - DNA, 25 bp, Homo sapien
tgggaaccttgcggaggccgccttc

SEQ ID NO: 2380387 - DNA, 25 bp, Homo sapien
gcagagattggagggctgaagccgc

SEQ ID NO: 2380388 - DNA, 25 bp, Homo sapien
gaataaattgctgtcgttggccggg

SEQ ID NO: 2380389 - DNA, 25 bp, Homo sapien
gactacatgaactacaggaagacaa

SEQ ID NO: 2380390 - DNA, 25 bp, Homo sapien
ggagtagggtcctgctgacgccttg

SEQ ID NO: 2380391 - DNA, 25 bp, Homo sapien
caccctctcctgataaggcacagag

SEQ ID NO: 2380392 - DNA, 25 bp, Homo sapien
agtcaccctctcctgataaggcaca

SEQ ID NO: 2380393 - DNA, 25 bp, Homo sapien
tgtaaagtcggcacagagtcaccct

SEQ ID NO: 2380394 - DNA, 25 bp, Homo sapien
gtgtccttcccatagccttgtaaag

SEQ ID NO: 2380395 - DNA, 25 bp, Homo sapien
gcagggcggctttctgggggcacca

SEQ ID NO: 2380396 - DNA, 25 bp, Homo sapien
agaagccccacgctctgacatcatc

SEQ ID NO: 2380397 - DNA, 25 bp, Homo sapien
ggcaccaatcccactcatgacagct

SEQ ID NO: 2380398 - DNA, 25 bp, Homo sapien
tgacatcatcccgtggtgattaggt

SEQ ID NO: 2380399 - DNA, 25 bp, Homo sapien
cctccctgatataggcctctgctaa

SEQ ID NO: 2380400 - DNA, 25 bp, Homo sapien
gttgtgactccctgtgacaccttca

SEQ ID NO: 2380401 - DNA, 25 bp, Homo sapien
gtcaccaccagggtctgcggtatgc

SEQ ID NO: 2380402 - DNA, 25 bp, Homo sapien
tgctaatggcgcctcctgagagagg

SEQ ID NO: 2380403 - DNA, 25 bp, Homo sapien
tgtctcattgtcatggggcctctcc

SEQ ID NO: 2380404 - DNA, 25 bp, Homo sapien
cctctcctgggacctcgagaatggc

SEQ ID NO: 2380405 - DNA, 25 bp, Homo sapien
gacctcgagaatggcctccgaaggc

SEQ ID NO: 2380406 - DNA, 25 bp, Homo sapien
tgcccgctgtctcattgtcatgggg

SEQ ID NO: 2380407 - DNA, 25 bp, Homo sapien
caataccggcacctggtctgagggt

SEQ ID NO: 2380408 - DNA, 25 bp, Homo sapien
tatgaagttgtagtggccggactga

SEQ ID NO: 2380409 - DNA, 25 bp, Homo sapien
ctggctcgacccctcaaggatggtg

SEQ ID NO: 2380410 - DNA, 25 bp, Homo sapien
tctcagggcgatggtatttatgaag

SEQ ID NO: 2380411 - DNA, 25 bp, Homo sapien
agggctgtctcatcggacgaagttg

SEQ ID NO: 2380412 - DNA, 25 bp, Homo sapien
ctgcagtcacggaaaagagcgctcg

SEQ ID NO: 2380413 - DNA, 25 bp, Homo sapien
agcgcagtgttgtcggccctgagct

SEQ ID NO: 2380414 - DNA, 25 bp, Homo sapien
gccctgagctcagcgggatggtggg

SEQ ID NO: 2380415 - DNA, 25 bp, Homo sapien
gctcgtacttttggcttccaaacaa

SEQ ID NO: 2380416 - DNA, 25 bp, Homo sapien
tggaggcccgacgtctcgttcacgg

SEQ ID NO: 2380417 - DNA, 25 bp, Homo sapien
cctgtgtttataggcccagagtggc

SEQ ID NO: 2380418 - DNA, 25 bp, Homo sapien
ccaaacaagaggagtggacttatgt

SEQ ID NO: 2380419 - DNA, 25 bp, Homo sapien
atggcgatgaggaattattacttac

SEQ ID NO: 2380420 - DNA, 25 bp, Homo sapien
catggcgatgaggaattattactta

SEQ ID NO: 2380421 - DNA, 25 bp, Homo sapien
ccagcctttggcgaaggtctggatg

SEQ ID NO: 2380422 - DNA, 25 bp, Homo sapien
ccagggccagcctttggcgaaggtc

SEQ ID NO: 2380423 - DNA, 25 bp, Homo sapien
gggccagcctttggcgaaggtctgg

SEQ ID NO: 2380424 - DNA, 25 bp, Homo sapien
agcctttggcgaaggtctggatgca

SEQ ID NO: 2380425 - DNA, 25 bp, Homo sapien
tgctgagcagataaccagacactgg

SEQ ID NO: 2380426 - DNA, 25 bp, Homo sapien
tctgaatatgagtttggttttggcc

SEQ ID NO: 2380427 - DNA, 25 bp, Homo sapien
tcaacaaacaatttgctgcggagtg

SEQ ID NO: 2380428 - DNA, 25 bp, Homo sapien
ccaggaagcggcctgtcggcagatt

SEQ ID NO: 2380429 - DNA, 25 bp, Homo sapien
tggcctgcggtgaatcatattctgg

SEQ ID NO: 2380430 - DNA, 25 bp, Homo sapien
tgtggcctgcggtgaatcatattct

SEQ ID NO: 2380431 - DNA, 25 bp, Homo sapien
gtggcctgcggtgaatcatattctg

SEQ ID NO: 2380432 - DNA, 25 bp, Homo sapien
gcctgcggtgaatcatattctgggg

SEQ ID NO: 2380433 - DNA, 25 bp, Homo sapien
ttgtgcagccggacagggcctgcgt

SEQ ID NO: 2380434 - DNA, 25 bp, Homo sapien
cgttgctgggccgtggcttggatgg

SEQ ID NO: 2380435 - DNA, 25 bp, Homo sapien
tgacttcaggcttgcggggtttggg

SEQ ID NO: 2380436 - DNA, 25 bp, Homo sapien
tgggagtgggggttcacacattccc

SEQ ID NO: 2380437 - DNA, 25 bp, Homo sapien
ggtttctcctcaggacctgagcatg

SEQ ID NO: 2380438 - DNA, 25 bp, Homo sapien
tttctcctcaggacctgagcatgtg

SEQ ID NO: 2380439 - DNA, 25 bp, Homo sapien
gtggtttctcctcaggacctgagca

SEQ ID NO: 2380440 - DNA, 25 bp, Homo sapien
ctcgtggtttctcctcaggacctga

SEQ ID NO: 2380441 - DNA, 25 bp, Homo sapien
acaaacatggtgccccgcacagatg

SEQ ID NO: 2380442 - DNA, 25 bp, Homo sapien
ggggccacagcacacgcagcacgcc

SEQ ID NO: 2380443 - DNA, 25 bp, Homo sapien
catcaggctgcgctgaagggtagat

SEQ ID NO: 2380444 - DNA, 25 bp, Homo sapien
catggtgccccgcacagatggggcc

SEQ ID NO: 2380445 - DNA, 25 bp, Homo sapien
taatgttagccgttccaggagaccc

SEQ ID NO: 2380446 - DNA, 25 bp, Homo sapien
tctaggcattgggttgctaggtcac

SEQ ID NO: 2380447 - DNA, 25 bp, Homo sapien
catgcccacctgcagtggatgagag

SEQ ID NO: 2380448 - DNA, 25 bp, Homo sapien
caggagaccctaatgcacatgcgat

SEQ ID NO: 2380449 - DNA, 25 bp, Homo sapien
gcatcagttaaatgccccggcctga

SEQ ID NO: 2380450 - DNA, 25 bp, Homo sapien
tgaaatgacctctcatgtgcctgtg

SEQ ID NO: 2380451 - DNA, 25 bp, Homo sapien
ttctttcataaacgggtgggctctg

SEQ ID NO: 2380452 - DNA, 25 bp, Homo sapien
catgagttggtggatgcctcccaga

SEQ ID NO: 2380453 - DNA, 25 bp, Homo sapien
acgagtcaggttggcctttgtggct

SEQ ID NO: 2380454 - DNA, 25 bp, Homo sapien
cgaatggacgagtcaggttggcctt

SEQ ID NO: 2380455 - DNA, 25 bp, Homo sapien
ctgggtgtggcgaatggacgagtca

SEQ ID NO: 2380456 - DNA, 25 bp, Homo sapien
atggacgagtcaggttggcctttgt

SEQ ID NO: 2380457 - DNA, 25 bp, Homo sapien
gcaggtcgaagctgcctctgggttt

SEQ ID NO: 2380458 - DNA, 25 bp, Homo sapien
cctctgggtttgaatgtcggctggc

SEQ ID NO: 2380459 - DNA, 25 bp, Homo sapien
ggtgtcctggtcgaggcaggtcgaa

SEQ ID NO: 2380460 - DNA, 25 bp, Homo sapien
ctctgtttgttgagcagctgaaggt

SEQ ID NO: 2380461 - DNA, 25 bp, Homo sapien
ttaattgcttctggcggatggtgcc

SEQ ID NO: 2380462 - DNA, 25 bp, Homo sapien
tctcttgacccagcaattaattgct

SEQ ID NO: 2380463 - DNA, 25 bp, Homo sapien
aggccctcgtgacaaatctctttca

SEQ ID NO: 2380464 - DNA, 25 bp, Homo sapien
tccagggagcttctaaaggccagac

SEQ ID NO: 2380465 - DNA, 25 bp, Homo sapien
tacatgagaaagatcccgggctgag

SEQ ID NO: 2380466 - DNA, 25 bp, Homo sapien
ccccgtgtgtcggtgggttggtgtg

SEQ ID NO: 2380467 - DNA, 25 bp, Homo sapien
tcggacccctccagaccagaggctc

SEQ ID NO: 2380468 - DNA, 25 bp, Homo sapien
aaacctgtgcctcggacccctccag

SEQ ID NO: 2380469 - DNA, 25 bp, Homo sapien
cgtggaaggtggaagcgtgctgcgc

SEQ ID NO: 2380470 - DNA, 25 bp, Homo sapien
cgcagcggcacctcccggaactgtg

SEQ ID NO: 2380471 - DNA, 25 bp, Homo sapien
gccctcagtgggaacgtggaaggtg

SEQ ID NO: 2380472 - DNA, 25 bp, Homo sapien
cctcccggaactgtgcggccctcag

SEQ ID NO: 2380473 - DNA, 25 bp, Homo sapien
gcttctcctgctggcctttctttgc

SEQ ID NO: 2380474 - DNA, 25 bp, Homo sapien
ttctcctgctggcctttctttgcat

SEQ ID NO: 2380475 - DNA, 25 bp, Homo sapien
ctgcttctcctgctggcctttcttt

SEQ ID NO: 2380476 - DNA, 25 bp, Homo sapien
tcaggtcccctgcttctcctgctgg

SEQ ID NO: 2380477 - DNA, 25 bp, Homo sapien
ctacaggctgctcggatatcaacca

SEQ ID NO: 2380478 - DNA, 25 bp, Homo sapien
tacaggctgctcggatatcaaccat

SEQ ID NO: 2380479 - DNA, 25 bp, Homo sapien
agtcaggcccagcagagcaatgaag

SEQ ID NO: 2380480 - DNA, 25 bp, Homo sapien
ggagtctgtggtgccggtgcccaga

SEQ ID NO: 2380481 - DNA, 25 bp, Homo sapien
tcccctctgcttgtccggagaggat

SEQ ID NO: 2380482 - DNA, 25 bp, Homo sapien
cgtgtccctgcttggaaattcactg

SEQ ID NO: 2380483 - DNA, 25 bp, Homo sapien
ccttgcggcagctttgatataaggg

SEQ ID NO: 2380484 - DNA, 25 bp, Homo sapien
caggctgtgtacctcgtgggtggcc

SEQ ID NO: 2380485 - DNA, 25 bp, Homo sapien
ccagatctgggtccttgcggcagct

SEQ ID NO: 2380486 - DNA, 25 bp, Homo sapien
gctttgatataaggggctctccggg

SEQ ID NO: 2380487 - DNA, 25 bp, Homo sapien
tgaacttgattagcctgaatgggca

SEQ ID NO: 2380488 - DNA, 25 bp, Homo sapien
ccatggttgaccatgtgaacttgat

SEQ ID NO: 2380489 - DNA, 25 bp, Homo sapien
gaacttgattagcctgaatgggcat

SEQ ID NO: 2380490 - DNA, 25 bp, Homo sapien
ccagacttagggacaagggatggca

SEQ ID NO: 2380491 - DNA, 25 bp, Homo sapien
acttagggacaagggatggcagcca

SEQ ID NO: 2380492 - DNA, 25 bp, Homo sapien
ggcccagacttagggacaagggatg

SEQ ID NO: 2380493 - DNA, 25 bp, Homo sapien
agacttagggacaagggatggcagc

SEQ ID NO: 2380494 - DNA, 25 bp, Homo sapien
cgcctcttccacttcctgcaaaatc

SEQ ID NO: 2380495 - DNA, 25 bp, Homo sapien
cacgcctcttccacttcctgcaaaa

SEQ ID NO: 2380496 - DNA, 25 bp, Homo sapien
ctacacgcctcttccacttcctgca

SEQ ID NO: 2380497 - DNA, 25 bp, Homo sapien
acacgcctcttccacttcctgcaaa

SEQ ID NO: 2380498 - DNA, 25 bp, Homo sapien
tggcttcctgtctgtcctctggcac

SEQ ID NO: 2380499 - DNA, 25 bp, Homo sapien
ggcttcctgtctgtcctctggcacc

SEQ ID NO: 2380500 - DNA, 25 bp, Homo sapien
ttggcttcctgtctgtcctctggca

SEQ ID NO: 2380501 - DNA, 25 bp, Homo sapien
cttcctgtctgtcctctggcacctt

SEQ ID NO: 2380502 - DNA, 25 bp, Homo sapien
aactcctggccgctgtgtgctttct

SEQ ID NO: 2380503 - DNA, 25 bp, Homo sapien
gctttcttccatcccgaaatgtgtg

SEQ ID NO: 2380504 - DNA, 25 bp, Homo sapien
ggtttggcctggatgcaagttctct

SEQ ID NO: 2380505 - DNA, 25 bp, Homo sapien
tgtgacagacgcaggaggaactgca

SEQ ID NO: 2380506 - DNA, 25 bp, Homo sapien
gaggcttaagggtccagagtcaacc

SEQ ID NO: 2380507 - DNA, 25 bp, Homo sapien
gagtcaaccctcaaaggaagtcaag

SEQ ID NO: 2380508 - DNA, 25 bp, Homo sapien
cctaggtgggtaaactccaggcaag

SEQ ID NO: 2380509 - DNA, 25 bp, Homo sapien
ctcagctgggttacgagggtgtcca

SEQ ID NO: 2380510 - DNA, 25 bp, Homo sapien
tggctgcttgatgccgtcagcaaag

SEQ ID NO: 2380511 - DNA, 25 bp, Homo sapien
caaagaccaagacccttccctctgg

SEQ ID NO: 2380512 - DNA, 25 bp, Homo sapien
attggctgcttgatgccgtcagcaa

SEQ ID NO: 2380513 - DNA, 25 bp, Homo sapien
gcttgatgccgtcagcaaagaccaa

SEQ ID NO: 2380514 - DNA, 25 bp, Homo sapien
tttcaatcggtaccaacggggcaca

SEQ ID NO: 2380515 - DNA, 25 bp, Homo sapien
gcatgcatctctccgactttgtctt

SEQ ID NO: 2380516 - DNA, 25 bp, Homo sapien
gcccgccccagaagcatcttcagtt

SEQ ID NO: 2380517 - DNA, 25 bp, Homo sapien
agttcagtctcgtatacgtgtagtt

SEQ ID NO: 2380518 - DNA, 25 bp, Homo sapien
gctggaggactgcctggaggaggag

SEQ ID NO: 2380519 - DNA, 25 bp, Homo sapien
aggaggcagcagccagttgtcccat

SEQ ID NO: 2380520 - DNA, 25 bp, Homo sapien
gaggaggaggcagcagccagttgtc

SEQ ID NO: 2380521 - DNA, 25 bp, Homo sapien
gaggaggcagcagccagttgtccca

SEQ ID NO: 2380522 - DNA, 25 bp, Homo sapien
tttcgtaagcaggaacgggtgaaga

SEQ ID NO: 2380523 - DNA, 25 bp, Homo sapien
ttcgtaagcaggaacgggtgaagag

SEQ ID NO: 2380524 - DNA, 25 bp, Homo sapien
ctattttcgtaagcaggaacgggtg

SEQ ID NO: 2380525 - DNA, 25 bp, Homo sapien
tattttcgtaagcaggaacgggtga

SEQ ID NO: 2380526 - DNA, 25 bp, Homo sapien
ctggaaaatgggtgctcttataacc

SEQ ID NO: 2380527 - DNA, 25 bp, Homo sapien
ttccactgggagcacgcccaggtct

SEQ ID NO: 2380528 - DNA, 25 bp, Homo sapien
ggatacctcttccactgggagcacg

SEQ ID NO: 2380529 - DNA, 25 bp, Homo sapien
tggcgaggcgactttcagggatacc

SEQ ID NO: 2380530 - DNA, 25 bp, Homo sapien
gacaccctcttttgtgctccggcaa

SEQ ID NO: 2380531 - DNA, 25 bp, Homo sapien
ccgttgccatggcgagaggcgtcct

SEQ ID NO: 2380532 - DNA, 25 bp, Homo sapien
ccagagtgcgggtgtttccccgaca

SEQ ID NO: 2380533 - DNA, 25 bp, Homo sapien
cactgtgtttctgccgccagagtgc

SEQ ID NO: 2380534 - DNA, 25 bp, Homo sapien
tggccagttcagcggtttcttaaaa

SEQ ID NO: 2380535 - DNA, 25 bp, Homo sapien
actccagagagtctgcctaagagaa

SEQ ID NO: 2380536 - DNA, 25 bp, Homo sapien
gaaatgggaacatacgtccacccag

SEQ ID NO: 2380537 - DNA, 25 bp, Homo sapien
taacctagacctaccgtatgatcca

SEQ ID NO: 2380538 - DNA, 25 bp, Homo sapien
ggcttctttacacccatggtccaga

SEQ ID NO: 2380539 - DNA, 25 bp, Homo sapien
tggtccagacaaggacacggaggcc

SEQ ID NO: 2380540 - DNA, 25 bp, Homo sapien
aaacattgtgcagctgacatcggtg

SEQ ID NO: 2380541 - DNA, 25 bp, Homo sapien
gacatcggtgctggcttcgttgtga

SEQ ID NO: 2380542 - DNA, 25 bp, Homo sapien
ggcagactcagtcctttccagagct

SEQ ID NO: 2380543 - DNA, 25 bp, Homo sapien
gaggttttggccataggcagactca

SEQ ID NO: 2380544 - DNA, 25 bp, Homo sapien
gctgctgtgtaagggctcatccagt

SEQ ID NO: 2380545 - DNA, 25 bp, Homo sapien
gaactctgacccgtttccctgtgaa

SEQ ID NO: 2380546 - DNA, 25 bp, Homo sapien
cccagtcctgggaaatggccttgca

SEQ ID NO: 2380547 - DNA, 25 bp, Homo sapien
ccttgcagagggaacagtcgcagct

SEQ ID NO: 2380548 - DNA, 25 bp, Homo sapien
aggctcctcaggaacccagtcctgg

SEQ ID NO: 2380549 - DNA, 25 bp, Homo sapien
gggaacagtcgcagctgggttccat

SEQ ID NO: 2380550 - DNA, 25 bp, Homo sapien
ccggcttgtgaaccagtgagatctg

SEQ ID NO: 2380551 - DNA, 25 bp, Homo sapien
taacctcccatcatagcctctgcat

SEQ ID NO: 2380552 - DNA, 25 bp, Homo sapien
tgtgaaccagtgagatctggagaca

SEQ ID NO: 2380553 - DNA, 25 bp, Homo sapien
acagatcctgtgatgaaatcaggcc

SEQ ID NO: 2380554 - DNA, 25 bp, Homo sapien
tgtgaatgagtccacttctggacag

SEQ ID NO: 2380555 - DNA, 25 bp, Homo sapien
ggcctgatggtgtgaatgagtccac

SEQ ID NO: 2380556 - DNA, 25 bp, Homo sapien
cctgatggtgtgaatgagtccactt

SEQ ID NO: 2380557 - DNA, 25 bp, Homo sapien
gatggtgtgaatgagtccacttctg

SEQ ID NO: 2380558 - DNA, 25 bp, Homo sapien
cgttccatccacaagtcagtgagaa

SEQ ID NO: 2380559 - DNA, 25 bp, Homo sapien
cctctgaaggtgacacgttccatcc

SEQ ID NO: 2380560 - DNA, 25 bp, Homo sapien
gcgtcgaaggaggtttgccccgaca

SEQ ID NO: 2380561 - DNA, 25 bp, Homo sapien
gcctgagctgttggagagcgtcgaa

SEQ ID NO: 2380562 - DNA, 25 bp, Homo sapien
gatacaatccacattcggcgacctg

SEQ ID NO: 2380563 - DNA, 25 bp, Homo sapien
cttctgatctgtgtagatgccaccc

SEQ ID NO: 2380564 - DNA, 25 bp, Homo sapien
aaggatcgggcggtcccacaggact

SEQ ID NO: 2380565 - DNA, 25 bp, Homo sapien
gctgcacaaggatcgggcggtccca

SEQ ID NO: 2380566 - DNA, 25 bp, Homo sapien
tttcatcgactgcttcaaaggatcc

SEQ ID NO: 2380567 - DNA, 25 bp, Homo sapien
ggagtggaatgtttcatcgactgct

SEQ ID NO: 2380568 - DNA, 25 bp, Homo sapien
gccacctgggcttttgaggtctgga

SEQ ID NO: 2380569 - DNA, 25 bp, Homo sapien
tgcttcaaaggatcccattatctga

SEQ ID NO: 2380570 - DNA, 25 bp, Homo sapien
cctggcctgccctcggatggatcgg

SEQ ID NO: 2380571 - DNA, 25 bp, Homo sapien
tcagaggccactgctcagttggagc

SEQ ID NO: 2380572 - DNA, 25 bp, Homo sapien
tccgagctgacctccgtgtcctgtc

SEQ ID NO: 2380573 - DNA, 25 bp, Homo sapien
cttcaggcgccagcagagggtcggc

SEQ ID NO: 2380574 - DNA, 25 bp, Homo sapien
aagcccgccgggaatcaaggctgac

SEQ ID NO: 2380575 - DNA, 25 bp, Homo sapien
taagcccgccgggaatcaaggctga

SEQ ID NO: 2380576 - DNA, 25 bp, Homo sapien
ctaagcccgccgggaatcaaggctg

SEQ ID NO: 2380577 - DNA, 25 bp, Homo sapien
cctgtgcaagtcagcaccctctcct

SEQ ID NO: 2380578 - DNA, 25 bp, Homo sapien
cctcctgtgcaagtcagcaccctct

SEQ ID NO: 2380579 - DNA, 25 bp, Homo sapien
tcctgtgcaagtcagcaccctctcc

SEQ ID NO: 2380580 - DNA, 25 bp, Homo sapien
ggcctcctgtgcaagtcagcaccct

SEQ ID NO: 2380581 - DNA, 25 bp, Homo sapien
ttctctgcgctctgtggcagccagc

SEQ ID NO: 2380582 - DNA, 25 bp, Homo sapien
catttcaaagctgcccgaatgctgt

SEQ ID NO: 2380583 - DNA, 25 bp, Homo sapien
agcatgccagcagcataagtttggg

SEQ ID NO: 2380584 - DNA, 25 bp, Homo sapien
gtcctggtgttctctgcgctctgtg

SEQ ID NO: 2380585 - DNA, 25 bp, Homo sapien
tttctcatgaataaaaccgggagct

SEQ ID NO: 2380586 - DNA, 25 bp, Homo sapien
tatgcacccagagtatacccaggag

SEQ ID NO: 2380587 - DNA, 25 bp, Homo sapien
atggcgccctggcaaactccacaag

SEQ ID NO: 2380588 - DNA, 25 bp, Homo sapien
gacaagctgtcacgctccaggatca

SEQ ID NO: 2380589 - DNA, 25 bp, Homo sapien
caggcctcaagcactctccctctta

SEQ ID NO: 2380590 - DNA, 25 bp, Homo sapien
gcttcgtcctctgtcggtttgccct

SEQ ID NO: 2380591 - DNA, 25 bp, Homo sapien
ggtttgccctccaaccaggcctcaa

SEQ ID NO: 2380592 - DNA, 25 bp, Homo sapien
gctgccatctgccagactgtcacat

SEQ ID NO: 2380593 - DNA, 25 bp, Homo sapien
catttgagtctagaggtctgaagac

SEQ ID NO: 2380594 - DNA, 25 bp, Homo sapien
tctagaggtctgaagacccgcaaag

SEQ ID NO: 2380595 - DNA, 25 bp, Homo sapien
aagacccgcaaagggtcttctctca

SEQ ID NO: 2380596 - DNA, 25 bp, Homo sapien
gagtctagaggtctgaagacccgca

SEQ ID NO: 2380597 - DNA, 25 bp, Homo sapien
tcctcctggaagaacgcactcgccc

SEQ ID NO: 2380598 - DNA, 25 bp, Homo sapien
ctcctggaagaacgcactcgcccag

SEQ ID NO: 2380599 - DNA, 25 bp, Homo sapien
cccacactcagccgtcagggcagag

SEQ ID NO: 2380600 - DNA, 25 bp, Homo sapien
accccacactcagccgtcagggcag

SEQ ID NO: 2380601 - DNA, 25 bp, Homo sapien
agccttcgctgtctgttcatcataa

SEQ ID NO: 2380602 - DNA, 25 bp, Homo sapien
gctgtctgttcatcataaaccggtg

SEQ ID NO: 2380603 - DNA, 25 bp, Homo sapien
ctccagttgcaatggagccttcgct

SEQ ID NO: 2380604 - DNA, 25 bp, Homo sapien
tccagttgcaatggagccttcgctg

SEQ ID NO: 2380605 - DNA, 25 bp, Homo sapien
tccaaacggatagctggaacacagt

SEQ ID NO: 2380606 - DNA, 25 bp, Homo sapien
gactgtatgcacagtcctggatatg

SEQ ID NO: 2380607 - DNA, 25 bp, Homo sapien
gctcctaagtggcagttgttccaaa

SEQ ID NO: 2380608 - DNA, 25 bp, Homo sapien
ggatatgaacattctcaatggagag

SEQ ID NO: 2380609 - DNA, 25 bp, Homo sapien
cccgactctccctgcttcgcattca

SEQ ID NO: 2380610 - DNA, 25 bp, Homo sapien
gactctccctgcttcgcattcagct

SEQ ID NO: 2380611 - DNA, 25 bp, Homo sapien
cgactctccctgcttcgcattcagc

SEQ ID NO: 2380612 - DNA, 25 bp, Homo sapien
actctccctgcttcgcattcagctg

SEQ ID NO: 2380613 - DNA, 25 bp, Homo sapien
atctggacgcccttcctgcggctgc

SEQ ID NO: 2380614 - DNA, 25 bp, Homo sapien
ccgcccctcgggagtctgcaaaggg

SEQ ID NO: 2380615 - DNA, 25 bp, Homo sapien
gggtcccagcgactcacccatctgg

SEQ ID NO: 2380616 - DNA, 25 bp, Homo sapien
gcaaagggtcccagcgactcaccca

SEQ ID NO: 2380617 - DNA, 25 bp, Homo sapien
gccgggagtcacaagcagagacact

SEQ ID NO: 2380618 - DNA, 25 bp, Homo sapien
gaggcccacgtttcaggcactgtag

SEQ ID NO: 2380619 - DNA, 25 bp, Homo sapien
tctttaggattaaggagctgccggg

SEQ ID NO: 2380620 - DNA, 25 bp, Homo sapien
actcatgtgggttccgaaggtccgc

SEQ ID NO: 2380621 - DNA, 25 bp, Homo sapien
tggcaaacaccaacctactgtacag

SEQ ID NO: 2380622 - DNA, 25 bp, Homo sapien
ctacgggtccgcctggtctgggctt

SEQ ID NO: 2380623 - DNA, 25 bp, Homo sapien
gctttccatagaaatgggaccggac

SEQ ID NO: 2380624 - DNA, 25 bp, Homo sapien
gaaaccctgttccatgcgcagtcac

SEQ ID NO: 2380625 - DNA, 25 bp, Homo sapien
ccttggtcaacctccgtttctgcat

SEQ ID NO: 2380626 - DNA, 25 bp, Homo sapien
tttctgcatcgctgcccaagaggga

SEQ ID NO: 2380627 - DNA, 25 bp, Homo sapien
gatggagtggcgtacccttggtcaa

SEQ ID NO: 2380628 - DNA, 25 bp, Homo sapien
tcctgccactgcgtgagtccctggg

SEQ ID NO: 2380629 - DNA, 25 bp, Homo sapien
ggaggattttggctgccttcggcca

SEQ ID NO: 2380630 - DNA, 25 bp, Homo sapien
ccagggctgggatcagcaaatttgt

SEQ ID NO: 2380631 - DNA, 25 bp, Homo sapien
tgttttccactgatgcgttgaaggt

SEQ ID NO: 2380632 - DNA, 25 bp, Homo sapien
cactgatgcgttgaaggtggcccca

SEQ ID NO: 2380633 - DNA, 25 bp, Homo sapien
gatgccaagggatgatcctgcttga

SEQ ID NO: 2380634 - DNA, 25 bp, Homo sapien
caagggatgatcctgcttgatggat

SEQ ID NO: 2380635 - DNA, 25 bp, Homo sapien
agtgatggatgccaagggatgatcc

SEQ ID NO: 2380636 - DNA, 25 bp, Homo sapien
tggatgaggggtctcgccggtgcgg

SEQ ID NO: 2380637 - DNA, 25 bp, Homo sapien
gggcggccccagattcagggaggcc

SEQ ID NO: 2380638 - DNA, 25 bp, Homo sapien
gaggctgcacgtgcggattgtggcc

SEQ ID NO: 2380639 - DNA, 25 bp, Homo sapien
tgccagaggctgcacgtgcggattg

SEQ ID NO: 2380640 - DNA, 25 bp, Homo sapien
gggctgggaaacgtctgttgtttga

SEQ ID NO: 2380641 - DNA, 25 bp, Homo sapien
ctgtgcacacaggtggtccagaggc

SEQ ID NO: 2380642 - DNA, 25 bp, Homo sapien
acacaggtggtccagaggctgctgc

SEQ ID NO: 2380643 - DNA, 25 bp, Homo sapien
gcacacaggtggtccagaggctgct

SEQ ID NO: 2380644 - DNA, 25 bp, Homo sapien
tgtgcacacaggtggtccagaggct

SEQ ID NO: 2380645 - DNA, 25 bp, Homo sapien
ctgcagcacgcgagacttcaggacg

SEQ ID NO: 2380646 - DNA, 25 bp, Homo sapien
tgttaatctgtcacaagggtcatct

SEQ ID NO: 2380647 - DNA, 25 bp, Homo sapien
caggtagcggccctgaaatgttaat

SEQ ID NO: 2380648 - DNA, 25 bp, Homo sapien
catctttgcttgaattgtgggtgac

SEQ ID NO: 2380649 - DNA, 25 bp, Homo sapien
cataaacatacgttctcctcctgag

SEQ ID NO: 2380650 - DNA, 25 bp, Homo sapien
gcgtgggtggtcacccagctttgcc

SEQ ID NO: 2380651 - DNA, 25 bp, Homo sapien
tgccccggttgttccatgttgactg

SEQ ID NO: 2380652 - DNA, 25 bp, Homo sapien
ccaggagtctataggtgactccagt

SEQ ID NO: 2380653 - DNA, 25 bp, Homo sapien
gagaggcattgatctaaatctggga

SEQ ID NO: 2380654 - DNA, 25 bp, Homo sapien
taatggaccctaatgagattctgat

SEQ ID NO: 2380655 - DNA, 25 bp, Homo sapien
ctcttgtgcaatagactcccctggg

SEQ ID NO: 2380656 - DNA, 25 bp, Homo sapien
tctggaataggatcatggtgggacc

SEQ ID NO: 2380657 - DNA, 25 bp, Homo sapien
gaatatggtttcctgtgactccccg

SEQ ID NO: 2380658 - DNA, 25 bp, Homo sapien
tgagcatctctagggcagtttctga

SEQ ID NO: 2380659 - DNA, 25 bp, Homo sapien
ggaggcagacagtccaagtatggca

SEQ ID NO: 2380660 - DNA, 25 bp, Homo sapien
tcgtggcaggtcacagtttcccagg

SEQ ID NO: 2380661 - DNA, 25 bp, Homo sapien
tacttgtacagattgctcaggcaca

SEQ ID NO: 2380662 - DNA, 25 bp, Homo sapien
gagttgtgacaacccacgtgacatg

SEQ ID NO: 2380663 - DNA, 25 bp, Homo sapien
gggagtcacccaattcttgctgcaa

SEQ ID NO: 2380664 - DNA, 25 bp, Homo sapien
tgacatgtcatctggcagggaagcc

SEQ ID NO: 2380665 - DNA, 25 bp, Homo sapien
cccgctgtgcacagcggtcctgttt

SEQ ID NO: 2380666 - DNA, 25 bp, Homo sapien
ctgacccgattagaaactgtcccga

SEQ ID NO: 2380667 - DNA, 25 bp, Homo sapien
attagaaactgtcccgactccccag

SEQ ID NO: 2380668 - DNA, 25 bp, Homo sapien
cccagtggcctgacccccgctgtgc

SEQ ID NO: 2380669 - DNA, 25 bp, Homo sapien
caatgtgtgagcactctggctgctc

SEQ ID NO: 2380670 - DNA, 25 bp, Homo sapien
gataatctttgtgtgggtgcatgct

SEQ ID NO: 2380671 - DNA, 25 bp, Homo sapien
attccacagtgactgcactaatgca

SEQ ID NO: 2380672 - DNA, 25 bp, Homo sapien
tattgtagggtgaacgtccagcttt

SEQ ID NO: 2380673 - DNA, 25 bp, Homo sapien
caaaagtcgttctgtagggcagtaa

SEQ ID NO: 2380674 - DNA, 25 bp, Homo sapien
tctgtagggcagtaatgaggtttga

SEQ ID NO: 2380675 - DNA, 25 bp, Homo sapien
tgttcagaaattgcccgagacctca

SEQ ID NO: 2380676 - DNA, 25 bp, Homo sapien
gaggtttgaaaggtggacctgctcc

SEQ ID NO: 2380677 - DNA, 25 bp, Homo sapien
gggagtgcagataagtgtgatgaag

SEQ ID NO: 2380678 - DNA, 25 bp, Homo sapien
ttgggagtgcagataagtgtgatga

SEQ ID NO: 2380679 - DNA, 25 bp, Homo sapien
tgggagtgcagataagtgtgatgaa

SEQ ID NO: 2380680 - DNA, 25 bp, Homo sapien
taggaccttgtaaaggacagggctg

SEQ ID NO: 2380681 - DNA, 25 bp, Homo sapien
ttggcatctcttgttcccgcacaga

SEQ ID NO: 2380682 - DNA, 25 bp, Homo sapien
gatgtgaccgccacgtttcctctgg

SEQ ID NO: 2380683 - DNA, 25 bp, Homo sapien
gcacctaggtggatcttggcatctc

SEQ ID NO: 2380684 - DNA, 25 bp, Homo sapien
caagctcttgtccaaagtggttgca

SEQ ID NO: 2380685 - DNA, 25 bp, Homo sapien
tcacttctgggttatgacacactcg

SEQ ID NO: 2380686 - DNA, 25 bp, Homo sapien
gacatgtgcctgaatccctctaggg

SEQ ID NO: 2380687 - DNA, 25 bp, Homo sapien
tctagggcccgacagtcagagtagg

SEQ ID NO: 2380688 - DNA, 25 bp, Homo sapien
tggcagtcacagtgcaagtctgaac

SEQ ID NO: 2380689 - DNA, 25 bp, Homo sapien
caaaagcctcattgtgtgaatcaga

SEQ ID NO: 2380690 - DNA, 25 bp, Homo sapien
tctcaggagtgcacgtggtcttccc

SEQ ID NO: 2380691 - DNA, 25 bp, Homo sapien
ggttgaagaagcctgcaattcctcc

SEQ ID NO: 2380692 - DNA, 25 bp, Homo sapien
atttcaattttagcatacatgctgc

SEQ ID NO: 2380693 - DNA, 25 bp, Homo sapien
aggtgccatgctaaactactctgta

SEQ ID NO: 2380694 - DNA, 25 bp, Homo sapien
atcatttcaattttagcatacatgc

SEQ ID NO: 2380695 - DNA, 25 bp, Homo sapien
caggtgccatgctaaactactctgt

SEQ ID NO: 2380696 - DNA, 25 bp, Homo sapien
aacctccagatgatgttattaccat

SEQ ID NO: 2380697 - DNA, 25 bp, Homo sapien
taacctccagatgatgttattacca

SEQ ID NO: 2380698 - DNA, 25 bp, Homo sapien
cctgcgcttgagggggggtgtctaa

SEQ ID NO: 2380699 - DNA, 25 bp, Homo sapien
gtttcaacaaatttcattgcacttt

SEQ ID NO: 2380700 - DNA, 25 bp, Homo sapien
acttggtcctgcgcttgaggggggg

SEQ ID NO: 2380701 - DNA, 25 bp, Homo sapien
tttcaacaaatttcattgcactttc

SEQ ID NO: 2380702 - DNA, 25 bp, Homo sapien
caaggcaaagatccaagataaggaa

SEQ ID NO: 2380703 - DNA, 25 bp, Homo sapien
gctggaagatggacgcaccctgtct

SEQ ID NO: 2380704 - DNA, 25 bp, Homo sapien
ccaagataaggaaggcatccctcct

SEQ ID NO: 2380705 - DNA, 25 bp, Homo sapien
acaccatcgagaatgtcaaggcaaa

SEQ ID NO: 2380706 - DNA, 25 bp, Homo sapien
tcagaggtgggatgcaaatcttcgt

SEQ ID NO: 2380707 - DNA, 25 bp, Homo sapien
tctcgaagtggagccgagtgacacc

SEQ ID NO: 2380708 - DNA, 25 bp, Homo sapien
ctccgtcttagaggtgggatgcaga

SEQ ID NO: 2380709 - DNA, 25 bp, Homo sapien
taagaccatcactctcgaagtggag

SEQ ID NO: 2380710 - DNA, 25 bp, Homo sapien
gtaagaccatcactctcgaagtgga

SEQ ID NO: 2380711 - DNA, 25 bp, Homo sapien
tctcgaagtggagccgagtgacacc

SEQ ID NO: 2380712 - DNA, 25 bp, Homo sapien
ctccgtcttagaggtgggatgcaga

SEQ ID NO: 2380713 - DNA, 25 bp, Homo sapien
tgctccgtcttagaggtgggatgca

SEQ ID NO: 2380714 - DNA, 25 bp, Homo sapien
tgctccgtctcagaggtgggatgca

SEQ ID NO: 2380715 - DNA, 25 bp, Homo sapien
gtgctccgtctcagaggtgggatgc

SEQ ID NO: 2380716 - DNA, 25 bp, Homo sapien
cgagaacgtcaaagcaaagatccag

SEQ ID NO: 2380717 - DNA, 25 bp, Homo sapien
attgtccgctaaattctggccgttt

SEQ ID NO: 2380718 - DNA, 25 bp, Homo sapien
gactagtaaattgtccgctaaattc

SEQ ID NO: 2380719 - DNA, 25 bp, Homo sapien
gtaaattgtccgctaaattctggcc

SEQ ID NO: 2380720 - DNA, 25 bp, Homo sapien
cggctgttcccgagtcttgaatgga

SEQ ID NO: 2380721 - DNA, 25 bp, Homo sapien
cttgaatggaagacgcttgtgaggc

SEQ ID NO: 2380722 - DNA, 25 bp, Homo sapien
cagccgggatttgggtcgcagttct

SEQ ID NO: 2380723 - DNA, 25 bp, Homo sapien
ctgggtccgcgagcaaggttgccct

SEQ ID NO: 2380724 - DNA, 25 bp, Homo sapien
tggccctcagaatgtacaggaaggt

SEQ ID NO: 2380725 - DNA, 25 bp, Homo sapien
tctagaaggatgtcgttcgctcagc

SEQ ID NO: 2380726 - DNA, 25 bp, Homo sapien
taccctgcactgaaataaggttggg

SEQ ID NO: 2380727 - DNA, 25 bp, Homo sapien
ccctgttggcatcaagtaggacctt

SEQ ID NO: 2380728 - DNA, 25 bp, Homo sapien
ccatttaagtcagggaatgctggga

SEQ ID NO: 2380729 - DNA, 25 bp, Homo sapien
ggcttgcagcagagtaacagccaaa

SEQ ID NO: 2380730 - DNA, 25 bp, Homo sapien
caaccagggcgtggttgaaagccag

SEQ ID NO: 2380731 - DNA, 25 bp, Homo sapien
tctttgcagctaacctttggcccat

SEQ ID NO: 2380732 - DNA, 25 bp, Homo sapien
ggctggattaagtcacatacaaggt

SEQ ID NO: 2380733 - DNA, 25 bp, Homo sapien
tgcaggcgtccttgacaacctttta

SEQ ID NO: 2380734 - DNA, 25 bp, Homo sapien
tatataagcgatgacaaagcaaggc

SEQ ID NO: 2380735 - DNA, 25 bp, Homo sapien
gaagcaagtttgttgaccctcactc

SEQ ID NO: 2380736 - DNA, 25 bp, Homo sapien
caaagcttattatatgaggtcacat

SEQ ID NO: 2380737 - DNA, 25 bp, Homo sapien
ggtggtgatggctgatgcacaatac

SEQ ID NO: 2380738 - DNA, 25 bp, Homo sapien
gaggtcacatgagttgtcaaattca

SEQ ID NO: 2380739 - DNA, 25 bp, Homo sapien
caaacgacgacacaaacaaagccca

SEQ ID NO: 2380740 - DNA, 25 bp, Homo sapien
tctgcactgccacgaaccacctcat

SEQ ID NO: 2380741 - DNA, 25 bp, Homo sapien
ctctgcactgccacgaaccacctca

SEQ ID NO: 2380742 - DNA, 25 bp, Homo sapien
cctctgcactgccacgaaccacctc

SEQ ID NO: 2380743 - DNA, 25 bp, Homo sapien
ggagtgtacaccacatctcgtgcca

SEQ ID NO: 2380744 - DNA, 25 bp, Homo sapien
tgacgcattcttggccatcagaggg

SEQ ID NO: 2380745 - DNA, 25 bp, Homo sapien
catgattgtactgcactggcctcga

SEQ ID NO: 2380746 - DNA, 25 bp, Homo sapien
ggcctcgagggctgttgacgcattc

SEQ ID NO: 2380747 - DNA, 25 bp, Homo sapien
aaggaacagctttttgatgacctga

SEQ ID NO: 2380748 - DNA, 25 bp, Homo sapien
acaccagacattgtgacttctctcc

SEQ ID NO: 2380749 - DNA, 25 bp, Homo sapien
acttctctcccctggtgtgcttaag

SEQ ID NO: 2380750 - DNA, 25 bp, Homo sapien
cccaaggaacagctttttgatgacc

SEQ ID NO: 2380751 - DNA, 25 bp, Homo sapien
cccactgccctcctgctctccccca

SEQ ID NO: 2380752 - DNA, 25 bp, Homo sapien
ccactgccctcctgctctcccccat

SEQ ID NO: 2380753 - DNA, 25 bp, Homo sapien
ctccccactgccctcctgctctccc

SEQ ID NO: 2380754 - DNA, 25 bp, Homo sapien
tccccactgccctcctgctctcccc

SEQ ID NO: 2380755 - DNA, 25 bp, Homo sapien
caaaatgatgccacctatggcgcca

SEQ ID NO: 2380756 - DNA, 25 bp, Homo sapien
ggactgagaacaacccgtgggcttg

SEQ ID NO: 2380757 - DNA, 25 bp, Homo sapien
tcaggtttgtttgagcagtgccctc

SEQ ID NO: 2380758 - DNA, 25 bp, Homo sapien
gctcctcaaccacatccaaaatgat

SEQ ID NO: 2380759 - DNA, 25 bp, Homo sapien
gtcaacatccctgccacgcctcgcg

SEQ ID NO: 2380760 - DNA, 25 bp, Homo sapien
aacatccctgccacgcctcgcgctg

SEQ ID NO: 2380761 - DNA, 25 bp, Homo sapien
cctgccacgcctcgcgctgcttgcg

SEQ ID NO: 2380762 - DNA, 25 bp, Homo sapien
ggagctgcgcccaggggatgacctt

SEQ ID NO: 2380763 - DNA, 25 bp, Homo sapien
ctgcccgaggaacgctgcgttccgg

SEQ ID NO: 2380764 - DNA, 25 bp, Homo sapien
aggaacgctgcgttccggctgacgc

SEQ ID NO: 2380765 - DNA, 25 bp, Homo sapien
gaacgctgcgttccggctgacgcgt

SEQ ID NO: 2380766 - DNA, 25 bp, Homo sapien
ccgaggaacgctgcgttccggctga

SEQ ID NO: 2380767 - DNA, 25 bp, Homo sapien
agcatggaggccacactcggaggcc

SEQ ID NO: 2380768 - DNA, 25 bp, Homo sapien
cctgttgacgtcttcccgcttggaa

SEQ ID NO: 2380769 - DNA, 25 bp, Homo sapien
cttcccgaagcgaagagcccagtct

SEQ ID NO: 2380770 - DNA, 25 bp, Homo sapien
ctcggaggccggatctgagtcactc

SEQ ID NO: 2380771 - DNA, 25 bp, Homo sapien
gattgaacccggggcctcatacgtg

SEQ ID NO: 2380772 - DNA, 25 bp, Homo sapien
atacgtgcaaagcatgcgctctacc

SEQ ID NO: 2380773 - DNA, 25 bp, Homo sapien
tgaacccggggcctcatacgtgcaa

SEQ ID NO: 2380774 - DNA, 25 bp, Homo sapien
tacgtgcaaagcatgcgctctacca

SEQ ID NO: 2380775 - DNA, 25 bp, Homo sapien
gctagggcaaggttggcgcgctcgg

SEQ ID NO: 2380776 - DNA, 25 bp, Homo sapien
ctccggctagggcaaggttggcgcg

SEQ ID NO: 2380777 - DNA, 25 bp, Homo sapien
cggctagggcaaggttggcgcgctc

SEQ ID NO: 2380778 - DNA, 25 bp, Homo sapien
gggctccggctagggcaaggttggc

SEQ ID NO: 2380779 - DNA, 25 bp, Homo sapien
tcgccgaacaggctgctgacgctct

SEQ ID NO: 2380780 - DNA, 25 bp, Homo sapien
ctgagcggcgcgcacgttgtcctcg

SEQ ID NO: 2380781 - DNA, 25 bp, Homo sapien
tgggagaaggtgttgaccgtgcggc

SEQ ID NO: 2380782 - DNA, 25 bp, Homo sapien
accgtgcggcggtagctgttcttct

SEQ ID NO: 2380783 - DNA, 25 bp, Homo sapien
gaaaacggtcatcacccaatcactg

SEQ ID NO: 2380784 - DNA, 25 bp, Homo sapien
caagaaaacggtcatcacccaatca

SEQ ID NO: 2380785 - DNA, 25 bp, Homo sapien
cagaaacaagaaaacggtcatcacc

SEQ ID NO: 2380786 - DNA, 25 bp, Homo sapien
ggtcatcacccaatcactgttttcc

SEQ ID NO: 2380787 - DNA, 25 bp, Homo sapien
cagcacaaatctctcagtcagcctg

SEQ ID NO: 2380788 - DNA, 25 bp, Homo sapien
atccactcccagcacaaatctctca

SEQ ID NO: 2380789 - DNA, 25 bp, Homo sapien
gcacaaatctctcagtcagcctggc

SEQ ID NO: 2380790 - DNA, 25 bp, Homo sapien
ctcccagcacaaatctctcagtcag

SEQ ID NO: 2380791 - DNA, 25 bp, Homo sapien
catccaagagctcggtccagacttt

SEQ ID NO: 2380792 - DNA, 25 bp, Homo sapien
tccaagagctcggtccagactttcc

SEQ ID NO: 2380793 - DNA, 25 bp, Homo sapien
aagagctcggtccagactttccaca

SEQ ID NO: 2380794 - DNA, 25 bp, Homo sapien
acatccaagagctcggtccagactt

SEQ ID NO: 2380795 - DNA, 25 bp, Homo sapien
ccgggctgctggacaccgaggctgg

SEQ ID NO: 2380796 - DNA, 25 bp, Homo sapien
acgccgaccagcaggagcgcgcggg

SEQ ID NO: 2380797 - DNA, 25 bp, Homo sapien
ctgaaatactgggacaggttggaga

SEQ ID NO: 2380798 - DNA, 25 bp, Homo sapien
ggctgaaatactgggacaggttgga

SEQ ID NO: 2380799 - DNA, 25 bp, Homo sapien
tggaaaacaggacgacccgcacgat

SEQ ID NO: 2380800 - DNA, 25 bp, Homo sapien
aagcggccgaacaccacgtgcagga

SEQ ID NO: 2380801 - DNA, 25 bp, Homo sapien
gacccgcacgatccagaagaagcgg

SEQ ID NO: 2380802 - DNA, 25 bp, Homo sapien
tgcaggatgtacacgcaggacatgg

SEQ ID NO: 2380803 - DNA, 25 bp, Homo sapien
gcccggtcatgaagtagacggccac

SEQ ID NO: 2380804 - DNA, 25 bp, Homo sapien
gaagcccatgggcccggtcatgaag

SEQ ID NO: 2380805 - DNA, 25 bp, Homo sapien
cggcagcaccgcgttctccggctcg

SEQ ID NO: 2380806 - DNA, 25 bp, Homo sapien
gccaccacgaagcacagcggcagca

SEQ ID NO: 2380807 - DNA, 25 bp, Homo sapien
aggctctcgagcacccggttgagac

SEQ ID NO: 2380808 - DNA, 25 bp, Homo sapien
gacggatgttgagcagtctgacctg

SEQ ID NO: 2380809 - DNA, 25 bp, Homo sapien
tccttggagcggtccaggctctcga

SEQ ID NO: 2380810 - DNA, 25 bp, Homo sapien
tctcctccacgctggggttgctggg

SEQ ID NO: 2380811 - DNA, 25 bp, Homo sapien
gagacagcgtgctggtaactgtgga

SEQ ID NO: 2380812 - DNA, 25 bp, Homo sapien
agacagcgtgctggtaactgtggac

SEQ ID NO: 2380813 - DNA, 25 bp, Homo sapien
gctcagtcgtgtttattaagattgt

SEQ ID NO: 2380814 - DNA, 25 bp, Homo sapien
tagttccacgtcaatgatctttccg

SEQ ID NO: 2380815 - DNA, 25 bp, Homo sapien
tgggtggaaatagccctacacagcg

SEQ ID NO: 2380816 - DNA, 25 bp, Homo sapien
gaatgtgtcctaagagctgccgggt

SEQ ID NO: 2380817 - DNA, 25 bp, Homo sapien
attacacttcgtgtgtagttccacg

SEQ ID NO: 2380818 - DNA, 25 bp, Homo sapien
tatatagccctagtgagcaaactgc

SEQ ID NO: 2380819 - DNA, 25 bp, Homo sapien
taaaatacatcgaagcacagaggga

SEQ ID NO: 2380820 - DNA, 25 bp, Homo sapien
aagaggttgagttgcatcctgcagc

SEQ ID NO: 2380821 - DNA, 25 bp, Homo sapien
caggtcttctagaaatggcgatgtc

SEQ ID NO: 2380822 - DNA, 25 bp, Homo sapien
ttctgaaactcccttgcccaggatc

SEQ ID NO: 2380823 - DNA, 25 bp, Homo sapien
cctcgcaagtcccactctctgccca

SEQ ID NO: 2380824 - DNA, 25 bp, Homo sapien
acagctgtccacctcgcaagtccca

SEQ ID NO: 2380825 - DNA, 25 bp, Homo sapien
tccacctcgcaagtcccactctctg

SEQ ID NO: 2380826 - DNA, 25 bp, Homo sapien
gttatctataaacctgcacgcaggg

SEQ ID NO: 2380827 - DNA, 25 bp, Homo sapien
cataaggtcttggttgtagcaggtc

SEQ ID NO: 2380828 - DNA, 25 bp, Homo sapien
gaagtgaatggaactctccaggaga

SEQ ID NO: 2380829 - DNA, 25 bp, Homo sapien
gccacagagacagtcgtgatcccca

SEQ ID NO: 2380830 - DNA, 25 bp, Homo sapien
ttagctttgcgcacagaatgccatg

SEQ ID NO: 2380831 - DNA, 25 bp, Homo sapien
agatttgatctaggcccagcgcggt

SEQ ID NO: 2380832 - DNA, 25 bp, Homo sapien
caattccagcaatctagagagggct

SEQ ID NO: 2380833 - DNA, 25 bp, Homo sapien
tcacagggccagatgagcgactaag

SEQ ID NO: 2380834 - DNA, 25 bp, Homo sapien
catcagggagaagttatcaggtgtc

SEQ ID NO: 2380835 - DNA, 25 bp, Homo sapien
gtcaacttgtaaggcagatgacatt

SEQ ID NO: 2380836 - DNA, 25 bp, Homo sapien
gccagttcggaaacccatcagggag

SEQ ID NO: 2380837 - DNA, 25 bp, Homo sapien
tcagccagttcggaaacccatcagg

SEQ ID NO: 2380838 - DNA, 25 bp, Homo sapien
aataataccactcgctgccacagct

SEQ ID NO: 2380839 - DNA, 25 bp, Homo sapien
tggtgcacctcctacatatcaagga

SEQ ID NO: 2380840 - DNA, 25 bp, Homo sapien
tgaccccttaggagcctcaggaatt

SEQ ID NO: 2380841 - DNA, 25 bp, Homo sapien
tcagcgttttaagccaccacaagag

SEQ ID NO: 2380842 - DNA, 25 bp, Homo sapien
atctctacataacaccaaagccagt

SEQ ID NO: 2380843 - DNA, 25 bp, Homo sapien
gataatggataccatacctcacaag

SEQ ID NO: 2380844 - DNA, 25 bp, Homo sapien
caaggctcacgaaactaaagtgcac

SEQ ID NO: 2380845 - DNA, 25 bp, Homo sapien
cagttaagaagagggagacaattgc

SEQ ID NO: 2380846 - DNA, 25 bp, Homo sapien
tatattttaaaagtccatacaacaa

SEQ ID NO: 2380847 - DNA, 25 bp, Homo sapien
aaagagggcgtcttcttagtcctct

SEQ ID NO: 2380848 - DNA, 25 bp, Homo sapien
gggagccattttgtgttttgcgtag

SEQ ID NO: 2380849 - DNA, 25 bp, Homo sapien
atgcctaatctgtaatcacatttct

SEQ ID NO: 2380850 - DNA, 25 bp, Homo sapien
gagggagtcgaagctgatggttgga

SEQ ID NO: 2380851 - DNA, 25 bp, Homo sapien
aaaggactgatttgatgcctctccc

SEQ ID NO: 2380852 - DNA, 25 bp, Homo sapien
ttccacatgtgccagttgcctggat

SEQ ID NO: 2380853 - DNA, 25 bp, Homo sapien
tataccctgaagaactctttttcct

SEQ ID NO: 2380854 - DNA, 25 bp, Homo sapien
gtcatagaggctatcctggagactt

SEQ ID NO: 2380855 - DNA, 25 bp, Homo sapien
ttgctttggtattctgcttccacat

SEQ ID NO: 2380856 - DNA, 25 bp, Homo sapien
tctttttcctctaatatgcctaatc

SEQ ID NO: 2380857 - DNA, 25 bp, Homo sapien
gcctctccccagagcatttgataag

SEQ ID NO: 2380858 - DNA, 25 bp, Homo sapien
gattaggcatattagaggaaaaaga

SEQ ID NO: 2380859 - DNA, 25 bp, Homo sapien
agaggactaagaagacgccctcttt

SEQ ID NO: 2380860 - DNA, 25 bp, Homo sapien
atgtggaagcagaataccaaagcaa

SEQ ID NO: 2380861 - DNA, 25 bp, Homo sapien
ctacgcaaaacacaaaatggctccc

SEQ ID NO: 2380862 - DNA, 25 bp, Homo sapien
atccaggcaactggcacatgtggaa

SEQ ID NO: 2380863 - DNA, 25 bp, Homo sapien
aggaaaaagagttcttcagggtata

SEQ ID NO: 2380864 - DNA, 25 bp, Homo sapien
agaaatgtgattacagattaggcat

SEQ ID NO: 2380865 - DNA, 25 bp, Homo sapien
gggagaggcatcaaatcagtccttt

SEQ ID NO: 2380866 - DNA, 25 bp, Homo sapien
cttatcaaatgctctggggagaggc

SEQ ID NO: 2380867 - DNA, 25 bp, Homo sapien
aagtctccaggatagcctctatgac

SEQ ID NO: 2380868 - DNA, 25 bp, Homo sapien
tccaaccatcagcttcgactccctc

SEQ ID NO: 2380869 - DNA, 25 bp, Homo sapien
gatcttcctgacatgaacatcatga

SEQ ID NO: 2380870 - DNA, 25 bp, Homo sapien
aggagaacacacacgatcttcctga

SEQ ID NO: 2380871 - DNA, 25 bp, Homo sapien
tgggcctgaaagaacttaggcccac

SEQ ID NO: 2380872 - DNA, 25 bp, Homo sapien
tgagcctgcacgcttagcctcagga

SEQ ID NO: 2380873 - DNA, 25 bp, Homo sapien
tagacgttgagcagcagacgttcag

SEQ ID NO: 2380874 - DNA, 25 bp, Homo sapien
caagattctggggtagacgttgagc

SEQ ID NO: 2380875 - DNA, 25 bp, Homo sapien
ggtagacgttgagcagcagacgttc

SEQ ID NO: 2380876 - DNA, 25 bp, Homo sapien
acgttgagcagcagacgttcagcca

SEQ ID NO: 2380877 - DNA, 25 bp, Homo sapien
cacactcagcccgagcgctgattgg

SEQ ID NO: 2380878 - DNA, 25 bp, Homo sapien
aggcctccgcgtctggaagatcggc

SEQ ID NO: 2380879 - DNA, 25 bp, Homo sapien
tgagcgccaaccaatcgcgacgcgt

SEQ ID NO: 2380880 - DNA, 25 bp, Homo sapien
gcgttccggttcataggccgcacct

SEQ ID NO: 2380881 - DNA, 25 bp, Homo sapien
taatgaagtaacatgagctgacacc

SEQ ID NO: 2380882 - DNA, 25 bp, Homo sapien
ttaacgcagtggctatatgaggcct

SEQ ID NO: 2380883 - DNA, 25 bp, Homo sapien
cctaaatgaagtgacacatccagcc

SEQ ID NO: 2380884 - DNA, 25 bp, Homo sapien
gctgatcttcgggaaaagccttgca

SEQ ID NO: 2380885 - DNA, 25 bp, Homo sapien
gcaggggctgatcctcgctgttgtc

SEQ ID NO: 2380886 - DNA, 25 bp, Homo sapien
tgcaggggctgatcctcgctgttgt

SEQ ID NO: 2380887 - DNA, 25 bp, Homo sapien
gagcccgaatcttccaagaacagcc

SEQ ID NO: 2380888 - DNA, 25 bp, Homo sapien
ctgagcccgaatcttccaagaacag

SEQ ID NO: 2380889 - DNA, 25 bp, Homo sapien
ggagtgtagccaggtagacaaatgg

SEQ ID NO: 2380890 - DNA, 25 bp, Homo sapien
aggagtgtagccaggtagacaaatg

SEQ ID NO: 2380891 - DNA, 25 bp, Homo sapien
ctgggaccggaggaagcgacggtca

SEQ ID NO: 2380892 - DNA, 25 bp, Homo sapien
aagcgacggtcaggagcgcctggcg

SEQ ID NO: 2380893 - DNA, 25 bp, Homo sapien
tcctgcgggccgcttggcccaggcc

SEQ ID NO: 2380894 - DNA, 25 bp, Homo sapien
acaagggactgaacggccgccgccg

SEQ ID NO: 2380895 - DNA, 25 bp, Homo sapien
ggtccatctgcgtgttcttcttact

SEQ ID NO: 2380896 - DNA, 25 bp, Homo sapien
tgcgtgttcttcttactgtcaggct

SEQ ID NO: 2380897 - DNA, 25 bp, Homo sapien
ttcttactgtcaggctcccacatca

SEQ ID NO: 2380898 - DNA, 25 bp, Homo sapien
cgcccggaagcggtccatctgcgtg

SEQ ID NO: 2380899 - DNA, 25 bp, Homo sapien
tgaatatgactcaacggaccaatgg

SEQ ID NO: 2380900 - DNA, 25 bp, Homo sapien
caatggtacaagtcatcataactct

SEQ ID NO: 2380901 - DNA, 25 bp, Homo sapien
tcatcatacacacgtgagaagacaa

SEQ ID NO: 2380902 - DNA, 25 bp, Homo sapien
tcatacacacgtgagaagacaattc

SEQ ID NO: 2380903 - DNA, 25 bp, Homo sapien
tctttgtgccgcaggaggttttctg

SEQ ID NO: 2380904 - DNA, 25 bp, Homo sapien
ttttctgcatagttgagccgactgc

SEQ ID NO: 2380905 - DNA, 25 bp, Homo sapien
gccgactgcctttgaaccactcggg

SEQ ID NO: 2380906 - DNA, 25 bp, Homo sapien
cgattcctttcgatgtgtccacaac

SEQ ID NO: 2380907 - DNA, 25 bp, Homo sapien
caacccgatctcctttcttcacacc

SEQ ID NO: 2380908 - DNA, 25 bp, Homo sapien
caacaacccgatctcctttcttcac

SEQ ID NO: 2380909 - DNA, 25 bp, Homo sapien
tgcaaacaaagccacttcttgcctc

SEQ ID NO: 2380910 - DNA, 25 bp, Homo sapien
aaacaaagccacttcttgcctcagc

SEQ ID NO: 2380911 - DNA, 25 bp, Homo sapien
atcgcctcgacagcgtgctcactgt

SEQ ID NO: 2380912 - DNA, 25 bp, Homo sapien
attcacaccgaagtccggggacgtg

SEQ ID NO: 2380913 - DNA, 25 bp, Homo sapien
gacgtggagctccagatggcaccaa

SEQ ID NO: 2380914 - DNA, 25 bp, Homo sapien
gatggcaccaatgcttgccgcagcc

SEQ ID NO: 2380915 - DNA, 25 bp, Homo sapien
cagacaccaactccgggcactgggt

SEQ ID NO: 2380916 - DNA, 25 bp, Homo sapien
gtgctgctgactgacggacggcaca

SEQ ID NO: 2380917 - DNA, 25 bp, Homo sapien
ctgaaggtccctgacgctcaaggct

SEQ ID NO: 2380918 - DNA, 25 bp, Homo sapien
aggttctcatggctcctgaaggtcc

SEQ ID NO: 2380919 - DNA, 25 bp, Homo sapien
tggggaggtcctggggtgagatggc

SEQ ID NO: 2380920 - DNA, 25 bp, Homo sapien
ctggggaggtcctggggtgagatgg

SEQ ID NO: 2380921 - DNA, 25 bp, Homo sapien
cctcccacaaggacaccattggccc

SEQ ID NO: 2380922 - DNA, 25 bp, Homo sapien
cacaaggacaccattggccccagca

SEQ ID NO: 2380923 - DNA, 25 bp, Homo sapien
aaggacaccattggccccagcagcc

SEQ ID NO: 2380924 - DNA, 25 bp, Homo sapien
tcccacaaggacaccattggcccca

SEQ ID NO: 2380925 - DNA, 25 bp, Homo sapien
gggtctgagtgtccagtccggaact

SEQ ID NO: 2380926 - DNA, 25 bp, Homo sapien
tctgagtgtccagtccggaactcca

SEQ ID NO: 2380927 - DNA, 25 bp, Homo sapien
ggtctgagtgtccagtccggaactc

SEQ ID NO: 2380928 - DNA, 25 bp, Homo sapien
tgagtgtccagtccggaactccacc

SEQ ID NO: 2380929 - DNA, 25 bp, Homo sapien
acaccagggcacttgcccatggaca

SEQ ID NO: 2380930 - DNA, 25 bp, Homo sapien
tggggacaccagggcacttgcccat

SEQ ID NO: 2380931 - DNA, 25 bp, Homo sapien
ggacaccagggcacttgcccatgga

SEQ ID NO: 2380932 - DNA, 25 bp, Homo sapien
gggacaccagggcacttgcccatgg

SEQ ID NO: 2380933 - DNA, 25 bp, Homo sapien
tgtccccggctccacacaaacgtgg

SEQ ID NO: 2380934 - DNA, 25 bp, Homo sapien
tccacacaaacgtggctcctgccat

SEQ ID NO: 2380935 - DNA, 25 bp, Homo sapien
ccacacaaacgtggctcctgccatc

SEQ ID NO: 2380936 - DNA, 25 bp, Homo sapien
ctccacacaaacgtggctcctgcca

SEQ ID NO: 2380937 - DNA, 25 bp, Homo sapien
cgtctccggcaggatggagtctata

SEQ ID NO: 2380938 - DNA, 25 bp, Homo sapien
aatgagcgacagagagaagcatctc

SEQ ID NO: 2380939 - DNA, 25 bp, Homo sapien
ggagtctatacctcggacactagca

SEQ ID NO: 2380940 - DNA, 25 bp, Homo sapien
gggcaggtggccctgttttctgacc

SEQ ID NO: 2380941 - DNA, 25 bp, Homo sapien
ttactcagctccgacagcgggtgtc

SEQ ID NO: 2380942 - DNA, 25 bp, Homo sapien
actcagctccgacagcgggtgtcca

SEQ ID NO: 2380943 - DNA, 25 bp, Homo sapien
gagcagaggctttcgcgcagtcgac

SEQ ID NO: 2380944 - DNA, 25 bp, Homo sapien
tcgcgcagtcgacctgtgccaggtc

SEQ ID NO: 2380945 - DNA, 25 bp, Homo sapien
ggaattcatccctgttagttttagc

SEQ ID NO: 2380946 - DNA, 25 bp, Homo sapien
aggaattcatccctgttagttttag

SEQ ID NO: 2380947 - DNA, 25 bp, Homo sapien
tccaggaattcatccctgttagttt

SEQ ID NO: 2380948 - DNA, 25 bp, Homo sapien
actccaggaattcatccctgttagt

SEQ ID NO: 2380949 - DNA, 25 bp, Homo sapien
cccgggattctaagatggaccgaga

SEQ ID NO: 2380950 - DNA, 25 bp, Homo sapien
tgcccttcacagccttaagagaggg

SEQ ID NO: 2380951 - DNA, 25 bp, Homo sapien
gccagttaaaacatattgagcattt

SEQ ID NO: 2380952 - DNA, 25 bp, Homo sapien
caggccccagtctgagctcattaga

SEQ ID NO: 2380953 - DNA, 25 bp, Homo sapien
cctcaggacatcaggccttcggtca

SEQ ID NO: 2380954 - DNA, 25 bp, Homo sapien
aaactgctacacagaggtggttgca

SEQ ID NO: 2380955 - DNA, 25 bp, Homo sapien
cagtttaaaaaagtgcatgggacat

SEQ ID NO: 2380956 - DNA, 25 bp, Homo sapien
acaggtaacagggacttggcccctg

SEQ ID NO: 2380957 - DNA, 25 bp, Homo sapien
tctggtctgtactgcacgtggagtc

SEQ ID NO: 2380958 - DNA, 25 bp, Homo sapien
tattccctcgcacatgagcctgatg

SEQ ID NO: 2380959 - DNA, 25 bp, Homo sapien
taatgagccccatcttaaaaggcag

SEQ ID NO: 2380960 - DNA, 25 bp, Homo sapien
tgagtaaggacttcacagcacaggc

SEQ ID NO: 2380961 - DNA, 25 bp, Homo sapien
taaagaggaacctgaatcctccaag

SEQ ID NO: 2380962 - DNA, 25 bp, Homo sapien
gaacctgaatcctccaagcagtgca

SEQ ID NO: 2380963 - DNA, 25 bp, Homo sapien
ttttggttctcggaatcttcaatta

SEQ ID NO: 2380964 - DNA, 25 bp, Homo sapien
gaatcttcaattaaagaggaacctg

SEQ ID NO: 2380965 - DNA, 25 bp, Homo sapien
gaaagagcctgttagcacagctctg

SEQ ID NO: 2380966 - DNA, 25 bp, Homo sapien
cttacagaaagagcctgttagcaca

SEQ ID NO: 2380967 - DNA, 25 bp, Homo sapien
cagaaagagcctgttagcacagctc

SEQ ID NO: 2380968 - DNA, 25 bp, Homo sapien
tacagaaagagcctgttagcacagc

SEQ ID NO: 2380969 - DNA, 25 bp, Homo sapien
catgtggttgtgctctttgccatta

SEQ ID NO: 2380970 - DNA, 25 bp, Homo sapien
aatttgagaaaaccggtccagcaca

SEQ ID NO: 2380971 - DNA, 25 bp, Homo sapien
tgtggttgtgctctttgccattata

SEQ ID NO: 2380972 - DNA, 25 bp, Homo sapien
tgaatttgagaaaaccggtccagca

SEQ ID NO: 2380973 - DNA, 25 bp, Homo sapien
tctggaggacacataaggaatcacc

SEQ ID NO: 2380974 - DNA, 25 bp, Homo sapien
tctctctggaggacacataaggaat

SEQ ID NO: 2380975 - DNA, 25 bp, Homo sapien
tgaaaggtctatgttctctctggag

SEQ ID NO: 2380976 - DNA, 25 bp, Homo sapien
ttgaaaggtctatgttctctctgga

SEQ ID NO: 2380977 - DNA, 25 bp, Homo sapien
gcatgtgcacctgtgcacgtatgca

SEQ ID NO: 2380978 - DNA, 25 bp, Homo sapien
tacaatcctattgggtacacaaaac

SEQ ID NO: 2380979 - DNA, 25 bp, Homo sapien
gaacacacgcatgtcctaaaaggtg

SEQ ID NO: 2380980 - DNA, 25 bp, Homo sapien
tacacgtgtagatatgtgtgccttg

SEQ ID NO: 2380981 - DNA, 25 bp, Homo sapien
tgactcaggtgcttcaggcgacaga

SEQ ID NO: 2380982 - DNA, 25 bp, Homo sapien
tccacaatcaaaggatggactgcag

SEQ ID NO: 2380983 - DNA, 25 bp, Homo sapien
gctaacatgattctgctggatgccc

SEQ ID NO: 2380984 - DNA, 25 bp, Homo sapien
cacagatgggcacgtacccgtttct

SEQ ID NO: 2380985 - DNA, 25 bp, Homo sapien
tgaagggcagctgctcgaactccag

SEQ ID NO: 2380986 - DNA, 25 bp, Homo sapien
ccatgcacttgggtgcgcccgtggt

SEQ ID NO: 2380987 - DNA, 25 bp, Homo sapien
tgccggtggcaagaaagtcatccag

SEQ ID NO: 2380988 - DNA, 25 bp, Homo sapien
cccgtggtgcccgatgagaacatga

SEQ ID NO: 2380989 - DNA, 25 bp, Homo sapien
agaagctgcacgttggactctccgg

SEQ ID NO: 2380990 - DNA, 25 bp, Homo sapien
taggtgccatcccagcctttgaagt

SEQ ID NO: 2380991 - DNA, 25 bp, Homo sapien
tgcagcaccccacttggagagaagc

SEQ ID NO: 2380992 - DNA, 25 bp, Homo sapien
gggtgcagtttgacaactccaacac

SEQ ID NO: 2380993 - DNA, 25 bp, Homo sapien
ctgctcagacgctgccaggaagaag

SEQ ID NO: 2380994 - DNA, 25 bp, Homo sapien
tgctcagacgctgccaggaagaagc

SEQ ID NO: 2380995 - DNA, 25 bp, Homo sapien
tggtgtagcacaggaggatgtcact

SEQ ID NO: 2380996 - DNA, 25 bp, Homo sapien
ccagaagggacaccatccagttcca

SEQ ID NO: 2380997 - DNA, 25 bp, Homo sapien
tcccagagcacattgggcgtgggca

SEQ ID NO: 2380998 - DNA, 25 bp, Homo sapien
cagaagggacaccatccagttccac

SEQ ID NO: 2380999 - DNA, 25 bp, Homo sapien
cagagcacattgggcgtgggcacca

SEQ ID NO: 2381000 - DNA, 25 bp, Homo sapien
ccccattcagagacgggcaaaactg

SEQ ID NO: 2381001 - DNA, 25 bp, Homo sapien
tagaaccatcttagacaatggcccc

SEQ ID NO: 2381002 - DNA, 25 bp, Homo sapien
ggtgcagatcccgacaaagtgctac

SEQ ID NO: 2381003 - DNA, 25 bp, Homo sapien
gagctgacatgctggtaatcaacag

SEQ ID NO: 2381004 - DNA, 25 bp, Homo sapien
tgtctgaagaaacggcaaagtcccc

SEQ ID NO: 2381005 - DNA, 25 bp, Homo sapien
tctaaagtgcgtctaagtgcaggca

SEQ ID NO: 2381006 - DNA, 25 bp, Homo sapien
cacattcggtggagagactcatccc

SEQ ID NO: 2381007 - DNA, 25 bp, Homo sapien
aaaactcgaaggctctctgtgggtc

SEQ ID NO: 2381008 - DNA, 25 bp, Homo sapien
cagccacttggccccagttaccagg

SEQ ID NO: 2381009 - DNA, 25 bp, Homo sapien
ggccccagttaccaggacagtgatg

SEQ ID NO: 2381010 - DNA, 25 bp, Homo sapien
acttggccccagttaccaggacagt

SEQ ID NO: 2381011 - DNA, 25 bp, Homo sapien
ttggccccagttaccaggacagtga

SEQ ID NO: 2381012 - DNA, 25 bp, Homo sapien
cactcgcaagcaggaaataggatgg

SEQ ID NO: 2381013 - DNA, 25 bp, Homo sapien
gattaaaactaaacccagtgcctga

SEQ ID NO: 2381014 - DNA, 25 bp, Homo sapien
gaatgagtactgaagaggcacactc

SEQ ID NO: 2381015 - DNA, 25 bp, Homo sapien
agtgcctgaagcctcactcgcaagc

SEQ ID NO: 2381016 - DNA, 25 bp, Homo sapien
gagccagtggacaggatcgtgtgga

SEQ ID NO: 2381017 - DNA, 25 bp, Homo sapien
atcgtgtggagcatctggagactgt

SEQ ID NO: 2381018 - DNA, 25 bp, Homo sapien
ggaggatgctgctcttgatgcacct

SEQ ID NO: 2381019 - DNA, 25 bp, Homo sapien
tgcacctgtagacatactcgtagct

SEQ ID NO: 2381020 - DNA, 25 bp, Homo sapien
ccacgtgcgtgaaccattttctaaa

SEQ ID NO: 2381021 - DNA, 25 bp, Homo sapien
caaaaatgaccgcaccttgtaattc

SEQ ID NO: 2381022 - DNA, 25 bp, Homo sapien
gtatttcatgcacttctaatggctg

SEQ ID NO: 2381023 - DNA, 25 bp, Homo sapien
tggccaatggccatgtttcgatgtc

SEQ ID NO: 2381024 - DNA, 25 bp, Homo sapien
catctggtgattgacgttttagccg

SEQ ID NO: 2381025 - DNA, 25 bp, Homo sapien
tttagaagcccaagacaaattgtgt

SEQ ID NO: 2381026 - DNA, 25 bp, Homo sapien
tgatatggaaattagaatgaacccc

SEQ ID NO: 2381027 - DNA, 25 bp, Homo sapien
tgagcaacaaaggagaaggtgccaa

SEQ ID NO: 2381028 - DNA, 25 bp, Homo sapien
tcccctttatacacaggaagagaaa

SEQ ID NO: 2381029 - DNA, 25 bp, Homo sapien
ctgaatctcccctttatacacagga

SEQ ID NO: 2381030 - DNA, 25 bp, Homo sapien
ggcctgaatctcccctttatacaca

SEQ ID NO: 2381031 - DNA, 25 bp, Homo sapien
gaatctcccctttatacacaggaag

SEQ ID NO: 2381032 - DNA, 25 bp, Homo sapien
ggttcattcgtattcaccacttggg

SEQ ID NO: 2381033 - DNA, 25 bp, Homo sapien
tgtgtgctccccaaaatcgctgtct

SEQ ID NO: 2381034 - DNA, 25 bp, Homo sapien
acatctgggctcgttcgggctacta

SEQ ID NO: 2381035 - DNA, 25 bp, Homo sapien
taataatgcgttcctcccagatgaa

SEQ ID NO: 2381036 - DNA, 25 bp, Homo sapien
gctggcaagggatcggcttagtaca

SEQ ID NO: 2381037 - DNA, 25 bp, Homo sapien
gaatttggagaaatacgccttcctg

SEQ ID NO: 2381038 - DNA, 25 bp, Homo sapien
tgtgtgggctggcaagggatcggct

SEQ ID NO: 2381039 - DNA, 25 bp, Homo sapien
ttcctgtacttgttgccgttctcat

SEQ ID NO: 2381040 - DNA, 25 bp, Homo sapien
tcattatccccccactggcggaatg

SEQ ID NO: 2381041 - DNA, 25 bp, Homo sapien
gctgaagacaacaagatattgatca

SEQ ID NO: 2381042 - DNA, 25 bp, Homo sapien
tcaagctgaagacaacaagatattg

SEQ ID NO: 2381043 - DNA, 25 bp, Homo sapien
gcggaatgaactataagcagcttct

SEQ ID NO: 2381044 - DNA, 25 bp, Homo sapien
gatgagtgtttctctacatccactc

SEQ ID NO: 2381045 - DNA, 25 bp, Homo sapien
tcagggtcatctgatgagtgtttct

SEQ ID NO: 2381046 - DNA, 25 bp, Homo sapien
gcttttctgcattcgtctgtctgca

SEQ ID NO: 2381047 - DNA, 25 bp, Homo sapien
tgcttttctgcattcgtctgtctgc

SEQ ID NO: 2381048 - DNA, 25 bp, Homo sapien
ctttaatcggacgagaaatttctgg

SEQ ID NO: 2381049 - DNA, 25 bp, Homo sapien
tggagtcagatctccctttaatcgg

SEQ ID NO: 2381050 - DNA, 25 bp, Homo sapien
ctgcctcattctggcacttcggtgc

SEQ ID NO: 2381051 - DNA, 25 bp, Homo sapien
ttcggtgccagcaacaacatacagt

SEQ ID NO: 2381052 - DNA, 25 bp, Homo sapien
gcatttatgtgacatcatgaagcag

SEQ ID NO: 2381053 - DNA, 25 bp, Homo sapien
gacactgccacaagccaccaccaag

SEQ ID NO: 2381054 - DNA, 25 bp, Homo sapien
tttatgtgacatcatgaagcagaca

SEQ ID NO: 2381055 - DNA, 25 bp, Homo sapien
gcagacactgccacaagccaccacc

SEQ ID NO: 2381056 - DNA, 25 bp, Homo sapien
gagcagttaaccagctgggggcctc

SEQ ID NO: 2381057 - DNA, 25 bp, Homo sapien
ctcctgcaataacgccccgaagatt

SEQ ID NO: 2381058 - DNA, 25 bp, Homo sapien
gtaatgccagaagtcatctgcctca

SEQ ID NO: 2381059 - DNA, 25 bp, Homo sapien
ggctggcctcctgcaataacgcccc

SEQ ID NO: 2381060 - DNA, 25 bp, Homo sapien
ctccggccaagcatgacgatgcccc

SEQ ID NO: 2381061 - DNA, 25 bp, Homo sapien
aagcatgacgatgcccccggtcttg

SEQ ID NO: 2381062 - DNA, 25 bp, Homo sapien
ggccaagcatgacgatgcccccggt

SEQ ID NO: 2381063 - DNA, 25 bp, Homo sapien
ttctgcagtagtcgccatgagccca

SEQ ID NO: 2381064 - DNA, 25 bp, Homo sapien
atagatttccgagctgccgaaccgc

SEQ ID NO: 2381065 - DNA, 25 bp, Homo sapien
atgttatagatttccgagctgccga

SEQ ID NO: 2381066 - DNA, 25 bp, Homo sapien
tgttatagatttccgagctgccgaa

SEQ ID NO: 2381067 - DNA, 25 bp, Homo sapien
ttatagatttccgagctgccgaacc

SEQ ID NO: 2381068 - DNA, 25 bp, Homo sapien
tgaggctgggcacgtgtcgcgcaga

SEQ ID NO: 2381069 - DNA, 25 bp, Homo sapien
ggaagaggatcaccctctcctccct

SEQ ID NO: 2381070 - DNA, 25 bp, Homo sapien
gcacgtgtcgcgcagacaagcccat

SEQ ID NO: 2381071 - DNA, 25 bp, Homo sapien
tcgcgcagacaagcccatgcggatg

SEQ ID NO: 2381072 - DNA, 25 bp, Homo sapien
cgatggctgcggtctcctcgctggc

SEQ ID NO: 2381073 - DNA, 25 bp, Homo sapien
tcagatgtaagcgcccctcaatgtg

SEQ ID NO: 2381074 - DNA, 25 bp, Homo sapien
atgtaagcgcccctcaatgtgtggg

SEQ ID NO: 2381075 - DNA, 25 bp, Homo sapien
cgcccctcaatgtgtgggctcgtgg

SEQ ID NO: 2381076 - DNA, 25 bp, Homo sapien
gacaaacgatatataaagcaccggc

SEQ ID NO: 2381077 - DNA, 25 bp, Homo sapien
aatgcagtcttaggaagggtaggaa

SEQ ID NO: 2381078 - DNA, 25 bp, Homo sapien
ttgctaggcaacgtggacaaacgat

SEQ ID NO: 2381079 - DNA, 25 bp, Homo sapien
tgggcctgctaaccctctgaacatg

SEQ ID NO: 2381080 - DNA, 25 bp, Homo sapien
cctgggaacccagtgagtgtgtgct

SEQ ID NO: 2381081 - DNA, 25 bp, Homo sapien
aatcctgtctctagttacacctcac

SEQ ID NO: 2381082 - DNA, 25 bp, Homo sapien
taacgaatagccattccataggctt

SEQ ID NO: 2381083 - DNA, 25 bp, Homo sapien
ggaagcagactctcctggtaaatcc

SEQ ID NO: 2381084 - DNA, 25 bp, Homo sapien
aaggccccgggactttgcagatgag

SEQ ID NO: 2381085 - DNA, 25 bp, Homo sapien
aaataacttcccgaatgcacccagg

SEQ ID NO: 2381086 - DNA, 25 bp, Homo sapien
gaacagaagcggcagtgtctctcca

SEQ ID NO: 2381087 - DNA, 25 bp, Homo sapien
caagcaacatgtgaagggtcagacc

SEQ ID NO: 2381088 - DNA, 25 bp, Homo sapien
gaggaagacaagtttgtcccgcctc

SEQ ID NO: 2381089 - DNA, 25 bp, Homo sapien
cctcataagaggaagtaagatgggt

SEQ ID NO: 2381090 - DNA, 25 bp, Homo sapien
agagctgactatggacaccccttcc

SEQ ID NO: 2381091 - DNA, 25 bp, Homo sapien
gaggtagacccacaaggttcctgtc

SEQ ID NO: 2381092 - DNA, 25 bp, Homo sapien
tcaaatgccaggagtccattccact

SEQ ID NO: 2381093 - DNA, 25 bp, Homo sapien
agtcgggaagccctcaaatgccagg

SEQ ID NO: 2381094 - DNA, 25 bp, Homo sapien
ggctgcagtcgggaagccctcaaat

SEQ ID NO: 2381095 - DNA, 25 bp, Homo sapien
ccaggagtccattccacttggccat

SEQ ID NO: 2381096 - DNA, 25 bp, Homo sapien
tgcatgaggcgtccccaagtagaca

SEQ ID NO: 2381097 - DNA, 25 bp, Homo sapien
aggcgtccccaagtagacaggagcc

SEQ ID NO: 2381098 - DNA, 25 bp, Homo sapien
agctcctgcatgaggcgtccccaag

SEQ ID NO: 2381099 - DNA, 25 bp, Homo sapien
gaagggccagacatcccagccatga

SEQ ID NO: 2381100 - DNA, 25 bp, Homo sapien
taaaagaaatcctgctaccatttcc

SEQ ID NO: 2381101 - DNA, 25 bp, Homo sapien
cttaaaagaaatcctgctaccattt

SEQ ID NO: 2381102 - DNA, 25 bp, Homo sapien
tcttaaaagaaatcctgctaccatt

SEQ ID NO: 2381103 - DNA, 25 bp, Homo sapien
cctcttaaaagaaatcctgctacca

SEQ ID NO: 2381104 - DNA, 25 bp, Homo sapien
gggagctaataccgccaccttccac

SEQ ID NO: 2381105 - DNA, 25 bp, Homo sapien
tgtgagatgcaaacgtctcgcctgc

SEQ ID NO: 2381106 - DNA, 25 bp, Homo sapien
tgaccccggcagtgcatattccaga

SEQ ID NO: 2381107 - DNA, 25 bp, Homo sapien
ttctaacgctgcacactctactggg

SEQ ID NO: 2381108 - DNA, 25 bp, Homo sapien
tagaggcaagagtgtccccaagctc

SEQ ID NO: 2381109 - DNA, 25 bp, Homo sapien
aatgggtctcggctctaagatgccc

SEQ ID NO: 2381110 - DNA, 25 bp, Homo sapien
gaggctatttcaaagttgcccagag

SEQ ID NO: 2381111 - DNA, 25 bp, Homo sapien
cgaagtacggtgaactgaccactgt

SEQ ID NO: 2381112 - DNA, 25 bp, Homo sapien
tctgcaaacgtgcaccgaagtacgg

SEQ ID NO: 2381113 - DNA, 25 bp, Homo sapien
ggcaacttccactttcttgccgttg

SEQ ID NO: 2381114 - DNA, 25 bp, Homo sapien
ttccactttcttgccgttgagcgta

SEQ ID NO: 2381115 - DNA, 25 bp, Homo sapien
cctccttgctccacggcttttccag

SEQ ID NO: 2381116 - DNA, 25 bp, Homo sapien
tcccggtacagatccagggtctcgg

SEQ ID NO: 2381117 - DNA, 25 bp, Homo sapien
caaaggcatactggaccctgaggga

SEQ ID NO: 2381118 - DNA, 25 bp, Homo sapien
aaaagttacagtgcacacgggtgcg

SEQ ID NO: 2381119 - DNA, 25 bp, Homo sapien
tacagaacacttggtgcgagcatcc

SEQ ID NO: 2381120 - DNA, 25 bp, Homo sapien
cacagagcaaaatgggacaacggga

SEQ ID NO: 2381121 - DNA, 25 bp, Homo sapien
tggcccggaggcacgctctggttga

SEQ ID NO: 2381122 - DNA, 25 bp, Homo sapien
agggcctgcattgcatccatgacac

SEQ ID NO: 2381123 - DNA, 25 bp, Homo sapien
gacgggtgacgcacagtcctccagg

SEQ ID NO: 2381124 - DNA, 25 bp, Homo sapien
ggcctgcattgcatccatgacacag

SEQ ID NO: 2381125 - DNA, 25 bp, Homo sapien
tgaattgtacataccaactgcctgg

SEQ ID NO: 2381126 - DNA, 25 bp, Homo sapien
gatgacatgatctcgacaagaaccc

SEQ ID NO: 2381127 - DNA, 25 bp, Homo sapien
actgcctggctatggaaacccgtga

SEQ ID NO: 2381128 - DNA, 25 bp, Homo sapien
acccatgagggacacgggtggacac

SEQ ID NO: 2381129 - DNA, 25 bp, Homo sapien
aaattatcacacacttagcagcgga

SEQ ID NO: 2381130 - DNA, 25 bp, Homo sapien
tttatccagcaacccaattccagag

SEQ ID NO: 2381131 - DNA, 25 bp, Homo sapien
gccctatatcctgctgtgcctgaag

SEQ ID NO: 2381132 - DNA, 25 bp, Homo sapien
tagcagcggaaaacagacctagact

SEQ ID NO: 2381133 - DNA, 25 bp, Homo sapien
acttgacatgatgcccgtgacgatg

SEQ ID NO: 2381134 - DNA, 25 bp, Homo sapien
gctgactgaagcacatgccttggga

SEQ ID NO: 2381135 - DNA, 25 bp, Homo sapien
tcacctgtggttgattctgacaaag

SEQ ID NO: 2381136 - DNA, 25 bp, Homo sapien
tgacgatgccctcaagggctgcagt

SEQ ID NO: 2381137 - DNA, 25 bp, Homo sapien
aagatacgcagtttagaaatttcac

SEQ ID NO: 2381138 - DNA, 25 bp, Homo sapien
caccattatacatgtgcaagatgag

SEQ ID NO: 2381139 - DNA, 25 bp, Homo sapien
cagtccctttcctatgcatactcga

SEQ ID NO: 2381140 - DNA, 25 bp, Homo sapien
gatgttgcacagtcctatcattgga

SEQ ID NO: 2381141 - DNA, 25 bp, Homo sapien
tcataatcttgatccacaaccaaat

SEQ ID NO: 2381142 - DNA, 25 bp, Homo sapien
aatgcagaatacagccagggtgggg

SEQ ID NO: 2381143 - DNA, 25 bp, Homo sapien
acaaccaaatccgagtcacaaccga

SEQ ID NO: 2381144 - DNA, 25 bp, Homo sapien
atccgagtcacaaccgacaatgcag

SEQ ID NO: 2381145 - DNA, 25 bp, Homo sapien
gcttaggaatattcaccaaccccat

SEQ ID NO: 2381146 - DNA, 25 bp, Homo sapien
ggaagccaaactagcatgcagaggc

SEQ ID NO: 2381147 - DNA, 25 bp, Homo sapien
caagcccctaattgtaaaggtgaga

SEQ ID NO: 2381148 - DNA, 25 bp, Homo sapien
ctgggggatcacagttaagaaggaa

SEQ ID NO: 2381149 - DNA, 25 bp, Homo sapien
tgaaggctcaacagaaggtgatgct

SEQ ID NO: 2381150 - DNA, 25 bp, Homo sapien
gactggacggcttctagcagcagaa

SEQ ID NO: 2381151 - DNA, 25 bp, Homo sapien
tgacaaatcgccatggactggacgg

SEQ ID NO: 2381152 - DNA, 25 bp, Homo sapien
gaaggctcaacaaggtgccagcgga

SEQ ID NO: 2381153 - DNA, 25 bp, Homo sapien
ataagccagcacagtcggaaccact

SEQ ID NO: 2381154 - DNA, 25 bp, Homo sapien
gtgtataccagtgacagtggccgag

SEQ ID NO: 2381155 - DNA, 25 bp, Homo sapien
gaaccacttcgctggcacttggctg

SEQ ID NO: 2381156 - DNA, 25 bp, Homo sapien
tggccgagaggaggtgttgaacaga

SEQ ID NO: 2381157 - DNA, 25 bp, Homo sapien
caagagttgcctggttgcggggggt

SEQ ID NO: 2381158 - DNA, 25 bp, Homo sapien
ggtgggcgggaggggcaagagttgc

SEQ ID NO: 2381159 - DNA, 25 bp, Homo sapien
aggggcaagagttgcctggttgcgg

SEQ ID NO: 2381160 - DNA, 25 bp, Homo sapien
tgcggggggtcttttcctggcaggc

SEQ ID NO: 2381161 - DNA, 25 bp, Homo sapien
ctcggccacctgtgaccaggatcaa

SEQ ID NO: 2381162 - DNA, 25 bp, Homo sapien
tcggccacctgtgaccaggatcaac

SEQ ID NO: 2381163 - DNA, 25 bp, Homo sapien
ggcagctcgggaccccatttcagag

SEQ ID NO: 2381164 - DNA, 25 bp, Homo sapien
gtggggtagtgggacaagcctggga

SEQ ID NO: 2381165 - DNA, 25 bp, Homo sapien
tggggtagtgggacaagcctgggac

SEQ ID NO: 2381166 - DNA, 25 bp, Homo sapien
cagctcgggaccccatttcagagcc

SEQ ID NO: 2381167 - DNA, 25 bp, Homo sapien
aagcacacgagggtcccgttttgtg

SEQ ID NO: 2381168 - DNA, 25 bp, Homo sapien
cccatccttccagtggaagaagcac

SEQ ID NO: 2381169 - DNA, 25 bp, Homo sapien
tgttaaaatggtccttgttattatc

SEQ ID NO: 2381170 - DNA, 25 bp, Homo sapien
gaatcaactcaggtatccccaggga

SEQ ID NO: 2381171 - DNA, 25 bp, Homo sapien
tcataacaccggcacgctgtttcga

SEQ ID NO: 2381172 - DNA, 25 bp, Homo sapien
ggcacgctgtttcgaaacaaggcat

SEQ ID NO: 2381173 - DNA, 25 bp, Homo sapien
aacaccggcacgctgtttcgaaaca

SEQ ID NO: 2381174 - DNA, 25 bp, Homo sapien
caccggcacgctgtttcgaaacaag

SEQ ID NO: 2381175 - DNA, 25 bp, Homo sapien
tgcacagaccggagagtgactctgg

SEQ ID NO: 2381176 - DNA, 25 bp, Homo sapien
tgactctggaacctaatcagctggg

SEQ ID NO: 2381177 - DNA, 25 bp, Homo sapien
tacttttacaactgtcccagaggtc

SEQ ID NO: 2381178 - DNA, 25 bp, Homo sapien
ttgaccaatttgagcttttccccag

SEQ ID NO: 2381179 - DNA, 25 bp, Homo sapien
tttagctcggaattcaaagccctcc

SEQ ID NO: 2381180 - DNA, 25 bp, Homo sapien
ttgccaatcgctggaccgaagaggg

SEQ ID NO: 2381181 - DNA, 25 bp, Homo sapien
aaatgcaacaatccctttagctcgg

SEQ ID NO: 2381182 - DNA, 25 bp, Homo sapien
catggaatcccaccattagaaggct

SEQ ID NO: 2381183 - DNA, 25 bp, Homo sapien
aacacattagccaaaggtttccaag

SEQ ID NO: 2381184 - DNA, 25 bp, Homo sapien
aggatgcaagataacaaaattacaa

SEQ ID NO: 2381185 - DNA, 25 bp, Homo sapien
aaggatgcaagataacaaaattaca

SEQ ID NO: 2381186 - DNA, 25 bp, Homo sapien
taattccgatgcgtaatgagctact

SEQ ID NO: 2381187 - DNA, 25 bp, Homo sapien
tgttcagaagcttcggcagttgggt

SEQ ID NO: 2381188 - DNA, 25 bp, Homo sapien
ttgaaagtgaagctctagaattgcc

SEQ ID NO: 2381189 - DNA, 25 bp, Homo sapien
gaattacggcccaaactcagccaag

SEQ ID NO: 2381190 - DNA, 25 bp, Homo sapien
aatagaccccgccactttagcaaag

SEQ ID NO: 2381191 - DNA, 25 bp, Homo sapien
cagagtcacgtagcaatggaggcaa

SEQ ID NO: 2381192 - DNA, 25 bp, Homo sapien
tccatcctccggtagcttgggtgtg

SEQ ID NO: 2381193 - DNA, 25 bp, Homo sapien
tctagtggccaaagcaaggcacgag

SEQ ID NO: 2381194 - DNA, 25 bp, Homo sapien
ggagactccactaagctgatgacgg

SEQ ID NO: 2381195 - DNA, 25 bp, Homo sapien
tagagatgatgaggggatatgaccc

SEQ ID NO: 2381196 - DNA, 25 bp, Homo sapien
cactaagctgatgacggaggaggat

SEQ ID NO: 2381197 - DNA, 25 bp, Homo sapien
gtcaacaggcgggagactccactaa

SEQ ID NO: 2381198 - DNA, 25 bp, Homo sapien
tacttataaaagcactcatgagggc

SEQ ID NO: 2381199 - DNA, 25 bp, Homo sapien
ccatcataggctgggaggcttcaac

SEQ ID NO: 2381200 - DNA, 25 bp, Homo sapien
ttcagtatccattaagagccagtcc

SEQ ID NO: 2381201 - DNA, 25 bp, Homo sapien
tcatttgtctaagtcagcttggcca

SEQ ID NO: 2381202 - DNA, 25 bp, Homo sapien
cagggctactgcattgaaaccctct

SEQ ID NO: 2381203 - DNA, 25 bp, Homo sapien
acagcgtcggccacggaacaatggc

SEQ ID NO: 2381204 - DNA, 25 bp, Homo sapien
tcagtccagcgtgacacagatcgtc

SEQ ID NO: 2381205 - DNA, 25 bp, Homo sapien
acagatcgtcggaccacagcgtcgg

SEQ ID NO: 2381206 - DNA, 25 bp, Homo sapien
gccagcaccccgtgggttctctgtg

SEQ ID NO: 2381207 - DNA, 25 bp, Homo sapien
ctctgtgctccggaagaatatgaaa

SEQ ID NO: 2381208 - DNA, 25 bp, Homo sapien
tgttgtcatttgtctattgtttcca

SEQ ID NO: 2381209 - DNA, 25 bp, Homo sapien
aagcacgactactctatgggaccag

SEQ ID NO: 2381210 - DNA, 25 bp, Homo sapien
cccgctcccagtccggctccctcct

SEQ ID NO: 2381211 - DNA, 25 bp, Homo sapien
tcgcgggcaacaccgccacccagtg

SEQ ID NO: 2381212 - DNA, 25 bp, Homo sapien
cccagtccggctccctcctccgcag

SEQ ID NO: 2381213 - DNA, 25 bp, Homo sapien
ccgggcctcgcgggcaacaccgcca

SEQ ID NO: 2381214 - DNA, 25 bp, Homo sapien
gtcctgtgtcgctcagagtcagcgg

SEQ ID NO: 2381215 - DNA, 25 bp, Homo sapien
gcttgtcctgtgtcgctcagagtca

SEQ ID NO: 2381216 - DNA, 25 bp, Homo sapien
gagcttgtcctgtgtcgctcagagt

SEQ ID NO: 2381217 - DNA, 25 bp, Homo sapien
agtcagcggaggacgaagcggactc

SEQ ID NO: 2381218 - DNA, 25 bp, Homo sapien
gctgcgcttaattgagagaagatga

SEQ ID NO: 2381219 - DNA, 25 bp, Homo sapien
gggagctgcgcttaattgagagaag

SEQ ID NO: 2381220 - DNA, 25 bp, Homo sapien
gagctgcgcttaattgagagaagat

SEQ ID NO: 2381221 - DNA, 25 bp, Homo sapien
cttctggggagctgcgcttaattga

SEQ ID NO: 2381222 - DNA, 25 bp, Homo sapien
tcgtcgaccgtattgcatatggctg

SEQ ID NO: 2381223 - DNA, 25 bp, Homo sapien
aaacttcctcgtcgaccgtattgca

SEQ ID NO: 2381224 - DNA, 25 bp, Homo sapien
cgtattgcatatggctgctcaggca

SEQ ID NO: 2381225 - DNA, 25 bp, Homo sapien
gtatccacgtatggccacaagactt

SEQ ID NO: 2381226 - DNA, 25 bp, Homo sapien
ggtgtgtgccaagactgctgacagc

SEQ ID NO: 2381227 - DNA, 25 bp, Homo sapien
gggctccatgtaagatgggcctata

SEQ ID NO: 2381228 - DNA, 25 bp, Homo sapien
tatggacaacgaagcaaaagcagtt

SEQ ID NO: 2381229 - DNA, 25 bp, Homo sapien
taagatgggcctataacaactatgg

SEQ ID NO: 2381230 - DNA, 25 bp, Homo sapien
tgtgagcagagaagactccttctgg

SEQ ID NO: 2381231 - DNA, 25 bp, Homo sapien
ttctctgagctgaccagcaacttca

SEQ ID NO: 2381232 - DNA, 25 bp, Homo sapien
cttctggtctggatttcttagctca

SEQ ID NO: 2381233 - DNA, 25 bp, Homo sapien
tcttagctcagagacaccttctctg

SEQ ID NO: 2381234 - DNA, 25 bp, Homo sapien
tcctggtggcgtatttttctgcagc

SEQ ID NO: 2381235 - DNA, 25 bp, Homo sapien
ctcctggtggcgtatttttctgcag

SEQ ID NO: 2381236 - DNA, 25 bp, Homo sapien
gctcctggtggcgtatttttctgca

SEQ ID NO: 2381237 - DNA, 25 bp, Homo sapien
ggctcctggtggcgtatttttctgc

SEQ ID NO: 2381238 - DNA, 25 bp, Homo sapien
aaaggactcctctgcattggagatg

SEQ ID NO: 2381239 - DNA, 25 bp, Homo sapien
gtagatgaagaatggctccacccgg

SEQ ID NO: 2381240 - DNA, 25 bp, Homo sapien
gcagactggagttccttgtgaggtc

SEQ ID NO: 2381241 - DNA, 25 bp, Homo sapien
aacttctgcaggctatccacaatcc

SEQ ID NO: 2381242 - DNA, 25 bp, Homo sapien
cacagagctactggtcagagagacc

SEQ ID NO: 2381243 - DNA, 25 bp, Homo sapien
gacacagggtagatcttccgtaagg

SEQ ID NO: 2381244 - DNA, 25 bp, Homo sapien
tcttgggttgggtagaccaccacac

SEQ ID NO: 2381245 - DNA, 25 bp, Homo sapien
gattcagaggtaccgagatgaccac

SEQ ID NO: 2381246 - DNA, 25 bp, Homo sapien
ggcttctgttccatcccacctggca

SEQ ID NO: 2381247 - DNA, 25 bp, Homo sapien
attcattgattactaagagttggct

SEQ ID NO: 2381248 - DNA, 25 bp, Homo sapien
cattgattactaagagttggcttct

SEQ ID NO: 2381249 - DNA, 25 bp, Homo sapien
tattcattgacaattcattgattac

SEQ ID NO: 2381250 - DNA, 25 bp, Homo sapien
ttgggatctgccagagcctcggaat

SEQ ID NO: 2381251 - DNA, 25 bp, Homo sapien
agcctcggaatcctgttggtgggca

SEQ ID NO: 2381252 - DNA, 25 bp, Homo sapien
gcctcggaatcctgttggtgggcat

SEQ ID NO: 2381253 - DNA, 25 bp, Homo sapien
tctgccagagcctcggaatcctgtt

SEQ ID NO: 2381254 - DNA, 25 bp, Homo sapien
agcatgtcagtcagggagtcagcac

SEQ ID NO: 2381255 - DNA, 25 bp, Homo sapien
gtgtgatagagccttgttctgcaag

SEQ ID NO: 2381256 - DNA, 25 bp, Homo sapien
gagccttgttctgcaagcatgtcag

SEQ ID NO: 2381257 - DNA, 25 bp, Homo sapien
ttgttctgcaagcatgtcagtcagg

SEQ ID NO: 2381258 - DNA, 25 bp, Homo sapien
aaacagcatgtatacctggcaccca

SEQ ID NO: 2381259 - DNA, 25 bp, Homo sapien
tacctggcacccatagaattgcatt

SEQ ID NO: 2381260 - DNA, 25 bp, Homo sapien
ccatagaatatcttccccagtaacc

SEQ ID NO: 2381261 - DNA, 25 bp, Homo sapien
ccaaacagcatgtatacctggcacc

SEQ ID NO: 2381262 - DNA, 25 bp, Homo sapien
tgtgacatgtgaagtggggcttctg

SEQ ID NO: 2381263 - DNA, 25 bp, Homo sapien
ctgtgacatgtgaagtggggcttct

SEQ ID NO: 2381264 - DNA, 25 bp, Homo sapien
tccctttggttctgagcgacaagag

SEQ ID NO: 2381265 - DNA, 25 bp, Homo sapien
ccttgtctgtgatggaggactggat

SEQ ID NO: 2381266 - DNA, 25 bp, Homo sapien
gacaagagtgacctgagctttggcc

SEQ ID NO: 2381267 - DNA, 25 bp, Homo sapien
gctggaaagagtctgagtccagatg

SEQ ID NO: 2381268 - DNA, 25 bp, Homo sapien
ctccgggttgccgtctgggtgggat

SEQ ID NO: 2381269 - DNA, 25 bp, Homo sapien
tgcacatcaggaccatcggactgct

SEQ ID NO: 2381270 - DNA, 25 bp, Homo sapien
ttattacatttgaagacaagcagag

SEQ ID NO: 2381271 - DNA, 25 bp, Homo sapien
gcttccccttagtgaagttattaca

SEQ ID NO: 2381272 - DNA, 25 bp, Homo sapien
tccatagagcatttcctagcacggg

SEQ ID NO: 2381273 - DNA, 25 bp, Homo sapien
gtccagtgcggggagacagtccaaa

SEQ ID NO: 2381274 - DNA, 25 bp, Homo sapien
aaatcttccatagagcatttcctag

SEQ ID NO: 2381275 - DNA, 25 bp, Homo sapien
tcttccatagagcatttcctagcac

SEQ ID NO: 2381276 - DNA, 25 bp, Homo sapien
tcatgggactccgtgcacgatgctt

SEQ ID NO: 2381277 - DNA, 25 bp, Homo sapien
acagtgggcaaacgcttcctcagag

SEQ ID NO: 2381278 - DNA, 25 bp, Homo sapien
ggcttctagcctctggtttatcccg

SEQ ID NO: 2381279 - DNA, 25 bp, Homo sapien
ctggtttatcccgacagagactctc

SEQ ID NO: 2381280 - DNA, 25 bp, Homo sapien
agggtagaattaggagattcaaatg

SEQ ID NO: 2381281 - DNA, 25 bp, Homo sapien
tcactgctgactctcactgccgtta

SEQ ID NO: 2381282 - DNA, 25 bp, Homo sapien
tgtccgggcgatggcccatgcaggt

SEQ ID NO: 2381283 - DNA, 25 bp, Homo sapien
gagtgctgccattatcaatttcctc

SEQ ID NO: 2381284 - DNA, 25 bp, Homo sapien
actgccgttatcttcacacctgctg

SEQ ID NO: 2381285 - DNA, 25 bp, Homo sapien
tcagctgaggagtccgagccccctc

SEQ ID NO: 2381286 - DNA, 25 bp, Homo sapien
tgctgtgggcactgcttttaatgag

SEQ ID NO: 2381287 - DNA, 25 bp, Homo sapien
gctgtgggcactgcttttaatgagt

SEQ ID NO: 2381288 - DNA, 25 bp, Homo sapien
tgtgggcactgcttttaatgagttt

SEQ ID NO: 2381289 - DNA, 25 bp, Homo sapien
ctcccctacttccacatgccaggtg

SEQ ID NO: 2381290 - DNA, 25 bp, Homo sapien
tctgatcaatgatgtgacatctagc

SEQ ID NO: 2381291 - DNA, 25 bp, Homo sapien
tgatgtgacatctagctctccagtg

SEQ ID NO: 2381292 - DNA, 25 bp, Homo sapien
gacaaccccacagctacggtccaat

SEQ ID NO: 2381293 - DNA, 25 bp, Homo sapien
ctaccgtgaaattctgatcaatgat

SEQ ID NO: 2381294 - DNA, 25 bp, Homo sapien
caccatgtctagcacccaaaagcca

SEQ ID NO: 2381295 - DNA, 25 bp, Homo sapien
caccgtcctggaaggctgagcacag

SEQ ID NO: 2381296 - DNA, 25 bp, Homo sapien
gggagcaccaaggacaatgcagctg

SEQ ID NO: 2381297 - DNA, 25 bp, Homo sapien
aaaagccaccgtcctggaaggctga

SEQ ID NO: 2381298 - DNA, 25 bp, Homo sapien
taaagccatttggagttcaagtcgg

SEQ ID NO: 2381299 - DNA, 25 bp, Homo sapien
cacagaaatcccagttgagccggag

SEQ ID NO: 2381300 - DNA, 25 bp, Homo sapien
tcagctgagactcgtggcacagaaa

SEQ ID NO: 2381301 - DNA, 25 bp, Homo sapien
tgaccgtgacgttccacagccaata

SEQ ID NO: 2381302 - DNA, 25 bp, Homo sapien
catgctgacacttcttatcatcatt

SEQ ID NO: 2381303 - DNA, 25 bp, Homo sapien
cattccatgctgacacttcttatca

SEQ ID NO: 2381304 - DNA, 25 bp, Homo sapien
tccatgctgacacttcttatcatca

SEQ ID NO: 2381305 - DNA, 25 bp, Homo sapien
ttccatgctgacacttcttatcatc

SEQ ID NO: 2381306 - DNA, 25 bp, Homo sapien
agtaaggcccaaagagacaaaatgt

SEQ ID NO: 2381307 - DNA, 25 bp, Homo sapien
tttcctctgatacttggcccagcat

SEQ ID NO: 2381308 - DNA, 25 bp, Homo sapien
taatgctcttgctttgaggtcgaca

SEQ ID NO: 2381309 - DNA, 25 bp, Homo sapien
tgcatggacagacacactgcgatcc

SEQ ID NO: 2381310 - DNA, 25 bp, Homo sapien
cataggtgggtctaagccagagccc

SEQ ID NO: 2381311 - DNA, 25 bp, Homo sapien
tagtaaattcagcaaggacaagaga

SEQ ID NO: 2381312 - DNA, 25 bp, Homo sapien
ggacaagagatgtcttctgttgagt

SEQ ID NO: 2381313 - DNA, 25 bp, Homo sapien
aacgggccctacttgaaagctccat

SEQ ID NO: 2381314 - DNA, 25 bp, Homo sapien
ctggacatgtacacctgtggccttc

SEQ ID NO: 2381315 - DNA, 25 bp, Homo sapien
attaccacacgtcaaaatctgttca

SEQ ID NO: 2381316 - DNA, 25 bp, Homo sapien
ttaccacacgtcaaaatctgttcat

SEQ ID NO: 2381317 - DNA, 25 bp, Homo sapien
cattaccacacgtcaaaatctgttc

SEQ ID NO: 2381318 - DNA, 25 bp, Homo sapien
taccacacgtcaaaatctgttcatc

SEQ ID NO: 2381319 - DNA, 25 bp, Homo sapien
cgatcaacctctgacccataggaag

SEQ ID NO: 2381320 - DNA, 25 bp, Homo sapien
ctgattggacccgatcaacctctga

SEQ ID NO: 2381321 - DNA, 25 bp, Homo sapien
cccgatcaacctctgacccatagga

SEQ ID NO: 2381322 - DNA, 25 bp, Homo sapien
gattggacccgatcaacctctgacc

SEQ ID NO: 2381323 - DNA, 25 bp, Homo sapien
ctgcagatgcagtgaacatcatggc

SEQ ID NO: 2381324 - DNA, 25 bp, Homo sapien
tgcagatgcagtgaacatcatggcc

SEQ ID NO: 2381325 - DNA, 25 bp, Homo sapien
cagatgcagtgaacatcatggccat

SEQ ID NO: 2381326 - DNA, 25 bp, Homo sapien
gcagatgcagtgaacatcatggcca

SEQ ID NO: 2381327 - DNA, 25 bp, Homo sapien
gaagccatatctgagacagtgaagg

SEQ ID NO: 2381328 - DNA, 25 bp, Homo sapien
ccactccacagtgggttctctggtg

SEQ ID NO: 2381329 - DNA, 25 bp, Homo sapien
cagtgaaggtaggtagagggttctc

SEQ ID NO: 2381330 - DNA, 25 bp, Homo sapien
tgggccagcggcaaatcatagcaga

SEQ ID NO: 2381331 - DNA, 25 bp, Homo sapien
ctaatggaccaagctcaattaggct

SEQ ID NO: 2381332 - DNA, 25 bp, Homo sapien
gactaatggaccaagctcaattagg

SEQ ID NO: 2381333 - DNA, 25 bp, Homo sapien
actaatggaccaagctcaattaggc

SEQ ID NO: 2381334 - DNA, 25 bp, Homo sapien
ttgactaatggaccaagctcaatta

SEQ ID NO: 2381335 - DNA, 25 bp, Homo sapien
cctggctcctgtccgccctgtgcag

SEQ ID NO: 2381336 - DNA, 25 bp, Homo sapien
tcctgtccgccctgtgcaggaagct

SEQ ID NO: 2381337 - DNA, 25 bp, Homo sapien
agtcctggctcctgtccgccctgtg

SEQ ID NO: 2381338 - DNA, 25 bp, Homo sapien
tggctcctgtccgccctgtgcagga

SEQ ID NO: 2381339 - DNA, 25 bp, Homo sapien
tgttcgtggctgacctacaaagatc

SEQ ID NO: 2381340 - DNA, 25 bp, Homo sapien
ctagatcagaagagtgctcacattc

SEQ ID NO: 2381341 - DNA, 25 bp, Homo sapien
cccaagatgaacttcctgcagaaca

SEQ ID NO: 2381342 - DNA, 25 bp, Homo sapien
ggctgacctacaaagatcaggccca

SEQ ID NO: 2381343 - DNA, 25 bp, Homo sapien
cagagctgaaaacaataaatcttga

SEQ ID NO: 2381344 - DNA, 25 bp, Homo sapien
tcagagctgaaaacaataaatcttg

SEQ ID NO: 2381345 - DNA, 25 bp, Homo sapien
tcttgataatgagcaaacacttgag

SEQ ID NO: 2381346 - DNA, 25 bp, Homo sapien
ctgctgagaattcacgtacctattt

SEQ ID NO: 2381347 - DNA, 25 bp, Homo sapien
gctgagaattcacgtacctatttcc

SEQ ID NO: 2381348 - DNA, 25 bp, Homo sapien
aattcacgtacctatttccactctt

SEQ ID NO: 2381349 - DNA, 25 bp, Homo sapien
ttcacgtacctatttccactcttac

SEQ ID NO: 2381350 - DNA, 25 bp, Homo sapien
catttccgttttgtcaagggcagtt

SEQ ID NO: 2381351 - DNA, 25 bp, Homo sapien
tcatttccgttttgtcaagggcagt

SEQ ID NO: 2381352 - DNA, 25 bp, Homo sapien
aaccgcctttcaggaatcaggatcg

SEQ ID NO: 2381353 - DNA, 25 bp, Homo sapien
tttcagccatgagacattcattagg

SEQ ID NO: 2381354 - DNA, 25 bp, Homo sapien
caaccgcctttcaggaatcaggatc

SEQ ID NO: 2381355 - DNA, 25 bp, Homo sapien
tgtttcagccatgagacattcatta

SEQ ID NO: 2381356 - DNA, 25 bp, Homo sapien
tgttgtcggagcctaattcacagct

SEQ ID NO: 2381357 - DNA, 25 bp, Homo sapien
ttgtcggagcctaattcacagctgc

SEQ ID NO: 2381358 - DNA, 25 bp, Homo sapien
cagtgttgtcggagcctaattcaca

SEQ ID NO: 2381359 - DNA, 25 bp, Homo sapien
acggcagtgttgtcggagcctaatt

SEQ ID NO: 2381360 - DNA, 25 bp, Homo sapien
gctattatcaattccaaagtccact

SEQ ID NO: 2381361 - DNA, 25 bp, Homo sapien
ggagtcctcaatcgggtactccacc

SEQ ID NO: 2381362 - DNA, 25 bp, Homo sapien
caaagtccacttgcaagatctcata

SEQ ID NO: 2381363 - DNA, 25 bp, Homo sapien
gatctcatagaaggatccatttacc

SEQ ID NO: 2381364 - DNA, 25 bp, Homo sapien
ctttgtgacacttcctctgaaaccc

SEQ ID NO: 2381365 - DNA, 25 bp, Homo sapien
aacttctttgtgacacttcctctga

SEQ ID NO: 2381366 - DNA, 25 bp, Homo sapien
tttgtgacacttcctctgaaacccc

SEQ ID NO: 2381367 - DNA, 25 bp, Homo sapien
agaaaacttctttgtgacacttcct

SEQ ID NO: 2381368 - DNA, 25 bp, Homo sapien
tgtctccgtggaatctctggaattt

SEQ ID NO: 2381369 - DNA, 25 bp, Homo sapien
ctgaggttgaacttctgttttacct

SEQ ID NO: 2381370 - DNA, 25 bp, Homo sapien
catcctgaggttgaacttctgtttt

SEQ ID NO: 2381371 - DNA, 25 bp, Homo sapien
atccatcctgaggttgaacttctgt

SEQ ID NO: 2381372 - DNA, 25 bp, Homo sapien
tcctgaggttgaacttctgttttac

SEQ ID NO: 2381373 - DNA, 25 bp, Homo sapien
cttcaaaactttcatccattccatt

SEQ ID NO: 2381374 - DNA, 25 bp, Homo sapien
acttcaaaactttcatccattccat

SEQ ID NO: 2381375 - DNA, 25 bp, Homo sapien
attttctgacggatgtgctgcatga

SEQ ID NO: 2381376 - DNA, 25 bp, Homo sapien
agcaggacaattccagggcagtatt

SEQ ID NO: 2381377 - DNA, 25 bp, Homo sapien
agggcgcgcggcctgtacaagccgg

SEQ ID NO: 2381378 - DNA, 25 bp, Homo sapien
tgtacaagccggtctgcggcgccat

SEQ ID NO: 2381379 - DNA, 25 bp, Homo sapien
cggcctgtacaagccggtctgcggc

SEQ ID NO: 2381380 - DNA, 25 bp, Homo sapien
gcgcgcggcctgtacaagccggtct

SEQ ID NO: 2381381 - DNA, 25 bp, Homo sapien
gcaggaaggagcctttatttgctca

SEQ ID NO: 2381382 - DNA, 25 bp, Homo sapien
ggaaggagcctttatttgctcacac

SEQ ID NO: 2381383 - DNA, 25 bp, Homo sapien
aggagcctttatttgctcacactca

SEQ ID NO: 2381384 - DNA, 25 bp, Homo sapien
tcagggaaatcgggaatccctggaa

SEQ ID NO: 2381385 - DNA, 25 bp, Homo sapien
gaatggttgaactctgggtatattt

SEQ ID NO: 2381386 - DNA, 25 bp, Homo sapien
tagatgacaatgacacgggagtgga

SEQ ID NO: 2381387 - DNA, 25 bp, Homo sapien
gagattacagatcctaggacttgct

SEQ ID NO: 2381388 - DNA, 25 bp, Homo sapien
caggacaggcggtctggcaggagat

SEQ ID NO: 2381389 - DNA, 25 bp, Homo sapien
gaaaggcttgataaagggttgcaat

SEQ ID NO: 2381390 - DNA, 25 bp, Homo sapien
gcttgataaagggttgcaattctta

SEQ ID NO: 2381391 - DNA, 25 bp, Homo sapien
aaggcttgataaagggttgcaattc

SEQ ID NO: 2381392 - DNA, 25 bp, Homo sapien
tgaaaggcttgataaagggttgcaa

SEQ ID NO: 2381393 - DNA, 25 bp, Homo sapien
ctgcagtatggctttgtgataaagg

SEQ ID NO: 2381394 - DNA, 25 bp, Homo sapien
gctttgtgataaagggaagaacttg

SEQ ID NO: 2381395 - DNA, 25 bp, Homo sapien
ctttgtgataaagggaagaacttgg

SEQ ID NO: 2381396 - DNA, 25 bp, Homo sapien
cagtatggctttgtgataaagggaa

SEQ ID NO: 2381397 - DNA, 25 bp, Homo sapien
ggggcgagcaggagaggggtgtcca

SEQ ID NO: 2381398 - DNA, 25 bp, Homo sapien
gtgtccaccaagctccctactgcct

SEQ ID NO: 2381399 - DNA, 25 bp, Homo sapien
cacaggggcgagcaggagaggggtg

SEQ ID NO: 2381400 - DNA, 25 bp, Homo sapien
agaggggtgtccaccaagctcccta

SEQ ID NO: 2381401 - DNA, 25 bp, Homo sapien
cacgactttgacaggaactgaaaca

SEQ ID NO: 2381402 - DNA, 25 bp, Homo sapien
cagctgtagataaatccccccttac

SEQ ID NO: 2381403 - DNA, 25 bp, Homo sapien
gaaggaacgacaaaaagctctgagc

SEQ ID NO: 2381404 - DNA, 25 bp, Homo sapien
aagaaggaacgacaaaaagctctga

SEQ ID NO: 2381405 - DNA, 25 bp, Homo sapien
agaaggaacgacaaaaagctctgag

SEQ ID NO: 2381406 - DNA, 25 bp, Homo sapien
cagccgcctgctgattccagggagt

SEQ ID NO: 2381407 - DNA, 25 bp, Homo sapien
tccttcgtgaggtcattctggcctc

SEQ ID NO: 2381408 - DNA, 25 bp, Homo sapien
tccagggagtctctgcggtcagctg

SEQ ID NO: 2381409 - DNA, 25 bp, Homo sapien
tccagccctttagagcatgggatgc

SEQ ID NO: 2381410 - DNA, 25 bp, Homo sapien
tcagggattcccctttccagggaga

SEQ ID NO: 2381411 - DNA, 25 bp, Homo sapien
aatgtaatacaccaagctcacggac

SEQ ID NO: 2381412 - DNA, 25 bp, Homo sapien
tgagctaactggctacccgaaagaa

SEQ ID NO: 2381413 - DNA, 25 bp, Homo sapien
tggttcaaaaagaccccttcagaga

SEQ ID NO: 2381414 - DNA, 25 bp, Homo sapien
tattcaagttcagttaggtggcaca

SEQ ID NO: 2381415 - DNA, 25 bp, Homo sapien
tgtctcttgcttaagacacagcatc

SEQ ID NO: 2381416 - DNA, 25 bp, Homo sapien
ctgtctcttgcttaagacacagcat

SEQ ID NO: 2381417 - DNA, 25 bp, Homo sapien
tcagacactttttggcagagcacaa

SEQ ID NO: 2381418 - DNA, 25 bp, Homo sapien
catagcaggctcttaggtcagaaca

SEQ ID NO: 2381419 - DNA, 25 bp, Homo sapien
tgtgacaactccacagactcagagg

SEQ ID NO: 2381420 - DNA, 25 bp, Homo sapien
gatctctccaaagggtgctaatgaa

SEQ ID NO: 2381421 - DNA, 25 bp, Homo sapien
gtggagatttccagagagagaccca

SEQ ID NO: 2381422 - DNA, 25 bp, Homo sapien
cagtctgcaggatctacacctttct

SEQ ID NO: 2381423 - DNA, 25 bp, Homo sapien
gcttgatgtgaaagcatggcctcca

SEQ ID NO: 2381424 - DNA, 25 bp, Homo sapien
tcaggctgagcaagtcaccgaggaa

SEQ ID NO: 2381425 - DNA, 25 bp, Homo sapien
cacaaaaatggaatcacagttgttg

SEQ ID NO: 2381426 - DNA, 25 bp, Homo sapien
aaatggaatcacagttgttggaaac

SEQ ID NO: 2381427 - DNA, 25 bp, Homo sapien
attcacaaaaatggaatcacagttg

SEQ ID NO: 2381428 - DNA, 25 bp, Homo sapien
caaaaatggaatcacagttgttgga

SEQ ID NO: 2381429 - DNA, 25 bp, Homo sapien
tctgttggcagcaaccgggatcctc

SEQ ID NO: 2381430 - DNA, 25 bp, Homo sapien
ccagacagtgacctcgaactgggag

SEQ ID NO: 2381431 - DNA, 25 bp, Homo sapien
gggtgaagttcacaatcgtgtccac

SEQ ID NO: 2381432 - DNA, 25 bp, Homo sapien
gatctggctcagctcggtgtctgag

SEQ ID NO: 2381433 - DNA, 25 bp, Homo sapien
tcatgaactcggtcacaaggtcagt

SEQ ID NO: 2381434 - DNA, 25 bp, Homo sapien
tgtaggtcagctgccctaagtcagg

SEQ ID NO: 2381435 - DNA, 25 bp, Homo sapien
aggtgactcggccacaaactgggtg

SEQ ID NO: 2381436 - DNA, 25 bp, Homo sapien
ggtcctgccgtcctgtaactgagcg

SEQ ID NO: 2381437 - DNA, 25 bp, Homo sapien
gcacaacagcatctacctggccact

SEQ ID NO: 2381438 - DNA, 25 bp, Homo sapien
ctgctgttgggcaaggcatggcggc

SEQ ID NO: 2381439 - DNA, 25 bp, Homo sapien
tctgcacaacagcatctacctggcc

SEQ ID NO: 2381440 - DNA, 25 bp, Homo sapien
gccactcatcaacacagactgctgt

SEQ ID NO: 2381441 - DNA, 25 bp, Homo sapien
agctacgagctgcactcccagctcc

SEQ ID NO: 2381442 - DNA, 25 bp, Homo sapien
ggatggagtcagacaacggcgagag

SEQ ID NO: 2381443 - DNA, 25 bp, Homo sapien
ggagagagacatgccagctacgagc

SEQ ID NO: 2381444 - DNA, 25 bp, Homo sapien
tggagtcagacaacggcgagaggac

SEQ ID NO: 2381445 - DNA, 25 bp, Homo sapien
gaaaccaaagcattatgttataatc

SEQ ID NO: 2381446 - DNA, 25 bp, Homo sapien
aaagcattatgttataatcagattc

SEQ ID NO: 2381447 - DNA, 25 bp, Homo sapien
atgaaaccaaagcattatgttataa

SEQ ID NO: 2381448 - DNA, 25 bp, Homo sapien
accaaagcattatgttataatcaga

SEQ ID NO: 2381449 - DNA, 25 bp, Homo sapien
aaaggtgtcaccgaaccatcactga

SEQ ID NO: 2381450 - DNA, 25 bp, Homo sapien
catccaatgatgagacagtaacaga

SEQ ID NO: 2381451 - DNA, 25 bp, Homo sapien
cagtaacagaataatccttaggatc

SEQ ID NO: 2381452 - DNA, 25 bp, Homo sapien
ggcaagaacactcttcctcttggtc

SEQ ID NO: 2381453 - DNA, 25 bp, Homo sapien
tgtgccacggtggaaccattcctgg

SEQ ID NO: 2381454 - DNA, 25 bp, Homo sapien
tctggaccaccacttttgagtaact

SEQ ID NO: 2381455 - DNA, 25 bp, Homo sapien
tactgaggtggtctttatattcccg

SEQ ID NO: 2381456 - DNA, 25 bp, Homo sapien
ggtgctcatcactacttggttcgaa

SEQ ID NO: 2381457 - DNA, 25 bp, Homo sapien
cagaagacgcagagcaaggcataca

SEQ ID NO: 2381458 - DNA, 25 bp, Homo sapien
aatggccagacagaagacgcagagc

SEQ ID NO: 2381459 - DNA, 25 bp, Homo sapien
agaatggccagacagaagacgcaga

SEQ ID NO: 2381460 - DNA, 25 bp, Homo sapien
gccagacagaagacgcagagcaagg

SEQ ID NO: 2381461 - DNA, 25 bp, Homo sapien
tcagagggtctgagtagttgactat

SEQ ID NO: 2381462 - DNA, 25 bp, Homo sapien
ttggcagacccacttgatgttatca

SEQ ID NO: 2381463 - DNA, 25 bp, Homo sapien
tctctaaagtcctgtgaatccccca

SEQ ID NO: 2381464 - DNA, 25 bp, Homo sapien
gtcttgcagactttccatatagtct

SEQ ID NO: 2381465 - DNA, 25 bp, Homo sapien
tatacaactaactgaacgctgggct

SEQ ID NO: 2381466 - DNA, 25 bp, Homo sapien
tgagcagcgctcatgacaaatcagg

SEQ ID NO: 2381467 - DNA, 25 bp, Homo sapien
gaaaaacctgacatcctgcatggag

SEQ ID NO: 2381468 - DNA, 25 bp, Homo sapien
gcaaaggcggctacacaggagctgt

SEQ ID NO: 2381469 - DNA, 25 bp, Homo sapien
caggtgtgcccgatggaaacggtca

SEQ ID NO: 2381470 - DNA, 25 bp, Homo sapien
tcaacatggtttgaccctggacggg

SEQ ID NO: 2381471 - DNA, 25 bp, Homo sapien
taacgtggcagactatttcagctcc

SEQ ID NO: 2381472 - DNA, 25 bp, Homo sapien
taatgaaatgagaaggctgagtgcc

SEQ ID NO: 2381473 - DNA, 25 bp, Homo sapien
catcgttgtttaaaggaagtgtcaa

SEQ ID NO: 2381474 - DNA, 25 bp, Homo sapien
tagattaactgtgcgccaaggtggc

SEQ ID NO: 2381475 - DNA, 25 bp, Homo sapien
tcagaggtcttggagatgctgcctt

SEQ ID NO: 2381476 - DNA, 25 bp, Homo sapien
gaagtgtcaaggcatcgaagaaatg

SEQ ID NO: 2381477 - DNA, 25 bp, Homo sapien
tatccgtcactgtaaaagtgttagc

SEQ ID NO: 2381478 - DNA, 25 bp, Homo sapien
acacattttagacccagagatacaa

SEQ ID NO: 2381479 - DNA, 25 bp, Homo sapien
caagggtcagctggatacaatgcag

SEQ ID NO: 2381480 - DNA, 25 bp, Homo sapien
ttatggcagaaataagtccagctcc

SEQ ID NO: 2381481 - DNA, 25 bp, Homo sapien
ctgaccatgacgcagccttccctga

SEQ ID NO: 2381482 - DNA, 25 bp, Homo sapien
cctgaccatgacgcagccttccctg

SEQ ID NO: 2381483 - DNA, 25 bp, Homo sapien
cttccctgaccatgacgcagccttc

SEQ ID NO: 2381484 - DNA, 25 bp, Homo sapien
ctgaccatgacgcagccttccctga

SEQ ID NO: 2381485 - DNA, 25 bp, Homo sapien
tgcccatgacgcagccttccctgac

SEQ ID NO: 2381486 - DNA, 25 bp, Homo sapien
cctgaccatgacgcagccttccctg

SEQ ID NO: 2381487 - DNA, 25 bp, Homo sapien
cttccctgaccatgacgcagccttc

SEQ ID NO: 2381488 - DNA, 25 bp, Homo sapien
acacagatgtcctgggggaactggc

SEQ ID NO: 2381489 - DNA, 25 bp, Homo sapien
gcaagacacagatgtcctgggggaa

SEQ ID NO: 2381490 - DNA, 25 bp, Homo sapien
aagacacagatgtcctgggggaact

SEQ ID NO: 2381491 - DNA, 25 bp, Homo sapien
ctgcaagacacagatgtcctggggg

SEQ ID NO: 2381492 - DNA, 25 bp, Homo sapien
gaattgaaggtctttgtaactgttc

SEQ ID NO: 2381493 - DNA, 25 bp, Homo sapien
cttgaaacttcatatcatactctcc

SEQ ID NO: 2381494 - DNA, 25 bp, Homo sapien
ttgaaacttcatatcatactctcct

SEQ ID NO: 2381495 - DNA, 25 bp, Homo sapien
tcctcttcctttactaggtctacca

SEQ ID NO: 2381496 - DNA, 25 bp, Homo sapien
catcctcttcctttactaggtctac

SEQ ID NO: 2381497 - DNA, 25 bp, Homo sapien
ttagttgcaagcttgcaattcatcc

SEQ ID NO: 2381498 - DNA, 25 bp, Homo sapien
ccatagcccttttgcatgtcaggca

SEQ ID NO: 2381499 - DNA, 25 bp, Homo sapien
gtccatagcccttttgcatgtcagg

SEQ ID NO: 2381500 - DNA, 25 bp, Homo sapien
atagcccttttgcatgtcaggcatc

SEQ ID NO: 2381501 - DNA, 25 bp, Homo sapien
ttgtccatagcccttttgcatgtca

SEQ ID NO: 2381502 - DNA, 25 bp, Homo sapien
tggataggggattggaacagcctct

SEQ ID NO: 2381503 - DNA, 25 bp, Homo sapien
gataggggattggaacagcctcttc

SEQ ID NO: 2381504 - DNA, 25 bp, Homo sapien
ctgtggataggggattggaacagcc

SEQ ID NO: 2381505 - DNA, 25 bp, Homo sapien
aggggattggaacagcctcttcttc

SEQ ID NO: 2381506 - DNA, 25 bp, Homo sapien
gccgccgccagtcattagggttcaa

SEQ ID NO: 2381507 - DNA, 25 bp, Homo sapien
gttccttttgccgccgccagtcatt

SEQ ID NO: 2381508 - DNA, 25 bp, Homo sapien
cagtcattagggttcaacatttgtc

SEQ ID NO: 2381509 - DNA, 25 bp, Homo sapien
tagggttcaacatttgtccttcaaa

SEQ ID NO: 2381510 - DNA, 25 bp, Homo sapien
ttttctctggccatacacagttgtg

SEQ ID NO: 2381511 - DNA, 25 bp, Homo sapien
gactgtagactcataatcagcaggt

SEQ ID NO: 2381512 - DNA, 25 bp, Homo sapien
tcatcaatactcgataatgggcagg

SEQ ID NO: 2381513 - DNA, 25 bp, Homo sapien
gattactaagggctcctcaaggaga

SEQ ID NO: 2381514 - DNA, 25 bp, Homo sapien
tccccgaacagaatgagctcacaac

SEQ ID NO: 2381515 - DNA, 25 bp, Homo sapien
aagaaattgacatgtgatccccgaa

SEQ ID NO: 2381516 - DNA, 25 bp, Homo sapien
ccagtcttataagagatgctgagac

SEQ ID NO: 2381517 - DNA, 25 bp, Homo sapien
tcaaagatgaccgtatgtcagagcc

SEQ ID NO: 2381518 - DNA, 25 bp, Homo sapien
tttcggcctggcatcaagtgctgct

SEQ ID NO: 2381519 - DNA, 25 bp, Homo sapien
cagtgtccctgagtgaccctaatga

SEQ ID NO: 2381520 - DNA, 25 bp, Homo sapien
gctgcaatagatcggcagggcacag

SEQ ID NO: 2381521 - DNA, 25 bp, Homo sapien
aaatgagcatttcggcctggcatca

SEQ ID NO: 2381522 - DNA, 25 bp, Homo sapien
cctgacaccattgtgtatcctccag

SEQ ID NO: 2381523 - DNA, 25 bp, Homo sapien
tcctgacaccattgtgtatcctcca

SEQ ID NO: 2381524 - DNA, 25 bp, Homo sapien
caggcatcccggcaagaaacgggct

SEQ ID NO: 2381525 - DNA, 25 bp, Homo sapien
caagaaacgggcttcggagacggcg

SEQ ID NO: 2381526 - DNA, 25 bp, Homo sapien
catcccggcaagaaacgggcttcgg

SEQ ID NO: 2381527 - DNA, 25 bp, Homo sapien
ttcctccaggcatcccggcaagaaa

SEQ ID NO: 2381528 - DNA, 25 bp, Homo sapien
tgtgaaatgcgagcacaagcagcat

SEQ ID NO: 2381529 - DNA, 25 bp, Homo sapien
aatgcgagcacaagcagcatctcac

SEQ ID NO: 2381530 - DNA, 25 bp, Homo sapien
gaaatgcgagcacaagcagcatctc

SEQ ID NO: 2381531 - DNA, 25 bp, Homo sapien
tgaaatgcgagcacaagcagcatct

SEQ ID NO: 2381532 - DNA, 25 bp, Homo sapien
tcagtcatcattggtaacagtctca

SEQ ID NO: 2381533 - DNA, 25 bp, Homo sapien
cagtcatcattggtaacagtctcac

SEQ ID NO: 2381534 - DNA, 25 bp, Homo sapien
agttcagagttggtgcctctaactg

SEQ ID NO: 2381535 - DNA, 25 bp, Homo sapien
tcagagttggtgcctctaactgctt

SEQ ID NO: 2381536 - DNA, 25 bp, Homo sapien
gttcagagttggtgcctctaactgc

SEQ ID NO: 2381537 - DNA, 25 bp, Homo sapien
aaagttcagagttggtgcctctaac

SEQ ID NO: 2381538 - DNA, 25 bp, Homo sapien
agaaatgacgtttttgaaggaggag

SEQ ID NO: 2381539 - DNA, 25 bp, Homo sapien
gcattaagaaatgacgtttttgaag

SEQ ID NO: 2381540 - DNA, 25 bp, Homo sapien
agagagggacgtagggcacgtgcat

SEQ ID NO: 2381541 - DNA, 25 bp, Homo sapien
agagagagggacgtagggcacgtgc

SEQ ID NO: 2381542 - DNA, 25 bp, Homo sapien
gcaagttgcctttgcagcgtcaggg

SEQ ID NO: 2381543 - DNA, 25 bp, Homo sapien
tgcctttgcagcgtcagggagaaag

SEQ ID NO: 2381544 - DNA, 25 bp, Homo sapien
ctaaagtgggaaggaatctataagt

SEQ ID NO: 2381545 - DNA, 25 bp, Homo sapien
aaggaatctataagtgcaagttgcc

SEQ ID NO: 2381546 - DNA, 25 bp, Homo sapien
gatctgcccactctttatgccttta

SEQ ID NO: 2381547 - DNA, 25 bp, Homo sapien
atctgcccactctttatgcctttac

SEQ ID NO: 2381548 - DNA, 25 bp, Homo sapien
gtgaattctggccacccttccctgg

SEQ ID NO: 2381549 - DNA, 25 bp, Homo sapien
cttgggcttcccatcagtgttgcta

SEQ ID NO: 2381550 - DNA, 25 bp, Homo sapien
tatacagcctgttgatcccacaaag

SEQ ID NO: 2381551 - DNA, 25 bp, Homo sapien
aagacttcccggtgatgtgggctca

SEQ ID NO: 2381552 - DNA, 25 bp, Homo sapien
tcattggtagggtttcataaggata

SEQ ID NO: 2381553 - DNA, 25 bp, Homo sapien
cattggtagggtttcataaggataa

SEQ ID NO: 2381554 - DNA, 25 bp, Homo sapien
attcattggtagggtttcataagga

SEQ ID NO: 2381555 - DNA, 25 bp, Homo sapien
ctgatgttgaattcattggtagggt

SEQ ID NO: 2381556 - DNA, 25 bp, Homo sapien
cttttgagccacttaagcaggtgac

SEQ ID NO: 2381557 - DNA, 25 bp, Homo sapien
ggaatcgtgtattttctgccagcag

SEQ ID NO: 2381558 - DNA, 25 bp, Homo sapien
ggctgcagggctcgataccgtgcat

SEQ ID NO: 2381559 - DNA, 25 bp, Homo sapien
tgctctaacacaattggctgcaggg

SEQ ID NO: 2381560 - DNA, 25 bp, Homo sapien
ccacttataagtgcaaatttgccag

SEQ ID NO: 2381561 - DNA, 25 bp, Homo sapien
gtgcaaatttgccagcgagccccag

SEQ ID NO: 2381562 - DNA, 25 bp, Homo sapien
tctgtttagctctaaatatccactt

SEQ ID NO: 2381563 - DNA, 25 bp, Homo sapien
ttagctctaaatatccacttataag

SEQ ID NO: 2381564 - DNA, 25 bp, Homo sapien
tgcaatatcccctcggagaacccgt

SEQ ID NO: 2381565 - DNA, 25 bp, Homo sapien
ctgcaatatcccctcggagaacccg

SEQ ID NO: 2381566 - DNA, 25 bp, Homo sapien
gcaatatcccctcggagaacccgta

SEQ ID NO: 2381567 - DNA, 25 bp, Homo sapien
caaggagtcaggtctttgacttaaa

SEQ ID NO: 2381568 - DNA, 25 bp, Homo sapien
gaaaatttgtcttcaaggagtcagg

SEQ ID NO: 2381569 - DNA, 25 bp, Homo sapien
cagtacaacccacaccatggggaag

SEQ ID NO: 2381570 - DNA, 25 bp, Homo sapien
tctttgacttaaaatcagtgagaac

SEQ ID NO: 2381571 - DNA, 25 bp, Homo sapien
gggcttggtttcctgcaagatgtaa

SEQ ID NO: 2381572 - DNA, 25 bp, Homo sapien
agcagacagaagaagacgtagtttg

SEQ ID NO: 2381573 - DNA, 25 bp, Homo sapien
taagctaaattgctcagcagacaga

SEQ ID NO: 2381574 - DNA, 25 bp, Homo sapien
gcaaatcccatatttagaaccacct

SEQ ID NO: 2381575 - DNA, 25 bp, Homo sapien
taaaggactgggttttcacactgga

SEQ ID NO: 2381576 - DNA, 25 bp, Homo sapien
caccacagggactttgagcgcgttg

SEQ ID NO: 2381577 - DNA, 25 bp, Homo sapien
ttatgagatgaatgttgcctttccc

SEQ ID NO: 2381578 - DNA, 25 bp, Homo sapien
cacacttccgtaaacattaagcagt

SEQ ID NO: 2381579 - DNA, 25 bp, Homo sapien
gggcttcaatacataaattggtgga

SEQ ID NO: 2381580 - DNA, 25 bp, Homo sapien
ccagtcgtattggatgagggtccac

SEQ ID NO: 2381581 - DNA, 25 bp, Homo sapien
gacttactcaacctagactgtgccc

SEQ ID NO: 2381582 - DNA, 25 bp, Homo sapien
ctcttaacaaggataccagtcgtat

SEQ ID NO: 2381583 - DNA, 25 bp, Homo sapien
ttacaattaggaaatctctaaagtg

SEQ ID NO: 2381584 - DNA, 25 bp, Homo sapien
gtatttgctctttacacctgtactg

SEQ ID NO: 2381585 - DNA, 25 bp, Homo sapien
cattcctggtcataaagctggaaaa

SEQ ID NO: 2381586 - DNA, 25 bp, Homo sapien
cttagctaaactgcaattcatgaaa

SEQ ID NO: 2381587 - DNA, 25 bp, Homo sapien
ccactacataagagacaggacacac

SEQ ID NO: 2381588 - DNA, 25 bp, Homo sapien
gccataccactacataagagacagg

SEQ ID NO: 2381589 - DNA, 25 bp, Homo sapien
tgatatagccataccactacataag

SEQ ID NO: 2381590 - DNA, 25 bp, Homo sapien
tatagccataccactacataagaga

SEQ ID NO: 2381591 - DNA, 25 bp, Homo sapien
caaattcagggacgtgcataacatc

SEQ ID NO: 2381592 - DNA, 25 bp, Homo sapien
tccaaattcagggacgtgcataaca

SEQ ID NO: 2381593 - DNA, 25 bp, Homo sapien
gggacgtgcataacatctgtttgcc

SEQ ID NO: 2381594 - DNA, 25 bp, Homo sapien
ttcagggacgtgcataacatctgtt

SEQ ID NO: 2381595 - DNA, 25 bp, Homo sapien
tcctctttcccacattagcaaatca

SEQ ID NO: 2381596 - DNA, 25 bp, Homo sapien
tcccacattagcaaatcatttggac

SEQ ID NO: 2381597 - DNA, 25 bp, Homo sapien
ctctttcccacattagcaaatcatt

SEQ ID NO: 2381598 - DNA, 25 bp, Homo sapien
gcatatcctctttcccacattagca

SEQ ID NO: 2381599 - DNA, 25 bp, Homo sapien
gagcaggatttgcttggcctcctga

SEQ ID NO: 2381600 - DNA, 25 bp, Homo sapien
ggagcaggatttgcttggcctcctg

SEQ ID NO: 2381601 - DNA, 25 bp, Homo sapien
cacatcatccgggattgtgggtcct

SEQ ID NO: 2381602 - DNA, 25 bp, Homo sapien
tcatccgggattgtgggtcctgtag

SEQ ID NO: 2381603 - DNA, 25 bp, Homo sapien
gtgtatatgtgtcactggtattctg

SEQ ID NO: 2381604 - DNA, 25 bp, Homo sapien
tatgtgtcactggtattctgacaca

SEQ ID NO: 2381605 - DNA, 25 bp, Homo sapien
tgttggtatcttacatggatttttg

SEQ ID NO: 2381606 - DNA, 25 bp, Homo sapien
tatatgtgtcactggtattctgaca

SEQ ID NO: 2381607 - DNA, 25 bp, Homo sapien
tacttgctgatacaaggctttgtct

SEQ ID NO: 2381608 - DNA, 25 bp, Homo sapien
tgcaaaatgccctggtacttgctga

SEQ ID NO: 2381609 - DNA, 25 bp, Homo sapien
cacatctcagcaaatgttatcccca

SEQ ID NO: 2381610 - DNA, 25 bp, Homo sapien
aaatgttatccccacatttgcaaaa

SEQ ID NO: 2381611 - DNA, 25 bp, Homo sapien
cctacttatgtcgaatgaatggcag

SEQ ID NO: 2381612 - DNA, 25 bp, Homo sapien
tccttcaaatgcagccccaagtatg

SEQ ID NO: 2381613 - DNA, 25 bp, Homo sapien
ctgtgaaaacaaagggatgttgctc

SEQ ID NO: 2381614 - DNA, 25 bp, Homo sapien
cacaagcagcgcttatcagatgaag

SEQ ID NO: 2381615 - DNA, 25 bp, Homo sapien
gatgctggacatggccatatgggtt

SEQ ID NO: 2381616 - DNA, 25 bp, Homo sapien
gagcagcaggtttctgatctggatg

SEQ ID NO: 2381617 - DNA, 25 bp, Homo sapien
ctcgtgctagaggagaactgccttt

SEQ ID NO: 2381618 - DNA, 25 bp, Homo sapien
tctggatgagacttcaagaagcacc

SEQ ID NO: 2381619 - DNA, 25 bp, Homo sapien
agattcatcaatggacacagtggaa

SEQ ID NO: 2381620 - DNA, 25 bp, Homo sapien
tgatgaagattcatcaatggacaca

SEQ ID NO: 2381621 - DNA, 25 bp, Homo sapien
tgaagattcatcaatggacacagtg

SEQ ID NO: 2381622 - DNA, 25 bp, Homo sapien
ccattctcagtgatgaagattcatc

SEQ ID NO: 2381623 - DNA, 25 bp, Homo sapien
gagttaaatcttgtatcatttgcca

SEQ ID NO: 2381624 - DNA, 25 bp, Homo sapien
gactgtgtgagttaaatcttgtatc

SEQ ID NO: 2381625 - DNA, 25 bp, Homo sapien
agtgtgggcttggaagccggactgt

SEQ ID NO: 2381626 - DNA, 25 bp, Homo sapien
cttggaagccggactgtgtgagtta

SEQ ID NO: 2381627 - DNA, 25 bp, Homo sapien
agggcaggtctttaatctgggtgat

SEQ ID NO: 2381628 - DNA, 25 bp, Homo sapien
aattttcctgctagccacactactg

SEQ ID NO: 2381629 - DNA, 25 bp, Homo sapien
ggagcaatggattcaccaaacccct

SEQ ID NO: 2381630 - DNA, 25 bp, Homo sapien
caggtctttaatctgggtgatggca

SEQ ID NO: 2381631 - DNA, 25 bp, Homo sapien
agcctgccagctggatggagcctct

SEQ ID NO: 2381632 - DNA, 25 bp, Homo sapien
ggaatcatggtggagcttggtgtct

SEQ ID NO: 2381633 - DNA, 25 bp, Homo sapien
gagcttggtgtctgcagcccacagt

SEQ ID NO: 2381634 - DNA, 25 bp, Homo sapien
tgcttgcccactcaatccctgactg

SEQ ID NO: 2381635 - DNA, 25 bp, Homo sapien
acaaagtggaatgagctgctactgg

SEQ ID NO: 2381636 - DNA, 25 bp, Homo sapien
agctgctactgggacatggaccact

SEQ ID NO: 2381637 - DNA, 25 bp, Homo sapien
cacagatagtcttctctatgcactg

SEQ ID NO: 2381638 - DNA, 25 bp, Homo sapien
actgaagccacccttcaaggcaaca

SEQ ID NO: 2381639 - DNA, 25 bp, Homo sapien
gaagaataaattccagtttgcctag

SEQ ID NO: 2381640 - DNA, 25 bp, Homo sapien
catctttagctaattgaatcccact

SEQ ID NO: 2381641 - DNA, 25 bp, Homo sapien
cagtttgcctaggatagtaattcca

SEQ ID NO: 2381642 - DNA, 25 bp, Homo sapien
ccactgaggagataacttcaacaat

SEQ ID NO: 2381643 - DNA, 25 bp, Homo sapien
ggaagtctgactccaatcagaactg

SEQ ID NO: 2381644 - DNA, 25 bp, Homo sapien
caagggctaaagcaactgagcagga

SEQ ID NO: 2381645 - DNA, 25 bp, Homo sapien
aatccaaggtgttgggctgtaaggt

SEQ ID NO: 2381646 - DNA, 25 bp, Homo sapien
actgggcaacgtgggactggaatcc

SEQ ID NO: 2381647 - DNA, 25 bp, Homo sapien
tcaattgattgagcgttgaggcagg

SEQ ID NO: 2381648 - DNA, 25 bp, Homo sapien
acagtcatcagcctagggacagtac

SEQ ID NO: 2381649 - DNA, 25 bp, Homo sapien
ttccaagcctgctctctagttggtg

SEQ ID NO: 2381650 - DNA, 25 bp, Homo sapien
caagcctgctctctagttggtgaca

SEQ ID NO: 2381651 - DNA, 25 bp, Homo sapien
aatgtgacagtcatcagcctaggga

SEQ ID NO: 2381652 - DNA, 25 bp, Homo sapien
agcagaaaggggcatatagaagccc

SEQ ID NO: 2381653 - DNA, 25 bp, Homo sapien
ggttgattgaaggatcccctggaag

SEQ ID NO: 2381654 - DNA, 25 bp, Homo sapien
aaaggggcatatagaagcccctcca

SEQ ID NO: 2381655 - DNA, 25 bp, Homo sapien
gatcccctggaagtgctgcctcatc

SEQ ID NO: 2381656 - DNA, 25 bp, Homo sapien
ctcagatttgcctgtatatgaaaat

SEQ ID NO: 2381657 - DNA, 25 bp, Homo sapien
cagcagtttctgtttaatgaccatt

SEQ ID NO: 2381658 - DNA, 25 bp, Homo sapien
taatgtgtattgctaagttgcttgt

SEQ ID NO: 2381659 - DNA, 25 bp, Homo sapien
ctttgctcctaatgtgtattgctaa

SEQ ID NO: 2381660 - DNA, 25 bp, Homo sapien
acagtaacagagaaagacttgcaca

SEQ ID NO: 2381661 - DNA, 25 bp, Homo sapien
acagagaaagacttgcacactcaaa

SEQ ID NO: 2381662 - DNA, 25 bp, Homo sapien
acttgcacactcaaaaacagtgccc

SEQ ID NO: 2381663 - DNA, 25 bp, Homo sapien
cttgcacactcaaaaacagtgccct

SEQ ID NO: 2381664 - DNA, 25 bp, Homo sapien
ttgccatgacactgctcaagacgtg

SEQ ID NO: 2381665 - DNA, 25 bp, Homo sapien
tgtgaaccacgatcacatctcctgc

SEQ ID NO: 2381666 - DNA, 25 bp, Homo sapien
cagagacagacattctacaagccag

SEQ ID NO: 2381667 - DNA, 25 bp, Homo sapien
caagacgtgcttcatttatttcaat

SEQ ID NO: 2381668 - DNA, 25 bp, Homo sapien
ctaggcattccgtgagaaaaggttt

SEQ ID NO: 2381669 - DNA, 25 bp, Homo sapien
ggaaacgttttgtgtcgcatgtttc

SEQ ID NO: 2381670 - DNA, 25 bp, Homo sapien
gcaaagcacagtgtgcccacaagat

SEQ ID NO: 2381671 - DNA, 25 bp, Homo sapien
ttttgtgtcgcatgtttctcttccc

SEQ ID NO: 2381672 - DNA, 25 bp, Homo sapien
tctgatctgctgagggtctctttgg

SEQ ID NO: 2381673 - DNA, 25 bp, Homo sapien
tcatcttacaatcatacatagccat

SEQ ID NO: 2381674 - DNA, 25 bp, Homo sapien
gtttgcctcatcttacaatcataca

SEQ ID NO: 2381675 - DNA, 25 bp, Homo sapien
gtgccttccaaggaagtttgcctca

SEQ ID NO: 2381676 - DNA, 25 bp, Homo sapien
aggtttcgctgtccctttctgtgcc

SEQ ID NO: 2381677 - DNA, 25 bp, Homo sapien
tttcttctcatttatcgtcttgtag

SEQ ID NO: 2381678 - DNA, 25 bp, Homo sapien
tatcgtcttgtaggaaataccccag

SEQ ID NO: 2381679 - DNA, 25 bp, Homo sapien
tcttctcatttatcgtcttgtagga

SEQ ID NO: 2381680 - DNA, 25 bp, Homo sapien
tcatttatcgtcttgtaggaaatac

SEQ ID NO: 2381681 - DNA, 25 bp, Homo sapien
tctttagccattgttttgtgctggg

SEQ ID NO: 2381682 - DNA, 25 bp, Homo sapien
gtgcctctttagccattgttttgtg

SEQ ID NO: 2381683 - DNA, 25 bp, Homo sapien
cctctttagccattgttttgtgctg

SEQ ID NO: 2381684 - DNA, 25 bp, Homo sapien
tgcctctttagccattgttttgtgc

SEQ ID NO: 2381685 - DNA, 25 bp, Homo sapien
cattgttgaagagtggttctgtgca

SEQ ID NO: 2381686 - DNA, 25 bp, Homo sapien
tgctgtaattctccactgctgagaa

SEQ ID NO: 2381687 - DNA, 25 bp, Homo sapien
gaaggtagagtgctttgtacttcat

SEQ ID NO: 2381688 - DNA, 25 bp, Homo sapien
actgtccaggaccagttgtttgtga

SEQ ID NO: 2381689 - DNA, 25 bp, Homo sapien
ttttgcctttcagcaacacactgat

SEQ ID NO: 2381690 - DNA, 25 bp, Homo sapien
tgatgtgccactctagtaagtgaag

SEQ ID NO: 2381691 - DNA, 25 bp, Homo sapien
tgaagatgcttgagctttccgtatc

SEQ ID NO: 2381692 - DNA, 25 bp, Homo sapien
cttgagctttccgtatcttatcact

SEQ ID NO: 2381693 - DNA, 25 bp, Homo sapien
caacctcacagcatatgactgtcca

SEQ ID NO: 2381694 - DNA, 25 bp, Homo sapien
agcatatgactgtccacccaccagt

SEQ ID NO: 2381695 - DNA, 25 bp, Homo sapien
gtggggccagtgaccaacctcacag

SEQ ID NO: 2381696 - DNA, 25 bp, Homo sapien
cagtgaccaacctcacagcatatga

SEQ ID NO: 2381697 - DNA, 25 bp, Homo sapien
cccagagcccgtgggaataagccat

SEQ ID NO: 2381698 - DNA, 25 bp, Homo sapien
gcccagagcccgtgggaataagcca

SEQ ID NO: 2381699 - DNA, 25 bp, Homo sapien
gggaataagccattctcatcctcac

SEQ ID NO: 2381700 - DNA, 25 bp, Homo sapien
gtgccgccatgaccccaatcactgt

SEQ ID NO: 2381701 - DNA, 25 bp, Homo sapien
tcacagactacgtgccgccatgacc

SEQ ID NO: 2381702 - DNA, 25 bp, Homo sapien
gccatgaccccaatcactgttactt

SEQ ID NO: 2381703 - DNA, 25 bp, Homo sapien
ccaatcactgttacttctgaatact

SEQ ID NO: 2381704 - DNA, 25 bp, Homo sapien
tcactgaccgtccaagggcttcatt

SEQ ID NO: 2381705 - DNA, 25 bp, Homo sapien
ctggatgattggcagctacttgtgt

SEQ ID NO: 2381706 - DNA, 25 bp, Homo sapien
ctcttctataattcagggtcgtcac

SEQ ID NO: 2381707 - DNA, 25 bp, Homo sapien
gattggcagctacttgtgtgtctct

SEQ ID NO: 2381708 - DNA, 25 bp, Homo sapien
catatgccctttgtccgtggttcac

SEQ ID NO: 2381709 - DNA, 25 bp, Homo sapien
gccatgatttgtcaccctcaccaag

SEQ ID NO: 2381710 - DNA, 25 bp, Homo sapien
tggcccgtaccatctactcaactgg

SEQ ID NO: 2381711 - DNA, 25 bp, Homo sapien
ggttcactaatcaacaccaactggc

SEQ ID NO: 2381712 - DNA, 25 bp, Homo sapien
ccgagaacatagtaatgagatgcaa

SEQ ID NO: 2381713 - DNA, 25 bp, Homo sapien
caaaggaagagatgtatacatgact

SEQ ID NO: 2381714 - DNA, 25 bp, Homo sapien
ctaaaccgagaacatagtaatgaga

SEQ ID NO: 2381715 - DNA, 25 bp, Homo sapien
ggaagagatgtatacatgactgtaa

SEQ ID NO: 2381716 - DNA, 25 bp, Homo sapien
cagaatgataattttctcccatcac

SEQ ID NO: 2381717 - DNA, 25 bp, Homo sapien
atcactagcaggaatccagtaggag

SEQ ID NO: 2381718 - DNA, 25 bp, Homo sapien
tccagtaggagtcttttgaaacaat

SEQ ID NO: 2381719 - DNA, 25 bp, Homo sapien
tgatttgaaagtccggtgtcttgta

SEQ ID NO: 2381720 - DNA, 25 bp, Homo sapien
tctgtctggaaagcagcgtctgacc

SEQ ID NO: 2381721 - DNA, 25 bp, Homo sapien
catgacagaggctatcagggtggac

SEQ ID NO: 2381722 - DNA, 25 bp, Homo sapien
tgtagcttatgtgatatcccagggc

SEQ ID NO: 2381723 - DNA, 25 bp, Homo sapien
gggcgatgatccaaactgaagggct

SEQ ID NO: 2381724 - DNA, 25 bp, Homo sapien
tatagctcctattagaggtgggaac

SEQ ID NO: 2381725 - DNA, 25 bp, Homo sapien
ggcttgctcttctggccattatgga

SEQ ID NO: 2381726 - DNA, 25 bp, Homo sapien
ttgttaagcaaacctccctgagatg

SEQ ID NO: 2381727 - DNA, 25 bp, Homo sapien
cattatggagtagcaaccttggtac

SEQ ID NO: 2381728 - DNA, 25 bp, Homo sapien
tctgctgttaacaggatcttagaca

SEQ ID NO: 2381729 - DNA, 25 bp, Homo sapien
caggatcttagacatattcttttca

SEQ ID NO: 2381730 - DNA, 25 bp, Homo sapien
tgctgttaacaggatcttagacata

SEQ ID NO: 2381731 - DNA, 25 bp, Homo sapien
gttaacaggatcttagacatattct

SEQ ID NO: 2381732 - DNA, 25 bp, Homo sapien
ggaaatacaggagaacgaatgaaga

SEQ ID NO: 2381733 - DNA, 25 bp, Homo sapien
cttttattggcgttaggaaatacag

SEQ ID NO: 2381734 - DNA, 25 bp, Homo sapien
aaatacaggagaacgaatgaagagc

SEQ ID NO: 2381735 - DNA, 25 bp, Homo sapien
gagaacgaatgaagagcatggaaaa

SEQ ID NO: 2381736 - DNA, 25 bp, Homo sapien
tggccgcgctgactcgggctctggt

SEQ ID NO: 2381737 - DNA, 25 bp, Homo sapien
gctgcgccacgttgcgtctctaagg

SEQ ID NO: 2381738 - DNA, 25 bp, Homo sapien
gcagagtcctggccgcgctgactcg

SEQ ID NO: 2381739 - DNA, 25 bp, Homo sapien
agggtcgctacctgcccctgcagag

SEQ ID NO: 2381740 - DNA, 25 bp, Homo sapien
ccgggggccacaccctcggagcgca

SEQ ID NO: 2381741 - DNA, 25 bp, Homo sapien
tctgagccccgcacagcccgggggc

SEQ ID NO: 2381742 - DNA, 25 bp, Homo sapien
ctttgtcgggcaccgcgcccagcaa

SEQ ID NO: 2381743 - DNA, 25 bp, Homo sapien
cacaccctcggagcgcacccggcat

SEQ ID NO: 2381744 - DNA, 25 bp, Homo sapien
taggaggagtcgcagatttctgcca

SEQ ID NO: 2381745 - DNA, 25 bp, Homo sapien
tcctccttggttggagggaagatgc

SEQ ID NO: 2381746 - DNA, 25 bp, Homo sapien
tttgcggttagctgcgttgtgagca

SEQ ID NO: 2381747 - DNA, 25 bp, Homo sapien
cggactgaatctggcacttaggagg

SEQ ID NO: 2381748 - DNA, 25 bp, Homo sapien
tgaataactcggagactgcctgtcc

SEQ ID NO: 2381749 - DNA, 25 bp, Homo sapien
ctcagcagttgctgtaggctctgcc

SEQ ID NO: 2381750 - DNA, 25 bp, Homo sapien
ctgttcctgaataactcggagactg

SEQ ID NO: 2381751 - DNA, 25 bp, Homo sapien
tcagcagttgctgtaggctctgcca

SEQ ID NO: 2381752 - DNA, 25 bp, Homo sapien
ccctttggctatataatgagaagcg

SEQ ID NO: 2381753 - DNA, 25 bp, Homo sapien
gatcattaaatcagaccctttggct

SEQ ID NO: 2381754 - DNA, 25 bp, Homo sapien
gatcctgaagtctcaacaccaagag

SEQ ID NO: 2381755 - DNA, 25 bp, Homo sapien
gaaattcagcagagtacaggcactg

SEQ ID NO: 2381756 - DNA, 25 bp, Homo sapien
tacaaatgctgacagttaccgactg

SEQ ID NO: 2381757 - DNA, 25 bp, Homo sapien
ggagaagccctggaattaagcaaag

SEQ ID NO: 2381758 - DNA, 25 bp, Homo sapien
ggatccaatccgctgcaagacatac

SEQ ID NO: 2381759 - DNA, 25 bp, Homo sapien
tgtgacacactctccctaaggtggc

SEQ ID NO: 2381760 - DNA, 25 bp, Homo sapien
ctgtcttctctgatcccgtcaacat

SEQ ID NO: 2381761 - DNA, 25 bp, Homo sapien
gccattgtctgtatacctgcgactg

SEQ ID NO: 2381762 - DNA, 25 bp, Homo sapien
tctgaacgttgctacttcattccct

SEQ ID NO: 2381763 - DNA, 25 bp, Homo sapien
ctaggtgacagcgcacgcaggcaag

SEQ ID NO: 2381764 - DNA, 25 bp, Homo sapien
caagggtggcaattgtctgaacgtt

SEQ ID NO: 2381765 - DNA, 25 bp, Homo sapien
tatgaaccgaaactgtgactcctga

SEQ ID NO: 2381766 - DNA, 25 bp, Homo sapien
gacccgggagactatggtaactggc

SEQ ID NO: 2381767 - DNA, 25 bp, Homo sapien
tgtagcacaattccaggacccggga

SEQ ID NO: 2381768 - DNA, 25 bp, Homo sapien
gagaatcccatttggactcctgtag

SEQ ID NO: 2381769 - DNA, 25 bp, Homo sapien
gaatgtttagttcaaggcatgctct

SEQ ID NO: 2381770 - DNA, 25 bp, Homo sapien
cactccagccaagaaagacgcatct

SEQ ID NO: 2381771 - DNA, 25 bp, Homo sapien
gcatgctctatagaatagttcctgg

SEQ ID NO: 2381772 - DNA, 25 bp, Homo sapien
tctttctatggtggaccactgtgct

SEQ ID NO: 2381773 - DNA, 25 bp, Homo sapien
cacattggtaccaaagataggatcc

SEQ ID NO: 2381774 - DNA, 25 bp, Homo sapien
tcacattggtaccaaagataggatc

SEQ ID NO: 2381775 - DNA, 25 bp, Homo sapien
cattggtaccaaagataggatccag

SEQ ID NO: 2381776 - DNA, 25 bp, Homo sapien
gggtcacattggtaccaaagatagg

SEQ ID NO: 2381777 - DNA, 25 bp, Homo sapien
gacgaaggttgatcatatgcccact

SEQ ID NO: 2381778 - DNA, 25 bp, Homo sapien
tacccaaggttagaaggctgagcac

SEQ ID NO: 2381779 - DNA, 25 bp, Homo sapien
aaaaggcacatagtagaccctcagg

SEQ ID NO: 2381780 - DNA, 25 bp, Homo sapien
gatagatgctcaaccaagagaagga

SEQ ID NO: 2381781 - DNA, 25 bp, Homo sapien
agctgcagtgcgtggtaaatgatac

SEQ ID NO: 2381782 - DNA, 25 bp, Homo sapien
caccaacacacgattcccaaataga

SEQ ID NO: 2381783 - DNA, 25 bp, Homo sapien
tgatactgaattgttgataccatca

SEQ ID NO: 2381784 - DNA, 25 bp, Homo sapien
gagagtaatgtaccttttacttctg

SEQ ID NO: 2381785 - DNA, 25 bp, Homo sapien
gacatttactagctacaaatggcag

SEQ ID NO: 2381786 - DNA, 25 bp, Homo sapien
ggcagagccacactgacatttacta

SEQ ID NO: 2381787 - DNA, 25 bp, Homo sapien
ttaacattggcagagccacactgac

SEQ ID NO: 2381788 - DNA, 25 bp, Homo sapien
tttactagctacaaatggcagcatt

SEQ ID NO: 2381789 - DNA, 25 bp, Homo sapien
cagtctaccgcagttctgtaaccag

SEQ ID NO: 2381790 - DNA, 25 bp, Homo sapien
tagatggaccagatactaggttgat

SEQ ID NO: 2381791 - DNA, 25 bp, Homo sapien
taaccagacatagttagatggacca

SEQ ID NO: 2381792 - DNA, 25 bp, Homo sapien
atactaggttgatgtccaataacac

SEQ ID NO: 2381793 - DNA, 25 bp, Homo sapien
tggctgtttttcctacgaccccagc

SEQ ID NO: 2381794 - DNA, 25 bp, Homo sapien
ctaaacggatgagcccaaacgggag

SEQ ID NO: 2381795 - DNA, 25 bp, Homo sapien
catgccaatgccgtcttcatttact

SEQ ID NO: 2381796 - DNA, 25 bp, Homo sapien
tactactggagtaagtctagtcatg

SEQ ID NO: 2381797 - DNA, 25 bp, Homo sapien
gaatggactccaggcatcgggactg

SEQ ID NO: 2381798 - DNA, 25 bp, Homo sapien
agcaagaacagcaagaatggactcc

SEQ ID NO: 2381799 - DNA, 25 bp, Homo sapien
aacaagcctgtggtgctctaacatc

SEQ ID NO: 2381800 - DNA, 25 bp, Homo sapien
gatcttcagcaatgatgagccgcct

SEQ ID NO: 2381801 - DNA, 25 bp, Homo sapien
cagtatgaactctggttcttttctg

SEQ ID NO: 2381802 - DNA, 25 bp, Homo sapien
tgcattttccacagagcagtatgaa

SEQ ID NO: 2381803 - DNA, 25 bp, Homo sapien
attttccacagagcagtatgaactc

SEQ ID NO: 2381804 - DNA, 25 bp, Homo sapien
gcagtatgaactctggttcttttct

SEQ ID NO: 2381805 - DNA, 25 bp, Homo sapien
gatggagagcaccatctttagagca

SEQ ID NO: 2381806 - DNA, 25 bp, Homo sapien
catttccaggcataatcaggattcc

SEQ ID NO: 2381807 - DNA, 25 bp, Homo sapien
gaggggtgaagccagttcatacagt

SEQ ID NO: 2381808 - DNA, 25 bp, Homo sapien
gggacacatcaacagggctagtaaa

SEQ ID NO: 2381809 - DNA, 25 bp, Homo sapien
ttttgtgcccatgacttgatcctct

SEQ ID NO: 2381810 - DNA, 25 bp, Homo sapien
atctttgtagccaagtttatctcta

SEQ ID NO: 2381811 - DNA, 25 bp, Homo sapien
cccacttgcatttaggatctttgta

SEQ ID NO: 2381812 - DNA, 25 bp, Homo sapien
ttatcagtcactgtcccacatttcc

SEQ ID NO: 2381813 - DNA, 25 bp, Homo sapien
cgaggacaaccttccgtagtttatg

SEQ ID NO: 2381814 - DNA, 25 bp, Homo sapien
gacaaccttccgtagtttatgcgat

SEQ ID NO: 2381815 - DNA, 25 bp, Homo sapien
ccttccgtagtttatgcgatttgga

SEQ ID NO: 2381816 - DNA, 25 bp, Homo sapien
cgtagtttatgcgatttggaagcag

SEQ ID NO: 2381817 - DNA, 25 bp, Homo sapien
gaacttcccaggaaggtactggcca

SEQ ID NO: 2381818 - DNA, 25 bp, Homo sapien
catcctgttcaatgacactgttagg

SEQ ID NO: 2381819 - DNA, 25 bp, Homo sapien
tcaatgacactgttaggttctgagg

SEQ ID NO: 2381820 - DNA, 25 bp, Homo sapien
gaaggtactggccaggacaaatctt

SEQ ID NO: 2381821 - DNA, 25 bp, Homo sapien
caattggcagtgaaatgaggatgag

SEQ ID NO: 2381822 - DNA, 25 bp, Homo sapien
aattggcagtgaaatgaggatgagc

SEQ ID NO: 2381823 - DNA, 25 bp, Homo sapien
aatcaattggcagtgaaatgaggat

SEQ ID NO: 2381824 - DNA, 25 bp, Homo sapien
tcaattggcagtgaaatgaggatga

SEQ ID NO: 2381825 - DNA, 25 bp, Homo sapien
gtatcagacttttgtttgcacatca

SEQ ID NO: 2381826 - DNA, 25 bp, Homo sapien
cagctcgtattggaattactatgtc

SEQ ID NO: 2381827 - DNA, 25 bp, Homo sapien
gttcatcaaagtgaattggctggaa

SEQ ID NO: 2381828 - DNA, 25 bp, Homo sapien
ttttgaaccacagctcgtattggaa

SEQ ID NO: 2381829 - DNA, 25 bp, Homo sapien
tatgcagatattccataagggtctt

SEQ ID NO: 2381830 - DNA, 25 bp, Homo sapien
gatcacatagttttcgggaccttgg

SEQ ID NO: 2381831 - DNA, 25 bp, Homo sapien
aataaagtgttcgtaggctggcatc

SEQ ID NO: 2381832 - DNA, 25 bp, Homo sapien
taagggtcttgactgttccttgaaa

SEQ ID NO: 2381833 - DNA, 25 bp, Homo sapien
agtcctcagtgacctacaaagagac

SEQ ID NO: 2381834 - DNA, 25 bp, Homo sapien
cataaagcaagtcctcagtgaccta

SEQ ID NO: 2381835 - DNA, 25 bp, Homo sapien
aagtcctcagtgacctacaaagaga

SEQ ID NO: 2381836 - DNA, 25 bp, Homo sapien
aagcaagtcctcagtgacctacaaa

SEQ ID NO: 2381837 - DNA, 25 bp, Homo sapien
attgattgagtttgaggaggtggag

SEQ ID NO: 2381838 - DNA, 25 bp, Homo sapien
ggattgattgagtttgaggaggtgg

SEQ ID NO: 2381839 - DNA, 25 bp, Homo sapien
caggaggattgattgagtttgagga

SEQ ID NO: 2381840 - DNA, 25 bp, Homo sapien
ggaggattgattgagtttgaggagg

SEQ ID NO: 2381841 - DNA, 25 bp, Homo sapien
ccttctagggtcttgcaaggcaaga

SEQ ID NO: 2381842 - DNA, 25 bp, Homo sapien
tttaagtggccctaacatccctctc

SEQ ID NO: 2381843 - DNA, 25 bp, Homo sapien
caagactggacagtgcccctttgtc

SEQ ID NO: 2381844 - DNA, 25 bp, Homo sapien
cagttgcttcaatcctgaaaaacac

SEQ ID NO: 2381845 - DNA, 25 bp, Homo sapien
gggagggaacatggataatgatttc

SEQ ID NO: 2381846 - DNA, 25 bp, Homo sapien
gatttcgacaccctggtgctgttgc

SEQ ID NO: 2381847 - DNA, 25 bp, Homo sapien
acatggataatgatttcgacaccct

SEQ ID NO: 2381848 - DNA, 25 bp, Homo sapien
gacaccctggtgctgttgctaggca

SEQ ID NO: 2381849 - DNA, 25 bp, Homo sapien
ttctgtatttttcacaagaggccaa

SEQ ID NO: 2381850 - DNA, 25 bp, Homo sapien
cacagacccagtatctcctgtcttc

SEQ ID NO: 2381851 - DNA, 25 bp, Homo sapien
tatatgagagcttctaattttgtta

SEQ ID NO: 2381852 - DNA, 25 bp, Homo sapien
tttgcatatatgagagcttctaatt

SEQ ID NO: 2381853 - DNA, 25 bp, Homo sapien
gggatggtggtgcgcctggatctga

SEQ ID NO: 2381854 - DNA, 25 bp, Homo sapien
acacaggtgtgagggtagggggatg

SEQ ID NO: 2381855 - DNA, 25 bp, Homo sapien
gggggatggtggtgcgcctggatct

SEQ ID NO: 2381856 - DNA, 25 bp, Homo sapien
atggtggtgcgcctggatctgaggc

SEQ ID NO: 2381857 - DNA, 25 bp, Homo sapien
tggagcccaggccatgacacaggta

SEQ ID NO: 2381858 - DNA, 25 bp, Homo sapien
ccaggccatgacacaggtatgaggg

SEQ ID NO: 2381859 - DNA, 25 bp, Homo sapien
ggtgatgcacctggatctgaggcca

SEQ ID NO: 2381860 - DNA, 25 bp, Homo sapien
atggtgatgcacctggatctgaggc

SEQ ID NO: 2381861 - DNA, 25 bp, Homo sapien
tgaggggtagggggatggcagtgca

SEQ ID NO: 2381862 - DNA, 25 bp, Homo sapien
gaggggtagggggatggcagtgcac

SEQ ID NO: 2381863 - DNA, 25 bp, Homo sapien
cagcatttctgattgggcttctgcc

SEQ ID NO: 2381864 - DNA, 25 bp, Homo sapien
tgattgggcttctgccatgggcctg

SEQ ID NO: 2381865 - DNA, 25 bp, Homo sapien
ccttgtggattgtgtgggcaacgcc

SEQ ID NO: 2381866 - DNA, 25 bp, Homo sapien
tgggcaacgccattttactccatgg

SEQ ID NO: 2381867 - DNA, 25 bp, Homo sapien
cataggaggcatcacactggactca

SEQ ID NO: 2381868 - DNA, 25 bp, Homo sapien
gactctataggctgatggcatgctg

SEQ ID NO: 2381869 - DNA, 25 bp, Homo sapien
aaatgtagccagctcataggctgcc

SEQ ID NO: 2381870 - DNA, 25 bp, Homo sapien
taatatttgtgctccttgcgcttgc

SEQ ID NO: 2381871 - DNA, 25 bp, Homo sapien
ttcttgtcaccttggtggggcattg

SEQ ID NO: 2381872 - DNA, 25 bp, Homo sapien
ggcctgctttccgagaaagagacca

SEQ ID NO: 2381873 - DNA, 25 bp, Homo sapien
cctgctttccgagaaagagaccaaa

SEQ ID NO: 2381874 - DNA, 25 bp, Homo sapien
ttgtcaccttggtggggcattgcag

SEQ ID NO: 2381875 - DNA, 25 bp, Homo sapien
tttgcttcaacagtcgctaaaggaa

SEQ ID NO: 2381876 - DNA, 25 bp, Homo sapien
tcaaaacgcagcaaatggactgtcc

SEQ ID NO: 2381877 - DNA, 25 bp, Homo sapien
cacaactcagaggagtgcaccagta

SEQ ID NO: 2381878 - DNA, 25 bp, Homo sapien
gagaagctgcctgaaaatggtgttc

SEQ ID NO: 2381879 - DNA, 25 bp, Homo sapien
gccatgtacgtaggccagttgggcc

SEQ ID NO: 2381880 - DNA, 25 bp, Homo sapien
cctctaagcgctattgtggatgtgg

SEQ ID NO: 2381881 - DNA, 25 bp, Homo sapien
gattagacagatgtgagatggctca

SEQ ID NO: 2381882 - DNA, 25 bp, Homo sapien
cagcaaattgtctcaaaatggcccc

SEQ ID NO: 2381883 - DNA, 25 bp, Homo sapien
gaagaaccgtctgatgcgagatgga

SEQ ID NO: 2381884 - DNA, 25 bp, Homo sapien
ggcaagatgatacaacacagacgtt

SEQ ID NO: 2381885 - DNA, 25 bp, Homo sapien
gaatgggctcagcaatcccctgaat

SEQ ID NO: 2381886 - DNA, 25 bp, Homo sapien
gactctgggcatctcggctgaatta

SEQ ID NO: 2381887 - DNA, 25 bp, Homo sapien
tctccagttcgagtgcttacaagaa

SEQ ID NO: 2381888 - DNA, 25 bp, Homo sapien
gaatctgactggactggatgctctc

SEQ ID NO: 2381889 - DNA, 25 bp, Homo sapien
gctctggaatctgactggactggat

SEQ ID NO: 2381890 - DNA, 25 bp, Homo sapien
gtgggccagacatctccagttcgag

SEQ ID NO: 2381891 - DNA, 25 bp, Homo sapien
tctgacgaggtcgagttcatatcgg

SEQ ID NO: 2381892 - DNA, 25 bp, Homo sapien
gaaatcaagatgaaccttccaaggc

SEQ ID NO: 2381893 - DNA, 25 bp, Homo sapien
catatcggatttcagagacacacag

SEQ ID NO: 2381894 - DNA, 25 bp, Homo sapien
tcagtcatcacacaaaaagagtgaa

SEQ ID NO: 2381895 - DNA, 25 bp, Homo sapien
ggaaatctttgaagtttgagataat

SEQ ID NO: 2381896 - DNA, 25 bp, Homo sapien
gccaataactaacagaaagttgctg

SEQ ID NO: 2381897 - DNA, 25 bp, Homo sapien
ggtaccataggtttagctcccagtg

SEQ ID NO: 2381898 - DNA, 25 bp, Homo sapien
gttgctgtttacgtctgcctcttgc

SEQ ID NO: 2381899 - DNA, 25 bp, Homo sapien
gatggctggcttatcatccacaagg

SEQ ID NO: 2381900 - DNA, 25 bp, Homo sapien
ccacaagggtgaattcatcatattt

SEQ ID NO: 2381901 - DNA, 25 bp, Homo sapien
catattttagagtaccattccccct

SEQ ID NO: 2381902 - DNA, 25 bp, Homo sapien
ttaaaagatggctggcttatcatcc

SEQ ID NO: 2381903 - DNA, 25 bp, Homo sapien
tccccccagagactgcaagtaaact

SEQ ID NO: 2381904 - DNA, 25 bp, Homo sapien
taaacccacagtttttgatggttga

SEQ ID NO: 2381905 - DNA, 25 bp, Homo sapien
tgaattattttggaccggattacac

SEQ ID NO: 2381906 - DNA, 25 bp, Homo sapien
caagtaaactaaatgtgctaagaaa

SEQ ID NO: 2381907 - DNA, 25 bp, Homo sapien
ctgctgctcgatgacctgtgcaggc

SEQ ID NO: 2381908 - DNA, 25 bp, Homo sapien
ttggattgtgggatcttcaggacac

SEQ ID NO: 2381909 - DNA, 25 bp, Homo sapien
ctgagggttatcttgagctgtgtcc

SEQ ID NO: 2381910 - DNA, 25 bp, Homo sapien
agtgacctctccctgtcggctgctg

SEQ ID NO: 2381911 - DNA, 25 bp, Homo sapien
gagtctgcgtggtaagggatcacat

SEQ ID NO: 2381912 - DNA, 25 bp, Homo sapien
catactttttgggtgtgccttgaaa

SEQ ID NO: 2381913 - DNA, 25 bp, Homo sapien
tacggacattgaacatcttcgaagg

SEQ ID NO: 2381914 - DNA, 25 bp, Homo sapien
ttatggcggcagtcagtgtttagag

SEQ ID NO: 2381915 - DNA, 25 bp, Homo sapien
gctcattggccattttgtttggaga

SEQ ID NO: 2381916 - DNA, 25 bp, Homo sapien
ttatgctaagatacagaacccagac

SEQ ID NO: 2381917 - DNA, 25 bp, Homo sapien
ggcctgtaaatcaaacctttaagca

SEQ ID NO: 2381918 - DNA, 25 bp, Homo sapien
gatattgaacgttattctgtgctca

SEQ ID NO: 2381919 - DNA, 25 bp, Homo sapien
gacaaattctgccttcaagcagccc

SEQ ID NO: 2381920 - DNA, 25 bp, Homo sapien
tttagaatcgtgatccttagtgact

SEQ ID NO: 2381921 - DNA, 25 bp, Homo sapien
gggcgacctctattgctgagcttct

SEQ ID NO: 2381922 - DNA, 25 bp, Homo sapien
agcagccccatagtttaatgccaga

SEQ ID NO: 2381923 - DNA, 25 bp, Homo sapien
agtattttattaacacgcttggaga

SEQ ID NO: 2381924 - DNA, 25 bp, Homo sapien
tttattaacacgcttggagagggct

SEQ ID NO: 2381925 - DNA, 25 bp, Homo sapien
ccttgttgtctgtcttatgctgaca

SEQ ID NO: 2381926 - DNA, 25 bp, Homo sapien
cttgccttgttgtctgtcttatgct

SEQ ID NO: 2381927 - DNA, 25 bp, Homo sapien
ctgtagcttggttctggcaaatttg

SEQ ID NO: 2381928 - DNA, 25 bp, Homo sapien
tgtagcttggttctggcaaatttgt

SEQ ID NO: 2381929 - DNA, 25 bp, Homo sapien
gatatgtcattggagagttcccagc

SEQ ID NO: 2381930 - DNA, 25 bp, Homo sapien
catcatcacagaggcacatggactg

SEQ ID NO: 2381931 - DNA, 25 bp, Homo sapien
gcaatatgactggttactccaggcc

SEQ ID NO: 2381932 - DNA, 25 bp, Homo sapien
catgaggaaccttccagagcagttc

SEQ ID NO: 2381933 - DNA, 25 bp, Homo sapien
gctcctgctctgaaagtgagcagtt

SEQ ID NO: 2381934 - DNA, 25 bp, Homo sapien
tgctcctgctctgaaagtgagcagt

SEQ ID NO: 2381935 - DNA, 25 bp, Homo sapien
tgaagtcaaagctgggtctcttgac

SEQ ID NO: 2381936 - DNA, 25 bp, Homo sapien
ctcctgctctgaaagtgagcagttg

SEQ ID NO: 2381937 - DNA, 25 bp, Homo sapien
cagcctggatctcatttttgcttct

SEQ ID NO: 2381938 - DNA, 25 bp, Homo sapien
ctggacttctcactgtgcagatgtt

SEQ ID NO: 2381939 - DNA, 25 bp, Homo sapien
ctcactgtgcagatgttagactcac

SEQ ID NO: 2381940 - DNA, 25 bp, Homo sapien
ctcatttttgcttctcctggacttc

SEQ ID NO: 2381941 - DNA, 25 bp, Homo sapien
taacatattgttgtaggaggtcata

SEQ ID NO: 2381942 - DNA, 25 bp, Homo sapien
cattcagtccaggtaagtctttttg

SEQ ID NO: 2381943 - DNA, 25 bp, Homo sapien
tctaactatatgtctatctgtatca

SEQ ID NO: 2381944 - DNA, 25 bp, Homo sapien
cagaacctattataaagtgacagtc

SEQ ID NO: 2381945 - DNA, 25 bp, Homo sapien
ttctgtgggaggtccaggaaccctc

SEQ ID NO: 2381946 - DNA, 25 bp, Homo sapien
tctgtgggaggtccaggaaccctct

SEQ ID NO: 2381947 - DNA, 25 bp, Homo sapien
tcttgaggtctggatcatagggacc

SEQ ID NO: 2381948 - DNA, 25 bp, Homo sapien
cctgaagtcatttggttggctatct

SEQ ID NO: 2381949 - DNA, 25 bp, Homo sapien
ttcccattgttctagggagctgggt

SEQ ID NO: 2381950 - DNA, 25 bp, Homo sapien
ctatcttggctctaatcagtttcag

SEQ ID NO: 2381951 - DNA, 25 bp, Homo sapien
tgaactcgcctgatgaagtgcccaa

SEQ ID NO: 2381952 - DNA, 25 bp, Homo sapien
tcttgtggatatggatggttctcta

SEQ ID NO: 2381953 - DNA, 25 bp, Homo sapien
tgggtgaggcagcaccattttgctg

SEQ ID NO: 2381954 - DNA, 25 bp, Homo sapien
ggttctctattattgttaccagcac

SEQ ID NO: 2381955 - DNA, 25 bp, Homo sapien
aggttctgcctcttgtggatatgga

SEQ ID NO: 2381956 - DNA, 25 bp, Homo sapien
tctcgaatggagcataatcaaagtg

SEQ ID NO: 2381957 - DNA, 25 bp, Homo sapien
caaagtgaatgtccgcatgtccagt

SEQ ID NO: 2381958 - DNA, 25 bp, Homo sapien
cattctagcattctcgaatggagca

SEQ ID NO: 2381959 - DNA, 25 bp, Homo sapien
gagcataatcaaagtgaatgtccgc

SEQ ID NO: 2381960 - DNA, 25 bp, Homo sapien
gatcaagtgaggcacccattgcccc

SEQ ID NO: 2381961 - DNA, 25 bp, Homo sapien
ttgccattgctcctgcacagttaag

SEQ ID NO: 2381962 - DNA, 25 bp, Homo sapien
cgtcctaattgagctaaacactaat

SEQ ID NO: 2381963 - DNA, 25 bp, Homo sapien
aaacactaattactgggttccatgg

SEQ ID NO: 2381964 - DNA, 25 bp, Homo sapien
ctgtgagacccggggtgggtgccct

SEQ ID NO: 2381965 - DNA, 25 bp, Homo sapien
gtgcagactcctgtgagacccgggg

SEQ ID NO: 2381966 - DNA, 25 bp, Homo sapien
ttgcagctttgtggtcctccgacgg

SEQ ID NO: 2381967 - DNA, 25 bp, Homo sapien
acttgcagctttgtggtcctccgac

SEQ ID NO: 2381968 - DNA, 25 bp, Homo sapien
aaacattgctttgcatgcaccctcg

SEQ ID NO: 2381969 - DNA, 25 bp, Homo sapien
tcaaggagcatgatgaggttctcac

SEQ ID NO: 2381970 - DNA, 25 bp, Homo sapien
acagctagctggacgatgtggcctc

SEQ ID NO: 2381971 - DNA, 25 bp, Homo sapien
cagagtgtggaggacttcagcagac

SEQ ID NO: 2381972 - DNA, 25 bp, Homo sapien
gcatcagacctctttgacaaggtga

SEQ ID NO: 2381973 - DNA, 25 bp, Homo sapien
gagaacttttagtcggcatcagacc

SEQ ID NO: 2381974 - DNA, 25 bp, Homo sapien
gccacaataggcttctctctgcacg

SEQ ID NO: 2381975 - DNA, 25 bp, Homo sapien
caaactctccaccatgatgggccag

SEQ ID NO: 2381976 - DNA, 25 bp, Homo sapien
cacgtgcagaaagtcggcaccaggg

SEQ ID NO: 2381977 - DNA, 25 bp, Homo sapien
gacgtgctgaatcgggaggaggcac

SEQ ID NO: 2381978 - DNA, 25 bp, Homo sapien
tcggcaccagggacgtgctgaatcg

SEQ ID NO: 2381979 - DNA, 25 bp, Homo sapien
cagaaagtcggcaccagggacgtgc

SEQ ID NO: 2381980 - DNA, 25 bp, Homo sapien
tgttgaggtcccagacttcagaaaa

SEQ ID NO: 2381981 - DNA, 25 bp, Homo sapien
tgagagaacacgtcgaccaggatga

SEQ ID NO: 2381982 - DNA, 25 bp, Homo sapien
gagaaatcccaaagccatatgtgaa

SEQ ID NO: 2381983 - DNA, 25 bp, Homo sapien
gagtctgagagcctcgatttaacag

SEQ ID NO: 2381984 - DNA, 25 bp, Homo sapien
tgtctcaatccttacaagagccaag

SEQ ID NO: 2381985 - DNA, 25 bp, Homo sapien
gtgtagacctccttagaccttcttc

SEQ ID NO: 2381986 - DNA, 25 bp, Homo sapien
ggcatgtctcaatccttacaagagc

SEQ ID NO: 2381987 - DNA, 25 bp, Homo sapien
caagagaggtggatgctgtagagat

SEQ ID NO: 2381988 - DNA, 25 bp, Homo sapien
gcctttcgggctataacaacgtgta

SEQ ID NO: 2381989 - DNA, 25 bp, Homo sapien
tcttcttagcatgtgggttgtcctt

SEQ ID NO: 2381990 - DNA, 25 bp, Homo sapien
tccatggtctcttgggtagcaagca

SEQ ID NO: 2381991 - DNA, 25 bp, Homo sapien
gacttgggaatccacatgggcaacc

SEQ ID NO: 2381992 - DNA, 25 bp, Homo sapien
tccaagcaaggtccatcaagttctc

SEQ ID NO: 2381993 - DNA, 25 bp, Homo sapien
ccaagcaaggtccatcaagttctct

SEQ ID NO: 2381994 - DNA, 25 bp, Homo sapien
gtccaagcaaggtccatcaagttct

SEQ ID NO: 2381995 - DNA, 25 bp, Homo sapien
ttgaacatcagaatggttgcttcat

SEQ ID NO: 2381996 - DNA, 25 bp, Homo sapien
cctgttattgaacatcagaatggtt

SEQ ID NO: 2381997 - DNA, 25 bp, Homo sapien
gtccttgacccatcgccatagctga

SEQ ID NO: 2381998 - DNA, 25 bp, Homo sapien
gaacatcagaatggttgcttcattc

SEQ ID NO: 2381999 - DNA, 25 bp, Homo sapien
tagtacagatagtttggtataaact

SEQ ID NO: 2382000 - DNA, 25 bp, Homo sapien
agtacagatagtttggtataaactg

SEQ ID NO: 2382001 - DNA, 25 bp, Homo sapien
tctggaagccttgagagttctttga

SEQ ID NO: 2382002 - DNA, 25 bp, Homo sapien
taaaagatactgcaaggacactgtc

SEQ ID NO: 2382003 - DNA, 25 bp, Homo sapien
ctcttgaaatgctcctatttggagt

SEQ ID NO: 2382004 - DNA, 25 bp, Homo sapien
ttaaggctccgatgatagaatatag

SEQ ID NO: 2382005 - DNA, 25 bp, Homo sapien
catgttctgatagcccctaaaagat

SEQ ID NO: 2382006 - DNA, 25 bp, Homo sapien
gtgcgcaggtgggagagttctgacc

SEQ ID NO: 2382007 - DNA, 25 bp, Homo sapien
cagagcctgggattgtctgttgcca

SEQ ID NO: 2382008 - DNA, 25 bp, Homo sapien
tggattgcaaactgccacacttctg

SEQ ID NO: 2382009 - DNA, 25 bp, Homo sapien
ctccatctcactgtggattgcaaac

SEQ ID NO: 2382010 - DNA, 25 bp, Homo sapien
gagaaatgcagaccctgaatcttgg

SEQ ID NO: 2382011 - DNA, 25 bp, Homo sapien
aaagtgctgtcggtcactcgtgccc

SEQ ID NO: 2382012 - DNA, 25 bp, Homo sapien
cctctgctttgacagtaagaatgca

SEQ ID NO: 2382013 - DNA, 25 bp, Homo sapien
tgccttgtacctcatcaagattctc

SEQ ID NO: 2382014 - DNA, 25 bp, Homo sapien
tgaaaactctccgaacagcatgcat

SEQ ID NO: 2382015 - DNA, 25 bp, Homo sapien
actgccctccatggggtggtgaaaa

SEQ ID NO: 2382016 - DNA, 25 bp, Homo sapien
acaagaggcctgcaacactgccctc

SEQ ID NO: 2382017 - DNA, 25 bp, Homo sapien
ccatggggtggtgaaaactctccga

SEQ ID NO: 2382018 - DNA, 25 bp, Homo sapien
tgtgccagaagtgttgaagctgctt

SEQ ID NO: 2382019 - DNA, 25 bp, Homo sapien
ctggtctgacattgggaaagacgtg

SEQ ID NO: 2382020 - DNA, 25 bp, Homo sapien
cagctgtccagttaggggatggtcc

SEQ ID NO: 2382021 - DNA, 25 bp, Homo sapien
cattgggaaagacgtgctgggattc

SEQ ID NO: 2382022 - DNA, 25 bp, Homo sapien
catttgaacagcaggtgatcacaag

SEQ ID NO: 2382023 - DNA, 25 bp, Homo sapien
ttttctgccatgtagaattccggtg

SEQ ID NO: 2382024 - DNA, 25 bp, Homo sapien
cggtgatgtaacacagtatccatct

SEQ ID NO: 2382025 - DNA, 25 bp, Homo sapien
caagcctttggtgggtgtgagtccc

SEQ ID NO: 2382026 - DNA, 25 bp, Homo sapien
tcacataggagtaggaatgttcccc

SEQ ID NO: 2382027 - DNA, 25 bp, Homo sapien
gctgaatcatacatcagtagaatct

SEQ ID NO: 2382028 - DNA, 25 bp, Homo sapien
agggagagatgctgaatcatacatc

SEQ ID NO: 2382029 - DNA, 25 bp, Homo sapien
ttctatcacataggagtaggaatgt

SEQ ID NO: 2382030 - DNA, 25 bp, Homo sapien
ttctccaattttcggtgtgtctgtg

SEQ ID NO: 2382031 - DNA, 25 bp, Homo sapien
ttctggtcctttatctgctcgtgcc

SEQ ID NO: 2382032 - DNA, 25 bp, Homo sapien
ctttatctgctcgtgcctcgatgcc

SEQ ID NO: 2382033 - DNA, 25 bp, Homo sapien
tcattctccaattttcggtgtgtct

SEQ ID NO: 2382034 - DNA, 25 bp, Homo sapien
tcaggactccattctcggggaattc

SEQ ID NO: 2382035 - DNA, 25 bp, Homo sapien
ggactccattctcggggaattcctc

SEQ ID NO: 2382036 - DNA, 25 bp, Homo sapien
caggactccattctcggggaattcc

SEQ ID NO: 2382037 - DNA, 25 bp, Homo sapien
gaattcctctaagcgtttttgtctg

SEQ ID NO: 2382038 - DNA, 25 bp, Homo sapien
cagtagaggtaggtggaacttcatc

SEQ ID NO: 2382039 - DNA, 25 bp, Homo sapien
tgcagcagtttcaggttgttgtatc

SEQ ID NO: 2382040 - DNA, 25 bp, Homo sapien
ttgtatcactacagcacttgagtct

SEQ ID NO: 2382041 - DNA, 25 bp, Homo sapien
cacttgagtctatgctgtcatttgt

SEQ ID NO: 2382042 - DNA, 25 bp, Homo sapien
tatagtttcaaagtggtcacatctc

SEQ ID NO: 2382043 - DNA, 25 bp, Homo sapien
gcgtttgcttatgagaggttgcaac

SEQ ID NO: 2382044 - DNA, 25 bp, Homo sapien
gttgcaacttggaaaactcgtccat

SEQ ID NO: 2382045 - DNA, 25 bp, Homo sapien
tatgagaggttgcaacttggaaaac

SEQ ID NO: 2382046 - DNA, 25 bp, Homo sapien
aaatgcttggcaattgtataaaaca

SEQ ID NO: 2382047 - DNA, 25 bp, Homo sapien
tgtataaaacatatgatgagaagcc

SEQ ID NO: 2382048 - DNA, 25 bp, Homo sapien
aaacatatgatgagaagccaataga

SEQ ID NO: 2382049 - DNA, 25 bp, Homo sapien
tcaccctccagaacctggccgaaaa

SEQ ID NO: 2382050 - DNA, 25 bp, Homo sapien
gctggaatccatcccccgtgtcttg

SEQ ID NO: 2382051 - DNA, 25 bp, Homo sapien
cgtgtcttgtccatcgttattccca

SEQ ID NO: 2382052 - DNA, 25 bp, Homo sapien
tcttctggtgctggaatccatcccc

SEQ ID NO: 2382053 - DNA, 25 bp, Homo sapien
ttgtccatcgttattcccagaataa

SEQ ID NO: 2382054 - DNA, 25 bp, Homo sapien
tgggaaatcgggcaacaggtacagt

SEQ ID NO: 2382055 - DNA, 25 bp, Homo sapien
gatggcaaaggcagtcttgtctgca

SEQ ID NO: 2382056 - DNA, 25 bp, Homo sapien
tgcagatggaatgataacagtgttg

SEQ ID NO: 2382057 - DNA, 25 bp, Homo sapien
cattattgaattgatggcaaaggca

SEQ ID NO: 2382058 - DNA, 25 bp, Homo sapien
tcctttgcgaaattgtctgcaggtc

SEQ ID NO: 2382059 - DNA, 25 bp, Homo sapien
tgcaggtctccgcaagttctttaac

SEQ ID NO: 2382060 - DNA, 25 bp, Homo sapien
gcgaaattgtctgcaggtctccgca

SEQ ID NO: 2382061 - DNA, 25 bp, Homo sapien
gctcttaaatcctttgcgaaattgt

SEQ ID NO: 2382062 - DNA, 25 bp, Homo sapien
ccatgaatgggcattggttgcaggc

SEQ ID NO: 2382063 - DNA, 25 bp, Homo sapien
tgcaggcatatgaaagggctccaac

SEQ ID NO: 2382064 - DNA, 25 bp, Homo sapien
agtggaaaggcttaagcatgtttat

SEQ ID NO: 2382065 - DNA, 25 bp, Homo sapien
tcctgtttatccacccaataggcct

SEQ ID NO: 2382066 - DNA, 25 bp, Homo sapien
gactcccacatacagccagtcccac

SEQ ID NO: 2382067 - DNA, 25 bp, Homo sapien
ctcccacatacagccagtcccacaa

SEQ ID NO: 2382068 - DNA, 25 bp, Homo sapien
actcccacatacagccagtcccaca

SEQ ID NO: 2382069 - DNA, 25 bp, Homo sapien
cagactggctctagttgttttgctc

SEQ ID NO: 2382070 - DNA, 25 bp, Homo sapien
aatctttctgtaccatactcttagc

SEQ ID NO: 2382071 - DNA, 25 bp, Homo sapien
taccatactcttagcctcttacatt

SEQ ID NO: 2382072 - DNA, 25 bp, Homo sapien
ttacattttagcagactggctctag

SEQ ID NO: 2382073 - DNA, 25 bp, Homo sapien
ttataatctgttctgtatactttct

SEQ ID NO: 2382074 - DNA, 25 bp, Homo sapien
agccagcttctcctttataatctgt

SEQ ID NO: 2382075 - DNA, 25 bp, Homo sapien
cctttataatctgttctgtatactt

SEQ ID NO: 2382076 - DNA, 25 bp, Homo sapien
ttctcctttataatctgttctgtat

SEQ ID NO: 2382077 - DNA, 25 bp, Homo sapien
tcccatggattcctcggctcatttt

SEQ ID NO: 2382078 - DNA, 25 bp, Homo sapien
cggctcatttttctcgccagactta

SEQ ID NO: 2382079 - DNA, 25 bp, Homo sapien
taatttcttaacagctggttccact

SEQ ID NO: 2382080 - DNA, 25 bp, Homo sapien
agacttagttcatctgcagtgtgaa

SEQ ID NO: 2382081 - DNA, 25 bp, Homo sapien
ccacatagatgatatctgcacctcg

SEQ ID NO: 2382082 - DNA, 25 bp, Homo sapien
attccaacacccacatagatgatat

SEQ ID NO: 2382083 - DNA, 25 bp, Homo sapien
caacacccacatagatgatatctgc

SEQ ID NO: 2382084 - DNA, 25 bp, Homo sapien
gatgatatctgcacctcggttgtca

SEQ ID NO: 2382085 - DNA, 25 bp, Homo sapien
tcaaactgaaatgcggccaggtgcg

SEQ ID NO: 2382086 - DNA, 25 bp, Homo sapien
cacgggtgatattaagtggtgctca

SEQ ID NO: 2382087 - DNA, 25 bp, Homo sapien
gtggtgctcacagaatacatcttgg

SEQ ID NO: 2382088 - DNA, 25 bp, Homo sapien
gggtttccaaaacgcattgatccaa

SEQ ID NO: 2382089 - DNA, 25 bp, Homo sapien
ttgtcaaagtatgaagcaatgttag

SEQ ID NO: 2382090 - DNA, 25 bp, Homo sapien
agcaatgttagggtttgataaggct

SEQ ID NO: 2382091 - DNA, 25 bp, Homo sapien
caatgttagggtttgataaggctga

SEQ ID NO: 2382092 - DNA, 25 bp, Homo sapien
cctgtttgtcaaagtatgaagcaat

SEQ ID NO: 2382093 - DNA, 25 bp, Homo sapien
aaagggctccaagctcttaattcgc

SEQ ID NO: 2382094 - DNA, 25 bp, Homo sapien
atcaaggatccaccgcaacatgttg

SEQ ID NO: 2382095 - DNA, 25 bp, Homo sapien
aacatgttgtcagtgccgtcccgcc

SEQ ID NO: 2382096 - DNA, 25 bp, Homo sapien
caagctcttaattcgccaggtggct

SEQ ID NO: 2382097 - DNA, 25 bp, Homo sapien
attattttctctatttcaatatctg

SEQ ID NO: 2382098 - DNA, 25 bp, Homo sapien
tttctctatttcaatatctgatatg

SEQ ID NO: 2382099 - DNA, 25 bp, Homo sapien
ttactcaagaattattttctctatt

SEQ ID NO: 2382100 - DNA, 25 bp, Homo sapien
tctctatttcaatatctgatatgca

SEQ ID NO: 2382101 - DNA, 25 bp, Homo sapien
ctgaaacgtccccaaatgatcacct

SEQ ID NO: 2382102 - DNA, 25 bp, Homo sapien
tagagaagagaccttggaacacgct

SEQ ID NO: 2382103 - DNA, 25 bp, Homo sapien
aaacgtccccaaatgatcacctgca

SEQ ID NO: 2382104 - DNA, 25 bp, Homo sapien
acctgcatatttgtaaagatgctgc

SEQ ID NO: 2382105 - DNA, 25 bp, Homo sapien
aatcaaactccattaacagcccaat

SEQ ID NO: 2382106 - DNA, 25 bp, Homo sapien
caatttagagtaatttagcagcttc

SEQ ID NO: 2382107 - DNA, 25 bp, Homo sapien
cattaacagcccaatgtccaattta

SEQ ID NO: 2382108 - DNA, 25 bp, Homo sapien
cagcccaatgtccaatttagagtaa

SEQ ID NO: 2382109 - DNA, 25 bp, Homo sapien
gctgctgtccttaaccttctctttg

SEQ ID NO: 2382110 - DNA, 25 bp, Homo sapien
ccttaaccttctctttggatattgg

SEQ ID NO: 2382111 - DNA, 25 bp, Homo sapien
tctctttggatattggaatttcttc

SEQ ID NO: 2382112 - DNA, 25 bp, Homo sapien
tcattcatgggctttgctgctgtcc

SEQ ID NO: 2382113 - DNA, 25 bp, Homo sapien
ggtttatcatctacatttcctgtca

SEQ ID NO: 2382114 - DNA, 25 bp, Homo sapien
cctttgcatgctccattttacccat

SEQ ID NO: 2382115 - DNA, 25 bp, Homo sapien
ctgtggtttatcatctacatttcct

SEQ ID NO: 2382116 - DNA, 25 bp, Homo sapien
cattattccctttgcatgctccatt

SEQ ID NO: 2382117 - DNA, 25 bp, Homo sapien
taaccacttgcgtgacactggcctg

SEQ ID NO: 2382118 - DNA, 25 bp, Homo sapien
taatggtagcaccaacctcacaggg

SEQ ID NO: 2382119 - DNA, 25 bp, Homo sapien
gctggttaggaaactaactggcata

SEQ ID NO: 2382120 - DNA, 25 bp, Homo sapien
tgacaaaggtctgttgacaaagttc

SEQ ID NO: 2382121 - DNA, 25 bp, Homo sapien
ctggtactattccaggcctcactgg

SEQ ID NO: 2382122 - DNA, 25 bp, Homo sapien
cctggtactattccaggcctcactg

SEQ ID NO: 2382123 - DNA, 25 bp, Homo sapien
ggcctcactgggctgagttgcctgc

SEQ ID NO: 2382124 - DNA, 25 bp, Homo sapien
actgggctgagttgcctgcttcctt

SEQ ID NO: 2382125 - DNA, 25 bp, Homo sapien
cttagcttgtattcagcttcagccc

SEQ ID NO: 2382126 - DNA, 25 bp, Homo sapien
ttagcttgtattcagcttcagccct

SEQ ID NO: 2382127 - DNA, 25 bp, Homo sapien
gcttagcttgtattcagcttcagcc

SEQ ID NO: 2382128 - DNA, 25 bp, Homo sapien
ctatcataggtgtcactggcctagc

SEQ ID NO: 2382129 - DNA, 25 bp, Homo sapien
gctcctatcattgccaggtagggct

SEQ ID NO: 2382130 - DNA, 25 bp, Homo sapien
ggtgtcactggcctagctcctatca

SEQ ID NO: 2382131 - DNA, 25 bp, Homo sapien
tggcctagctcctatcattgccagg

SEQ ID NO: 2382132 - DNA, 25 bp, Homo sapien
gccttctgaactgatcatctcttcc

SEQ ID NO: 2382133 - DNA, 25 bp, Homo sapien
tgggagagaactagcatccacattg

SEQ ID NO: 2382134 - DNA, 25 bp, Homo sapien
gggagagaactagcatccacattgt

SEQ ID NO: 2382135 - DNA, 25 bp, Homo sapien
ggagagaactagcatccacattgtc

SEQ ID NO: 2382136 - DNA, 25 bp, Homo sapien
atgggagagaactagcatccacatt

SEQ ID NO: 2382137 - DNA, 25 bp, Homo sapien
ggccaagatgcacttcgctagactt

SEQ ID NO: 2382138 - DNA, 25 bp, Homo sapien
tgcaggccaagatgcacttcgctag

SEQ ID NO: 2382139 - DNA, 25 bp, Homo sapien
caagatgcacttcgctagacttgac

SEQ ID NO: 2382140 - DNA, 25 bp, Homo sapien
gatgcacttcgctagacttgactgg

SEQ ID NO: 2382141 - DNA, 25 bp, Homo sapien
cattgtcagtggataggacacaggg

SEQ ID NO: 2382142 - DNA, 25 bp, Homo sapien
acagggagtcatgcccacttcagga

SEQ ID NO: 2382143 - DNA, 25 bp, Homo sapien
tgacactcgtcaatggcaaaccgtc

SEQ ID NO: 2382144 - DNA, 25 bp, Homo sapien
ctatgagcggcttctgtgctactga

SEQ ID NO: 2382145 - DNA, 25 bp, Homo sapien
agttttcttagacttggcgtctcca

SEQ ID NO: 2382146 - DNA, 25 bp, Homo sapien
gggacaggttttatgcacagggact

SEQ ID NO: 2382147 - DNA, 25 bp, Homo sapien
aatgaccacagacactgggttgaag

SEQ ID NO: 2382148 - DNA, 25 bp, Homo sapien
taaggtctcctaatgactgtctgcg

SEQ ID NO: 2382149 - DNA, 25 bp, Homo sapien
ccctgaaaggaatcacgtggacaac

SEQ ID NO: 2382150 - DNA, 25 bp, Homo sapien
gtgtcccacatgtcgtaaactcaga

SEQ ID NO: 2382151 - DNA, 25 bp, Homo sapien
gacaacgtgtgatttggaagtccag

SEQ ID NO: 2382152 - DNA, 25 bp, Homo sapien
tagcatgctctttgacgtctgccag

SEQ ID NO: 2382153 - DNA, 25 bp, Homo sapien
agtaaagtggccctcattaatagga

SEQ ID NO: 2382154 - DNA, 25 bp, Homo sapien
ccctcattaataggatatgatgatc

SEQ ID NO: 2382155 - DNA, 25 bp, Homo sapien
gatctgtgctttgatgcaattcatg

SEQ ID NO: 2382156 - DNA, 25 bp, Homo sapien
tcatgaacaatagagatggctttac

SEQ ID NO: 2382157 - DNA, 25 bp, Homo sapien
aagtccagcagtagattgtgtaagg

SEQ ID NO: 2382158 - DNA, 25 bp, Homo sapien
tatcgtcttctatcattggccagag

SEQ ID NO: 2382159 - DNA, 25 bp, Homo sapien
cacctcattgtggataaaattcaag

SEQ ID NO: 2382160 - DNA, 25 bp, Homo sapien
tgttctctcagctgcaagtgatgga

SEQ ID NO: 2382161 - DNA, 25 bp, Homo sapien
caacatatatagactatcgcaagaa

SEQ ID NO: 2382162 - DNA, 25 bp, Homo sapien
gcatctacagtatactccatcagtt

SEQ ID NO: 2382163 - DNA, 25 bp, Homo sapien
tagtgccattatctttgttcaagtc

SEQ ID NO: 2382164 - DNA, 25 bp, Homo sapien
tgttcaagtctctatagcaacatat

SEQ ID NO: 2382165 - DNA, 25 bp, Homo sapien
ttaagcacaggagcgacctggctga

SEQ ID NO: 2382166 - DNA, 25 bp, Homo sapien
tcagtttacagaccccatcatcatt

SEQ ID NO: 2382167 - DNA, 25 bp, Homo sapien
taactggcctgtcagtttacagacc

SEQ ID NO: 2382168 - DNA, 25 bp, Homo sapien
acctggctgatgtaactgcatgacg

SEQ ID NO: 2382169 - DNA, 25 bp, Homo sapien
ggacctctctgcttgtgtgtcgtgc

SEQ ID NO: 2382170 - DNA, 25 bp, Homo sapien
tgtgtcgtgcatgttatgtctccgg

SEQ ID NO: 2382171 - DNA, 25 bp, Homo sapien
gtgcatgttatgtctccggcagaac

SEQ ID NO: 2382172 - DNA, 25 bp, Homo sapien
gcttgtgtgtcgtgcatgttatgtc

SEQ ID NO: 2382173 - DNA, 25 bp, Homo sapien
gatttgcacccagcgcgctctctct

SEQ ID NO: 2382174 - DNA, 25 bp, Homo sapien
cagggcccaaccagatgatttcagt

SEQ ID NO: 2382175 - DNA, 25 bp, Homo sapien
agcctttcccgctgatttgcaccca

SEQ ID NO: 2382176 - DNA, 25 bp, Homo sapien
ttcatggaagttgcctctaccaggg

SEQ ID NO: 2382177 - DNA, 25 bp, Homo sapien
ctaaattgcgggtcacatttgcgga

SEQ ID NO: 2382178 - DNA, 25 bp, Homo sapien
gggagctcgtgccttcggaaattaa

SEQ ID NO: 2382179 - DNA, 25 bp, Homo sapien
tgcgggtcacatttgcggatgccag

SEQ ID NO: 2382180 - DNA, 25 bp, Homo sapien
aaaatcctatccagttgattcggaa

SEQ ID NO: 2382181 - DNA, 25 bp, Homo sapien
caggtagggtctgcgctcctcttcc

SEQ ID NO: 2382182 - DNA, 25 bp, Homo sapien
gacaggtagggtctgcgctcctctt

SEQ ID NO: 2382183 - DNA, 25 bp, Homo sapien
ctgaccgttactccggacaggtagg

SEQ ID NO: 2382184 - DNA, 25 bp, Homo sapien
acctctctcctgaccgttactccgg

SEQ ID NO: 2382185 - DNA, 25 bp, Homo sapien
gtggacccgctcctctggcacggaa

SEQ ID NO: 2382186 - DNA, 25 bp, Homo sapien
gaaactccgtgtctgcagactccct

SEQ ID NO: 2382187 - DNA, 25 bp, Homo sapien
tggaactgcctgtccgcgtggaccc

SEQ ID NO: 2382188 - DNA, 25 bp, Homo sapien
cggagctggaactgcctgtccgcgt

SEQ ID NO: 2382189 - DNA, 25 bp, Homo sapien
ggaaatctctccgggactgctgctg

SEQ ID NO: 2382190 - DNA, 25 bp, Homo sapien
ctgtgcgccctcatctgcaccgtcg

SEQ ID NO: 2382191 - DNA, 25 bp, Homo sapien
tgacaacttttctgaaccgccgtct

SEQ ID NO: 2382192 - DNA, 25 bp, Homo sapien
cgtggccctttgtgccaggcgggct

SEQ ID NO: 2382193 - DNA, 25 bp, Homo sapien
ggaaggcgccaagcacccgccccag

SEQ ID NO: 2382194 - DNA, 25 bp, Homo sapien
gggaaggcgccaagcacccgcccca

SEQ ID NO: 2382195 - DNA, 25 bp, Homo sapien
tgtgccggggaaggcgccaagcacc

SEQ ID NO: 2382196 - DNA, 25 bp, Homo sapien
gccggggaaggcgccaagcacccgc

SEQ ID NO: 2382197 - DNA, 25 bp, Homo sapien
ctgcgagcttcgctgtgaacacctg

SEQ ID NO: 2382198 - DNA, 25 bp, Homo sapien
ggccccctgcgagcttcgctgtgaa

SEQ ID NO: 2382199 - DNA, 25 bp, Homo sapien
gagataatcgcacatttctgccaac

SEQ ID NO: 2382200 - DNA, 25 bp, Homo sapien
cggatctcgatctcaggtgtctgtt

SEQ ID NO: 2382201 - DNA, 25 bp, Homo sapien
cagcccctccttgcaatcctcaaac

SEQ ID NO: 2382202 - DNA, 25 bp, Homo sapien
gcccctccttgcaatcctcaaacca

SEQ ID NO: 2382203 - DNA, 25 bp, Homo sapien
agcccctccttgcaatcctcaaacc

SEQ ID NO: 2382204 - DNA, 25 bp, Homo sapien
tgtgcctaatgtacccactaaattc

SEQ ID NO: 2382205 - DNA, 25 bp, Homo sapien
agtggttaacagctgctaagctttt

SEQ ID NO: 2382206 - DNA, 25 bp, Homo sapien
gcttttcgtgtgcttcaggcgctgt

SEQ ID NO: 2382207 - DNA, 25 bp, Homo sapien
tgcttcaggcgctgtgctatgtgcc

SEQ ID NO: 2382208 - DNA, 25 bp, Homo sapien
agggacacattgagtggacagatga

SEQ ID NO: 2382209 - DNA, 25 bp, Homo sapien
cagggacacattgagtggacagatg

SEQ ID NO: 2382210 - DNA, 25 bp, Homo sapien
gggacacattgagtggacagatgaa

SEQ ID NO: 2382211 - DNA, 25 bp, Homo sapien
ttctccaattttgccggatatccgg

SEQ ID NO: 2382212 - DNA, 25 bp, Homo sapien
gccggatatccggaatccactcagt

SEQ ID NO: 2382213 - DNA, 25 bp, Homo sapien
tcagtaacaccactctgaattcctt

SEQ ID NO: 2382214 - DNA, 25 bp, Homo sapien
attagaacttctccaattttgccgg

SEQ ID NO: 2382215 - DNA, 25 bp, Homo sapien
ctttccagtgacaaaagaggttaca

SEQ ID NO: 2382216 - DNA, 25 bp, Homo sapien
tttccagtgacaaaagaggttacac

SEQ ID NO: 2382217 - DNA, 25 bp, Homo sapien
gtatctgtggttcttcctgtccagc

SEQ ID NO: 2382218 - DNA, 25 bp, Homo sapien
aaacatcctgattgtcccttaggcc

SEQ ID NO: 2382219 - DNA, 25 bp, Homo sapien
ttttcagtctctgtggtctgggtgg

SEQ ID NO: 2382220 - DNA, 25 bp, Homo sapien
ccgtatctggtatctgtggttcttc

SEQ ID NO: 2382221 - DNA, 25 bp, Homo sapien
tgctttggacttctcactaattgag

SEQ ID NO: 2382222 - DNA, 25 bp, Homo sapien
tccacagagtccatttgctttggac

SEQ ID NO: 2382223 - DNA, 25 bp, Homo sapien
catgagacaacttaaatgtgccctt

SEQ ID NO: 2382224 - DNA, 25 bp, Homo sapien
aatgtgcccttaacctttgacttca

SEQ ID NO: 2382225 - DNA, 25 bp, Homo sapien
tcataattttgtaaccaggcttgtc

SEQ ID NO: 2382226 - DNA, 25 bp, Homo sapien
gcagagatgtcagcccctggtcagg

SEQ ID NO: 2382227 - DNA, 25 bp, Homo sapien
atggctgttactggctccttgctca

SEQ ID NO: 2382228 - DNA, 25 bp, Homo sapien
gataccaccatgactttcccataga

SEQ ID NO: 2382229 - DNA, 25 bp, Homo sapien
gcttgaaggagcctcggtaagtaaa

SEQ ID NO: 2382230 - DNA, 25 bp, Homo sapien
gagcttgaaggagcctcggtaagta

SEQ ID NO: 2382231 - DNA, 25 bp, Homo sapien
aagagcttgaaggagcctcggtaag

SEQ ID NO: 2382232 - DNA, 25 bp, Homo sapien
agagcttgaaggagcctcggtaagt

SEQ ID NO: 2382233 - DNA, 25 bp, Homo sapien
gcagttcctgtagcatagacagcca

SEQ ID NO: 2382234 - DNA, 25 bp, Homo sapien
cgaaatgtagccgtgtggagtcgct

SEQ ID NO: 2382235 - DNA, 25 bp, Homo sapien
gatcaatgcctcattaaataccgaa

SEQ ID NO: 2382236 - DNA, 25 bp, Homo sapien
agacagccaacgactcaggcacaga

SEQ ID NO: 2382237 - DNA, 25 bp, Homo sapien
tgaggaagccctgaatgcaaacact

SEQ ID NO: 2382238 - DNA, 25 bp, Homo sapien
caagcgctatgggagaagcttcctc

SEQ ID NO: 2382239 - DNA, 25 bp, Homo sapien
tgatacaacccgcagacctgaaggc

SEQ ID NO: 2382240 - DNA, 25 bp, Homo sapien
taatggcccattggaaggaagccac

SEQ ID NO: 2382241 - DNA, 25 bp, Homo sapien
tatctgaaaggttctacggaaagcc

SEQ ID NO: 2382242 - DNA, 25 bp, Homo sapien
ccaggaggaacccaaggcaagatta

SEQ ID NO: 2382243 - DNA, 25 bp, Homo sapien
tatccagaagatacgcagctgaaca

SEQ ID NO: 2382244 - DNA, 25 bp, Homo sapien
gcagtgtgatccttccgtatccaga

SEQ ID NO: 2382245 - DNA, 25 bp, Homo sapien
ctctgaaagtgttgattcttccttt

SEQ ID NO: 2382246 - DNA, 25 bp, Homo sapien
tctgaaagtgttgattcttcctttt

SEQ ID NO: 2382247 - DNA, 25 bp, Homo sapien
tctctcaggcaatgtagaaagggag

SEQ ID NO: 2382248 - DNA, 25 bp, Homo sapien
cattgactagttggtactgtggctc

SEQ ID NO: 2382249 - DNA, 25 bp, Homo sapien
ggtactgtggctcaacaggctccat

SEQ ID NO: 2382250 - DNA, 25 bp, Homo sapien
gagaagtcgattcagcattgactag

SEQ ID NO: 2382251 - DNA, 25 bp, Homo sapien
tccccaacagtgaaaattcgtgtac

SEQ ID NO: 2382252 - DNA, 25 bp, Homo sapien
ttccccaacagtgaaaattcgtgta

SEQ ID NO: 2382253 - DNA, 25 bp, Homo sapien
aactgaggtctacccatcacttcca

SEQ ID NO: 2382254 - DNA, 25 bp, Homo sapien
tagtaattaacacaatgcatacaaa

SEQ ID NO: 2382255 - DNA, 25 bp, Homo sapien
ttaacacaatgcatacaaactgagg

SEQ ID NO: 2382256 - DNA, 25 bp, Homo sapien
cacaatgcatacaaactgaggtcta

SEQ ID NO: 2382257 - DNA, 25 bp, Homo sapien
tatgtagaaacttgtggagaagatg

SEQ ID NO: 2382258 - DNA, 25 bp, Homo sapien
ggctgctctgcattcgatatgtaga

SEQ ID NO: 2382259 - DNA, 25 bp, Homo sapien
ctacagactgagttccttagcagct

SEQ ID NO: 2382260 - DNA, 25 bp, Homo sapien
cagcttccgtaggaggtcctttgaa

SEQ ID NO: 2382261 - DNA, 25 bp, Homo sapien
tttctgggggatgatatcagatgaa

SEQ ID NO: 2382262 - DNA, 25 bp, Homo sapien
ggcaggtctcagttcagtgtttaca

SEQ ID NO: 2382263 - DNA, 25 bp, Homo sapien
gtgtttacacatggctccacgcaga

SEQ ID NO: 2382264 - DNA, 25 bp, Homo sapien
tgcaggattttaattctaagggaaa

SEQ ID NO: 2382265 - DNA, 25 bp, Homo sapien
tctgtgaggcaaaaggatttcgcaa

SEQ ID NO: 2382266 - DNA, 25 bp, Homo sapien
ggccatgggtggttcatcgctgaaa

SEQ ID NO: 2382267 - DNA, 25 bp, Homo sapien
tctacggatctgatggtctggttcc

SEQ ID NO: 2382268 - DNA, 25 bp, Homo sapien
tgctgcattatcatttctcctggga

SEQ ID NO: 2382269 - DNA, 25 bp, Homo sapien
gacatccagaggttttgaagtctgg

SEQ ID NO: 2382270 - DNA, 25 bp, Homo sapien
ctgacatccagaggttttgaagtct

SEQ ID NO: 2382271 - DNA, 25 bp, Homo sapien
catccagaggttttgaagtctgggc

SEQ ID NO: 2382272 - DNA, 25 bp, Homo sapien
agctgacatccagaggttttgaagt

SEQ ID NO: 2382273 - DNA, 25 bp, Homo sapien
aatggcagccgatttaggcaaaagg

SEQ ID NO: 2382274 - DNA, 25 bp, Homo sapien
gctacgaccaccagtgggtatcttg

SEQ ID NO: 2382275 - DNA, 25 bp, Homo sapien
tttttgcaacttcgctaagtcgtga

SEQ ID NO: 2382276 - DNA, 25 bp, Homo sapien
ttggaattccagtccccagtttgga

SEQ ID NO: 2382277 - DNA, 25 bp, Homo sapien
catggcacccaaccccaattagttg

SEQ ID NO: 2382278 - DNA, 25 bp, Homo sapien
ggagcatgccagagtgcccaactaa

SEQ ID NO: 2382279 - DNA, 25 bp, Homo sapien
taatggatagcataagaactgtggt

SEQ ID NO: 2382280 - DNA, 25 bp, Homo sapien
gcctcccaagtactacaggagcatg

SEQ ID NO: 2382281 - DNA, 25 bp, Homo sapien
gatatgctttcccactagccactcc

SEQ ID NO: 2382282 - DNA, 25 bp, Homo sapien
tgggcctgaggcatatctgtcctgc

SEQ ID NO: 2382283 - DNA, 25 bp, Homo sapien
cagggacactgcctggctacgctgt

SEQ ID NO: 2382284 - DNA, 25 bp, Homo sapien
cactgcctggctacgctgtaagggc

SEQ ID NO: 2382285 - DNA, 25 bp, Homo sapien
caagagagtagggatgctttgctca

SEQ ID NO: 2382286 - DNA, 25 bp, Homo sapien
cagcaagagagtagggatgctttgc

SEQ ID NO: 2382287 - DNA, 25 bp, Homo sapien
gaggcagcaagagagtagggatgct

SEQ ID NO: 2382288 - DNA, 25 bp, Homo sapien
aagagagtagggatgctttgctcac

SEQ ID NO: 2382289 - DNA, 25 bp, Homo sapien
gacacgccctaatggtaacaagatg

SEQ ID NO: 2382290 - DNA, 25 bp, Homo sapien
caagatgccggtcactatagcaggc

SEQ ID NO: 2382291 - DNA, 25 bp, Homo sapien
tttgcaacaggcttggacacgccct

SEQ ID NO: 2382292 - DNA, 25 bp, Homo sapien
gagattgagtatgccggtccctatt

SEQ ID NO: 2382293 - DNA, 25 bp, Homo sapien
ccccttgaggtcactaagattattg

SEQ ID NO: 2382294 - DNA, 25 bp, Homo sapien
ggtcactaagattattgggctccaa

SEQ ID NO: 2382295 - DNA, 25 bp, Homo sapien
gattattgggctccaatgacttctc

SEQ ID NO: 2382296 - DNA, 25 bp, Homo sapien
gctccaatgacttctcttgagtggg

SEQ ID NO: 2382297 - DNA, 25 bp, Homo sapien
caacaagtctaaatagttgactatg

SEQ ID NO: 2382298 - DNA, 25 bp, Homo sapien
gtcttctggaaactgccgttgagaa

SEQ ID NO: 2382299 - DNA, 25 bp, Homo sapien
ccagaatggccgggaagaagacgta

SEQ ID NO: 2382300 - DNA, 25 bp, Homo sapien
tcatagacatagtcaacaagtctaa

SEQ ID NO: 2382301 - DNA, 25 bp, Homo sapien
cagccccatatcttcgcagacgcac

SEQ ID NO: 2382302 - DNA, 25 bp, Homo sapien
tatatatgcaagtcccccagcccca

SEQ ID NO: 2382303 - DNA, 25 bp, Homo sapien
ccccagccccatatcttcgcagacg

SEQ ID NO: 2382304 - DNA, 25 bp, Homo sapien
ttatatatgcaagtcccccagcccc

SEQ ID NO: 2382305 - DNA, 25 bp, Homo sapien
tgacagtttcatgaagtgcccgcat

SEQ ID NO: 2382306 - DNA, 25 bp, Homo sapien
gacgctgacagtttcatgaagtgcc

SEQ ID NO: 2382307 - DNA, 25 bp, Homo sapien
gcaaagatgacgctgacagtttcat

SEQ ID NO: 2382308 - DNA, 25 bp, Homo sapien
gatgacgctgacagtttcatgaagt

SEQ ID NO: 2382309 - DNA, 25 bp, Homo sapien
agacacatccaactgagacttccct

SEQ ID NO: 2382310 - DNA, 25 bp, Homo sapien
cattaagacacatccaactgagact

SEQ ID NO: 2382311 - DNA, 25 bp, Homo sapien
agccattgatcattaagacacatcc

SEQ ID NO: 2382312 - DNA, 25 bp, Homo sapien
gatcattaagacacatccaactgag

SEQ ID NO: 2382313 - DNA, 25 bp, Homo sapien
gtaagggcaccccatgaaacacagg

SEQ ID NO: 2382314 - DNA, 25 bp, Homo sapien
tcaagtaagggcaccccatgaaaca

SEQ ID NO: 2382315 - DNA, 25 bp, Homo sapien
gtcatgtccttctccaaattttcct

SEQ ID NO: 2382316 - DNA, 25 bp, Homo sapien
gaaacacaggcccaggtcatgtcct

SEQ ID NO: 2382317 - DNA, 25 bp, Homo sapien
ctctttctctatattttcacagtat

SEQ ID NO: 2382318 - DNA, 25 bp, Homo sapien
aaacaaggtcacatgaaccattggg

SEQ ID NO: 2382319 - DNA, 25 bp, Homo sapien
gcatcgctgactctgtccttaacgg

SEQ ID NO: 2382320 - DNA, 25 bp, Homo sapien
tccttaacggcagggagagtctctt

SEQ ID NO: 2382321 - DNA, 25 bp, Homo sapien
ggcaggaatttctcagcatcgctga

SEQ ID NO: 2382322 - DNA, 25 bp, Homo sapien
cttgcacgacaggttccttgagatt

SEQ ID NO: 2382323 - DNA, 25 bp, Homo sapien
gaatccttgtcatctaaactgactt

SEQ ID NO: 2382324 - DNA, 25 bp, Homo sapien
tacactaactggttgaatatctcca

SEQ ID NO: 2382325 - DNA, 25 bp, Homo sapien
tccaatagctatgcctgttgcttgc

SEQ ID NO: 2382326 - DNA, 25 bp, Homo sapien
tttgactcagttgtggccaatgaga

SEQ ID NO: 2382327 - DNA, 25 bp, Homo sapien
acattaaccatgtacttgacactgg

SEQ ID NO: 2382328 - DNA, 25 bp, Homo sapien
tgagcctccattggagctcagatcc

SEQ ID NO: 2382329 - DNA, 25 bp, Homo sapien
gacactggtgtacaattgtaacaga

SEQ ID NO: 2382330 - DNA, 25 bp, Homo sapien
cataaataggagcattataagcttc

SEQ ID NO: 2382331 - DNA, 25 bp, Homo sapien
aattcgtgaagtggtgggaaatatc

SEQ ID NO: 2382332 - DNA, 25 bp, Homo sapien
tctgatcagagctcgtataaaattc

SEQ ID NO: 2382333 - DNA, 25 bp, Homo sapien
ggagccttgagtcaatctgatcaga

SEQ ID NO: 2382334 - DNA, 25 bp, Homo sapien
aaaccttgactattgtttgcacagt

SEQ ID NO: 2382335 - DNA, 25 bp, Homo sapien
aaaaaccttgactattgtttgcaca

SEQ ID NO: 2382336 - DNA, 25 bp, Homo sapien
accttgactattgtttgcacagtca

SEQ ID NO: 2382337 - DNA, 25 bp, Homo sapien
aaaaccttgactattgtttgcacag

SEQ ID NO: 2382338 - DNA, 25 bp, Homo sapien
tcatggcgttgggatggagaaacac

SEQ ID NO: 2382339 - DNA, 25 bp, Homo sapien
tggtccgagaagagtcagcaacttg

SEQ ID NO: 2382340 - DNA, 25 bp, Homo sapien
tacatctgcgatgctttgggatacc

SEQ ID NO: 2382341 - DNA, 25 bp, Homo sapien
gcagcagatgtagattggtccgaga

SEQ ID NO: 2382342 - DNA, 25 bp, Homo sapien
ctcatagatgggaattgaacaatga

SEQ ID NO: 2382343 - DNA, 25 bp, Homo sapien
cactcatagatgggaattgaacaat

SEQ ID NO: 2382344 - DNA, 25 bp, Homo sapien
acactgcatgttccatgttctcact

SEQ ID NO: 2382345 - DNA, 25 bp, Homo sapien
aaacactgcatgttccatgttctca

SEQ ID NO: 2382346 - DNA, 25 bp, Homo sapien
tttgctggctgactcattcccgctc

SEQ ID NO: 2382347 - DNA, 25 bp, Homo sapien
tgctggctgactcattcccgctcat

SEQ ID NO: 2382348 - DNA, 25 bp, Homo sapien
ttgctggctgactcattcccgctca

SEQ ID NO: 2382349 - DNA, 25 bp, Homo sapien
ctcttccatgaagcgtgccctgacc

SEQ ID NO: 2382350 - DNA, 25 bp, Homo sapien
tgcactgtgttgtccgtcgctgacc

SEQ ID NO: 2382351 - DNA, 25 bp, Homo sapien
gtctgcactgtgttgtccgtcgctg

SEQ ID NO: 2382352 - DNA, 25 bp, Homo sapien
actgtgttgtccgtcgctgacccat

SEQ ID NO: 2382353 - DNA, 25 bp, Homo sapien
aggattcccagcatggatctaatgt

SEQ ID NO: 2382354 - DNA, 25 bp, Homo sapien
tgaggattcccagcatggatctaat

SEQ ID NO: 2382355 - DNA, 25 bp, Homo sapien
gaggattcccagcatggatctaatg

SEQ ID NO: 2382356 - DNA, 25 bp, Homo sapien
ctgaggattcccagcatggatctaa

SEQ ID NO: 2382357 - DNA, 25 bp, Homo sapien
aaaaaacgcttgcactctcggaagc

SEQ ID NO: 2382358 - DNA, 25 bp, Homo sapien
tccgactgcagcttcggtggatctg

SEQ ID NO: 2382359 - DNA, 25 bp, Homo sapien
ttctccagagcgtcgaatccgataa

SEQ ID NO: 2382360 - DNA, 25 bp, Homo sapien
cttgttcttccgactgcagcttcgg

SEQ ID NO: 2382361 - DNA, 25 bp, Homo sapien
cagttagtctaggtcttagaggagc

SEQ ID NO: 2382362 - DNA, 25 bp, Homo sapien
tatgacccaatccagccaatgagga

SEQ ID NO: 2382363 - DNA, 25 bp, Homo sapien
gaagtttaggcatcatcactctgtc

SEQ ID NO: 2382364 - DNA, 25 bp, Homo sapien
cctctctgtagctataggtgaccat

SEQ ID NO: 2382365 - DNA, 25 bp, Homo sapien
caagcgttggctgtacggattacca

SEQ ID NO: 2382366 - DNA, 25 bp, Homo sapien
tgtacggattaccagctcctgaatt

SEQ ID NO: 2382367 - DNA, 25 bp, Homo sapien
ttcaagcgttggctgtacggattac

SEQ ID NO: 2382368 - DNA, 25 bp, Homo sapien
gttggctgtacggattaccagctcc

SEQ ID NO: 2382369 - DNA, 25 bp, Homo sapien
ttaggatgtgattcttagcaccttc

SEQ ID NO: 2382370 - DNA, 25 bp, Homo sapien
tagcatctgtgacaatgacattata

SEQ ID NO: 2382371 - DNA, 25 bp, Homo sapien
tctgtagcatctgtgacaatgacat

SEQ ID NO: 2382372 - DNA, 25 bp, Homo sapien
ctaagacagcattaggatgtgattc

SEQ ID NO: 2382373 - DNA, 25 bp, Homo sapien
gattgccaatgttgattctatttca

SEQ ID NO: 2382374 - DNA, 25 bp, Homo sapien
gtcaaagattgccaatgttgattct

SEQ ID NO: 2382375 - DNA, 25 bp, Homo sapien
ttcaagtcatcatgaccgagtactg

SEQ ID NO: 2382376 - DNA, 25 bp, Homo sapien
ttttcatgcaataattacacctcag

SEQ ID NO: 2382377 - DNA, 25 bp, Homo sapien
tgtgacccctctctaagcagaagct

SEQ ID NO: 2382378 - DNA, 25 bp, Homo sapien
taagcagaagcttcaccaggtgcat

SEQ ID NO: 2382379 - DNA, 25 bp, Homo sapien
tctctaagcagaagcttcaccaggt

SEQ ID NO: 2382380 - DNA, 25 bp, Homo sapien
caggctgagttgtgacccctctcta

SEQ ID NO: 2382381 - DNA, 25 bp, Homo sapien
gtctgattggtttcttgtctttttc

SEQ ID NO: 2382382 - DNA, 25 bp, Homo sapien
tctgattggtttcttgtctttttcc

SEQ ID NO: 2382383 - DNA, 25 bp, Homo sapien
tcttcagcaaggctaagccccgcag

SEQ ID NO: 2382384 - DNA, 25 bp, Homo sapien
atggccttcataggatctttctcca

SEQ ID NO: 2382385 - DNA, 25 bp, Homo sapien
ggatctttctccaactgaggcattt

SEQ ID NO: 2382386 - DNA, 25 bp, Homo sapien
ttcagcaaggctaagccccgcagtg

SEQ ID NO: 2382387 - DNA, 25 bp, Homo sapien
tataattggccatgaggcacagcac

SEQ ID NO: 2382388 - DNA, 25 bp, Homo sapien
tcacgtctgaacctagaggcgggcg

SEQ ID NO: 2382389 - DNA, 25 bp, Homo sapien
tgtttagaaacccatctcgtgaagg

SEQ ID NO: 2382390 - DNA, 25 bp, Homo sapien
gggtctgcttttacattcacaacat

SEQ ID NO: 2382391 - DNA, 25 bp, Homo sapien
tttcatgagggtggccagacatgga

SEQ ID NO: 2382392 - DNA, 25 bp, Homo sapien
ttgaacagaaatcaaaactggcgag

SEQ ID NO: 2382393 - DNA, 25 bp, Homo sapien
gaaatcaaaactggcgagtttcatg

SEQ ID NO: 2382394 - DNA, 25 bp, Homo sapien
caaaactggcgagtttcatgagggt

SEQ ID NO: 2382395 - DNA, 25 bp, Homo sapien
tggagaacaacgagaagagtcctgc

SEQ ID NO: 2382396 - DNA, 25 bp, Homo sapien
gatggggtgtgctcgcctcttcagt

SEQ ID NO: 2382397 - DNA, 25 bp, Homo sapien
cagctgtgccaaagaatgggttctt

SEQ ID NO: 2382398 - DNA, 25 bp, Homo sapien
gccccgttggtcatacctctagtgg

SEQ ID NO: 2382399 - DNA, 25 bp, Homo sapien
gattaaatgagatcagggtggtgtc

SEQ ID NO: 2382400 - DNA, 25 bp, Homo sapien
aggctgtggtgctgacatccccact

SEQ ID NO: 2382401 - DNA, 25 bp, Homo sapien
tatgatgggaggtacaggaacccag

SEQ ID NO: 2382402 - DNA, 25 bp, Homo sapien
tctgtgacacctgcattgcttaagg

SEQ ID NO: 2382403 - DNA, 25 bp, Homo sapien
agcctgacttgcatggcactgcatg

SEQ ID NO: 2382404 - DNA, 25 bp, Homo sapien
gcctgacttgcatggcactgcatgc

SEQ ID NO: 2382405 - DNA, 25 bp, Homo sapien
gagcctgacttgcatggcactgcat

SEQ ID NO: 2382406 - DNA, 25 bp, Homo sapien
agagcctgacttgcatggcactgca

SEQ ID NO: 2382407 - DNA, 25 bp, Homo sapien
tcccatatactgtgtctctgaaagc

SEQ ID NO: 2382408 - DNA, 25 bp, Homo sapien
cagtctgtgcatctattctctctcc

SEQ ID NO: 2382409 - DNA, 25 bp, Homo sapien
ttcaccatcagttccaactcagctt

SEQ ID NO: 2382410 - DNA, 25 bp, Homo sapien
tttcctgagcaaccctcatcattgt

SEQ ID NO: 2382411 - DNA, 25 bp, Homo sapien
taatcaatagtaaggtcattccaag

SEQ ID NO: 2382412 - DNA, 25 bp, Homo sapien
ttcagaaaatgtgcaagcatgaggg

SEQ ID NO: 2382413 - DNA, 25 bp, Homo sapien
gagacagtgagttcccatttcagaa

SEQ ID NO: 2382414 - DNA, 25 bp, Homo sapien
tgatgaggctattgatgataccggg

SEQ ID NO: 2382415 - DNA, 25 bp, Homo sapien
tcagcaacttcagtgttggacactt

SEQ ID NO: 2382416 - DNA, 25 bp, Homo sapien
cttcaggttgtgttgaattgggcac

SEQ ID NO: 2382417 - DNA, 25 bp, Homo sapien
gtgaatatgccgtctgactcagcaa

SEQ ID NO: 2382418 - DNA, 25 bp, Homo sapien
cctttcttaaggacacattgggaat

SEQ ID NO: 2382419 - DNA, 25 bp, Homo sapien
gacacacactcccatatttccgtgt

SEQ ID NO: 2382420 - DNA, 25 bp, Homo sapien
gatagaaggctgaaagcgggaccct

SEQ ID NO: 2382421 - DNA, 25 bp, Homo sapien
gaaagcgggacccttctcagcgaca

SEQ ID NO: 2382422 - DNA, 25 bp, Homo sapien
taaaggctcaggattgttgagggaa

SEQ ID NO: 2382423 - DNA, 25 bp, Homo sapien
gaatagtcattagctagctgtcccc

SEQ ID NO: 2382424 - DNA, 25 bp, Homo sapien
tggcagaattggaatagtcattagc

SEQ ID NO: 2382425 - DNA, 25 bp, Homo sapien
gaattggaatagtcattagctagct

SEQ ID NO: 2382426 - DNA, 25 bp, Homo sapien
ttttggcagaattggaatagtcatt

SEQ ID NO: 2382427 - DNA, 25 bp, Homo sapien
caggcgcagacgacgggggtcgagt

SEQ ID NO: 2382428 - DNA, 25 bp, Homo sapien
caggcggtaggggcgacctgggaga

SEQ ID NO: 2382429 - DNA, 25 bp, Homo sapien
cgacgggggtcgagttgggcaggcg

SEQ ID NO: 2382430 - DNA, 25 bp, Homo sapien
tgggcaggcggtaggggcgacctgg

SEQ ID NO: 2382431 - DNA, 25 bp, Homo sapien
gaagctcacgttctcaggaaagggt

SEQ ID NO: 2382432 - DNA, 25 bp, Homo sapien
cttcgtgccgcggtagttccggcga

SEQ ID NO: 2382433 - DNA, 25 bp, Homo sapien
tagttccggcgaagcgggtgggctc

SEQ ID NO: 2382434 - DNA, 25 bp, Homo sapien
ggcgcagacggcgaagctcacgttc

SEQ ID NO: 2382435 - DNA, 25 bp, Homo sapien
ttcgtcatcgtcctgtgctcgcctg

SEQ ID NO: 2382436 - DNA, 25 bp, Homo sapien
cgtccgcgcgtctcctggaggtgct

SEQ ID NO: 2382437 - DNA, 25 bp, Homo sapien
cactacgcctgattggcgagccgcg

SEQ ID NO: 2382438 - DNA, 25 bp, Homo sapien
gctgagtccaccgtgtcgtgctgcg

SEQ ID NO: 2382439 - DNA, 25 bp, Homo sapien
ggcttggtccaacactaactgagaa

SEQ ID NO: 2382440 - DNA, 25 bp, Homo sapien
tgaagtcagtgaatccccaggtgtc

SEQ ID NO: 2382441 - DNA, 25 bp, Homo sapien
cacgtgggcctatcctgagaggaat

SEQ ID NO: 2382442 - DNA, 25 bp, Homo sapien
gaaaagttacctgattggcctcgcc

SEQ ID NO: 2382443 - DNA, 25 bp, Homo sapien
tagagaagtttaggtccacactcac

SEQ ID NO: 2382444 - DNA, 25 bp, Homo sapien
taataacctgatgaaagatgcgtgg

SEQ ID NO: 2382445 - DNA, 25 bp, Homo sapien
tggaatttaccaaagagccctgttg

SEQ ID NO: 2382446 - DNA, 25 bp, Homo sapien
gctactgggaaaagacttggctgcc

SEQ ID NO: 2382447 - DNA, 25 bp, Homo sapien
tattttaaataggtgcgaggcagcc

SEQ ID NO: 2382448 - DNA, 25 bp, Homo sapien
ccttctttcggctttgcaatgtgag

SEQ ID NO: 2382449 - DNA, 25 bp, Homo sapien
gcaatgtgagctactgattttcatg

SEQ ID NO: 2382450 - DNA, 25 bp, Homo sapien
tctagtggacagctgaacagagaga

SEQ ID NO: 2382451 - DNA, 25 bp, Homo sapien
catattttggtgacccgggaaggag

SEQ ID NO: 2382452 - DNA, 25 bp, Homo sapien
ggtattgcccgaaggcctaagaatg

SEQ ID NO: 2382453 - DNA, 25 bp, Homo sapien
gaatgggaataattggcctgccccg

SEQ ID NO: 2382454 - DNA, 25 bp, Homo sapien
cccttggtgggcagcgtctaaacat

SEQ ID NO: 2382455 - DNA, 25 bp, Homo sapien
cgctaaaccattcgtagacgacttg

SEQ ID NO: 2382456 - DNA, 25 bp, Homo sapien
ggcgctaaaccattcgtagacgact

SEQ ID NO: 2382457 - DNA, 25 bp, Homo sapien
gcgctaaaccattcgtagacgactt

SEQ ID NO: 2382458 - DNA, 25 bp, Homo sapien
gccctctcgcccgtcacgcaacgca

SEQ ID NO: 2382459 - DNA, 25 bp, Homo sapien
gccggaaaggcggccgccctctcgc

SEQ ID NO: 2382460 - DNA, 25 bp, Homo sapien
gtgcggagtgccctttgtcctggga

SEQ ID NO: 2382461 - DNA, 25 bp, Homo sapien
cggtgcggagtgccctttgtcctgg

SEQ ID NO: 2382462 - DNA, 25 bp, Homo sapien
attatgactgaacgcctcttaagtc

SEQ ID NO: 2382463 - DNA, 25 bp, Homo sapien
gaacgcctcttaagtcagaatcccg

SEQ ID NO: 2382464 - DNA, 25 bp, Homo sapien
ccgcccaggcggaacgatacggcag

SEQ ID NO: 2382465 - DNA, 25 bp, Homo sapien
aggcggaacgatacggcagccccgc

SEQ ID NO: 2382466 - DNA, 25 bp, Homo sapien
ccagacattgattactgagctattg

SEQ ID NO: 2382467 - DNA, 25 bp, Homo sapien
tgattactgagctattgatgtttgc

SEQ ID NO: 2382468 - DNA, 25 bp, Homo sapien
gagctattgatgtttgctgagttca

SEQ ID NO: 2382469 - DNA, 25 bp, Homo sapien
tggcccaatagccagacattgatta

SEQ ID NO: 2382470 - DNA, 25 bp, Homo sapien
agcaaaaatccattaagtctctgca

SEQ ID NO: 2382471 - DNA, 25 bp, Homo sapien
aaaaatccattaagtctctgcagaa

SEQ ID NO: 2382472 - DNA, 25 bp, Homo sapien
aaaatccattaagtctctgcagaag

SEQ ID NO: 2382473 - DNA, 25 bp, Homo sapien
caaaaatccattaagtctctgcaga

SEQ ID NO: 2382474 - DNA, 25 bp, Homo sapien
cacatggagttggtagacgcagcac

SEQ ID NO: 2382475 - DNA, 25 bp, Homo sapien
tcacatggagttggtagacgcagca

SEQ ID NO: 2382476 - DNA, 25 bp, Homo sapien
tacaaagttgctccgaaatgccatt

SEQ ID NO: 2382477 - DNA, 25 bp, Homo sapien
aacggctttcagatcgtgggactcc

SEQ ID NO: 2382478 - DNA, 25 bp, Homo sapien
gggactcctggacggctctgatttt

SEQ ID NO: 2382479 - DNA, 25 bp, Homo sapien
aacaatgtgtgtccatcgggcctcc

SEQ ID NO: 2382480 - DNA, 25 bp, Homo sapien
gacaggtcccgactcacactgagaa

SEQ ID NO: 2382481 - DNA, 25 bp, Homo sapien
gccaggagctgtacacgtgtctctt

SEQ ID NO: 2382482 - DNA, 25 bp, Homo sapien
caggcacggaggacaggtcccgact

SEQ ID NO: 2382483 - DNA, 25 bp, Homo sapien
cacgtgtctcttgcaatgaggcagg

SEQ ID NO: 2382484 - DNA, 25 bp, Homo sapien
gattgctctaccgagaataattttc

SEQ ID NO: 2382485 - DNA, 25 bp, Homo sapien
ttctctatcatggaatgcttgtaca

SEQ ID NO: 2382486 - DNA, 25 bp, Homo sapien
ccgtgtccgattgctctaccgagaa

SEQ ID NO: 2382487 - DNA, 25 bp, Homo sapien
gattcttaagtgttttgccgtgtcc

SEQ ID NO: 2382488 - DNA, 25 bp, Homo sapien
gttaatattccactctctacaccaa

SEQ ID NO: 2382489 - DNA, 25 bp, Homo sapien
tgtctgttaatattccactctctac

SEQ ID NO: 2382490 - DNA, 25 bp, Homo sapien
tccactgtctgttaatattccactc

SEQ ID NO: 2382491 - DNA, 25 bp, Homo sapien
atattccactctctacaccaagctg

SEQ ID NO: 2382492 - DNA, 25 bp, Homo sapien
tcatcagacggtgttgctcttgctc

SEQ ID NO: 2382493 - DNA, 25 bp, Homo sapien
gtgtcagttccgtcatcattcaggg

SEQ ID NO: 2382494 - DNA, 25 bp, Homo sapien
cgcttttagctcatgcactgacgca

SEQ ID NO: 2382495 - DNA, 25 bp, Homo sapien
ttgaagtttgatctgcaggcatagc

SEQ ID NO: 2382496 - DNA, 25 bp, Homo sapien
caatggagaagcatctcgagccgcc

SEQ ID NO: 2382497 - DNA, 25 bp, Homo sapien
gggtccactttgcccgctacctaga

SEQ ID NO: 2382498 - DNA, 25 bp, Homo sapien
tctctaaggatagtgtaactgccca

SEQ ID NO: 2382499 - DNA, 25 bp, Homo sapien
ccaggttaccagatgccagccaatg

SEQ ID NO: 2382500 - DNA, 25 bp, Homo sapien
aattgtagtctccaacgtccagctg

SEQ ID NO: 2382501 - DNA, 25 bp, Homo sapien
gccaagctcttattcagtgtccagg

SEQ ID NO: 2382502 - DNA, 25 bp, Homo sapien
cagactccgttcagaagcaatgccg

SEQ ID NO: 2382503 - DNA, 25 bp, Homo sapien
catggaagccagttacataggaacc

SEQ ID NO: 2382504 - DNA, 25 bp, Homo sapien
gctaaatcggtatgtgctcccgagg

SEQ ID NO: 2382505 - DNA, 25 bp, Homo sapien
tgctaaatcggtatgtgctcccgag

SEQ ID NO: 2382506 - DNA, 25 bp, Homo sapien
taaatcggtatgtgctcccgagggc

SEQ ID NO: 2382507 - DNA, 25 bp, Homo sapien
agtgctaaatcggtatgtgctcccg

SEQ ID NO: 2382508 - DNA, 25 bp, Homo sapien
ctcctgagttggtgtcatgagaaca

SEQ ID NO: 2382509 - DNA, 25 bp, Homo sapien
tatgaatagaggcttggaatgcacc

SEQ ID NO: 2382510 - DNA, 25 bp, Homo sapien
tttgcaaaaacttgcgcagatgagg

SEQ ID NO: 2382511 - DNA, 25 bp, Homo sapien
cagatcactgaactatgaatagagg

SEQ ID NO: 2382512 - DNA, 25 bp, Homo sapien
ttggggctgcctcaaagcatcctgt

SEQ ID NO: 2382513 - DNA, 25 bp, Homo sapien
atcctgtactgatgcactgaggggg

SEQ ID NO: 2382514 - DNA, 25 bp, Homo sapien
gggctgcctcaaagcatcctgtact

SEQ ID NO: 2382515 - DNA, 25 bp, Homo sapien
catcctgtactgatgcactgagggg

SEQ ID NO: 2382516 - DNA, 25 bp, Homo sapien
ctagctgttgactagacacatctct

SEQ ID NO: 2382517 - DNA, 25 bp, Homo sapien
agacacatctctaggatgggtgtgg

SEQ ID NO: 2382518 - DNA, 25 bp, Homo sapien
tgatcacagcacaaataccctgagg

SEQ ID NO: 2382519 - DNA, 25 bp, Homo sapien
aagagaccgcctagccatgatcaca

SEQ ID NO: 2382520 - DNA, 25 bp, Homo sapien
gaagagaccgcctagccatgatcac

SEQ ID NO: 2382521 - DNA, 25 bp, Homo sapien
ccatgatcacagcacaaataccctg

SEQ ID NO: 2382522 - DNA, 25 bp, Homo sapien
agaggtagtgcctggctcctccctc

SEQ ID NO: 2382523 - DNA, 25 bp, Homo sapien
ggagatagcacatggctccctcatt

SEQ ID NO: 2382524 - DNA, 25 bp, Homo sapien
tccaggagatagcacatggctacct

SEQ ID NO: 2382525 - DNA, 25 bp, Homo sapien
tccaggagatagcacatggctccct

SEQ ID NO: 2382526 - DNA, 25 bp, Homo sapien
ctgatgaggagcacatagctggcac

SEQ ID NO: 2382527 - DNA, 25 bp, Homo sapien
ctggcactgatgagcacaggtctcc

SEQ ID NO: 2382528 - DNA, 25 bp, Homo sapien
cctgttggtggcagtttcttctggg

SEQ ID NO: 2382529 - DNA, 25 bp, Homo sapien
tgttcctgtaaccactgtagactga

SEQ ID NO: 2382530 - DNA, 25 bp, Homo sapien
gatgactgagtcaccatcgcagagc

SEQ ID NO: 2382531 - DNA, 25 bp, Homo sapien
cctaagttaagggattcatggtgct

SEQ ID NO: 2382532 - DNA, 25 bp, Homo sapien
tccatcctggctgagaagacggtga

SEQ ID NO: 2382533 - DNA, 25 bp, Homo sapien
gaacagagatgcatgagcctcctcg

SEQ ID NO: 2382534 - DNA, 25 bp, Homo sapien
gtgtgcaatagacaagcctcgccct

SEQ ID NO: 2382535 - DNA, 25 bp, Homo sapien
tgtgcaatagacaagcctcgccctg

SEQ ID NO: 2382536 - DNA, 25 bp, Homo sapien
tcaattttttcagagcaccgaggtc

SEQ ID NO: 2382537 - DNA, 25 bp, Homo sapien
gacttgtgagatgtcaagacctttc

SEQ ID NO: 2382538 - DNA, 25 bp, Homo sapien
tttcatgaagccaaaggctattcaa

SEQ ID NO: 2382539 - DNA, 25 bp, Homo sapien
tgtttgcttgctacctctgattttc

SEQ ID NO: 2382540 - DNA, 25 bp, Homo sapien
gaaatcacttagctgcatttgggtt

SEQ ID NO: 2382541 - DNA, 25 bp, Homo sapien
gaagaaatcacttagctgcatttgg

SEQ ID NO: 2382542 - DNA, 25 bp, Homo sapien
cttagctgcatttgggttcctgctc

SEQ ID NO: 2382543 - DNA, 25 bp, Homo sapien
tcacttagctgcatttgggttcctg

SEQ ID NO: 2382544 - DNA, 25 bp, Homo sapien
ggtagctgaattcagcccgtccttg

SEQ ID NO: 2382545 - DNA, 25 bp, Homo sapien
gaaggctggctttgtctccgatgga

SEQ ID NO: 2382546 - DNA, 25 bp, Homo sapien
gatggagacacacgtcctgaatgac

SEQ ID NO: 2382547 - DNA, 25 bp, Homo sapien
cacattaaatgaggcggtagctgaa

SEQ ID NO: 2382548 - DNA, 25 bp, Homo sapien
tgctggagtcagttatgtagactgg

SEQ ID NO: 2382549 - DNA, 25 bp, Homo sapien
gaaattgctggagtcagttatgtag

SEQ ID NO: 2382550 - DNA, 25 bp, Homo sapien
aggaaattgctggagtcagttatgt

SEQ ID NO: 2382551 - DNA, 25 bp, Homo sapien
aattgctggagtcagttatgtagac

SEQ ID NO: 2382552 - DNA, 25 bp, Homo sapien
ccagggcagtttggaatatgcaatt

SEQ ID NO: 2382553 - DNA, 25 bp, Homo sapien
cagggcagtttggaatatgcaattg

SEQ ID NO: 2382554 - DNA, 25 bp, Homo sapien
gggcagtttggaatatgcaattgct

SEQ ID NO: 2382555 - DNA, 25 bp, Homo sapien
gcagtttggaatatgcaattgctgg

SEQ ID NO: 2382556 - DNA, 25 bp, Homo sapien
actgcatcagaggttggatagttca

SEQ ID NO: 2382557 - DNA, 25 bp, Homo sapien
ggctccggggaagctctgaacattg

SEQ ID NO: 2382558 - DNA, 25 bp, Homo sapien
tcagaggttggatagttcaggtccg

SEQ ID NO: 2382559 - DNA, 25 bp, Homo sapien
agctctgaacattgagaggaacact

SEQ ID NO: 2382560 - DNA, 25 bp, Homo sapien
ccttgtggacagggctcatcagccc

SEQ ID NO: 2382561 - DNA, 25 bp, Homo sapien
ccagtggtggcccttgtggacaggg

SEQ ID NO: 2382562 - DNA, 25 bp, Homo sapien
ggctcatcagcccatagaatcccaa

SEQ ID NO: 2382563 - DNA, 25 bp, Homo sapien
gacagggctcatcagcccatagaat

SEQ ID NO: 2382564 - DNA, 25 bp, Homo sapien
tgcagaggtggtgaccgataaggag

SEQ ID NO: 2382565 - DNA, 25 bp, Homo sapien
ggtgaccgataaggaggccaggaga

SEQ ID NO: 2382566 - DNA, 25 bp, Homo sapien
tgggtggtttgcctggagccaggct

SEQ ID NO: 2382567 - DNA, 25 bp, Homo sapien
atgccacatcccaaaccgcttcctg

SEQ ID NO: 2382568 - DNA, 25 bp, Homo sapien
gagaacattagaggcatcccaggta

SEQ ID NO: 2382569 - DNA, 25 bp, Homo sapien
catttctggggttccgggcccactg

SEQ ID NO: 2382570 - DNA, 25 bp, Homo sapien
agaacattagaggtacaccaggtgg

SEQ ID NO: 2382571 - DNA, 25 bp, Homo sapien
gagtgtgttgtctgcggccacagcc

SEQ ID NO: 2382572 - DNA, 25 bp, Homo sapien
cattccggcctctatgctgcattca

SEQ ID NO: 2382573 - DNA, 25 bp, Homo sapien
ttcacttccgggtcttggccaagca

SEQ ID NO: 2382574 - DNA, 25 bp, Homo sapien
tgacgtcccctgcttgcagcaagga

SEQ ID NO: 2382575 - DNA, 25 bp, Homo sapien
tggccaagcagaacatctctctgtt

SEQ ID NO: 2382576 - DNA, 25 bp, Homo sapien
ttgactgccaatgctgactccctgc

SEQ ID NO: 2382577 - DNA, 25 bp, Homo sapien
tgctggttcataggaatcactctgg

SEQ ID NO: 2382578 - DNA, 25 bp, Homo sapien
ccaatgctgactccctgctggttca

SEQ ID NO: 2382579 - DNA, 25 bp, Homo sapien
tggccaaagatcatcctccaggctt

SEQ ID NO: 2382580 - DNA, 25 bp, Homo sapien
ctactgctaaccttgactactgcta

SEQ ID NO: 2382581 - DNA, 25 bp, Homo sapien
gactactgctaaccttgactactgc

SEQ ID NO: 2382582 - DNA, 25 bp, Homo sapien
cttgactactgctaaccttgactac

SEQ ID NO: 2382583 - DNA, 25 bp, Homo sapien
actgctaaccttgactactgctaac

SEQ ID NO: 2382584 - DNA, 25 bp, Homo sapien
tgctaatcgctgctttccacgtggc

SEQ ID NO: 2382585 - DNA, 25 bp, Homo sapien
tcctcagactctgtgctaatcgctg

SEQ ID NO: 2382586 - DNA, 25 bp, Homo sapien
cttccagaacaagtccctcccgtgc

SEQ ID NO: 2382587 - DNA, 25 bp, Homo sapien
gactctgtgctaatcgctgctttcc

SEQ ID NO: 2382588 - DNA, 25 bp, Homo sapien
tatgagcacagatgaggggcttcat

SEQ ID NO: 2382589 - DNA, 25 bp, Homo sapien
ctatgagcacagatgaggggcttca

SEQ ID NO: 2382590 - DNA, 25 bp, Homo sapien
tgaacctcatcatccctagatctgg

SEQ ID NO: 2382591 - DNA, 25 bp, Homo sapien
aaaagccaccacaatggcatactga

SEQ ID NO: 2382592 - DNA, 25 bp, Homo sapien
tcttcttttcgtgctgtgatcacac

SEQ ID NO: 2382593 - DNA, 25 bp, Homo sapien
ctttgtcttcttttcgtgctgtgat

SEQ ID NO: 2382594 - DNA, 25 bp, Homo sapien
tctgccccagaggtatatgaggatt

SEQ ID NO: 2382595 - DNA, 25 bp, Homo sapien
ttccctggtgtaaggaggtgagcct

SEQ ID NO: 2382596 - DNA, 25 bp, Homo sapien
tcagctggacggttagttccctggt

SEQ ID NO: 2382597 - DNA, 25 bp, Homo sapien
gattgctaggagaacagcccatgtt

SEQ ID NO: 2382598 - DNA, 25 bp, Homo sapien
gaagcagcattcattgcccatgcag

SEQ ID NO: 2382599 - DNA, 25 bp, Homo sapien
tcgctgaaatccttcagccctaatg

SEQ ID NO: 2382600 - DNA, 25 bp, Homo sapien
gccctaatgctggctaggtaccgtg

SEQ ID NO: 2382601 - DNA, 25 bp, Homo sapien
attcattgcccatgcaggcaccatg

SEQ ID NO: 2382602 - DNA, 25 bp, Homo sapien
caaggtggtggcacaaatattggtt

SEQ ID NO: 2382603 - DNA, 25 bp, Homo sapien
atgcaggacaaggtggtggcacaaa

SEQ ID NO: 2382604 - DNA, 25 bp, Homo sapien
tattggttgagtgctcccgtgtgtg

SEQ ID NO: 2382605 - DNA, 25 bp, Homo sapien
aatattggttgagtgctcccgtgtg

SEQ ID NO: 2382606 - DNA, 25 bp, Homo sapien
caggtgtgcacattcagataagctt

SEQ ID NO: 2382607 - DNA, 25 bp, Homo sapien
gaggtagacgcagatatgaacccag

SEQ ID NO: 2382608 - DNA, 25 bp, Homo sapien
acaggtgcgcacatccaggtgagca

SEQ ID NO: 2382609 - DNA, 25 bp, Homo sapien
catgtccaggtgagcaggatgcaaa

SEQ ID NO: 2382610 - DNA, 25 bp, Homo sapien
agccggagtctaggagggtcatcct

SEQ ID NO: 2382611 - DNA, 25 bp, Homo sapien
tctgggagccggagtctaggagggt

SEQ ID NO: 2382612 - DNA, 25 bp, Homo sapien
ccggagtctaggagggtcatcctgc

SEQ ID NO: 2382613 - DNA, 25 bp, Homo sapien
gtctaggagggtcatcctgcctctg

SEQ ID NO: 2382614 - DNA, 25 bp, Homo sapien
gtgacgagtccctctcatggatgag

SEQ ID NO: 2382615 - DNA, 25 bp, Homo sapien
tgagcttttgcttaacagtgcagag

SEQ ID NO: 2382616 - DNA, 25 bp, Homo sapien
gcttaacagtgcagagctttgcaga

SEQ ID NO: 2382617 - DNA, 25 bp, Homo sapien
agaactctccccaatagtgatcatt

SEQ ID NO: 2382618 - DNA, 25 bp, Homo sapien
caatgatgctactgggatggcaaac

SEQ ID NO: 2382619 - DNA, 25 bp, Homo sapien
acaaaggacccaacgtgctctgatg

SEQ ID NO: 2382620 - DNA, 25 bp, Homo sapien
ctctttctgccaatcagggtcaatg

SEQ ID NO: 2382621 - DNA, 25 bp, Homo sapien
tactgggatggcaaacgttcttaac

SEQ ID NO: 2382622 - DNA, 25 bp, Homo sapien
taatggtttgtccgaaatattttga

SEQ ID NO: 2382623 - DNA, 25 bp, Homo sapien
aggttgccgtaagtccagaggcaca

SEQ ID NO: 2382624 - DNA, 25 bp, Homo sapien
tattttgaggttgccgtaagtccag

SEQ ID NO: 2382625 - DNA, 25 bp, Homo sapien
gaaaatgtaggcttttagcttccat

SEQ ID NO: 2382626 - DNA, 25 bp, Homo sapien
cctccccacaacaggcaagacacat

SEQ ID NO: 2382627 - DNA, 25 bp, Homo sapien
ccccacaacaggcaagacacatgca

SEQ ID NO: 2382628 - DNA, 25 bp, Homo sapien
ccacaacaggcaagacacatgcaca

SEQ ID NO: 2382629 - DNA, 25 bp, Homo sapien
ctccccacaacaggcaagacacatg

SEQ ID NO: 2382630 - DNA, 25 bp, Homo sapien
ctgtgactgtacaagttaatactta

SEQ ID NO: 2382631 - DNA, 25 bp, Homo sapien
gacaccttgcgagtctgcagctaga

SEQ ID NO: 2382632 - DNA, 25 bp, Homo sapien
cctccagatcgttgggcaagtggtg

SEQ ID NO: 2382633 - DNA, 25 bp, Homo sapien
gctagagtgacaaactgtaccgggt

SEQ ID NO: 2382634 - DNA, 25 bp, Homo sapien
ttcttatctctggtgcgtaggtccc

SEQ ID NO: 2382635 - DNA, 25 bp, Homo sapien
gcactcaatgagtaagtccagtctt

SEQ ID NO: 2382636 - DNA, 25 bp, Homo sapien
ctgaatttttctgcccgatctttgg

SEQ ID NO: 2382637 - DNA, 25 bp, Homo sapien
tgttttgcactcaatgagtaagtcc

SEQ ID NO: 2382638 - DNA, 25 bp, Homo sapien
gaccacgagtgcttgaagtgccttc

SEQ ID NO: 2382639 - DNA, 25 bp, Homo sapien
acccatcgtccacgtgccataaaga

SEQ ID NO: 2382640 - DNA, 25 bp, Homo sapien
aagtggagccccacaaggagacgga

SEQ ID NO: 2382641 - DNA, 25 bp, Homo sapien
cacaaggagacggagatgattggat

SEQ ID NO: 2382642 - DNA, 25 bp, Homo sapien
ccacgtgccataaagaagtgaaact

SEQ ID NO: 2382643 - DNA, 25 bp, Homo sapien
gatgagggtgaccacacacttgaaa

SEQ ID NO: 2382644 - DNA, 25 bp, Homo sapien
gggacgccgcacatcctttgtcagt

SEQ ID NO: 2382645 - DNA, 25 bp, Homo sapien
ctatgacagtcagaggaagcgggca

SEQ ID NO: 2382646 - DNA, 25 bp, Homo sapien
tgcttgggtataaagtgtgcagacc

SEQ ID NO: 2382647 - DNA, 25 bp, Homo sapien
ccttctcccataaaggggagaagtg

SEQ ID NO: 2382648 - DNA, 25 bp, Homo sapien
caagtccttctcccataaaggggag

SEQ ID NO: 2382649 - DNA, 25 bp, Homo sapien
ggagaagtgtcatttcagatgtcag

SEQ ID NO: 2382650 - DNA, 25 bp, Homo sapien
aggggagaagtgtcatttcagatgt

SEQ ID NO: 2382651 - DNA, 25 bp, Homo sapien
actttctctgcaccacaggtgacct

SEQ ID NO: 2382652 - DNA, 25 bp, Homo sapien
tctctgcaccacaggtgacctggag

SEQ ID NO: 2382653 - DNA, 25 bp, Homo sapien
tttctctgcaccacaggtgacctgg

SEQ ID NO: 2382654 - DNA, 25 bp, Homo sapien
ttctctgcaccacaggtgacctgga

SEQ ID NO: 2382655 - DNA, 25 bp, Homo sapien
ctgtggggcagctctatgttatcta

SEQ ID NO: 2382656 - DNA, 25 bp, Homo sapien
tggggcagctctatgttatctatct

SEQ ID NO: 2382657 - DNA, 25 bp, Homo sapien
atctgtggggcagctctatgttatc

SEQ ID NO: 2382658 - DNA, 25 bp, Homo sapien
gggcagctctatgttatctatctcc

SEQ ID NO: 2382659 - DNA, 25 bp, Homo sapien
ctgctaccagtgagatgttcaagcc

SEQ ID NO: 2382660 - DNA, 25 bp, Homo sapien
gattcacagaagactggctgctacc

SEQ ID NO: 2382661 - DNA, 25 bp, Homo sapien
gaagactggctgctaccagtgagat

SEQ ID NO: 2382662 - DNA, 25 bp, Homo sapien
tggaagcctgattcacagaagactg

SEQ ID NO: 2382663 - DNA, 25 bp, Homo sapien
ctttgccatgcggagatgtggattc

SEQ ID NO: 2382664 - DNA, 25 bp, Homo sapien
ctcctttgccatgcggagatgtgga

SEQ ID NO: 2382665 - DNA, 25 bp, Homo sapien
ttgccatgcggagatgtggattcat

SEQ ID NO: 2382666 - DNA, 25 bp, Homo sapien
tcctttgccatgcggagatgtggat

SEQ ID NO: 2382667 - DNA, 25 bp, Homo sapien
gctctggtgtttctgtgctccccag

SEQ ID NO: 2382668 - DNA, 25 bp, Homo sapien
gactcgatgaccaagtgcagccctt

SEQ ID NO: 2382669 - DNA, 25 bp, Homo sapien
ccagaatgacactccagatagctta

SEQ ID NO: 2382670 - DNA, 25 bp, Homo sapien
tagcttaactggaataagggactta

SEQ ID NO: 2382671 - DNA, 25 bp, Homo sapien
ttagactatgttctgtcccattagg

SEQ ID NO: 2382672 - DNA, 25 bp, Homo sapien
cagaaattagactatgttctgtccc

SEQ ID NO: 2382673 - DNA, 25 bp, Homo sapien
gaaattagactatgttctgtcccat

SEQ ID NO: 2382674 - DNA, 25 bp, Homo sapien
cattaggttttccaccgcctgggca

SEQ ID NO: 2382675 - DNA, 25 bp, Homo sapien
gctgcctcttaaacgggagttctga

SEQ ID NO: 2382676 - DNA, 25 bp, Homo sapien
taaacgggagttctgaatagcccac

SEQ ID NO: 2382677 - DNA, 25 bp, Homo sapien
actctgttcggatgtgaaaatcatg

SEQ ID NO: 2382678 - DNA, 25 bp, Homo sapien
caaatgggaactctgttcggatgtg

SEQ ID NO: 2382679 - DNA, 25 bp, Homo sapien
tgccaatcgtgaatcttaggactgt

SEQ ID NO: 2382680 - DNA, 25 bp, Homo sapien
cgtgaatcttaggactgtagtttcc

SEQ ID NO: 2382681 - DNA, 25 bp, Homo sapien
caatcgtgaatcttaggactgtagt

SEQ ID NO: 2382682 - DNA, 25 bp, Homo sapien
tcgtgaatcttaggactgtagtttc

SEQ ID NO: 2382683 - DNA, 25 bp, Homo sapien
acacagtctgtgagcttttatccca

SEQ ID NO: 2382684 - DNA, 25 bp, Homo sapien
ggttaagacggacaaggtgatctac

SEQ ID NO: 2382685 - DNA, 25 bp, Homo sapien
agcaaatgctctcggaactccagga

SEQ ID NO: 2382686 - DNA, 25 bp, Homo sapien
ggaagagccagataatgacctgagc

SEQ ID NO: 2382687 - DNA, 25 bp, Homo sapien
catggaggggctccaaacatacatc

SEQ ID NO: 2382688 - DNA, 25 bp, Homo sapien
actgtagtttaagcaagactcatgg

SEQ ID NO: 2382689 - DNA, 25 bp, Homo sapien
aactctgctatttaggtcctcagcc

SEQ ID NO: 2382690 - DNA, 25 bp, Homo sapien
catgcccggaatgttgtgcttcgac

SEQ ID NO: 2382691 - DNA, 25 bp, Homo sapien
gttcctcattgtccaatatggctgc

SEQ ID NO: 2382692 - DNA, 25 bp, Homo sapien
tttcaaggttcctcattgtccaata

SEQ ID NO: 2382693 - DNA, 25 bp, Homo sapien
tcattgtccaatatggctgctggag

SEQ ID NO: 2382694 - DNA, 25 bp, Homo sapien
caaggttcctcattgtccaatatgg

SEQ ID NO: 2382695 - DNA, 25 bp, Homo sapien
catcttctctccacaatagagcaga

SEQ ID NO: 2382696 - DNA, 25 bp, Homo sapien
gaaaggttcaaaaagctccgcacag

SEQ ID NO: 2382697 - DNA, 25 bp, Homo sapien
cctttaggtgatgtcacagggtgac

SEQ ID NO: 2382698 - DNA, 25 bp, Homo sapien
cgccaagccctcctgtcatatctgt

SEQ ID NO: 2382699 - DNA, 25 bp, Homo sapien
tgctaacagagatcaaaaattgatc

SEQ ID NO: 2382700 - DNA, 25 bp, Homo sapien
attgatcagatagaaagtggaagtc

SEQ ID NO: 2382701 - DNA, 25 bp, Homo sapien
ctgcttgctaacagagatcaaaaat

SEQ ID NO: 2382702 - DNA, 25 bp, Homo sapien
tgatcagatagaaagtggaagtcca

SEQ ID NO: 2382703 - DNA, 25 bp, Homo sapien
ctgtaggttgcctggaaaatgaagt

SEQ ID NO: 2382704 - DNA, 25 bp, Homo sapien
tctgtaggttgcctggaaaatgaag

SEQ ID NO: 2382705 - DNA, 25 bp, Homo sapien
tgtaggttgcctggaaaatgaagtt

SEQ ID NO: 2382706 - DNA, 25 bp, Homo sapien
gtgtcaaagctaagatggcagtggc

SEQ ID NO: 2382707 - DNA, 25 bp, Homo sapien
cacccctgtgctgaaggaggtgagt

SEQ ID NO: 2382708 - DNA, 25 bp, Homo sapien
aaggaggtgagtgtcaaagctaaga

SEQ ID NO: 2382709 - DNA, 25 bp, Homo sapien
ccctcacccctgtgctgaaggaggt

SEQ ID NO: 2382710 - DNA, 25 bp, Homo sapien
tcctctcaagtctgctgctagggtg

SEQ ID NO: 2382711 - DNA, 25 bp, Homo sapien
gccactagctcctgccttttcaatg

SEQ ID NO: 2382712 - DNA, 25 bp, Homo sapien
gcttgtccaataccccacctagaag

SEQ ID NO: 2382713 - DNA, 25 bp, Homo sapien
cctagaagggaatatccacttcctc

SEQ ID NO: 2382714 - DNA, 25 bp, Homo sapien
tggccgtcttcctcaagggttacca

SEQ ID NO: 2382715 - DNA, 25 bp, Homo sapien
cacggagtagaagaccgccgagtga

SEQ ID NO: 2382716 - DNA, 25 bp, Homo sapien
tgggccacgtctccgaagtcattga

SEQ ID NO: 2382717 - DNA, 25 bp, Homo sapien
cgagtgactccttatttcgggaggg

SEQ ID NO: 2382718 - DNA, 25 bp, Homo sapien
cagataagtgaccaccgaacagtgc

SEQ ID NO: 2382719 - DNA, 25 bp, Homo sapien
gaccaccgaacagtgctgatgatgg

SEQ ID NO: 2382720 - DNA, 25 bp, Homo sapien
cctgcacagataagtgaccaccgaa

SEQ ID NO: 2382721 - DNA, 25 bp, Homo sapien
gctgctcaggccctgcacagataag

SEQ ID NO: 2382722 - DNA, 25 bp, Homo sapien
tcatcttgagtcttccgggagggct

SEQ ID NO: 2382723 - DNA, 25 bp, Homo sapien
tataagcttgggaaagttggtggtc

SEQ ID NO: 2382724 - DNA, 25 bp, Homo sapien
taaaagcgttggttccagcttgtcc

SEQ ID NO: 2382725 - DNA, 25 bp, Homo sapien
ggcctgaagtctctacagctttcac

SEQ ID NO: 2382726 - DNA, 25 bp, Homo sapien
gagaaggctcactgtatagtaattc

SEQ ID NO: 2382727 - DNA, 25 bp, Homo sapien
cagagaaggctcactgtatagtaat

SEQ ID NO: 2382728 - DNA, 25 bp, Homo sapien
agagaaggctcactgtatagtaatt

SEQ ID NO: 2382729 - DNA, 25 bp, Homo sapien
gcagagaaggctcactgtatagtaa

SEQ ID NO: 2382730 - DNA, 25 bp, Homo sapien
ccaagtttggaaacaagatgcttcc

SEQ ID NO: 2382731 - DNA, 25 bp, Homo sapien
cttggaccaagtttggaaacaagat

SEQ ID NO: 2382732 - DNA, 25 bp, Homo sapien
gaccaagtttggaaacaagatgctt

SEQ ID NO: 2382733 - DNA, 25 bp, Homo sapien
ggaccaagtttggaaacaagatgct

SEQ ID NO: 2382734 - DNA, 25 bp, Homo sapien
cgtatgcgagctcttttggagctgc

SEQ ID NO: 2382735 - DNA, 25 bp, Homo sapien
gagctgccctacgtttacccaggaa

SEQ ID NO: 2382736 - DNA, 25 bp, Homo sapien
gccaatgtgttcttcctaggaatta

SEQ ID NO: 2382737 - DNA, 25 bp, Homo sapien
ccttaaggaaaccttcgtatgcgag

SEQ ID NO: 2382738 - DNA, 25 bp, Homo sapien
ccttggagaaggcttcatgggagcc

SEQ ID NO: 2382739 - DNA, 25 bp, Homo sapien
tggagaaggcttcatgggagccgcc

SEQ ID NO: 2382740 - DNA, 25 bp, Homo sapien
tctgtgtccttggagaaggcttcat

SEQ ID NO: 2382741 - DNA, 25 bp, Homo sapien
gagaaggcttcatgggagccgccat

SEQ ID NO: 2382742 - DNA, 25 bp, Homo sapien
gagttagcacggctctgctgctgtc

SEQ ID NO: 2382743 - DNA, 25 bp, Homo sapien
aatcgagttagcacggctctgctgc

SEQ ID NO: 2382744 - DNA, 25 bp, Homo sapien
tggtaaaatcgagttagcacggctc

SEQ ID NO: 2382745 - DNA, 25 bp, Homo sapien
acttgttggtaaaatcgagttagca

SEQ ID NO: 2382746 - DNA, 25 bp, Homo sapien
gaaattttgccgacaactgccaagg

SEQ ID NO: 2382747 - DNA, 25 bp, Homo sapien
gccgacaactgccaaggagacgtca

SEQ ID NO: 2382748 - DNA, 25 bp, Homo sapien
tcatgcccagtaattcataggaaat

SEQ ID NO: 2382749 - DNA, 25 bp, Homo sapien
cataggaaattttgccgacaactgc

SEQ ID NO: 2382750 - DNA, 25 bp, Homo sapien
ctgagacacattggcagccctaagc

SEQ ID NO: 2382751 - DNA, 25 bp, Homo sapien
aaatagggtctgaggtctgagacac

SEQ ID NO: 2382752 - DNA, 25 bp, Homo sapien
gcccctggcaatgttatcgagtgaa

SEQ ID NO: 2382753 - DNA, 25 bp, Homo sapien
taagacatcgctcttctgtgagacg

SEQ ID NO: 2382754 - DNA, 25 bp, Homo sapien
tcgaagctctgaatccgcagggaga

SEQ ID NO: 2382755 - DNA, 25 bp, Homo sapien
tccctgtcgaagctctgaatccgca

SEQ ID NO: 2382756 - DNA, 25 bp, Homo sapien
gatctggctcagctccctgtcgaag

SEQ ID NO: 2382757 - DNA, 25 bp, Homo sapien
aatccgcagggagagtctggacacc

SEQ ID NO: 2382758 - DNA, 25 bp, Homo sapien
ttcgtaggaacatctgtagcttgat

SEQ ID NO: 2382759 - DNA, 25 bp, Homo sapien
ttggggttccattcgtaggaacatc

SEQ ID NO: 2382760 - DNA, 25 bp, Homo sapien
ctttctgctggatagggatgaagaa

SEQ ID NO: 2382761 - DNA, 25 bp, Homo sapien
gctactttctgctggatagggatga

SEQ ID NO: 2382762 - DNA, 25 bp, Homo sapien
agctacgagctgcactcccagctcc

SEQ ID NO: 2382763 - DNA, 25 bp, Homo sapien
ggatggagtcagacaacggcgagag

SEQ ID NO: 2382764 - DNA, 25 bp, Homo sapien
ggagagagacatgccagctacgagc

SEQ ID NO: 2382765 - DNA, 25 bp, Homo sapien
tggagtcagacaacggcgagaggac

SEQ ID NO: 2382766 - DNA, 25 bp, Homo sapien
gtcctgctctccttcgcaggatgtg

SEQ ID NO: 2382767 - DNA, 25 bp, Homo sapien
ccttcgcaggatgtgctaactgaga

SEQ ID NO: 2382768 - DNA, 25 bp, Homo sapien
agaagtcatctccactgaccaggga

SEQ ID NO: 2382769 - DNA, 25 bp, Homo sapien
gatgtgctaactgagagagaagtca

SEQ ID NO: 2382770 - DNA, 25 bp, Homo sapien
tataaatctacctatcaactggaag

SEQ ID NO: 2382771 - DNA, 25 bp, Homo sapien
ggaagccatgctaaaagtatctgag

SEQ ID NO: 2382772 - DNA, 25 bp, Homo sapien
taaatgaacttcctcctcgccagag

SEQ ID NO: 2382773 - DNA, 25 bp, Homo sapien
gggagattggcatgcttgaagacac

SEQ ID NO: 2382774 - DNA, 25 bp, Homo sapien
atccaatgataagacagcaactgaa

SEQ ID NO: 2382775 - DNA, 25 bp, Homo sapien
tcatccaatgataagacagcaactg

SEQ ID NO: 2382776 - DNA, 25 bp, Homo sapien
tggacagacaccaccatttcatcca

SEQ ID NO: 2382777 - DNA, 25 bp, Homo sapien
atttcatccaatgataagacagcaa

SEQ ID NO: 2382778 - DNA, 25 bp, Homo sapien
tctaatttaaacaagggcacctgtc

SEQ ID NO: 2382779 - DNA, 25 bp, Homo sapien
atcgcgaacctgaaaagctcactaa

SEQ ID NO: 2382780 - DNA, 25 bp, Homo sapien
ctcttttcttcatcgcgaacctgaa

SEQ ID NO: 2382781 - DNA, 25 bp, Homo sapien
acactaccaaccatttggactcaag

SEQ ID NO: 2382782 - DNA, 25 bp, Homo sapien
taagccagtctagatcaatatctgt

SEQ ID NO: 2382783 - DNA, 25 bp, Homo sapien
cagccgatccatctttacagataca

SEQ ID NO: 2382784 - DNA, 25 bp, Homo sapien
taacggagactctcataagccagtc

SEQ ID NO: 2382785 - DNA, 25 bp, Homo sapien
agaaatggtttaacggagactctca

SEQ ID NO: 2382786 - DNA, 25 bp, Homo sapien
atctccaaactatattagcaaactg

SEQ ID NO: 2382787 - DNA, 25 bp, Homo sapien
aaaaaatctccaaactatattagca

SEQ ID NO: 2382788 - DNA, 25 bp, Homo sapien
agttcagatatatcaattcttcccc

SEQ ID NO: 2382789 - DNA, 25 bp, Homo sapien
tccagttcagatatatcaattcttc

SEQ ID NO: 2382790 - DNA, 25 bp, Homo sapien
tcaccccgaatctaatatgggatgc

SEQ ID NO: 2382791 - DNA, 25 bp, Homo sapien
tcaccagatcccagagatgcgacca

SEQ ID NO: 2382792 - DNA, 25 bp, Homo sapien
ctaatatgggatgcttaatactacc

SEQ ID NO: 2382793 - DNA, 25 bp, Homo sapien
taatactaccaatatcaccagatcc

SEQ ID NO: 2382794 - DNA, 25 bp, Homo sapien
tggagagtggtatcagtcatacaca

SEQ ID NO: 2382795 - DNA, 25 bp, Homo sapien
gagagtggtatcagtcatacacaat

SEQ ID NO: 2382796 - DNA, 25 bp, Homo sapien
tcttggagagtggtatcagtcatac

SEQ ID NO: 2382797 - DNA, 25 bp, Homo sapien
ctgctcttggagagtggtatcagtc

SEQ ID NO: 2382798 - DNA, 25 bp, Homo sapien
taatttgattgctggcatttcaccc

SEQ ID NO: 2382799 - DNA, 25 bp, Homo sapien
ctggctttcttcaagttaggcaggg

SEQ ID NO: 2382800 - DNA, 25 bp, Homo sapien
gatatgttgccctgatatacaggtg

SEQ ID NO: 2382801 - DNA, 25 bp, Homo sapien
aatgtgtgagcggaaattatccaca

SEQ ID NO: 2382802 - DNA, 25 bp, Homo sapien
cggtggcactaggttcgtaagaagc

SEQ ID NO: 2382803 - DNA, 25 bp, Homo sapien
gactcgttacgtcagtgtccccaag

SEQ ID NO: 2382804 - DNA, 25 bp, Homo sapien
tgcttatggatgtccaagacagaca

SEQ ID NO: 2382805 - DNA, 25 bp, Homo sapien
tccccaagtggctgtcctagattca

SEQ ID NO: 2382806 - DNA, 25 bp, Homo sapien
taccagccgtcccatagtctctgag

SEQ ID NO: 2382807 - DNA, 25 bp, Homo sapien
tggtccccaaactctgaagctgcac

SEQ ID NO: 2382808 - DNA, 25 bp, Homo sapien
tactcatccgttcaaaatcccacag

SEQ ID NO: 2382809 - DNA, 25 bp, Homo sapien
tctgagctcaactcttaccagccgt

SEQ ID NO: 2382810 - DNA, 25 bp, Homo sapien
tatagccagtgtgttagagtgcaaa

SEQ ID NO: 2382811 - DNA, 25 bp, Homo sapien
caacttgcatctaatactcggctag

SEQ ID NO: 2382812 - DNA, 25 bp, Homo sapien
acaaaggttgtggacacgaggtcgc

SEQ ID NO: 2382813 - DNA, 25 bp, Homo sapien
caattgcagtggaattatggcctct

SEQ ID NO: 2382814 - DNA, 25 bp, Homo sapien
tgctcgattctccaagtgccgcgtt

SEQ ID NO: 2382815 - DNA, 25 bp, Homo sapien
tcgattctccaagtgccgcgttcat

SEQ ID NO: 2382816 - DNA, 25 bp, Homo sapien
tcagcctggatcccgctgctcgatt

SEQ ID NO: 2382817 - DNA, 25 bp, Homo sapien
gctgctcgattctccaagtgccgcg

SEQ ID NO: 2382818 - DNA, 25 bp, Homo sapien
ctcctttatccatgagcgttctctt

SEQ ID NO: 2382819 - DNA, 25 bp, Homo sapien
tatccatgagcgttctcttcccagc

SEQ ID NO: 2382820 - DNA, 25 bp, Homo sapien
cctgaagtcagatggcgctggggtt

SEQ ID NO: 2382821 - DNA, 25 bp, Homo sapien
gagcgttctcttcccagcctcatgt

SEQ ID NO: 2382822 - DNA, 25 bp, Homo sapien
taaatggtgtcattagtgggactcc

SEQ ID NO: 2382823 - DNA, 25 bp, Homo sapien
ccagtgcagattaggacggtctttc

SEQ ID NO: 2382824 - DNA, 25 bp, Homo sapien
cattagagtagaacagagctgcagc

SEQ ID NO: 2382825 - DNA, 25 bp, Homo sapien
tgctgtggtgcaagtaatgcggcca

SEQ ID NO: 2382826 - DNA, 25 bp, Homo sapien
gatgctcaatctctaaccacgctct

SEQ ID NO: 2382827 - DNA, 25 bp, Homo sapien
gggctctgatgatcagaggctcgtt

SEQ ID NO: 2382828 - DNA, 25 bp, Homo sapien
ggatgccctgatgctcaatctctaa

SEQ ID NO: 2382829 - DNA, 25 bp, Homo sapien
gatcagaggctcgttggatgccctg

SEQ ID NO: 2382830 - DNA, 25 bp, Homo sapien
ttgacgtttgctgcaggcgatggcc

SEQ ID NO: 2382831 - DNA, 25 bp, Homo sapien
ctgtggggtgtattggctccagtca

SEQ ID NO: 2382832 - DNA, 25 bp, Homo sapien
gtttggatcaccagacgttgacgtt

SEQ ID NO: 2382833 - DNA, 25 bp, Homo sapien
cattcctgttaaactacatgtcatg

SEQ ID NO: 2382834 - DNA, 25 bp, Homo sapien
catagtctctaagaagaggacgctc

SEQ ID NO: 2382835 - DNA, 25 bp, Homo sapien
ctcctgtgacattctagtgccttac

SEQ ID NO: 2382836 - DNA, 25 bp, Homo sapien
tagtctctaagaagaggacgctcct

SEQ ID NO: 2382837 - DNA, 25 bp, Homo sapien
tgtgacattctagtgccttactcat

SEQ ID NO: 2382838 - DNA, 25 bp, Homo sapien
ttagctttgcggagggtccctgctc

SEQ ID NO: 2382839 - DNA, 25 bp, Homo sapien
gatggagctgtcattagctttgcgg

SEQ ID NO: 2382840 - DNA, 25 bp, Homo sapien
atcccttcttttgccagtaggttca

SEQ ID NO: 2382841 - DNA, 25 bp, Homo sapien
ttttgccagtaggttcagagatgga

SEQ ID NO: 2382842 - DNA, 25 bp, Homo sapien
taggacccctacagactctaagttc

SEQ ID NO: 2382843 - DNA, 25 bp, Homo sapien
tcagtaggacccctacagactctaa

SEQ ID NO: 2382844 - DNA, 25 bp, Homo sapien
cctcagtaggacccctacagactct

SEQ ID NO: 2382845 - DNA, 25 bp, Homo sapien
agtaggacccctacagactctaagt

SEQ ID NO: 2382846 - DNA, 25 bp, Homo sapien
gaaaccaatagggtccacatctccc

SEQ ID NO: 2382847 - DNA, 25 bp, Homo sapien
agcagatggaaaccaatagggtcca

SEQ ID NO: 2382848 - DNA, 25 bp, Homo sapien
ggcataacacgaacagagagccacg

SEQ ID NO: 2382849 - DNA, 25 bp, Homo sapien
tctggccaccaaaggcataacacga

SEQ ID NO: 2382850 - DNA, 25 bp, Homo sapien
tctcatagtgcggacatcctggcgg

SEQ ID NO: 2382851 - DNA, 25 bp, Homo sapien
tgagtcaagtggacaaaggcccagc

SEQ ID NO: 2382852 - DNA, 25 bp, Homo sapien
tgttatacgatatggagaggagcca

SEQ ID NO: 2382853 - DNA, 25 bp, Homo sapien
ctgacaacagtcttgtaggcaccag

SEQ ID NO: 2382854 - DNA, 25 bp, Homo sapien
ttgtttctttgactcttagctccag

SEQ ID NO: 2382855 - DNA, 25 bp, Homo sapien
tgtttctttgactcttagctccagg

SEQ ID NO: 2382856 - DNA, 25 bp, Homo sapien
gcacaggatgttggacacagtgaaa

SEQ ID NO: 2382857 - DNA, 25 bp, Homo sapien
attcaatacttgacaacagggcaca

SEQ ID NO: 2382858 - DNA, 25 bp, Homo sapien
cacagtgaaatcgtaggatcgagtt

SEQ ID NO: 2382859 - DNA, 25 bp, Homo sapien
caatacttgacaacagggcacagga

SEQ ID NO: 2382860 - DNA, 25 bp, Homo sapien
tttctcgcctcgactttaatatcat

SEQ ID NO: 2382861 - DNA, 25 bp, Homo sapien
tctttctcgcctcgactttaatatc

SEQ ID NO: 2382862 - DNA, 25 bp, Homo sapien
tcttctttctcgcctcgactttaat

SEQ ID NO: 2382863 - DNA, 25 bp, Homo sapien
tccaggaacacgaccatatcttccc

SEQ ID NO: 2382864 - DNA, 25 bp, Homo sapien
ctcggaccagcaggtatcgaggcat

SEQ ID NO: 2382865 - DNA, 25 bp, Homo sapien
tttcttctccccctcggaccagcag

SEQ ID NO: 2382866 - DNA, 25 bp, Homo sapien
cccctcggaccagcaggtatcgagg

SEQ ID NO: 2382867 - DNA, 25 bp, Homo sapien
ttctccccctcggaccagcaggtat

SEQ ID NO: 2382868 - DNA, 25 bp, Homo sapien
caaatgttcccctatacagggatga

SEQ ID NO: 2382869 - DNA, 25 bp, Homo sapien
ctcttcaggtttttgctcaaagaat

SEQ ID NO: 2382870 - DNA, 25 bp, Homo sapien
tgtgcactcttctccatgtccgtgc

SEQ ID NO: 2382871 - DNA, 25 bp, Homo sapien
tgttggatgttctctgctagcagct

SEQ ID NO: 2382872 - DNA, 25 bp, Homo sapien
atgtccaccagcccgttctttcaga

SEQ ID NO: 2382873 - DNA, 25 bp, Homo sapien
ttctttcagagtgcctcctggcgtg

SEQ ID NO: 2382874 - DNA, 25 bp, Homo sapien
agcccgttctttcagagtgcctcct

SEQ ID NO: 2382875 - DNA, 25 bp, Homo sapien
accagcccgttctttcagagtgcct

SEQ ID NO: 2382876 - DNA, 25 bp, Homo sapien
ggcgcggacatcctcgcgtttctct

SEQ ID NO: 2382877 - DNA, 25 bp, Homo sapien
gcccctgagaaacacggcgcggaca

SEQ ID NO: 2382878 - DNA, 25 bp, Homo sapien
ccctgagaaacacggcgcggacatc

SEQ ID NO: 2382879 - DNA, 25 bp, Homo sapien
aaacacggcgcggacatcctcgcgt

SEQ ID NO: 2382880 - DNA, 25 bp, Homo sapien
aggctgggctgggagctggacgcac

SEQ ID NO: 2382881 - DNA, 25 bp, Homo sapien
ctactgccctgcctcaggctgggct

SEQ ID NO: 2382882 - DNA, 25 bp, Homo sapien
tcaggctgggctgggagctggacgc

SEQ ID NO: 2382883 - DNA, 25 bp, Homo sapien
actgccctgcctcaggctgggctgg

SEQ ID NO: 2382884 - DNA, 25 bp, Homo sapien
tgaattaaactagagccagcagcct

SEQ ID NO: 2382885 - DNA, 25 bp, Homo sapien
tcataaggaactttaccaatggtgg

SEQ ID NO: 2382886 - DNA, 25 bp, Homo sapien
gctacctgggctagatgggatgaat

SEQ ID NO: 2382887 - DNA, 25 bp, Homo sapien
cagcagcctgacatttcatacacct

SEQ ID NO: 2382888 - DNA, 25 bp, Homo sapien
cagcaagtttgtcgtggataaatga

SEQ ID NO: 2382889 - DNA, 25 bp, Homo sapien
gctgaacagcaagtttgtcgtggat

SEQ ID NO: 2382890 - DNA, 25 bp, Homo sapien
tgtcgtggataaatgatatctcagg

SEQ ID NO: 2382891 - DNA, 25 bp, Homo sapien
aatgatatctcaggagggtccagct

SEQ ID NO: 2382892 - DNA, 25 bp, Homo sapien
ccctgagttctctgtgccacgttgg

SEQ ID NO: 2382893 - DNA, 25 bp, Homo sapien
gccctgagttctctgtgccacgttg

SEQ ID NO: 2382894 - DNA, 25 bp, Homo sapien
ctctctgcatccggctctgatgtgg

SEQ ID NO: 2382895 - DNA, 25 bp, Homo sapien
ctgcatccggctctgatgtggtctc

SEQ ID NO: 2382896 - DNA, 25 bp, Homo sapien
gaagggtgtaggtggacagtggttc

SEQ ID NO: 2382897 - DNA, 25 bp, Homo sapien
tggttcctctgcatggcggctctgc

SEQ ID NO: 2382898 - DNA, 25 bp, Homo sapien
tctcggaggacgtttgctctatttt

SEQ ID NO: 2382899 - DNA, 25 bp, Homo sapien
ccattcttgatctgtctcggaggac

SEQ ID NO: 2382900 - DNA, 25 bp, Homo sapien
tggcctctatttctaccctactatc

SEQ ID NO: 2382901 - DNA, 25 bp, Homo sapien
cactggagggttgccattgcatctc

SEQ ID NO: 2382902 - DNA, 25 bp, Homo sapien
ctaaatccgaggaacttgtgatgtt

SEQ ID NO: 2382903 - DNA, 25 bp, Homo sapien
tatgcattctgggattcctgcgtgt

SEQ ID NO: 2382904 - DNA, 25 bp, Homo sapien
cattctgggattcctgcgtgttttc

SEQ ID NO: 2382905 - DNA, 25 bp, Homo sapien
gattcctgcgtgttttcccccttca

SEQ ID NO: 2382906 - DNA, 25 bp, Homo sapien
tctgggattcctgcgtgttttcccc

SEQ ID NO: 2382907 - DNA, 25 bp, Homo sapien
tgcatttggcttcacaagatctgac

SEQ ID NO: 2382908 - DNA, 25 bp, Homo sapien
gacttgccctgctctccaacatggg

SEQ ID NO: 2382909 - DNA, 25 bp, Homo sapien
cctgcatttggcttcacaagatctg

SEQ ID NO: 2382910 - DNA, 25 bp, Homo sapien
acaagatctgacttgccctgctctc

SEQ ID NO: 2382911 - DNA, 25 bp, Homo sapien
ttgttttacatctgactcctacccc

SEQ ID NO: 2382912 - DNA, 25 bp, Homo sapien
tccaaggcaatgttgggcttgtttt

SEQ ID NO: 2382913 - DNA, 25 bp, Homo sapien
tacatctgactcctaccccagatgt

SEQ ID NO: 2382914 - DNA, 25 bp, Homo sapien
ccaaggcaatgttgggcttgtttta

SEQ ID NO: 2382915 - DNA, 25 bp, Homo sapien
tccgtgctcagtggtaaaggctgac

SEQ ID NO: 2382916 - DNA, 25 bp, Homo sapien
gctgacagatcagatcaaggatcct

SEQ ID NO: 2382917 - DNA, 25 bp, Homo sapien
gatgtctcctggtgcttccgtgctc

SEQ ID NO: 2382918 - DNA, 25 bp, Homo sapien
ggaaccaagtaatttcttgatcctg

SEQ ID NO: 2382919 - DNA, 25 bp, Homo sapien
tctattaacgttctgggacatccct

SEQ ID NO: 2382920 - DNA, 25 bp, Homo sapien
tcttgaaacttctgcacggccactg

SEQ ID NO: 2382921 - DNA, 25 bp, Homo sapien
ttctagctgacggtgagagaggcct

SEQ ID NO: 2382922 - DNA, 25 bp, Homo sapien
tggagtccatcctaggttcacgtgc

SEQ ID NO: 2382923 - DNA, 25 bp, Homo sapien
tctgcgctctgcaccatggagaaag

SEQ ID NO: 2382924 - DNA, 25 bp, Homo sapien
tcagagtccctccaagtcagatgga

SEQ ID NO: 2382925 - DNA, 25 bp, Homo sapien
gagtcaacgacagatgtgcaggcag

SEQ ID NO: 2382926 - DNA, 25 bp, Homo sapien
tcaggctcaggttggtccctcagag

SEQ ID NO: 2382927 - DNA, 25 bp, Homo sapien
agttcattgattatggtatctttct

SEQ ID NO: 2382928 - DNA, 25 bp, Homo sapien
ttcattgattatggtatctttcttt

SEQ ID NO: 2382929 - DNA, 25 bp, Homo sapien
gttcattgattatggtatctttctt

SEQ ID NO: 2382930 - DNA, 25 bp, Homo sapien
tttctgcgacttgctggtttttgaa

SEQ ID NO: 2382931 - DNA, 25 bp, Homo sapien
ggcttttctatgcagataacttgac

SEQ ID NO: 2382932 - DNA, 25 bp, Homo sapien
tcttaatgctaagacctgaccgtat

SEQ ID NO: 2382933 - DNA, 25 bp, Homo sapien
cagagcccaactttggtcctgaatt

SEQ ID NO: 2382934 - DNA, 25 bp, Homo sapien
gacctgaccgtatatttttgctaat

SEQ ID NO: 2382935 - DNA, 25 bp, Homo sapien
acattgatgcgtcaacttgatgacc

SEQ ID NO: 2382936 - DNA, 25 bp, Homo sapien
atgtaaacattgatgcgtcaacttg

SEQ ID NO: 2382937 - DNA, 25 bp, Homo sapien
ttgatgcgtcaacttgatgacctct

SEQ ID NO: 2382938 - DNA, 25 bp, Homo sapien
aaacattgatgcgtcaacttgatga

SEQ ID NO: 2382939 - DNA, 25 bp, Homo sapien
caagagctattatgcgtctgtttgt

SEQ ID NO: 2382940 - DNA, 25 bp, Homo sapien
catttattcaagcagttgattttca

SEQ ID NO: 2382941 - DNA, 25 bp, Homo sapien
attcaagcagttgattttcacttcc

SEQ ID NO: 2382942 - DNA, 25 bp, Homo sapien
ttcacttcccaatggcaagctcaag

SEQ ID NO: 2382943 - DNA, 25 bp, Homo sapien
tgcttgcccccggagacttgtttct

SEQ ID NO: 2382944 - DNA, 25 bp, Homo sapien
gtgcttgcccccggagacttgtttc

SEQ ID NO: 2382945 - DNA, 25 bp, Homo sapien
gcctgtgcttgcccccggagacttg

SEQ ID NO: 2382946 - DNA, 25 bp, Homo sapien
gaacaattgctaccagagtcacctc

SEQ ID NO: 2382947 - DNA, 25 bp, Homo sapien
tattggctgctgttgagtcacaagg

SEQ ID NO: 2382948 - DNA, 25 bp, Homo sapien
tagatatagctaaggcttgtccagc

SEQ ID NO: 2382949 - DNA, 25 bp, Homo sapien
taccatagagttgggaggctgatca

SEQ ID NO: 2382950 - DNA, 25 bp, Homo sapien
cttccaacatgaagattccttgatc

SEQ ID NO: 2382951 - DNA, 25 bp, Homo sapien
agattccttgatcaaccagtggcaa

SEQ ID NO: 2382952 - DNA, 25 bp, Homo sapien
attccttgatcaaccagtggcaact

SEQ ID NO: 2382953 - DNA, 25 bp, Homo sapien
ttccaacatgaagattccttgatca

SEQ ID NO: 2382954 - DNA, 25 bp, Homo sapien
acaaggaggactcttggccggccct

SEQ ID NO: 2382955 - DNA, 25 bp, Homo sapien
tcatagagaaatcggacaaggagga

SEQ ID NO: 2382956 - DNA, 25 bp, Homo sapien
agcctggttgagctgagctgaactg

SEQ ID NO: 2382957 - DNA, 25 bp, Homo sapien
atcctttcactccatgcagctttct

SEQ ID NO: 2382958 - DNA, 25 bp, Homo sapien
gatccttttgctgactgctacgcta

SEQ ID NO: 2382959 - DNA, 25 bp, Homo sapien
taatatgctcttcgctccacagatc

SEQ ID NO: 2382960 - DNA, 25 bp, Homo sapien
gagtcactggactcaattccaccca

SEQ ID NO: 2382961 - DNA, 25 bp, Homo sapien
tggtcagcaccattccccttgatgg

SEQ ID NO: 2382962 - DNA, 25 bp, Homo sapien
gtgttttcaactaagctcagattgg

SEQ ID NO: 2382963 - DNA, 25 bp, Homo sapien
tgttttcaactaagctcagattggg

SEQ ID NO: 2382964 - DNA, 25 bp, Homo sapien
tcatgttctgtgcactttctcatca

SEQ ID NO: 2382965 - DNA, 25 bp, Homo sapien
catgttctgtgcactttctcatcac

SEQ ID NO: 2382966 - DNA, 25 bp, Homo sapien
tgggaaggacatggatcttttccag

SEQ ID NO: 2382967 - DNA, 25 bp, Homo sapien
cttttccagcatgggatcttttcaa

SEQ ID NO: 2382968 - DNA, 25 bp, Homo sapien
tccagcatgggatcttttcaatgct

SEQ ID NO: 2382969 - DNA, 25 bp, Homo sapien
gggaaggacatggatcttttccagc

SEQ ID NO: 2382970 - DNA, 25 bp, Homo sapien
tgctgccatttacaggacaaacctg

SEQ ID NO: 2382971 - DNA, 25 bp, Homo sapien
ggagccctcatggaacacagatttg

SEQ ID NO: 2382972 - DNA, 25 bp, Homo sapien
ccgagcacggaagcttagggccttt

SEQ ID NO: 2382973 - DNA, 25 bp, Homo sapien
gaagtctgagccatccgtagtgaca

SEQ ID NO: 2382974 - DNA, 25 bp, Homo sapien
gctgccgcaagcaaagtgaccactg

SEQ ID NO: 2382975 - DNA, 25 bp, Homo sapien
tttattcacagagaccggcatgcac

SEQ ID NO: 2382976 - DNA, 25 bp, Homo sapien
ggccccacggccttgatactggatt

SEQ ID NO: 2382977 - DNA, 25 bp, Homo sapien
gccacccggtctaggacatttattc

SEQ ID NO: 2382978 - DNA, 25 bp, Homo sapien
tctgtttggaattggagacgaagca

SEQ ID NO: 2382979 - DNA, 25 bp, Homo sapien
ttggaattggagacgaagcaatcat

SEQ ID NO: 2382980 - DNA, 25 bp, Homo sapien
gtttggaattggagacgaagcaatc

SEQ ID NO: 2382981 - DNA, 25 bp, Homo sapien
ctgtttggaattggagacgaagcaa

SEQ ID NO: 2382982 - DNA, 25 bp, Homo sapien
ggttcaattgtggagttacacgatg

SEQ ID NO: 2382983 - DNA, 25 bp, Homo sapien
ggagttacacgatgatggattctca

SEQ ID NO: 2382984 - DNA, 25 bp, Homo sapien
caattgtggagttacacgatgatgg

SEQ ID NO: 2382985 - DNA, 25 bp, Homo sapien
taataggttcaattgtggagttaca

SEQ ID NO: 2382986 - DNA, 25 bp, Homo sapien
gtgaacactgagatagtctgcacat

SEQ ID NO: 2382987 - DNA, 25 bp, Homo sapien
tgtgaacactgagatagtctgcaca

SEQ ID NO: 2382988 - DNA, 25 bp, Homo sapien
ctgtgaacactgagatagtctgcac

SEQ ID NO: 2382989 - DNA, 25 bp, Homo sapien
ggagtccataagcatctctaaagcg

SEQ ID NO: 2382990 - DNA, 25 bp, Homo sapien
tgagaatgtaaatggcccgtaagga

SEQ ID NO: 2382991 - DNA, 25 bp, Homo sapien
ccttgtagcatagattcacctgaga

SEQ ID NO: 2382992 - DNA, 25 bp, Homo sapien
taaagcgaatgcacgtggtaagccc

SEQ ID NO: 2382993 - DNA, 25 bp, Homo sapien
aatctcttagggaattcagcaaaaa

SEQ ID NO: 2382994 - DNA, 25 bp, Homo sapien
ggcatgaacaggcatcccctagtga

SEQ ID NO: 2382995 - DNA, 25 bp, Homo sapien
catccaaatctttcagccatcggct

SEQ ID NO: 2382996 - DNA, 25 bp, Homo sapien
cagcaacagcagattcatccaaatc

SEQ ID NO: 2382997 - DNA, 25 bp, Homo sapien
gctggtctgttgacaagatacagcc

SEQ ID NO: 2382998 - DNA, 25 bp, Homo sapien
ctctgctggtctgttgacaagatac

SEQ ID NO: 2382999 - DNA, 25 bp, Homo sapien
tctgctggtctgttgacaagataca

SEQ ID NO: 2383000 - DNA, 25 bp, Homo sapien
ggtctgttgacaagatacagccgat

SEQ ID NO: 2383001 - DNA, 25 bp, Homo sapien
tagttttgttgtttctgatttttca

SEQ ID NO: 2383002 - DNA, 25 bp, Homo sapien
ttcatcatcaatgaatcgctttcca

SEQ ID NO: 2383003 - DNA, 25 bp, Homo sapien
ctaattccaactggcctacgctaaa

SEQ ID NO: 2383004 - DNA, 25 bp, Homo sapien
aactggcctacgctaaattctccca

SEQ ID NO: 2383005 - DNA, 25 bp, Homo sapien
gaatcgctttccactgacacgacgc

SEQ ID NO: 2383006 - DNA, 25 bp, Homo sapien
cccttttccactctctcgaggccct

SEQ ID NO: 2383007 - DNA, 25 bp, Homo sapien
tcatcttcacggctggtgcctcatg

SEQ ID NO: 2383008 - DNA, 25 bp, Homo sapien
ggatgggcgcttcatcttcacggct

SEQ ID NO: 2383009 - DNA, 25 bp, Homo sapien
tgggcgcttcatcttcacggctggt

SEQ ID NO: 2383010 - DNA, 25 bp, Homo sapien
caccaggacaagtgcaacgcatggg

SEQ ID NO: 2383011 - DNA, 25 bp, Homo sapien
aagtgcaacgcatgggaggccagcc

SEQ ID NO: 2383012 - DNA, 25 bp, Homo sapien
agctcttgaggccattcagagctga

SEQ ID NO: 2383013 - DNA, 25 bp, Homo sapien
acaagtgcaacgcatgggaggccag

SEQ ID NO: 2383014 - DNA, 25 bp, Homo sapien
gtgttgccattgcgcttcgcagatg

SEQ ID NO: 2383015 - DNA, 25 bp, Homo sapien
gttgccattgcgcttcgcagatgct

SEQ ID NO: 2383016 - DNA, 25 bp, Homo sapien
gccattgcgcttcgcagatgctctg

SEQ ID NO: 2383017 - DNA, 25 bp, Homo sapien
cattgcgcttcgcagatgctctgtc

SEQ ID NO: 2383018 - DNA, 25 bp, Homo sapien
aaatcagccaaacctagcatgtata

SEQ ID NO: 2383019 - DNA, 25 bp, Homo sapien
cattccctgggatcaatctttgatt

SEQ ID NO: 2383020 - DNA, 25 bp, Homo sapien
gatcaatctttgattcccccgggta

SEQ ID NO: 2383021 - DNA, 25 bp, Homo sapien
tataaaacaactttcgtgcttggcc

SEQ ID NO: 2383022 - DNA, 25 bp, Homo sapien
cattccatggcattagggaggcgga

SEQ ID NO: 2383023 - DNA, 25 bp, Homo sapien
gatcctagagttgtacccttcccca

SEQ ID NO: 2383024 - DNA, 25 bp, Homo sapien
agaagaatcgctcactaggtcccag

SEQ ID NO: 2383025 - DNA, 25 bp, Homo sapien
taggtcccaggcacattgccaagtg

SEQ ID NO: 2383026 - DNA, 25 bp, Homo sapien
ggatggctcccctatttagactctt

SEQ ID NO: 2383027 - DNA, 25 bp, Homo sapien
cgcccttcaggtcaaataacgtgta

SEQ ID NO: 2383028 - DNA, 25 bp, Homo sapien
tgtaccctgctggttccgggaagcg

SEQ ID NO: 2383029 - DNA, 25 bp, Homo sapien
ctcttcctctcacgaagctgaaagg

SEQ ID NO: 2383030 - DNA, 25 bp, Homo sapien
ttgcagacggcaaggaccctgaact

SEQ ID NO: 2383031 - DNA, 25 bp, Homo sapien
tatttatgccttcgcagagggtgga

SEQ ID NO: 2383032 - DNA, 25 bp, Homo sapien
agagaagctcctaactgccgtgtca

SEQ ID NO: 2383033 - DNA, 25 bp, Homo sapien
tgacagtcagactcaaggatcttga

SEQ ID NO: 2383034 - DNA, 25 bp, Homo sapien
gctaacgagaccagacatcaaagga

SEQ ID NO: 2383035 - DNA, 25 bp, Homo sapien
atagaggacggttctggccactggc

SEQ ID NO: 2383036 - DNA, 25 bp, Homo sapien
caagatcacagagctcatgagggat

SEQ ID NO: 2383037 - DNA, 25 bp, Homo sapien
gagtcttggagtaacacgtcctcag

SEQ ID NO: 2383038 - DNA, 25 bp, Homo sapien
ctttgtacgtgtagcagtggagatg

SEQ ID NO: 2383039 - DNA, 25 bp, Homo sapien
tgtctttgtacgtgtagcagtggag

SEQ ID NO: 2383040 - DNA, 25 bp, Homo sapien
tctttgtacgtgtagcagtggagat

SEQ ID NO: 2383041 - DNA, 25 bp, Homo sapien
tctgtctttgtacgtgtagcagtgg

SEQ ID NO: 2383042 - DNA, 25 bp, Homo sapien
ccaaaagcggtaggcgatgtttgca

SEQ ID NO: 2383043 - DNA, 25 bp, Homo sapien
ctcacatgtgatccctgccttgaag

SEQ ID NO: 2383044 - DNA, 25 bp, Homo sapien
gctcacagctggcaatgtttcccca

SEQ ID NO: 2383045 - DNA, 25 bp, Homo sapien
gagccaccacagcacttaccaaaag

SEQ ID NO: 2383046 - DNA, 25 bp, Homo sapien
cttgattcttgcattgtgtgtttgc

SEQ ID NO: 2383047 - DNA, 25 bp, Homo sapien
gaaataatagcttgattcttgcatt

SEQ ID NO: 2383048 - DNA, 25 bp, Homo sapien
tgaaatgccacccttcagttgggaa

SEQ ID NO: 2383049 - DNA, 25 bp, Homo sapien
gccacccttcagttgggaagaagga

SEQ ID NO: 2383050 - DNA, 25 bp, Homo sapien
gggaattgattggtgttttgcttct

SEQ ID NO: 2383051 - DNA, 25 bp, Homo sapien
aaacccaccctatcccttgatgaag

SEQ ID NO: 2383052 - DNA, 25 bp, Homo sapien
ctggacgaaacaagtgggaattgat

SEQ ID NO: 2383053 - DNA, 25 bp, Homo sapien
attggcagctaccattttaaaggac

SEQ ID NO: 2383054 - DNA, 25 bp, Homo sapien
tggccagcgtcggggtcggtaacca

SEQ ID NO: 2383055 - DNA, 25 bp, Homo sapien
tggcatctcaccagacacccgggag

SEQ ID NO: 2383056 - DNA, 25 bp, Homo sapien
taaccacaggcaatggctggcatct

SEQ ID NO: 2383057 - DNA, 25 bp, Homo sapien
atctcaccagacacccgggagctgg

SEQ ID NO: 2383058 - DNA, 25 bp, Homo sapien
ccatttctgggctgcgttattgaaa

SEQ ID NO: 2383059 - DNA, 25 bp, Homo sapien
gctacggagagcgtgcagccggctc

SEQ ID NO: 2383060 - DNA, 25 bp, Homo sapien
gacagtggcaggagtaattgatccc

SEQ ID NO: 2383061 - DNA, 25 bp, Homo sapien
ctcccatagcaaacaatgcgagtgg

SEQ ID NO: 2383062 - DNA, 25 bp, Homo sapien
agaaggcctttgaaatcaggaggag

SEQ ID NO: 2383063 - DNA, 25 bp, Homo sapien
gaaggcctttgaaatcaggaggagg

SEQ ID NO: 2383064 - DNA, 25 bp, Homo sapien
ctcaatccctctggccagacgggaa

SEQ ID NO: 2383065 - DNA, 25 bp, Homo sapien
cagacgggaaacgttcccaagctct

SEQ ID NO: 2383066 - DNA, 25 bp, Homo sapien
ctgcgtaaccggctgcaaaagtggg

SEQ ID NO: 2383067 - DNA, 25 bp, Homo sapien
catgcagagcaatagtggccaggag

SEQ ID NO: 2383068 - DNA, 25 bp, Homo sapien
cttctagacgcaggctccaccttta

SEQ ID NO: 2383069 - DNA, 25 bp, Homo sapien
tccaacagcccttctagacgcaggc

SEQ ID NO: 2383070 - DNA, 25 bp, Homo sapien
cagccctgggcatcacgtgaccatc

SEQ ID NO: 2383071 - DNA, 25 bp, Homo sapien
gctccacctttagcctgtggaagaa

SEQ ID NO: 2383072 - DNA, 25 bp, Homo sapien
gctgcactggaatcgaccggggcca

SEQ ID NO: 2383073 - DNA, 25 bp, Homo sapien
cactcaggggtgtcagcatcagtca

SEQ ID NO: 2383074 - DNA, 25 bp, Homo sapien
ggagacggcggtggtcagacagcag

SEQ ID NO: 2383075 - DNA, 25 bp, Homo sapien
tcagcatcagtcaggagacggcggt

SEQ ID NO: 2383076 - DNA, 25 bp, Homo sapien
ccacaggacaagctctggtcactgt

SEQ ID NO: 2383077 - DNA, 25 bp, Homo sapien
tttctaggggagcagtgattaccac

SEQ ID NO: 2383078 - DNA, 25 bp, Homo sapien
cagctgcccatgttggttccccagg

SEQ ID NO: 2383079 - DNA, 25 bp, Homo sapien
gtgattaccacaggacaagctctgg

SEQ ID NO: 2383080 - DNA, 25 bp, Homo sapien
ggcaaggtaattacctgctctctgc

SEQ ID NO: 2383081 - DNA, 25 bp, Homo sapien
caaagatacatcactattggggatg

SEQ ID NO: 2383082 - DNA, 25 bp, Homo sapien
caagatcaagtgaggtcaaagatac

SEQ ID NO: 2383083 - DNA, 25 bp, Homo sapien
tcactattggggatgacatgggcaa

SEQ ID NO: 2383084 - DNA, 25 bp, Homo sapien
gactgccaagtcagtggagggcacc

SEQ ID NO: 2383085 - DNA, 25 bp, Homo sapien
tggagggcaccctctcagagggaca

SEQ ID NO: 2383086 - DNA, 25 bp, Homo sapien
gcttggtgtcgtacaattacaatgg

SEQ ID NO: 2383087 - DNA, 25 bp, Homo sapien
acaatggtgattgggcctgagaaac

SEQ ID NO: 2383088 - DNA, 25 bp, Homo sapien
gaatctggtgcccatcacttcaggg

SEQ ID NO: 2383089 - DNA, 25 bp, Homo sapien
tatacactcaaggtggtggccaagc

SEQ ID NO: 2383090 - DNA, 25 bp, Homo sapien
caaaccttccctagacttggagtca

SEQ ID NO: 2383091 - DNA, 25 bp, Homo sapien
gggaaagatcactctctcgtcactg

SEQ ID NO: 2383092 - DNA, 25 bp, Homo sapien
gccatgagtgaaagttagcacctcg

SEQ ID NO: 2383093 - DNA, 25 bp, Homo sapien
ggttctatgataggctctagccagg

SEQ ID NO: 2383094 - DNA, 25 bp, Homo sapien
ttgtcactataagagggcttgcccg

SEQ ID NO: 2383095 - DNA, 25 bp, Homo sapien
gaatcttcttaagggcatagccatg

SEQ ID NO: 2383096 - DNA, 25 bp, Homo sapien
agcccgccgccagcccgaagcgcag

SEQ ID NO: 2383097 - DNA, 25 bp, Homo sapien
cgccagcccgaagcgcagcgcccgc

SEQ ID NO: 2383098 - DNA, 25 bp, Homo sapien
cagcccgccgccagcccgaagcgca

SEQ ID NO: 2383099 - DNA, 25 bp, Homo sapien
cgccgccagcccgaagcgcagcgcc

SEQ ID NO: 2383100 - DNA, 25 bp, Homo sapien
ctcagcgccccgcacagcggcgccg

SEQ ID NO: 2383101 - DNA, 25 bp, Homo sapien
tgcatggactggatgggaacttcaa

SEQ ID NO: 2383102 - DNA, 25 bp, Homo sapien
gagtgggcacattccaccaagcaag

SEQ ID NO: 2383103 - DNA, 25 bp, Homo sapien
tttgagtttgtaagcctgcatccag

SEQ ID NO: 2383104 - DNA, 25 bp, Homo sapien
tcaatgtctgtgtggatcttgctgc

SEQ ID NO: 2383105 - DNA, 25 bp, Homo sapien
gcacgctccagttcagtggctttca

SEQ ID NO: 2383106 - DNA, 25 bp, Homo sapien
ctacagcacgctccagttcagtggc

SEQ ID NO: 2383107 - DNA, 25 bp, Homo sapien
cagcacgctccagttcagtggcttt

SEQ ID NO: 2383108 - DNA, 25 bp, Homo sapien
tacagcacgctccagttcagtggct

SEQ ID NO: 2383109 - DNA, 25 bp, Homo sapien
ctcaccaggaggatggtgcactcac

SEQ ID NO: 2383110 - DNA, 25 bp, Homo sapien
actgctgggtgaggaagttgggcag

SEQ ID NO: 2383111 - DNA, 25 bp, Homo sapien
cctctaagttttgcctttcattctg

SEQ ID NO: 2383112 - DNA, 25 bp, Homo sapien
tgtctcccttgtacacagcaggaat

SEQ ID NO: 2383113 - DNA, 25 bp, Homo sapien
cagggaggccggctttgtttccaag

SEQ ID NO: 2383114 - DNA, 25 bp, Homo sapien
ctgcaatcacgtgtaggggtgagag

SEQ ID NO: 2383115 - DNA, 25 bp, Homo sapien
agggaccacatttcatagagtgaag

SEQ ID NO: 2383116 - DNA, 25 bp, Homo sapien
caatcacgtgtaggggtgagaggta

SEQ ID NO: 2383117 - DNA, 25 bp, Homo sapien
tgagaggtagggaccacatttcata

SEQ ID NO: 2383118 - DNA, 25 bp, Homo sapien
tctcatcagtgtgcatggtaaaagg

SEQ ID NO: 2383119 - DNA, 25 bp, Homo sapien
ctcatcagtgtgcatggtaaaaggt

SEQ ID NO: 2383120 - DNA, 25 bp, Homo sapien
ttctcatcagtgtgcatggtaaaag

SEQ ID NO: 2383121 - DNA, 25 bp, Homo sapien
tgtttgccaagtcccaatgcaaatg

SEQ ID NO: 2383122 - DNA, 25 bp, Homo sapien
caatgcaaatgaaacggaactcttt

SEQ ID NO: 2383123 - DNA, 25 bp, Homo sapien
cttcacaggacaccagtaatactgg

SEQ ID NO: 2383124 - DNA, 25 bp, Homo sapien
ctttgatggcattataaatactacc

SEQ ID NO: 2383125 - DNA, 25 bp, Homo sapien
agacagaagtgtgcagaaacctcct

SEQ ID NO: 2383126 - DNA, 25 bp, Homo sapien
taccgtagcaagcaacgttgagaac

SEQ ID NO: 2383127 - DNA, 25 bp, Homo sapien
tctcgttggtcaagaatggccttca

SEQ ID NO: 2383128 - DNA, 25 bp, Homo sapien
aaatgtcaagcctagcagcagcgag

SEQ ID NO: 2383129 - DNA, 25 bp, Homo sapien
ctcaaatgatctacccacccaaaat

SEQ ID NO: 2383130 - DNA, 25 bp, Homo sapien
cctcaaatgatctacccacccaaaa

SEQ ID NO: 2383131 - DNA, 25 bp, Homo sapien
acctcaaatgatctacccacccaaa

SEQ ID NO: 2383132 - DNA, 25 bp, Homo sapien
caggcgataaggtttctagaagctc

SEQ ID NO: 2383133 - DNA, 25 bp, Homo sapien
gggtaagtctatgaaaccaggcgat

SEQ ID NO: 2383134 - DNA, 25 bp, Homo sapien
cttcatgataacaccccactttggg

SEQ ID NO: 2383135 - DNA, 25 bp, Homo sapien
tatggtgccatataaccaagggtgg

SEQ ID NO: 2383136 - DNA, 25 bp, Homo sapien
aaaaaggtttgagcaggcagcgtga

SEQ ID NO: 2383137 - DNA, 25 bp, Homo sapien
tgcgtagaggtggtcaggagaggct

SEQ ID NO: 2383138 - DNA, 25 bp, Homo sapien
gctggcctgcgcttgataaaaaggt

SEQ ID NO: 2383139 - DNA, 25 bp, Homo sapien
agccaggaccgacgtgaagtgagtc

SEQ ID NO: 2383140 - DNA, 25 bp, Homo sapien
gaacccaatctgagataagcagagg

SEQ ID NO: 2383141 - DNA, 25 bp, Homo sapien
gttgggtttctgtcgccactcagca

SEQ ID NO: 2383142 - DNA, 25 bp, Homo sapien
gaatttgagtggtctcttgccatca

SEQ ID NO: 2383143 - DNA, 25 bp, Homo sapien
ctgcaccgtcaacggcggcctggaa

SEQ ID NO: 2383144 - DNA, 25 bp, Homo sapien
taaggtcacatgagatcctacatgg

SEQ ID NO: 2383145 - DNA, 25 bp, Homo sapien
gcttgtcacccgtgggcttgtggat

SEQ ID NO: 2383146 - DNA, 25 bp, Homo sapien
cttcctgcaagagagtcaacctgaa

SEQ ID NO: 2383147 - DNA, 25 bp, Homo sapien
tgcacatggccttctcataaggacc

SEQ ID NO: 2383148 - DNA, 25 bp, Homo sapien
gagccaacactcctgactaatattt

SEQ ID NO: 2383149 - DNA, 25 bp, Homo sapien
agccttgacctcttatctcccaggt

SEQ ID NO: 2383150 - DNA, 25 bp, Homo sapien
cttgacctcttatctcccaggtgca

SEQ ID NO: 2383151 - DNA, 25 bp, Homo sapien
gacctcttatctcccaggtgcaagt

SEQ ID NO: 2383152 - DNA, 25 bp, Homo sapien
taccacaatcaggatatggacactg

SEQ ID NO: 2383153 - DNA, 25 bp, Homo sapien
tccacagttttacttgcacatgtac

SEQ ID NO: 2383154 - DNA, 25 bp, Homo sapien
tacaaagagatctcatggactctct

SEQ ID NO: 2383155 - DNA, 25 bp, Homo sapien
catgtacatgtggttgtgtctttag

SEQ ID NO: 2383156 - DNA, 25 bp, Homo sapien
cttcttcaaacaaatcacctttctc

SEQ ID NO: 2383157 - DNA, 25 bp, Homo sapien
cttcaaacaaatcacctttctccat

SEQ ID NO: 2383158 - DNA, 25 bp, Homo sapien
tcttcaaacaaatcacctttctcca

SEQ ID NO: 2383159 - DNA, 25 bp, Homo sapien
ttcttcaaacaaatcacctttctcc

SEQ ID NO: 2383160 - DNA, 25 bp, Homo sapien
tcattacaaccgaattagaggctgg

SEQ ID NO: 2383161 - DNA, 25 bp, Homo sapien
tcagtgctctagaagtacgggttgg

SEQ ID NO: 2383162 - DNA, 25 bp, Homo sapien
ggaagtgtcctgttcaaccctagaa

SEQ ID NO: 2383163 - DNA, 25 bp, Homo sapien
gaaggctgcaacattaatacacggt

SEQ ID NO: 2383164 - DNA, 25 bp, Homo sapien
cataatgagcacagaacacagagct

SEQ ID NO: 2383165 - DNA, 25 bp, Homo sapien
ttcaggactgtgcttcaagaacaga

SEQ ID NO: 2383166 - DNA, 25 bp, Homo sapien
cacagagctcaagtatttagcatct

SEQ ID NO: 2383167 - DNA, 25 bp, Homo sapien
tttgcataatgagcacagaacacag

SEQ ID NO: 2383168 - DNA, 25 bp, Homo sapien
caaatggacgttgcttccggctgta

SEQ ID NO: 2383169 - DNA, 25 bp, Homo sapien
gacaaattagtcctgagctgcaagc

SEQ ID NO: 2383170 - DNA, 25 bp, Homo sapien
accctggctggtggctagatcttcc

SEQ ID NO: 2383171 - DNA, 25 bp, Homo sapien
tggtctgcgcagaagcatcagcttt

SEQ ID NO: 2383172 - DNA, 25 bp, Homo sapien
ttgagccagcgagaaccaaatactt

SEQ ID NO: 2383173 - DNA, 25 bp, Homo sapien
acccctttgagccagcgagaaccaa

SEQ ID NO: 2383174 - DNA, 25 bp, Homo sapien
cagcaacccctttgagccagcgaga

SEQ ID NO: 2383175 - DNA, 25 bp, Homo sapien
caaatacttcgtgaggggctgttcc

SEQ ID NO: 2383176 - DNA, 25 bp, Homo sapien
gctgagagctttgcacagcacaacc

SEQ ID NO: 2383177 - DNA, 25 bp, Homo sapien
catccctgctagaggtaaggctcag

SEQ ID NO: 2383178 - DNA, 25 bp, Homo sapien
caggtggacagccaaccagaggcat

SEQ ID NO: 2383179 - DNA, 25 bp, Homo sapien
cacacatgcttacttgtcctgcggg

SEQ ID NO: 2383180 - DNA, 25 bp, Homo sapien
tttcagacgtgttgaccagggatgg

SEQ ID NO: 2383181 - DNA, 25 bp, Homo sapien
ttcagacgtgttgaccagggatgga

SEQ ID NO: 2383182 - DNA, 25 bp, Homo sapien
tcagacgtgttgaccagggatggat

SEQ ID NO: 2383183 - DNA, 25 bp, Homo sapien
cagacgtgttgaccagggatggatt

SEQ ID NO: 2383184 - DNA, 25 bp, Homo sapien
ccctggaaaagtccaatgctggttt

SEQ ID NO: 2383185 - DNA, 25 bp, Homo sapien
ctacggccacgggagacagcctgga

SEQ ID NO: 2383186 - DNA, 25 bp, Homo sapien
aatgctggtttcctacggccacggg

SEQ ID NO: 2383187 - DNA, 25 bp, Homo sapien
gtttcctacggccacgggagacagc

SEQ ID NO: 2383188 - DNA, 25 bp, Homo sapien
tgtggtagctcacaggtaggtaagg

SEQ ID NO: 2383189 - DNA, 25 bp, Homo sapien
tgttgtctgtgaccccgtgaccctc

SEQ ID NO: 2383190 - DNA, 25 bp, Homo sapien
gcaggctggagttccgcagcaggtc

SEQ ID NO: 2383191 - DNA, 25 bp, Homo sapien
ggtaaggtggcagtgaggagaatct

SEQ ID NO: 2383192 - DNA, 25 bp, Homo sapien
tgctcgagatggtgacataggccgt

SEQ ID NO: 2383193 - DNA, 25 bp, Homo sapien
gacggatggcgttgcccttcctgaa

SEQ ID NO: 2383194 - DNA, 25 bp, Homo sapien
tgccgatcctctgcaggtgggacgt

SEQ ID NO: 2383195 - DNA, 25 bp, Homo sapien
gaggtccacagaggaattgctcgag

SEQ ID NO: 2383196 - DNA, 25 bp, Homo sapien
tagagaggcggattactctcatctt

SEQ ID NO: 2383197 - DNA, 25 bp, Homo sapien
tgtgggcaggtgcataatttgcctt

SEQ ID NO: 2383198 - DNA, 25 bp, Homo sapien
tgccttcccctgttaatgccaaacg

SEQ ID NO: 2383199 - DNA, 25 bp, Homo sapien
cataacccacggtgtaaggagggct

SEQ ID NO: 2383200 - DNA, 25 bp, Homo sapien
tcacaggtccactaattcatgtgtt

SEQ ID NO: 2383201 - DNA, 25 bp, Homo sapien
caggtccactaattcatgtgttaaa

SEQ ID NO: 2383202 - DNA, 25 bp, Homo sapien
cgaaaactaagacgacacttaaatg

SEQ ID NO: 2383203 - DNA, 25 bp, Homo sapien
ggagaactcgaaaactaagacgaca

SEQ ID NO: 2383204 - DNA, 25 bp, Homo sapien
cagagcctgaggatcctctgagggt

SEQ ID NO: 2383205 - DNA, 25 bp, Homo sapien
tactgcaaatttggttctagaccag

SEQ ID NO: 2383206 - DNA, 25 bp, Homo sapien
cagcatcaagccagaagcagttcag

SEQ ID NO: 2383207 - DNA, 25 bp, Homo sapien
tctgagggtcctatcaacacttaag

SEQ ID NO: 2383208 - DNA, 25 bp, Homo sapien
tgtgtgaggagccaaagtccctttg

SEQ ID NO: 2383209 - DNA, 25 bp, Homo sapien
gcaggggacacaaagtatctcggca

SEQ ID NO: 2383210 - DNA, 25 bp, Homo sapien
caggggacacaaagtatctcggcat

SEQ ID NO: 2383211 - DNA, 25 bp, Homo sapien
cctctggacgcagacccttgctcca

SEQ ID NO: 2383212 - DNA, 25 bp, Homo sapien
agcacccctctggacgcagaccctt

SEQ ID NO: 2383213 - DNA, 25 bp, Homo sapien
cacagcacccctctggacgcagacc

SEQ ID NO: 2383214 - DNA, 25 bp, Homo sapien
ttaattcactaccagtctgctccct

SEQ ID NO: 2383215 - DNA, 25 bp, Homo sapien
tgcaaggcaatcagcaaccggctaa

SEQ ID NO: 2383216 - DNA, 25 bp, Homo sapien
catgcatgtagtcaggttctgcacc

SEQ ID NO: 2383217 - DNA, 25 bp, Homo sapien
cagaaccacagctgagagcctagca

SEQ ID NO: 2383218 - DNA, 25 bp, Homo sapien
aaccggctaactgagcacccggtgc

SEQ ID NO: 2383219 - DNA, 25 bp, Homo sapien
actgctgtgttaagatccaaaatct

SEQ ID NO: 2383220 - DNA, 25 bp, Homo sapien
cactgctgtgttaagatccaaaatc

SEQ ID NO: 2383221 - DNA, 25 bp, Homo sapien
tgctgtgttaagatccaaaatctgg

SEQ ID NO: 2383222 - DNA, 25 bp, Homo sapien
ctgtgttaagatccaaaatctggac

SEQ ID NO: 2383223 - DNA, 25 bp, Homo sapien
aaaggggcaggttgtttctgagaca

SEQ ID NO: 2383224 - DNA, 25 bp, Homo sapien
tgaggctttactccaagctgctgtt

SEQ ID NO: 2383225 - DNA, 25 bp, Homo sapien
tctgataactggtcacatacagaaa

SEQ ID NO: 2383226 - DNA, 25 bp, Homo sapien
ctgtcgggaatgtctgataactggt

SEQ ID NO: 2383227 - DNA, 25 bp, Homo sapien
cattgtcccgggcaaagaagtattc

SEQ ID NO: 2383228 - DNA, 25 bp, Homo sapien
agtcgttaggtaagtcattgtcccg

SEQ ID NO: 2383229 - DNA, 25 bp, Homo sapien
cacctgctagtggtgcttgcatgga

SEQ ID NO: 2383230 - DNA, 25 bp, Homo sapien
cctggagttgaagccctgctgtgcc

SEQ ID NO: 2383231 - DNA, 25 bp, Homo sapien
gctgtacctccggtaatgtggcact

SEQ ID NO: 2383232 - DNA, 25 bp, Homo sapien
tgtacctccggtaatgtggcactga

SEQ ID NO: 2383233 - DNA, 25 bp, Homo sapien
ttcagtgagctataagatgggacag

SEQ ID NO: 2383234 - DNA, 25 bp, Homo sapien
gagctataagatgggacaggtgtca

SEQ ID NO: 2383235 - DNA, 25 bp, Homo sapien
cgctgtcgtgagatctcttggcata

SEQ ID NO: 2383236 - DNA, 25 bp, Homo sapien
aaccatgacaggcaggcgctgtcgt

SEQ ID NO: 2383237 - DNA, 25 bp, Homo sapien
caggcaggcgctgtcgtgagatctc

SEQ ID NO: 2383238 - DNA, 25 bp, Homo sapien
gatctcttggcataagtcgttgagt

SEQ ID NO: 2383239 - DNA, 25 bp, Homo sapien
ctttgggcgcaagcttactggctta

SEQ ID NO: 2383240 - DNA, 25 bp, Homo sapien
actggcttattgctgtctactttag

SEQ ID NO: 2383241 - DNA, 25 bp, Homo sapien
gggcgcaagcttactggcttattgc

SEQ ID NO: 2383242 - DNA, 25 bp, Homo sapien
gcgcaagcttactggcttattgctg

SEQ ID NO: 2383243 - DNA, 25 bp, Homo sapien
caaaattcagctctgacgcggtcct

SEQ ID NO: 2383244 - DNA, 25 bp, Homo sapien
taaatgctagtaagtgggaagctcg

SEQ ID NO: 2383245 - DNA, 25 bp, Homo sapien
taacttgcaaccctccagtagctgg

SEQ ID NO: 2383246 - DNA, 25 bp, Homo sapien
gactggatgctgtcactaacttgca

SEQ ID NO: 2383247 - DNA, 25 bp, Homo sapien
tctagcaggaaaacgcccccatcag

SEQ ID NO: 2383248 - DNA, 25 bp, Homo sapien
tccaccctcgtctagcaggaaaacg

SEQ ID NO: 2383249 - DNA, 25 bp, Homo sapien
cttccaccctcgtctagcaggaaaa

SEQ ID NO: 2383250 - DNA, 25 bp, Homo sapien
gcccttccaccctcgtctagcagga

SEQ ID NO: 2383251 - DNA, 25 bp, Homo sapien
gagccggtacaacctcgtccttgag

SEQ ID NO: 2383252 - DNA, 25 bp, Homo sapien
aagaggaatgccgtgggtcagcacc

SEQ ID NO: 2383253 - DNA, 25 bp, Homo sapien
gtgcagttgagagccggtacaacct

SEQ ID NO: 2383254 - DNA, 25 bp, Homo sapien
caaggagcggtagccaaagaggaat

SEQ ID NO: 2383255 - DNA, 25 bp, Homo sapien
gaaaaacagcgctgcagactgagga

SEQ ID NO: 2383256 - DNA, 25 bp, Homo sapien
ctcgcctacacttaaaattcctcat

SEQ ID NO: 2383257 - DNA, 25 bp, Homo sapien
tcggctcctcgcctacacttaaaat

SEQ ID NO: 2383258 - DNA, 25 bp, Homo sapien
aacaagaccagaaacctcggctcct

SEQ ID NO: 2383259 - DNA, 25 bp, Homo sapien
cttgatacagaagaacaaaaccagg

SEQ ID NO: 2383260 - DNA, 25 bp, Homo sapien
tacagaagaacaaaaccagggccaa

SEQ ID NO: 2383261 - DNA, 25 bp, Homo sapien
caaaacccaaaatgctccatattta

SEQ ID NO: 2383262 - DNA, 25 bp, Homo sapien
tgctccatatttatgccgccatggt

SEQ ID NO: 2383263 - DNA, 25 bp, Homo sapien
tgcaggagacccatgtaatgcagat

SEQ ID NO: 2383264 - DNA, 25 bp, Homo sapien
tgccgaccatgggtataaaagccac

SEQ ID NO: 2383265 - DNA, 25 bp, Homo sapien
tagagacgtgtctgctagctgccga

SEQ ID NO: 2383266 - DNA, 25 bp, Homo sapien
ccacatattaatgacggcgaggttg

SEQ ID NO: 2383267 - DNA, 25 bp, Homo sapien
gggttttgttctttgagatgctcac

SEQ ID NO: 2383268 - DNA, 25 bp, Homo sapien
gaaacttgtgtttttctggttcata

SEQ ID NO: 2383269 - DNA, 25 bp, Homo sapien
ctgcctctttttggaaggaaacttg

SEQ ID NO: 2383270 - DNA, 25 bp, Homo sapien
ctggttcatagggttttgttctttg

SEQ ID NO: 2383271 - DNA, 25 bp, Homo sapien
caggttcatgtccatctgatggaag

SEQ ID NO: 2383272 - DNA, 25 bp, Homo sapien
gagctttgcttttgctgccaaccag

SEQ ID NO: 2383273 - DNA, 25 bp, Homo sapien
tgatggaagtgggacggaagccaga

SEQ ID NO: 2383274 - DNA, 25 bp, Homo sapien
cagctccagcgatgcagaaaatgtg

SEQ ID NO: 2383275 - DNA, 25 bp, Homo sapien
gccaagggcctttgatcctgcctgg

SEQ ID NO: 2383276 - DNA, 25 bp, Homo sapien
ggtgagcggcacacagcatcgcatt

SEQ ID NO: 2383277 - DNA, 25 bp, Homo sapien
catagggcactaagagaaggttcca

SEQ ID NO: 2383278 - DNA, 25 bp, Homo sapien
tctctggtaactcagtgggaactgc

SEQ ID NO: 2383279 - DNA, 25 bp, Homo sapien
ccacaaatcaattgcagaaatccct

SEQ ID NO: 2383280 - DNA, 25 bp, Homo sapien
tctttccatggtgcacccaaccact

SEQ ID NO: 2383281 - DNA, 25 bp, Homo sapien
caggtactttctcgactcatccaca

SEQ ID NO: 2383282 - DNA, 25 bp, Homo sapien
tacttgggactgcagcgtggctgaa

SEQ ID NO: 2383283 - DNA, 25 bp, Homo sapien
catgcccggcaagttcaatctttac

SEQ ID NO: 2383284 - DNA, 25 bp, Homo sapien
ccatgcccggcaagttcaatcttta

SEQ ID NO: 2383285 - DNA, 25 bp, Homo sapien
tgtggcatcaggtcccgttctgttg

SEQ ID NO: 2383286 - DNA, 25 bp, Homo sapien
cagtctctaagaacgaggatgccaa

SEQ ID NO: 2383287 - DNA, 25 bp, Homo sapien
ctgtgttccaaggacgccgcctgaa

SEQ ID NO: 2383288 - DNA, 25 bp, Homo sapien
gatgatggcatggatacctgtgttc

SEQ ID NO: 2383289 - DNA, 25 bp, Homo sapien
gaggaggaaaggtctcatcatggac

SEQ ID NO: 2383290 - DNA, 25 bp, Homo sapien
caggggtgatacgtggactgctgag

SEQ ID NO: 2383291 - DNA, 25 bp, Homo sapien
tggtcaggaggtgccttctgagatg

SEQ ID NO: 2383292 - DNA, 25 bp, Homo sapien
agcatgcaggggtgatacgtggact

SEQ ID NO: 2383293 - DNA, 25 bp, Homo sapien
ggtgatacgtggactgctgagcgag

SEQ ID NO: 2383294 - DNA, 25 bp, Homo sapien
tgtgtcaaggcgtggtgtcccaagt

SEQ ID NO: 2383295 - DNA, 25 bp, Homo sapien
cagctccgaccagggaatcactgaa

SEQ ID NO: 2383296 - DNA, 25 bp, Homo sapien
aatacagtccttacggtagcagcaa

SEQ ID NO: 2383297 - DNA, 25 bp, Homo sapien
cctctgttttctggccgtgtgtcaa

SEQ ID NO: 2383298 - DNA, 25 bp, Homo sapien
tgctcccaatgtggtagcccgtgga

SEQ ID NO: 2383299 - DNA, 25 bp, Homo sapien
tctgaaatatggagataaggcccag

SEQ ID NO: 2383300 - DNA, 25 bp, Homo sapien
gctctataaggcaagggtcatatgt

SEQ ID NO: 2383301 - DNA, 25 bp, Homo sapien
catgtgacatcagcagccaattgca

SEQ ID NO: 2383302 - DNA, 25 bp, Homo sapien
gggtgcaattctggacacagcgacc

SEQ ID NO: 2383303 - DNA, 25 bp, Homo sapien
catgttggggtgcaattctggacac

SEQ ID NO: 2383304 - DNA, 25 bp, Homo sapien
gacacagcgaccatccatggttgct

SEQ ID NO: 2383305 - DNA, 25 bp, Homo sapien
aattctggacacagcgaccatccat

SEQ ID NO: 2383306 - DNA, 25 bp, Homo sapien
cggagggtagacagctctacattat

SEQ ID NO: 2383307 - DNA, 25 bp, Homo sapien
gagggtagacagctctacattatcc

SEQ ID NO: 2383308 - DNA, 25 bp, Homo sapien
cactcgagcttcaccctcacatggt

SEQ ID NO: 2383309 - DNA, 25 bp, Homo sapien
atttccctaggatcaggcactcgag

SEQ ID NO: 2383310 - DNA, 25 bp, Homo sapien
agaccttgctgtccggttctgaggg

SEQ ID NO: 2383311 - DNA, 25 bp, Homo sapien
tgcctgtggataaggcagtcacaga

SEQ ID NO: 2383312 - DNA, 25 bp, Homo sapien
gctctgcagagttgtcacctttagt

SEQ ID NO: 2383313 - DNA, 25 bp, Homo sapien
ttggcctttccaacgtgcccagctc

SEQ ID NO: 2383314 - DNA, 25 bp, Homo sapien
cggggctcacgggtctgagcactca

SEQ ID NO: 2383315 - DNA, 25 bp, Homo sapien
acctcctgcttgacgccccactgcc

SEQ ID NO: 2383316 - DNA, 25 bp, Homo sapien
tctgagcactcaggatgttcacccc

SEQ ID NO: 2383317 - DNA, 25 bp, Homo sapien
cacggtggccgtcacgtgctttccg

SEQ ID NO: 2383318 - DNA, 25 bp, Homo sapien
aactgtttgggacaccagattttct

SEQ ID NO: 2383319 - DNA, 25 bp, Homo sapien
gtttgtgaactgtttgggacaccag

SEQ ID NO: 2383320 - DNA, 25 bp, Homo sapien
atggtgacggttggcatttgagttt

SEQ ID NO: 2383321 - DNA, 25 bp, Homo sapien
ccttcttggggtaatgatggtgacg

SEQ ID NO: 2383322 - DNA, 25 bp, Homo sapien
tgccaaaacattcaggatggctgac

SEQ ID NO: 2383323 - DNA, 25 bp, Homo sapien
gactgtggaaactcatgcacaatgc

SEQ ID NO: 2383324 - DNA, 25 bp, Homo sapien
caggatggctgactgtggaaactca

SEQ ID NO: 2383325 - DNA, 25 bp, Homo sapien
tcctcttgtccacagtctgccaaaa

SEQ ID NO: 2383326 - DNA, 25 bp, Homo sapien
ctctcagagtcctgcagagaggctc

SEQ ID NO: 2383327 - DNA, 25 bp, Homo sapien
atccagccagtgcaggctctcagag

SEQ ID NO: 2383328 - DNA, 25 bp, Homo sapien
gctctcagagtcctgcagagaggct

SEQ ID NO: 2383329 - DNA, 25 bp, Homo sapien
ctgtgagtgccatccagccagtgca

SEQ ID NO: 2383330 - DNA, 25 bp, Homo sapien
aagatgcagaccgaggaaaggagat

SEQ ID NO: 2383331 - DNA, 25 bp, Homo sapien
tgaaaaaagatgcagaccgaggaaa

SEQ ID NO: 2383332 - DNA, 25 bp, Homo sapien
aaaaaagatgcagaccgaggaaagg

SEQ ID NO: 2383333 - DNA, 25 bp, Homo sapien
atgcagaccgaggaaaggagatgaa

SEQ ID NO: 2383334 - DNA, 25 bp, Homo sapien
gtctcccacatggcccgtaaccagt

SEQ ID NO: 2383335 - DNA, 25 bp, Homo sapien
tggcccgtaaccagtcctgggcaca

SEQ ID NO: 2383336 - DNA, 25 bp, Homo sapien
cacatggcccgtaaccagtcctggg

SEQ ID NO: 2383337 - DNA, 25 bp, Homo sapien
gcccgtaaccagtcctgggcacaga

SEQ ID NO: 2383338 - DNA, 25 bp, Homo sapien
cctctaggggactgatgaagtatcc

SEQ ID NO: 2383339 - DNA, 25 bp, Homo sapien
gggactgatgaagtatcccaggaaa

SEQ ID NO: 2383340 - DNA, 25 bp, Homo sapien
caacgtgcatcccttgagtaaggtt

SEQ ID NO: 2383341 - DNA, 25 bp, Homo sapien
gatgaagtatcccaggaaaggtttc

SEQ ID NO: 2383342 - DNA, 25 bp, Homo sapien
ctggacaatacaggcaatcaacctc

SEQ ID NO: 2383343 - DNA, 25 bp, Homo sapien
tttctaagtccctccaaaagaggca

SEQ ID NO: 2383344 - DNA, 25 bp, Homo sapien
taagaaccggagctcagatgcgtgt

SEQ ID NO: 2383345 - DNA, 25 bp, Homo sapien
gcgtctgtgcgatgtgctctgttta

SEQ ID NO: 2383346 - DNA, 25 bp, Homo sapien
aaacagctggccttctttctaagtc

SEQ ID NO: 2383347 - DNA, 25 bp, Homo sapien
agagagtccctgaagcacgatgctg

SEQ ID NO: 2383348 - DNA, 25 bp, Homo sapien
cagagagtccctgaagcacgatgct

SEQ ID NO: 2383349 - DNA, 25 bp, Homo sapien
gagagtccctgaagcacgatgctgg

SEQ ID NO: 2383350 - DNA, 25 bp, Homo sapien
gtttgccacaaacccctatggagtc

SEQ ID NO: 2383351 - DNA, 25 bp, Homo sapien
tcaacgtttgccacaaacccctatg

SEQ ID NO: 2383352 - DNA, 25 bp, Homo sapien
caaacccctatggagtccaggaagc

SEQ ID NO: 2383353 - DNA, 25 bp, Homo sapien
gccacaaacccctatggagtccagg

SEQ ID NO: 2383354 - DNA, 25 bp, Homo sapien
ggagtaaaggccagagccaaccagc

SEQ ID NO: 2383355 - DNA, 25 bp, Homo sapien
ttgccctgagggtgggagtaaaggc

SEQ ID NO: 2383356 - DNA, 25 bp, Homo sapien
tgccctgagggtgggagtaaaggcc

SEQ ID NO: 2383357 - DNA, 25 bp, Homo sapien
gagggtgggagtaaaggccagagcc

SEQ ID NO: 2383358 - DNA, 25 bp, Homo sapien
agactgggcttctgatggcattgca

SEQ ID NO: 2383359 - DNA, 25 bp, Homo sapien
gactgggcttctgatggcattgcag

SEQ ID NO: 2383360 - DNA, 25 bp, Homo sapien
actgggcttctgatggcattgcaga

SEQ ID NO: 2383361 - DNA, 25 bp, Homo sapien
gagactgggcttctgatggcattgc

SEQ ID NO: 2383362 - DNA, 25 bp, Homo sapien
tattgggatagtctaactggttgac

SEQ ID NO: 2383363 - DNA, 25 bp, Homo sapien
ccattggctgggcttgcaagtacta

SEQ ID NO: 2383364 - DNA, 25 bp, Homo sapien
gcaagtactagcacaccatcttgaa

SEQ ID NO: 2383365 - DNA, 25 bp, Homo sapien
ggttgacggtatcttcctggatcac

SEQ ID NO: 2383366 - DNA, 25 bp, Homo sapien
agcagggaataataaggaccactta

SEQ ID NO: 2383367 - DNA, 25 bp, Homo sapien
tacacacccctggtgagaaaatact

SEQ ID NO: 2383368 - DNA, 25 bp, Homo sapien
aaaatactgcattggagatggaaca

SEQ ID NO: 2383369 - DNA, 25 bp, Homo sapien
gaccacttatgaagaattaatgtga

SEQ ID NO: 2383370 - DNA, 25 bp, Homo sapien
tccacaagccgctctagtgtgggct

SEQ ID NO: 2383371 - DNA, 25 bp, Homo sapien
tcaggttttactactctctccacaa

SEQ ID NO: 2383372 - DNA, 25 bp, Homo sapien
gttttactactctctccacaagccg

SEQ ID NO: 2383373 - DNA, 25 bp, Homo sapien
aagccgctctagtgtgggctctgtc

SEQ ID NO: 2383374 - DNA, 25 bp, Homo sapien
caatgtgaccacagtgtgagtgtgt

SEQ ID NO: 2383375 - DNA, 25 bp, Homo sapien
ctcaatgtgaccacagtgtgagtgt

SEQ ID NO: 2383376 - DNA, 25 bp, Homo sapien
ctaagtgtcagaatgcgtcttgcat

SEQ ID NO: 2383377 - DNA, 25 bp, Homo sapien
atgcgtcttgcatcttttctcaatg

SEQ ID NO: 2383378 - DNA, 25 bp, Homo sapien
cgcgaagaaggtggtatttcaagcc

SEQ ID NO: 2383379 - DNA, 25 bp, Homo sapien
gtcctcatttgaggggagccgcgaa

SEQ ID NO: 2383380 - DNA, 25 bp, Homo sapien
gagccgcgaagaaggtggtatttca

SEQ ID NO: 2383381 - DNA, 25 bp, Homo sapien
gaagaaggtggtatttcaagccttc

SEQ ID NO: 2383382 - DNA, 25 bp, Homo sapien
cagccctcgctggtgtaacttgtgg

SEQ ID NO: 2383383 - DNA, 25 bp, Homo sapien
ggatgaagacgtttgaatgctgctc

SEQ ID NO: 2383384 - DNA, 25 bp, Homo sapien
tcagcacacgttgagagagggaacc

SEQ ID NO: 2383385 - DNA, 25 bp, Homo sapien
ctctgcaggagtgaaaccacggatg

SEQ ID NO: 2383386 - DNA, 25 bp, Homo sapien
gcagtcaccaccgaagctcgttccc

SEQ ID NO: 2383387 - DNA, 25 bp, Homo sapien
ccgaagctcgttcccttcagcagcc

SEQ ID NO: 2383388 - DNA, 25 bp, Homo sapien
caccgaagctcgttcccttcagcag

SEQ ID NO: 2383389 - DNA, 25 bp, Homo sapien
caccaccgaagctcgttcccttcag

SEQ ID NO: 2383390 - DNA, 25 bp, Homo sapien
tcctcagccgatgcctcaggaggtg

SEQ ID NO: 2383391 - DNA, 25 bp, Homo sapien
tgtcgaaggctatcacaccagatcc

SEQ ID NO: 2383392 - DNA, 25 bp, Homo sapien
gggaaaacccagtggtgcctcatgc

SEQ ID NO: 2383393 - DNA, 25 bp, Homo sapien
gagacacctgaagcaataaaaaggg

SEQ ID NO: 2383394 - DNA, 25 bp, Homo sapien
agagaagaaggaactagggtgcatg

SEQ ID NO: 2383395 - DNA, 25 bp, Homo sapien
catggaggctctaaagaccccacaa

SEQ ID NO: 2383396 - DNA, 25 bp, Homo sapien
ggtgcatggaggctctaaagacccc

SEQ ID NO: 2383397 - DNA, 25 bp, Homo sapien
gaactagggtgcatggaggctctaa

SEQ ID NO: 2383398 - DNA, 25 bp, Homo sapien
cccaaagcgggcactgagtccagcc

SEQ ID NO: 2383399 - DNA, 25 bp, Homo sapien
agacatcacagtgggcttcccagtg

SEQ ID NO: 2383400 - DNA, 25 bp, Homo sapien
agtgctgcaatggtgggccctaggc

SEQ ID NO: 2383401 - DNA, 25 bp, Homo sapien
ccttcagatccaattaacatgctgg

SEQ ID NO: 2383402 - DNA, 25 bp, Homo sapien
ccttatctgccactgggtaccagta

SEQ ID NO: 2383403 - DNA, 25 bp, Homo sapien
gggtaccagtactggtgctgtccag

SEQ ID NO: 2383404 - DNA, 25 bp, Homo sapien
tctgccactgggtaccagtactggt

SEQ ID NO: 2383405 - DNA, 25 bp, Homo sapien
cactgggtaccagtactggtgctgt

SEQ ID NO: 2383406 - DNA, 25 bp, Homo sapien
cggacacggcgatgtctgtggtccc

SEQ ID NO: 2383407 - DNA, 25 bp, Homo sapien
atagccaagggaacgatgcccacca

SEQ ID NO: 2383408 - DNA, 25 bp, Homo sapien
tggctgacaaagatctcggacacgg

SEQ ID NO: 2383409 - DNA, 25 bp, Homo sapien
caacctcattgaataaactgctgct

SEQ ID NO: 2383410 - DNA, 25 bp, Homo sapien
tgggcacaggaaccttatgtctgtt

SEQ ID NO: 2383411 - DNA, 25 bp, Homo sapien
gatggtcacaggattaatgttcaca

SEQ ID NO: 2383412 - DNA, 25 bp, Homo sapien
tcacaagataatgcctggggtgccg

SEQ ID NO: 2383413 - DNA, 25 bp, Homo sapien
gtctgttatgctcgttgctgtttcc

SEQ ID NO: 2383414 - DNA, 25 bp, Homo sapien
ctgctgtctggggttgaaggcagca

SEQ ID NO: 2383415 - DNA, 25 bp, Homo sapien
cagcaggacaggggacccagggctc

SEQ ID NO: 2383416 - DNA, 25 bp, Homo sapien
tgtctggggttgaaggcagcaggac

SEQ ID NO: 2383417 - DNA, 25 bp, Homo sapien
agcaggacaggggacccagggctca

SEQ ID NO: 2383418 - DNA, 25 bp, Homo sapien
gcactttctgggcacggaggcctga

SEQ ID NO: 2383419 - DNA, 25 bp, Homo sapien
tttctgggcacggaggcctgactcc

SEQ ID NO: 2383420 - DNA, 25 bp, Homo sapien
cagctgctggccgtgagctgtccag

SEQ ID NO: 2383421 - DNA, 25 bp, Homo sapien
tggccgtgagctgtccagcagtttc

SEQ ID NO: 2383422 - DNA, 25 bp, Homo sapien
ggctgatcgcaaacccctgacctcg

SEQ ID NO: 2383423 - DNA, 25 bp, Homo sapien
agactgagtctcaccatcttggcca

SEQ ID NO: 2383424 - DNA, 25 bp, Homo sapien
gctgatcgcaaacccctgacctcgt

SEQ ID NO: 2383425 - DNA, 25 bp, Homo sapien
ttagtagagactgagtctcaccatc

SEQ ID NO: 2383426 - DNA, 25 bp, Homo sapien
agagctaagagggttatccagtcca

SEQ ID NO: 2383427 - DNA, 25 bp, Homo sapien
gagggttatccagtccagttcttta

SEQ ID NO: 2383428 - DNA, 25 bp, Homo sapien
taagagggttatccagtccagttct

SEQ ID NO: 2383429 - DNA, 25 bp, Homo sapien
gctaagagggttatccagtccagtt

SEQ ID NO: 2383430 - DNA, 25 bp, Homo sapien
ctgacatattggacaaataaaagcc

SEQ ID NO: 2383431 - DNA, 25 bp, Homo sapien
ggtgttactgacatattggacaaat

SEQ ID NO: 2383432 - DNA, 25 bp, Homo sapien
tactgacatattggacaaataaaag

SEQ ID NO: 2383433 - DNA, 25 bp, Homo sapien
gtggtgttactgacatattggacaa

SEQ ID NO: 2383434 - DNA, 25 bp, Homo sapien
ctgtcgcggacttttctgaacaaag

SEQ ID NO: 2383435 - DNA, 25 bp, Homo sapien
aaagaacaagctgcagctcacacac

SEQ ID NO: 2383436 - DNA, 25 bp, Homo sapien
ctgaacaaagaacaagctgcagctc

SEQ ID NO: 2383437 - DNA, 25 bp, Homo sapien
aacaaagaacaagctgcagctcaca

SEQ ID NO: 2383438 - DNA, 25 bp, Homo sapien
cattcatccaatgctgatggactga

SEQ ID NO: 2383439 - DNA, 25 bp, Homo sapien
gctgatggactgagctaaacacact

SEQ ID NO: 2383440 - DNA, 25 bp, Homo sapien
ctgatggactgagctaaacacactc

SEQ ID NO: 2383441 - DNA, 25 bp, Homo sapien
tggactgagctaaacacactcacat

SEQ ID NO: 2383442 - DNA, 25 bp, Homo sapien
caatttgagggcacggcgctttaag

SEQ ID NO: 2383443 - DNA, 25 bp, Homo sapien
cagacaactgcagatgtgaagagac

SEQ ID NO: 2383444 - DNA, 25 bp, Homo sapien
gcgctttaagacgaaggccttgaat

SEQ ID NO: 2383445 - DNA, 25 bp, Homo sapien
gtcgttgtctgaagagccagccttg

SEQ ID NO: 2383446 - DNA, 25 bp, Homo sapien
tgctcggaagaaggcttacactgct

SEQ ID NO: 2383447 - DNA, 25 bp, Homo sapien
ccatccggctctgatgagtttagca

SEQ ID NO: 2383448 - DNA, 25 bp, Homo sapien
tatgctgctgcttagcactgctcgg

SEQ ID NO: 2383449 - DNA, 25 bp, Homo sapien
gatgccgcttccctttatgctgctg

SEQ ID NO: 2383450 - DNA, 25 bp, Homo sapien
acagagaccaccttgataggcatgg

SEQ ID NO: 2383451 - DNA, 25 bp, Homo sapien
tgtctttcctgtgagtacggcggtg

SEQ ID NO: 2383452 - DNA, 25 bp, Homo sapien
tttgataacgtcctcgtctgtggac

SEQ ID NO: 2383453 - DNA, 25 bp, Homo sapien
actccaccgactctgagatgtccat

SEQ ID NO: 2383454 - DNA, 25 bp, Homo sapien
taagcctctgtatagttgaacgtca

SEQ ID NO: 2383455 - DNA, 25 bp, Homo sapien
tctaaatgtccctagcaaacgggat

SEQ ID NO: 2383456 - DNA, 25 bp, Homo sapien
gatgtccaagtgaagttcccaccgg

SEQ ID NO: 2383457 - DNA, 25 bp, Homo sapien
ccctaaccaggttggcatgatgtga

SEQ ID NO: 2383458 - DNA, 25 bp, Homo sapien
ctctgtttcaatagcgttatatgtc

SEQ ID NO: 2383459 - DNA, 25 bp, Homo sapien
gggcgggcgatgctctgtttcaata

SEQ ID NO: 2383460 - DNA, 25 bp, Homo sapien
ttttcttcttgcatccgttttctga

SEQ ID NO: 2383461 - DNA, 25 bp, Homo sapien
tcaatagcgttatatgtctgatatt

SEQ ID NO: 2383462 - DNA, 25 bp, Homo sapien
gggcctggaggtaggaataattgtg

SEQ ID NO: 2383463 - DNA, 25 bp, Homo sapien
gaggtaggaataattgtggcctgtt

SEQ ID NO: 2383464 - DNA, 25 bp, Homo sapien
tgagggcctggaggtaggaataatt

SEQ ID NO: 2383465 - DNA, 25 bp, Homo sapien
ctggaggtaggaataattgtggcct

SEQ ID NO: 2383466 - DNA, 25 bp, Homo sapien
ctttcctctcgttgccggtacctgt

SEQ ID NO: 2383467 - DNA, 25 bp, Homo sapien
gcagttctctcattactaaagtgca

SEQ ID NO: 2383468 - DNA, 25 bp, Homo sapien
gtggccagagctgaagttttacatt

SEQ ID NO: 2383469 - DNA, 25 bp, Homo sapien
caatgtgcccttcccttgcagtggc

SEQ ID NO: 2383470 - DNA, 25 bp, Homo sapien
gaggggccaccgtttcaggacattc

SEQ ID NO: 2383471 - DNA, 25 bp, Homo sapien
aggggccaccgtttcaggacattca

SEQ ID NO: 2383472 - DNA, 25 bp, Homo sapien
ggggccaccgtttcaggacattcac

SEQ ID NO: 2383473 - DNA, 25 bp, Homo sapien
ctccaaggatgcaaagggcccgtag

SEQ ID NO: 2383474 - DNA, 25 bp, Homo sapien
cctccaaggatgcaaagggcccgta

SEQ ID NO: 2383475 - DNA, 25 bp, Homo sapien
agcctccaaggatgcaaagggcccg

SEQ ID NO: 2383476 - DNA, 25 bp, Homo sapien
gcctccaaggatgcaaagggcccgt

SEQ ID NO: 2383477 - DNA, 25 bp, Homo sapien
gcgctcaggtactggtatgtgaagt

SEQ ID NO: 2383478 - DNA, 25 bp, Homo sapien
caaagatgtagtcacagcgctcaga

SEQ ID NO: 2383479 - DNA, 25 bp, Homo sapien
tatctggctgagctccgtgtcagag

SEQ ID NO: 2383480 - DNA, 25 bp, Homo sapien
tatgtgaagttcaccaccgcatcca

SEQ ID NO: 2383481 - DNA, 25 bp, Homo sapien
actaagcaggtagttcggctggccc

SEQ ID NO: 2383482 - DNA, 25 bp, Homo sapien
gcttcatgaagtctgccaccaggtg

SEQ ID NO: 2383483 - DNA, 25 bp, Homo sapien
caccaggtgagtgatgtcgaactgc

SEQ ID NO: 2383484 - DNA, 25 bp, Homo sapien
ggcgccctcagacacaaactgggtg

SEQ ID NO: 2383485 - DNA, 25 bp, Homo sapien
gatgttatcccctttaccagtaata

SEQ ID NO: 2383486 - DNA, 25 bp, Homo sapien
ctgtttccagatgttatccccttta

SEQ ID NO: 2383487 - DNA, 25 bp, Homo sapien
tccagatgttatcccctttaccagt

SEQ ID NO: 2383488 - DNA, 25 bp, Homo sapien
ttccagatgttatcccctttaccag

SEQ ID NO: 2383489 - DNA, 25 bp, Homo sapien
ggtaaagggcgacagacagcccagc

SEQ ID NO: 2383490 - DNA, 25 bp, Homo sapien
tacggccttgctgttttctgcgttg

SEQ ID NO: 2383491 - DNA, 25 bp, Homo sapien
tgtgaccacagctgttacggccttg

SEQ ID NO: 2383492 - DNA, 25 bp, Homo sapien
tggccaagtctgtcaccgatacttt

SEQ ID NO: 2383493 - DNA, 25 bp, Homo sapien
taatgcctcaacctcatgcacaaat

SEQ ID NO: 2383494 - DNA, 25 bp, Homo sapien
caatccaataagtccttctaatgcc

SEQ ID NO: 2383495 - DNA, 25 bp, Homo sapien
tgtccatatcagctgatgaatcaca

SEQ ID NO: 2383496 - DNA, 25 bp, Homo sapien
ctcctttcatttttcgatcctactt

SEQ ID NO: 2383497 - DNA, 25 bp, Homo sapien
tttctagaccggcatacagtcgccc

SEQ ID NO: 2383498 - DNA, 25 bp, Homo sapien
gatggctcagcgatgttggtgctca

SEQ ID NO: 2383499 - DNA, 25 bp, Homo sapien
cctacagcaagatgtgccaaggagt

SEQ ID NO: 2383500 - DNA, 25 bp, Homo sapien
gaatccatgtggttgtgcctacagc

SEQ ID NO: 2383501 - DNA, 25 bp, Homo sapien
ctgtggtatgcgaattgggagaaaa

SEQ ID NO: 2383502 - DNA, 25 bp, Homo sapien
gggtgggataactacctctgtggta

SEQ ID NO: 2383503 - DNA, 25 bp, Homo sapien
tacctctgtggtatgcgaattggga

SEQ ID NO: 2383504 - DNA, 25 bp, Homo sapien
gataactacctctgtggtatgcgaa

SEQ ID NO: 2383505 - DNA, 25 bp, Homo sapien
cactggatggagatgtcgccactca

SEQ ID NO: 2383506 - DNA, 25 bp, Homo sapien
gcttgtgtgcgctctgagcactgga

SEQ ID NO: 2383507 - DNA, 25 bp, Homo sapien
ggagatgtcgccactcaaaaccaaa

SEQ ID NO: 2383508 - DNA, 25 bp, Homo sapien
tctgagcactggatggagatgtcgc

SEQ ID NO: 2383509 - DNA, 25 bp, Homo sapien
tattgcttgaatcagtcagccggtg

SEQ ID NO: 2383510 - DNA, 25 bp, Homo sapien
tgaccctgttgagccattgcagatg

SEQ ID NO: 2383511 - DNA, 25 bp, Homo sapien
tcagccggtgcatgttcacagacaa

SEQ ID NO: 2383512 - DNA, 25 bp, Homo sapien
gaggctccgggtggctttatccaca

SEQ ID NO: 2383513 - DNA, 25 bp, Homo sapien
tcggcgatcgtcatgtccactcgga

SEQ ID NO: 2383514 - DNA, 25 bp, Homo sapien
cttgcgtttagatttctggcaggcc

SEQ ID NO: 2383515 - DNA, 25 bp, Homo sapien
ccacaacgggccacctgggagagcg

SEQ ID NO: 2383516 - DNA, 25 bp, Homo sapien
gaagtccttggtgtcgtagatgtcc

SEQ ID NO: 2383517 - DNA, 25 bp, Homo sapien
ggagtcagcatcgttctgtccgaac

SEQ ID NO: 2383518 - DNA, 25 bp, Homo sapien
tcgctggcgtggttcttgatctcat

SEQ ID NO: 2383519 - DNA, 25 bp, Homo sapien
gagctgccatagaggtgcccatctt

SEQ ID NO: 2383520 - DNA, 25 bp, Homo sapien
tcaccactttgttgtccagcaggga

SEQ ID NO: 2383521 - DNA, 25 bp, Homo sapien
gaatctggctctgcacgtgcttgtg

SEQ ID NO: 2383522 - DNA, 25 bp, Homo sapien
gctgctgacgatggagttcaccgtg

SEQ ID NO: 2383523 - DNA, 25 bp, Homo sapien
caggagttcggcctcattgccaagc

SEQ ID NO: 2383524 - DNA, 25 bp, Homo sapien
tctatgatggtggtgtgctcgtcct

SEQ ID NO: 2383525 - DNA, 25 bp, Homo sapien
cttgatacaaaaacgtcttttcctg

SEQ ID NO: 2383526 - DNA, 25 bp, Homo sapien
agtaacttggtctgcactccccatg

SEQ ID NO: 2383527 - DNA, 25 bp, Homo sapien
tttggtagcttgtctgtagtatgtt

SEQ ID NO: 2383528 - DNA, 25 bp, Homo sapien
ttaactgctaaaaatcccttgatac

SEQ ID NO: 2383529 - DNA, 25 bp, Homo sapien
gagggctccctccaattgtacaaaa

SEQ ID NO: 2383530 - DNA, 25 bp, Homo sapien
tgtgatagaccaagcccaccaggtt

SEQ ID NO: 2383531 - DNA, 25 bp, Homo sapien
tctgattacacctgggcgtggcctc

SEQ ID NO: 2383532 - DNA, 25 bp, Homo sapien
taggaacatccccacgatgacaggg

SEQ ID NO: 2383533 - DNA, 25 bp, Homo sapien
tgacaattggcatcacaggtataaa

SEQ ID NO: 2383534 - DNA, 25 bp, Homo sapien
aataaacacccctggcatctttgtg

SEQ ID NO: 2383535 - DNA, 25 bp, Homo sapien
tggagcacacggagaactggagtca

SEQ ID NO: 2383536 - DNA, 25 bp, Homo sapien
gcatgagggctgtcaggcatcttcc

SEQ ID NO: 2383537 - DNA, 25 bp, Homo sapien
tgtggatgatggtgagtctatgaat

SEQ ID NO: 2383538 - DNA, 25 bp, Homo sapien
gagtgtatgaatgaacgccctcctg

SEQ ID NO: 2383539 - DNA, 25 bp, Homo sapien
gtgtatgaatgaacgccctcctgct

SEQ ID NO: 2383540 - DNA, 25 bp, Homo sapien
agtgtatgaatgaacgccctcctgc

SEQ ID NO: 2383541 - DNA, 25 bp, Homo sapien
gaacttgagctgtttgaccagtcac

SEQ ID NO: 2383542 - DNA, 25 bp, Homo sapien
gagctgcagatttcgagtatgtcgc

SEQ ID NO: 2383543 - DNA, 25 bp, Homo sapien
tcagcgatcaagagccaatggcgtg

SEQ ID NO: 2383544 - DNA, 25 bp, Homo sapien
cactgaaacttgcatgttgcctgga

SEQ ID NO: 2383545 - DNA, 25 bp, Homo sapien
tgccagtgttgggacagcagtgaca

SEQ ID NO: 2383546 - DNA, 25 bp, Homo sapien
tctcagtagcgtcaaatgccagtgt

SEQ ID NO: 2383547 - DNA, 25 bp, Homo sapien
gcagtgacagctagtgccaggctcc

SEQ ID NO: 2383548 - DNA, 25 bp, Homo sapien
ggcctgccagctttagctcgggaag

SEQ ID NO: 2383549 - DNA, 25 bp, Homo sapien
tatccatgctgttgtcggtgggtgc

SEQ ID NO: 2383550 - DNA, 25 bp, Homo sapien
tgagcatctcccctgtacttctgag

SEQ ID NO: 2383551 - DNA, 25 bp, Homo sapien
acttagcacttctgtctgtgagcat

SEQ ID NO: 2383552 - DNA, 25 bp, Homo sapien
tcgtacgagccgtcacgaggcattt

SEQ ID NO: 2383553 - DNA, 25 bp, Homo sapien
ttgtgtctgtccaattcgtcgtgtc

SEQ ID NO: 2383554 - DNA, 25 bp, Homo sapien
caattcgtcgtgtcgtcccggacat

SEQ ID NO: 2383555 - DNA, 25 bp, Homo sapien
tgtccaattcgtcgtgtcgtcccgg

SEQ ID NO: 2383556 - DNA, 25 bp, Homo sapien
tctgtccaattcgtcgtgtcgtccc

SEQ ID NO: 2383557 - DNA, 25 bp, Homo sapien
tgaggtgatacagcttcttaaaaag

SEQ ID NO: 2383558 - DNA, 25 bp, Homo sapien
ccttcgtctgcggttgtttttggcg

SEQ ID NO: 2383559 - DNA, 25 bp, Homo sapien
tgtgcgtctgtgtctagaatcggcc

SEQ ID NO: 2383560 - DNA, 25 bp, Homo sapien
ctgtgtcattgagcacgtgtgcgtc

SEQ ID NO: 2383561 - DNA, 25 bp, Homo sapien
aagaggctgatgttggtcctctgac

SEQ ID NO: 2383562 - DNA, 25 bp, Homo sapien
taaaagaggctgatgttggtcctct

SEQ ID NO: 2383563 - DNA, 25 bp, Homo sapien
ttaaaagaggctgatgttggtcctc

SEQ ID NO: 2383564 - DNA, 25 bp, Homo sapien
aaagaggctgatgttggtcctctga

SEQ ID NO: 2383565 - DNA, 25 bp, Homo sapien
ctgtgggaaaggagacgtccttggt

SEQ ID NO: 2383566 - DNA, 25 bp, Homo sapien
tttccggaggcttttccagtagata

SEQ ID NO: 2383567 - DNA, 25 bp, Homo sapien
ttccagtagatacttggtttgggct

SEQ ID NO: 2383568 - DNA, 25 bp, Homo sapien
tcagtttcataaatggctgaatcac

SEQ ID NO: 2383569 - DNA, 25 bp, Homo sapien
tgtgccccgtcaccacactggttga

SEQ ID NO: 2383570 - DNA, 25 bp, Homo sapien
tgcggttcagcagagtgcgcctgca

SEQ ID NO: 2383571 - DNA, 25 bp, Homo sapien
cacactggttgatgccaaggaaggg

SEQ ID NO: 2383572 - DNA, 25 bp, Homo sapien
gctgtctgcaggaagtctttgcact

SEQ ID NO: 2383573 - DNA, 25 bp, Homo sapien
cgccagagtaatgggtaagcactta

SEQ ID NO: 2383574 - DNA, 25 bp, Homo sapien
ggccagagcgttttcatcaccaagc

SEQ ID NO: 2383575 - DNA, 25 bp, Homo sapien
gctttgtcactggttatgcgatccc

SEQ ID NO: 2383576 - DNA, 25 bp, Homo sapien
tcccagaagcgaagtggagagcgcc

SEQ ID NO: 2383577 - DNA, 25 bp, Homo sapien
tgggcgtggccaccgtcaaggccaa

SEQ ID NO: 2383578 - DNA, 25 bp, Homo sapien
ctggcgctctacctgctgggcatgc

SEQ ID NO: 2383579 - DNA, 25 bp, Homo sapien
ttctacggcatcacgtccaacctgg

SEQ ID NO: 2383580 - DNA, 25 bp, Homo sapien
caacctggtgctattcctgaacggg

SEQ ID NO: 2383581 - DNA, 25 bp, Homo sapien
tcaaagtgccaacgatgcacgggtt

SEQ ID NO: 2383582 - DNA, 25 bp, Homo sapien
gacacgcagtgatccagaataccgg

SEQ ID NO: 2383583 - DNA, 25 bp, Homo sapien
gagcagccgccgtctcagtgtgagt

SEQ ID NO: 2383584 - DNA, 25 bp, Homo sapien
tgctgaacatcgtgcaacgcacagg

SEQ ID NO: 2383585 - DNA, 25 bp, Homo sapien
gtgatgccctcactgctgaatgcag

SEQ ID NO: 2383586 - DNA, 25 bp, Homo sapien
ctgagggccatttttgggcggcact

SEQ ID NO: 2383587 - DNA, 25 bp, Homo sapien
gcagcagctgtggatcacgattcct

SEQ ID NO: 2383588 - DNA, 25 bp, Homo sapien
gggcggcactctttcactccactat

SEQ ID NO: 2383589 - DNA, 25 bp, Homo sapien
tctcaaatgaggcaatgcaatcgga

SEQ ID NO: 2383590 - DNA, 25 bp, Homo sapien
tgtattgagcactgtttggacactg

SEQ ID NO: 2383591 - DNA, 25 bp, Homo sapien
gaagcagcactggactcataattag

SEQ ID NO: 2383592 - DNA, 25 bp, Homo sapien
tgagcgtcaaacctatcagtcttag

SEQ ID NO: 2383593 - DNA, 25 bp, Homo sapien
ttcccagaacatagccaacacgggc

SEQ ID NO: 2383594 - DNA, 25 bp, Homo sapien
ttttattggtaagtctgggcacaca

SEQ ID NO: 2383595 - DNA, 25 bp, Homo sapien
caagtgactaattgccctccagaag

SEQ ID NO: 2383596 - DNA, 25 bp, Homo sapien
tccagaagagctgtgccggtttact

SEQ ID NO: 2383597 - DNA, 25 bp, Homo sapien
actcatcatgtgatttcgggcatgc

SEQ ID NO: 2383598 - DNA, 25 bp, Homo sapien
gctgggcaatctaggatgatttcct

SEQ ID NO: 2383599 - DNA, 25 bp, Homo sapien
ggactaccagtgagcaccactacac

SEQ ID NO: 2383600 - DNA, 25 bp, Homo sapien
tttcgggcatgctgggcaatctagg

SEQ ID NO: 2383601 - DNA, 25 bp, Homo sapien
gactaggaccagcagtgaccacgtt

SEQ ID NO: 2383602 - DNA, 25 bp, Homo sapien
tcaccagggtagccgcggtctgttt

SEQ ID NO: 2383603 - DNA, 25 bp, Homo sapien
tgaccacagaccattctcacgggga

SEQ ID NO: 2383604 - DNA, 25 bp, Homo sapien
cacgttcccttccacagggaacagg

SEQ ID NO: 2383605 - DNA, 25 bp, Homo sapien
ggccggcgcagacgcggacggcggg

SEQ ID NO: 2383606 - DNA, 25 bp, Homo sapien
ccggggccggcgcagacgcggacgg

SEQ ID NO: 2383607 - DNA, 25 bp, Homo sapien
aggccgcgccccagctcgcaggttc

SEQ ID NO: 2383608 - DNA, 25 bp, Homo sapien
gcggctgggtctgtcccgcccgccc

SEQ ID NO: 2383609 - DNA, 25 bp, Homo sapien
cgtgaccgcgttgccggtgtgtggc

SEQ ID NO: 2383610 - DNA, 25 bp, Homo sapien
cgaacgcgctgggccgtgaccgcgt

SEQ ID NO: 2383611 - DNA, 25 bp, Homo sapien
accgcgttgccggtgtgtggccgca

SEQ ID NO: 2383612 - DNA, 25 bp, Homo sapien
gctgggccgtgaccgcgttgccggt

SEQ ID NO: 2383613 - DNA, 25 bp, Homo sapien
gcaaacttggtctggaccttgccat

SEQ ID NO: 2383614 - DNA, 25 bp, Homo sapien
gacactgctttaaaaacgctgaaag

SEQ ID NO: 2383615 - DNA, 25 bp, Homo sapien
ttggtctggaccttgccatttttca

SEQ ID NO: 2383616 - DNA, 25 bp, Homo sapien
ccatattggcatcctcattatgaaa

SEQ ID NO: 2383617 - DNA, 25 bp, Homo sapien
cagcagtcaagctatcagctcgctt

SEQ ID NO: 2383618 - DNA, 25 bp, Homo sapien
tgcagcagtcaagctatcagctcgc

SEQ ID NO: 2383619 - DNA, 25 bp, Homo sapien
agtcaagctatcagctcgcttcagc

SEQ ID NO: 2383620 - DNA, 25 bp, Homo sapien
gcagtcaagctatcagctcgcttca

SEQ ID NO: 2383621 - DNA, 25 bp, Homo sapien
ctcaactgtcagtggcatgagaatg

SEQ ID NO: 2383622 - DNA, 25 bp, Homo sapien
tcagctcaactgtcagtggcatgag

SEQ ID NO: 2383623 - DNA, 25 bp, Homo sapien
gtattcagctcaactgtcagtggca

SEQ ID NO: 2383624 - DNA, 25 bp, Homo sapien
cgtattcagctcaactgtcagtggc

SEQ ID NO: 2383625 - DNA, 25 bp, Homo sapien
gcctcgcagttctcagccaagatga

SEQ ID NO: 2383626 - DNA, 25 bp, Homo sapien
gcaatctcagatcggctttcaaagt

SEQ ID NO: 2383627 - DNA, 25 bp, Homo sapien
gccaagatgaggtttgcaatctcag

SEQ ID NO: 2383628 - DNA, 25 bp, Homo sapien
cctatagagatgaagagccagggca

SEQ ID NO: 2383629 - DNA, 25 bp, Homo sapien
aaaggttcctactgagctatcaggg

SEQ ID NO: 2383630 - DNA, 25 bp, Homo sapien
agctatcagggattccgaacttcat

SEQ ID NO: 2383631 - DNA, 25 bp, Homo sapien
tactgagctatcagggattccgaac

SEQ ID NO: 2383632 - DNA, 25 bp, Homo sapien
cctactgagctatcagggattccga

SEQ ID NO: 2383633 - DNA, 25 bp, Homo sapien
aacagaatcactaaactcagggctg

SEQ ID NO: 2383634 - DNA, 25 bp, Homo sapien
taaactcagggctgaggctttgtga

SEQ ID NO: 2383635 - DNA, 25 bp, Homo sapien
tcaacagaatcactaaactcagggc

SEQ ID NO: 2383636 - DNA, 25 bp, Homo sapien
tgtcaacagaatcactaaactcagg

SEQ ID NO: 2383637 - DNA, 25 bp, Homo sapien
aagatgactccaaaagggattcggt

SEQ ID NO: 2383638 - DNA, 25 bp, Homo sapien
tcatttacatcagttccaccaaaga

SEQ ID NO: 2383639 - DNA, 25 bp, Homo sapien
tttacatcagttccaccaaagatga

SEQ ID NO: 2383640 - DNA, 25 bp, Homo sapien
tttttccgcctggttggcatcttca

SEQ ID NO: 2383641 - DNA, 25 bp, Homo sapien
caagaggtgcaaggaaactgtatct

SEQ ID NO: 2383642 - DNA, 25 bp, Homo sapien
tgtatctgggggaatagactttatc

SEQ ID NO: 2383643 - DNA, 25 bp, Homo sapien
gaaaactaacaagaggtgcaaggaa

SEQ ID NO: 2383644 - DNA, 25 bp, Homo sapien
ctaacaagaggtgcaaggaaactgt

SEQ ID NO: 2383645 - DNA, 25 bp, Homo sapien
aaggaggctcgagcccagcatgggt

SEQ ID NO: 2383646 - DNA, 25 bp, Homo sapien
ccatacagtgctgacgcggaaggag

SEQ ID NO: 2383647 - DNA, 25 bp, Homo sapien
aaggcccactttcataatccaagca

SEQ ID NO: 2383648 - DNA, 25 bp, Homo sapien
gcctcagttatgagaagctctccat

SEQ ID NO: 2383649 - DNA, 25 bp, Homo sapien
ccactgcgcttgtgccatttccttc

SEQ ID NO: 2383650 - DNA, 25 bp, Homo sapien
actgcgcttgtgccatttccttcat

SEQ ID NO: 2383651 - DNA, 25 bp, Homo sapien
cactgcgcttgtgccatttccttca

SEQ ID NO: 2383652 - DNA, 25 bp, Homo sapien
ctgcgcttgtgccatttccttcatt

SEQ ID NO: 2383653 - DNA, 25 bp, Homo sapien
cctttcggttctcgaattctgcaat

SEQ ID NO: 2383654 - DNA, 25 bp, Homo sapien
tttcggttctcgaattctgcaattt

SEQ ID NO: 2383655 - DNA, 25 bp, Homo sapien
gcctttcggttctcgaattctgcaa

SEQ ID NO: 2383656 - DNA, 25 bp, Homo sapien
ctgcctttcggttctcgaattctgc

SEQ ID NO: 2383657 - DNA, 25 bp, Homo sapien
gacatagaccttacccttagcatgc

SEQ ID NO: 2383658 - DNA, 25 bp, Homo sapien
catagaccttacccttagcatgcgg

SEQ ID NO: 2383659 - DNA, 25 bp, Homo sapien
acatagaccttacccttagcatgcg

SEQ ID NO: 2383660 - DNA, 25 bp, Homo sapien
ggacatagaccttacccttagcatg

SEQ ID NO: 2383661 - DNA, 25 bp, Homo sapien
gcggcgtttggtgttgttgcaattc

SEQ ID NO: 2383662 - DNA, 25 bp, Homo sapien
taaaagcggcgtttggtgttgttgc

SEQ ID NO: 2383663 - DNA, 25 bp, Homo sapien
cagttaaaagcggcgtttggtgttg

SEQ ID NO: 2383664 - DNA, 25 bp, Homo sapien
aaagcggcgtttggtgttgttgcaa

SEQ ID NO: 2383665 - DNA, 25 bp, Homo sapien
cagctgaggtcgtgtgggttcatct

SEQ ID NO: 2383666 - DNA, 25 bp, Homo sapien
tgaaaatgggcccactcgttctgaa

SEQ ID NO: 2383667 - DNA, 25 bp, Homo sapien
aataatggtacatgtaactgacatg

SEQ ID NO: 2383668 - DNA, 25 bp, Homo sapien
gggcccactcgttctgaataatggt

SEQ ID NO: 2383669 - DNA, 25 bp, Homo sapien
gatgcctgatcataaaacccagaga

SEQ ID NO: 2383670 - DNA, 25 bp, Homo sapien
ttaagccgttatctgccactgtcag

SEQ ID NO: 2383671 - DNA, 25 bp, Homo sapien
caaacgatggcacaaatgcgaacag

SEQ ID NO: 2383672 - DNA, 25 bp, Homo sapien
tgagagacgacaaagacaaacgatg

SEQ ID NO: 2383673 - DNA, 25 bp, Homo sapien
aagatagagtaaggttgatgaggac

SEQ ID NO: 2383674 - DNA, 25 bp, Homo sapien
tgatgaggacggcccatccccagag

SEQ ID NO: 2383675 - DNA, 25 bp, Homo sapien
tctgaagctccaagtgggagggaca

SEQ ID NO: 2383676 - DNA, 25 bp, Homo sapien
tccagaggccaagggaagatagagt

SEQ ID NO: 2383677 - DNA, 25 bp, Homo sapien
tcaggagaaatgcaggggtggctgc

SEQ ID NO: 2383678 - DNA, 25 bp, Homo sapien
aaccccagcatcaggagaaatgcag

SEQ ID NO: 2383679 - DNA, 25 bp, Homo sapien
atgaagcagccctcgcagggccaaa

SEQ ID NO: 2383680 - DNA, 25 bp, Homo sapien
gggtggctgctttcagctggtgcat

SEQ ID NO: 2383681 - DNA, 25 bp, Homo sapien
aatatgtgcaaattatcagcacttt

SEQ ID NO: 2383682 - DNA, 25 bp, Homo sapien
gaagaaatatgtgcaaattatcagc

SEQ ID NO: 2383683 - DNA, 25 bp, Homo sapien
tgtgcaaattatcagcactttggtt

SEQ ID NO: 2383684 - DNA, 25 bp, Homo sapien
tatgtgcaaattatcagcactttgg

SEQ ID NO: 2383685 - DNA, 25 bp, Homo sapien
tgcgtccaccagatagagaggatcc

SEQ ID NO: 2383686 - DNA, 25 bp, Homo sapien
tagagaggatccttaacttgtcgaa

SEQ ID NO: 2383687 - DNA, 25 bp, Homo sapien
gatccttaacttgtcgaagtccaca

SEQ ID NO: 2383688 - DNA, 25 bp, Homo sapien
ctgaaaatgcgtccaccagatagag

SEQ ID NO: 2383689 - DNA, 25 bp, Homo sapien
aggacccacaatcaccaggtgcaca

SEQ ID NO: 2383690 - DNA, 25 bp, Homo sapien
ttcaggacccacaatcaccaggtgc

SEQ ID NO: 2383691 - DNA, 25 bp, Homo sapien
ggacccacaatcaccaggtgcacat

SEQ ID NO: 2383692 - DNA, 25 bp, Homo sapien
tcaggacccacaatcaccaggtgca

SEQ ID NO: 2383693 - DNA, 25 bp, Homo sapien
gggctccatccctcggtcacggcca

SEQ ID NO: 2383694 - DNA, 25 bp, Homo sapien
tcccatcccagcgtgtttctcggat

SEQ ID NO: 2383695 - DNA, 25 bp, Homo sapien
tcacggccaccagaacgtctcccat

SEQ ID NO: 2383696 - DNA, 25 bp, Homo sapien
gtcacggccaccatagtcacggcca

SEQ ID NO: 2383697 - DNA, 25 bp, Homo sapien
ctcttgattagccagaattttagca

SEQ ID NO: 2383698 - DNA, 25 bp, Homo sapien
agctggtatcaagcactgtacctga

SEQ ID NO: 2383699 - DNA, 25 bp, Homo sapien
tagatactgttgttgcctgctcatg

SEQ ID NO: 2383700 - DNA, 25 bp, Homo sapien
cactgtacctgagatgtgatcatca

SEQ ID NO: 2383701 - DNA, 25 bp, Homo sapien
tgtgttggactagcttggaaatgga

SEQ ID NO: 2383702 - DNA, 25 bp, Homo sapien
gactcatctgggacccgtacttgcc

SEQ ID NO: 2383703 - DNA, 25 bp, Homo sapien
ccaactaacgtgctgggctggacgt

SEQ ID NO: 2383704 - DNA, 25 bp, Homo sapien
cgtacttgcctaccacgtatgttgt

SEQ ID NO: 2383705 - DNA, 25 bp, Homo sapien
tgcccagagccggatcttaaaccag

SEQ ID NO: 2383706 - DNA, 25 bp, Homo sapien
gacgaggcagggatcttaaaccagg

SEQ ID NO: 2383707 - DNA, 25 bp, Homo sapien
caaaccgcgattggatgtgggagcc

SEQ ID NO: 2383708 - DNA, 25 bp, Homo sapien
gatatggaggaccttcgacgaggca

SEQ ID NO: 2383709 - DNA, 25 bp, Homo sapien
gatacaggcagagggtctaaacaca

SEQ ID NO: 2383710 - DNA, 25 bp, Homo sapien
acatctgagattaagtgacactgcc

SEQ ID NO: 2383711 - DNA, 25 bp, Homo sapien
agctgctactcctgatgagccggga

SEQ ID NO: 2383712 - DNA, 25 bp, Homo sapien
tactgaggtgctgagaggaccttcc

SEQ ID NO: 2383713 - DNA, 25 bp, Homo sapien
gtgggcctcggtctgcggccacggg

SEQ ID NO: 2383714 - DNA, 25 bp, Homo sapien
cggcgtgggcctcggtctgcggcca

SEQ ID NO: 2383715 - DNA, 25 bp, Homo sapien
ggtctgcggccacgggggtgtcctc

SEQ ID NO: 2383716 - DNA, 25 bp, Homo sapien
aagccctggtgccagcgcggcgtgg

SEQ ID NO: 2383717 - DNA, 25 bp, Homo sapien
cttcccttgtaaacactggatcgac

SEQ ID NO: 2383718 - DNA, 25 bp, Homo sapien
ttcactttggctttcacttcccttg

SEQ ID NO: 2383719 - DNA, 25 bp, Homo sapien
tcactttggctttcacttcccttgt

SEQ ID NO: 2383720 - DNA, 25 bp, Homo sapien
tcacttcccttgtaaacactggatc

SEQ ID NO: 2383721 - DNA, 25 bp, Homo sapien
aatgtaaatcttcgcctttcttcga

SEQ ID NO: 2383722 - DNA, 25 bp, Homo sapien
tcgatcttccccgtccccaccgctg

SEQ ID NO: 2383723 - DNA, 25 bp, Homo sapien
aatcttcgcctttcttcgatcttcc

SEQ ID NO: 2383724 - DNA, 25 bp, Homo sapien
cagacaatgtaaatcttcgcctttc

SEQ ID NO: 2383725 - DNA, 25 bp, Homo sapien
attccaagaatctcatgggtaggca

SEQ ID NO: 2383726 - DNA, 25 bp, Homo sapien
ttccaagaatctcatgggtaggcag

SEQ ID NO: 2383727 - DNA, 25 bp, Homo sapien
tcagagacagagctattcaccaccg

SEQ ID NO: 2383728 - DNA, 25 bp, Homo sapien
caaaattgcagctgacatgccttca

SEQ ID NO: 2383729 - DNA, 25 bp, Homo sapien
accaccgcgtgcagatcttcttgag

SEQ ID NO: 2383730 - DNA, 25 bp, Homo sapien
ttcaccaccgcgaagcaattcttca

SEQ ID NO: 2383731 - DNA, 25 bp, Homo sapien
gaagaactcctggacgatgatgacg

SEQ ID NO: 2383732 - DNA, 25 bp, Homo sapien
ctgggcggacagtgcacagaggtga

SEQ ID NO: 2383733 - DNA, 25 bp, Homo sapien
gtgtgctcgacctcagaacatgccc

SEQ ID NO: 2383734 - DNA, 25 bp, Homo sapien
gtcctgagggagacgggcggtgcct

SEQ ID NO: 2383735 - DNA, 25 bp, Homo sapien
tcccatttgatggtccacagtgcac

SEQ ID NO: 2383736 - DNA, 25 bp, Homo sapien
catttgatggtccacagtgcacggg

SEQ ID NO: 2383737 - DNA, 25 bp, Homo sapien
tcatcccatttgatggtccacagtg

SEQ ID NO: 2383738 - DNA, 25 bp, Homo sapien
gacgcaggggaggattccacaccat

SEQ ID NO: 2383739 - DNA, 25 bp, Homo sapien
tccactagatactagttgtaccatc

SEQ ID NO: 2383740 - DNA, 25 bp, Homo sapien
tactagttgtaccatcttgggtcaa

SEQ ID NO: 2383741 - DNA, 25 bp, Homo sapien
atcctggttccactagatactagtt

SEQ ID NO: 2383742 - DNA, 25 bp, Homo sapien
tagatactagttgtaccatcttggg

SEQ ID NO: 2383743 - DNA, 25 bp, Homo sapien
tcactttccctgaggagccatttcc

SEQ ID NO: 2383744 - DNA, 25 bp, Homo sapien
catggagcatgcatttttaattacc

SEQ ID NO: 2383745 - DNA, 25 bp, Homo sapien
ttcaccgaccgaccgcatggagcat

SEQ ID NO: 2383746 - DNA, 25 bp, Homo sapien
cacaggcaagggagtatgaatgcca

SEQ ID NO: 2383747 - DNA, 25 bp, Homo sapien
gagaaaagggggtggaaggcagtca

SEQ ID NO: 2383748 - DNA, 25 bp, Homo sapien
caggagaaaagggggtggaaggcag

SEQ ID NO: 2383749 - DNA, 25 bp, Homo sapien
gggtggaaggcagtcatttcaagag

SEQ ID NO: 2383750 - DNA, 25 bp, Homo sapien
aagggggtggaaggcagtcatttca

SEQ ID NO: 2383751 - DNA, 25 bp, Homo sapien
gatgttcctggccaataccggtact

SEQ ID NO: 2383752 - DNA, 25 bp, Homo sapien
cacggcagcattcccggggatgttc

SEQ ID NO: 2383753 - DNA, 25 bp, Homo sapien
gccaataccggtacttctaaatcca

SEQ ID NO: 2383754 - DNA, 25 bp, Homo sapien
gcattcccggggatgttcctggcca

SEQ ID NO: 2383755 - DNA, 25 bp, Homo sapien
gaggattggaaaacagtagccctgt

SEQ ID NO: 2383756 - DNA, 25 bp, Homo sapien
gattggaaaacagtagccctgtgac

SEQ ID NO: 2383757 - DNA, 25 bp, Homo sapien
ggattggaaaacagtagccctgtga

SEQ ID NO: 2383758 - DNA, 25 bp, Homo sapien
ctgaggattggaaaacagtagccct

SEQ ID NO: 2383759 - DNA, 25 bp, Homo sapien
gcaaatctccccacgaatgtgtaag

SEQ ID NO: 2383760 - DNA, 25 bp, Homo sapien
agcaaatctccccacgaatgtgtaa

SEQ ID NO: 2383761 - DNA, 25 bp, Homo sapien
aaatctccccacgaatgtgtaagta

SEQ ID NO: 2383762 - DNA, 25 bp, Homo sapien
caaatctccccacgaatgtgtaagt

SEQ ID NO: 2383763 - DNA, 25 bp, Homo sapien
tcattttcagcggaaaggggtatcc

SEQ ID NO: 2383764 - DNA, 25 bp, Homo sapien
tgtgcacagtgtgctccggctgagt

SEQ ID NO: 2383765 - DNA, 25 bp, Homo sapien
tgctccggctgagttacagttctca

SEQ ID NO: 2383766 - DNA, 25 bp, Homo sapien
aacccactgtcgttggtgtgcacag

SEQ ID NO: 2383767 - DNA, 25 bp, Homo sapien
agcgaggaggacactgatggccaga

SEQ ID NO: 2383768 - DNA, 25 bp, Homo sapien
gcgaggaggacactgatggccagag

SEQ ID NO: 2383769 - DNA, 25 bp, Homo sapien
tgcattggcatcactggaaactctt

SEQ ID NO: 2383770 - DNA, 25 bp, Homo sapien
tctgccactgtgaacacattctttc

SEQ ID NO: 2383771 - DNA, 25 bp, Homo sapien
ctgaaacagtcctctttttggaggt

SEQ ID NO: 2383772 - DNA, 25 bp, Homo sapien
ctgcagccagctgcattggcatcac

SEQ ID NO: 2383773 - DNA, 25 bp, Homo sapien
gacgcgatgcaagcaggatgctccc

SEQ ID NO: 2383774 - DNA, 25 bp, Homo sapien
tcggtgcacacccagctcggggcaa

SEQ ID NO: 2383775 - DNA, 25 bp, Homo sapien
caaacctgccctaggggctgcacag

SEQ ID NO: 2383776 - DNA, 25 bp, Homo sapien
gagtgcctccgcaccttggtgatgg

SEQ ID NO: 2383777 - DNA, 25 bp, Homo sapien
ggcttctaccagtgccaacatgtca

SEQ ID NO: 2383778 - DNA, 25 bp, Homo sapien
cctacagcagcgttgttttgatgtg

SEQ ID NO: 2383779 - DNA, 25 bp, Homo sapien
ccagaaacggccttcggagctgatt

SEQ ID NO: 2383780 - DNA, 25 bp, Homo sapien
tgaattccaggataccccagaaacg

SEQ ID NO: 2383781 - DNA, 25 bp, Homo sapien
gctgctctggtgtgctttgggggtt

SEQ ID NO: 2383782 - DNA, 25 bp, Homo sapien
ccggctggctgaaaggtgcttctgc

SEQ ID NO: 2383783 - DNA, 25 bp, Homo sapien
ggctgaaaggtgcttctgctgctct

SEQ ID NO: 2383784 - DNA, 25 bp, Homo sapien
cttctgctgctctggtgtgctttgg

SEQ ID NO: 2383785 - DNA, 25 bp, Homo sapien
cagtgggccctgtgtaagcacgctg

SEQ ID NO: 2383786 - DNA, 25 bp, Homo sapien
gcctgagcgtgtatctaacaggcca

SEQ ID NO: 2383787 - DNA, 25 bp, Homo sapien
agggaggctccgtgctcagaccctt

SEQ ID NO: 2383788 - DNA, 25 bp, Homo sapien
tttgccgggacaatgcctgagcgtg

SEQ ID NO: 2383789 - DNA, 25 bp, Homo sapien
tcgccgctgacgacacatcaatgtg

SEQ ID NO: 2383790 - DNA, 25 bp, Homo sapien
tggcactatccaaactgtcaaactg

SEQ ID NO: 2383791 - DNA, 25 bp, Homo sapien
cagcgtacgttgattgttctcccag

SEQ ID NO: 2383792 - DNA, 25 bp, Homo sapien
gaggaacgtgcatctgactgtggta

SEQ ID NO: 2383793 - DNA, 25 bp, Homo sapien
gaatgatacattctcacgtattccc

SEQ ID NO: 2383794 - DNA, 25 bp, Homo sapien
attctcacgtattcccttccgttca

SEQ ID NO: 2383795 - DNA, 25 bp, Homo sapien
gagctgttggtaggtgtctctttcc

SEQ ID NO: 2383796 - DNA, 25 bp, Homo sapien
tctaatgcaggatcactaaccagtc

SEQ ID NO: 2383797 - DNA, 25 bp, Homo sapien
cattgaaaagtgagctgtgccgggc

SEQ ID NO: 2383798 - DNA, 25 bp, Homo sapien
catctacagggtcattcgaggagga

SEQ ID NO: 2383799 - DNA, 25 bp, Homo sapien
gacatgaaagccataacccttgggc

SEQ ID NO: 2383800 - DNA, 25 bp, Homo sapien
gaaacattgaattacacggcacgag

SEQ ID NO: 2383801 - DNA, 25 bp, Homo sapien
taagttccaagtcaaacttcagttg

SEQ ID NO: 2383802 - DNA, 25 bp, Homo sapien
ctgctcaggataatttgtgttggct

SEQ ID NO: 2383803 - DNA, 25 bp, Homo sapien
gttccaagtcaaacttcagttgctc

SEQ ID NO: 2383804 - DNA, 25 bp, Homo sapien
aagttccaagtcaaacttcagttgc

SEQ ID NO: 2383805 - DNA, 25 bp, Homo sapien
ttcaagttcagtgaatcctgggagc

SEQ ID NO: 2383806 - DNA, 25 bp, Homo sapien
taaaccgctgtccagtatctctcac

SEQ ID NO: 2383807 - DNA, 25 bp, Homo sapien
tgccatttcatacaagtacagacca

SEQ ID NO: 2383808 - DNA, 25 bp, Homo sapien
tcagtgaatcctgggagctttatga

SEQ ID NO: 2383809 - DNA, 25 bp, Homo sapien
tcattgacttaaacttttaaggcac

SEQ ID NO: 2383810 - DNA, 25 bp, Homo sapien
aaaccaaaggatgtctccagcaagc

SEQ ID NO: 2383811 - DNA, 25 bp, Homo sapien
tgttgaaattccaaacacgaatacc

SEQ ID NO: 2383812 - DNA, 25 bp, Homo sapien
ttcttctgttgaaattccaaacacg

SEQ ID NO: 2383813 - DNA, 25 bp, Homo sapien
tcttcacaaccttcatcggagatgt

SEQ ID NO: 2383814 - DNA, 25 bp, Homo sapien
gtcttcacaaccttcatcggagatg

SEQ ID NO: 2383815 - DNA, 25 bp, Homo sapien
cagtgagtgccacagcaaggtcttc

SEQ ID NO: 2383816 - DNA, 25 bp, Homo sapien
taactgtttgacaccagcgcctcgt

SEQ ID NO: 2383817 - DNA, 25 bp, Homo sapien
tctacagtgagggtgcttcaaagca

SEQ ID NO: 2383818 - DNA, 25 bp, Homo sapien
gatcggctatgtttgcagtgcaaga

SEQ ID NO: 2383819 - DNA, 25 bp, Homo sapien
tctgctgcccttagagtggccagtc

SEQ ID NO: 2383820 - DNA, 25 bp, Homo sapien
tgttctgaacactgccacatgccac

SEQ ID NO: 2383821 - DNA, 25 bp, Homo sapien
cacgtaccattcaggttgctaggaa

SEQ ID NO: 2383822 - DNA, 25 bp, Homo sapien
tacaagaattgatcatctgctgccc

SEQ ID NO: 2383823 - DNA, 25 bp, Homo sapien
tctggctcctgtgtacaggatgctt

SEQ ID NO: 2383824 - DNA, 25 bp, Homo sapien
caccatctggctcctgtgtacagga

SEQ ID NO: 2383825 - DNA, 25 bp, Homo sapien
cggagggtgttcgtggtcaccatct

SEQ ID NO: 2383826 - DNA, 25 bp, Homo sapien
cccgggctctgccacggagggtgtt

SEQ ID NO: 2383827 - DNA, 25 bp, Homo sapien
catgcttagccgacctggatcctac

SEQ ID NO: 2383828 - DNA, 25 bp, Homo sapien
gaagccagcatgcttagccgacctg

SEQ ID NO: 2383829 - DNA, 25 bp, Homo sapien
gttgaagccagcatgcttagccgac

SEQ ID NO: 2383830 - DNA, 25 bp, Homo sapien
gccagcatgcttagccgacctggat

SEQ ID NO: 2383831 - DNA, 25 bp, Homo sapien
tcagctctaaaccaagcggaactaa

SEQ ID NO: 2383832 - DNA, 25 bp, Homo sapien
actcagctctaaaccaagcggaact

SEQ ID NO: 2383833 - DNA, 25 bp, Homo sapien
ctcagctctaaaccaagcggaacta

SEQ ID NO: 2383834 - DNA, 25 bp, Homo sapien
aactcagctctaaaccaagcggaac

SEQ ID NO: 2383835 - DNA, 25 bp, Homo sapien
acatcagactaacagctgatctctt

SEQ ID NO: 2383836 - DNA, 25 bp, Homo sapien
ggcagaaactctacaagccagaaga

SEQ ID NO: 2383837 - DNA, 25 bp, Homo sapien
tttcaacccagaatttcatatccag

SEQ ID NO: 2383838 - DNA, 25 bp, Homo sapien
ccaaactaagcttcataagtgaagg

SEQ ID NO: 2383839 - DNA, 25 bp, Homo sapien
gtgactgatgttcagctcgcgtaca

SEQ ID NO: 2383840 - DNA, 25 bp, Homo sapien
gttcagctcgcgtacaccaacaggg

SEQ ID NO: 2383841 - DNA, 25 bp, Homo sapien
gggcatcccagatgtttacggccag

SEQ ID NO: 2383842 - DNA, 25 bp, Homo sapien
cccagatgtttacggccagttccat

SEQ ID NO: 2383843 - DNA, 25 bp, Homo sapien
tcatcgaaataagtgtctctggcac

SEQ ID NO: 2383844 - DNA, 25 bp, Homo sapien
atcgaaataagtgtctctggcacta

SEQ ID NO: 2383845 - DNA, 25 bp, Homo sapien
atcatcgaaataagtgtctctggca

SEQ ID NO: 2383846 - DNA, 25 bp, Homo sapien
catcatcgaaataagtgtctctggc

SEQ ID NO: 2383847 - DNA, 25 bp, Homo sapien
tacatcgtgtagtgctgctccctgc

SEQ ID NO: 2383848 - DNA, 25 bp, Homo sapien
ttgaaggatcccagcacaatccagt

SEQ ID NO: 2383849 - DNA, 25 bp, Homo sapien
caaatggctctgcaaatgctgcagc

SEQ ID NO: 2383850 - DNA, 25 bp, Homo sapien
tgttgacacgtgatgacaaagtgca

SEQ ID NO: 2383851 - DNA, 25 bp, Homo sapien
ctgtagattgtaagaatgtaatata

SEQ ID NO: 2383852 - DNA, 25 bp, Homo sapien
tgtagattgtaagaatgtaatatat

SEQ ID NO: 2383853 - DNA, 25 bp, Homo sapien
tgttctgttgaatactgcagccgct

SEQ ID NO: 2383854 - DNA, 25 bp, Homo sapien
tctgttgaatactgcagccgctgcc

SEQ ID NO: 2383855 - DNA, 25 bp, Homo sapien
ttctgttgaatactgcagccgctgc

SEQ ID NO: 2383856 - DNA, 25 bp, Homo sapien
gttctgttgaatactgcagccgctg

SEQ ID NO: 2383857 - DNA, 25 bp, Homo sapien
gaatcctttgctttcagtaacgtcc

SEQ ID NO: 2383858 - DNA, 25 bp, Homo sapien
cagtaacgtcctcatatttctttcc

SEQ ID NO: 2383859 - DNA, 25 bp, Homo sapien
tgtttggttgggtgattaagctgtc

SEQ ID NO: 2383860 - DNA, 25 bp, Homo sapien
aagctgtcaccccttttcaatgaga

SEQ ID NO: 2383861 - DNA, 25 bp, Homo sapien
cagtcagccccgaaaggttcagcat

SEQ ID NO: 2383862 - DNA, 25 bp, Homo sapien
tcagcattgcttaagaccagccatg

SEQ ID NO: 2383863 - DNA, 25 bp, Homo sapien
gccatgactctggatatccctgaat

SEQ ID NO: 2383864 - DNA, 25 bp, Homo sapien
gatgcaggtttgcaagcacttggtc

SEQ ID NO: 2383865 - DNA, 25 bp, Homo sapien
tattcctccactgcattgccatcct

SEQ ID NO: 2383866 - DNA, 25 bp, Homo sapien
gcattgccatcctccccaaagccgt

SEQ ID NO: 2383867 - DNA, 25 bp, Homo sapien
actgcattgccatcctccccaaagc

SEQ ID NO: 2383868 - DNA, 25 bp, Homo sapien
ctccactgcattgccatcctcccca

SEQ ID NO: 2383869 - DNA, 25 bp, Homo sapien
gaactgtgctgatgttcaacacggc

SEQ ID NO: 2383870 - DNA, 25 bp, Homo sapien
tgtggctcctcagtctggcctgggc

SEQ ID NO: 2383871 - DNA, 25 bp, Homo sapien
tcctgcagactgcatagagccgtct

SEQ ID NO: 2383872 - DNA, 25 bp, Homo sapien
gtgttcttgacctgcatctgctgag

SEQ ID NO: 2383873 - DNA, 25 bp, Homo sapien
tttgcataaaagaaagttactggcc

SEQ ID NO: 2383874 - DNA, 25 bp, Homo sapien
gcactgcagagcttagatcctgcca

SEQ ID NO: 2383875 - DNA, 25 bp, Homo sapien
caggatttgaccctgaccatttgaa

SEQ ID NO: 2383876 - DNA, 25 bp, Homo sapien
tagcgctgcaaagcttagaccctgc

SEQ ID NO: 2383877 - DNA, 25 bp, Homo sapien
gcgaaaggcacttctcacgtggtgg

SEQ ID NO: 2383878 - DNA, 25 bp, Homo sapien
aggcacttctcacgtggtggcagca

SEQ ID NO: 2383879 - DNA, 25 bp, Homo sapien
aaaggcacttctcacgtggtggcag

SEQ ID NO: 2383880 - DNA, 25 bp, Homo sapien
gaaaggcacttctcacgtggtggca

SEQ ID NO: 2383881 - DNA, 25 bp, Homo sapien
taaaaggcttaagcgtgactcactc

SEQ ID NO: 2383882 - DNA, 25 bp, Homo sapien
cagacagagttaagtgcaccagaga

SEQ ID NO: 2383883 - DNA, 25 bp, Homo sapien
tgagcttcaggatgcgatgcaggtc

SEQ ID NO: 2383884 - DNA, 25 bp, Homo sapien
cagggaactttctcaatggtcggga

SEQ ID NO: 2383885 - DNA, 25 bp, Homo sapien
ggcattctatgcacagattcctgaa

SEQ ID NO: 2383886 - DNA, 25 bp, Homo sapien
taaaccctttcgctactgagtccag

SEQ ID NO: 2383887 - DNA, 25 bp, Homo sapien
tccgagcacataaaccctttcgcta

SEQ ID NO: 2383888 - DNA, 25 bp, Homo sapien
tttcctctgcactatggcattctat

SEQ ID NO: 2383889 - DNA, 25 bp, Homo sapien
tttccacagcagacagttgttctct

SEQ ID NO: 2383890 - DNA, 25 bp, Homo sapien
ctttccacagcagacagttgttctc

SEQ ID NO: 2383891 - DNA, 25 bp, Homo sapien
actttccacagcagacagttgttct

SEQ ID NO: 2383892 - DNA, 25 bp, Homo sapien
tatggagtgccaggataatagagca

SEQ ID NO: 2383893 - DNA, 25 bp, Homo sapien
agtgcaaatgagaagcagtccgtca

SEQ ID NO: 2383894 - DNA, 25 bp, Homo sapien
aactccttctctgggcgccggatgc

SEQ ID NO: 2383895 - DNA, 25 bp, Homo sapien
ctctggcctggctgaggagtctcac

SEQ ID NO: 2383896 - DNA, 25 bp, Homo sapien
tagaagtaaaaacatttggctcaga

SEQ ID NO: 2383897 - DNA, 25 bp, Homo sapien
gaaaactatgtcaattaatacatca

SEQ ID NO: 2383898 - DNA, 25 bp, Homo sapien
gccctcaatagcaatagcacaaaga

SEQ ID NO: 2383899 - DNA, 25 bp, Homo sapien
caagaccttgggactatgggacact

SEQ ID NO: 2383900 - DNA, 25 bp, Homo sapien
aagttgggctggtttcagaaagaag

SEQ ID NO: 2383901 - DNA, 25 bp, Homo sapien
gttgggctggtttcagaaagaagac

SEQ ID NO: 2383902 - DNA, 25 bp, Homo sapien
gagaaaagttgggctggtttcagaa

SEQ ID NO: 2383903 - DNA, 25 bp, Homo sapien
tgggagaaaagttgggctggtttca

SEQ ID NO: 2383904 - DNA, 25 bp, Homo sapien
gaattggtcaaaaagcagcaggtgg

SEQ ID NO: 2383905 - DNA, 25 bp, Homo sapien
gttttctcgatgtccagatgccatg

SEQ ID NO: 2383906 - DNA, 25 bp, Homo sapien
aatccatccctccaactgactgaag

SEQ ID NO: 2383907 - DNA, 25 bp, Homo sapien
tagcggtttatatgggaattggtca

SEQ ID NO: 2383908 - DNA, 25 bp, Homo sapien
ccaattaagccctggccgtggtcca

SEQ ID NO: 2383909 - DNA, 25 bp, Homo sapien
gcagctctagatgagaaagggagtt

SEQ ID NO: 2383910 - DNA, 25 bp, Homo sapien
ccctggccgtggtccagtgtggcat

SEQ ID NO: 2383911 - DNA, 25 bp, Homo sapien
tggagactttacgattattcacaaa

SEQ ID NO: 2383912 - DNA, 25 bp, Homo sapien
gcaggagataaatgggttccccagg

SEQ ID NO: 2383913 - DNA, 25 bp, Homo sapien
acaaaagcccgggacagcgagaagg

SEQ ID NO: 2383914 - DNA, 25 bp, Homo sapien
gagacagggctgcagtgacagatgc

SEQ ID NO: 2383915 - DNA, 25 bp, Homo sapien
tccatatgagtcctagccatggctg

SEQ ID NO: 2383916 - DNA, 25 bp, Homo sapien
tctccgtggaggacgacggcacagt

SEQ ID NO: 2383917 - DNA, 25 bp, Homo sapien
tcccagggactgggccgtctcagga

SEQ ID NO: 2383918 - DNA, 25 bp, Homo sapien
tggccgtcccggtgaaagtggtctc

SEQ ID NO: 2383919 - DNA, 25 bp, Homo sapien
tgaacacagccatcctcacggggaa

SEQ ID NO: 2383920 - DNA, 25 bp, Homo sapien
tctggccatccttcggcggcttaag

SEQ ID NO: 2383921 - DNA, 25 bp, Homo sapien
ctggtggtgcggtgctgctcatcaa

SEQ ID NO: 2383922 - DNA, 25 bp, Homo sapien
taagctaccgtcgtcatgtccacgt

SEQ ID NO: 2383923 - DNA, 25 bp, Homo sapien
cctgggcaagtgacaaaagctctct

SEQ ID NO: 2383924 - DNA, 25 bp, Homo sapien
aaaatgggctcctatgatctctctg

SEQ ID NO: 2383925 - DNA, 25 bp, Homo sapien
gaaaaatgggctcctatgatctctc

SEQ ID NO: 2383926 - DNA, 25 bp, Homo sapien
aatgggctcctatgatctctctgtc

SEQ ID NO: 2383927 - DNA, 25 bp, Homo sapien
tgggctcctatgatctctctgtccc

SEQ ID NO: 2383928 - DNA, 25 bp, Homo sapien
gataaggtgaccacgcagcaataag

SEQ ID NO: 2383929 - DNA, 25 bp, Homo sapien
ggtcatatctcaggcaaagctaagg

SEQ ID NO: 2383930 - DNA, 25 bp, Homo sapien
gatgagccagtttcggccagcaagt

SEQ ID NO: 2383931 - DNA, 25 bp, Homo sapien
taaggctttacaggtacttctgcca

SEQ ID NO: 2383932 - DNA, 25 bp, Homo sapien
tttttccatgaaacgtaaattcaca

SEQ ID NO: 2383933 - DNA, 25 bp, Homo sapien
cgtaaattcacaattcttgtatccg

SEQ ID NO: 2383934 - DNA, 25 bp, Homo sapien
tcttgtatccgtttgacatttaatg

SEQ ID NO: 2383935 - DNA, 25 bp, Homo sapien
tcacaattcttgtatccgtttgaca

SEQ ID NO: 2383936 - DNA, 25 bp, Homo sapien
ggtggggattgaacccacgacctca

SEQ ID NO: 2383937 - DNA, 25 bp, Homo sapien
cacaaatttttacggcagtgagact

SEQ ID NO: 2383938 - DNA, 25 bp, Homo sapien
ctgagagtcatattcctaagtggaa

SEQ ID NO: 2383939 - DNA, 25 bp, Homo sapien
tagctacacactgtattgatccaag

SEQ ID NO: 2383940 - DNA, 25 bp, Homo sapien
gatggatacatgatactatgctttg

SEQ ID NO: 2383941 - DNA, 25 bp, Homo sapien
atgtgtaaaagcagagcggccgtgg

SEQ ID NO: 2383942 - DNA, 25 bp, Homo sapien
ttatgtgtaaaagcagagcggccgt

SEQ ID NO: 2383943 - DNA, 25 bp, Homo sapien
tatgtgtaaaagcagagcggccgtg

SEQ ID NO: 2383944 - DNA, 25 bp, Homo sapien
tcttatgtgtaaaagcagagcggcc

SEQ ID NO: 2383945 - DNA, 25 bp, Homo sapien
ggtggtattaactcgctgcccacag

SEQ ID NO: 2383946 - DNA, 25 bp, Homo sapien
tgtagaatctggaaatgctgtagct

SEQ ID NO: 2383947 - DNA, 25 bp, Homo sapien
caatgagcgataaggagatatctcc

SEQ ID NO: 2383948 - DNA, 25 bp, Homo sapien
tccccaaggacatagcaattggttc

SEQ ID NO: 2383949 - DNA, 25 bp, Homo sapien
cagagatacagatgataaattattg

SEQ ID NO: 2383950 - DNA, 25 bp, Homo sapien
cttttcggcagagatacagatgata

SEQ ID NO: 2383951 - DNA, 25 bp, Homo sapien
ggcagagatacagatgataaattat

SEQ ID NO: 2383952 - DNA, 25 bp, Homo sapien
tcggcagagatacagatgataaatt

SEQ ID NO: 2383953 - DNA, 25 bp, Homo sapien
cactgctatgccattgggagctgca

SEQ ID NO: 2383954 - DNA, 25 bp, Homo sapien
tagtcagcccggatcgtagctggtg

SEQ ID NO: 2383955 - DNA, 25 bp, Homo sapien
agttttcttattgccacacatggag

SEQ ID NO: 2383956 - DNA, 25 bp, Homo sapien
tactatgagccttgtcagcaaccgg

SEQ ID NO: 2383957 - DNA, 25 bp, Homo sapien
gtctctcttcagtgtagtccagtag

SEQ ID NO: 2383958 - DNA, 25 bp, Homo sapien
ctctcttcagtgtagtccagtagtt

SEQ ID NO: 2383959 - DNA, 25 bp, Homo sapien
tctctcttcagtgtagtccagtagt

SEQ ID NO: 2383960 - DNA, 25 bp, Homo sapien
tagctcagtttcaggcgaaaagaca

SEQ ID NO: 2383961 - DNA, 25 bp, Homo sapien
aatagctcagtttcaggcgaaaaga

SEQ ID NO: 2383962 - DNA, 25 bp, Homo sapien
agctcagtttcaggcgaaaagacat

SEQ ID NO: 2383963 - DNA, 25 bp, Homo sapien
taatagctcagtttcaggcgaaaag

SEQ ID NO: 2383964 - DNA, 25 bp, Homo sapien
gaaagttgacccatccaggtggaga

SEQ ID NO: 2383965 - DNA, 25 bp, Homo sapien
taagttccttgaaagttgacccatc

SEQ ID NO: 2383966 - DNA, 25 bp, Homo sapien
attttacagacattttccgtagcct

SEQ ID NO: 2383967 - DNA, 25 bp, Homo sapien
gacattttccgtagcctttgttctg

SEQ ID NO: 2383968 - DNA, 25 bp, Homo sapien
tctagccagcagtgttccgtagtgg

SEQ ID NO: 2383969 - DNA, 25 bp, Homo sapien
gtagccggcagtgttccgtagcgtc

SEQ ID NO: 2383970 - DNA, 25 bp, Homo sapien
tccgtagtggtcgtcttctgtggaa

SEQ ID NO: 2383971 - DNA, 25 bp, Homo sapien
catagtgtgtagccggcagtgttct

SEQ ID NO: 2383972 - DNA, 25 bp, Homo sapien
gagaaaaatacgctccagtggcctg

SEQ ID NO: 2383973 - DNA, 25 bp, Homo sapien
aaatacgctccagtggcctgctggt

SEQ ID NO: 2383974 - DNA, 25 bp, Homo sapien
gaaaaatacgctccagtggcctgct

SEQ ID NO: 2383975 - DNA, 25 bp, Homo sapien
gattatgagaaaaatacgctccagt

SEQ ID NO: 2383976 - DNA, 25 bp, Homo sapien
gactttgagctcgagcttcgctgtg

SEQ ID NO: 2383977 - DNA, 25 bp, Homo sapien
ctgtgtgcattgctttggccaaggg

SEQ ID NO: 2383978 - DNA, 25 bp, Homo sapien
taaaaggaggtgacactgaacacgt

SEQ ID NO: 2383979 - DNA, 25 bp, Homo sapien
ttctcccaatgactttgagctcgag

SEQ ID NO: 2383980 - DNA, 25 bp, Homo sapien
caatgctctaccatcaagagaaatg

SEQ ID NO: 2383981 - DNA, 25 bp, Homo sapien
aaacattgtatcaatgctctaccat

SEQ ID NO: 2383982 - DNA, 25 bp, Homo sapien
tgctctaccatcaagagaaatggcc

SEQ ID NO: 2383983 - DNA, 25 bp, Homo sapien
ctctaccatcaagagaaatggccat

SEQ ID NO: 2383984 - DNA, 25 bp, Homo sapien
ttgaattaaactcatataagggttg

SEQ ID NO: 2383985 - DNA, 25 bp, Homo sapien
tgaattaaactcatataagggttga

SEQ ID NO: 2383986 - DNA, 25 bp, Homo sapien
tattcttgctggctgagatcatgtg

SEQ ID NO: 2383987 - DNA, 25 bp, Homo sapien
atgttggctcctctactctgtgcac

SEQ ID NO: 2383988 - DNA, 25 bp, Homo sapien
tccttgcacgcaatgagggcagcgg

SEQ ID NO: 2383989 - DNA, 25 bp, Homo sapien
ggcagcgggcaagtcggaggattct

SEQ ID NO: 2383990 - DNA, 25 bp, Homo sapien
tggtgttagtattagtgttggtgtt

SEQ ID NO: 2383991 - DNA, 25 bp, Homo sapien
gtgttagtattagtgttggtgttgg

SEQ ID NO: 2383992 - DNA, 25 bp, Homo sapien
gtgttggtgttagtattagtgttgg

SEQ ID NO: 2383993 - DNA, 25 bp, Homo sapien
tgttggtgttagtattagtgttggt

SEQ ID NO: 2383994 - DNA, 25 bp, Homo sapien
gtttttgtagacattcgagtttgcc

SEQ ID NO: 2383995 - DNA, 25 bp, Homo sapien
tttttgtagacattcgagtttgcca

SEQ ID NO: 2383996 - DNA, 25 bp, Homo sapien
ttggaggaacacttatacagaggca

SEQ ID NO: 2383997 - DNA, 25 bp, Homo sapien
tggaggaacacttatacagaggcat

SEQ ID NO: 2383998 - DNA, 25 bp, Homo sapien
atttttggaggaacacttatacaga

SEQ ID NO: 2383999 - DNA, 25 bp, Homo sapien
ttttggaggaacacttatacagagg

SEQ ID NO: 2384000 - DNA, 25 bp, Homo sapien
ttgcagccactcattgtcacagagc

SEQ ID NO: 2384001 - DNA, 25 bp, Homo sapien
ccctggcagcctaaaggagtcactt

SEQ ID NO: 2384002 - DNA, 25 bp, Homo sapien
aaaatgcagccctcgtagccaggct

SEQ ID NO: 2384003 - DNA, 25 bp, Homo sapien
tccctcatgtacctggttgtattga

SEQ ID NO: 2384004 - DNA, 25 bp, Homo sapien
tatagcagacaactgcttccaatgg

SEQ ID NO: 2384005 - DNA, 25 bp, Homo sapien
tagcagaaaatgcaaccggaggcag

SEQ ID NO: 2384006 - DNA, 25 bp, Homo sapien
caactgagaagttaagtggtatttc

SEQ ID NO: 2384007 - DNA, 25 bp, Homo sapien
tatattattagcttatgcaactgag

SEQ ID NO: 2384008 - DNA, 25 bp, Homo sapien
tgggaagcagtaatgctgtgaatat

SEQ ID NO: 2384009 - DNA, 25 bp, Homo sapien
atgggaagcagtaatgctgtgaata

SEQ ID NO: 2384010 - DNA, 25 bp, Homo sapien
gagactccgtgtacccatattgctg

SEQ ID NO: 2384011 - DNA, 25 bp, Homo sapien
gatttggtggtcgataccatctgaa

SEQ ID NO: 2384012 - DNA, 25 bp, Homo sapien
taaaatactggattcacacttggtg

SEQ ID NO: 2384013 - DNA, 25 bp, Homo sapien
gatttttcacacaatgagacgctgg

SEQ ID NO: 2384014 - DNA, 25 bp, Homo sapien
tatttgggttggtcaatgtcaagcc

SEQ ID NO: 2384015 - DNA, 25 bp, Homo sapien
tcaagccatagcatcctgggagaca

SEQ ID NO: 2384016 - DNA, 25 bp, Homo sapien
tctggcagacactgggaagtcagcg

SEQ ID NO: 2384017 - DNA, 25 bp, Homo sapien
ggagacagcttcaccagtagtggga

SEQ ID NO: 2384018 - DNA, 25 bp, Homo sapien
ccatgtcaagggtcactaaagtcca

SEQ ID NO: 2384019 - DNA, 25 bp, Homo sapien
cttctctgtctctggcagtctggat

SEQ ID NO: 2384020 - DNA, 25 bp, Homo sapien
agcataacccacataatccacactt

SEQ ID NO: 2384021 - DNA, 25 bp, Homo sapien
cacacttgatgtccagtgatgtgca

SEQ ID NO: 2384022 - DNA, 25 bp, Homo sapien
tattctaacccatactgggaaccta

SEQ ID NO: 2384023 - DNA, 25 bp, Homo sapien
attctaacccatactgggaacctat

SEQ ID NO: 2384024 - DNA, 25 bp, Homo sapien
tctaacccatactgggaacctatac

SEQ ID NO: 2384025 - DNA, 25 bp, Homo sapien
ttctaacccatactgggaacctata

SEQ ID NO: 2384026 - DNA, 25 bp, Homo sapien
gtggatgcagagatgctgccttgat

SEQ ID NO: 2384027 - DNA, 25 bp, Homo sapien
ctttcaggtcttctttgcaatacag

SEQ ID NO: 2384028 - DNA, 25 bp, Homo sapien
tgccttgatgatatttgcatccacg

SEQ ID NO: 2384029 - DNA, 25 bp, Homo sapien
ggtcttctttgcaatacagaatgct

SEQ ID NO: 2384030 - DNA, 25 bp, Homo sapien
tccagggatgttggttttacaaatg

SEQ ID NO: 2384031 - DNA, 25 bp, Homo sapien
tctttccagggatgttggttttaca

SEQ ID NO: 2384032 - DNA, 25 bp, Homo sapien
gcaaagaccacgtgaaccttcaaca

SEQ ID NO: 2384033 - DNA, 25 bp, Homo sapien
caaagaccacgtgaaccttcaacat

SEQ ID NO: 2384034 - DNA, 25 bp, Homo sapien
gacagatgaggtccggtgaattgcc

SEQ ID NO: 2384035 - DNA, 25 bp, Homo sapien
aggtccggtgaattgcctccccact

SEQ ID NO: 2384036 - DNA, 25 bp, Homo sapien
tagttggaggtaaccaactgaagta

SEQ ID NO: 2384037 - DNA, 25 bp, Homo sapien
agatgaggtccggtgaattgcctcc

SEQ ID NO: 2384038 - DNA, 25 bp, Homo sapien
gctcccatttcaatggaactaccaa

SEQ ID NO: 2384039 - DNA, 25 bp, Homo sapien
tgttgcttcgaggaaagagaaagct

SEQ ID NO: 2384040 - DNA, 25 bp, Homo sapien
tgatttcagagtcctacgaaggcca

SEQ ID NO: 2384041 - DNA, 25 bp, Homo sapien
catgtttggttgctgtcggtttgtg

SEQ ID NO: 2384042 - DNA, 25 bp, Homo sapien
ggtgcgtgtagcaactgagctttat

SEQ ID NO: 2384043 - DNA, 25 bp, Homo sapien
gtgtagcaactgagctttatcctca

SEQ ID NO: 2384044 - DNA, 25 bp, Homo sapien
tgcgtgtagcaactgagctttatcc

SEQ ID NO: 2384045 - DNA, 25 bp, Homo sapien
gcgtgtagcaactgagctttatcct

SEQ ID NO: 2384046 - DNA, 25 bp, Homo sapien
tcttgatagcccgttagcatgcatg

SEQ ID NO: 2384047 - DNA, 25 bp, Homo sapien
gatagcccgttagcatgcatggcag

SEQ ID NO: 2384048 - DNA, 25 bp, Homo sapien
cacctcttgatagcccgttagcatg

SEQ ID NO: 2384049 - DNA, 25 bp, Homo sapien
atgaggtcacctcttgatagcccgt

SEQ ID NO: 2384050 - DNA, 25 bp, Homo sapien
caaatctacgtgactctagttcacc

SEQ ID NO: 2384051 - DNA, 25 bp, Homo sapien
tgccttctctcaaatctacgtgact

SEQ ID NO: 2384052 - DNA, 25 bp, Homo sapien
gagtcagcgtggattccactgtgcg

SEQ ID NO: 2384053 - DNA, 25 bp, Homo sapien
tgtgtctgagtcagcgtggattcca

SEQ ID NO: 2384054 - DNA, 25 bp, Homo sapien
gtgagtccacagctggccgatgagc

SEQ ID NO: 2384055 - DNA, 25 bp, Homo sapien
tagcaccacgacacagagctgcttt

SEQ ID NO: 2384056 - DNA, 25 bp, Homo sapien
atgtctttgtgtaggcgcagggtct

SEQ ID NO: 2384057 - DNA, 25 bp, Homo sapien
tgcccctggctgtgcagtcacctag

SEQ ID NO: 2384058 - DNA, 25 bp, Homo sapien
ccttccttaggagcgttgactgcat

SEQ ID NO: 2384059 - DNA, 25 bp, Homo sapien
tttggtggagtttcgggcatctgca

SEQ ID NO: 2384060 - DNA, 25 bp, Homo sapien
tatgtagcgccaagcagatccgatg

SEQ ID NO: 2384061 - DNA, 25 bp, Homo sapien
gatccgatgagagagtgagctgcct

SEQ ID NO: 2384062 - DNA, 25 bp, Homo sapien
tccaattggttaggtgcattacagt

SEQ ID NO: 2384063 - DNA, 25 bp, Homo sapien
tatgtccacaaataacctgcaccgg

SEQ ID NO: 2384064 - DNA, 25 bp, Homo sapien
tgctgtaggatccaacgctcgtgct

SEQ ID NO: 2384065 - DNA, 25 bp, Homo sapien
cctgcaccgggatgtttatagcacc

SEQ ID NO: 2384066 - DNA, 25 bp, Homo sapien
cagtactctgtgcatgcgatcgcag

SEQ ID NO: 2384067 - DNA, 25 bp, Homo sapien
ggaattctgcatgccaagctccaga

SEQ ID NO: 2384068 - DNA, 25 bp, Homo sapien
tgaccgtgggagcaacccttcgtag

SEQ ID NO: 2384069 - DNA, 25 bp, Homo sapien
gaggaatgagcccactctgcgtgac

SEQ ID NO: 2384070 - DNA, 25 bp, Homo sapien
ctggaagatccacgtggtaacaggg

SEQ ID NO: 2384071 - DNA, 25 bp, Homo sapien
ttactggaagatccacgtggtaaca

SEQ ID NO: 2384072 - DNA, 25 bp, Homo sapien
ctgtccagggcagcatacagagctc

SEQ ID NO: 2384073 - DNA, 25 bp, Homo sapien
agagctcagaaaggcgggcatctga

SEQ ID NO: 2384074 - DNA, 25 bp, Homo sapien
gcaaatgagtgcatcttccttcttc

SEQ ID NO: 2384075 - DNA, 25 bp, Homo sapien
ccagctctcctttcgcaaatgagtg

SEQ ID NO: 2384076 - DNA, 25 bp, Homo sapien
gggcccgtcattgaaatgtgatgga

SEQ ID NO: 2384077 - DNA, 25 bp, Homo sapien
gatgttacagcccatggtctgctgt

SEQ ID NO: 2384078 - DNA, 25 bp, Homo sapien
tggagcaatggaaacgctcacacgt

SEQ ID NO: 2384079 - DNA, 25 bp, Homo sapien
gccaatcaggttgaaaaatgtgaag

SEQ ID NO: 2384080 - DNA, 25 bp, Homo sapien
tcgccagagggaatcactgcagctt

SEQ ID NO: 2384081 - DNA, 25 bp, Homo sapien
aggcagtagccatgccaatcaggtt

SEQ ID NO: 2384082 - DNA, 25 bp, Homo sapien
gggactggcaaagtgctcagagcgg

SEQ ID NO: 2384083 - DNA, 25 bp, Homo sapien
ggactggcaaagtgctcagagcgga

SEQ ID NO: 2384084 - DNA, 25 bp, Homo sapien
tggagtggcctcgagggagggactg

SEQ ID NO: 2384085 - DNA, 25 bp, Homo sapien
aagcagatggagtggcctcgaggga

SEQ ID NO: 2384086 - DNA, 25 bp, Homo sapien
taataaggcagcttggggtccatac

SEQ ID NO: 2384087 - DNA, 25 bp, Homo sapien
ataaaagggaatccaaagattatct

SEQ ID NO: 2384088 - DNA, 25 bp, Homo sapien
gagagggagctcgtgcgtggatggt

SEQ ID NO: 2384089 - DNA, 25 bp, Homo sapien
taggaagggatgatgcggagaggga

SEQ ID NO: 2384090 - DNA, 25 bp, Homo sapien
tggtaacggccttcccaggagtcca

SEQ ID NO: 2384091 - DNA, 25 bp, Homo sapien
tccacattgccctcgtggggctgat

SEQ ID NO: 2384092 - DNA, 25 bp, Homo sapien
ctcactcccatggtaacggccttcc

SEQ ID NO: 2384093 - DNA, 25 bp, Homo sapien
cctcgtggggctgatagtctattac

SEQ ID NO: 2384094 - DNA, 25 bp, Homo sapien
ggagacatcatttcctgtacagatg

SEQ ID NO: 2384095 - DNA, 25 bp, Homo sapien
tttcctgtacagatgttgcacatgt

SEQ ID NO: 2384096 - DNA, 25 bp, Homo sapien
ggcacagtggagacatcatttcctg

SEQ ID NO: 2384097 - DNA, 25 bp, Homo sapien
gttgcacatgttactggagggctgg

SEQ ID NO: 2384098 - DNA, 25 bp, Homo sapien
gataaagttgtacctgagactaggc

SEQ ID NO: 2384099 - DNA, 25 bp, Homo sapien
gaggcctcatgatcacggcaaaggc

SEQ ID NO: 2384100 - DNA, 25 bp, Homo sapien
cagcaacattcactgttgtatcagt

SEQ ID NO: 2384101 - DNA, 25 bp, Homo sapien
cagagatagaaatccatgctggctt

SEQ ID NO: 2384102 - DNA, 25 bp, Homo sapien
tgggagaccatgtaagagactctga

SEQ ID NO: 2384103 - DNA, 25 bp, Homo sapien
tttctgggagaccatgtaagagact

SEQ ID NO: 2384104 - DNA, 25 bp, Homo sapien
gccagcatattagaaatccagctgt

SEQ ID NO: 2384105 - DNA, 25 bp, Homo sapien
actctgagccagcatattagaaatc

SEQ ID NO: 2384106 - DNA, 25 bp, Homo sapien
ggtgaaccttgagcacacttggtgg

SEQ ID NO: 2384107 - DNA, 25 bp, Homo sapien
ccaagaaatgtatcagggaccagct

SEQ ID NO: 2384108 - DNA, 25 bp, Homo sapien
tacttatgcaacttgggagggtcac

SEQ ID NO: 2384109 - DNA, 25 bp, Homo sapien
tgttgattcgttttccaagagggct

SEQ ID NO: 2384110 - DNA, 25 bp, Homo sapien
tccatgtagacactcatgggaatgt

SEQ ID NO: 2384111 - DNA, 25 bp, Homo sapien
aatgtcttcatatcccctcatcaca

SEQ ID NO: 2384112 - DNA, 25 bp, Homo sapien
ccacccaggttgtagatggaatgtc

SEQ ID NO: 2384113 - DNA, 25 bp, Homo sapien
tcatctgtccatgtagacactcatg

SEQ ID NO: 2384114 - DNA, 25 bp, Homo sapien
cttgcaacggaaggaagatacatcc

SEQ ID NO: 2384115 - DNA, 25 bp, Homo sapien
aagatggaattcaagctaaatctca

SEQ ID NO: 2384116 - DNA, 25 bp, Homo sapien
gaattcaagctaaatctcacaaaga

SEQ ID NO: 2384117 - DNA, 25 bp, Homo sapien
gaaggaagatacatccagaagatgg

SEQ ID NO: 2384118 - DNA, 25 bp, Homo sapien
ctcctcactataccgcctaagagtg

SEQ ID NO: 2384119 - DNA, 25 bp, Homo sapien
gctgatggagcttttgtcgtcttct

SEQ ID NO: 2384120 - DNA, 25 bp, Homo sapien
gcagaggccagtcctgttccttttt

SEQ ID NO: 2384121 - DNA, 25 bp, Homo sapien
taccgcctaagagtgagctgggcta

SEQ ID NO: 2384122 - DNA, 25 bp, Homo sapien
cttgtggtatgctaaagatgtagat

SEQ ID NO: 2384123 - DNA, 25 bp, Homo sapien
gggaataagttatgaccccaatcat

SEQ ID NO: 2384124 - DNA, 25 bp, Homo sapien
tgtagatgttgttagtttgggaata

SEQ ID NO: 2384125 - DNA, 25 bp, Homo sapien
agatgtagatgttgttagtttggga

SEQ ID NO: 2384126 - DNA, 25 bp, Homo sapien
caatgaccacatccgcatttgcggg

SEQ ID NO: 2384127 - DNA, 25 bp, Homo sapien
agatgacctggtaggcatcaacccc

SEQ ID NO: 2384128 - DNA, 25 bp, Homo sapien
agaaggtggatataaccagatgacc

SEQ ID NO: 2384129 - DNA, 25 bp, Homo sapien
catttgcgggtgttgactttggaag

SEQ ID NO: 2384130 - DNA, 25 bp, Homo sapien
ccatcttcttgtctggtccctggct

SEQ ID NO: 2384131 - DNA, 25 bp, Homo sapien
caagggtagtaaatgtcccattgtt

SEQ ID NO: 2384132 - DNA, 25 bp, Homo sapien
tcaaaggcaagggtagtaaatgtcc

SEQ ID NO: 2384133 - DNA, 25 bp, Homo sapien
ctgaattctcgtcatcagagaaccc

SEQ ID NO: 2384134 - DNA, 25 bp, Homo sapien
tcagagaaccccacactgtattcaa

SEQ ID NO: 2384135 - DNA, 25 bp, Homo sapien
tgaatcttgcgcactctgtcagcat

SEQ ID NO: 2384136 - DNA, 25 bp, Homo sapien
tccttttctcagtggtacagcaatg

SEQ ID NO: 2384137 - DNA, 25 bp, Homo sapien
cagtggtacagcaatgaatcttgcg

SEQ ID NO: 2384138 - DNA, 25 bp, Homo sapien
tacagcaatgaatcttgcgcactct

SEQ ID NO: 2384139 - DNA, 25 bp, Homo sapien
gggcaaggtcgctgcttgtcatctg

SEQ ID NO: 2384140 - DNA, 25 bp, Homo sapien
gcattccgcccaaatgtttgatatt

SEQ ID NO: 2384141 - DNA, 25 bp, Homo sapien
tctggtaggagactgggcaaggtcg

SEQ ID NO: 2384142 - DNA, 25 bp, Homo sapien
cggtgtcctcattgacatccaaagc

SEQ ID NO: 2384143 - DNA, 25 bp, Homo sapien
cagtgaacaggggcgatttgtactt

SEQ ID NO: 2384144 - DNA, 25 bp, Homo sapien
tgaacaggggcgatttgtacttttc

SEQ ID NO: 2384145 - DNA, 25 bp, Homo sapien
gcacagtgctggtggctctcccatg

SEQ ID NO: 2384146 - DNA, 25 bp, Homo sapien
acagtgctggtggctctcccatgcc

SEQ ID NO: 2384147 - DNA, 25 bp, Homo sapien
tgaaataatagctccaatttccagg

SEQ ID NO: 2384148 - DNA, 25 bp, Homo sapien
tgcttctctgaaataatagctccaa

SEQ ID NO: 2384149 - DNA, 25 bp, Homo sapien
gcttctctgaaataatagctccaat

SEQ ID NO: 2384150 - DNA, 25 bp, Homo sapien
ataatagctccaatttccagggctc

SEQ ID NO: 2384151 - DNA, 25 bp, Homo sapien
tgggtgaagcctttgctagttaatg

SEQ ID NO: 2384152 - DNA, 25 bp, Homo sapien
ttttcagttgttgcagtaggtgggt

SEQ ID NO: 2384153 - DNA, 25 bp, Homo sapien
taggtgggtgaagcctttgctagtt

SEQ ID NO: 2384154 - DNA, 25 bp, Homo sapien
tatttttcagttgttgcagtaggtg

SEQ ID NO: 2384155 - DNA, 25 bp, Homo sapien
ctcccataacgggagcaagggaagc

SEQ ID NO: 2384156 - DNA, 25 bp, Homo sapien
gggcgctgcagctcccataacggga

SEQ ID NO: 2384157 - DNA, 25 bp, Homo sapien
gcagctcccataacgggagcaaggg

SEQ ID NO: 2384158 - DNA, 25 bp, Homo sapien
gctgcagctcccataacgggagcaa

SEQ ID NO: 2384159 - DNA, 25 bp, Homo sapien
acagggtctcgttggagcctagatt

SEQ ID NO: 2384160 - DNA, 25 bp, Homo sapien
gggtctcgttggagcctagatttag

SEQ ID NO: 2384161 - DNA, 25 bp, Homo sapien
agcctagatttagacagaggaacca

SEQ ID NO: 2384162 - DNA, 25 bp, Homo sapien
tcgttggagcctagatttagacaga

SEQ ID NO: 2384163 - DNA, 25 bp, Homo sapien
cacgagcaccactctgggtctgatc

SEQ ID NO: 2384164 - DNA, 25 bp, Homo sapien
tccacgagcaccactctgggtctga

SEQ ID NO: 2384165 - DNA, 25 bp, Homo sapien
cgagcaccactctgggtctgatcag

SEQ ID NO: 2384166 - DNA, 25 bp, Homo sapien
agagcccctccacgagcaccactct

SEQ ID NO: 2384167 - DNA, 25 bp, Homo sapien
aaacatgatgttacacgtggtgtca

SEQ ID NO: 2384168 - DNA, 25 bp, Homo sapien
cgtggtgtcagtgatagcagagtct

SEQ ID NO: 2384169 - DNA, 25 bp, Homo sapien
ttaagcaaatgaacggtttcaaaca

SEQ ID NO: 2384170 - DNA, 25 bp, Homo sapien
ttagatgtccacgagataacccatc

SEQ ID NO: 2384171 - DNA, 25 bp, Homo sapien
catatttccaaaggaaaatagcttc

SEQ ID NO: 2384172 - DNA, 25 bp, Homo sapien
ttgtccatatttccaaaggaaaata

SEQ ID NO: 2384173 - DNA, 25 bp, Homo sapien
tccatatttccaaaggaaaatagct

SEQ ID NO: 2384174 - DNA, 25 bp, Homo sapien
tgtccatatttccaaaggaaaatag

SEQ ID NO: 2384175 - DNA, 25 bp, Homo sapien
attgaattcatacgagtattcagtc

SEQ ID NO: 2384176 - DNA, 25 bp, Homo sapien
gaattcatacgagtattcagtcgtg

SEQ ID NO: 2384177 - DNA, 25 bp, Homo sapien
tcatacgagtattcagtcgtgacat

SEQ ID NO: 2384178 - DNA, 25 bp, Homo sapien
attcatacgagtattcagtcgtgac

SEQ ID NO: 2384179 - DNA, 25 bp, Homo sapien
ttggaattctgtcccctgctccagc

SEQ ID NO: 2384180 - DNA, 25 bp, Homo sapien
cactcatgagcactttgggtagcag

SEQ ID NO: 2384181 - DNA, 25 bp, Homo sapien
tcatgtccacggtgcacgtgcggtc

SEQ ID NO: 2384182 - DNA, 25 bp, Homo sapien
tgccatgaacaaacgtcttgagagc

SEQ ID NO: 2384183 - DNA, 25 bp, Homo sapien
ctgccgggcagaggcctgggaggag

SEQ ID NO: 2384184 - DNA, 25 bp, Homo sapien
ggcctgggaggaggcagaggtggcc

SEQ ID NO: 2384185 - DNA, 25 bp, Homo sapien
gaggcctgggaggaggcagaggtgg

SEQ ID NO: 2384186 - DNA, 25 bp, Homo sapien
aggcctgggaggaggcagaggtggc

SEQ ID NO: 2384187 - DNA, 25 bp, Homo sapien
aaaaagctcataggttccatccacc

SEQ ID NO: 2384188 - DNA, 25 bp, Homo sapien
ttcctaagatctgggcacgttgctg

SEQ ID NO: 2384189 - DNA, 25 bp, Homo sapien
tgatgaataaaacggcccaatgtgc

SEQ ID NO: 2384190 - DNA, 25 bp, Homo sapien
tccaccatgccccaagttcctgatg

SEQ ID NO: 2384191 - DNA, 25 bp, Homo sapien
tctgagttaacagcagctcacctgt

SEQ ID NO: 2384192 - DNA, 25 bp, Homo sapien
cattctgagttaacagcagctcacc

SEQ ID NO: 2384193 - DNA, 25 bp, Homo sapien
tggacattctgagttaacagcagct

SEQ ID NO: 2384194 - DNA, 25 bp, Homo sapien
gacattctgagttaacagcagctca

SEQ ID NO: 2384195 - DNA, 25 bp, Homo sapien
gaaagacgctttctattctagagca

SEQ ID NO: 2384196 - DNA, 25 bp, Homo sapien
gttggaaagacgctttctattctag

SEQ ID NO: 2384197 - DNA, 25 bp, Homo sapien
gagagttggaaagacgctttctatt

SEQ ID NO: 2384198 - DNA, 25 bp, Homo sapien
agacgctttctattctagagcatac

SEQ ID NO: 2384199 - DNA, 25 bp, Homo sapien
tacattgtatcctaaacacttaaaa

SEQ ID NO: 2384200 - DNA, 25 bp, Homo sapien
ctgcagaggacgaagagcctccggg

SEQ ID NO: 2384201 - DNA, 25 bp, Homo sapien
cggcggtctctcacccagggtgtgt

SEQ ID NO: 2384202 - DNA, 25 bp, Homo sapien
tttagcaaagaggagtgtagatgcc

SEQ ID NO: 2384203 - DNA, 25 bp, Homo sapien
ccgacacctttcaccaccccaggtg

SEQ ID NO: 2384204 - DNA, 25 bp, Homo sapien
agccgacacctttcaccaccccagg

SEQ ID NO: 2384205 - DNA, 25 bp, Homo sapien
tcagccgacacctttcaccacccca

SEQ ID NO: 2384206 - DNA, 25 bp, Homo sapien
gacacctttcaccaccccaggtgtg

SEQ ID NO: 2384207 - DNA, 25 bp, Homo sapien
ccagggacttggcatgactcctcag

SEQ ID NO: 2384208 - DNA, 25 bp, Homo sapien
gccgccggacgtgtgctcaaatgaa

SEQ ID NO: 2384209 - DNA, 25 bp, Homo sapien
gagcttacaatgaagggccgccgga

SEQ ID NO: 2384210 - DNA, 25 bp, Homo sapien
tgaaggaatttaaccctgggtgcca

SEQ ID NO: 2384211 - DNA, 25 bp, Homo sapien
ttctccatctgtgcctctcgcttgg

SEQ ID NO: 2384212 - DNA, 25 bp, Homo sapien
cctctcgcttggcaaaacatcactt

SEQ ID NO: 2384213 - DNA, 25 bp, Homo sapien
tcgtcgttgagttctccatctgtgc

SEQ ID NO: 2384214 - DNA, 25 bp, Homo sapien
cttcacaacttcgtcgttgagttct

SEQ ID NO: 2384215 - DNA, 25 bp, Homo sapien
cctaacactactgcgggcaggtggt

SEQ ID NO: 2384216 - DNA, 25 bp, Homo sapien
gagccgatgagctcagctgtgtcat

SEQ ID NO: 2384217 - DNA, 25 bp, Homo sapien
catttcaggttcttggagccgatga

SEQ ID NO: 2384218 - DNA, 25 bp, Homo sapien
tgcttggagtccctaacactactgc

SEQ ID NO: 2384219 - DNA, 25 bp, Homo sapien
ggaactaagtgcctggtgcacatcc

SEQ ID NO: 2384220 - DNA, 25 bp, Homo sapien
taagtgcctggtgcacatcctccgt

SEQ ID NO: 2384221 - DNA, 25 bp, Homo sapien
tcatctttgcgtggccaagtttccc

SEQ ID NO: 2384222 - DNA, 25 bp, Homo sapien
cttggaactaagtgcctggtgcaca

SEQ ID NO: 2384223 - DNA, 25 bp, Homo sapien
gcaatagaacagtcccctttgagga

SEQ ID NO: 2384224 - DNA, 25 bp, Homo sapien
tgggccctgatcaatagtaaatggt

SEQ ID NO: 2384225 - DNA, 25 bp, Homo sapien
gatgcagacgagtttaatgccctgg

SEQ ID NO: 2384226 - DNA, 25 bp, Homo sapien
taaattgacagagtttgggccctga

SEQ ID NO: 2384227 - DNA, 25 bp, Homo sapien
tctgctgcatggtagccaaaacacc

SEQ ID NO: 2384228 - DNA, 25 bp, Homo sapien
tgcctggtgattgccagatgaggca

SEQ ID NO: 2384229 - DNA, 25 bp, Homo sapien
gttgagtctgttatgcgaagctggt

SEQ ID NO: 2384230 - DNA, 25 bp, Homo sapien
ggatgtccgtcttcttgccctgttc

SEQ ID NO: 2384231 - DNA, 25 bp, Homo sapien
ctctgaaagtgtttgtaccacggcc

SEQ ID NO: 2384232 - DNA, 25 bp, Homo sapien
tctgaaagtgtttgtaccacggcca

SEQ ID NO: 2384233 - DNA, 25 bp, Homo sapien
ctgaaagtgtttgtaccacggccat

SEQ ID NO: 2384234 - DNA, 25 bp, Homo sapien
tctctgaaagtgtttgtaccacggc

SEQ ID NO: 2384235 - DNA, 25 bp, Homo sapien
cctaggtgtttcagagttgtccacc

SEQ ID NO: 2384236 - DNA, 25 bp, Homo sapien
tatggcatcgccaaattccccctag

SEQ ID NO: 2384237 - DNA, 25 bp, Homo sapien
cccctaggtgtttcagagttgtcca

SEQ ID NO: 2384238 - DNA, 25 bp, Homo sapien
catcgccaaattccccctaggtgtt

SEQ ID NO: 2384239 - DNA, 25 bp, Homo sapien
catcccaaaggcctctggactactg

SEQ ID NO: 2384240 - DNA, 25 bp, Homo sapien
ttgtgtttctttgaacaggaggccc

SEQ ID NO: 2384241 - DNA, 25 bp, Homo sapien
tggactactgtcctggtcagcattg

SEQ ID NO: 2384242 - DNA, 25 bp, Homo sapien
ggaggccctcaagaggaagaactgt

SEQ ID NO: 2384243 - DNA, 25 bp, Homo sapien
aaatctcttttccacaattgtgctt

SEQ ID NO: 2384244 - DNA, 25 bp, Homo sapien
gaaatctcttttccacaattgtgct

SEQ ID NO: 2384245 - DNA, 25 bp, Homo sapien
ttttcaactttttcgagttcatgtg

SEQ ID NO: 2384246 - DNA, 25 bp, Homo sapien
actttttcgagttcatgtgtttaca

SEQ ID NO: 2384247 - DNA, 25 bp, Homo sapien
tcaactttttcgagttcatgtgttt

SEQ ID NO: 2384248 - DNA, 25 bp, Homo sapien
caactttttcgagttcatgtgttta

SEQ ID NO: 2384249 - DNA, 25 bp, Homo sapien
ttctgtggacaagcctcgggataag

SEQ ID NO: 2384250 - DNA, 25 bp, Homo sapien
tctgtagggcgtgaaaatcatgctc

SEQ ID NO: 2384251 - DNA, 25 bp, Homo sapien
caagcctcgggataagctctgtagg

SEQ ID NO: 2384252 - DNA, 25 bp, Homo sapien
gaaaatcatgctccccttcgatcca

SEQ ID NO: 2384253 - DNA, 25 bp, Homo sapien
tcccagttatgttcccttgcacatg

SEQ ID NO: 2384254 - DNA, 25 bp, Homo sapien
tccttcccagttatgttcccttgca

SEQ ID NO: 2384255 - DNA, 25 bp, Homo sapien
tgcatccttcccagttatgttccct

SEQ ID NO: 2384256 - DNA, 25 bp, Homo sapien
gtgcatccttcccagttatgttccc

SEQ ID NO: 2384257 - DNA, 25 bp, Homo sapien
gggcaccgtggcgatcgcctccgtt

SEQ ID NO: 2384258 - DNA, 25 bp, Homo sapien
tccgttccggatgcggtccttgcgg

SEQ ID NO: 2384259 - DNA, 25 bp, Homo sapien
gcagacaaatttttaaggcgaaagc

SEQ ID NO: 2384260 - DNA, 25 bp, Homo sapien
ctcacagctgtcactccgaaagggt

SEQ ID NO: 2384261 - DNA, 25 bp, Homo sapien
ggtcacctgggagagcacgaatatt

SEQ ID NO: 2384262 - DNA, 25 bp, Homo sapien
tcacctgggagagcacgaatattcc

SEQ ID NO: 2384263 - DNA, 25 bp, Homo sapien
ggagagcacgaatattccaactttt

SEQ ID NO: 2384264 - DNA, 25 bp, Homo sapien
cctgggagagcacgaatattccaac

SEQ ID NO: 2384265 - DNA, 25 bp, Homo sapien
caggtccactgatgccacaagcagg

SEQ ID NO: 2384266 - DNA, 25 bp, Homo sapien
atgccacaagcagggcgcctgagcg

SEQ ID NO: 2384267 - DNA, 25 bp, Homo sapien
aaatgttttaggatccaatctccag

SEQ ID NO: 2384268 - DNA, 25 bp, Homo sapien
ttaggatccaatctccaggtgcccc

SEQ ID NO: 2384269 - DNA, 25 bp, Homo sapien
caacaagaccacttcactgttacat

SEQ ID NO: 2384270 - DNA, 25 bp, Homo sapien
tggaggtctcctttcaacaagacca

SEQ ID NO: 2384271 - DNA, 25 bp, Homo sapien
ctgttacatgatcccttagctgctc

SEQ ID NO: 2384272 - DNA, 25 bp, Homo sapien
gctgacatcaatgtctgattcctgg

SEQ ID NO: 2384273 - DNA, 25 bp, Homo sapien
cttccagaagattccagcacgctcc

SEQ ID NO: 2384274 - DNA, 25 bp, Homo sapien
ttccagaagattccagcacgctcca

SEQ ID NO: 2384275 - DNA, 25 bp, Homo sapien
gggtgacttaactgggccactaatg

SEQ ID NO: 2384276 - DNA, 25 bp, Homo sapien
taatgagaattactggaagagccga

SEQ ID NO: 2384277 - DNA, 25 bp, Homo sapien
aaactgagtccacgccaggtgcctt

SEQ ID NO: 2384278 - DNA, 25 bp, Homo sapien
aaatgccagaggtcgtgaggaaacc

SEQ ID NO: 2384279 - DNA, 25 bp, Homo sapien
ttccgtctgcgtgcggaagagcagc

SEQ ID NO: 2384280 - DNA, 25 bp, Homo sapien
gaagttttccgtctgcgtgcggaag

SEQ ID NO: 2384281 - DNA, 25 bp, Homo sapien
tctgcgtgcggaagagcagcgacct

SEQ ID NO: 2384282 - DNA, 25 bp, Homo sapien
gcagatgaagttttccgtctgcgtg

SEQ ID NO: 2384283 - DNA, 25 bp, Homo sapien
gcttcctcttccaggaagccctcca

SEQ ID NO: 2384284 - DNA, 25 bp, Homo sapien
cttgcttcctcttccaggaagccct

SEQ ID NO: 2384285 - DNA, 25 bp, Homo sapien
ttgcttcctcttccaggaagccctc

SEQ ID NO: 2384286 - DNA, 25 bp, Homo sapien
cttcctcttccaggaagccctccat

SEQ ID NO: 2384287 - DNA, 25 bp, Homo sapien
ggtgactgtccatacgatgtgccca

SEQ ID NO: 2384288 - DNA, 25 bp, Homo sapien
gaaagtccctggaacgatgatcaaa

SEQ ID NO: 2384289 - DNA, 25 bp, Homo sapien
tcaaatattcgctgctcccgggtcc

SEQ ID NO: 2384290 - DNA, 25 bp, Homo sapien
tgttccccggactcagtgtactctc

SEQ ID NO: 2384291 - DNA, 25 bp, Homo sapien
gcagcattaccgtgtttcaccaatt

SEQ ID NO: 2384292 - DNA, 25 bp, Homo sapien
agcattaccgtgtttcaccaattcc

SEQ ID NO: 2384293 - DNA, 25 bp, Homo sapien
gtgggtagcagcattaccgtgtttc

SEQ ID NO: 2384294 - DNA, 25 bp, Homo sapien
gtagcagcattaccgtgtttcacca

SEQ ID NO: 2384295 - DNA, 25 bp, Homo sapien
gagacatcgattttcctccagatgg

SEQ ID NO: 2384296 - DNA, 25 bp, Homo sapien
tcccatctggcctaaatatagagac

SEQ ID NO: 2384297 - DNA, 25 bp, Homo sapien
gttccgttgacgctgctcccatctg

SEQ ID NO: 2384298 - DNA, 25 bp, Homo sapien
tggtacaaacatgtgccgctcggtt

SEQ ID NO: 2384299 - DNA, 25 bp, Homo sapien
aatgaaatgagatgtggggtgtcac

SEQ ID NO: 2384300 - DNA, 25 bp, Homo sapien
gcttggatctcaatccactgtctgg

SEQ ID NO: 2384301 - DNA, 25 bp, Homo sapien
gctacatcaaactgggtcctgcaga

SEQ ID NO: 2384302 - DNA, 25 bp, Homo sapien
ccactgtctggagtcaatggccttc

SEQ ID NO: 2384303 - DNA, 25 bp, Homo sapien
tctgaagtttctggtcaaagctatt

SEQ ID NO: 2384304 - DNA, 25 bp, Homo sapien
ctgaacagtgtccagggcggcaggc

SEQ ID NO: 2384305 - DNA, 25 bp, Homo sapien
ggacctgctgaacagtgtccagggc

SEQ ID NO: 2384306 - DNA, 25 bp, Homo sapien
ctgctgaacagtgtccagggcggca

SEQ ID NO: 2384307 - DNA, 25 bp, Homo sapien
gacctgctgaacagtgtccagggcg

SEQ ID NO: 2384308 - DNA, 25 bp, Homo sapien
cttgctcgtctcgtgatttggggat

SEQ ID NO: 2384309 - DNA, 25 bp, Homo sapien
gctcgtctcgtgatttggggatgaa

SEQ ID NO: 2384310 - DNA, 25 bp, Homo sapien
cgtctcgtgatttggggatgaatca

SEQ ID NO: 2384311 - DNA, 25 bp, Homo sapien
ccttctgtttgctggtcagcctctc

SEQ ID NO: 2384312 - DNA, 25 bp, Homo sapien
cattgcctgtgagaatggcctgaag

SEQ ID NO: 2384313 - DNA, 25 bp, Homo sapien
tggaagttgattccactcagcattg

SEQ ID NO: 2384314 - DNA, 25 bp, Homo sapien
ctggaagttgattccactcagcatt

SEQ ID NO: 2384315 - DNA, 25 bp, Homo sapien
actcagcattgcctgtgagaatggc

SEQ ID NO: 2384316 - DNA, 25 bp, Homo sapien
tactcatgaattttgcattcatcag

SEQ ID NO: 2384317 - DNA, 25 bp, Homo sapien
ttactcatgaattttgcattcatca

SEQ ID NO: 2384318 - DNA, 25 bp, Homo sapien
ctcatgaattttgcattcatcagag

SEQ ID NO: 2384319 - DNA, 25 bp, Homo sapien
catgaattttgcattcatcagagtc

SEQ ID NO: 2384320 - DNA, 25 bp, Homo sapien
tccttccagccggtaaagctactga

SEQ ID NO: 2384321 - DNA, 25 bp, Homo sapien
cagccggtaaagctactgaacgttt

SEQ ID NO: 2384322 - DNA, 25 bp, Homo sapien
attcaatcactgtccttccagccgg

SEQ ID NO: 2384323 - DNA, 25 bp, Homo sapien
actgaacgtttttgtctctcaccca

SEQ ID NO: 2384324 - DNA, 25 bp, Homo sapien
tcagctgatggctggacccaacctt

SEQ ID NO: 2384325 - DNA, 25 bp, Homo sapien
tgagaagatgaataggctccttcac

SEQ ID NO: 2384326 - DNA, 25 bp, Homo sapien
tggacccaacctttgcgcccatgat

SEQ ID NO: 2384327 - DNA, 25 bp, Homo sapien
acctttgcgcccatgatggagcaca

SEQ ID NO: 2384328 - DNA, 25 bp, Homo sapien
cattgacttcatggagtcttctaga

SEQ ID NO: 2384329 - DNA, 25 bp, Homo sapien
tgttctggaatagacagcagaggca

SEQ ID NO: 2384330 - DNA, 25 bp, Homo sapien
gatggtagcatcacagtcactaata

SEQ ID NO: 2384331 - DNA, 25 bp, Homo sapien
taataacctcaagaggagtctgctg

SEQ ID NO: 2384332 - DNA, 25 bp, Homo sapien
gtgggcaaccgagattttgagagcc

SEQ ID NO: 2384333 - DNA, 25 bp, Homo sapien
taaccaggatgtagacccaagtctt

SEQ ID NO: 2384334 - DNA, 25 bp, Homo sapien
tgggttgctggcttacatgtggtca

SEQ ID NO: 2384335 - DNA, 25 bp, Homo sapien
tgagccttgtactctctaaccagga

SEQ ID NO: 2384336 - DNA, 25 bp, Homo sapien
gagggaagtacttgaactcctcatc

SEQ ID NO: 2384337 - DNA, 25 bp, Homo sapien
agcccagtcttcagagggaagtact

SEQ ID NO: 2384338 - DNA, 25 bp, Homo sapien
caggaaactcgagtctcctggcagc

SEQ ID NO: 2384339 - DNA, 25 bp, Homo sapien
cccaggaaactcgagtctcctggca

SEQ ID NO: 2384340 - DNA, 25 bp, Homo sapien
tcagtttataggacctgcatatagt

SEQ ID NO: 2384341 - DNA, 25 bp, Homo sapien
ctcagtttataggacctgcatatag

SEQ ID NO: 2384342 - DNA, 25 bp, Homo sapien
cctcagtttataggacctgcatata

SEQ ID NO: 2384343 - DNA, 25 bp, Homo sapien
taagcagaacgcagatgattcctcc

SEQ ID NO: 2384344 - DNA, 25 bp, Homo sapien
tccagagaaccagtgttgtcccggt

SEQ ID NO: 2384345 - DNA, 25 bp, Homo sapien
aatgagagcaagtgacccacatgcc

SEQ ID NO: 2384346 - DNA, 25 bp, Homo sapien
atgtctcccacatgcatcacgtaag

SEQ ID NO: 2384347 - DNA, 25 bp, Homo sapien
gagatcatccccgatggcgatggcg

SEQ ID NO: 2384348 - DNA, 25 bp, Homo sapien
gagcccgctcgtaagaaccgaagct

SEQ ID NO: 2384349 - DNA, 25 bp, Homo sapien
tttacagaaactctgcgaccggccc

SEQ ID NO: 2384350 - DNA, 25 bp, Homo sapien
gaagctggcggctgaaatctggcac

SEQ ID NO: 2384351 - DNA, 25 bp, Homo sapien
gagatgcagttcgagacagctaggt

SEQ ID NO: 2384352 - DNA, 25 bp, Homo sapien
catgtcaggccaagattcgaaaacc

SEQ ID NO: 2384353 - DNA, 25 bp, Homo sapien
tgttcatccttgtgcttcggccgca

SEQ ID NO: 2384354 - DNA, 25 bp, Homo sapien
ggcttgtgtcattccgcggagctga

SEQ ID NO: 2384355 - DNA, 25 bp, Homo sapien
ttctcagacagactgcgcgaagcag

SEQ ID NO: 2384356 - DNA, 25 bp, Homo sapien
tctggctgcgcacacattaagaagt

SEQ ID NO: 2384357 - DNA, 25 bp, Homo sapien
tgtttttcatagactcggctggaga

SEQ ID NO: 2384358 - DNA, 25 bp, Homo sapien
ttgaataaacctgaaagtgcaccgg

SEQ ID NO: 2384359 - DNA, 25 bp, Homo sapien
gggcaggtggttgggctgctctgta

SEQ ID NO: 2384360 - DNA, 25 bp, Homo sapien
gggctgctctgtaagccttggtcct

SEQ ID NO: 2384361 - DNA, 25 bp, Homo sapien
ggcaggtggttgggctgctctgtaa

SEQ ID NO: 2384362 - DNA, 25 bp, Homo sapien
gctctgtaagccttggtcctgaccc

SEQ ID NO: 2384363 - DNA, 25 bp, Homo sapien
acttgcccagattcatcagtcaggg

SEQ ID NO: 2384364 - DNA, 25 bp, Homo sapien
ggtaacttgcccagattcatcagtc

SEQ ID NO: 2384365 - DNA, 25 bp, Homo sapien
ctcacaatccgtacagtggtaactt

SEQ ID NO: 2384366 - DNA, 25 bp, Homo sapien
aatccgtacagtggtaacttgccca

SEQ ID NO: 2384367 - DNA, 25 bp, Homo sapien
tgtgatcaacggcagtttcggtcac

SEQ ID NO: 2384368 - DNA, 25 bp, Homo sapien
tattcatgtgatcaacggcagtttc

SEQ ID NO: 2384369 - DNA, 25 bp, Homo sapien
tcatgtgatcaacggcagtttcggt

SEQ ID NO: 2384370 - DNA, 25 bp, Homo sapien
ttatatattcatgtgatcaacggca

SEQ ID NO: 2384371 - DNA, 25 bp, Homo sapien
aaacagcattcgctctccgagtgcc

SEQ ID NO: 2384372 - DNA, 25 bp, Homo sapien
cgttccgagaatcgccactagaggg

SEQ ID NO: 2384373 - DNA, 25 bp, Homo sapien
agagaccctgatgggaaaagcccct

SEQ ID NO: 2384374 - DNA, 25 bp, Homo sapien
tttctcaaagttgacctgcaggtgg

SEQ ID NO: 2384375 - DNA, 25 bp, Homo sapien
ctgtgtggcctgttttattgactca

SEQ ID NO: 2384376 - DNA, 25 bp, Homo sapien
gaatgccttggctatgtccataatt

SEQ ID NO: 2384377 - DNA, 25 bp, Homo sapien
gaaaaacgtgttatcacacctagtg

SEQ ID NO: 2384378 - DNA, 25 bp, Homo sapien
ccaatgaagcatggaaatgctgtca

SEQ ID NO: 2384379 - DNA, 25 bp, Homo sapien
gaagcacccacgatgtcactggcct

SEQ ID NO: 2384380 - DNA, 25 bp, Homo sapien
ctgaagcacccacgatgtcactggc

SEQ ID NO: 2384381 - DNA, 25 bp, Homo sapien
aagcacccacgatgtcactggcctc

SEQ ID NO: 2384382 - DNA, 25 bp, Homo sapien
tgaagcacccacgatgtcactggcc

SEQ ID NO: 2384383 - DNA, 25 bp, Homo sapien
tcctggaaatgctagtgtgactttc

SEQ ID NO: 2384384 - DNA, 25 bp, Homo sapien
ctagtgtgactttcctaagggttct

SEQ ID NO: 2384385 - DNA, 25 bp, Homo sapien
gacacttttagacctgccttttgtc

SEQ ID NO: 2384386 - DNA, 25 bp, Homo sapien
actggccgcacggctcctggaaatg

SEQ ID NO: 2384387 - DNA, 25 bp, Homo sapien
ccttgacaagtcgagagggtgacat

SEQ ID NO: 2384388 - DNA, 25 bp, Homo sapien
tcaagtgcagaccttgacaagtcga

SEQ ID NO: 2384389 - DNA, 25 bp, Homo sapien
cttgagctagcctcgagggtcaagt

SEQ ID NO: 2384390 - DNA, 25 bp, Homo sapien
gcctcgagggtcaagtgcagacctt

SEQ ID NO: 2384391 - DNA, 25 bp, Homo sapien
caggcctccgtgcttgtctgtttgc

SEQ ID NO: 2384392 - DNA, 25 bp, Homo sapien
gcttgctttcctgagatgctggcag

SEQ ID NO: 2384393 - DNA, 25 bp, Homo sapien
gccccgggaattcacagcttgcttt

SEQ ID NO: 2384394 - DNA, 25 bp, Homo sapien
tctcaggcctggtgataacactggg

SEQ ID NO: 2384395 - DNA, 25 bp, Homo sapien
agcccccttctgtgatggacacgcg

SEQ ID NO: 2384396 - DNA, 25 bp, Homo sapien
tgtccttgatgtacaccgtctttcc

SEQ ID NO: 2384397 - DNA, 25 bp, Homo sapien
ccccttctgtgatggacacgcgtgc

SEQ ID NO: 2384398 - DNA, 25 bp, Homo sapien
tctgtgatggacacgcgtgcccttt

SEQ ID NO: 2384399 - DNA, 25 bp, Homo sapien
cagtccagattagctcgcggtgaag

SEQ ID NO: 2384400 - DNA, 25 bp, Homo sapien
tgagctcactgcgaagactgatctg

SEQ ID NO: 2384401 - DNA, 25 bp, Homo sapien
tccgggctaagggaatccaggtcac

SEQ ID NO: 2384402 - DNA, 25 bp, Homo sapien
gattctactgaaacccgagtctggg

SEQ ID NO: 2384403 - DNA, 25 bp, Homo sapien
ggtttactgtggatggctacctgca

SEQ ID NO: 2384404 - DNA, 25 bp, Homo sapien
gcagtcctcatttatcagcgtccta

SEQ ID NO: 2384405 - DNA, 25 bp, Homo sapien
gacttagcccaaatgtctttatggc

SEQ ID NO: 2384406 - DNA, 25 bp, Homo sapien
tctttatggcccaagtgaaaacata

SEQ ID NO: 2384407 - DNA, 25 bp, Homo sapien
agccctccgcaaacaatctccctcc

SEQ ID NO: 2384408 - DNA, 25 bp, Homo sapien
tgcagccctccgcaaacaatctccc

SEQ ID NO: 2384409 - DNA, 25 bp, Homo sapien
ccctccgcaaacaatctccctccta

SEQ ID NO: 2384410 - DNA, 25 bp, Homo sapien
gctgcagccctccgcaaacaatctc

SEQ ID NO: 2384411 - DNA, 25 bp, Homo sapien
aattactaaggtcttcttctccatc

SEQ ID NO: 2384412 - DNA, 25 bp, Homo sapien
taagtaccaagggttgtctgcctag

SEQ ID NO: 2384413 - DNA, 25 bp, Homo sapien
taccatctggaaatagcatcgcttg

SEQ ID NO: 2384414 - DNA, 25 bp, Homo sapien
tgtagtagaaaagtcaaaagcccta

SEQ ID NO: 2384415 - DNA, 25 bp, Homo sapien
tcatatgccttgaggaagccacctt

SEQ ID NO: 2384416 - DNA, 25 bp, Homo sapien
tgttctggacgtgtcacatccgtgg

SEQ ID NO: 2384417 - DNA, 25 bp, Homo sapien
tacacggccgtgtgtgcgtggcttc

SEQ ID NO: 2384418 - DNA, 25 bp, Homo sapien
tagtgtgctttctgttcgcgaggac

SEQ ID NO: 2384419 - DNA, 25 bp, Homo sapien
ggaaatcccacaccttgtaagcagt

SEQ ID NO: 2384420 - DNA, 25 bp, Homo sapien
tgatctactgcctacaagttggaga

SEQ ID NO: 2384421 - DNA, 25 bp, Homo sapien
tcatttggtgcaagtccgaaggcct

SEQ ID NO: 2384422 - DNA, 25 bp, Homo sapien
tcttgatccgggtccaaaggccggc

SEQ ID NO: 2384423 - DNA, 25 bp, Homo sapien
ccacgctagcaagagcagaccttct

SEQ ID NO: 2384424 - DNA, 25 bp, Homo sapien
cgtgtgtttcggaggagagggatga

SEQ ID NO: 2384425 - DNA, 25 bp, Homo sapien
ctggctctgagatggccgtgtgttt

SEQ ID NO: 2384426 - DNA, 25 bp, Homo sapien
tggctctgagatggccgtgtgtttc

SEQ ID NO: 2384427 - DNA, 25 bp, Homo sapien
cggaggagagggatgacctgcagct

SEQ ID NO: 2384428 - DNA, 25 bp, Homo sapien
ggggaccgcagaccccagcccgcac

SEQ ID NO: 2384429 - DNA, 25 bp, Homo sapien
cagtggggaccgcagaccccagccc

SEQ ID NO: 2384430 - DNA, 25 bp, Homo sapien
gtggggaccgcagaccccagcccgc

SEQ ID NO: 2384431 - DNA, 25 bp, Homo sapien
cttccagtggggaccgcagacccca

SEQ ID NO: 2384432 - DNA, 25 bp, Homo sapien
gggagccgcgctcatcttcatggaa

SEQ ID NO: 2384433 - DNA, 25 bp, Homo sapien
acacaaaggagagggagccgcgctc

SEQ ID NO: 2384434 - DNA, 25 bp, Homo sapien
aacccgccgtcgtcactgaggaggg

SEQ ID NO: 2384435 - DNA, 25 bp, Homo sapien
tggaaggggatgaagccaaacccgc

SEQ ID NO: 2384436 - DNA, 25 bp, Homo sapien
gccccacggccgctggtattgggcc

SEQ ID NO: 2384437 - DNA, 25 bp, Homo sapien
cacggccgctggtattgggccgggc

SEQ ID NO: 2384438 - DNA, 25 bp, Homo sapien
acggccgctggtattgggccgggct

SEQ ID NO: 2384439 - DNA, 25 bp, Homo sapien
cccacggccgctggtattgggccgg

SEQ ID NO: 2384440 - DNA, 25 bp, Homo sapien
tcttgcttaccaaatgcaggcgaag

SEQ ID NO: 2384441 - DNA, 25 bp, Homo sapien
tgttcagaagtacagcgcatcgctg

SEQ ID NO: 2384442 - DNA, 25 bp, Homo sapien
tacagagactgagacacgggagaat

SEQ ID NO: 2384443 - DNA, 25 bp, Homo sapien
gactccaggctactgacgactcttg

SEQ ID NO: 2384444 - DNA, 25 bp, Homo sapien
atacacatggtgcagttgccaagcc

SEQ ID NO: 2384445 - DNA, 25 bp, Homo sapien
taatcacagcgtggactgtgcccgc

SEQ ID NO: 2384446 - DNA, 25 bp, Homo sapien
tgtctagagtacaggaagaaggtgc

SEQ ID NO: 2384447 - DNA, 25 bp, Homo sapien
taaagttctttgcacgtatcccctc

SEQ ID NO: 2384448 - DNA, 25 bp, Homo sapien
tgattggagttcctggccctagagc

SEQ ID NO: 2384449 - DNA, 25 bp, Homo sapien
tgtggcacgcacaaagcgaagctta

SEQ ID NO: 2384450 - DNA, 25 bp, Homo sapien
gcttaatcctcgtttcagttctggg

SEQ ID NO: 2384451 - DNA, 25 bp, Homo sapien
gagtgcaagctgactgcttatccag

SEQ ID NO: 2384452 - DNA, 25 bp, Homo sapien
cagtcattagctttcagagctgaca

SEQ ID NO: 2384453 - DNA, 25 bp, Homo sapien
tttcagagctgacacatcaggaggc

SEQ ID NO: 2384454 - DNA, 25 bp, Homo sapien
acacacgcaggcacagtcattagct

SEQ ID NO: 2384455 - DNA, 25 bp, Homo sapien
caggcacagtcattagctttcagag

SEQ ID NO: 2384456 - DNA, 25 bp, Homo sapien
caggacctgaaatcccgtgctcagc

SEQ ID NO: 2384457 - DNA, 25 bp, Homo sapien
acctgaaatcccgtgctcagctccc

SEQ ID NO: 2384458 - DNA, 25 bp, Homo sapien
aagcaggacctgaaatcccgtgctc

SEQ ID NO: 2384459 - DNA, 25 bp, Homo sapien
ggacctgaaatcccgtgctcagctc

SEQ ID NO: 2384460 - DNA, 25 bp, Homo sapien
ggagtgagcagtggacagcttcttc

SEQ ID NO: 2384461 - DNA, 25 bp, Homo sapien
tcttccttgaatttaaccaggagtg

SEQ ID NO: 2384462 - DNA, 25 bp, Homo sapien
tttctatagggctgccacacttgtg

SEQ ID NO: 2384463 - DNA, 25 bp, Homo sapien
tgaatttaaccaggagtgagcagtg

SEQ ID NO: 2384464 - DNA, 25 bp, Homo sapien
gatggcttactaatagcatcactta

SEQ ID NO: 2384465 - DNA, 25 bp, Homo sapien
cttcactggccggaagccaagatgg

SEQ ID NO: 2384466 - DNA, 25 bp, Homo sapien
taatgctagccctgtgggattcact

SEQ ID NO: 2384467 - DNA, 25 bp, Homo sapien
taagctctgagaaccgagttggcac

SEQ ID NO: 2384468 - DNA, 25 bp, Homo sapien
ctttggatcgctggcgtcgactggc

SEQ ID NO: 2384469 - DNA, 25 bp, Homo sapien
cagcgtattagcctttttgctgccc

SEQ ID NO: 2384470 - DNA, 25 bp, Homo sapien
caaaaaacaacaccgcagacagaca

SEQ ID NO: 2384471 - DNA, 25 bp, Homo sapien
cctggctcaggagggaccattcaag

SEQ ID NO: 2384472 - DNA, 25 bp, Homo sapien
gtggagaaggagcgtcctgggcagg

SEQ ID NO: 2384473 - DNA, 25 bp, Homo sapien
agtggagaaggagcgtcctgggcag

SEQ ID NO: 2384474 - DNA, 25 bp, Homo sapien
tcattcgctcgtggggtatttatgt

SEQ ID NO: 2384475 - DNA, 25 bp, Homo sapien
agctcccgcgaggacacggaggcgc

SEQ ID NO: 2384476 - DNA, 25 bp, Homo sapien
atttggcgagtgatgtgcccggcca

SEQ ID NO: 2384477 - DNA, 25 bp, Homo sapien
tgggtcgtgggaggagcgcgtcagc

SEQ ID NO: 2384478 - DNA, 25 bp, Homo sapien
gaagtgcgggcttggtttgtaccgc

SEQ ID NO: 2384479 - DNA, 25 bp, Homo sapien
gagatgccttcttggcggctgagtt

SEQ ID NO: 2384480 - DNA, 25 bp, Homo sapien
gcgggcttggtttgtaccgcggtga

SEQ ID NO: 2384481 - DNA, 25 bp, Homo sapien
tcttggcggctgagtttatttatta

SEQ ID NO: 2384482 - DNA, 25 bp, Homo sapien
tcacggccgcggcaaacttcggcct

SEQ ID NO: 2384483 - DNA, 25 bp, Homo sapien
gcctcttcttggagcgcccaggtgg

SEQ ID NO: 2384484 - DNA, 25 bp, Homo sapien
agctgtttcgaggtttgcgtcccgg

SEQ ID NO: 2384485 - DNA, 25 bp, Homo sapien
tttgcaaacaataccgggaagcgag

SEQ ID NO: 2384486 - DNA, 25 bp, Homo sapien
tgtcctcgcggggagctccgcgccc

SEQ ID NO: 2384487 - DNA, 25 bp, Homo sapien
gctggcgttggacgtgtcctcgcgg

SEQ ID NO: 2384488 - DNA, 25 bp, Homo sapien
ctcgcggggagctccgcgcccctca

SEQ ID NO: 2384489 - DNA, 25 bp, Homo sapien
ttggacgtgtcctcgcggggagctc

SEQ ID NO: 2384490 - DNA, 25 bp, Homo sapien
catgttgtagccgatgtccttgcac

SEQ ID NO: 2384491 - DNA, 25 bp, Homo sapien
catcaggttgggcatacgagtcatg

SEQ ID NO: 2384492 - DNA, 25 bp, Homo sapien
gggtagagacctgctcggtgcacat

SEQ ID NO: 2384493 - DNA, 25 bp, Homo sapien
gaactcgtgcaactggatggctgcc

SEQ ID NO: 2384494 - DNA, 25 bp, Homo sapien
gtccttcagcgggtgctcctgcgcg

SEQ ID NO: 2384495 - DNA, 25 bp, Homo sapien
cgagccgttgttgggcgcctccatg

SEQ ID NO: 2384496 - DNA, 25 bp, Homo sapien
cttgcccgggttgtcgcagccgccg

SEQ ID NO: 2384497 - DNA, 25 bp, Homo sapien
cgggtgggctcgtccgagccgttgt

SEQ ID NO: 2384498 - DNA, 25 bp, Homo sapien
ttgtcctcgcggctccagtacacgt

SEQ ID NO: 2384499 - DNA, 25 bp, Homo sapien
agagcggcgcgcacgacgcgctctt

SEQ ID NO: 2384500 - DNA, 25 bp, Homo sapien
ccagaccactgcgaagcgcttgtcc

SEQ ID NO: 2384501 - DNA, 25 bp, Homo sapien
gtccacgccgggcgtgcagagcggc

SEQ ID NO: 2384502 - DNA, 25 bp, Homo sapien
agaagcacagcaccgcccagatggc

SEQ ID NO: 2384503 - DNA, 25 bp, Homo sapien
gaagcgggccgggtcgatgaggaag

SEQ ID NO: 2384504 - DNA, 25 bp, Homo sapien
gtagcggaagcgggccgggtcgatg

SEQ ID NO: 2384505 - DNA, 25 bp, Homo sapien
gagaagaagcacagcaccgcccaga

SEQ ID NO: 2384506 - DNA, 25 bp, Homo sapien
aaagtagcaggcgatcacacaggtg

SEQ ID NO: 2384507 - DNA, 25 bp, Homo sapien
gccatcaggcagtccagcgttttag

SEQ ID NO: 2384508 - DNA, 25 bp, Homo sapien
ccacggagtagacgcagtagcacat

SEQ ID NO: 2384509 - DNA, 25 bp, Homo sapien
atcaggatggtcttcaccgccggga

SEQ ID NO: 2384510 - DNA, 25 bp, Homo sapien
ttttgtaaatcccaccgctggtgat

SEQ ID NO: 2384511 - DNA, 25 bp, Homo sapien
tcttctttaacctacggctgcacac

SEQ ID NO: 2384512 - DNA, 25 bp, Homo sapien
gcagggatctcatatttcccgtggt

SEQ ID NO: 2384513 - DNA, 25 bp, Homo sapien
cgctggtgatcacgctggccggttt

SEQ ID NO: 2384514 - DNA, 25 bp, Homo sapien
tgcagagagactattggtgaaggcc

SEQ ID NO: 2384515 - DNA, 25 bp, Homo sapien
ggatggctcatttgttaacccaggg

SEQ ID NO: 2384516 - DNA, 25 bp, Homo sapien
cacaagaggctacttcactggagga

SEQ ID NO: 2384517 - DNA, 25 bp, Homo sapien
gaaggccggagtctattttaagcaa

SEQ ID NO: 2384518 - DNA, 25 bp, Homo sapien
ctgggatggatccacagtgagacac

SEQ ID NO: 2384519 - DNA, 25 bp, Homo sapien
gggtcagatttcagcttagtagaga

SEQ ID NO: 2384520 - DNA, 25 bp, Homo sapien
ttgaatatgactttccttgggacca

SEQ ID NO: 2384521 - DNA, 25 bp, Homo sapien
gagacacattcagggataactaaca

SEQ ID NO: 2384522 - DNA, 25 bp, Homo sapien
tctgtatacctcctaagtatcggag

SEQ ID NO: 2384523 - DNA, 25 bp, Homo sapien
taaagcctgcagatgcataaatctc

SEQ ID NO: 2384524 - DNA, 25 bp, Homo sapien
caggcagccatcctcggatagacca

SEQ ID NO: 2384525 - DNA, 25 bp, Homo sapien
gatagaccactgaacttaacgagcc

SEQ ID NO: 2384526 - DNA, 25 bp, Homo sapien
cccacacatcttgcaggcctgctcc

SEQ ID NO: 2384527 - DNA, 25 bp, Homo sapien
ctcctcggtcaacggtggcccagag

SEQ ID NO: 2384528 - DNA, 25 bp, Homo sapien
aggcctgctcctcggtcaacggtgg

SEQ ID NO: 2384529 - DNA, 25 bp, Homo sapien
ccacacatcttgcaggcctgctcct

SEQ ID NO: 2384530 - DNA, 25 bp, Homo sapien
gcaggaactgaaaggtatttctagg

SEQ ID NO: 2384531 - DNA, 25 bp, Homo sapien
agcaggaactgaaaggtatttctag

SEQ ID NO: 2384532 - DNA, 25 bp, Homo sapien
gtatttctaggaacggtgcactcac

SEQ ID NO: 2384533 - DNA, 25 bp, Homo sapien
aaggtatttctaggaacggtgcact

SEQ ID NO: 2384534 - DNA, 25 bp, Homo sapien
ggctcgggatccagatggtggttgt

SEQ ID NO: 2384535 - DNA, 25 bp, Homo sapien
agccggcgagcgtgccattgcagac

SEQ ID NO: 2384536 - DNA, 25 bp, Homo sapien
ttgtggggggtctcaaaatcagcca

SEQ ID NO: 2384537 - DNA, 25 bp, Homo sapien
tgcagaccacatgggacccctattc

SEQ ID NO: 2384538 - DNA, 25 bp, Homo sapien
cagacccgtcggagaccagaggcca

SEQ ID NO: 2384539 - DNA, 25 bp, Homo sapien
agacccgtcggagaccagaggccat

SEQ ID NO: 2384540 - DNA, 25 bp, Homo sapien
gcagacccgtcggagaccagaggcc

SEQ ID NO: 2384541 - DNA, 25 bp, Homo sapien
ggagcacagaccctgtgaatgtgtg

SEQ ID NO: 2384542 - DNA, 25 bp, Homo sapien
caggggagcacagaccctgtgaatg

SEQ ID NO: 2384543 - DNA, 25 bp, Homo sapien
gaatgtgtgaactccactgcgtgtg

SEQ ID NO: 2384544 - DNA, 25 bp, Homo sapien
tgtgaatgtgtgaactccactgcgt

SEQ ID NO: 2384545 - DNA, 25 bp, Homo sapien
ctagagtgacttgctgtctcggggg

SEQ ID NO: 2384546 - DNA, 25 bp, Homo sapien
tagagtgacttgctgtctcgggggg

SEQ ID NO: 2384547 - DNA, 25 bp, Homo sapien
cagtgttatcattgcattgtcgatg

SEQ ID NO: 2384548 - DNA, 25 bp, Homo sapien
tgttatcattgcattgtcgatgcca

SEQ ID NO: 2384549 - DNA, 25 bp, Homo sapien
cccgggaccttcagtgttatcattg

SEQ ID NO: 2384550 - DNA, 25 bp, Homo sapien
tcattgcattgtcgatgccagccat

SEQ ID NO: 2384551 - DNA, 25 bp, Homo sapien
tcccaggaatccatggatggtgcac

SEQ ID NO: 2384552 - DNA, 25 bp, Homo sapien
taagctcccaggaatccatggatgg

SEQ ID NO: 2384553 - DNA, 25 bp, Homo sapien
tcctgcctcgcctgctgaggggtcc

SEQ ID NO: 2384554 - DNA, 25 bp, Homo sapien
gctgaggggtccactaagctcccag

SEQ ID NO: 2384555 - DNA, 25 bp, Homo sapien
attgcattgaaggagttaagctgac

SEQ ID NO: 2384556 - DNA, 25 bp, Homo sapien
taagctgacgataacgacgtagatg

SEQ ID NO: 2384557 - DNA, 25 bp, Homo sapien
aactccttgtccacagttattctgt

SEQ ID NO: 2384558 - DNA, 25 bp, Homo sapien
ctgaaatgaatattgcattgaagga

SEQ ID NO: 2384559 - DNA, 25 bp, Homo sapien
agcagcacatctgccaaggtcacgt

SEQ ID NO: 2384560 - DNA, 25 bp, Homo sapien
atctgccaaggtcacgttttcaaga

SEQ ID NO: 2384561 - DNA, 25 bp, Homo sapien
tgccaaggtcacgttttcaagagtt

SEQ ID NO: 2384562 - DNA, 25 bp, Homo sapien
aggtcacgttttcaagagtttccat

SEQ ID NO: 2384563 - DNA, 25 bp, Homo sapien
ctctcctgaaaacgaacacgccttt

SEQ ID NO: 2384564 - DNA, 25 bp, Homo sapien
tttctgcatctgaggtttacccagc

SEQ ID NO: 2384565 - DNA, 25 bp, Homo sapien
tcccctggcatctgctcgagttcca

SEQ ID NO: 2384566 - DNA, 25 bp, Homo sapien
cccagcacaggcctaggtgcctcag

SEQ ID NO: 2384567 - DNA, 25 bp, Homo sapien
aagcccgaggcgctcccacggcatc

SEQ ID NO: 2384568 - DNA, 25 bp, Homo sapien
aagcaagcccgaggcgctcccacgg

SEQ ID NO: 2384569 - DNA, 25 bp, Homo sapien
tcaaagcaagcccgaggcgctccca

SEQ ID NO: 2384570 - DNA, 25 bp, Homo sapien
agcccgaggcgctcccacggcatcc

SEQ ID NO: 2384571 - DNA, 25 bp, Homo sapien
gctttcgccaatgaacaagtcggtc

SEQ ID NO: 2384572 - DNA, 25 bp, Homo sapien
tttcgccaatgaacaagtcggtcag

SEQ ID NO: 2384573 - DNA, 25 bp, Homo sapien
tggctttcgccaatgaacaagtcgg

SEQ ID NO: 2384574 - DNA, 25 bp, Homo sapien
gttggctttcgccaatgaacaagtc

SEQ ID NO: 2384575 - DNA, 25 bp, Homo sapien
tggctttgataaggttctgagggct

SEQ ID NO: 2384576 - DNA, 25 bp, Homo sapien
agggctgcctttggcgcagttgccc

SEQ ID NO: 2384577 - DNA, 25 bp, Homo sapien
actccgctgtggctttgataaggtt

SEQ ID NO: 2384578 - DNA, 25 bp, Homo sapien
attcccactccgctgtggctttgat

SEQ ID NO: 2384579 - DNA, 25 bp, Homo sapien
catgtcaatgacttccttccacctg

SEQ ID NO: 2384580 - DNA, 25 bp, Homo sapien
tccataaccggttgtcctgtcccat

SEQ ID NO: 2384581 - DNA, 25 bp, Homo sapien
tctccatgtcaatgacttccttcca

SEQ ID NO: 2384582 - DNA, 25 bp, Homo sapien
ttccataaccggttgtcctgtccca

SEQ ID NO: 2384583 - DNA, 25 bp, Homo sapien
actgagtctgtttcgtgtcctccca

SEQ ID NO: 2384584 - DNA, 25 bp, Homo sapien
gtagaaatactgagtctgtttcgtg

SEQ ID NO: 2384585 - DNA, 25 bp, Homo sapien
atactgagtctgtttcgtgtcctcc

SEQ ID NO: 2384586 - DNA, 25 bp, Homo sapien
gaaatactgagtctgtttcgtgtcc

SEQ ID NO: 2384587 - DNA, 25 bp, Homo sapien
ggaaggcagtgagtgtctccggcat

SEQ ID NO: 2384588 - DNA, 25 bp, Homo sapien
tctgcttgatgctcagaactgaaag

SEQ ID NO: 2384589 - DNA, 25 bp, Homo sapien
ggcccatctccatctggactgtgtt

SEQ ID NO: 2384590 - DNA, 25 bp, Homo sapien
gcttgatgctcagaactgaaagggc

SEQ ID NO: 2384591 - DNA, 25 bp, Homo sapien
aagggcccatctccatctggactgt

SEQ ID NO: 2384592 - DNA, 25 bp, Homo sapien
gaacttctgggtcgttgtcttgcaa

SEQ ID NO: 2384593 - DNA, 25 bp, Homo sapien
ttttggctgtgcttaggagcgagct

SEQ ID NO: 2384594 - DNA, 25 bp, Homo sapien
tcttcaatccgtctgaagcagggca

SEQ ID NO: 2384595 - DNA, 25 bp, Homo sapien
taattccatcccagacaagggtgag

SEQ ID NO: 2384596 - DNA, 25 bp, Homo sapien
catggccataagcaaggcagatgag

SEQ ID NO: 2384597 - DNA, 25 bp, Homo sapien
catggattaagctcaatgggtctga

SEQ ID NO: 2384598 - DNA, 25 bp, Homo sapien
tgtccaacagctattgtgtccacag

SEQ ID NO: 2384599 - DNA, 25 bp, Homo sapien
caagccttgagtgtgtgccccatga

SEQ ID NO: 2384600 - DNA, 25 bp, Homo sapien
gaagagaactcagcttcaatgcact

SEQ ID NO: 2384601 - DNA, 25 bp, Homo sapien
tccgtctggtgagtcatgttggtaa

SEQ ID NO: 2384602 - DNA, 25 bp, Homo sapien
tcactgcgtggaggaaacgctcgcc

SEQ ID NO: 2384603 - DNA, 25 bp, Homo sapien
tcaatgcactccgtgatgacctgtg

SEQ ID NO: 2384604 - DNA, 25 bp, Homo sapien
ctgggtggtgatccgggccacctcc

SEQ ID NO: 2384605 - DNA, 25 bp, Homo sapien
tgccctccttgtgccgggcacgttg

SEQ ID NO: 2384606 - DNA, 25 bp, Homo sapien
cccctggtgactgatgagtgccctc

SEQ ID NO: 2384607 - DNA, 25 bp, Homo sapien
cgggcacgttgctgggtggtgatcc

SEQ ID NO: 2384608 - DNA, 25 bp, Homo sapien
cctgatgccgagtcacagaacaggc

SEQ ID NO: 2384609 - DNA, 25 bp, Homo sapien
gccctgatgccgagtcacagaacag

SEQ ID NO: 2384610 - DNA, 25 bp, Homo sapien
gatgccgagtcacagaacaggcctg

SEQ ID NO: 2384611 - DNA, 25 bp, Homo sapien
tgatgccgagtcacagaacaggcct

SEQ ID NO: 2384612 - DNA, 25 bp, Homo sapien
tgctcttttataggacagtgtagta

SEQ ID NO: 2384613 - DNA, 25 bp, Homo sapien
tatgtccccgagtgcccaatgttta

SEQ ID NO: 2384614 - DNA, 25 bp, Homo sapien
ggtacagttgatcccttcaccgagg

SEQ ID NO: 2384615 - DNA, 25 bp, Homo sapien
gtgtagtattccttaaggtgtcttc

SEQ ID NO: 2384616 - DNA, 25 bp, Homo sapien
gtgtcacgtctactcatttcctgca

SEQ ID NO: 2384617 - DNA, 25 bp, Homo sapien
tcacgtctactcatttcctgcatgg

SEQ ID NO: 2384618 - DNA, 25 bp, Homo sapien
ggagtgtcacgtctactcatttcct

SEQ ID NO: 2384619 - DNA, 25 bp, Homo sapien
gagtgtcacgtctactcatttcctg

SEQ ID NO: 2384620 - DNA, 25 bp, Homo sapien
agcacagagctctcgttctcactca

SEQ ID NO: 2384621 - DNA, 25 bp, Homo sapien
ctgagggcagccgatgactggctct

SEQ ID NO: 2384622 - DNA, 25 bp, Homo sapien
tgctctccccggtgacctcacatgc

SEQ ID NO: 2384623 - DNA, 25 bp, Homo sapien
gtgacctcacatgctcccagcagct

SEQ ID NO: 2384624 - DNA, 25 bp, Homo sapien
tgctcgccacttgtttgttgctcct

SEQ ID NO: 2384625 - DNA, 25 bp, Homo sapien
gtgtttagcacacagcggttatgcg

SEQ ID NO: 2384626 - DNA, 25 bp, Homo sapien
tatgcgactcttggatgctggcatg

SEQ ID NO: 2384627 - DNA, 25 bp, Homo sapien
tcactgctcgccacttgtttgttgc

SEQ ID NO: 2384628 - DNA, 25 bp, Homo sapien
tggtgtggccttgcggctggcacat

SEQ ID NO: 2384629 - DNA, 25 bp, Homo sapien
tccatcccaggcgttaaataaggca

SEQ ID NO: 2384630 - DNA, 25 bp, Homo sapien
taaataaggcatttgcatggatggt

SEQ ID NO: 2384631 - DNA, 25 bp, Homo sapien
catttgcatggatggtgtggccttg

SEQ ID NO: 2384632 - DNA, 25 bp, Homo sapien
tttcctgcttgcatgaacggcacgc

SEQ ID NO: 2384633 - DNA, 25 bp, Homo sapien
caggttttatatggcagtagtttcc

SEQ ID NO: 2384634 - DNA, 25 bp, Homo sapien
aacggcacgcgtgtctcccttcggg

SEQ ID NO: 2384635 - DNA, 25 bp, Homo sapien
gagtcccttgtgtctgaagcaggcg

SEQ ID NO: 2384636 - DNA, 25 bp, Homo sapien
tttacaaaagtctggacacttcgtc

SEQ ID NO: 2384637 - DNA, 25 bp, Homo sapien
gtctggacacttcgtctctgagtga

SEQ ID NO: 2384638 - DNA, 25 bp, Homo sapien
tcaaggtgtgaagacttggactcaa

SEQ ID NO: 2384639 - DNA, 25 bp, Homo sapien
aatacatggggcaggacatttacaa

SEQ ID NO: 2384640 - DNA, 25 bp, Homo sapien
tcctccccaagagctgtgtagtttt

SEQ ID NO: 2384641 - DNA, 25 bp, Homo sapien
cctccccaagagctgtgtagttttg

SEQ ID NO: 2384642 - DNA, 25 bp, Homo sapien
tgtagttttgttttggagtggccat

SEQ ID NO: 2384643 - DNA, 25 bp, Homo sapien
ttcctccccaagagctgtgtagttt

SEQ ID NO: 2384644 - DNA, 25 bp, Homo sapien
tttcttcttcaaatattgcatcctt

SEQ ID NO: 2384645 - DNA, 25 bp, Homo sapien
tgttgtgttcatttcttcttcaaat

SEQ ID NO: 2384646 - DNA, 25 bp, Homo sapien
ctgttgtgttcatttcttcttcaaa

SEQ ID NO: 2384647 - DNA, 25 bp, Homo sapien
cttcttcaaatattgcatccttctc

SEQ ID NO: 2384648 - DNA, 25 bp, Homo sapien
tgagggatgcttcgtgactcaacgc

SEQ ID NO: 2384649 - DNA, 25 bp, Homo sapien
tgcaagtcatccagcacgggagcaa

SEQ ID NO: 2384650 - DNA, 25 bp, Homo sapien
gcggagcacgttggtctgagcacat

SEQ ID NO: 2384651 - DNA, 25 bp, Homo sapien
gctgctgaagccctgaaggctgatt

SEQ ID NO: 2384652 - DNA, 25 bp, Homo sapien
cttcgaaatggtgcccacgtgggca

SEQ ID NO: 2384653 - DNA, 25 bp, Homo sapien
gcagtggactcgatcttggtctggc

SEQ ID NO: 2384654 - DNA, 25 bp, Homo sapien
gcggcggcgcacgaagtagaccctc

SEQ ID NO: 2384655 - DNA, 25 bp, Homo sapien
agtagaccctccatagacttcgaaa

SEQ ID NO: 2384656 - DNA, 25 bp, Homo sapien
cgggcggatgaacaccgcctcccgg

SEQ ID NO: 2384657 - DNA, 25 bp, Homo sapien
gggcagcgagcaacaggcgctcttt

SEQ ID NO: 2384658 - DNA, 25 bp, Homo sapien
cgccggcctcgtgtctgtacgccat

SEQ ID NO: 2384659 - DNA, 25 bp, Homo sapien
tgggttcccgagagagccagggaca

SEQ ID NO: 2384660 - DNA, 25 bp, Homo sapien
cgctgccctcgccctagtcctggtc

SEQ ID NO: 2384661 - DNA, 25 bp, Homo sapien
gctgccctcgccctagtcctggtcc

SEQ ID NO: 2384662 - DNA, 25 bp, Homo sapien
agcgctctacgtccaggtttcccag

SEQ ID NO: 2384663 - DNA, 25 bp, Homo sapien
gggctcagcgctctacgtccaggtt

SEQ ID NO: 2384664 - DNA, 25 bp, Homo sapien
gtttcccagcacaactctggttttc

SEQ ID NO: 2384665 - DNA, 25 bp, Homo sapien
tcccagcacaactctggttttcagc

SEQ ID NO: 2384666 - DNA, 25 bp, Homo sapien
taagtgcttgaactggatgcagaac

SEQ ID NO: 2384667 - DNA, 25 bp, Homo sapien
cagtctttcacacaaacggtaacaa

SEQ ID NO: 2384668 - DNA, 25 bp, Homo sapien
gtaacaacccacacataagtgcttg

SEQ ID NO: 2384669 - DNA, 25 bp, Homo sapien
cagaaccaaaagacgtccagtggga

SEQ ID NO: 2384670 - DNA, 25 bp, Homo sapien
cctcatcgtggtggtacacaatgtc

SEQ ID NO: 2384671 - DNA, 25 bp, Homo sapien
ctcatcgtggtggtacacaatgtca

SEQ ID NO: 2384672 - DNA, 25 bp, Homo sapien
tcgtggtggtacacaatgtcatcag

SEQ ID NO: 2384673 - DNA, 25 bp, Homo sapien
catcgtggtggtacacaatgtcatc

SEQ ID NO: 2384674 - DNA, 25 bp, Homo sapien
tggagaggaaacaatcttgaagaca

SEQ ID NO: 2384675 - DNA, 25 bp, Homo sapien
gcaatcgcatttgataatttctaca

SEQ ID NO: 2384676 - DNA, 25 bp, Homo sapien
caatactcaatggaggcaatcgcat

SEQ ID NO: 2384677 - DNA, 25 bp, Homo sapien
gcttaccttgcactgggcactgcag

SEQ ID NO: 2384678 - DNA, 25 bp, Homo sapien
cagctgcgctgtctcctgaccgcgg

SEQ ID NO: 2384679 - DNA, 25 bp, Homo sapien
agctgcgctgtctcctgaccgcggg

SEQ ID NO: 2384680 - DNA, 25 bp, Homo sapien
tgcgctgtctcctgaccgcgggccc

SEQ ID NO: 2384681 - DNA, 25 bp, Homo sapien
gctgtctcctgaccgcgggcccttc

SEQ ID NO: 2384682 - DNA, 25 bp, Homo sapien
ctctgccgtccacggccaaataatt

SEQ ID NO: 2384683 - DNA, 25 bp, Homo sapien
tcctctctgccgtccacggccaaat

SEQ ID NO: 2384684 - DNA, 25 bp, Homo sapien
ctgttcctctctgccgtccacggcc

SEQ ID NO: 2384685 - DNA, 25 bp, Homo sapien
ggccaaataattccccctctgctgg

SEQ ID NO: 2384686 - DNA, 25 bp, Homo sapien
tcttaaacagtttcagcacaaattt

SEQ ID NO: 2384687 - DNA, 25 bp, Homo sapien
aatttgctgtatatgttgaacagag

SEQ ID NO: 2384688 - DNA, 25 bp, Homo sapien
cagtttcagcacaaatttttgtacc

SEQ ID NO: 2384689 - DNA, 25 bp, Homo sapien
tgaacagagttgttaagacttcctt

SEQ ID NO: 2384690 - DNA, 25 bp, Homo sapien
tactgaggtgtagaagacaaggcat

SEQ ID NO: 2384691 - DNA, 25 bp, Homo sapien
tgcagatgcaccctttcaagagatg

SEQ ID NO: 2384692 - DNA, 25 bp, Homo sapien
tctgccagcctaacgagagaatggt

SEQ ID NO: 2384693 - DNA, 25 bp, Homo sapien
taaaggccttgtcactgtcctgggc

SEQ ID NO: 2384694 - DNA, 25 bp, Homo sapien
gataactcctgaaatccagcagata

SEQ ID NO: 2384695 - DNA, 25 bp, Homo sapien
gctaacgataactcctgaaatccag

SEQ ID NO: 2384696 - DNA, 25 bp, Homo sapien
ctctctctgctaacgataactcctg

SEQ ID NO: 2384697 - DNA, 25 bp, Homo sapien
gaaaatctctacgacgacctcctct

SEQ ID NO: 2384698 - DNA, 25 bp, Homo sapien
tctgccttgtattcacaccaagatc

SEQ ID NO: 2384699 - DNA, 25 bp, Homo sapien
ctgccttgtattcacaccaagatca

SEQ ID NO: 2384700 - DNA, 25 bp, Homo sapien
ttctgccttgtattcacaccaagat

SEQ ID NO: 2384701 - DNA, 25 bp, Homo sapien
tgccttgtattcacaccaagatcat

SEQ ID NO: 2384702 - DNA, 25 bp, Homo sapien
gatgtcagccggaaatggttagtgc

SEQ ID NO: 2384703 - DNA, 25 bp, Homo sapien
taatatcgttccatcaaaagcatga

SEQ ID NO: 2384704 - DNA, 25 bp, Homo sapien
aaaagaagagctgaacggagtcttc

SEQ ID NO: 2384705 - DNA, 25 bp, Homo sapien
ccatcagtgggttatagtcaatgtg

SEQ ID NO: 2384706 - DNA, 25 bp, Homo sapien
ttctgctttgaagtggaaatccccc

SEQ ID NO: 2384707 - DNA, 25 bp, Homo sapien
gttctgctttgaagtggaaatcccc

SEQ ID NO: 2384708 - DNA, 25 bp, Homo sapien
agttctgctttgaagtggaaatccc

SEQ ID NO: 2384709 - DNA, 25 bp, Homo sapien
aatccttaaaggacaattatgccca

SEQ ID NO: 2384710 - DNA, 25 bp, Homo sapien
tccttaaaggacaattatgcccaat

SEQ ID NO: 2384711 - DNA, 25 bp, Homo sapien
aaaggacaattatgcccaatcacat

SEQ ID NO: 2384712 - DNA, 25 bp, Homo sapien
ttaaaggacaattatgcccaatcac

SEQ ID NO: 2384713 - DNA, 25 bp, Homo sapien
atcctctccattccgggtcttacta

SEQ ID NO: 2384714 - DNA, 25 bp, Homo sapien
taaagtgatcgttatcctcacatcc

SEQ ID NO: 2384715 - DNA, 25 bp, Homo sapien
catttgttaaagtgatcgttatcct

SEQ ID NO: 2384716 - DNA, 25 bp, Homo sapien
tgcaaacaagttggtgatgtaggtg

SEQ ID NO: 2384717 - DNA, 25 bp, Homo sapien
ccaatgctgaaaatctaggagaact

SEQ ID NO: 2384718 - DNA, 25 bp, Homo sapien
gatgaattttctatcagtaaaccac

SEQ ID NO: 2384719 - DNA, 25 bp, Homo sapien
taaaccacaccttaagttactgcaa

SEQ ID NO: 2384720 - DNA, 25 bp, Homo sapien
aaggcaggatacttgcttaaagcaa

SEQ ID NO: 2384721 - DNA, 25 bp, Homo sapien
aatatcaattgggtcatttgggtta

SEQ ID NO: 2384722 - DNA, 25 bp, Homo sapien
tcgtccaatttgttgcaaattcatg

SEQ ID NO: 2384723 - DNA, 25 bp, Homo sapien
tcatttgggttataataatttcgtc

SEQ ID NO: 2384724 - DNA, 25 bp, Homo sapien
taataatttcgtccaatttgttgca

SEQ ID NO: 2384725 - DNA, 25 bp, Homo sapien
gtctcacttcgaaggactttatggc

SEQ ID NO: 2384726 - DNA, 25 bp, Homo sapien
tggaagtagtgaagccaggccaaat

SEQ ID NO: 2384727 - DNA, 25 bp, Homo sapien
actgaaggatggaagtagtgaagcc

SEQ ID NO: 2384728 - DNA, 25 bp, Homo sapien
taacgtcagtgcagagcatgatgct

SEQ ID NO: 2384729 - DNA, 25 bp, Homo sapien
cttcctgtagtattctaagaagctg

SEQ ID NO: 2384730 - DNA, 25 bp, Homo sapien
tcaatatcatccactctgtatgtct

SEQ ID NO: 2384731 - DNA, 25 bp, Homo sapien
aagaagctgacttcagagccgtcgg

SEQ ID NO: 2384732 - DNA, 25 bp, Homo sapien
cagagccgtcggctttcttaaaggt

SEQ ID NO: 2384733 - DNA, 25 bp, Homo sapien
ttcaccagacacagggccacgggtg

SEQ ID NO: 2384734 - DNA, 25 bp, Homo sapien
acttcaccagacacagggccacggg

SEQ ID NO: 2384735 - DNA, 25 bp, Homo sapien
acagggccacgggtgccacatcact

SEQ ID NO: 2384736 - DNA, 25 bp, Homo sapien
agacacagggccacgggtgccacat

SEQ ID NO: 2384737 - DNA, 25 bp, Homo sapien
aaaccaactatgaccttctctacca

SEQ ID NO: 2384738 - DNA, 25 bp, Homo sapien
catacaaggtgtgtccaacagaggg

SEQ ID NO: 2384739 - DNA, 25 bp, Homo sapien
taaacattttcctctacacctgaaa

SEQ ID NO: 2384740 - DNA, 25 bp, Homo sapien
cacttactagtaaaactgcatttct

SEQ ID NO: 2384741 - DNA, 25 bp, Homo sapien
tgggctggctgaccaagacaggctg

SEQ ID NO: 2384742 - DNA, 25 bp, Homo sapien
gacaggctgcttcaagtcggtgatc

SEQ ID NO: 2384743 - DNA, 25 bp, Homo sapien
aggaatgagcatggcaggccctggc

SEQ ID NO: 2384744 - DNA, 25 bp, Homo sapien
agtcggtgatctcttggttgtattg

SEQ ID NO: 2384745 - DNA, 25 bp, Homo sapien
aataactggagtatagggtgatggt

SEQ ID NO: 2384746 - DNA, 25 bp, Homo sapien
aataagacatttaaaggcatatggt

SEQ ID NO: 2384747 - DNA, 25 bp, Homo sapien
tcaggtctaaataactggagtatag

SEQ ID NO: 2384748 - DNA, 25 bp, Homo sapien
ggtgatggtgagtgggaattcccag

SEQ ID NO: 2384749 - DNA, 25 bp, Homo sapien
ggagttagtcttgtatgaacggcta

SEQ ID NO: 2384750 - DNA, 25 bp, Homo sapien
tcattacgcattttatcagttagac

SEQ ID NO: 2384751 - DNA, 25 bp, Homo sapien
tcaatgagtcgtcccacttcacgct

SEQ ID NO: 2384752 - DNA, 25 bp, Homo sapien
tgaacggctaagtctttcatcacgt

SEQ ID NO: 2384753 - DNA, 25 bp, Homo sapien
agtctcgaagctccctttgaacatt

SEQ ID NO: 2384754 - DNA, 25 bp, Homo sapien
caaagctcaaaccccagtctcgaag

SEQ ID NO: 2384755 - DNA, 25 bp, Homo sapien
ccccagtctcgaagctccctttgaa

SEQ ID NO: 2384756 - DNA, 25 bp, Homo sapien
aagctcaaaccccagtctcgaagct

SEQ ID NO: 2384757 - DNA, 25 bp, Homo sapien
tttccaccttggtgaatcttttctg

SEQ ID NO: 2384758 - DNA, 25 bp, Homo sapien
accttggtgaatcttttctgtttgc

SEQ ID NO: 2384759 - DNA, 25 bp, Homo sapien
ccaccttggtgaatcttttctgttt

SEQ ID NO: 2384760 - DNA, 25 bp, Homo sapien
tccaccttggtgaatcttttctgtt

SEQ ID NO: 2384761 - DNA, 25 bp, Homo sapien
gcttttctcatttgcatgcccatgg

SEQ ID NO: 2384762 - DNA, 25 bp, Homo sapien
gcttaacactaattaatggtgcacc

SEQ ID NO: 2384763 - DNA, 25 bp, Homo sapien
tctttggaccaatctgcaaattgtg

SEQ ID NO: 2384764 - DNA, 25 bp, Homo sapien
tttcttcgcgtatagatcaacagcc

SEQ ID NO: 2384765 - DNA, 25 bp, Homo sapien
cagtagcgacaaatggaccgtgcat

SEQ ID NO: 2384766 - DNA, 25 bp, Homo sapien
aatccaacactcagacacagtagcg

SEQ ID NO: 2384767 - DNA, 25 bp, Homo sapien
aagtacacaatccaacactcagaca

SEQ ID NO: 2384768 - DNA, 25 bp, Homo sapien
aaatggaccgtgcataaacaccttc

SEQ ID NO: 2384769 - DNA, 25 bp, Homo sapien
gtaagactcttaagtaggcttcagt

SEQ ID NO: 2384770 - DNA, 25 bp, Homo sapien
tgtaagactcttaagtaggcttcag

SEQ ID NO: 2384771 - DNA, 25 bp, Homo sapien
gctgtaagactcttaagtaggcttc

SEQ ID NO: 2384772 - DNA, 25 bp, Homo sapien
ctgtaagactcttaagtaggcttca

SEQ ID NO: 2384773 - DNA, 25 bp, Homo sapien
tccgattacttgacaacagacagac

SEQ ID NO: 2384774 - DNA, 25 bp, Homo sapien
atagcatcgtatttgtccttccgat

SEQ ID NO: 2384775 - DNA, 25 bp, Homo sapien
tttgcctaaggttcgggccaccaca

SEQ ID NO: 2384776 - DNA, 25 bp, Homo sapien
gggtagggcaatctgtacacaggta

SEQ ID NO: 2384777 - DNA, 25 bp, Homo sapien
tcatgtcatggtaacaatcgatgcc

SEQ ID NO: 2384778 - DNA, 25 bp, Homo sapien
ggtcatcccttcattgatgctggca

SEQ ID NO: 2384779 - DNA, 25 bp, Homo sapien
aacaaatcctgcgattgacctccgc

SEQ ID NO: 2384780 - DNA, 25 bp, Homo sapien
tgccaacgatcatcacgagcttcag

SEQ ID NO: 2384781 - DNA, 25 bp, Homo sapien
ctgaaatatgcagcgtgagaaccag

SEQ ID NO: 2384782 - DNA, 25 bp, Homo sapien
ggcagactttgagcccatctaccag

SEQ ID NO: 2384783 - DNA, 25 bp, Homo sapien
tttgagcccatctaccagctcctgt

SEQ ID NO: 2384784 - DNA, 25 bp, Homo sapien
cttgcaggcagactttgagcccatc

SEQ ID NO: 2384785 - DNA, 25 bp, Homo sapien
tgcaggcagactttgagcccatcta

SEQ ID NO: 2384786 - DNA, 25 bp, Homo sapien
tacgccatcgcggtacacgatgatc

SEQ ID NO: 2384787 - DNA, 25 bp, Homo sapien
gtgttttcagctggccgtctcctac

SEQ ID NO: 2384788 - DNA, 25 bp, Homo sapien
aaactgtggcacttcgtagttcacc

SEQ ID NO: 2384789 - DNA, 25 bp, Homo sapien
tgtaacctctaccaatggattttag

SEQ ID NO: 2384790 - DNA, 25 bp, Homo sapien
gccaaagatgactcagaagcccgtt

SEQ ID NO: 2384791 - DNA, 25 bp, Homo sapien
tatgtgcaagcacacgaaacaggat

SEQ ID NO: 2384792 - DNA, 25 bp, Homo sapien
tctgagaccttcacggcatcacatg

SEQ ID NO: 2384793 - DNA, 25 bp, Homo sapien
gaatggctctcttgcgatggtacac

SEQ ID NO: 2384794 - DNA, 25 bp, Homo sapien
caggacgactgtgcacaggtactca

SEQ ID NO: 2384795 - DNA, 25 bp, Homo sapien
tgcacactcaggacgactgtgcaca

SEQ ID NO: 2384796 - DNA, 25 bp, Homo sapien
tgtgcacaggtactcattcactagg

SEQ ID NO: 2384797 - DNA, 25 bp, Homo sapien
cacaggtactcattcactagggtgg

SEQ ID NO: 2384798 - DNA, 25 bp, Homo sapien
tcaaatgacgttttccgcagacccc

SEQ ID NO: 2384799 - DNA, 25 bp, Homo sapien
tcaggcggctctcctgtgtcaaggt

SEQ ID NO: 2384800 - DNA, 25 bp, Homo sapien
tgcacccatactagaggctgccctt

SEQ ID NO: 2384801 - DNA, 25 bp, Homo sapien
tgtttcaccggagtctcaaatgacg

SEQ ID NO: 2384802 - DNA, 25 bp, Homo sapien
gttccaggaagtggattctgaagtc

SEQ ID NO: 2384803 - DNA, 25 bp, Homo sapien
cattctggtctggtaacctctacat

SEQ ID NO: 2384804 - DNA, 25 bp, Homo sapien
ggtctggtaacctctacatcaataa

SEQ ID NO: 2384805 - DNA, 25 bp, Homo sapien
caggaagtggattctgaagtcttcc

SEQ ID NO: 2384806 - DNA, 25 bp, Homo sapien
cgggcgctaaaaacgatggcatact

SEQ ID NO: 2384807 - DNA, 25 bp, Homo sapien
atatctgtcatgatgcctcccagca

SEQ ID NO: 2384808 - DNA, 25 bp, Homo sapien
cccgaaccatgtgactgagccttca

SEQ ID NO: 2384809 - DNA, 25 bp, Homo sapien
gaaccaagcatttgttacgggcgct

SEQ ID NO: 2384810 - DNA, 25 bp, Homo sapien
tcaggccgctgttgtcatagatgac

SEQ ID NO: 2384811 - DNA, 25 bp, Homo sapien
taggtcaagcgctgtatgtggtctg

SEQ ID NO: 2384812 - DNA, 25 bp, Homo sapien
ccagttgtaatagatgtggcacagc

SEQ ID NO: 2384813 - DNA, 25 bp, Homo sapien
tgtgtgggagaaacactaccacttc

SEQ ID NO: 2384814 - DNA, 25 bp, Homo sapien
tatttgctaaacatcaacaagtaga

SEQ ID NO: 2384815 - DNA, 25 bp, Homo sapien
cctttatttgctaaacatcaacaag

SEQ ID NO: 2384816 - DNA, 25 bp, Homo sapien
tgtcctttatttgctaaacatcaac

SEQ ID NO: 2384817 - DNA, 25 bp, Homo sapien
gaatgtcctttatttgctaaacatc

SEQ ID NO: 2384818 - DNA, 25 bp, Homo sapien
tggccaacaagaaaagccagcttgt

SEQ ID NO: 2384819 - DNA, 25 bp, Homo sapien
cttgtgggcgtactggcaaggagca

SEQ ID NO: 2384820 - DNA, 25 bp, Homo sapien
taaaggcggtttgacagtgacagat

SEQ ID NO: 2384821 - DNA, 25 bp, Homo sapien
tagaggtagtaaaggcggtttgaca

SEQ ID NO: 2384822 - DNA, 25 bp, Homo sapien
gaaaagcggctgcatcgtcttctgc

SEQ ID NO: 2384823 - DNA, 25 bp, Homo sapien
taaggaagccggtgaatagcaatgc

SEQ ID NO: 2384824 - DNA, 25 bp, Homo sapien
taagatatgagctgaaaccccacct

SEQ ID NO: 2384825 - DNA, 25 bp, Homo sapien
cccacctatggttgtagtgagcatc

SEQ ID NO: 2384826 - DNA, 25 bp, Homo sapien
tggtacgccattctaaaagacaggc

SEQ ID NO: 2384827 - DNA, 25 bp, Homo sapien
caatagcaaacgctgggaaagacgt

SEQ ID NO: 2384828 - DNA, 25 bp, Homo sapien
gaaagacgtgaattaacaggaactc

SEQ ID NO: 2384829 - DNA, 25 bp, Homo sapien
tagtcttaccttacgaagcacactg

SEQ ID NO: 2384830 - DNA, 25 bp, Homo sapien
ggtggtcaggaagagggtcagggaa

SEQ ID NO: 2384831 - DNA, 25 bp, Homo sapien
caggaagagggtcagggaatttttg

SEQ ID NO: 2384832 - DNA, 25 bp, Homo sapien
tggtcaggaagagggtcagggaatt

SEQ ID NO: 2384833 - DNA, 25 bp, Homo sapien
gtggtcaggaagagggtcagggaat

SEQ ID NO: 2384834 - DNA, 25 bp, Homo sapien
atcagaaactgccgtgggcacaggc

SEQ ID NO: 2384835 - DNA, 25 bp, Homo sapien
caggctcagaccacggcggcccagg

SEQ ID NO: 2384836 - DNA, 25 bp, Homo sapien
acaggctcagaccacggcggcccag

SEQ ID NO: 2384837 - DNA, 25 bp, Homo sapien
agaaactgccgtgggcacaggctca

SEQ ID NO: 2384838 - DNA, 25 bp, Homo sapien
caggcccatgtgctgctggttgtcc

SEQ ID NO: 2384839 - DNA, 25 bp, Homo sapien
atgtgctgctggttgtccctcatcc

SEQ ID NO: 2384840 - DNA, 25 bp, Homo sapien
gctgctggttgtccctcatccaaat

SEQ ID NO: 2384841 - DNA, 25 bp, Homo sapien
ggttgtccctcatccaaatcagcaa

SEQ ID NO: 2384842 - DNA, 25 bp, Homo sapien
tcatcacaacattcagtattcacca

SEQ ID NO: 2384843 - DNA, 25 bp, Homo sapien
ggtcatcacaacattcagtattcac

SEQ ID NO: 2384844 - DNA, 25 bp, Homo sapien
gtcatcacaacattcagtattcacc

SEQ ID NO: 2384845 - DNA, 25 bp, Homo sapien
gggtcatcacaacattcagtattca

SEQ ID NO: 2384846 - DNA, 25 bp, Homo sapien
acacatgatgacggtgaccgggtca

SEQ ID NO: 2384847 - DNA, 25 bp, Homo sapien
tgatgacggtgaccgggtcatcaca

SEQ ID NO: 2384848 - DNA, 25 bp, Homo sapien
cacatgatgacggtgaccgggtcat

SEQ ID NO: 2384849 - DNA, 25 bp, Homo sapien
catgatgacggtgaccgggtcatca

SEQ ID NO: 2384850 - DNA, 25 bp, Homo sapien
cacaacattcaatattcaccaggta

SEQ ID NO: 2384851 - DNA, 25 bp, Homo sapien
ggtgaccgggtcctcacaacattca

SEQ ID NO: 2384852 - DNA, 25 bp, Homo sapien
ccgggtcctcacaacattcaatatt

SEQ ID NO: 2384853 - DNA, 25 bp, Homo sapien
tgatgacggtgaccgggtcctcaca

SEQ ID NO: 2384854 - DNA, 25 bp, Homo sapien
tgatgacggtgaccgggtcatcaca

SEQ ID NO: 2384855 - DNA, 25 bp, Homo sapien
tgacggtgaccgggtcatcacaaca

SEQ ID NO: 2384856 - DNA, 25 bp, Homo sapien
ggtgaccgggtcatcacaacattca

SEQ ID NO: 2384857 - DNA, 25 bp, Homo sapien
cggtgaccgggtcatcacaacattc

SEQ ID NO: 2384858 - DNA, 25 bp, Homo sapien
cacaacattcaatattcaccaggta

SEQ ID NO: 2384859 - DNA, 25 bp, Homo sapien
ggtgaccgggtcctcacaacattca

SEQ ID NO: 2384860 - DNA, 25 bp, Homo sapien
ccgggtcctcacaacattcaatatt

SEQ ID NO: 2384861 - DNA, 25 bp, Homo sapien
tgatgacggtgaccgggtcctcaca

SEQ ID NO: 2384862 - DNA, 25 bp, Homo sapien
acaacattcaatattcaccaggtaa

SEQ ID NO: 2384863 - DNA, 25 bp, Homo sapien
ggtgaccgggtcatcacaacattca

SEQ ID NO: 2384864 - DNA, 25 bp, Homo sapien
tcacaacattcaatattcaccaggt

SEQ ID NO: 2384865 - DNA, 25 bp, Homo sapien
tgatgacggtgaccgggtcatcaca

SEQ ID NO: 2384866 - DNA, 25 bp, Homo sapien
acaacattcaatattcaccaggtaa

SEQ ID NO: 2384867 - DNA, 25 bp, Homo sapien
cctcacaacattcaatattcaccag

SEQ ID NO: 2384868 - DNA, 25 bp, Homo sapien
tcacaacattcaatattcaccaggt

SEQ ID NO: 2384869 - DNA, 25 bp, Homo sapien
gtcctcacaacattcaatattcacc

SEQ ID NO: 2384870 - DNA, 25 bp, Homo sapien
tgatgacggtgaccgggtcatcaca

SEQ ID NO: 2384871 - DNA, 25 bp, Homo sapien
catcacaacattcaatactcaccag

SEQ ID NO: 2384872 - DNA, 25 bp, Homo sapien
ggtgaccgggtcatcacaacattca

SEQ ID NO: 2384873 - DNA, 25 bp, Homo sapien
atcacaacattcaatactcaccagg

SEQ ID NO: 2384874 - DNA, 25 bp, Homo sapien
tgacagacacgtgatgacggtgacc

SEQ ID NO: 2384875 - DNA, 25 bp, Homo sapien
tgatgacggtgaccgggtcatcaca

SEQ ID NO: 2384876 - DNA, 25 bp, Homo sapien
ggtgaccgggtcatcacaacattca

SEQ ID NO: 2384877 - DNA, 25 bp, Homo sapien
caggtaactgacagacacgtgatga

SEQ ID NO: 2384878 - DNA, 25 bp, Homo sapien
catcacaacattcaatactcaccag

SEQ ID NO: 2384879 - DNA, 25 bp, Homo sapien
tgatgacggtgaccgggtcatcaca

SEQ ID NO: 2384880 - DNA, 25 bp, Homo sapien
ggtgaccgggtcatcacaacattca

SEQ ID NO: 2384881 - DNA, 25 bp, Homo sapien
atcacaacattcaatactcaccagg

SEQ ID NO: 2384882 - DNA, 25 bp, Homo sapien
gactgggtcatcacaacattcaata

SEQ ID NO: 2384883 - DNA, 25 bp, Homo sapien
gacggtgactgggtcatcacaacat

SEQ ID NO: 2384884 - DNA, 25 bp, Homo sapien
tgatgacggtgactgggtcatcaca

SEQ ID NO: 2384885 - DNA, 25 bp, Homo sapien
tcacaacattcaatatgcaccaggt

SEQ ID NO: 2384886 - DNA, 25 bp, Homo sapien
acaacattcaatattcaccaggtaa

SEQ ID NO: 2384887 - DNA, 25 bp, Homo sapien
catcacaacattcaatattcaccag

SEQ ID NO: 2384888 - DNA, 25 bp, Homo sapien
ggtgaccgggtcatcacaacattca

SEQ ID NO: 2384889 - DNA, 25 bp, Homo sapien
tcacaacattcaatattcaccaggt

SEQ ID NO: 2384890 - DNA, 25 bp, Homo sapien
ggtgaccgggtcatcacaacattca

SEQ ID NO: 2384891 - DNA, 25 bp, Homo sapien
cacatgatgacggtgaccgggtcat

SEQ ID NO: 2384892 - DNA, 25 bp, Homo sapien
tgatgacggtgaccgggtcatcaca

SEQ ID NO: 2384893 - DNA, 25 bp, Homo sapien
gacggtgaccgggtcatcacaacat

SEQ ID NO: 2384894 - DNA, 25 bp, Homo sapien
gcacccacgtgatgacggtgactgg

SEQ ID NO: 2384895 - DNA, 25 bp, Homo sapien
tcatcacaacattcagtattcacca

SEQ ID NO: 2384896 - DNA, 25 bp, Homo sapien
gggtcatcacaacattcagtattca

SEQ ID NO: 2384897 - DNA, 25 bp, Homo sapien
cacgtgatgacggtgactgggtcat

SEQ ID NO: 2384898 - DNA, 25 bp, Homo sapien
gcacccacgtgatgacggtgactgg

SEQ ID NO: 2384899 - DNA, 25 bp, Homo sapien
cacccacgtgatgacggtgactggg

SEQ ID NO: 2384900 - DNA, 25 bp, Homo sapien
cccacgtgatgacggtgactgggtc

SEQ ID NO: 2384901 - DNA, 25 bp, Homo sapien
acgtgatgacggtgactgggtcatc

SEQ ID NO: 2384902 - DNA, 25 bp, Homo sapien
ggaaatccatgtgtggttaagctct

SEQ ID NO: 2384903 - DNA, 25 bp, Homo sapien
tgtgtcttcaaaaacgctattataa

SEQ ID NO: 2384904 - DNA, 25 bp, Homo sapien
ttccccattgtgtcttcaaaaacgc

SEQ ID NO: 2384905 - DNA, 25 bp, Homo sapien
aggaaatccatgtgtggttaagctc

SEQ ID NO: 2384906 - DNA, 25 bp, Homo sapien
catctatgggttctggtagtcctgg

SEQ ID NO: 2384907 - DNA, 25 bp, Homo sapien
cattcggggtcacctacgtcatcta

SEQ ID NO: 2384908 - DNA, 25 bp, Homo sapien
acagtccatctccattcggggtcac

SEQ ID NO: 2384909 - DNA, 25 bp, Homo sapien
tcctgagggttcaggtacagcaagg

SEQ ID NO: 2384910 - DNA, 25 bp, Homo sapien
gaattctgttgttggcgctcacaca

SEQ ID NO: 2384911 - DNA, 25 bp, Homo sapien
tagtataccaaccaccccaggaatg

SEQ ID NO: 2384912 - DNA, 25 bp, Homo sapien
taagactactgatgggtactcggcc

SEQ ID NO: 2384913 - DNA, 25 bp, Homo sapien
gaggacctttgcttctcatggcata

SEQ ID NO: 2384914 - DNA, 25 bp, Homo sapien
acaggtgttttgatgtagtaggctc

SEQ ID NO: 2384915 - DNA, 25 bp, Homo sapien
tcactgcacaggtgttttgatgtag

SEQ ID NO: 2384916 - DNA, 25 bp, Homo sapien
gcagatagatgacttgcagacattt

SEQ ID NO: 2384917 - DNA, 25 bp, Homo sapien
cattccacaggtactcatcactctg

SEQ ID NO: 2384918 - DNA, 25 bp, Homo sapien
gaacaaattttccatgatcagcctt

SEQ ID NO: 2384919 - DNA, 25 bp, Homo sapien
cacccaggagaggtgcgagatccgt

SEQ ID NO: 2384920 - DNA, 25 bp, Homo sapien
gatccgtgcctcagtgactcagccg

SEQ ID NO: 2384921 - DNA, 25 bp, Homo sapien
tgtgcccacagtttccagaacaaat

SEQ ID NO: 2384922 - DNA, 25 bp, Homo sapien
tagaaagtcctgcagagggtgccga

SEQ ID NO: 2384923 - DNA, 25 bp, Homo sapien
ggcccggagtaagcacacagtctgt

SEQ ID NO: 2384924 - DNA, 25 bp, Homo sapien
tctaaatgtaaagcggaggccagga

SEQ ID NO: 2384925 - DNA, 25 bp, Homo sapien
tcatctcgagagaatcggcagccga

SEQ ID NO: 2384926 - DNA, 25 bp, Homo sapien
ttaaaaagcgttaatatttagcagc

SEQ ID NO: 2384927 - DNA, 25 bp, Homo sapien
agcgttaatatttagcagcattgtt

SEQ ID NO: 2384928 - DNA, 25 bp, Homo sapien
tgttgtattcataacataataatat

SEQ ID NO: 2384929 - DNA, 25 bp, Homo sapien
aaagcgttaatatttagcagcattg

SEQ ID NO: 2384930 - DNA, 25 bp, Homo sapien
caaatgtggtgacggtcgcaacgca

SEQ ID NO: 2384931 - DNA, 25 bp, Homo sapien
tcgcgcagaacaccttggacagcat

SEQ ID NO: 2384932 - DNA, 25 bp, Homo sapien
gtcttgctttgctcttcgcgcagaa

SEQ ID NO: 2384933 - DNA, 25 bp, Homo sapien
gcaacgcagcgtgctttggttcgaa

SEQ ID NO: 2384934 - DNA, 25 bp, Homo sapien
tcccttaagtgaggccaatattgga

SEQ ID NO: 2384935 - DNA, 25 bp, Homo sapien
ggtaatgttcccttaagtgaggcca

SEQ ID NO: 2384936 - DNA, 25 bp, Homo sapien
aatgttcccttaagtgaggccaata

SEQ ID NO: 2384937 - DNA, 25 bp, Homo sapien
taagtgaggccaatattggatgagg

SEQ ID NO: 2384938 - DNA, 25 bp, Homo sapien
acggtgtttgatgctgggacttcca

SEQ ID NO: 2384939 - DNA, 25 bp, Homo sapien
gacaagaaataacggtgtttgatgc

SEQ ID NO: 2384940 - DNA, 25 bp, Homo sapien
tgtgaggacaagaaataacggtgtt

SEQ ID NO: 2384941 - DNA, 25 bp, Homo sapien
gaaataacggtgtttgatgctggga

SEQ ID NO: 2384942 - DNA, 25 bp, Homo sapien
aggaactatgccgagggctacaagg

SEQ ID NO: 2384943 - DNA, 25 bp, Homo sapien
aggtccttaccatcatgatgatgct

SEQ ID NO: 2384944 - DNA, 25 bp, Homo sapien
ttgaaacacgacaggtccttaccat

SEQ ID NO: 2384945 - DNA, 25 bp, Homo sapien
gccgagggctacaaggaccttcaaa

SEQ ID NO: 2384946 - DNA, 25 bp, Homo sapien
aaggcgcgtcggactcgtaggacat

SEQ ID NO: 2384947 - DNA, 25 bp, Homo sapien
cacttcagctccgtgaaaggcgcgt

SEQ ID NO: 2384948 - DNA, 25 bp, Homo sapien
gttggcacttcagctccgtgaaagg

SEQ ID NO: 2384949 - DNA, 25 bp, Homo sapien
tcagctccgtgaaaggcgcgtcgga

SEQ ID NO: 2384950 - DNA, 25 bp, Homo sapien
ggcgtctaatatcaggggcctgcat

SEQ ID NO: 2384951 - DNA, 25 bp, Homo sapien
gacattcaggcgtctaatatcaggg

SEQ ID NO: 2384952 - DNA, 25 bp, Homo sapien
caggcgtctaatatcaggggcctgc

SEQ ID NO: 2384953 - DNA, 25 bp, Homo sapien
tggacattcaggcgtctaatatcag

SEQ ID NO: 2384954 - DNA, 25 bp, Homo sapien
tgcaccatgaggcacggattagctg

SEQ ID NO: 2384955 - DNA, 25 bp, Homo sapien
gcacggattagctgaagactggccc

SEQ ID NO: 2384956 - DNA, 25 bp, Homo sapien
tgaggcacggattagctgaagactg

SEQ ID NO: 2384957 - DNA, 25 bp, Homo sapien
caccatgaggcacggattagctgaa

SEQ ID NO: 2384958 - DNA, 25 bp, Homo sapien
cattcagcaggggtcggccgtctgc

SEQ ID NO: 2384959 - DNA, 25 bp, Homo sapien
caggaacacagctgcgagtgggaca

SEQ ID NO: 2384960 - DNA, 25 bp, Homo sapien
ggccgtctgcccctccaagcagcca

SEQ ID NO: 2384961 - DNA, 25 bp, Homo sapien
acagctgcgagtgggacacggctct

SEQ ID NO: 2384962 - DNA, 25 bp, Homo sapien
tgagtggaatgagatccgggacttc

SEQ ID NO: 2384963 - DNA, 25 bp, Homo sapien
tctagaggctttgatgtagttttta

SEQ ID NO: 2384964 - DNA, 25 bp, Homo sapien
tcgttgcactgcacttgtgaccagc

SEQ ID NO: 2384965 - DNA, 25 bp, Homo sapien
tgcattcagtttccacgtgggtggt

SEQ ID NO: 2384966 - DNA, 25 bp, Homo sapien
gctgtccagttctcttggcgttctt

SEQ ID NO: 2384967 - DNA, 25 bp, Homo sapien
tctgttttggacacactgatgcttc

SEQ ID NO: 2384968 - DNA, 25 bp, Homo sapien
ctgtgtgctgtccagttctcttggc

SEQ ID NO: 2384969 - DNA, 25 bp, Homo sapien
tattccgcgtccacgatctcttctg

SEQ ID NO: 2384970 - DNA, 25 bp, Homo sapien
gctgcatagtaggtgcgtgcatttg

SEQ ID NO: 2384971 - DNA, 25 bp, Homo sapien
gacccgtgtacacacacaatcggcg

SEQ ID NO: 2384972 - DNA, 25 bp, Homo sapien
tgaccccatggtgcttaggactgct

SEQ ID NO: 2384973 - DNA, 25 bp, Homo sapien
catttgtggacttaggaccgcctga

SEQ ID NO: 2384974 - DNA, 25 bp, Homo sapien
cacaaggtttctagattcagagagc

SEQ ID NO: 2384975 - DNA, 25 bp, Homo sapien
cctcgttcagtgacaggctttggaa

SEQ ID NO: 2384976 - DNA, 25 bp, Homo sapien
ggagtttggatagagacacagacgc

SEQ ID NO: 2384977 - DNA, 25 bp, Homo sapien
aatcagtgattacggagcccaggga

SEQ ID NO: 2384978 - DNA, 25 bp, Homo sapien
cggcagctacccacattccactcgc

SEQ ID NO: 2384979 - DNA, 25 bp, Homo sapien
tgccaatgcccccatgaacgttacc

SEQ ID NO: 2384980 - DNA, 25 bp, Homo sapien
tgctgttcccggcagctacccacat

SEQ ID NO: 2384981 - DNA, 25 bp, Homo sapien
ccatgaacgttaccaccctcagcct

SEQ ID NO: 2384982 - DNA, 25 bp, Homo sapien
caatacggtgattcttcaggccggc

SEQ ID NO: 2384983 - DNA, 25 bp, Homo sapien
ggtgattcttcaggccggcacagga

SEQ ID NO: 2384984 - DNA, 25 bp, Homo sapien
tcaggacagtcaatacggtgattct

SEQ ID NO: 2384985 - DNA, 25 bp, Homo sapien
cacaggagggcccacaaacccaaat

SEQ ID NO: 2384986 - DNA, 25 bp, Homo sapien
ggctggcggagatggagatttgaca

SEQ ID NO: 2384987 - DNA, 25 bp, Homo sapien
tgaactgggctcgttcctcggtcat

SEQ ID NO: 2384988 - DNA, 25 bp, Homo sapien
ccagacgtgacactcgacggcggct

SEQ ID NO: 2384989 - DNA, 25 bp, Homo sapien
tgcgtaagccccttagcacggcgct

SEQ ID NO: 2384990 - DNA, 25 bp, Homo sapien
ctccaaggtcactcgcatggctgag

SEQ ID NO: 2384991 - DNA, 25 bp, Homo sapien
cactagggtgggacccgcctccaag

SEQ ID NO: 2384992 - DNA, 25 bp, Homo sapien
aaggtcactcgcatggctgagggca

SEQ ID NO: 2384993 - DNA, 25 bp, Homo sapien
gcctccaaggtcactcgcatggctg

SEQ ID NO: 2384994 - DNA, 25 bp, Homo sapien
ttagcctgacttgagtggaagtagc

SEQ ID NO: 2384995 - DNA, 25 bp, Homo sapien
gcctgacttgagtggaagtagccag

SEQ ID NO: 2384996 - DNA, 25 bp, Homo sapien
ctgacttgagtggaagtagccagca

SEQ ID NO: 2384997 - DNA, 25 bp, Homo sapien
tagcctgacttgagtggaagtagcc

SEQ ID NO: 2384998 - DNA, 25 bp, Homo sapien
agtcggactgagctgcacggctgct

SEQ ID NO: 2384999 - DNA, 25 bp, Homo sapien
gtccctggagtcggactgagctgca

SEQ ID NO: 2385000 - DNA, 25 bp, Homo sapien
ccctggagtcggactgagctgcacg

SEQ ID NO: 2385001 - DNA, 25 bp, Homo sapien
ggagtcggactgagctgcacggctg

SEQ ID NO: 2385002 - DNA, 25 bp, Homo sapien
gacgaatgtatttgatccccttttc

SEQ ID NO: 2385003 - DNA, 25 bp, Homo sapien
tttcgacgaatgtatttgatcccct

SEQ ID NO: 2385004 - DNA, 25 bp, Homo sapien
tcgacgaatgtatttgatccccttt

SEQ ID NO: 2385005 - DNA, 25 bp, Homo sapien
ttttcgacgaatgtatttgatcccc

SEQ ID NO: 2385006 - DNA, 25 bp, Homo sapien
aattaattgggttgacagccctgcc

SEQ ID NO: 2385007 - DNA, 25 bp, Homo sapien
cgttactttgctggaattaattggg

SEQ ID NO: 2385008 - DNA, 25 bp, Homo sapien
tgtgtttgtatgtaagaatcttttg

SEQ ID NO: 2385009 - DNA, 25 bp, Homo sapien
cttttgatgaaagagcccacgttac

SEQ ID NO: 2385010 - DNA, 25 bp, Homo sapien
cgctcccgacatcgcagcccggatc

SEQ ID NO: 2385011 - DNA, 25 bp, Homo sapien
tcccgacatcgcagcccggatcctc

SEQ ID NO: 2385012 - DNA, 25 bp, Homo sapien
ctcccgacatcgcagcccggatcct

SEQ ID NO: 2385013 - DNA, 25 bp, Homo sapien
ccgacatcgcagcccggatcctcac

SEQ ID NO: 2385014 - DNA, 25 bp, Homo sapien
tgagcattccgagcagtttctgacc

SEQ ID NO: 2385015 - DNA, 25 bp, Homo sapien
ggagtcggatttgtgtctgactcgc

SEQ ID NO: 2385016 - DNA, 25 bp, Homo sapien
gatttgtgtctgactcgctctcggg

SEQ ID NO: 2385017 - DNA, 25 bp, Homo sapien
ttccgagcagtttctgaccaatgca

SEQ ID NO: 2385018 - DNA, 25 bp, Homo sapien
aagacttgatgaagagaggaccctg

SEQ ID NO: 2385019 - DNA, 25 bp, Homo sapien
gcaagacttgatgaagagaggaccc

SEQ ID NO: 2385020 - DNA, 25 bp, Homo sapien
gagcaagacttgatgaagagaggac

SEQ ID NO: 2385021 - DNA, 25 bp, Homo sapien
tggagcaagacttgatgaagagagg

SEQ ID NO: 2385022 - DNA, 25 bp, Homo sapien
acacagatggcgtagaccctccctt

SEQ ID NO: 2385023 - DNA, 25 bp, Homo sapien
tggcgtagaccctcccttcaaagtg

SEQ ID NO: 2385024 - DNA, 25 bp, Homo sapien
ttggggccacacagatggcgtagac

SEQ ID NO: 2385025 - DNA, 25 bp, Homo sapien
tcccttcaaagtgtagctttaagcc

SEQ ID NO: 2385026 - DNA, 25 bp, Homo sapien
gggcagcaacagcctccaatggatg

SEQ ID NO: 2385027 - DNA, 25 bp, Homo sapien
ttagaaatgagggaactcggaggca

SEQ ID NO: 2385028 - DNA, 25 bp, Homo sapien
aatgagggaactcggaggcagagtg

SEQ ID NO: 2385029 - DNA, 25 bp, Homo sapien
ccagggactcgctgggcagcaacag

SEQ ID NO: 2385030 - DNA, 25 bp, Homo sapien
gacagagctcgtgggatgggagggg

SEQ ID NO: 2385031 - DNA, 25 bp, Homo sapien
ggacagagctcgtgggatgggaggg

SEQ ID NO: 2385032 - DNA, 25 bp, Homo sapien
gggacagagctcgtgggatgggagg

SEQ ID NO: 2385033 - DNA, 25 bp, Homo sapien
gtccctgtggtgttggcagcgatgc

SEQ ID NO: 2385034 - DNA, 25 bp, Homo sapien
gagggacgtcaatcatcagggagga

SEQ ID NO: 2385035 - DNA, 25 bp, Homo sapien
ctttacgggagggacgtcaatcatc

SEQ ID NO: 2385036 - DNA, 25 bp, Homo sapien
ggagggacgtcaatcatcagggagg

SEQ ID NO: 2385037 - DNA, 25 bp, Homo sapien
tacgggagggacgtcaatcatcagg

SEQ ID NO: 2385038 - DNA, 25 bp, Homo sapien
tgatggaggctgtagctcaaagaga

SEQ ID NO: 2385039 - DNA, 25 bp, Homo sapien
cctgcaacgtattgtctgatggagg

SEQ ID NO: 2385040 - DNA, 25 bp, Homo sapien
tattgtctgatggaggctgtagctc

SEQ ID NO: 2385041 - DNA, 25 bp, Homo sapien
aagggcccccaatatcctgcaacgt

SEQ ID NO: 2385042 - DNA, 25 bp, Homo sapien
atgcgggtaaatgaagcggccccag

SEQ ID NO: 2385043 - DNA, 25 bp, Homo sapien
gcagagatgcgggtaaatgaagcgg

SEQ ID NO: 2385044 - DNA, 25 bp, Homo sapien
acctgcagcgaagcccggtagccgg

SEQ ID NO: 2385045 - DNA, 25 bp, Homo sapien
agccggtgtcttccagcggaggatc

SEQ ID NO: 2385046 - DNA, 25 bp, Homo sapien
ctagcccaggctacggaggtaaatc

SEQ ID NO: 2385047 - DNA, 25 bp, Homo sapien
aatcctctccgcaggagacgcgtcg

SEQ ID NO: 2385048 - DNA, 25 bp, Homo sapien
ccaggctacggaggtaaatcctctc

SEQ ID NO: 2385049 - DNA, 25 bp, Homo sapien
aggtaaatcctctccgcaggagacg

SEQ ID NO: 2385050 - DNA, 25 bp, Homo sapien
ggtgtacaaccgagaaccttgcaga

SEQ ID NO: 2385051 - DNA, 25 bp, Homo sapien
cagccttcgtgtaacaggcagttac

SEQ ID NO: 2385052 - DNA, 25 bp, Homo sapien
acatgggttccgtgtcctgcttgcc

SEQ ID NO: 2385053 - DNA, 25 bp, Homo sapien
tacatgggtttcatgggtcgacatg

SEQ ID NO: 2385054 - DNA, 25 bp, Homo sapien
tctacttgcaaagcaacttcttaga

SEQ ID NO: 2385055 - DNA, 25 bp, Homo sapien
tgcagccaattggttttccccaact

SEQ ID NO: 2385056 - DNA, 25 bp, Homo sapien
tccccaactttctacttgcaaagca

SEQ ID NO: 2385057 - DNA, 25 bp, Homo sapien
caatcctgcagccaattggttttcc

SEQ ID NO: 2385058 - DNA, 25 bp, Homo sapien
ccagaataaggtaccagtgtctgca

SEQ ID NO: 2385059 - DNA, 25 bp, Homo sapien
cacccggatggggtctaagcccaga

SEQ ID NO: 2385060 - DNA, 25 bp, Homo sapien
gtctaagcccagaataaggtaccag

SEQ ID NO: 2385061 - DNA, 25 bp, Homo sapien
ataaggtaccagtgtctgcatccag

SEQ ID NO: 2385062 - DNA, 25 bp, Homo sapien
tctgcctggagctgtagctggccta

SEQ ID NO: 2385063 - DNA, 25 bp, Homo sapien
gctggtgtcagctgaaacctgcttg

SEQ ID NO: 2385064 - DNA, 25 bp, Homo sapien
tttgctaaaggaaaggccgcctcca

SEQ ID NO: 2385065 - DNA, 25 bp, Homo sapien
aacctgcttgtcgtttctgcctgga

SEQ ID NO: 2385066 - DNA, 25 bp, Homo sapien
aagcttcagctgaaataagaagcag

SEQ ID NO: 2385067 - DNA, 25 bp, Homo sapien
tcagctgaaataagaagcagcccac

SEQ ID NO: 2385068 - DNA, 25 bp, Homo sapien
gcttcagctgaaataagaagcagcc

SEQ ID NO: 2385069 - DNA, 25 bp, Homo sapien
cagcccaaggccctctctgttactt

SEQ ID NO: 2385070 - DNA, 25 bp, Homo sapien
tcagggagggcgagaaacctaagac

SEQ ID NO: 2385071 - DNA, 25 bp, Homo sapien
tggagtgagatgaagatcctacgat

SEQ ID NO: 2385072 - DNA, 25 bp, Homo sapien
cctaagactgaagggaacctgatct

SEQ ID NO: 2385073 - DNA, 25 bp, Homo sapien
cctacgatatatccagtgctgtaca

SEQ ID NO: 2385074 - DNA, 25 bp, Homo sapien
gccttcaggatgcttgttcaggtgt

SEQ ID NO: 2385075 - DNA, 25 bp, Homo sapien
tgccttcaggatgcttgttcaggtg

SEQ ID NO: 2385076 - DNA, 25 bp, Homo sapien
cttcaggatgcttgttcaggtgtgg

SEQ ID NO: 2385077 - DNA, 25 bp, Homo sapien
ccttcaggatgcttgttcaggtgtg

SEQ ID NO: 2385078 - DNA, 25 bp, Homo sapien
gccgctgatagatatccacagacag

SEQ ID NO: 2385079 - DNA, 25 bp, Homo sapien
gcaacagaagcatttgccgctgata

SEQ ID NO: 2385080 - DNA, 25 bp, Homo sapien
cagctccccggtgcaaacaaaaggg

SEQ ID NO: 2385081 - DNA, 25 bp, Homo sapien
gtctccaagagtaaccaggcaacag

SEQ ID NO: 2385082 - DNA, 25 bp, Homo sapien
tcacctaaggtcactttccacgtag

SEQ ID NO: 2385083 - DNA, 25 bp, Homo sapien
gtcactttccacgtaggaatgacca

SEQ ID NO: 2385084 - DNA, 25 bp, Homo sapien
ttccaactcacctaaggtcactttc

SEQ ID NO: 2385085 - DNA, 25 bp, Homo sapien
taaggtcactttccacgtaggaatg

SEQ ID NO: 2385086 - DNA, 25 bp, Homo sapien
cttggtaaactcgggccctgggatg

SEQ ID NO: 2385087 - DNA, 25 bp, Homo sapien
gccctgggatgtcatttacttgctc

SEQ ID NO: 2385088 - DNA, 25 bp, Homo sapien
taaactcgggccctgggatgtcatt

SEQ ID NO: 2385089 - DNA, 25 bp, Homo sapien
ctcgggccctgggatgtcatttact

SEQ ID NO: 2385090 - DNA, 25 bp, Homo sapien
ccttggtctcgaggatcagtttcgg

SEQ ID NO: 2385091 - DNA, 25 bp, Homo sapien
gaactggcattagaaacagcatcca

SEQ ID NO: 2385092 - DNA, 25 bp, Homo sapien
gaattcaccgttctggtgggaacag

SEQ ID NO: 2385093 - DNA, 25 bp, Homo sapien
agcatcacagaactggcattagaaa

SEQ ID NO: 2385094 - DNA, 25 bp, Homo sapien
cctgttcgggtgctgtcttggtgaa

SEQ ID NO: 2385095 - DNA, 25 bp, Homo sapien
gagagtctcgtaccgcttgttcctg

SEQ ID NO: 2385096 - DNA, 25 bp, Homo sapien
gttcctgttgaatctccgacctgca

SEQ ID NO: 2385097 - DNA, 25 bp, Homo sapien
agtctcctgagcctatgggttgaag

SEQ ID NO: 2385098 - DNA, 25 bp, Homo sapien
ggcccgctgatctctctcacacctg

SEQ ID NO: 2385099 - DNA, 25 bp, Homo sapien
tgatctctctcacacctgcctgagt

SEQ ID NO: 2385100 - DNA, 25 bp, Homo sapien
ccagcagggcccgctgatctctctc

SEQ ID NO: 2385101 - DNA, 25 bp, Homo sapien
gatctctctcacacctgcctgagtg

SEQ ID NO: 2385102 - DNA, 25 bp, Homo sapien
gctttggaacctgtctttcagagcc

SEQ ID NO: 2385103 - DNA, 25 bp, Homo sapien
ctttggaacctgtctttcagagccc

SEQ ID NO: 2385104 - DNA, 25 bp, Homo sapien
gttcccctctaacaatggatgcttt

SEQ ID NO: 2385105 - DNA, 25 bp, Homo sapien
tgcacatgggaagaactccgagatg

SEQ ID NO: 2385106 - DNA, 25 bp, Homo sapien
cacatgggaagaactccgagatgtt

SEQ ID NO: 2385107 - DNA, 25 bp, Homo sapien
catacatacgcatcacaggctcagc

SEQ ID NO: 2385108 - DNA, 25 bp, Homo sapien
gagtggtgagcatgacacggcttca

SEQ ID NO: 2385109 - DNA, 25 bp, Homo sapien
gacagattcgtgttcttgcccagaa

SEQ ID NO: 2385110 - DNA, 25 bp, Homo sapien
ttcatgtcaacacgcgagcctggct

SEQ ID NO: 2385111 - DNA, 25 bp, Homo sapien
catagagactgtgagtgttcgcacc

SEQ ID NO: 2385112 - DNA, 25 bp, Homo sapien
aatacggtttgccttgtgtccagcc

SEQ ID NO: 2385113 - DNA, 25 bp, Homo sapien
tgggtgagcccactcttgaccttgt

SEQ ID NO: 2385114 - DNA, 25 bp, Homo sapien
gaccttgtcatatacagatcttcag

SEQ ID NO: 2385115 - DNA, 25 bp, Homo sapien
tttttaaggtgaccactagacagtg

SEQ ID NO: 2385116 - DNA, 25 bp, Homo sapien
taaagttatgcaggtggctgacacg

SEQ ID NO: 2385117 - DNA, 25 bp, Homo sapien
tggtggctgccgggaagatccgctt

SEQ ID NO: 2385118 - DNA, 25 bp, Homo sapien
acgctggtggctgccgggaagatcc

SEQ ID NO: 2385119 - DNA, 25 bp, Homo sapien
ggtggctgccgggaagatccgcttc

SEQ ID NO: 2385120 - DNA, 25 bp, Homo sapien
gctggtggctgccgggaagatccgc

SEQ ID NO: 2385121 - DNA, 25 bp, Homo sapien
gagagggaaacgacttgaggtggct

SEQ ID NO: 2385122 - DNA, 25 bp, Homo sapien
agagggaaacgacttgaggtggctt

SEQ ID NO: 2385123 - DNA, 25 bp, Homo sapien
ctgagagggaaacgacttgaggtgg

SEQ ID NO: 2385124 - DNA, 25 bp, Homo sapien
tgagagggaaacgacttgaggtggc

SEQ ID NO: 2385125 - DNA, 25 bp, Homo sapien
tcctcgagtgggagttcttcctttg

SEQ ID NO: 2385126 - DNA, 25 bp, Homo sapien
tgattcttccatcctcgagtgggag

SEQ ID NO: 2385127 - DNA, 25 bp, Homo sapien
tttgtttcctgggagcagcacgaat

SEQ ID NO: 2385128 - DNA, 25 bp, Homo sapien
tgtttcctgggagcagcacgaatcc

SEQ ID NO: 2385129 - DNA, 25 bp, Homo sapien
ctgcccagtgctaccaaaaagaaag

SEQ ID NO: 2385130 - DNA, 25 bp, Homo sapien
ctcctgcccagtgctaccaaaaaga

SEQ ID NO: 2385131 - DNA, 25 bp, Homo sapien
agtgctaccaaaaagaaagcccatt

SEQ ID NO: 2385132 - DNA, 25 bp, Homo sapien
gcccagtgctaccaaaaagaaagcc

SEQ ID NO: 2385133 - DNA, 25 bp, Homo sapien
tcccgtgtagatagtggtagtgcat

SEQ ID NO: 2385134 - DNA, 25 bp, Homo sapien
catcccgtgtagatagtggtagtgc

SEQ ID NO: 2385135 - DNA, 25 bp, Homo sapien
ctcatcccgtgtagatagtggtagt

SEQ ID NO: 2385136 - DNA, 25 bp, Homo sapien
tcatcccgtgtagatagtggtagtg

SEQ ID NO: 2385137 - DNA, 25 bp, Homo sapien
cagagtggagcccttccaggttatt

SEQ ID NO: 2385138 - DNA, 25 bp, Homo sapien
tggcagcggctattcccccgtgccc

SEQ ID NO: 2385139 - DNA, 25 bp, Homo sapien
ttatttcagggaaggcgctggcagc

SEQ ID NO: 2385140 - DNA, 25 bp, Homo sapien
ccgtggccatatggcagccgcctgg

SEQ ID NO: 2385141 - DNA, 25 bp, Homo sapien
tagccatcttggtgtgtgtatgcgc

SEQ ID NO: 2385142 - DNA, 25 bp, Homo sapien
cacagctctgtgaaagaaactggca

SEQ ID NO: 2385143 - DNA, 25 bp, Homo sapien
ttgcctgtcggttgcaggagacccc

SEQ ID NO: 2385144 - DNA, 25 bp, Homo sapien
catcacttaattctgagggcgcttg

SEQ ID NO: 2385145 - DNA, 25 bp, Homo sapien
tggtagcaggaatcacatactccat

SEQ ID NO: 2385146 - DNA, 25 bp, Homo sapien
tatttcataaaaatgggctcatacg

SEQ ID NO: 2385147 - DNA, 25 bp, Homo sapien
ggctcatacgatagatgggctttgt

SEQ ID NO: 2385148 - DNA, 25 bp, Homo sapien
gaaaccccactccagtaaggagtca

SEQ ID NO: 2385149 - DNA, 25 bp, Homo sapien
cttggaattggcctcatagaaaact

SEQ ID NO: 2385150 - DNA, 25 bp, Homo sapien
ccaccggccttggaattggcctcat

SEQ ID NO: 2385151 - DNA, 25 bp, Homo sapien
aattggcctcatagaaaacttgctg

SEQ ID NO: 2385152 - DNA, 25 bp, Homo sapien
tgctttgtggaagctcgggcccgca

SEQ ID NO: 2385153 - DNA, 25 bp, Homo sapien
ctcagtagcgaagtagatgtggagg

SEQ ID NO: 2385154 - DNA, 25 bp, Homo sapien
agtatctcagtagcgaagtagatgt

SEQ ID NO: 2385155 - DNA, 25 bp, Homo sapien
tatctcagtagcgaagtagatgtgg

SEQ ID NO: 2385156 - DNA, 25 bp, Homo sapien
tctcagtagcgaagtagatgtggag

SEQ ID NO: 2385157 - DNA, 25 bp, Homo sapien
catttggcagcatccatcatctcac

SEQ ID NO: 2385158 - DNA, 25 bp, Homo sapien
gcatttggcagcatccatcatctca

SEQ ID NO: 2385159 - DNA, 25 bp, Homo sapien
ttagcatttggcagcatccatcatc

SEQ ID NO: 2385160 - DNA, 25 bp, Homo sapien
tagcatttggcagcatccatcatct

SEQ ID NO: 2385161 - DNA, 25 bp, Homo sapien
atggagaccattcaggccccgtgga

SEQ ID NO: 2385162 - DNA, 25 bp, Homo sapien
ggatgagcccgccggcctgtgcttt

SEQ ID NO: 2385163 - DNA, 25 bp, Homo sapien
ccccgtggaggatcccagacagcag

SEQ ID NO: 2385164 - DNA, 25 bp, Homo sapien
ctctggtggtccacgggtgggatga

SEQ ID NO: 2385165 - DNA, 25 bp, Homo sapien
atggcacctgtagggcgttgctctg

SEQ ID NO: 2385166 - DNA, 25 bp, Homo sapien
gagtgatccgcacacaatggcacct

SEQ ID NO: 2385167 - DNA, 25 bp, Homo sapien
gtgaccccttaagagctgtgtacgg

SEQ ID NO: 2385168 - DNA, 25 bp, Homo sapien
taagagctgtgtacggtgctgctga

SEQ ID NO: 2385169 - DNA, 25 bp, Homo sapien
gaagctcgcgcccagctgtggatgc

SEQ ID NO: 2385170 - DNA, 25 bp, Homo sapien
aaccttgggtcaatagaatctgtgt

SEQ ID NO: 2385171 - DNA, 25 bp, Homo sapien
ccaggagaagctcgcgcccagctgt

SEQ ID NO: 2385172 - DNA, 25 bp, Homo sapien
aaaaaccttgggtcaatagaatctg

SEQ ID NO: 2385173 - DNA, 25 bp, Homo sapien
ttggggtgttctgtgttcgctcctg

SEQ ID NO: 2385174 - DNA, 25 bp, Homo sapien
gtttggggtgttctgtgttcgctcc

SEQ ID NO: 2385175 - DNA, 25 bp, Homo sapien
gtgttctgtgttcgctcctgcaggc

SEQ ID NO: 2385176 - DNA, 25 bp, Homo sapien
ggggtgttctgtgttcgctcctgca

SEQ ID NO: 2385177 - DNA, 25 bp, Homo sapien
ctccgtccacatccgtgcctacatc

SEQ ID NO: 2385178 - DNA, 25 bp, Homo sapien
gtccacatccgtgcctacatctgta

SEQ ID NO: 2385179 - DNA, 25 bp, Homo sapien
ccacatccgtgcctacatctgtatc

SEQ ID NO: 2385180 - DNA, 25 bp, Homo sapien
ccgtccacatccgtgcctacatctg

SEQ ID NO: 2385181 - DNA, 25 bp, Homo sapien
caccacgtccacgaggtcctcttgg

SEQ ID NO: 2385182 - DNA, 25 bp, Homo sapien
accacgtccacgaggtcctcttggg

SEQ ID NO: 2385183 - DNA, 25 bp, Homo sapien
ggcaccacgtccacgaggtcctctt

SEQ ID NO: 2385184 - DNA, 25 bp, Homo sapien
gaggcaccacgtccacgaggtcctc

SEQ ID NO: 2385185 - DNA, 25 bp, Homo sapien
tctgcaactggatgggctctagcgg

SEQ ID NO: 2385186 - DNA, 25 bp, Homo sapien
tgggccctgggtttgtgtctgcaac

SEQ ID NO: 2385187 - DNA, 25 bp, Homo sapien
gggttctgcccaatctagcaattcg

SEQ ID NO: 2385188 - DNA, 25 bp, Homo sapien
caatctagcaattcgaggtggcaca

SEQ ID NO: 2385189 - DNA, 25 bp, Homo sapien
gtgtttcctcctcatagacccgcac

SEQ ID NO: 2385190 - DNA, 25 bp, Homo sapien
gcttccttgttcaccctcactggtc

SEQ ID NO: 2385191 - DNA, 25 bp, Homo sapien
gggagttctctatccgcttccttgt

SEQ ID NO: 2385192 - DNA, 25 bp, Homo sapien
gaggcgctggttctgtgtattcacc

SEQ ID NO: 2385193 - DNA, 25 bp, Homo sapien
catccatgtgtagggcagtcgggaa

SEQ ID NO: 2385194 - DNA, 25 bp, Homo sapien
ttgtgtcgctgcagtgaccggacag

SEQ ID NO: 2385195 - DNA, 25 bp, Homo sapien
caactgcaaggaggcttgtgtcgct

SEQ ID NO: 2385196 - DNA, 25 bp, Homo sapien
cagtggcaggtaagcgtgcgatccc

SEQ ID NO: 2385197 - DNA, 25 bp, Homo sapien
gagcttctaatgcaggaatcacaag

SEQ ID NO: 2385198 - DNA, 25 bp, Homo sapien
gatgctatgttttgcttcggcgtgc

SEQ ID NO: 2385199 - DNA, 25 bp, Homo sapien
cagatccctcacagatgctatgttt

SEQ ID NO: 2385200 - DNA, 25 bp, Homo sapien
aggctctacacacgttggagttttc

SEQ ID NO: 2385201 - DNA, 25 bp, Homo sapien
cgtctccggcattcggtgtcagcat

SEQ ID NO: 2385202 - DNA, 25 bp, Homo sapien
agaagcatccgcgtctccggcattc

SEQ ID NO: 2385203 - DNA, 25 bp, Homo sapien
ccttggtgccactggggtagaagca

SEQ ID NO: 2385204 - DNA, 25 bp, Homo sapien
tttgggattccgcagacagcagcct

SEQ ID NO: 2385205 - DNA, 25 bp, Homo sapien
tcatctgcgctcggattcctgaggc

SEQ ID NO: 2385206 - DNA, 25 bp, Homo sapien
tcgatgagggagtaggcgtgagcct

SEQ ID NO: 2385207 - DNA, 25 bp, Homo sapien
aggcgtgagcctgttcttctctatc

SEQ ID NO: 2385208 - DNA, 25 bp, Homo sapien
gagcctgttcttctctatctgtatc

SEQ ID NO: 2385209 - DNA, 25 bp, Homo sapien
tgttcttctctatctgtatcccctt

SEQ ID NO: 2385210 - DNA, 25 bp, Homo sapien
ggagagtgacaatgttttgaaattg

SEQ ID NO: 2385211 - DNA, 25 bp, Homo sapien
tcaggcggggagagtgacaatgttt

SEQ ID NO: 2385212 - DNA, 25 bp, Homo sapien
tgttgcggcggcctgaagaagcaca

SEQ ID NO: 2385213 - DNA, 25 bp, Homo sapien
cgggaaggctggtgttgcggcggcc

SEQ ID NO: 2385214 - DNA, 25 bp, Homo sapien
cagggagaggttccagagagtgcag

SEQ ID NO: 2385215 - DNA, 25 bp, Homo sapien
tgggcctcctgggacctcagttccc

SEQ ID NO: 2385216 - DNA, 25 bp, Homo sapien
ctgcctccttgggtggggtgacctg

SEQ ID NO: 2385217 - DNA, 25 bp, Homo sapien
ctaagcctgagaaaacagggcctct

SEQ ID NO: 2385218 - DNA, 25 bp, Homo sapien
tgtctaagcctcatgtaccgatttg

SEQ ID NO: 2385219 - DNA, 25 bp, Homo sapien
aacaccctgtcgtgggatgtgctca

SEQ ID NO: 2385220 - DNA, 25 bp, Homo sapien
gtccaatgatgtgtatgtctaagcc

SEQ ID NO: 2385221 - DNA, 25 bp, Homo sapien
caaggtctgtcatatgagtcctccc

SEQ ID NO: 2385222 - DNA, 25 bp, Homo sapien
ccttttgagtgaaataggaagcttc

SEQ ID NO: 2385223 - DNA, 25 bp, Homo sapien
ctcccagctagtttgtgctaattaa

SEQ ID NO: 2385224 - DNA, 25 bp, Homo sapien
tagatctcaggtctaaggcttcctt

SEQ ID NO: 2385225 - DNA, 25 bp, Homo sapien
ccattgtcacggaaaacattggctg

SEQ ID NO: 2385226 - DNA, 25 bp, Homo sapien
ttacatgaggcggagttaaactctt

SEQ ID NO: 2385227 - DNA, 25 bp, Homo sapien
ccagtgtgccgagacattgtttacc

SEQ ID NO: 2385228 - DNA, 25 bp, Homo sapien
gactctcattacgtggactttattg

SEQ ID NO: 2385229 - DNA, 25 bp, Homo sapien
taaactcttagggaaaccagtgtgc

SEQ ID NO: 2385230 - DNA, 25 bp, Homo sapien
agatggtctctttggctagtagggt

SEQ ID NO: 2385231 - DNA, 25 bp, Homo sapien
tctgggtcacagatcatggaggaca

SEQ ID NO: 2385232 - DNA, 25 bp, Homo sapien
gctgcttgtcgtccatcatcgtgaa

SEQ ID NO: 2385233 - DNA, 25 bp, Homo sapien
cagagaggatcagcgttggactctc

SEQ ID NO: 2385234 - DNA, 25 bp, Homo sapien
gatttcatcagtgtgtatttcaaaa

SEQ ID NO: 2385235 - DNA, 25 bp, Homo sapien
taaacagtttgcttgaattgagtcc

SEQ ID NO: 2385236 - DNA, 25 bp, Homo sapien
caattatatctaaacccaaattcat

SEQ ID NO: 2385237 - DNA, 25 bp, Homo sapien
taatagtacagaatatccaggcaga

SEQ ID NO: 2385238 - DNA, 25 bp, Homo sapien
cccgctgctctgtgccatagaccct

SEQ ID NO: 2385239 - DNA, 25 bp, Homo sapien
tctgtgccatagacccttcttctgc

SEQ ID NO: 2385240 - DNA, 25 bp, Homo sapien
tccactcccaggtcagatgtcccct

SEQ ID NO: 2385241 - DNA, 25 bp, Homo sapien
gctgctctgtgccatagacccttct

SEQ ID NO: 2385242 - DNA, 25 bp, Homo sapien
aaataatctttttaggctggatgca

SEQ ID NO: 2385243 - DNA, 25 bp, Homo sapien
aaaataatctttttaggctggatgc

SEQ ID NO: 2385244 - DNA, 25 bp, Homo sapien
cgcacgaacaccccgtcgtcacgct

SEQ ID NO: 2385245 - DNA, 25 bp, Homo sapien
cccgtcgtcacgctcaggaactaca

SEQ ID NO: 2385246 - DNA, 25 bp, Homo sapien
cgtcgtcacgctcaggaactacagg

SEQ ID NO: 2385247 - DNA, 25 bp, Homo sapien
gcacatctcacacgcgcacgaacac

SEQ ID NO: 2385248 - DNA, 25 bp, Homo sapien
gcctgctcccgtgcattctgtgctt

SEQ ID NO: 2385249 - DNA, 25 bp, Homo sapien
agactcatggagacccggctccttg

SEQ ID NO: 2385250 - DNA, 25 bp, Homo sapien
tccgcgggaaatcagactcatggag

SEQ ID NO: 2385251 - DNA, 25 bp, Homo sapien
cggctccttgtgcggaggcccctga

SEQ ID NO: 2385252 - DNA, 25 bp, Homo sapien
cagagaggtggacgaaggacctttt

SEQ ID NO: 2385253 - DNA, 25 bp, Homo sapien
cgtagaaatttcaggccctccaaga

SEQ ID NO: 2385254 - DNA, 25 bp, Homo sapien
cctgtgttcgggtgcggtcgtcctt

SEQ ID NO: 2385255 - DNA, 25 bp, Homo sapien
tgcagtcagccgtcagcctggcttg

SEQ ID NO: 2385256 - DNA, 25 bp, Homo sapien
tttatttagctgacctccagtacag

SEQ ID NO: 2385257 - DNA, 25 bp, Homo sapien
cgtgcccagccgtatctactttaaa

SEQ ID NO: 2385258 - DNA, 25 bp, Homo sapien
tatgttggattgtctctgtacccag

SEQ ID NO: 2385259 - DNA, 25 bp, Homo sapien
tattggccttgtaccccttgcctaa

SEQ ID NO: 2385260 - DNA, 25 bp, Homo sapien
tttgtctcaatttgcttccccgtgg

SEQ ID NO: 2385261 - DNA, 25 bp, Homo sapien
tggtatttgcatctcctcattggga

SEQ ID NO: 2385262 - DNA, 25 bp, Homo sapien
caaataggagtccacacatcatggt

SEQ ID NO: 2385263 - DNA, 25 bp, Homo sapien
gagaagagagtttcattgctctgga

SEQ ID NO: 2385264 - DNA, 25 bp, Homo sapien
cattctacacgtgtaaaggtgacag

SEQ ID NO: 2385265 - DNA, 25 bp, Homo sapien
gatttcgatgcattctacacgtgta

SEQ ID NO: 2385266 - DNA, 25 bp, Homo sapien
gaaggatttcgatgcattctacacg

SEQ ID NO: 2385267 - DNA, 25 bp, Homo sapien
attttggaaggatttcgatgcattc

SEQ ID NO: 2385268 - DNA, 25 bp, Homo sapien
cggccggggcggcgtctggagggcg

SEQ ID NO: 2385269 - DNA, 25 bp, Homo sapien
cggcagccgcgggtagcggttcagg

SEQ ID NO: 2385270 - DNA, 25 bp, Homo sapien
cagccgcgggtagcggttcaggccc

SEQ ID NO: 2385271 - DNA, 25 bp, Homo sapien
tgagcggcagccgcgggtagcggtt

SEQ ID NO: 2385272 - DNA, 25 bp, Homo sapien
cagtgtttattaactttctcagatt

SEQ ID NO: 2385273 - DNA, 25 bp, Homo sapien
agtgtttattaactttctcagattt

SEQ ID NO: 2385274 - DNA, 25 bp, Homo sapien
tcagtgtttattaactttctcagat

SEQ ID NO: 2385275 - DNA, 25 bp, Homo sapien
gtgtttattaactttctcagatttc

SEQ ID NO: 2385276 - DNA, 25 bp, Homo sapien
gcagaagaaacactgctatggttga

SEQ ID NO: 2385277 - DNA, 25 bp, Homo sapien
agcagaagaaacactgctatggttg

SEQ ID NO: 2385278 - DNA, 25 bp, Homo sapien
gactgatattgtcaattctttagga

SEQ ID NO: 2385279 - DNA, 25 bp, Homo sapien
tgctatggttgactgatattgtcaa

SEQ ID NO: 2385280 - DNA, 25 bp, Homo sapien
gcggaagcgcaattcaaacgccgga

SEQ ID NO: 2385281 - DNA, 25 bp, Homo sapien
attcaaacgccggagacgcagccga

SEQ ID NO: 2385282 - DNA, 25 bp, Homo sapien
gcacgcacgcaacgcggttcggtcg

SEQ ID NO: 2385283 - DNA, 25 bp, Homo sapien
ggaaagatggcggaagcgcaattca

SEQ ID NO: 2385284 - DNA, 25 bp, Homo sapien
tccagaagcgtctccgcgcccgtcc

SEQ ID NO: 2385285 - DNA, 25 bp, Homo sapien
ttccagaagcgtctccgcgcccgtc

SEQ ID NO: 2385286 - DNA, 25 bp, Homo sapien
cagaagcgtctccgcgcccgtccga

SEQ ID NO: 2385287 - DNA, 25 bp, Homo sapien
cttccagaagcgtctccgcgcccgt

SEQ ID NO: 2385288 - DNA, 25 bp, Homo sapien
ggacggggatgagagcggaggatga

SEQ ID NO: 2385289 - DNA, 25 bp, Homo sapien
ggcggccggaggtgtagggatggga

SEQ ID NO: 2385290 - DNA, 25 bp, Homo sapien
ttcgcgggggctagcgccgacccca

SEQ ID NO: 2385291 - DNA, 25 bp, Homo sapien
aacggcggccggaggtgtagggatg

SEQ ID NO: 2385292 - DNA, 25 bp, Homo sapien
ggacggaggcgagcgctcgcgcggc

SEQ ID NO: 2385293 - DNA, 25 bp, Homo sapien
aggacggaggcgagcgctcgcgcgg

SEQ ID NO: 2385294 - DNA, 25 bp, Homo sapien
gcagaggacggaggcgagcgctcgc

SEQ ID NO: 2385295 - DNA, 25 bp, Homo sapien
agaggacggaggcgagcgctcgcgc

SEQ ID NO: 2385296 - DNA, 25 bp, Homo sapien
gagggacccgcgagtcgcacgcggt

SEQ ID NO: 2385297 - DNA, 25 bp, Homo sapien
cggggccccattacagccatcgtgg

SEQ ID NO: 2385298 - DNA, 25 bp, Homo sapien
tcacggaactttaaccaccacaggc

SEQ ID NO: 2385299 - DNA, 25 bp, Homo sapien
aagatcccagagtcacggaacttta

SEQ ID NO: 2385300 - DNA, 25 bp, Homo sapien
gtcaaatgacgtttcacgaaggtcg

SEQ ID NO: 2385301 - DNA, 25 bp, Homo sapien
caaatgacgtttcacgaaggtcgtt

SEQ ID NO: 2385302 - DNA, 25 bp, Homo sapien
acatacttcttctcaaattcaccag

SEQ ID NO: 2385303 - DNA, 25 bp, Homo sapien
accagtcaaatgacgtttcacgaag

SEQ ID NO: 2385304 - DNA, 25 bp, Homo sapien
tacattgaacttaataggtcctctg

SEQ ID NO: 2385305 - DNA, 25 bp, Homo sapien
tggccggctgtgtcccatacattga

SEQ ID NO: 2385306 - DNA, 25 bp, Homo sapien
ggatgaacctcaacacccaaggtgg

SEQ ID NO: 2385307 - DNA, 25 bp, Homo sapien
tataatagccatctctcagtccacc

SEQ ID NO: 2385308 - DNA, 25 bp, Homo sapien
tacatgctcaaggaaagcaaaaggc

SEQ ID NO: 2385309 - DNA, 25 bp, Homo sapien
gacactatttgttggaacagacctg

SEQ ID NO: 2385310 - DNA, 25 bp, Homo sapien
tgtgttatcggcaacgtgaggttcc

SEQ ID NO: 2385311 - DNA, 25 bp, Homo sapien
atggtggtcaactccccgaagtcca

SEQ ID NO: 2385312 - DNA, 25 bp, Homo sapien
gtacagttagcaaggcaagaaacca

SEQ ID NO: 2385313 - DNA, 25 bp, Homo sapien
cctgcaggaataactatggtacagt

SEQ ID NO: 2385314 - DNA, 25 bp, Homo sapien
taaataacccagataaagcctatat

SEQ ID NO: 2385315 - DNA, 25 bp, Homo sapien
aagcctatatattcacctgcaggaa

SEQ ID NO: 2385316 - DNA, 25 bp, Homo sapien
tgagctcatgagttccagaccagca

SEQ ID NO: 2385317 - DNA, 25 bp, Homo sapien
catgggcaacatggtgaatccccat

SEQ ID NO: 2385318 - DNA, 25 bp, Homo sapien
tgggcaacatggtgaatccccatct

SEQ ID NO: 2385319 - DNA, 25 bp, Homo sapien
ctcatgagttccagaccagcatggg

SEQ ID NO: 2385320 - DNA, 25 bp, Homo sapien
ggctggctatactggaaaacattat

SEQ ID NO: 2385321 - DNA, 25 bp, Homo sapien
tccagataggccaagcaatgtggct

SEQ ID NO: 2385322 - DNA, 25 bp, Homo sapien
attattcctgtcttaaaaaatccag

SEQ ID NO: 2385323 - DNA, 25 bp, Homo sapien
tctttaaatggctggctatactgga

SEQ ID NO: 2385324 - DNA, 25 bp, Homo sapien
tactgcacaagtgaagaatgctaag

SEQ ID NO: 2385325 - DNA, 25 bp, Homo sapien
caactagttatagtcttagacctca

SEQ ID NO: 2385326 - DNA, 25 bp, Homo sapien
tagacctcaacgagtcacctgtatc

SEQ ID NO: 2385327 - DNA, 25 bp, Homo sapien
gaaccagagactaggattcaactag

SEQ ID NO: 2385328 - DNA, 25 bp, Homo sapien
ctctatgccagttaggcacattctt

SEQ ID NO: 2385329 - DNA, 25 bp, Homo sapien
tcgtgctcatactgtgctgccaaag

SEQ ID NO: 2385330 - DNA, 25 bp, Homo sapien
taagtcgtgctcatactgtgctgcc

SEQ ID NO: 2385331 - DNA, 25 bp, Homo sapien
gctcatactgtgctgccaaagctgg

SEQ ID NO: 2385332 - DNA, 25 bp, Homo sapien
ctctaagtcgtgctcatactgtgct

SEQ ID NO: 2385333 - DNA, 25 bp, Homo sapien
ctgaacagcaaagtggccacaatac

SEQ ID NO: 2385334 - DNA, 25 bp, Homo sapien
tctgaacagcaaagtggccacaata

SEQ ID NO: 2385335 - DNA, 25 bp, Homo sapien
atcctcatccgggagagcagttgtc

SEQ ID NO: 2385336 - DNA, 25 bp, Homo sapien
tcatcatcctcatccgggagagcag

SEQ ID NO: 2385337 - DNA, 25 bp, Homo sapien
tcatcctcatccgggagagcagttg

SEQ ID NO: 2385338 - DNA, 25 bp, Homo sapien
ccgggagagcagttgtctgagcaac

SEQ ID NO: 2385339 - DNA, 25 bp, Homo sapien
tgatgtgactgcagcagtcttatat

SEQ ID NO: 2385340 - DNA, 25 bp, Homo sapien
gcagcagtcttatatatgaaactca

SEQ ID NO: 2385341 - DNA, 25 bp, Homo sapien
gtgactgcagcagtcttatatatga

SEQ ID NO: 2385342 - DNA, 25 bp, Homo sapien
cagtcttatatatgaaactcaagga

SEQ ID NO: 2385343 - DNA, 25 bp, Homo sapien
cagtaacaaacaagatttcaccact

SEQ ID NO: 2385344 - DNA, 25 bp, Homo sapien
tgggaatgacagtaacaaacaagat

SEQ ID NO: 2385345 - DNA, 25 bp, Homo sapien
taaacgaaaaggaatgggaatgaca

SEQ ID NO: 2385346 - DNA, 25 bp, Homo sapien
tacaactttattctgattctaaacg

SEQ ID NO: 2385347 - DNA, 25 bp, Homo sapien
ggtgaccctacctagccaatatgaa

SEQ ID NO: 2385348 - DNA, 25 bp, Homo sapien
gcaagtgcttccctaggtgacccta

SEQ ID NO: 2385349 - DNA, 25 bp, Homo sapien
ccatgtaacccttctaaccaaatag

SEQ ID NO: 2385350 - DNA, 25 bp, Homo sapien
catcagtttgtgtgacatggctcaa

SEQ ID NO: 2385351 - DNA, 25 bp, Homo sapien
tgaaaactgtgggtaaacatggacc

SEQ ID NO: 2385352 - DNA, 25 bp, Homo sapien
gctcaagattcctaactgctacaag

SEQ ID NO: 2385353 - DNA, 25 bp, Homo sapien
catctttaaagtctaggagtacctg

SEQ ID NO: 2385354 - DNA, 25 bp, Homo sapien
aaaacggtgtagtgtgaactgctga

SEQ ID NO: 2385355 - DNA, 25 bp, Homo sapien
gatccagaatgtcaacaccacttgc

SEQ ID NO: 2385356 - DNA, 25 bp, Homo sapien
cacgttagacaggtaagtgacgtca

SEQ ID NO: 2385357 - DNA, 25 bp, Homo sapien
tgaaaggtttcatcccaattatggg

SEQ ID NO: 2385358 - DNA, 25 bp, Homo sapien
tgaatacagcgtaacatacacagca

SEQ ID NO: 2385359 - DNA, 25 bp, Homo sapien
gaagaacgaggactttgatctgtaa

SEQ ID NO: 2385360 - DNA, 25 bp, Homo sapien
gaagggaagaacgaggactttgatc

SEQ ID NO: 2385361 - DNA, 25 bp, Homo sapien
aagaacgaggactttgatctgtaac

SEQ ID NO: 2385362 - DNA, 25 bp, Homo sapien
gggaagaacgaggactttgatctgt

SEQ ID NO: 2385363 - DNA, 25 bp, Homo sapien
taataccgacgcgtggttcaagaac

SEQ ID NO: 2385364 - DNA, 25 bp, Homo sapien
ggaagtgccttcctcgagctacgta

SEQ ID NO: 2385365 - DNA, 25 bp, Homo sapien
acagacttatgtggccttacgaacc

SEQ ID NO: 2385366 - DNA, 25 bp, Homo sapien
catgaaagtttgagaggtgctgcac

SEQ ID NO: 2385367 - DNA, 25 bp, Homo sapien
gagccagaaggaacagagatcgcat

SEQ ID NO: 2385368 - DNA, 25 bp, Homo sapien
ctgagagccagaaggaacagagatc

SEQ ID NO: 2385369 - DNA, 25 bp, Homo sapien
ctggtctcttgctgagagccagaag

SEQ ID NO: 2385370 - DNA, 25 bp, Homo sapien
gagagccagaaggaacagagatcgc

SEQ ID NO: 2385371 - DNA, 25 bp, Homo sapien
ctccactctgcctgatacagtcaga

SEQ ID NO: 2385372 - DNA, 25 bp, Homo sapien
actccactctgcctgatacagtcag

SEQ ID NO: 2385373 - DNA, 25 bp, Homo sapien
ctgaacatccagaggactgagcaca

SEQ ID NO: 2385374 - DNA, 25 bp, Homo sapien
gagctgaacatccagaggactgagc

SEQ ID NO: 2385375 - DNA, 25 bp, Homo sapien
gctgaacatccagaggactgagcac

SEQ ID NO: 2385376 - DNA, 25 bp, Homo sapien
gctgctgagctgaacatccagagga

SEQ ID NO: 2385377 - DNA, 25 bp, Homo sapien
gcttgcgcaaccaaaaacgtcctcg

SEQ ID NO: 2385378 - DNA, 25 bp, Homo sapien
catgggtgcagcgatcaggtcaaaa

SEQ ID NO: 2385379 - DNA, 25 bp, Homo sapien
gagagcaggttgcagtcatcccaag

SEQ ID NO: 2385380 - DNA, 25 bp, Homo sapien
tgtgaggctccggagaattcccgca

SEQ ID NO: 2385381 - DNA, 25 bp, Homo sapien
gttgctcctgatggcgatgccctca

SEQ ID NO: 2385382 - DNA, 25 bp, Homo sapien
ggcttccaccagcgttgctcctgat

SEQ ID NO: 2385383 - DNA, 25 bp, Homo sapien
gcgttgctcctgatggcgatgccct

SEQ ID NO: 2385384 - DNA, 25 bp, Homo sapien
cgttgctcctgatggcgatgccctc

SEQ ID NO: 2385385 - DNA, 25 bp, Homo sapien
aggccttgttcagaggcccagatga

SEQ ID NO: 2385386 - DNA, 25 bp, Homo sapien
tgtaaagcagcgtgtcctgaagcct

SEQ ID NO: 2385387 - DNA, 25 bp, Homo sapien
tcaggccttgttcagaggcccagat

SEQ ID NO: 2385388 - DNA, 25 bp, Homo sapien
ccagatgaagagcccgcctccatgt

SEQ ID NO: 2385389 - DNA, 25 bp, Homo sapien
aagagaaagcagcacacccactgtg

SEQ ID NO: 2385390 - DNA, 25 bp, Homo sapien
aataaacacgttgcgatgaccagag

SEQ ID NO: 2385391 - DNA, 25 bp, Homo sapien
tggtcagcaccttcaaagtcggcat

SEQ ID NO: 2385392 - DNA, 25 bp, Homo sapien
tgtgccctccatattaagcgctgac

SEQ ID NO: 2385393 - DNA, 25 bp, Homo sapien
ggctctctcggaggtcaaagctcgg

SEQ ID NO: 2385394 - DNA, 25 bp, Homo sapien
ggtcaaagctcggagccaagtgaaa

SEQ ID NO: 2385395 - DNA, 25 bp, Homo sapien
tctcggaggtcaaagctcggagcca

SEQ ID NO: 2385396 - DNA, 25 bp, Homo sapien
tcaaagctcggagccaagtgaaatt

SEQ ID NO: 2385397 - DNA, 25 bp, Homo sapien
atagcagcagccaggagtaccagca

SEQ ID NO: 2385398 - DNA, 25 bp, Homo sapien
aatagcagcagccaggagtaccagc

SEQ ID NO: 2385399 - DNA, 25 bp, Homo sapien
gatggtcctgcgatctggagtagac

SEQ ID NO: 2385400 - DNA, 25 bp, Homo sapien
tcctgcgatctggagtagacgccac

SEQ ID NO: 2385401 - DNA, 25 bp, Homo sapien
ctggatggtcctgcgatctggagta

SEQ ID NO: 2385402 - DNA, 25 bp, Homo sapien
tgcgatctggagtagacgccacgca

SEQ ID NO: 2385403 - DNA, 25 bp, Homo sapien
cagagatgaacaagtgggctgttcc

SEQ ID NO: 2385404 - DNA, 25 bp, Homo sapien
acaagggccattcgctgatgcctca

SEQ ID NO: 2385405 - DNA, 25 bp, Homo sapien
cagggtcacagtgtgtggtgaggca

SEQ ID NO: 2385406 - DNA, 25 bp, Homo sapien
gtgggctgttcctgagatacctgca

SEQ ID NO: 2385407 - DNA, 25 bp, Homo sapien
aatggaggtggtggcgaggcgacga

SEQ ID NO: 2385408 - DNA, 25 bp, Homo sapien
gcgaggcgacgatgcctggaacatc

SEQ ID NO: 2385409 - DNA, 25 bp, Homo sapien
ccccgagttggtgaatggaggtggt

SEQ ID NO: 2385410 - DNA, 25 bp, Homo sapien
gatgcctggaacatcctggcatggg

SEQ ID NO: 2385411 - DNA, 25 bp, Homo sapien
catgtggacgaaacagaagtggcag

SEQ ID NO: 2385412 - DNA, 25 bp, Homo sapien
ctatgcatgtggacgaaacagaagt

SEQ ID NO: 2385413 - DNA, 25 bp, Homo sapien
tatgcatgtggacgaaacagaagtg

SEQ ID NO: 2385414 - DNA, 25 bp, Homo sapien
tgcatgtggacgaaacagaagtggc

SEQ ID NO: 2385415 - DNA, 25 bp, Homo sapien
gtcctctctttaacgcagcgctggg

SEQ ID NO: 2385416 - DNA, 25 bp, Homo sapien
tgtttattcgttcccaagccacagg

SEQ ID NO: 2385417 - DNA, 25 bp, Homo sapien
tctgtatcataagcagaagtccggg

SEQ ID NO: 2385418 - DNA, 25 bp, Homo sapien
caggagcccttgtttcattcagcga

SEQ ID NO: 2385419 - DNA, 25 bp, Homo sapien
aaccttgcggtttcaagagctcagg

SEQ ID NO: 2385420 - DNA, 25 bp, Homo sapien
cagcatggccgtcgtttctctaaga

SEQ ID NO: 2385421 - DNA, 25 bp, Homo sapien
caaaaacaatttgcagtgagaggag

SEQ ID NO: 2385422 - DNA, 25 bp, Homo sapien
gaaaaagagggactgctagaacctg

SEQ ID NO: 2385423 - DNA, 25 bp, Homo sapien
tttcgggaaaaaggcactctgtggc

SEQ ID NO: 2385424 - DNA, 25 bp, Homo sapien
tgaattcagcccacaggttcctttt

SEQ ID NO: 2385425 - DNA, 25 bp, Homo sapien
aaacgtcttcttaggcaggtcagcc

SEQ ID NO: 2385426 - DNA, 25 bp, Homo sapien
ggcatgagaccacctaactctgcaa

SEQ ID NO: 2385427 - DNA, 25 bp, Homo sapien
taaagtgatggtgtctcgttcaccc

SEQ ID NO: 2385428 - DNA, 25 bp, Homo sapien
ccagagttcataggtggccagtgat

SEQ ID NO: 2385429 - DNA, 25 bp, Homo sapien
tgacgcaccccatgtaatatctgaa

SEQ ID NO: 2385430 - DNA, 25 bp, Homo sapien
cacaatcagtcctggcagaaaggct

SEQ ID NO: 2385431 - DNA, 25 bp, Homo sapien
gggaagcagacgccaacacctgaaa

SEQ ID NO: 2385432 - DNA, 25 bp, Homo sapien
gaagcagacgccaacacctgaaatc

SEQ ID NO: 2385433 - DNA, 25 bp, Homo sapien
ggaagcagacgccaacacctgaaat

SEQ ID NO: 2385434 - DNA, 25 bp, Homo sapien
taaaatgcttcgtggcctggcacag

SEQ ID NO: 2385435 - DNA, 25 bp, Homo sapien
tcactggaaacgtcttaggcgatgc

SEQ ID NO: 2385436 - DNA, 25 bp, Homo sapien
gacttgcacatagaggcatcctcag

SEQ ID NO: 2385437 - DNA, 25 bp, Homo sapien
gctaggattgctgtacggtaaaccc

SEQ ID NO: 2385438 - DNA, 25 bp, Homo sapien
acggagcgcgtgctcctcaacggcg

SEQ ID NO: 2385439 - DNA, 25 bp, Homo sapien
ctggctgtagggtggtttccaaatg

SEQ ID NO: 2385440 - DNA, 25 bp, Homo sapien
aggtgcccttcacggagcgcgtgct

SEQ ID NO: 2385441 - DNA, 25 bp, Homo sapien
tggccatgttgctgccctacaggca

SEQ ID NO: 2385442 - DNA, 25 bp, Homo sapien
tgaacttggccactcataacacagg

SEQ ID NO: 2385443 - DNA, 25 bp, Homo sapien
tgtttactttggtcagcagctcggc

SEQ ID NO: 2385444 - DNA, 25 bp, Homo sapien
caaaacgacggagagttcggcaaca

SEQ ID NO: 2385445 - DNA, 25 bp, Homo sapien
tcgtttgaacccgagccagtggtga

SEQ ID NO: 2385446 - DNA, 25 bp, Homo sapien
taggcagaatcattggaatacacaa

SEQ ID NO: 2385447 - DNA, 25 bp, Homo sapien
cacagtgagcttgtgggttcgggac

SEQ ID NO: 2385448 - DNA, 25 bp, Homo sapien
gcagagagatttgagtaggcagaat

SEQ ID NO: 2385449 - DNA, 25 bp, Homo sapien
gtagcattacgggaaggaagcacag

SEQ ID NO: 2385450 - DNA, 25 bp, Homo sapien
ggataaccgactcaagggacctcag

SEQ ID NO: 2385451 - DNA, 25 bp, Homo sapien
aacccattttcaggcgccaggagga

SEQ ID NO: 2385452 - DNA, 25 bp, Homo sapien
caacattttgcatagtcccaggaga

SEQ ID NO: 2385453 - DNA, 25 bp, Homo sapien
tcagagatctttgctaccacatggg

SEQ ID NO: 2385454 - DNA, 25 bp, Homo sapien
tcctctttcaggtaaatgcctttgt

SEQ ID NO: 2385455 - DNA, 25 bp, Homo sapien
gagaagcgtgactcccttttcctct

SEQ ID NO: 2385456 - DNA, 25 bp, Homo sapien
gtacctgccgtaatagagaagcgtg

SEQ ID NO: 2385457 - DNA, 25 bp, Homo sapien
gatgcaggagctgttgtacctgccg

SEQ ID NO: 2385458 - DNA, 25 bp, Homo sapien
aactggagacggaagtccagggcca

SEQ ID NO: 2385459 - DNA, 25 bp, Homo sapien
ggaagtggaacccacgccttctggc

SEQ ID NO: 2385460 - DNA, 25 bp, Homo sapien
ggaagcagtggttgcccaagatccc

SEQ ID NO: 2385461 - DNA, 25 bp, Homo sapien
catgctgcggacaggctctgttcga

SEQ ID NO: 2385462 - DNA, 25 bp, Homo sapien
tcagaatcagcacgtcctggttggg

SEQ ID NO: 2385463 - DNA, 25 bp, Homo sapien
aaaaacagaagatcaacacggcgcc

SEQ ID NO: 2385464 - DNA, 25 bp, Homo sapien
caagcacgtatagtcagccgcggat

SEQ ID NO: 2385465 - DNA, 25 bp, Homo sapien
ccacctggcaggagacaatgtagaa

SEQ ID NO: 2385466 - DNA, 25 bp, Homo sapien
ggtctgatggccgttctggcacccg

SEQ ID NO: 2385467 - DNA, 25 bp, Homo sapien
acagggtctgatggccgttctggca

SEQ ID NO: 2385468 - DNA, 25 bp, Homo sapien
cagggacagggtctgatggccgttc

SEQ ID NO: 2385469 - DNA, 25 bp, Homo sapien
gatggccgttctggcacccggacca

SEQ ID NO: 2385470 - DNA, 25 bp, Homo sapien
cttggagcttctgagcggatgctgc

SEQ ID NO: 2385471 - DNA, 25 bp, Homo sapien
ttctgagcggatgctgctcccacac

SEQ ID NO: 2385472 - DNA, 25 bp, Homo sapien
tgctgctcccacaccaggaaagcag

SEQ ID NO: 2385473 - DNA, 25 bp, Homo sapien
ctgacaaaaccagaacttggagctt

SEQ ID NO: 2385474 - DNA, 25 bp, Homo sapien
tccatggtgccggtaaccaagcttt

SEQ ID NO: 2385475 - DNA, 25 bp, Homo sapien
gacttctacctgagcaacagcttat

SEQ ID NO: 2385476 - DNA, 25 bp, Homo sapien
taagggtagatcgaaggccatccat

SEQ ID NO: 2385477 - DNA, 25 bp, Homo sapien
aactttgcctcatggagttgggcca

SEQ ID NO: 2385478 - DNA, 25 bp, Homo sapien
tgcccagtaatgtgggttaccgcaa

SEQ ID NO: 2385479 - DNA, 25 bp, Homo sapien
caaggaagtcagcacagtgcgttgt

SEQ ID NO: 2385480 - DNA, 25 bp, Homo sapien
tgcggcatctgtccttagggctcct

SEQ ID NO: 2385481 - DNA, 25 bp, Homo sapien
gttaccgcaaaagggtgcgactgtg

SEQ ID NO: 2385482 - DNA, 25 bp, Homo sapien
gattgcacctggactaaatggtctg

SEQ ID NO: 2385483 - DNA, 25 bp, Homo sapien
tctgagcgacgcatgttagcatgaa

SEQ ID NO: 2385484 - DNA, 25 bp, Homo sapien
tgtgggtgcaaagtcctactgtgat

SEQ ID NO: 2385485 - DNA, 25 bp, Homo sapien
cattagttcatgttgcctccgccac

SEQ ID NO: 2385486 - DNA, 25 bp, Homo sapien
tgactgatgaagatcgctgcagccc

SEQ ID NO: 2385487 - DNA, 25 bp, Homo sapien
acttttatgtctgcacagcggcgca

SEQ ID NO: 2385488 - DNA, 25 bp, Homo sapien
tccccgggatcatgcaaatgtgaag

SEQ ID NO: 2385489 - DNA, 25 bp, Homo sapien
ccagaaatgtggttagggcggctcc

SEQ ID NO: 2385490 - DNA, 25 bp, Homo sapien
ctcccatgtcatggaattgtcccgc

SEQ ID NO: 2385491 - DNA, 25 bp, Homo sapien
gagcagactttgaacccattggaga

SEQ ID NO: 2385492 - DNA, 25 bp, Homo sapien
ccccatacgcagaagggattggtct

SEQ ID NO: 2385493 - DNA, 25 bp, Homo sapien
gaattgtcccgcgtatacagctcca

SEQ ID NO: 2385494 - DNA, 25 bp, Homo sapien
gcctgggcaaccaagtaagacctca

SEQ ID NO: 2385495 - DNA, 25 bp, Homo sapien
cctgggcaaccaagtaagacctcac

SEQ ID NO: 2385496 - DNA, 25 bp, Homo sapien
cgttgacgtagactttcaggccctc

SEQ ID NO: 2385497 - DNA, 25 bp, Homo sapien
tccactcggatcagaggtgctcagg

SEQ ID NO: 2385498 - DNA, 25 bp, Homo sapien
cacgaggttgacgttggactctcca

SEQ ID NO: 2385499 - DNA, 25 bp, Homo sapien
tgatgaactcatcgaaagcaccgtt

SEQ ID NO: 2385500 - DNA, 25 bp, Homo sapien
ggcagctgcataacaccgtgaatgt

SEQ ID NO: 2385501 - DNA, 25 bp, Homo sapien
gaaaatgtttccaagccaggtagag

SEQ ID NO: 2385502 - DNA, 25 bp, Homo sapien
cagtgctgatagctgcaacgggaga

SEQ ID NO: 2385503 - DNA, 25 bp, Homo sapien
tataccttgaaaccccgtgatgatc

SEQ ID NO: 2385504 - DNA, 25 bp, Homo sapien
caccaggtgcaatgggattctggtc

SEQ ID NO: 2385505 - DNA, 25 bp, Homo sapien
tctggttctggcgatgagggtttgc

SEQ ID NO: 2385506 - DNA, 25 bp, Homo sapien
gctctgacaagaacaagaaccagaa

SEQ ID NO: 2385507 - DNA, 25 bp, Homo sapien
tctggtcgatccagttctggttcag

SEQ ID NO: 2385508 - DNA, 25 bp, Homo sapien
gatagtgaaaatcggtccagcgatc

SEQ ID NO: 2385509 - DNA, 25 bp, Homo sapien
cgcttgcaagcgatgaccatggaga

SEQ ID NO: 2385510 - DNA, 25 bp, Homo sapien
cagcgatcctgccaacgcttgcaag

SEQ ID NO: 2385511 - DNA, 25 bp, Homo sapien
gagggatagtgaaaatcggtccagc

SEQ ID NO: 2385512 - DNA, 25 bp, Homo sapien
tgtcatgaagaggcttggcagcgtt

SEQ ID NO: 2385513 - DNA, 25 bp, Homo sapien
gatgtcatgaagaggcttggcagcg

SEQ ID NO: 2385514 - DNA, 25 bp, Homo sapien
catgaagaggcttggcagcgttgaa

SEQ ID NO: 2385515 - DNA, 25 bp, Homo sapien
tcatgaagaggcttggcagcgttga

SEQ ID NO: 2385516 - DNA, 25 bp, Homo sapien
aattggcaacatgagtttctactaa

SEQ ID NO: 2385517 - DNA, 25 bp, Homo sapien
gaaattggcaacatgagtttctact

SEQ ID NO: 2385518 - DNA, 25 bp, Homo sapien
ttggcaacatgagtttctactaaga

SEQ ID NO: 2385519 - DNA, 25 bp, Homo sapien
tggcaacatgagtttctactaagaa

SEQ ID NO: 2385520 - DNA, 25 bp, Homo sapien
cttactgggtaagctgagggataca

SEQ ID NO: 2385521 - DNA, 25 bp, Homo sapien
ctctcttctgtcaggttggttatga

SEQ ID NO: 2385522 - DNA, 25 bp, Homo sapien
ctcagtatcactccgggactttgga

SEQ ID NO: 2385523 - DNA, 25 bp, Homo sapien
gagattcaaggctgtctgctccgag

SEQ ID NO: 2385524 - DNA, 25 bp, Homo sapien
aaggatctctcccacggcttttaag

SEQ ID NO: 2385525 - DNA, 25 bp, Homo sapien
agaaggatctctcccacggctttta

SEQ ID NO: 2385526 - DNA, 25 bp, Homo sapien
ggatctctcccacggcttttaagaa

SEQ ID NO: 2385527 - DNA, 25 bp, Homo sapien
gtagaaggatctctcccacggcttt

SEQ ID NO: 2385528 - DNA, 25 bp, Homo sapien
ctccctgtgcttcacgaggaggggc

SEQ ID NO: 2385529 - DNA, 25 bp, Homo sapien
tccctgtgcttcacgaggaggggct

SEQ ID NO: 2385530 - DNA, 25 bp, Homo sapien
gctgatcgcccccaggtccactctg

SEQ ID NO: 2385531 - DNA, 25 bp, Homo sapien
tcgcccccaggtccactctgggatg

SEQ ID NO: 2385532 - DNA, 25 bp, Homo sapien
caatagtgtcgatgagactcagtac

SEQ ID NO: 2385533 - DNA, 25 bp, Homo sapien
ccatgacggtgtcaatagtgtcgat

SEQ ID NO: 2385534 - DNA, 25 bp, Homo sapien
ttggaggatacatggcccatgacgg

SEQ ID NO: 2385535 - DNA, 25 bp, Homo sapien
atgagactcagtaccacggcgctgt

SEQ ID NO: 2385536 - DNA, 25 bp, Homo sapien
cggtaatgggaggaattcacggtct

SEQ ID NO: 2385537 - DNA, 25 bp, Homo sapien
taatgggaggaattcacggtcttgg

SEQ ID NO: 2385538 - DNA, 25 bp, Homo sapien
ttgggcaggattttggccacggaaa

SEQ ID NO: 2385539 - DNA, 25 bp, Homo sapien
aagcggtaatgggaggaattcacgg

SEQ ID NO: 2385540 - DNA, 25 bp, Homo sapien
cagggcatcacacagtctcagagcc

SEQ ID NO: 2385541 - DNA, 25 bp, Homo sapien
agggcatcacacagtctcagagccc

SEQ ID NO: 2385542 - DNA, 25 bp, Homo sapien
ccagggcatcacacagtctcagagc

SEQ ID NO: 2385543 - DNA, 25 bp, Homo sapien
agggcatcacacggtctcagagccc

SEQ ID NO: 2385544 - DNA, 25 bp, Homo sapien
ccagggcatcacacggtctcagagc

SEQ ID NO: 2385545 - DNA, 25 bp, Homo sapien
cagggcatcacacggtctcagagcc

SEQ ID NO: 2385546 - DNA, 25 bp, Homo sapien
agtgcatgctgtggtacagcagacc

SEQ ID NO: 2385547 - DNA, 25 bp, Homo sapien
tgttcaggtagtagtgcatgctgtg

SEQ ID NO: 2385548 - DNA, 25 bp, Homo sapien
agcagacccacgacggtgctccagg

SEQ ID NO: 2385549 - DNA, 25 bp, Homo sapien
cgggccagatgttgttcaggtagta

SEQ ID NO: 2385550 - DNA, 25 bp, Homo sapien
ggtttgcagggggacgtcagagtta

SEQ ID NO: 2385551 - DNA, 25 bp, Homo sapien
gatgacttggctgtccaatttccag

SEQ ID NO: 2385552 - DNA, 25 bp, Homo sapien
gttagctgcattgttctgggacaca

SEQ ID NO: 2385553 - DNA, 25 bp, Homo sapien
gggacgtcagagttagctgcattgt

SEQ ID NO: 2385554 - DNA, 25 bp, Homo sapien
gtgctgctcatggaacatgttgtgg

SEQ ID NO: 2385555 - DNA, 25 bp, Homo sapien
ctgctcatggaacatgttgtggggc

SEQ ID NO: 2385556 - DNA, 25 bp, Homo sapien
tgctcatggaacatgttgtggggct

SEQ ID NO: 2385557 - DNA, 25 bp, Homo sapien
tgctgctcatggaacatgttgtggg

SEQ ID NO: 2385558 - DNA, 25 bp, Homo sapien
ggcagcgagtgagactcaaaggatc

SEQ ID NO: 2385559 - DNA, 25 bp, Homo sapien
caggcagcgagtgagactcaaagga

SEQ ID NO: 2385560 - DNA, 25 bp, Homo sapien
aggcagcgagtgagactcaaaggat

SEQ ID NO: 2385561 - DNA, 25 bp, Homo sapien
ctgtcccggtgctggctgagcctag

SEQ ID NO: 2385562 - DNA, 25 bp, Homo sapien
agcctagcacgagcacccgtaaaag

SEQ ID NO: 2385563 - DNA, 25 bp, Homo sapien
cgagcacccgtaaaagctgaacagt

SEQ ID NO: 2385564 - DNA, 25 bp, Homo sapien
ggctgagcctagcacgagcacccgt

SEQ ID NO: 2385565 - DNA, 25 bp, Homo sapien
tctgtgcttgaggtggaccgtaatg

SEQ ID NO: 2385566 - DNA, 25 bp, Homo sapien
agagcccgacaggttctgagacagg

SEQ ID NO: 2385567 - DNA, 25 bp, Homo sapien
caatctgtgcttgaggtggaccgta

SEQ ID NO: 2385568 - DNA, 25 bp, Homo sapien
gaccgtaatgagtggagagcccgac

SEQ ID NO: 2385569 - DNA, 25 bp, Homo sapien
agtgtgaaaccagatcaaaggcggc

SEQ ID NO: 2385570 - DNA, 25 bp, Homo sapien
aaccagatcaaaggcggcgacaagg

SEQ ID NO: 2385571 - DNA, 25 bp, Homo sapien
gcgacaagggtgaaggcaccgccac

SEQ ID NO: 2385572 - DNA, 25 bp, Homo sapien
caagggtgaaggcaccgccactcac

SEQ ID NO: 2385573 - DNA, 25 bp, Homo sapien
tgagcctccacgcagtgccaaggcc

SEQ ID NO: 2385574 - DNA, 25 bp, Homo sapien
cctgagcctccacgcagtgccaagg

SEQ ID NO: 2385575 - DNA, 25 bp, Homo sapien
ctgagcctccacgcagtgccaaggc

SEQ ID NO: 2385576 - DNA, 25 bp, Homo sapien
gagcctccacgcagtgccaaggcca

SEQ ID NO: 2385577 - DNA, 25 bp, Homo sapien
cacaaacatggccttctacaaaact

SEQ ID NO: 2385578 - DNA, 25 bp, Homo sapien
tacaaaacttccatccacggcatca

SEQ ID NO: 2385579 - DNA, 25 bp, Homo sapien
agccctgcccgagcttctcacacag

SEQ ID NO: 2385580 - DNA, 25 bp, Homo sapien
aactggcacctttcatacttcacag

SEQ ID NO: 2385581 - DNA, 25 bp, Homo sapien
tgaaggccaccgtccagtgtttgag

SEQ ID NO: 2385582 - DNA, 25 bp, Homo sapien
tgtaaatggtcatcccagcaacagg

SEQ ID NO: 2385583 - DNA, 25 bp, Homo sapien
cagaaaccctggtgaaaagagcggc

SEQ ID NO: 2385584 - DNA, 25 bp, Homo sapien
cgtattcaaagcgatgagccctcag

SEQ ID NO: 2385585 - DNA, 25 bp, Homo sapien
gagccccaggggcatttccacttgc

SEQ ID NO: 2385586 - DNA, 25 bp, Homo sapien
tgagccccaggggcatttccacttg

SEQ ID NO: 2385587 - DNA, 25 bp, Homo sapien
gggcgcagccgataataaaatgtcc

SEQ ID NO: 2385588 - DNA, 25 bp, Homo sapien
aaggaaccctaggtcatcggcgcct

SEQ ID NO: 2385589 - DNA, 25 bp, Homo sapien
taaaatgtccaaggacacatggtgc

SEQ ID NO: 2385590 - DNA, 25 bp, Homo sapien
gactcggataacaaacccgactgcg

SEQ ID NO: 2385591 - DNA, 25 bp, Homo sapien
gcccaggagggcacaggttggcagg

SEQ ID NO: 2385592 - DNA, 25 bp, Homo sapien
agggcacaggttggcagggccgcag

SEQ ID NO: 2385593 - DNA, 25 bp, Homo sapien
ggagggcacaggttggcagggccgc

SEQ ID NO: 2385594 - DNA, 25 bp, Homo sapien
cacaggttggcagggccgcagggcg

SEQ ID NO: 2385595 - DNA, 25 bp, Homo sapien
cgcagaaacccaccggcacgcgcac

SEQ ID NO: 2385596 - DNA, 25 bp, Homo sapien
ccgcagaaacccaccggcacgcgca

SEQ ID NO: 2385597 - DNA, 25 bp, Homo sapien
gccgcagaaacccaccggcacgcgc

SEQ ID NO: 2385598 - DNA, 25 bp, Homo sapien
ggacgagggccaggctcatccacgc

SEQ ID NO: 2385599 - DNA, 25 bp, Homo sapien
ttcggatccgctcctggcgctgcaa

SEQ ID NO: 2385600 - DNA, 25 bp, Homo sapien
cggatttcggcatgcccaatgcgcc

SEQ ID NO: 2385601 - DNA, 25 bp, Homo sapien
ggacagcagccattcgcattcggat

SEQ ID NO: 2385602 - DNA, 25 bp, Homo sapien
atgacggccgcgacctggagaccca

SEQ ID NO: 2385603 - DNA, 25 bp, Homo sapien
tgacggccgcgacctggagacccac

SEQ ID NO: 2385604 - DNA, 25 bp, Homo sapien
gagggagcattgaccaggaaggaca

SEQ ID NO: 2385605 - DNA, 25 bp, Homo sapien
ggagggagcattgaccaggaaggac

SEQ ID NO: 2385606 - DNA, 25 bp, Homo sapien
ggagcattgaccagggagggggcac

SEQ ID NO: 2385607 - DNA, 25 bp, Homo sapien
gggcactgatcagggagggagcatt

SEQ ID NO: 2385608 - DNA, 25 bp, Homo sapien
atcagggagggagcattgaccaggg

SEQ ID NO: 2385609 - DNA, 25 bp, Homo sapien
ggagggggcactgatcagggaggga

SEQ ID NO: 2385610 - DNA, 25 bp, Homo sapien
gagggagcattgaccagggaggaca

SEQ ID NO: 2385611 - DNA, 25 bp, Homo sapien
tgaccagggagggagcgctgaccag

SEQ ID NO: 2385612 - DNA, 25 bp, Homo sapien
aggacactgaccagggagggagcgc

SEQ ID NO: 2385613 - DNA, 25 bp, Homo sapien
ccagggagggagcattgaccaggga

SEQ ID NO: 2385614 - DNA, 25 bp, Homo sapien
ggtgatgatgtctttacgctgagcc

SEQ ID NO: 2385615 - DNA, 25 bp, Homo sapien
gtctttacgctgagccaagcctcct

SEQ ID NO: 2385616 - DNA, 25 bp, Homo sapien
gatgatgtctttacgctgagccaag

SEQ ID NO: 2385617 - DNA, 25 bp, Homo sapien
ctgtcattctttgggggtggctgtt

SEQ ID NO: 2385618 - DNA, 25 bp, Homo sapien
gagagctctgtgaccgacaagcatc

SEQ ID NO: 2385619 - DNA, 25 bp, Homo sapien
tctgtgaccgacaagcatctgctct

SEQ ID NO: 2385620 - DNA, 25 bp, Homo sapien
agctctgtgaccgacaagcatctgc

SEQ ID NO: 2385621 - DNA, 25 bp, Homo sapien
agagagagctctgtgaccgacaagc

SEQ ID NO: 2385622 - DNA, 25 bp, Homo sapien
cgtgccgtccgctgctggattcaca

SEQ ID NO: 2385623 - DNA, 25 bp, Homo sapien
gattcacagtgtcagaagcactgct

SEQ ID NO: 2385624 - DNA, 25 bp, Homo sapien
cacagtgtcagaagcactgctggcc

SEQ ID NO: 2385625 - DNA, 25 bp, Homo sapien
tggattcacagtgtcagaagcactg

SEQ ID NO: 2385626 - DNA, 25 bp, Homo sapien
ggatgtgtgaaaggaaacgtgctcc

SEQ ID NO: 2385627 - DNA, 25 bp, Homo sapien
ggtgcaggaagacacccgaggatgg

SEQ ID NO: 2385628 - DNA, 25 bp, Homo sapien
ggctcaaacccgggaaagatgggca

SEQ ID NO: 2385629 - DNA, 25 bp, Homo sapien
acagacataggtgcactcctggcca

SEQ ID NO: 2385630 - DNA, 25 bp, Homo sapien
gacccagccagcagttaacagccag

SEQ ID NO: 2385631 - DNA, 25 bp, Homo sapien
tgacccagccagcagttaacagcca

SEQ ID NO: 2385632 - DNA, 25 bp, Homo sapien
gtgacccagccagcagttaacagcc

SEQ ID NO: 2385633 - DNA, 25 bp, Homo sapien
tgttggacaaagagtaagaatcaga

SEQ ID NO: 2385634 - DNA, 25 bp, Homo sapien
tctggtttagtggtacggctgctga

SEQ ID NO: 2385635 - DNA, 25 bp, Homo sapien
agtggtacggctgctgatgcccctg

SEQ ID NO: 2385636 - DNA, 25 bp, Homo sapien
aggctgctggtgtccgtaaggcccc

SEQ ID NO: 2385637 - DNA, 25 bp, Homo sapien
ttacgtctcattttgatttgctgag

SEQ ID NO: 2385638 - DNA, 25 bp, Homo sapien
acgtctcattttgatttgctgagtt

SEQ ID NO: 2385639 - DNA, 25 bp, Homo sapien
tacgtctcattttgatttgctgagt

SEQ ID NO: 2385640 - DNA, 25 bp, Homo sapien
ccagcagacagagccgagggtccac

SEQ ID NO: 2385641 - DNA, 25 bp, Homo sapien
gggtccacgctgctacagcagggcc

SEQ ID NO: 2385642 - DNA, 25 bp, Homo sapien
agagccgagggtccacgctgctaca

SEQ ID NO: 2385643 - DNA, 25 bp, Homo sapien
gctgctacagcagggcccgagcgtt

SEQ ID NO: 2385644 - DNA, 25 bp, Homo sapien
gggcacagcgatcagacatacagga

SEQ ID NO: 2385645 - DNA, 25 bp, Homo sapien
gcacagcgatcagacatacaggagg

SEQ ID NO: 2385646 - DNA, 25 bp, Homo sapien
cacagcgatcagacatataggaggc

SEQ ID NO: 2385647 - DNA, 25 bp, Homo sapien
tcagacatataggaggcagagggca

SEQ ID NO: 2385648 - DNA, 25 bp, Homo sapien
tctctgaaatctccctccagaagga

SEQ ID NO: 2385649 - DNA, 25 bp, Homo sapien
atcaggggcacagcgatcagacata

SEQ ID NO: 2385650 - DNA, 25 bp, Homo sapien
agagcttggtgggacttctctgaaa

SEQ ID NO: 2385651 - DNA, 25 bp, Homo sapien
gaaatctccctccagaaggatcagg

SEQ ID NO: 2385652 - DNA, 25 bp, Homo sapien
cttgtggcttcatctccgtgggaat

SEQ ID NO: 2385653 - DNA, 25 bp, Homo sapien
ggaacctccacatcggatcgtcgtg

SEQ ID NO: 2385654 - DNA, 25 bp, Homo sapien
tctccgtgggaataggaacctccac

SEQ ID NO: 2385655 - DNA, 25 bp, Homo sapien
ggcttcatctccgtgggaataggaa

SEQ ID NO: 2385656 - DNA, 25 bp, Homo sapien
aaaacaaaaacgctgtcgctgccct

SEQ ID NO: 2385657 - DNA, 25 bp, Homo sapien
cctagaatgctggagtctcgcctca

SEQ ID NO: 2385658 - DNA, 25 bp, Homo sapien
tctgtataagcggactcagcaccag

SEQ ID NO: 2385659 - DNA, 25 bp, Homo sapien
gagggcctggttttgcggtcatccc

SEQ ID NO: 2385660 - DNA, 25 bp, Homo sapien
ggtcaacttctaaagcgcgtctcag

SEQ ID NO: 2385661 - DNA, 25 bp, Homo sapien
gagcagcaggtcaacttctaaagcg

SEQ ID NO: 2385662 - DNA, 25 bp, Homo sapien
ttctaaagcgcgtctcagaccgcct

SEQ ID NO: 2385663 - DNA, 25 bp, Homo sapien
ctggatgacgcagcagcctccactc

SEQ ID NO: 2385664 - DNA, 25 bp, Homo sapien
tgcagacactccatgaccacatggg

SEQ ID NO: 2385665 - DNA, 25 bp, Homo sapien
ggcagggcactagaggccagccaac

SEQ ID NO: 2385666 - DNA, 25 bp, Homo sapien
cagacactccatgaccacatgggca

SEQ ID NO: 2385667 - DNA, 25 bp, Homo sapien
acatgggcagggcactagaggccag

SEQ ID NO: 2385668 - DNA, 25 bp, Homo sapien
agccccttctcaggcccactctgac

SEQ ID NO: 2385669 - DNA, 25 bp, Homo sapien
tctccaccatcctggatggcagact

SEQ ID NO: 2385670 - DNA, 25 bp, Homo sapien
ctgaccccaggactcttctccacca

SEQ ID NO: 2385671 - DNA, 25 bp, Homo sapien
attcccctgatggtgcagcccacag

SEQ ID NO: 2385672 - DNA, 25 bp, Homo sapien
gtacagcgtggaccagaagccacca

SEQ ID NO: 2385673 - DNA, 25 bp, Homo sapien
tgcgtgcacaagttgccctctgtgg

SEQ ID NO: 2385674 - DNA, 25 bp, Homo sapien
tcctggacacataggacccgccagt

SEQ ID NO: 2385675 - DNA, 25 bp, Homo sapien
ctggtgagccttgaacccggcatcc

SEQ ID NO: 2385676 - DNA, 25 bp, Homo sapien
ttggcatttagcagctgcgatgtct

SEQ ID NO: 2385677 - DNA, 25 bp, Homo sapien
tttggcatttagcagctgcgatgtc

SEQ ID NO: 2385678 - DNA, 25 bp, Homo sapien
atttggcatttagcagctgcgatgt

SEQ ID NO: 2385679 - DNA, 25 bp, Homo sapien
tggcatttagcagctgcgatgtctc

SEQ ID NO: 2385680 - DNA, 25 bp, Homo sapien
tcagtggaaagcgcggcacacgaag

SEQ ID NO: 2385681 - DNA, 25 bp, Homo sapien
ggcacacgaagccaggccgggaccc

SEQ ID NO: 2385682 - DNA, 25 bp, Homo sapien
cggcacacgaagccaggccgggacc

SEQ ID NO: 2385683 - DNA, 25 bp, Homo sapien
gcggcacacgaagccaggccgggac

SEQ ID NO: 2385684 - DNA, 25 bp, Homo sapien
ccaggtagcacccagtcacgcggct

SEQ ID NO: 2385685 - DNA, 25 bp, Homo sapien
caggtagcacccagtcacgcggctc

SEQ ID NO: 2385686 - DNA, 25 bp, Homo sapien
ggcagcttgccccgaaactgaacag

SEQ ID NO: 2385687 - DNA, 25 bp, Homo sapien
ttgtgcaggacagagccacgagggc

SEQ ID NO: 2385688 - DNA, 25 bp, Homo sapien
gacgctgctgaagaggcccctggtt

SEQ ID NO: 2385689 - DNA, 25 bp, Homo sapien
ctgaagaggcccctggttctcagca

SEQ ID NO: 2385690 - DNA, 25 bp, Homo sapien
acgctgctgaagaggcccctggttc

SEQ ID NO: 2385691 - DNA, 25 bp, Homo sapien
ctgctgaagaggcccctggttctca

SEQ ID NO: 2385692 - DNA, 25 bp, Homo sapien
ctgaaatgaaagaaagcaaacacga

SEQ ID NO: 2385693 - DNA, 25 bp, Homo sapien
aaatgaaagaaagcaaacacgatgc

SEQ ID NO: 2385694 - DNA, 25 bp, Homo sapien
atgaaagaaagcaaacacgatgcat

SEQ ID NO: 2385695 - DNA, 25 bp, Homo sapien
gaaatgaaagaaagcaaacacgatg

SEQ ID NO: 2385696 - DNA, 25 bp, Homo sapien
tgttggtggcctcactgtgctgctt

SEQ ID NO: 2385697 - DNA, 25 bp, Homo sapien
tggcctcactgtgctgcttacgtgt

SEQ ID NO: 2385698 - DNA, 25 bp, Homo sapien
aggaaggcgcagtacacgaagactc

SEQ ID NO: 2385699 - DNA, 25 bp, Homo sapien
gtacacgaagactcggttgctgctg

SEQ ID NO: 2385700 - DNA, 25 bp, Homo sapien
ctgctctcccctgtgcagagggtac

SEQ ID NO: 2385701 - DNA, 25 bp, Homo sapien
ccccagctcagcgtcttgcaatctc

SEQ ID NO: 2385702 - DNA, 25 bp, Homo sapien
cagctcagcgtcttgcaatctcctg

SEQ ID NO: 2385703 - DNA, 25 bp, Homo sapien
gcagagacgctttctctgacgggga

SEQ ID NO: 2385704 - DNA, 25 bp, Homo sapien
ctgacggggaccataccagcagagg

SEQ ID NO: 2385705 - DNA, 25 bp, Homo sapien
cctcgctgttcacagaacagagata

SEQ ID NO: 2385706 - DNA, 25 bp, Homo sapien
actttcctcgctgttcacagaacag

SEQ ID NO: 2385707 - DNA, 25 bp, Homo sapien
tttcctcgctgttcacagaacagag

SEQ ID NO: 2385708 - DNA, 25 bp, Homo sapien
tcctcgctgttcacagaacagagat

SEQ ID NO: 2385709 - DNA, 25 bp, Homo sapien
acgccgacggccatagccagagtga

SEQ ID NO: 2385710 - DNA, 25 bp, Homo sapien
ccacattgcagaggcatgacgccaa

SEQ ID NO: 2385711 - DNA, 25 bp, Homo sapien
aacggtcatagccagacgccgacgg

SEQ ID NO: 2385712 - DNA, 25 bp, Homo sapien
ccgacggccatagccagagtgaggc

SEQ ID NO: 2385713 - DNA, 25 bp, Homo sapien
gtaaccctgcgttagccctgggcga

SEQ ID NO: 2385714 - DNA, 25 bp, Homo sapien
gttcagtggtgattttcatgattaa

SEQ ID NO: 2385715 - DNA, 25 bp, Homo sapien
agcagcctcgggcaacggtaaccct

SEQ ID NO: 2385716 - DNA, 25 bp, Homo sapien
gacggtctttccgacatgacccagg

SEQ ID NO: 2385717 - DNA, 25 bp, Homo sapien
tgaggtgagtgcagcggcagacgga

SEQ ID NO: 2385718 - DNA, 25 bp, Homo sapien
agcgcacagccgtggttcgaccaga

SEQ ID NO: 2385719 - DNA, 25 bp, Homo sapien
cagacggagtaggtgaggtttcctc

SEQ ID NO: 2385720 - DNA, 25 bp, Homo sapien
gaggtttcctctcgtgagcgcacag

SEQ ID NO: 2385721 - DNA, 25 bp, Homo sapien
tgctgtgcgaagcacaccacactgg

SEQ ID NO: 2385722 - DNA, 25 bp, Homo sapien
tgctggcacccaatacatgcaggac

SEQ ID NO: 2385723 - DNA, 25 bp, Homo sapien
ggctcctcggatatttgctggcacc

SEQ ID NO: 2385724 - DNA, 25 bp, Homo sapien
gatttacacaatcatgggctcctcg

SEQ ID NO: 2385725 - DNA, 25 bp, Homo sapien
gccccagcagcattacaagtcactt

SEQ ID NO: 2385726 - DNA, 25 bp, Homo sapien
ccccagcagcattacaagtcacttc

SEQ ID NO: 2385727 - DNA, 25 bp, Homo sapien
ctgccccagcagcattacaagtcac

SEQ ID NO: 2385728 - DNA, 25 bp, Homo sapien
tgccccagcagcattacaagtcact

SEQ ID NO: 2385729 - DNA, 25 bp, Homo sapien
acgtgcgtctttcgccctgtgaggg

SEQ ID NO: 2385730 - DNA, 25 bp, Homo sapien
ttttccatggaatttaaagatgagg

SEQ ID NO: 2385731 - DNA, 25 bp, Homo sapien
ggtgccacgtgcgtctttcgccctg

SEQ ID NO: 2385732 - DNA, 25 bp, Homo sapien
cagtgaggccgggatcacactggct

SEQ ID NO: 2385733 - DNA, 25 bp, Homo sapien
tgtgcatgaaggaagacgttccccg

SEQ ID NO: 2385734 - DNA, 25 bp, Homo sapien
ctgtgcatgaaggaagacgttcccc

SEQ ID NO: 2385735 - DNA, 25 bp, Homo sapien
tgcatgaaggaagacgttccccgtt

SEQ ID NO: 2385736 - DNA, 25 bp, Homo sapien
gcatgaaggaagacgttccccgttc

SEQ ID NO: 2385737 - DNA, 25 bp, Homo sapien
tcccaggtggtcggctgtgtgaagg

SEQ ID NO: 2385738 - DNA, 25 bp, Homo sapien
aggtggtcggctgtgtgaaggccac

SEQ ID NO: 2385739 - DNA, 25 bp, Homo sapien
caggtggtcggctgtgtgaaggcca

SEQ ID NO: 2385740 - DNA, 25 bp, Homo sapien
ccaggtggtcggctgtgtgaaggcc

SEQ ID NO: 2385741 - DNA, 25 bp, Homo sapien
acctcttaggcccatttcccaatgt

SEQ ID NO: 2385742 - DNA, 25 bp, Homo sapien
ctcgaagtgcaggtttttacctctt

SEQ ID NO: 2385743 - DNA, 25 bp, Homo sapien
ttaggcccatttcccaatgtcccag

SEQ ID NO: 2385744 - DNA, 25 bp, Homo sapien
catttcccaatgtcccaggtggcca

SEQ ID NO: 2385745 - DNA, 25 bp, Homo sapien
cctcacagatggaggcgggatataa

SEQ ID NO: 2385746 - DNA, 25 bp, Homo sapien
gatataaaactggaccggcagtgcc

SEQ ID NO: 2385747 - DNA, 25 bp, Homo sapien
tgccccagacgatggctgctttaaa

SEQ ID NO: 2385748 - DNA, 25 bp, Homo sapien
tgtggcgatgtaaacctggactggc

SEQ ID NO: 2385749 - DNA, 25 bp, Homo sapien
ggtttggcggccatccctggccgta

SEQ ID NO: 2385750 - DNA, 25 bp, Homo sapien
actgatggaaatgaaccgacagccc

SEQ ID NO: 2385751 - DNA, 25 bp, Homo sapien
gtaggcagccgtagcatgtgccagc

SEQ ID NO: 2385752 - DNA, 25 bp, Homo sapien
aggcatccctggtttggcggccatc

SEQ ID NO: 2385753 - DNA, 25 bp, Homo sapien
ggctgcactcctgcccttggctcct

SEQ ID NO: 2385754 - DNA, 25 bp, Homo sapien
gggctgcactcctgcccttggctcc

SEQ ID NO: 2385755 - DNA, 25 bp, Homo sapien
ctcatctcgcagctctaagaacagc

SEQ ID NO: 2385756 - DNA, 25 bp, Homo sapien
gtgagcagtactgggaacaatggta

SEQ ID NO: 2385757 - DNA, 25 bp, Homo sapien
tgggaacaatggtaaccagaggtat

SEQ ID NO: 2385758 - DNA, 25 bp, Homo sapien
tctcgcagctctaagaacagcagtg

SEQ ID NO: 2385759 - DNA, 25 bp, Homo sapien
ctcctgtggcccatggctcttgtca

SEQ ID NO: 2385760 - DNA, 25 bp, Homo sapien
gaggcccagctgaagcctgaagcct

SEQ ID NO: 2385761 - DNA, 25 bp, Homo sapien
cagaggcccagctgaagcctgaagc

SEQ ID NO: 2385762 - DNA, 25 bp, Homo sapien
gcaggagggcgccacgtgcttcctc

SEQ ID NO: 2385763 - DNA, 25 bp, Homo sapien
accaggcagagcacggagagggagc

SEQ ID NO: 2385764 - DNA, 25 bp, Homo sapien
agggagcagcccacatagctgatag

SEQ ID NO: 2385765 - DNA, 25 bp, Homo sapien
tagctgatagacgacagcgccacct

SEQ ID NO: 2385766 - DNA, 25 bp, Homo sapien
acggcgaaggtgaccagcgtggcca

SEQ ID NO: 2385767 - DNA, 25 bp, Homo sapien
cggctcgaggcggaaactaatgagc

SEQ ID NO: 2385768 - DNA, 25 bp, Homo sapien
caccagcacggcgaaggacaggttg

SEQ ID NO: 2385769 - DNA, 25 bp, Homo sapien
ggcggaaactaatgagcagcaggac

SEQ ID NO: 2385770 - DNA, 25 bp, Homo sapien
gcgctggttccggatggtgctcacg

SEQ ID NO: 2385771 - DNA, 25 bp, Homo sapien
aagaagtagtgtaggagcacggcca

SEQ ID NO: 2385772 - DNA, 25 bp, Homo sapien
caggaagaagtagtgtaggagcacg

SEQ ID NO: 2385773 - DNA, 25 bp, Homo sapien
agtgtaggagcacggccatcacttg

SEQ ID NO: 2385774 - DNA, 25 bp, Homo sapien
tccaccagcatccatgcgaaggcac

SEQ ID NO: 2385775 - DNA, 25 bp, Homo sapien
tcccatagtagtaacggtgcttgct

SEQ ID NO: 2385776 - DNA, 25 bp, Homo sapien
atagtagtaacggtgcttgctgtcc

SEQ ID NO: 2385777 - DNA, 25 bp, Homo sapien
agtagtaacggtgcttgctgtcctc

SEQ ID NO: 2385778 - DNA, 25 bp, Homo sapien
tcccatcccatagtagtaacggtgc

SEQ ID NO: 2385779 - DNA, 25 bp, Homo sapien
cctgaagaagcaggtcatgcgtgac

SEQ ID NO: 2385780 - DNA, 25 bp, Homo sapien
gcctgaagaagcaggtcatgcgtga

SEQ ID NO: 2385781 - DNA, 25 bp, Homo sapien
tgatcatggcattacgcaatctctc

SEQ ID NO: 2385782 - DNA, 25 bp, Homo sapien
gttttgtccctagaggaacaggagc

SEQ ID NO: 2385783 - DNA, 25 bp, Homo sapien
gtctcgcagtcaacaacaccttaag

SEQ ID NO: 2385784 - DNA, 25 bp, Homo sapien
ctctctggaatgaaagtgcagcttc

SEQ ID NO: 2385785 - DNA, 25 bp, Homo sapien
tttgggtgctcctctttgcaacacg

SEQ ID NO: 2385786 - DNA, 25 bp, Homo sapien
caacacggtgaccttcagagggacc

SEQ ID NO: 2385787 - DNA, 25 bp, Homo sapien
gaccggtgctgtccttggcatctgc

SEQ ID NO: 2385788 - DNA, 25 bp, Homo sapien
ttcagagggaccagaccggtgctgt

SEQ ID NO: 2385789 - DNA, 25 bp, Homo sapien
gtccctctggccctgtcatcagaga

SEQ ID NO: 2385790 - DNA, 25 bp, Homo sapien
ttctgcggacaatgtgaagtccctc

SEQ ID NO: 2385791 - DNA, 25 bp, Homo sapien
ctggaacatgcttctgcggacaatg

SEQ ID NO: 2385792 - DNA, 25 bp, Homo sapien
gacaatgtgaagtccctctggccct

SEQ ID NO: 2385793 - DNA, 25 bp, Homo sapien
tctgaaactctcacacggtaacctg

SEQ ID NO: 2385794 - DNA, 25 bp, Homo sapien
tgtcatctgaaactctcacacggta

SEQ ID NO: 2385795 - DNA, 25 bp, Homo sapien
ctctcacacggtaacctgggcagac

SEQ ID NO: 2385796 - DNA, 25 bp, Homo sapien
gaaactctcacacggtaacctgggc

SEQ ID NO: 2385797 - DNA, 25 bp, Homo sapien
ttattcagaaagtggggcatcatcc

SEQ ID NO: 2385798 - DNA, 25 bp, Homo sapien
gaaacagatcctgcacgaatgggaa

SEQ ID NO: 2385799 - DNA, 25 bp, Homo sapien
acagatcctgcacgaatgggaatct

SEQ ID NO: 2385800 - DNA, 25 bp, Homo sapien
aaacagatcctgcacgaatgggaat

SEQ ID NO: 2385801 - DNA, 25 bp, Homo sapien
gatcctgcacgaatgggaatctgtt

SEQ ID NO: 2385802 - DNA, 25 bp, Homo sapien
cttgttccgtaactgtccatggcaa

SEQ ID NO: 2385803 - DNA, 25 bp, Homo sapien
tgcttgttccgtaactgtccatggc

SEQ ID NO: 2385804 - DNA, 25 bp, Homo sapien
gcttgttccgtaactgtccatggca

SEQ ID NO: 2385805 - DNA, 25 bp, Homo sapien
ttgcttgttccgtaactgtccatgg

SEQ ID NO: 2385806 - DNA, 25 bp, Homo sapien
tgtggtctttgttgctagttccgag

SEQ ID NO: 2385807 - DNA, 25 bp, Homo sapien
ttcctggaggcgctctgtggtcttt

SEQ ID NO: 2385808 - DNA, 25 bp, Homo sapien
ctttctcaccggctgggcctgtggg

SEQ ID NO: 2385809 - DNA, 25 bp, Homo sapien
tagttccgaggccccaaaatgtcca

SEQ ID NO: 2385810 - DNA, 25 bp, Homo sapien
ccagatggcgccactcgccaacgac

SEQ ID NO: 2385811 - DNA, 25 bp, Homo sapien
acagggcaggggctacaaaggccca

SEQ ID NO: 2385812 - DNA, 25 bp, Homo sapien
gccactcgccaacgacagccagcaa

SEQ ID NO: 2385813 - DNA, 25 bp, Homo sapien
agatggcgccactcgccaacgacag

SEQ ID NO: 2385814 - DNA, 25 bp, Homo sapien
ctgggcagctccctcagtaggaggc

SEQ ID NO: 2385815 - DNA, 25 bp, Homo sapien
ctcagtaggaggctggcgaggcagg

SEQ ID NO: 2385816 - DNA, 25 bp, Homo sapien
cagtaggaggctggcgaggcaggca

SEQ ID NO: 2385817 - DNA, 25 bp, Homo sapien
ccctcagtaggaggctggcgaggca

SEQ ID NO: 2385818 - DNA, 25 bp, Homo sapien
ggatcttgtagttgtcggcgctgat

SEQ ID NO: 2385819 - DNA, 25 bp, Homo sapien
tcggcgctgatctgtgagatgactc

SEQ ID NO: 2385820 - DNA, 25 bp, Homo sapien
tgactctggtcacagcgatgaggat

SEQ ID NO: 2385821 - DNA, 25 bp, Homo sapien
tgtgagatgactctggtcacagcga

SEQ ID NO: 2385822 - DNA, 25 bp, Homo sapien
tggccctgctcatgctcaaaggacg

SEQ ID NO: 2385823 - DNA, 25 bp, Homo sapien
agggcagggccaagtggtcatcttc

SEQ ID NO: 2385824 - DNA, 25 bp, Homo sapien
aagtggtcatcttcatggccctgct

SEQ ID NO: 2385825 - DNA, 25 bp, Homo sapien
aggacgtgctaaacaagggcttgct

SEQ ID NO: 2385826 - DNA, 25 bp, Homo sapien
acccgagccctcctgtgacactgac

SEQ ID NO: 2385827 - DNA, 25 bp, Homo sapien
cgctgatcacccgagccctcctgtg

SEQ ID NO: 2385828 - DNA, 25 bp, Homo sapien
tgcagcccgcgtgtcccccgctgat

SEQ ID NO: 2385829 - DNA, 25 bp, Homo sapien
gcgtgtcccccgctgatcacccgag

SEQ ID NO: 2385830 - DNA, 25 bp, Homo sapien
ctaggccatagggagaatctgtcca

SEQ ID NO: 2385831 - DNA, 25 bp, Homo sapien
aggccatagggagaatctgtccagg

SEQ ID NO: 2385832 - DNA, 25 bp, Homo sapien
taggccatagggagaatctgtccag

SEQ ID NO: 2385833 - DNA, 25 bp, Homo sapien
ggccatagggagaatctgtccaggc

SEQ ID NO: 2385834 - DNA, 25 bp, Homo sapien
accacagcacaaccgttgacagcaa

SEQ ID NO: 2385835 - DNA, 25 bp, Homo sapien
cgttgacagcaagcacgccaaagac

SEQ ID NO: 2385836 - DNA, 25 bp, Homo sapien
gagcgtggcaaacatgtactggaaa

SEQ ID NO: 2385837 - DNA, 25 bp, Homo sapien
aaagacccacgaggtacccaggatg

SEQ ID NO: 2385838 - DNA, 25 bp, Homo sapien
gaattcaggagacaatgaaagagga

SEQ ID NO: 2385839 - DNA, 25 bp, Homo sapien
caatgaaagaggaatatgaacagtc

SEQ ID NO: 2385840 - DNA, 25 bp, Homo sapien
tcaggagacaatgaaagaggaatat

SEQ ID NO: 2385841 - DNA, 25 bp, Homo sapien
ctctgaattcaggagacaatgaaag

SEQ ID NO: 2385842 - DNA, 25 bp, Homo sapien
cagaggagtctgtgccggtgcaact

SEQ ID NO: 2385843 - DNA, 25 bp, Homo sapien
tgcaacagccgtaaccagaggagtc

SEQ ID NO: 2385844 - DNA, 25 bp, Homo sapien
gcaactccggaaccagatgtgcgag

SEQ ID NO: 2385845 - DNA, 25 bp, Homo sapien
caaataaacaaatgcgtggtgggca

SEQ ID NO: 2385846 - DNA, 25 bp, Homo sapien
gaggtccgagtggaagggcttcgcg

SEQ ID NO: 2385847 - DNA, 25 bp, Homo sapien
cgtgagcgaccagaccttggttttg

SEQ ID NO: 2385848 - DNA, 25 bp, Homo sapien
agagctgctcgtgagcgaccagacc

SEQ ID NO: 2385849 - DNA, 25 bp, Homo sapien
gcttcgcgttggaggtgcgggcaga

SEQ ID NO: 2385850 - DNA, 25 bp, Homo sapien
tgtagccgtggggctagagcagccc

SEQ ID NO: 2385851 - DNA, 25 bp, Homo sapien
tagccgtggggctagagcagcccat

SEQ ID NO: 2385852 - DNA, 25 bp, Homo sapien
cgtggggctagagcagcccatgagc

SEQ ID NO: 2385853 - DNA, 25 bp, Homo sapien
tggggctagagcagcccatgagcca

SEQ ID NO: 2385854 - DNA, 25 bp, Homo sapien
gggcccatagctgcccgaggattct

SEQ ID NO: 2385855 - DNA, 25 bp, Homo sapien
gctcccagggggagagccataagcc

SEQ ID NO: 2385856 - DNA, 25 bp, Homo sapien
ggagagccataagcccagtgagtgc

SEQ ID NO: 2385857 - DNA, 25 bp, Homo sapien
gagcattgggcccatagctgcccga

SEQ ID NO: 2385858 - DNA, 25 bp, Homo sapien
tcacacggctgacaggtcgacgcgg

SEQ ID NO: 2385859 - DNA, 25 bp, Homo sapien
acggctgacaggtcgacgcggtggg

SEQ ID NO: 2385860 - DNA, 25 bp, Homo sapien
ttggtggaggccatgcctggccggg

SEQ ID NO: 2385861 - DNA, 25 bp, Homo sapien
ggtggaggccatgcctggccgggtc

SEQ ID NO: 2385862 - DNA, 25 bp, Homo sapien
acaccacggctagcgccggctgtgg

SEQ ID NO: 2385863 - DNA, 25 bp, Homo sapien
gaggaagtcactcagcccacgggtg

SEQ ID NO: 2385864 - DNA, 25 bp, Homo sapien
tgtgtcctgggaatcccccgaggaa

SEQ ID NO: 2385865 - DNA, 25 bp, Homo sapien
gcagcaaggagagggtccatgggca

SEQ ID NO: 2385866 - DNA, 25 bp, Homo sapien
gagagtcaacgactcccgcccacgg

SEQ ID NO: 2385867 - DNA, 25 bp, Homo sapien
ccacggctcgagctcggcttgggca

SEQ ID NO: 2385868 - DNA, 25 bp, Homo sapien
tcccgcccacggctcgagctcggct

SEQ ID NO: 2385869 - DNA, 25 bp, Homo sapien
ggagagtcaacgactcccgcccacg

SEQ ID NO: 2385870 - DNA, 25 bp, Homo sapien
ctcacagcggatggccgagaagctc

SEQ ID NO: 2385871 - DNA, 25 bp, Homo sapien
gaggagggcatcttaaggccgaatt

SEQ ID NO: 2385872 - DNA, 25 bp, Homo sapien
gctggcacacgagggaggagggcat

SEQ ID NO: 2385873 - DNA, 25 bp, Homo sapien
cagagcggctcttcacgtgagcaga

SEQ ID NO: 2385874 - DNA, 25 bp, Homo sapien
tgcccattagaaacttcgtagagtg

SEQ ID NO: 2385875 - DNA, 25 bp, Homo sapien
gccgcgtggtctgcccattagaaac

SEQ ID NO: 2385876 - DNA, 25 bp, Homo sapien
tagaaacttcgtagagtgcctgtga

SEQ ID NO: 2385877 - DNA, 25 bp, Homo sapien
ctgccgcgtggtctgcccattagaa

SEQ ID NO: 2385878 - DNA, 25 bp, Homo sapien
gaggcctgcagatgagtggtccact

SEQ ID NO: 2385879 - DNA, 25 bp, Homo sapien
gagttacattaagaagccaccaggt

SEQ ID NO: 2385880 - DNA, 25 bp, Homo sapien
tctcatggtgaccagacggagcgca

SEQ ID NO: 2385881 - DNA, 25 bp, Homo sapien
gactcttcactgaacagcggccttg

SEQ ID NO: 2385882 - DNA, 25 bp, Homo sapien
atgtgacctggtttctggggtcacg

SEQ ID NO: 2385883 - DNA, 25 bp, Homo sapien
cggcgtgatgaggatctggcactgt

SEQ ID NO: 2385884 - DNA, 25 bp, Homo sapien
ggcgtgatgaggatctggcactgtg

SEQ ID NO: 2385885 - DNA, 25 bp, Homo sapien
tccatgtgacctggtttctggggtc

SEQ ID NO: 2385886 - DNA, 25 bp, Homo sapien
aacatagagcctataaataaagtgc

SEQ ID NO: 2385887 - DNA, 25 bp, Homo sapien
tccatctaaactaaagatagttcct

SEQ ID NO: 2385888 - DNA, 25 bp, Homo sapien
gctatatagatgaatacggcaacaa

SEQ ID NO: 2385889 - DNA, 25 bp, Homo sapien
tactgcagaagccaaaacatagagc

SEQ ID NO: 2385890 - DNA, 25 bp, Homo sapien
gggaactgtagcttgttcctgccat

SEQ ID NO: 2385891 - DNA, 25 bp, Homo sapien
atgggaactgtagcttgttcctgcc

SEQ ID NO: 2385892 - DNA, 25 bp, Homo sapien
tgggaactgtagcttgttcctgcca

SEQ ID NO: 2385893 - DNA, 25 bp, Homo sapien
ttggtgacatgccaggagagagctg

SEQ ID NO: 2385894 - DNA, 25 bp, Homo sapien
tctctgccaggaacatccatgttag

SEQ ID NO: 2385895 - DNA, 25 bp, Homo sapien
ggaacatccatgttagattcctttt

SEQ ID NO: 2385896 - DNA, 25 bp, Homo sapien
ctctgaaggctgttcttgcaggtgg

SEQ ID NO: 2385897 - DNA, 25 bp, Homo sapien
tcctttttgctgattgcttttctct

SEQ ID NO: 2385898 - DNA, 25 bp, Homo sapien
ggctccagatgcccccattgatgtc

SEQ ID NO: 2385899 - DNA, 25 bp, Homo sapien
tccagatgcccccattgatgtccac

SEQ ID NO: 2385900 - DNA, 25 bp, Homo sapien
attgatgtccaccatgggatggact

SEQ ID NO: 2385901 - DNA, 25 bp, Homo sapien
ccaccatgggatggacttgggagct

SEQ ID NO: 2385902 - DNA, 25 bp, Homo sapien
tggcagtgtccacatgtagcacata

SEQ ID NO: 2385903 - DNA, 25 bp, Homo sapien
gtaataatcatgtcagcagcctgcg

SEQ ID NO: 2385904 - DNA, 25 bp, Homo sapien
tgtcagcagcctgcgtgtgtgacac

SEQ ID NO: 2385905 - DNA, 25 bp, Homo sapien
catgtagcacataggtaataatcat

SEQ ID NO: 2385906 - DNA, 25 bp, Homo sapien
gctggcggcagcatatgagtatcca

SEQ ID NO: 2385907 - DNA, 25 bp, Homo sapien
gtgcgttccgctggcggcagcatat

SEQ ID NO: 2385908 - DNA, 25 bp, Homo sapien
cccctcgcgccgcagtagagggaag

SEQ ID NO: 2385909 - DNA, 25 bp, Homo sapien
gaagggtgcgttccgctggcggcag

SEQ ID NO: 2385910 - DNA, 25 bp, Homo sapien
gcctctggacgacccctggtcggag

SEQ ID NO: 2385911 - DNA, 25 bp, Homo sapien
atttccctgctgtgaaaacccggag

SEQ ID NO: 2385912 - DNA, 25 bp, Homo sapien
ggctcgcttccgagggtcctggcca

SEQ ID NO: 2385913 - DNA, 25 bp, Homo sapien
ctgcccgtgcgggacagagaaacag

SEQ ID NO: 2385914 - DNA, 25 bp, Homo sapien
gagctccgggtgtcattaggttgca

SEQ ID NO: 2385915 - DNA, 25 bp, Homo sapien
gccttgtttctaggagacgttccca

SEQ ID NO: 2385916 - DNA, 25 bp, Homo sapien
gagcggaaatcccagcctggcgtct

SEQ ID NO: 2385917 - DNA, 25 bp, Homo sapien
gctcattcccagatcgagcggaaat

SEQ ID NO: 2385918 - DNA, 25 bp, Homo sapien
tcaagcatatgacgctgaggaaatg

SEQ ID NO: 2385919 - DNA, 25 bp, Homo sapien
gagagcacgcccaaatcacttgaag

SEQ ID NO: 2385920 - DNA, 25 bp, Homo sapien
taactgctgatgtggattctcccca

SEQ ID NO: 2385921 - DNA, 25 bp, Homo sapien
gactcatgagtgctgaaagagagca

SEQ ID NO: 2385922 - DNA, 25 bp, Homo sapien
tgagggacctccaacatttttatag

SEQ ID NO: 2385923 - DNA, 25 bp, Homo sapien
cttgcaggtgtgaactggtatctca

SEQ ID NO: 2385924 - DNA, 25 bp, Homo sapien
caatatgcattttcgtactgactaa

SEQ ID NO: 2385925 - DNA, 25 bp, Homo sapien
cagcctcgggcattccattatagca

SEQ ID NO: 2385926 - DNA, 25 bp, Homo sapien
taacacatataaccggcacaagcag

SEQ ID NO: 2385927 - DNA, 25 bp, Homo sapien
tgtaagtataattgggatacccacc

SEQ ID NO: 2385928 - DNA, 25 bp, Homo sapien
tcatagttctttgatcccaatgtac

SEQ ID NO: 2385929 - DNA, 25 bp, Homo sapien
aactagcaattcaggttttgcagaa

SEQ ID NO: 2385930 - DNA, 25 bp, Homo sapien
gcatttaaccagaatccactgtgca

SEQ ID NO: 2385931 - DNA, 25 bp, Homo sapien
ttggccccagcatttaaccagaatc

SEQ ID NO: 2385932 - DNA, 25 bp, Homo sapien
agcgtgatcagagttcttggcccca

SEQ ID NO: 2385933 - DNA, 25 bp, Homo sapien
tgctaccacgctggacttctccatg

SEQ ID NO: 2385934 - DNA, 25 bp, Homo sapien
caatgtcctgtcgagggcaaaagtg

SEQ ID NO: 2385935 - DNA, 25 bp, Homo sapien
cagcaggtagcctgcccgcaatgtc

SEQ ID NO: 2385936 - DNA, 25 bp, Homo sapien
cctgcccgcaatgtcctgtcgaggg

SEQ ID NO: 2385937 - DNA, 25 bp, Homo sapien
gagggcaaaagtgcctccagcaaac

SEQ ID NO: 2385938 - DNA, 25 bp, Homo sapien
cagggagcaatgaagcccctggagc

SEQ ID NO: 2385939 - DNA, 25 bp, Homo sapien
aagctccaacgatgacaccggccgt

SEQ ID NO: 2385940 - DNA, 25 bp, Homo sapien
ggagtcttaggaagctccaacgatg

SEQ ID NO: 2385941 - DNA, 25 bp, Homo sapien
agggagcaatgaagcccctggagca

SEQ ID NO: 2385942 - DNA, 25 bp, Homo sapien
ctgaaaactcgccaatgggacccca

SEQ ID NO: 2385943 - DNA, 25 bp, Homo sapien
tgagcagggacaggataggtggacg

SEQ ID NO: 2385944 - DNA, 25 bp, Homo sapien
tgtgtccccatttacaccaatagga

SEQ ID NO: 2385945 - DNA, 25 bp, Homo sapien
accaataggagctcacaccacgtgg

SEQ ID NO: 2385946 - DNA, 25 bp, Homo sapien
ttgattggagcaggatattccacac

SEQ ID NO: 2385947 - DNA, 25 bp, Homo sapien
actggacaacgcaggtgacatggct

SEQ ID NO: 2385948 - DNA, 25 bp, Homo sapien
cactggacaacgcaggtgacatggc

SEQ ID NO: 2385949 - DNA, 25 bp, Homo sapien
accgcgcgtcctccctggtcccaca

SEQ ID NO: 2385950 - DNA, 25 bp, Homo sapien
gctggctctgctcccgcaccgcgcg

SEQ ID NO: 2385951 - DNA, 25 bp, Homo sapien
cttgcgccactcagatgaacagtgc

SEQ ID NO: 2385952 - DNA, 25 bp, Homo sapien
gccactcagatgaacagtgcagcag

SEQ ID NO: 2385953 - DNA, 25 bp, Homo sapien
cacggagtcactcgggaccccgatg

SEQ ID NO: 2385954 - DNA, 25 bp, Homo sapien
aagactcatccctcagattaaaggc

SEQ ID NO: 2385955 - DNA, 25 bp, Homo sapien
gagtaagtgttaaatcctgacaaca

SEQ ID NO: 2385956 - DNA, 25 bp, Homo sapien
ctgaagactcatccctcagattaaa

SEQ ID NO: 2385957 - DNA, 25 bp, Homo sapien
caacaaactctcctgaagactcatc

SEQ ID NO: 2385958 - DNA, 25 bp, Homo sapien
tgggagcagggtctgcccggttcat

SEQ ID NO: 2385959 - DNA, 25 bp, Homo sapien
ctgagattgaggcagatggagatgg

SEQ ID NO: 2385960 - DNA, 25 bp, Homo sapien
gatggagatgggagcagggtctgcc

SEQ ID NO: 2385961 - DNA, 25 bp, Homo sapien
gagatgggagcagggtctgcccggt

SEQ ID NO: 2385962 - DNA, 25 bp, Homo sapien
tgtgcagtgacttggtaacaggcgc

SEQ ID NO: 2385963 - DNA, 25 bp, Homo sapien
tgaagttacagagccctcgtcatga

SEQ ID NO: 2385964 - DNA, 25 bp, Homo sapien
gagaccctccaaagtcatggtgccg

SEQ ID NO: 2385965 - DNA, 25 bp, Homo sapien
tcgttgaagggtgattttctgccca

SEQ ID NO: 2385966 - DNA, 25 bp, Homo sapien
gaaccccaggcctatgtactttgtc

SEQ ID NO: 2385967 - DNA, 25 bp, Homo sapien
caggacttgaatctgctactgggaa

SEQ ID NO: 2385968 - DNA, 25 bp, Homo sapien
aaactgctcagagatctcaggtgcc

SEQ ID NO: 2385969 - DNA, 25 bp, Homo sapien
gaggtttctgcacagactcgggcat

SEQ ID NO: 2385970 - DNA, 25 bp, Homo sapien
caggctctggcccacgggctcgagt

SEQ ID NO: 2385971 - DNA, 25 bp, Homo sapien
tgtagccacggttcagccacacgag

SEQ ID NO: 2385972 - DNA, 25 bp, Homo sapien
ccagttctcccgcagacctaggaat

SEQ ID NO: 2385973 - DNA, 25 bp, Homo sapien
ttctcccgcagacctaggaatagag

SEQ ID NO: 2385974 - DNA, 25 bp, Homo sapien
tgtggccctgatgccctcccatcca

SEQ ID NO: 2385975 - DNA, 25 bp, Homo sapien
tgcaaatgcccccaagagcagtcgg

SEQ ID NO: 2385976 - DNA, 25 bp, Homo sapien
cccaagagcagtcggcatgcctgtc

SEQ ID NO: 2385977 - DNA, 25 bp, Homo sapien
agagcagtcggcatgcctgtcctgg

SEQ ID NO: 2385978 - DNA, 25 bp, Homo sapien
tctctgacatgagtaaagcaggact

SEQ ID NO: 2385979 - DNA, 25 bp, Homo sapien
aagcaggactcacccgatagcaggt

SEQ ID NO: 2385980 - DNA, 25 bp, Homo sapien
gagtgctacctaatccaagaccatg

SEQ ID NO: 2385981 - DNA, 25 bp, Homo sapien
tattatagccctcagcatgagtgga

SEQ ID NO: 2385982 - DNA, 25 bp, Homo sapien
gaaatcaggcgcctgggatacccag

SEQ ID NO: 2385983 - DNA, 25 bp, Homo sapien
gcagggctttttccggagatgtcag

SEQ ID NO: 2385984 - DNA, 25 bp, Homo sapien
gcctccctgtccgaggaagaaatga

SEQ ID NO: 2385985 - DNA, 25 bp, Homo sapien
gaaatgaaaacctcactcaggcctc

SEQ ID NO: 2385986 - DNA, 25 bp, Homo sapien
agggttctgggccagtttgtctctg

SEQ ID NO: 2385987 - DNA, 25 bp, Homo sapien
attcccaggggtgcggggctcctct

SEQ ID NO: 2385988 - DNA, 25 bp, Homo sapien
cagggcccactgatccccattccca

SEQ ID NO: 2385989 - DNA, 25 bp, Homo sapien
gctcctctgctggaagagggttctg

SEQ ID NO: 2385990 - DNA, 25 bp, Homo sapien
aggctttgatggaagtagcgtttcc

SEQ ID NO: 2385991 - DNA, 25 bp, Homo sapien
cgcgggcaccaggatgttaccaaag

SEQ ID NO: 2385992 - DNA, 25 bp, Homo sapien
gacgggtctccagtcgtgggtgccg

SEQ ID NO: 2385993 - DNA, 25 bp, Homo sapien
tagcgtttcctaaacatcggcccac

SEQ ID NO: 2385994 - DNA, 25 bp, Homo sapien
ctggctcttccccagacccaagctg

SEQ ID NO: 2385995 - DNA, 25 bp, Homo sapien
ctggctgtccaccaggcccctggct

SEQ ID NO: 2385996 - DNA, 25 bp, Homo sapien
tggctgtccaccaggcccctggctc

SEQ ID NO: 2385997 - DNA, 25 bp, Homo sapien
tccccagacccaagctgccctgggc

SEQ ID NO: 2385998 - DNA, 25 bp, Homo sapien
gccatcggtagacgcggccttgaga

SEQ ID NO: 2385999 - DNA, 25 bp, Homo sapien
cacgtgcctttctggcgtcggtttc

SEQ ID NO: 2386000 - DNA, 25 bp, Homo sapien
tggtccgcgtatttgaggtccctgg

SEQ ID NO: 2386001 - DNA, 25 bp, Homo sapien
ccttctgtacaacgggcctcgtgga

SEQ ID NO: 2386002 - DNA, 25 bp, Homo sapien
ccgcactgacgcgagctgctgggca

SEQ ID NO: 2386003 - DNA, 25 bp, Homo sapien
cgcactgacgcgagctgctgggcag

SEQ ID NO: 2386004 - DNA, 25 bp, Homo sapien
gcagaggaagcctcagcactggaaa

SEQ ID NO: 2386005 - DNA, 25 bp, Homo sapien
agctgcagaggaagcctcagcactg

SEQ ID NO: 2386006 - DNA, 25 bp, Homo sapien
gaggaagcctcagcactggaaacat

SEQ ID NO: 2386007 - DNA, 25 bp, Homo sapien
cgacacaggttcagagagctgcaga

SEQ ID NO: 2386008 - DNA, 25 bp, Homo sapien
ttcaagggctgcctcccgagcacag

SEQ ID NO: 2386009 - DNA, 25 bp, Homo sapien
tggctccctttcaagggctgcctcc

SEQ ID NO: 2386010 - DNA, 25 bp, Homo sapien
aatttctggatcatcgcccggattt

SEQ ID NO: 2386011 - DNA, 25 bp, Homo sapien
tcgcccggatttgggcacaggtgcc

SEQ ID NO: 2386012 - DNA, 25 bp, Homo sapien
caagcgccggcattcctcatggaga

SEQ ID NO: 2386013 - DNA, 25 bp, Homo sapien
ttcccttcctgaggtccgggtctgc

SEQ ID NO: 2386014 - DNA, 25 bp, Homo sapien
ttcccgaatgcgctgctgtggtcac

SEQ ID NO: 2386015 - DNA, 25 bp, Homo sapien
gtctgcaaacatgcgggccctcgca

SEQ ID NO: 2386016 - DNA, 25 bp, Homo sapien
agcctcccggagtcctgtgtgggca

SEQ ID NO: 2386017 - DNA, 25 bp, Homo sapien
gctctggagcacccgtctccagcct

SEQ ID NO: 2386018 - DNA, 25 bp, Homo sapien
ggagtcctgtgtgggcagcggctgc

SEQ ID NO: 2386019 - DNA, 25 bp, Homo sapien
cccggagtcctgtgtgggcagcggc

SEQ ID NO: 2386020 - DNA, 25 bp, Homo sapien
gaagtgatgaacatgataatgccag

SEQ ID NO: 2386021 - DNA, 25 bp, Homo sapien
tgccagtgacgcaggctgtgtaaag

SEQ ID NO: 2386022 - DNA, 25 bp, Homo sapien
aggctgtgtaaagtctggagaacca

SEQ ID NO: 2386023 - DNA, 25 bp, Homo sapien
actcagccccatcagtagaagtgat

SEQ ID NO: 2386024 - DNA, 25 bp, Homo sapien
tgagagtcatggttgcatccgggac

SEQ ID NO: 2386025 - DNA, 25 bp, Homo sapien
ttggtgctgagagtcatggttgcat

SEQ ID NO: 2386026 - DNA, 25 bp, Homo sapien
agagtcatggttgcatccgggactg

SEQ ID NO: 2386027 - DNA, 25 bp, Homo sapien
tgctgagagtcatggttgcatccgg

SEQ ID NO: 2386028 - DNA, 25 bp, Homo sapien
agcaacagccccagtactgaaaggt

SEQ ID NO: 2386029 - DNA, 25 bp, Homo sapien
caaaccgacagcacttatcaaaatt

SEQ ID NO: 2386030 - DNA, 25 bp, Homo sapien
gatatgtcatcaaaccgacagcact

SEQ ID NO: 2386031 - DNA, 25 bp, Homo sapien
ccagtactgaaaggtgccctgagcc

SEQ ID NO: 2386032 - DNA, 25 bp, Homo sapien
tcagagtcctaagactggtgtgggt

SEQ ID NO: 2386033 - DNA, 25 bp, Homo sapien
tgtgtgggtccaatcagagtcctaa

SEQ ID NO: 2386034 - DNA, 25 bp, Homo sapien
tagatctgagtccttcggtgtgggc

SEQ ID NO: 2386035 - DNA, 25 bp, Homo sapien
cagaacgagctcctttattgctaga

SEQ ID NO: 2386036 - DNA, 25 bp, Homo sapien
ggtctcggtcccacgatccagttcc

SEQ ID NO: 2386037 - DNA, 25 bp, Homo sapien
ggtcccacgatccagttcccatggt

SEQ ID NO: 2386038 - DNA, 25 bp, Homo sapien
acggtctcggtcccacgatccagtt

SEQ ID NO: 2386039 - DNA, 25 bp, Homo sapien
ttcccacggtctcggtcccacgatc

SEQ ID NO: 2386040 - DNA, 25 bp, Homo sapien
gaaagctgtgcgtcttcctctctgt

SEQ ID NO: 2386041 - DNA, 25 bp, Homo sapien
acagtcccagcatccatatggcaga

SEQ ID NO: 2386042 - DNA, 25 bp, Homo sapien
tggacactcttaacagtcacaggac

SEQ ID NO: 2386043 - DNA, 25 bp, Homo sapien
tctctgtcgggctcattctgaagca

SEQ ID NO: 2386044 - DNA, 25 bp, Homo sapien
tgccactcgacttcttgccagctgg

SEQ ID NO: 2386045 - DNA, 25 bp, Homo sapien
actcgacttcttgccagctggtgtc

SEQ ID NO: 2386046 - DNA, 25 bp, Homo sapien
tggcaaaggtggtcaccgggcagac

SEQ ID NO: 2386047 - DNA, 25 bp, Homo sapien
cgacttcttgccagctggtgtccag

SEQ ID NO: 2386048 - DNA, 25 bp, Homo sapien
gcctgctttgcgttctggaaacctc

SEQ ID NO: 2386049 - DNA, 25 bp, Homo sapien
ggaggcctgctttgcgttctggaaa

SEQ ID NO: 2386050 - DNA, 25 bp, Homo sapien
ggcctgctttgcgttctggaaacct

SEQ ID NO: 2386051 - DNA, 25 bp, Homo sapien
gaggcctgctttgcgttctggaaac

SEQ ID NO: 2386052 - DNA, 25 bp, Homo sapien
gagtgaccttgctgtaccccaaaac

SEQ ID NO: 2386053 - DNA, 25 bp, Homo sapien
accgagtgaccttgctgtaccccaa

SEQ ID NO: 2386054 - DNA, 25 bp, Homo sapien
agtacaccgagtgaccttgctgtac

SEQ ID NO: 2386055 - DNA, 25 bp, Homo sapien
gggtgctctcacatgctgggtgaca

SEQ ID NO: 2386056 - DNA, 25 bp, Homo sapien
cctttgtagctgtttcgggatcgac

SEQ ID NO: 2386057 - DNA, 25 bp, Homo sapien
tgaccgcgcacgtgctactgtgagc

SEQ ID NO: 2386058 - DNA, 25 bp, Homo sapien
tactgtgagctatggcgagagagtc

SEQ ID NO: 2386059 - DNA, 25 bp, Homo sapien
tgtggacacgcctctcattgtggca

SEQ ID NO: 2386060 - DNA, 25 bp, Homo sapien
gagatttccgagcagccatgacgag

SEQ ID NO: 2386061 - DNA, 25 bp, Homo sapien
cagactctgtgtcatcctggcagga

SEQ ID NO: 2386062 - DNA, 25 bp, Homo sapien
caaatgtccaggcttcggaggtcac

SEQ ID NO: 2386063 - DNA, 25 bp, Homo sapien
taactctgatgtgaaaatccctgcg

SEQ ID NO: 2386064 - DNA, 25 bp, Homo sapien
ggtctccaggcacgagattgtctca

SEQ ID NO: 2386065 - DNA, 25 bp, Homo sapien
caggcacgagattgtctcaggctcc

SEQ ID NO: 2386066 - DNA, 25 bp, Homo sapien
tctccaggcacgagattgtctcagg

SEQ ID NO: 2386067 - DNA, 25 bp, Homo sapien
gggcggtctccaggcacgagattgt

SEQ ID NO: 2386068 - DNA, 25 bp, Homo sapien
ggggtggtctccaggcatagttacc

SEQ ID NO: 2386069 - DNA, 25 bp, Homo sapien
caggcatagttacccctggggtctg

SEQ ID NO: 2386070 - DNA, 25 bp, Homo sapien
gtggtctccaggcatagttacccct

SEQ ID NO: 2386071 - DNA, 25 bp, Homo sapien
ggtctccaggcatagttacccctgg

SEQ ID NO: 2386072 - DNA, 25 bp, Homo sapien
tcatttaacccacgcctgcagcggg

SEQ ID NO: 2386073 - DNA, 25 bp, Homo sapien
acaggctccccatcctttgctaaga

SEQ ID NO: 2386074 - DNA, 25 bp, Homo sapien
aggctccccatcctttgctaagatg

SEQ ID NO: 2386075 - DNA, 25 bp, Homo sapien
atttaacccacgcctgcagcgggtc

SEQ ID NO: 2386076 - DNA, 25 bp, Homo sapien
gtgaaaacgtaaactgcaatccaga

SEQ ID NO: 2386077 - DNA, 25 bp, Homo sapien
gagaagtgaaaacgtaaactgcaat

SEQ ID NO: 2386078 - DNA, 25 bp, Homo sapien
ctccttgacttacatcggggcaggg

SEQ ID NO: 2386079 - DNA, 25 bp, Homo sapien
ggggcagggctgcaatgagaagtga

SEQ ID NO: 2386080 - DNA, 25 bp, Homo sapien
cagcagcagtgccagatcagatggc

SEQ ID NO: 2386081 - DNA, 25 bp, Homo sapien
gatcagatggcaggactgatctcat

SEQ ID NO: 2386082 - DNA, 25 bp, Homo sapien
cagcagtgccagatcagatggcagg

SEQ ID NO: 2386083 - DNA, 25 bp, Homo sapien
gccaggagctgagtgaccagcagca

SEQ ID NO: 2386084 - DNA, 25 bp, Homo sapien
ctgcaaagacgggtacagtgagtgc

SEQ ID NO: 2386085 - DNA, 25 bp, Homo sapien
gtgaggacgatgacacccatcctcg

SEQ ID NO: 2386086 - DNA, 25 bp, Homo sapien
cctcgggcacgctgtaagcagccat

SEQ ID NO: 2386087 - DNA, 25 bp, Homo sapien
caaagacgggtacagtgagtgcaga

SEQ ID NO: 2386088 - DNA, 25 bp, Homo sapien
gtcctggtggagaccagcaccctcc

SEQ ID NO: 2386089 - DNA, 25 bp, Homo sapien
ctggtggagaccagcaccctcctgg

SEQ ID NO: 2386090 - DNA, 25 bp, Homo sapien
gcccagagtaggacccggcagggcc

SEQ ID NO: 2386091 - DNA, 25 bp, Homo sapien
gtgcccagagtaggacccggcaggg

SEQ ID NO: 2386092 - DNA, 25 bp, Homo sapien
gcagctcagggaccttgacatctgg

SEQ ID NO: 2386093 - DNA, 25 bp, Homo sapien
ttgacatctgggaagagaggctgca

SEQ ID NO: 2386094 - DNA, 25 bp, Homo sapien
agggaccttgacatctgggaagaga

SEQ ID NO: 2386095 - DNA, 25 bp, Homo sapien
gtctgctccccgcttgcctggccct

SEQ ID NO: 2386096 - DNA, 25 bp, Homo sapien
ggcagctgtggcgttcgccttccag

SEQ ID NO: 2386097 - DNA, 25 bp, Homo sapien
gttcgccttccagagagactcctgt

SEQ ID NO: 2386098 - DNA, 25 bp, Homo sapien
tggcgttcgccttccagagagactc

SEQ ID NO: 2386099 - DNA, 25 bp, Homo sapien
agctgtggcgttcgccttccagaga

SEQ ID NO: 2386100 - DNA, 25 bp, Homo sapien
agcccttttgggtcatgatggtgtc

SEQ ID NO: 2386101 - DNA, 25 bp, Homo sapien
ccttttgggtcatgatggtgtctgg

SEQ ID NO: 2386102 - DNA, 25 bp, Homo sapien
tgcagcccttttgggtcatgatggt

SEQ ID NO: 2386103 - DNA, 25 bp, Homo sapien
agaagtgcagcccttttgggtcatg

SEQ ID NO: 2386104 - DNA, 25 bp, Homo sapien
cctttttctccccgatgcatttcag

SEQ ID NO: 2386105 - DNA, 25 bp, Homo sapien
tgcaggtctgctgtgctgcaccagc

SEQ ID NO: 2386106 - DNA, 25 bp, Homo sapien
tttttctccccgatgcatttcagtg

SEQ ID NO: 2386107 - DNA, 25 bp, Homo sapien
tttctccccgatgcatttcagtgca

SEQ ID NO: 2386108 - DNA, 25 bp, Homo sapien
gcttgtatattttagaggtgcagag

SEQ ID NO: 2386109 - DNA, 25 bp, Homo sapien
gcaatgtacttcgaattaattccaa

SEQ ID NO: 2386110 - DNA, 25 bp, Homo sapien
gaggtgcagagtgtagaatttagaa

SEQ ID NO: 2386111 - DNA, 25 bp, Homo sapien
taaaaggccatcgtgattgcaatgt

SEQ ID NO: 2386112 - DNA, 25 bp, Homo sapien
ctggctgaccttacccttttccgag

SEQ ID NO: 2386113 - DNA, 25 bp, Homo sapien
tggtggccacagttgcttgcaggac

SEQ ID NO: 2386114 - DNA, 25 bp, Homo sapien
gacgctggtggccacagttgcttgc

SEQ ID NO: 2386115 - DNA, 25 bp, Homo sapien
tgctgcgacgctggtggccacagtt

SEQ ID NO: 2386116 - DNA, 25 bp, Homo sapien
cttgctgctgcgacgctggtggcca

SEQ ID NO: 2386117 - DNA, 25 bp, Homo sapien
acggcagcgaagagcacgatgatca

SEQ ID NO: 2386118 - DNA, 25 bp, Homo sapien
cagtagttgaatataggagaagccg

SEQ ID NO: 2386119 - DNA, 25 bp, Homo sapien
agaagccgtaagagggattctcggc

SEQ ID NO: 2386120 - DNA, 25 bp, Homo sapien
cataaattctcggacgatgttggaa

SEQ ID NO: 2386121 - DNA, 25 bp, Homo sapien
tctcatggaagtggtcagcgacgtc

SEQ ID NO: 2386122 - DNA, 25 bp, Homo sapien
gaagctcactccgtgttttccaagg

SEQ ID NO: 2386123 - DNA, 25 bp, Homo sapien
gactgccggcattccaggacaagaa

SEQ ID NO: 2386124 - DNA, 25 bp, Homo sapien
gcaaagagcctcctctgcgggaaga

SEQ ID NO: 2386125 - DNA, 25 bp, Homo sapien
gctgctgcaaggtgacgatgctgct

SEQ ID NO: 2386126 - DNA, 25 bp, Homo sapien
tgagttgctgctgcaaggtgacgat

SEQ ID NO: 2386127 - DNA, 25 bp, Homo sapien
ttgctgctgcaaggtgacgatgctg

SEQ ID NO: 2386128 - DNA, 25 bp, Homo sapien
gctgcaaggtgacgatgctgctgca

SEQ ID NO: 2386129 - DNA, 25 bp, Homo sapien
ggcaggtgagtcagcccgagtggtt

SEQ ID NO: 2386130 - DNA, 25 bp, Homo sapien
caggtgagtcagcccgagtggttgc

SEQ ID NO: 2386131 - DNA, 25 bp, Homo sapien
aggtgagtcagcccgagtggttgct

SEQ ID NO: 2386132 - DNA, 25 bp, Homo sapien
gcaggtgagtcagcccgagtggttg

SEQ ID NO: 2386133 - DNA, 25 bp, Homo sapien
cccatgcagtcctgaggtccatgct

SEQ ID NO: 2386134 - DNA, 25 bp, Homo sapien
tcctgaggtccatgctgttgcctgg

SEQ ID NO: 2386135 - DNA, 25 bp, Homo sapien
ctgctgacgtttgggcctcccagaa

SEQ ID NO: 2386136 - DNA, 25 bp, Homo sapien
ctgtgtgtccactgctgacgtttgg

SEQ ID NO: 2386137 - DNA, 25 bp, Homo sapien
ctgttataggcttccagatgctcaa

SEQ ID NO: 2386138 - DNA, 25 bp, Homo sapien
tctgaagcagtagacctcatcgggg

SEQ ID NO: 2386139 - DNA, 25 bp, Homo sapien
cagtagacctcatcggggcaattta

SEQ ID NO: 2386140 - DNA, 25 bp, Homo sapien
taggcttccagatgctcaaagagtc

SEQ ID NO: 2386141 - DNA, 25 bp, Homo sapien
aggggatgcccgtggagcccagcaa

SEQ ID NO: 2386142 - DNA, 25 bp, Homo sapien
ggatgcccgtggagcccagcaatga

SEQ ID NO: 2386143 - DNA, 25 bp, Homo sapien
tcaggggatgcccgtggagcccagc

SEQ ID NO: 2386144 - DNA, 25 bp, Homo sapien
gggatgcccgtggagcccagcaatg

SEQ ID NO: 2386145 - DNA, 25 bp, Homo sapien
ggaacctacacgtgacttcgctggt

SEQ ID NO: 2386146 - DNA, 25 bp, Homo sapien
gcttttgaacccagcccaaggtcag

SEQ ID NO: 2386147 - DNA, 25 bp, Homo sapien
cctgggaaccatgtcaaggagcctg

SEQ ID NO: 2386148 - DNA, 25 bp, Homo sapien
tgcaaggcacccttctgtgaacggt

SEQ ID NO: 2386149 - DNA, 25 bp, Homo sapien
tgtagagtgccccatatggcctcac

SEQ ID NO: 2386150 - DNA, 25 bp, Homo sapien
agcttctgtagagtgccccgcatgg

SEQ ID NO: 2386151 - DNA, 25 bp, Homo sapien
tagagtgccccatatggcctcacgg

SEQ ID NO: 2386152 - DNA, 25 bp, Homo sapien
agagtgccccatatggcctcacggg

SEQ ID NO: 2386153 - DNA, 25 bp, Homo sapien
ccaggcccagcttctgtggagtgcc

SEQ ID NO: 2386154 - DNA, 25 bp, Homo sapien
tggagtgccccgcatggcctcacgg

SEQ ID NO: 2386155 - DNA, 25 bp, Homo sapien
ggagtgccccgcatggcctcacggg

SEQ ID NO: 2386156 - DNA, 25 bp, Homo sapien
cagcttctgtggagtgccccgcatg

SEQ ID NO: 2386157 - DNA, 25 bp, Homo sapien
gcttctgtagagtgccccgcatggc

SEQ ID NO: 2386158 - DNA, 25 bp, Homo sapien
agcttctgtagagtgccccgcatgg

SEQ ID NO: 2386159 - DNA, 25 bp, Homo sapien
cttctgtagagtgccccgcatggcc

SEQ ID NO: 2386160 - DNA, 25 bp, Homo sapien
cagcttctgtagagtgccccgcatg

SEQ ID NO: 2386161 - DNA, 25 bp, Homo sapien
atttattcctcgtgccctccctgca

SEQ ID NO: 2386162 - DNA, 25 bp, Homo sapien
tttattcctcgtgccctccctgcat

SEQ ID NO: 2386163 - DNA, 25 bp, Homo sapien
ttttctgcggcagattcattttgca

SEQ ID NO: 2386164 - DNA, 25 bp, Homo sapien
tattggttttctgcggcagattcat

SEQ ID NO: 2386165 - DNA, 25 bp, Homo sapien
ttattggttttctgcggcagattca

SEQ ID NO: 2386166 - DNA, 25 bp, Homo sapien
tggttttctgcggcagattcatttt

SEQ ID NO: 2386167 - DNA, 25 bp, Homo sapien
tgccgtgggacctgcaggcatcttt

SEQ ID NO: 2386168 - DNA, 25 bp, Homo sapien
gccgtgggacctgcaggcatctttc

SEQ ID NO: 2386169 - DNA, 25 bp, Homo sapien
ctgccgtgggacctgcaggcatctt

SEQ ID NO: 2386170 - DNA, 25 bp, Homo sapien
gcttctcacgctggctccactgagc

SEQ ID NO: 2386171 - DNA, 25 bp, Homo sapien
tgtcagctcatggacacctccctgc

SEQ ID NO: 2386172 - DNA, 25 bp, Homo sapien
ggtggaggattgttccatgagcagc

SEQ ID NO: 2386173 - DNA, 25 bp, Homo sapien
cggatgccggcattttgttgtcctg

SEQ ID NO: 2386174 - DNA, 25 bp, Homo sapien
cacattgattaggtttccatggcca

SEQ ID NO: 2386175 - DNA, 25 bp, Homo sapien
aggtccttgtcacggatgccggcat

SEQ ID NO: 2386176 - DNA, 25 bp, Homo sapien
aggttaaatccacaccaaagctcat

SEQ ID NO: 2386177 - DNA, 25 bp, Homo sapien
caggttaaatccacaccaaagctca

SEQ ID NO: 2386178 - DNA, 25 bp, Homo sapien
tcaggttaaatccacaccaaagctc

SEQ ID NO: 2386179 - DNA, 25 bp, Homo sapien
gtggctgtggattgagcttccccag

SEQ ID NO: 2386180 - DNA, 25 bp, Homo sapien
aggaaggtcaccaatttcagtcagg

SEQ ID NO: 2386181 - DNA, 25 bp, Homo sapien
tcaggtgtgtctccgcttcctgctg

SEQ ID NO: 2386182 - DNA, 25 bp, Homo sapien
tcctgctgccactcgtcattcttag

SEQ ID NO: 2386183 - DNA, 25 bp, Homo sapien
gagtccaggtctgacccatcagaac

SEQ ID NO: 2386184 - DNA, 25 bp, Homo sapien
gaatcctgttgcaaaatgtcagaat

SEQ ID NO: 2386185 - DNA, 25 bp, Homo sapien
tgttgctaaatgaaccccagtgttc

SEQ ID NO: 2386186 - DNA, 25 bp, Homo sapien
catcagaaccagtaagtgacacgga

SEQ ID NO: 2386187 - DNA, 25 bp, Homo sapien
gcaagaaggcaaatcagcgtcctca

SEQ ID NO: 2386188 - DNA, 25 bp, Homo sapien
caagaaggcaaatcagcgtcctcag

SEQ ID NO: 2386189 - DNA, 25 bp, Homo sapien
aagaaggcaaatcagcgtcctcagg

SEQ ID NO: 2386190 - DNA, 25 bp, Homo sapien
ccctcctcggtgccaggatcaaatc

SEQ ID NO: 2386191 - DNA, 25 bp, Homo sapien
ctcctcggtgccaggatcaaatcca

SEQ ID NO: 2386192 - DNA, 25 bp, Homo sapien
cctcctcggtgccaggatcaaatcc

SEQ ID NO: 2386193 - DNA, 25 bp, Homo sapien
gcatgaacgtcaatggtctcatgtg

SEQ ID NO: 2386194 - DNA, 25 bp, Homo sapien
ggacgtgttcttggagagtgcccat

SEQ ID NO: 2386195 - DNA, 25 bp, Homo sapien
tgttcttggagagtgcccattgctg

SEQ ID NO: 2386196 - DNA, 25 bp, Homo sapien
gctgtttccgggcatgaacgtcaat

SEQ ID NO: 2386197 - DNA, 25 bp, Homo sapien
ttgtccacactggagacagcacagc

SEQ ID NO: 2386198 - DNA, 25 bp, Homo sapien
cactggagacagcacagctctgtgt

SEQ ID NO: 2386199 - DNA, 25 bp, Homo sapien
tgcaggcttgtccacactggagaca

SEQ ID NO: 2386200 - DNA, 25 bp, Homo sapien
acagcacagctctgtgtcagctgca

SEQ ID NO: 2386201 - DNA, 25 bp, Homo sapien
agtgctcctgaagtgagcccctcat

SEQ ID NO: 2386202 - DNA, 25 bp, Homo sapien
ctggcagagccgcacaggtgcccct

SEQ ID NO: 2386203 - DNA, 25 bp, Homo sapien
gctcctgaagtgagcccctcataag

SEQ ID NO: 2386204 - DNA, 25 bp, Homo sapien
tgaagtgagcccctcataagcaggg

SEQ ID NO: 2386205 - DNA, 25 bp, Homo sapien
cctgtgggcgtgtttgccgcatgac

SEQ ID NO: 2386206 - DNA, 25 bp, Homo sapien
gccgcatgacattgagtggttctga

SEQ ID NO: 2386207 - DNA, 25 bp, Homo sapien
tcctggaggacggttctgctgaccc

SEQ ID NO: 2386208 - DNA, 25 bp, Homo sapien
tcctgtcagcgccagcacaattcca

SEQ ID NO: 2386209 - DNA, 25 bp, Homo sapien
actgtgttgtggatccagccccctg

SEQ ID NO: 2386210 - DNA, 25 bp, Homo sapien
gtgttgtggatccagccccctgtgc

SEQ ID NO: 2386211 - DNA, 25 bp, Homo sapien
gaagactgtgttgtggatccagccc

SEQ ID NO: 2386212 - DNA, 25 bp, Homo sapien
aagactgtgttgtggatccagcccc

SEQ ID NO: 2386213 - DNA, 25 bp, Homo sapien
gggcccagggccacccagagagcag

SEQ ID NO: 2386214 - DNA, 25 bp, Homo sapien
ccagagagcagccacagccatggcc

SEQ ID NO: 2386215 - DNA, 25 bp, Homo sapien
tcactgcaagttgaggtgcagggcc

SEQ ID NO: 2386216 - DNA, 25 bp, Homo sapien
gggccacccagagagcagccacagc

SEQ ID NO: 2386217 - DNA, 25 bp, Homo sapien
tccttttggtaagggatgctgatgg

SEQ ID NO: 2386218 - DNA, 25 bp, Homo sapien
tctgcttgttcccttggatgtattt

SEQ ID NO: 2386219 - DNA, 25 bp, Homo sapien
ccttttggtaagggatgctgatggc

SEQ ID NO: 2386220 - DNA, 25 bp, Homo sapien
ttaaactgcatcgtgatgatgaagt

SEQ ID NO: 2386221 - DNA, 25 bp, Homo sapien
agtctcttaaactgcatcgtgatga

SEQ ID NO: 2386222 - DNA, 25 bp, Homo sapien
aagtctggaatagacagttcaggaa

SEQ ID NO: 2386223 - DNA, 25 bp, Homo sapien
gttcaggaagcagtctcttaaactg

SEQ ID NO: 2386224 - DNA, 25 bp, Homo sapien
cagggctccgctgttcagggactta

SEQ ID NO: 2386225 - DNA, 25 bp, Homo sapien
tccatggagtcctgtttgcgcaccg

SEQ ID NO: 2386226 - DNA, 25 bp, Homo sapien
ggagaggaccgtgcatcctcagtga

SEQ ID NO: 2386227 - DNA, 25 bp, Homo sapien
gggttggtcgcacactcactgtggc

SEQ ID NO: 2386228 - DNA, 25 bp, Homo sapien
ctctggagccgcgtgggaatcctta

SEQ ID NO: 2386229 - DNA, 25 bp, Homo sapien
tgtttggaaacgtccctctggagcc

SEQ ID NO: 2386230 - DNA, 25 bp, Homo sapien
ggaatccttagggttcagccgcata

SEQ ID NO: 2386231 - DNA, 25 bp, Homo sapien
agtctggagcaaatagcacccaccg

SEQ ID NO: 2386232 - DNA, 25 bp, Homo sapien
tataatttataatggtgaaccctcc

SEQ ID NO: 2386233 - DNA, 25 bp, Homo sapien
tctagatagatgacaagcggtgcct

SEQ ID NO: 2386234 - DNA, 25 bp, Homo sapien
cacagttccaggcaacatgcagaga

SEQ ID NO: 2386235 - DNA, 25 bp, Homo sapien
agcggtgccttcagcagcctgggta

SEQ ID NO: 2386236 - DNA, 25 bp, Homo sapien
aggccagggtagcgctggggggtag

SEQ ID NO: 2386237 - DNA, 25 bp, Homo sapien
ccaggccagggtagcgctggggggt

SEQ ID NO: 2386238 - DNA, 25 bp, Homo sapien
caggccagggtagcgctggggggta

SEQ ID NO: 2386239 - DNA, 25 bp, Homo sapien
ctgggcttgggcttgtacagcagct

SEQ ID NO: 2386240 - DNA, 25 bp, Homo sapien
ttgggcttgtacagcagctctggag

SEQ ID NO: 2386241 - DNA, 25 bp, Homo sapien
gggcttgggcttgtacagcagctct

SEQ ID NO: 2386242 - DNA, 25 bp, Homo sapien
gcttgggcttgtacagcagctctgg

SEQ ID NO: 2386243 - DNA, 25 bp, Homo sapien
taggatccaccacaagccattgctt

SEQ ID NO: 2386244 - DNA, 25 bp, Homo sapien
cagaggctccgtgtgcatttggccg

SEQ ID NO: 2386245 - DNA, 25 bp, Homo sapien
tccttgtaacactgagcagaggctc

SEQ ID NO: 2386246 - DNA, 25 bp, Homo sapien
gagagttttctgtgcagtgaaaacc

SEQ ID NO: 2386247 - DNA, 25 bp, Homo sapien
ttccaggtccagccgaggacacaca

SEQ ID NO: 2386248 - DNA, 25 bp, Homo sapien
atcattgggtatgctccctgctggg

SEQ ID NO: 2386249 - DNA, 25 bp, Homo sapien
aatgctgggtgcgtgctgttgttgc

SEQ ID NO: 2386250 - DNA, 25 bp, Homo sapien
gcggatccagtagcacaggcatcat

SEQ ID NO: 2386251 - DNA, 25 bp, Homo sapien
aagctgttgtcgagggatggcctga

SEQ ID NO: 2386252 - DNA, 25 bp, Homo sapien
tgcgggtagggtccgttcctgatca

SEQ ID NO: 2386253 - DNA, 25 bp, Homo sapien
cctgattgagctcgtgaggccctgg

SEQ ID NO: 2386254 - DNA, 25 bp, Homo sapien
tgatcaggagcgttctcagcgtcgt

SEQ ID NO: 2386255 - DNA, 25 bp, Homo sapien
acagcactctcctgacttgtgccag

SEQ ID NO: 2386256 - DNA, 25 bp, Homo sapien
cattggctgggagcctccactgact

SEQ ID NO: 2386257 - DNA, 25 bp, Homo sapien
ggtgctctcattggctgggagcctc

SEQ ID NO: 2386258 - DNA, 25 bp, Homo sapien
ccctggttgtggacggtgagggagg

SEQ ID NO: 2386259 - DNA, 25 bp, Homo sapien
ccggacacggaagccagatatcacc

SEQ ID NO: 2386260 - DNA, 25 bp, Homo sapien
tgtggacaccgccatcactgccaaa

SEQ ID NO: 2386261 - DNA, 25 bp, Homo sapien
acccctgtcttcaccgcagggctgt

SEQ ID NO: 2386262 - DNA, 25 bp, Homo sapien
agaggctccccggacacggaagcca

SEQ ID NO: 2386263 - DNA, 25 bp, Homo sapien
tgtcctgtccctgctaagtgtcggc

SEQ ID NO: 2386264 - DNA, 25 bp, Homo sapien
cttttcagatgagtcagggatgctc

SEQ ID NO: 2386265 - DNA, 25 bp, Homo sapien
tgtcactccaggtggagcccttgtc

SEQ ID NO: 2386266 - DNA, 25 bp, Homo sapien
agtgtcggcctcctcgctgagtggg

SEQ ID NO: 2386267 - DNA, 25 bp, Homo sapien
gaaggaagcaaaacgctctctcgtg

SEQ ID NO: 2386268 - DNA, 25 bp, Homo sapien
aggagcagccgattcgcgcagagaa

SEQ ID NO: 2386269 - DNA, 25 bp, Homo sapien
agttgatctcacagggacaggcatt

SEQ ID NO: 2386270 - DNA, 25 bp, Homo sapien
gtggttatgggcatcttgcagttga

SEQ ID NO: 2386271 - DNA, 25 bp, Homo sapien
cagtgacaagctcctgaaccgtgga

SEQ ID NO: 2386272 - DNA, 25 bp, Homo sapien
tcaggagcagtgacaagctcctgaa

SEQ ID NO: 2386273 - DNA, 25 bp, Homo sapien
cctgaaccgtggaaatgagtctggt

SEQ ID NO: 2386274 - DNA, 25 bp, Homo sapien
caagctcctgaaccgtggaaatgag

SEQ ID NO: 2386275 - DNA, 25 bp, Homo sapien
tgggtgccgagtgcatgccctgttt

SEQ ID NO: 2386276 - DNA, 25 bp, Homo sapien
aatgaaaggatatagatgggaatgg

SEQ ID NO: 2386277 - DNA, 25 bp, Homo sapien
gttcatggatgggacgtgggtgccg

SEQ ID NO: 2386278 - DNA, 25 bp, Homo sapien
tgttgcctcggggaaatgaaaggat

SEQ ID NO: 2386279 - DNA, 25 bp, Homo sapien
gcagcagttttgcacgtccatccat

SEQ ID NO: 2386280 - DNA, 25 bp, Homo sapien
ccagggaggtgccagatccgtgtgc

SEQ ID NO: 2386281 - DNA, 25 bp, Homo sapien
ttttgcacgtccatccatttgttca

SEQ ID NO: 2386282 - DNA, 25 bp, Homo sapien
gaggtgccagatccgtgtgcagcag

SEQ ID NO: 2386283 - DNA, 25 bp, Homo sapien
tgaggacggcaggttaccatcgaca

SEQ ID NO: 2386284 - DNA, 25 bp, Homo sapien
caagtgtgtgccctctcgaaggtct

SEQ ID NO: 2386285 - DNA, 25 bp, Homo sapien
tctcgaaggtctaccttagaaggta

SEQ ID NO: 2386286 - DNA, 25 bp, Homo sapien
aaggtaaagtgattctgaagttctg

SEQ ID NO: 2386287 - DNA, 25 bp, Homo sapien
ggatagaggtgaaacaaccctcctc

SEQ ID NO: 2386288 - DNA, 25 bp, Homo sapien
ctaggatagaggtgaaacaaccctc

SEQ ID NO: 2386289 - DNA, 25 bp, Homo sapien
ggtgaaacaaccctcctctgcagtc

SEQ ID NO: 2386290 - DNA, 25 bp, Homo sapien
tagaggtgaaacaaccctcctctgc

SEQ ID NO: 2386291 - DNA, 25 bp, Homo sapien
gctggttcctctacctgcacattca

SEQ ID NO: 2386292 - DNA, 25 bp, Homo sapien
tgctggttcctctacctgcacattc

SEQ ID NO: 2386293 - DNA, 25 bp, Homo sapien
ctgctggttcctctacctgcacatt

SEQ ID NO: 2386294 - DNA, 25 bp, Homo sapien
tacctgcacattcagggttgggggc

SEQ ID NO: 2386295 - DNA, 25 bp, Homo sapien
catgcagttttctcctggcttgttt

SEQ ID NO: 2386296 - DNA, 25 bp, Homo sapien
cacatgcagttttctcctggcttgt

SEQ ID NO: 2386297 - DNA, 25 bp, Homo sapien
catctccacatgcagttttctcctg

SEQ ID NO: 2386298 - DNA, 25 bp, Homo sapien
tctccacatgcagttttctcctggc

SEQ ID NO: 2386299 - DNA, 25 bp, Homo sapien
ccgatggccgtgacttccacgggta

SEQ ID NO: 2386300 - DNA, 25 bp, Homo sapien
cttccacgggtaaggtcacatcaag

SEQ ID NO: 2386301 - DNA, 25 bp, Homo sapien
tggtgtataaggctggtttttccca

SEQ ID NO: 2386302 - DNA, 25 bp, Homo sapien
aaggtctgaatgttcatgaccttgg

SEQ ID NO: 2386303 - DNA, 25 bp, Homo sapien
gagctgcacggcctggcagtgctca

SEQ ID NO: 2386304 - DNA, 25 bp, Homo sapien
tgcttttcttgagcgtcctcctggg

SEQ ID NO: 2386305 - DNA, 25 bp, Homo sapien
cttattccaggaatctgagacgtgc

SEQ ID NO: 2386306 - DNA, 25 bp, Homo sapien
tgctcagttggtgtcttcggctccc

SEQ ID NO: 2386307 - DNA, 25 bp, Homo sapien
tggtgaggcaaacttgccggctcag

SEQ ID NO: 2386308 - DNA, 25 bp, Homo sapien
tgttcacaacggacttcagggaccg

SEQ ID NO: 2386309 - DNA, 25 bp, Homo sapien
ggctgtagccataggtccactctag

SEQ ID NO: 2386310 - DNA, 25 bp, Homo sapien
tgctctgcaccggaaaccagtttcc

SEQ ID NO: 2386311 - DNA, 25 bp, Homo sapien
ctgggctctattccttcttgacagc

SEQ ID NO: 2386312 - DNA, 25 bp, Homo sapien
ctccaggtaagcagtaaggctcagc

SEQ ID NO: 2386313 - DNA, 25 bp, Homo sapien
ggtaagcagtaaggctcagcactct

SEQ ID NO: 2386314 - DNA, 25 bp, Homo sapien
ggctctattccttcttgacagccct

SEQ ID NO: 2386315 - DNA, 25 bp, Homo sapien
ccagagaggccgactgcttgcagat

SEQ ID NO: 2386316 - DNA, 25 bp, Homo sapien
ttccagagaggccgactgcttgcag

SEQ ID NO: 2386317 - DNA, 25 bp, Homo sapien
acttccagagaggccgactgcttgc

SEQ ID NO: 2386318 - DNA, 25 bp, Homo sapien
tccagagaggccgactgcttgcaga

SEQ ID NO: 2386319 - DNA, 25 bp, Homo sapien
ttcccgtgacagccacgatgcccat

SEQ ID NO: 2386320 - DNA, 25 bp, Homo sapien
ctttcccgtgacagccacgatgccc

SEQ ID NO: 2386321 - DNA, 25 bp, Homo sapien
tttcccgtgacagccacgatgccca

SEQ ID NO: 2386322 - DNA, 25 bp, Homo sapien
gggcaggttcctgttggccccgctc

SEQ ID NO: 2386323 - DNA, 25 bp, Homo sapien
ggcaggtcagccgtggtaaagcaca

SEQ ID NO: 2386324 - DNA, 25 bp, Homo sapien
gtaaagcacagcgggtggaggacca

SEQ ID NO: 2386325 - DNA, 25 bp, Homo sapien
ggcaggttcctgttggccccgctcg

SEQ ID NO: 2386326 - DNA, 25 bp, Homo sapien
agggcagggcacgatgcacccacca

SEQ ID NO: 2386327 - DNA, 25 bp, Homo sapien
gcagggcacgatgcacccaccagat

SEQ ID NO: 2386328 - DNA, 25 bp, Homo sapien
gggcagggcacgatgcacccaccag

SEQ ID NO: 2386329 - DNA, 25 bp, Homo sapien
ggcagggcacgatgcacccaccaga

SEQ ID NO: 2386330 - DNA, 25 bp, Homo sapien
gctagtttttgctggctcccttgag

SEQ ID NO: 2386331 - DNA, 25 bp, Homo sapien
gattagggcatcgtgacctgcgcag

SEQ ID NO: 2386332 - DNA, 25 bp, Homo sapien
ccagggtagacttatctgtgcagga

SEQ ID NO: 2386333 - DNA, 25 bp, Homo sapien
tctgctcccctgactgattagggca

SEQ ID NO: 2386334 - DNA, 25 bp, Homo sapien
cagggttctcggagacatcgcagct

SEQ ID NO: 2386335 - DNA, 25 bp, Homo sapien
ctgtgggctccgtctctgcagggtt

SEQ ID NO: 2386336 - DNA, 25 bp, Homo sapien
tccgtctctgcagggttctcggaga

SEQ ID NO: 2386337 - DNA, 25 bp, Homo sapien
tctggtggcttctggtccacgctgt

SEQ ID NO: 2386338 - DNA, 25 bp, Homo sapien
agggcaacttgtgcgtgcactggca

SEQ ID NO: 2386339 - DNA, 25 bp, Homo sapien
cttgtgcgtgcactggcaggtcctg

SEQ ID NO: 2386340 - DNA, 25 bp, Homo sapien
agagggcaacttgtgcgtgcactgg

SEQ ID NO: 2386341 - DNA, 25 bp, Homo sapien
gcaacttgtgcgtgcactggcaggt

SEQ ID NO: 2386342 - DNA, 25 bp, Homo sapien
ttgaggcttgtagaagtggatggca

SEQ ID NO: 2386343 - DNA, 25 bp, Homo sapien
tgaggcttgtagaagtggatggcat

SEQ ID NO: 2386344 - DNA, 25 bp, Homo sapien
cccagggcgagctcttcttctgtaa

SEQ ID NO: 2386345 - DNA, 25 bp, Homo sapien
ggctctgctggaggtctgcaaccag

SEQ ID NO: 2386346 - DNA, 25 bp, Homo sapien
tcacggaggaattacatgcagcttc

SEQ ID NO: 2386347 - DNA, 25 bp, Homo sapien
caactggggcaagagctctgttctc

SEQ ID NO: 2386348 - DNA, 25 bp, Homo sapien
gcattttgctccgactgttgagaca

SEQ ID NO: 2386349 - DNA, 25 bp, Homo sapien
tcctctgtgcattttgctccgactg

SEQ ID NO: 2386350 - DNA, 25 bp, Homo sapien
tttgctccgactgttgagacacggg

SEQ ID NO: 2386351 - DNA, 25 bp, Homo sapien
tgtgcattttgctccgactgttgag

SEQ ID NO: 2386352 - DNA, 25 bp, Homo sapien
gcccagccctcccgtgctggctcct

SEQ ID NO: 2386353 - DNA, 25 bp, Homo sapien
ccagccctcccgtgctggctcctca

SEQ ID NO: 2386354 - DNA, 25 bp, Homo sapien
cagcccagccctcccgtgctggctc

SEQ ID NO: 2386355 - DNA, 25 bp, Homo sapien
cagccctcccgtgctggctcctcac

SEQ ID NO: 2386356 - DNA, 25 bp, Homo sapien
tcgagaagctctcgccagagacctc

SEQ ID NO: 2386357 - DNA, 25 bp, Homo sapien
gctggtcggtagcatcccctccatt

SEQ ID NO: 2386358 - DNA, 25 bp, Homo sapien
tcacatgctggtcggtagcatcccc

SEQ ID NO: 2386359 - DNA, 25 bp, Homo sapien
ggtgttggtggaactctcgagaagc

SEQ ID NO: 2386360 - DNA, 25 bp, Homo sapien
atccagacgcgaagagagggctgat

SEQ ID NO: 2386361 - DNA, 25 bp, Homo sapien
cagacccgaagagagggctgatcca

SEQ ID NO: 2386362 - DNA, 25 bp, Homo sapien
ggctgatccagacgtgaagagaggg

SEQ ID NO: 2386363 - DNA, 25 bp, Homo sapien
agagggctgatccagacccgaagag

SEQ ID NO: 2386364 - DNA, 25 bp, Homo sapien
tccagacgcgaagagagggctgatc

SEQ ID NO: 2386365 - DNA, 25 bp, Homo sapien
ctgatccagacgtgaagagagggct

SEQ ID NO: 2386366 - DNA, 25 bp, Homo sapien
cagacgcgaagagagggctgatcca

SEQ ID NO: 2386367 - DNA, 25 bp, Homo sapien
tccagacccgaagagagggctgatc

SEQ ID NO: 2386368 - DNA, 25 bp, Homo sapien
tccctgggatgccctgcattgctgc

SEQ ID NO: 2386369 - DNA, 25 bp, Homo sapien
cgcccttctctcatgatcaaaggtg

SEQ ID NO: 2386370 - DNA, 25 bp, Homo sapien
gatcaaaggtgccagcgtcaccagc

SEQ ID NO: 2386371 - DNA, 25 bp, Homo sapien
ccacagcgaggtccccagagtctct

SEQ ID NO: 2386372 - DNA, 25 bp, Homo sapien
gtcagcatgaactgtggggcctccg

SEQ ID NO: 2386373 - DNA, 25 bp, Homo sapien
gggcctccgctctgctgagccccag

SEQ ID NO: 2386374 - DNA, 25 bp, Homo sapien
gtctctggttggcttctctctgccc

SEQ ID NO: 2386375 - DNA, 25 bp, Homo sapien
cagcccacgtgaggcacagtcagca

SEQ ID NO: 2386376 - DNA, 25 bp, Homo sapien
ggagccggcacagtcgacgtgccat

SEQ ID NO: 2386377 - DNA, 25 bp, Homo sapien
aaacagccccgctcctaacaaagag

SEQ ID NO: 2386378 - DNA, 25 bp, Homo sapien
ggtgactggcggttgataaacagcc

SEQ ID NO: 2386379 - DNA, 25 bp, Homo sapien
cgctgttccctgctgtgccgggctg

SEQ ID NO: 2386380 - DNA, 25 bp, Homo sapien
ctgcaaaggatcccgtgagccccca

SEQ ID NO: 2386381 - DNA, 25 bp, Homo sapien
aaggatcccgtgagcccccaggtag

SEQ ID NO: 2386382 - DNA, 25 bp, Homo sapien
ccccaggtagctgctcccaggacat

SEQ ID NO: 2386383 - DNA, 25 bp, Homo sapien
caaaggatcccgtgagcccccaggt

SEQ ID NO: 2386384 - DNA, 25 bp, Homo sapien
gggatccctgggctgatatcagaaa

SEQ ID NO: 2386385 - DNA, 25 bp, Homo sapien
atcggtgctggcgagaaagtaaggg

SEQ ID NO: 2386386 - DNA, 25 bp, Homo sapien
tccctgggctgatatcagaaacaag

SEQ ID NO: 2386387 - DNA, 25 bp, Homo sapien
cagaaacaagggcatcggtgctggc

SEQ ID NO: 2386388 - DNA, 25 bp, Homo sapien
ggagctgctgcatcctgcaagtgca

SEQ ID NO: 2386389 - DNA, 25 bp, Homo sapien
aatttctccagcatacttgggccca

SEQ ID NO: 2386390 - DNA, 25 bp, Homo sapien
tgcaagtgcactgcccggttattag

SEQ ID NO: 2386391 - DNA, 25 bp, Homo sapien
tgggcccaccaaatagtcacagcag

SEQ ID NO: 2386392 - DNA, 25 bp, Homo sapien
cactgccaagttctgacactgccga

SEQ ID NO: 2386393 - DNA, 25 bp, Homo sapien
tttgcagtcactgagaaattctttc

SEQ ID NO: 2386394 - DNA, 25 bp, Homo sapien
tgccgactccccacattgagggcaa

SEQ ID NO: 2386395 - DNA, 25 bp, Homo sapien
aatctcactccttgtttgcagtcac

SEQ ID NO: 2386396 - DNA, 25 bp, Homo sapien
gggtctctgaccacaaatggggcac

SEQ ID NO: 2386397 - DNA, 25 bp, Homo sapien
tgcccagccacggaggacgtggggt

SEQ ID NO: 2386398 - DNA, 25 bp, Homo sapien
cacggaggacgtggggtctctgacc

SEQ ID NO: 2386399 - DNA, 25 bp, Homo sapien
ggcacggccaaagggcacccggctc

SEQ ID NO: 2386400 - DNA, 25 bp, Homo sapien
ggccggccagcggcctgaccagcag

SEQ ID NO: 2386401 - DNA, 25 bp, Homo sapien
gccggccagcggcctgaccagcagc

SEQ ID NO: 2386402 - DNA, 25 bp, Homo sapien
ttcccagcagcccaaacttcctgtt

SEQ ID NO: 2386403 - DNA, 25 bp, Homo sapien
gttcccagcagcccaaacttcctgt

SEQ ID NO: 2386404 - DNA, 25 bp, Homo sapien
tgtgccggaccctcccatggggagc

SEQ ID NO: 2386405 - DNA, 25 bp, Homo sapien
tgcctcctgtgtgccggaccctccc

SEQ ID NO: 2386406 - DNA, 25 bp, Homo sapien
cacacgcggctgggctctgatgcag

SEQ ID NO: 2386407 - DNA, 25 bp, Homo sapien
cacgcggctgggctctgatgcagct

SEQ ID NO: 2386408 - DNA, 25 bp, Homo sapien
caggtgtattttctgccgggtggat

SEQ ID NO: 2386409 - DNA, 25 bp, Homo sapien
cacacaggtgtattttctgccgggt

SEQ ID NO: 2386410 - DNA, 25 bp, Homo sapien
ggtgtattttctgccgggtggattc

SEQ ID NO: 2386411 - DNA, 25 bp, Homo sapien
cacaggtgtattttctgccgggtgg

SEQ ID NO: 2386412 - DNA, 25 bp, Homo sapien
ggtggagaagggaccacttcaccca

SEQ ID NO: 2386413 - DNA, 25 bp, Homo sapien
tggagaagggaccacttcacccaag

SEQ ID NO: 2386414 - DNA, 25 bp, Homo sapien
ctggggtggagaagggaccacttca

SEQ ID NO: 2386415 - DNA, 25 bp, Homo sapien
tggggtggagaagggaccacttcac

SEQ ID NO: 2386416 - DNA, 25 bp, Homo sapien
ctggtgcccatagcagggacggctg

SEQ ID NO: 2386417 - DNA, 25 bp, Homo sapien
atgtgtccaggacgccctcccagga

SEQ ID NO: 2386418 - DNA, 25 bp, Homo sapien
catagcagggacggctgagggatgt

SEQ ID NO: 2386419 - DNA, 25 bp, Homo sapien
gtgcccatagcagggacggctgagg

SEQ ID NO: 2386420 - DNA, 25 bp, Homo sapien
cacaaccctggacccttcagttggt

SEQ ID NO: 2386421 - DNA, 25 bp, Homo sapien
tggacccttcagttggtttgagttg

SEQ ID NO: 2386422 - DNA, 25 bp, Homo sapien
tgcagatacacaaccctggaccctt

SEQ ID NO: 2386423 - DNA, 25 bp, Homo sapien
ccctggacccttcagttggtttgag

SEQ ID NO: 2386424 - DNA, 25 bp, Homo sapien
gagcacaaatgctagcttggaagcc

SEQ ID NO: 2386425 - DNA, 25 bp, Homo sapien
gcttgtcctggagtcgaccccagat

SEQ ID NO: 2386426 - DNA, 25 bp, Homo sapien
tacaaatgaattcaccccagactac

SEQ ID NO: 2386427 - DNA, 25 bp, Homo sapien
tgtgtctgtaagtatcagcttgtcc

SEQ ID NO: 2386428 - DNA, 25 bp, Homo sapien
gtcgggcgcagtgcagcaacaccag

SEQ ID NO: 2386429 - DNA, 25 bp, Homo sapien
gaggacaacgcccacactggagact

SEQ ID NO: 2386430 - DNA, 25 bp, Homo sapien
catccggacttcgtggggctgaagt

SEQ ID NO: 2386431 - DNA, 25 bp, Homo sapien
actggagactcgcagttgcatccgg

SEQ ID NO: 2386432 - DNA, 25 bp, Homo sapien
tcctcatggagttgtgggggtacag

SEQ ID NO: 2386433 - DNA, 25 bp, Homo sapien
gtcctcatggagttgtgggggtaca

SEQ ID NO: 2386434 - DNA, 25 bp, Homo sapien
gggtcctcatggagttgtgggggta

SEQ ID NO: 2386435 - DNA, 25 bp, Homo sapien
ctcatggagttgtgggggtacagca

SEQ ID NO: 2386436 - DNA, 25 bp, Homo sapien
catggtgctgcctgtgcctgctctg

SEQ ID NO: 2386437 - DNA, 25 bp, Homo sapien
ctctgtcttcttgagcccaccaggg

SEQ ID NO: 2386438 - DNA, 25 bp, Homo sapien
tcttcttgagcccaccagggggtgg

SEQ ID NO: 2386439 - DNA, 25 bp, Homo sapien
cactggggacccatctgtgttcatg

SEQ ID NO: 2386440 - DNA, 25 bp, Homo sapien
agcgggaggaacttgactcagagca

SEQ ID NO: 2386441 - DNA, 25 bp, Homo sapien
gaatgaagtcagcaggtgagcggga

SEQ ID NO: 2386442 - DNA, 25 bp, Homo sapien
tcagtgttaagggagcagctcagga

SEQ ID NO: 2386443 - DNA, 25 bp, Homo sapien
cctcagtgttaagggagcagctcag

SEQ ID NO: 2386444 - DNA, 25 bp, Homo sapien
tcctgggacagccacgcagtcccca

SEQ ID NO: 2386445 - DNA, 25 bp, Homo sapien
ttatcctgggacagccacgcagtcc

SEQ ID NO: 2386446 - DNA, 25 bp, Homo sapien
tatcctgggacagccacgcagtccc

SEQ ID NO: 2386447 - DNA, 25 bp, Homo sapien
cctgggacagccacgcagtccccac

SEQ ID NO: 2386448 - DNA, 25 bp, Homo sapien
ctgtgaacaggctcaatcacaagct

SEQ ID NO: 2386449 - DNA, 25 bp, Homo sapien
aagctgtgtccagcacgaaggtgtc

SEQ ID NO: 2386450 - DNA, 25 bp, Homo sapien
aggaagctgtgtccagcacgaaggt

SEQ ID NO: 2386451 - DNA, 25 bp, Homo sapien
gtgtcctgtgaacaggctcaatcac

SEQ ID NO: 2386452 - DNA, 25 bp, Homo sapien
gaagttttctataggggacctcagc

SEQ ID NO: 2386453 - DNA, 25 bp, Homo sapien
catgctctatggagggcgtgctgct

SEQ ID NO: 2386454 - DNA, 25 bp, Homo sapien
gggaagtttacatgctctatggagg

SEQ ID NO: 2386455 - DNA, 25 bp, Homo sapien
tgctgctgagggcaataccagaagg

SEQ ID NO: 2386456 - DNA, 25 bp, Homo sapien
taaatttaatgcagaaaccttcact

SEQ ID NO: 2386457 - DNA, 25 bp, Homo sapien
ttaatgcagaaaccttcactggttg

SEQ ID NO: 2386458 - DNA, 25 bp, Homo sapien
tgaactaaatttaatgcagaaacct

SEQ ID NO: 2386459 - DNA, 25 bp, Homo sapien
tcttgacctgaactaaatttaatgc

SEQ ID NO: 2386460 - DNA, 25 bp, Homo sapien
cccaggctttaaagaggtgcattca

SEQ ID NO: 2386461 - DNA, 25 bp, Homo sapien
ccaggctttaaagaggtgcattcac

SEQ ID NO: 2386462 - DNA, 25 bp, Homo sapien
gactccaggaatcccctccccattc

SEQ ID NO: 2386463 - DNA, 25 bp, Homo sapien
catcccccaaacctctatcctccat

SEQ ID NO: 2386464 - DNA, 25 bp, Homo sapien
tcccagggactccaggaatcccctc

SEQ ID NO: 2386465 - DNA, 25 bp, Homo sapien
tgggctctgaaggccagggccacct

SEQ ID NO: 2386466 - DNA, 25 bp, Homo sapien
atcagatgagctcgtaggcgttcgg

SEQ ID NO: 2386467 - DNA, 25 bp, Homo sapien
aggcgttcggggggcatggccgtag

SEQ ID NO: 2386468 - DNA, 25 bp, Homo sapien
agatcagatgagctcgtaggcgttc

SEQ ID NO: 2386469 - DNA, 25 bp, Homo sapien
ggcgttcggggggcatggccgtaga

SEQ ID NO: 2386470 - DNA, 25 bp, Homo sapien
ttcgtgcattcggaagccgccggtc

SEQ ID NO: 2386471 - DNA, 25 bp, Homo sapien
tggacttcgtgcattcggaagccgc

SEQ ID NO: 2386472 - DNA, 25 bp, Homo sapien
gccgccggtcgaggctcggtggctg

SEQ ID NO: 2386473 - DNA, 25 bp, Homo sapien
caggagcgtggacttcgtgcattcg

SEQ ID NO: 2386474 - DNA, 25 bp, Homo sapien
catcgcctccggggacgggcccgct

SEQ ID NO: 2386475 - DNA, 25 bp, Homo sapien
gcatcgcctccggggacgggcccgc

SEQ ID NO: 2386476 - DNA, 25 bp, Homo sapien
gccggcatcgcctccggggacgggc

SEQ ID NO: 2386477 - DNA, 25 bp, Homo sapien
gggccccgtgatgagtgcgacccta

SEQ ID NO: 2386478 - DNA, 25 bp, Homo sapien
aaggccccgcagatgtcagtcgtgg

SEQ ID NO: 2386479 - DNA, 25 bp, Homo sapien
gcgaaggccccgcagatgtcagtcg

SEQ ID NO: 2386480 - DNA, 25 bp, Homo sapien
ggaagctgaaactcgaagcctagcg

SEQ ID NO: 2386481 - DNA, 25 bp, Homo sapien
tggcggttcagagggcccaatcagc

SEQ ID NO: 2386482 - DNA, 25 bp, Homo sapien
ggatgtgacagtgacctccgaagcc

SEQ ID NO: 2386483 - DNA, 25 bp, Homo sapien
gtgacctccgaagcctggacatttg

SEQ ID NO: 2386484 - DNA, 25 bp, Homo sapien
gacacagggtggattcgggcacaag

SEQ ID NO: 2386485 - DNA, 25 bp, Homo sapien
ggctgtccatgccctcatctcaggc

SEQ ID NO: 2386486 - DNA, 25 bp, Homo sapien
tgtccatgccctcatctcaggcagc

SEQ ID NO: 2386487 - DNA, 25 bp, Homo sapien
ccggctgtccatgccctcatctcag

SEQ ID NO: 2386488 - DNA, 25 bp, Homo sapien
gctgtccatgccctcatctcaggca

SEQ ID NO: 2386489 - DNA, 25 bp, Homo sapien
accactgcgaggttgcctgtcccgt

SEQ ID NO: 2386490 - DNA, 25 bp, Homo sapien
cgaggttgcctgtcccgtcttgtac

SEQ ID NO: 2386491 - DNA, 25 bp, Homo sapien
ctgcgaggttgcctgtcccgtcttg

SEQ ID NO: 2386492 - DNA, 25 bp, Homo sapien
cactgcgaggttgcctgtcccgtct

SEQ ID NO: 2386493 - DNA, 25 bp, Homo sapien
tgctgccaccattgcagtcactgcc

SEQ ID NO: 2386494 - DNA, 25 bp, Homo sapien
attgcagtcactgccctggtgggca

SEQ ID NO: 2386495 - DNA, 25 bp, Homo sapien
catggtgactgtcccctgctgccac

SEQ ID NO: 2386496 - DNA, 25 bp, Homo sapien
cactgcgcatggactgtgtggtctt

SEQ ID NO: 2386497 - DNA, 25 bp, Homo sapien
ggtgcagtagcccaggttgcgcact

SEQ ID NO: 2386498 - DNA, 25 bp, Homo sapien
tctcagtgacaattagagctctggg

SEQ ID NO: 2386499 - DNA, 25 bp, Homo sapien
gaagggcccattgccgctttgtcca

SEQ ID NO: 2386500 - DNA, 25 bp, Homo sapien
tagatggccgcactgtgtctcagga

SEQ ID NO: 2386501 - DNA, 25 bp, Homo sapien
tcctggaatgtctgtgcgcgccaag

SEQ ID NO: 2386502 - DNA, 25 bp, Homo sapien
ggtgtcttggaatctggctgcagca

SEQ ID NO: 2386503 - DNA, 25 bp, Homo sapien
gcataatgtgacaaccccggactct

SEQ ID NO: 2386504 - DNA, 25 bp, Homo sapien
aaaccacgtggtatcctgagcccgt

SEQ ID NO: 2386505 - DNA, 25 bp, Homo sapien
tcaatgagcttttggcagctagcgg

SEQ ID NO: 2386506 - DNA, 25 bp, Homo sapien
tgtggccacaggcatctcatacaaa

SEQ ID NO: 2386507 - DNA, 25 bp, Homo sapien
cagctagcggctgggaagatgttca

SEQ ID NO: 2386508 - DNA, 25 bp, Homo sapien
atctcatacaaactacgaagtttgc

SEQ ID NO: 2386509 - DNA, 25 bp, Homo sapien
catgcttcacgagagcatcagcagc

SEQ ID NO: 2386510 - DNA, 25 bp, Homo sapien
aacccttccatgcttcacgagagca

SEQ ID NO: 2386511 - DNA, 25 bp, Homo sapien
cactgatccagaccacagaaccctt

SEQ ID NO: 2386512 - DNA, 25 bp, Homo sapien
acagaacccttccatgcttcacgag

SEQ ID NO: 2386513 - DNA, 25 bp, Homo sapien
gactgcactggtgcagagttctttc

SEQ ID NO: 2386514 - DNA, 25 bp, Homo sapien
cccctgacaggagtgaacgcgagag

SEQ ID NO: 2386515 - DNA, 25 bp, Homo sapien
catcttggcgtccacacgctgccca

SEQ ID NO: 2386516 - DNA, 25 bp, Homo sapien
ctccatcttggcgtccacacgctgc

SEQ ID NO: 2386517 - DNA, 25 bp, Homo sapien
gagcccctgacaggagtgaacgcga

SEQ ID NO: 2386518 - DNA, 25 bp, Homo sapien
ctcctcggatgcctgaacccagggg

SEQ ID NO: 2386519 - DNA, 25 bp, Homo sapien
ctctcctcggatgcctgaacccagg

SEQ ID NO: 2386520 - DNA, 25 bp, Homo sapien
tcagaggcatctcggggtgggagcc

SEQ ID NO: 2386521 - DNA, 25 bp, Homo sapien
tgcagaccccgtatctgctgccgga

SEQ ID NO: 2386522 - DNA, 25 bp, Homo sapien
gcagggccgtgcagaccccgtatct

SEQ ID NO: 2386523 - DNA, 25 bp, Homo sapien
cccgtatctgctgccggaaagggag

SEQ ID NO: 2386524 - DNA, 25 bp, Homo sapien
cccatgggggtggacgattggtcac

SEQ ID NO: 2386525 - DNA, 25 bp, Homo sapien
tcccagggatgctttgttccgttcc

SEQ ID NO: 2386526 - DNA, 25 bp, Homo sapien
ccggtcccagggatgctttgttccg

SEQ ID NO: 2386527 - DNA, 25 bp, Homo sapien
aggtgcaagccggtcccagggatgc

SEQ ID NO: 2386528 - DNA, 25 bp, Homo sapien
gggatgctttgttccgttccctgct

SEQ ID NO: 2386529 - DNA, 25 bp, Homo sapien
gctcgggttcaatctcctcaaggaa

SEQ ID NO: 2386530 - DNA, 25 bp, Homo sapien
accgcggcaggacaagctcgggttc

SEQ ID NO: 2386531 - DNA, 25 bp, Homo sapien
aaagatgcctgcgtggacgggtccc

SEQ ID NO: 2386532 - DNA, 25 bp, Homo sapien
ctccaagtggtgagagaccccagag

SEQ ID NO: 2386533 - DNA, 25 bp, Homo sapien
tggagaagagcgagcagcgtcaaat

SEQ ID NO: 2386534 - DNA, 25 bp, Homo sapien
agcagcgtcaaatggtcggggccca

SEQ ID NO: 2386535 - DNA, 25 bp, Homo sapien
ggtcggatgagcgtctggagaagag

SEQ ID NO: 2386536 - DNA, 25 bp, Homo sapien
cggatgagcgtctggagaagagcga

SEQ ID NO: 2386537 - DNA, 25 bp, Homo sapien
gtgtgaccacgtgtcttctgtcttc

SEQ ID NO: 2386538 - DNA, 25 bp, Homo sapien
catcctgttcccacgtgtgaccaag

SEQ ID NO: 2386539 - DNA, 25 bp, Homo sapien
ggcacagagctcggggtgtgggtgc

SEQ ID NO: 2386540 - DNA, 25 bp, Homo sapien
cacagagctcggggtgtgggtgcca

SEQ ID NO: 2386541 - DNA, 25 bp, Homo sapien
atctgacctagcctacgtgccggcc

SEQ ID NO: 2386542 - DNA, 25 bp, Homo sapien
gggccagtccgttgtcctcagtgag

SEQ ID NO: 2386543 - DNA, 25 bp, Homo sapien
acacgggccagtccgttgtcctcag

SEQ ID NO: 2386544 - DNA, 25 bp, Homo sapien
cagtccgttgtcctcagtgaggcag

SEQ ID NO: 2386545 - DNA, 25 bp, Homo sapien
gagcccagcactagagccaggttcg

SEQ ID NO: 2386546 - DNA, 25 bp, Homo sapien
ctagagccaggttcgctctgctctt

SEQ ID NO: 2386547 - DNA, 25 bp, Homo sapien
gcccagcactagagccaggttcgct

SEQ ID NO: 2386548 - DNA, 25 bp, Homo sapien
gcactagagccaggttcgctctgct

SEQ ID NO: 2386549 - DNA, 25 bp, Homo sapien
aaggacgtgtggtgagcacgtgctc

SEQ ID NO: 2386550 - DNA, 25 bp, Homo sapien
ataagtcagggctctccccggagaa

SEQ ID NO: 2386551 - DNA, 25 bp, Homo sapien
cccggagaagacgacaaggacgtgt

SEQ ID NO: 2386552 - DNA, 25 bp, Homo sapien
ctcggataagtcagggctctccccg

SEQ ID NO: 2386553 - DNA, 25 bp, Homo sapien
ccgctgaagactggcacagacttgg

SEQ ID NO: 2386554 - DNA, 25 bp, Homo sapien
cctaagggtggtcccgctgaagact

SEQ ID NO: 2386555 - DNA, 25 bp, Homo sapien
gtcccgctgaagactggcacagact

SEQ ID NO: 2386556 - DNA, 25 bp, Homo sapien
ggtggtcccgctgaagactggcaca

SEQ ID NO: 2386557 - DNA, 25 bp, Homo sapien
aggagatgtagaaatcgaggtggcg

SEQ ID NO: 2386558 - DNA, 25 bp, Homo sapien
ttgatttttctcgtctgcaggctga

SEQ ID NO: 2386559 - DNA, 25 bp, Homo sapien
gatttttctcgtctgcaggctgaag

SEQ ID NO: 2386560 - DNA, 25 bp, Homo sapien
tcaagacttgggcattgatttttct

SEQ ID NO: 2386561 - DNA, 25 bp, Homo sapien
tttctcgtctgcaggctgaaggact

SEQ ID NO: 2386562 - DNA, 25 bp, Homo sapien
tggagggagacttaacatgttctga

SEQ ID NO: 2386563 - DNA, 25 bp, Homo sapien
tcagacagcatccccgcgggtggga

SEQ ID NO: 2386564 - DNA, 25 bp, Homo sapien
tgttctgacacgcaataggctttct

SEQ ID NO: 2386565 - DNA, 25 bp, Homo sapien
gcagctccatttggagggagactta

SEQ ID NO: 2386566 - DNA, 25 bp, Homo sapien
tgatgtaagatcttcctgggcttgg

SEQ ID NO: 2386567 - DNA, 25 bp, Homo sapien
gggtccagtactcacatacgtggtc

SEQ ID NO: 2386568 - DNA, 25 bp, Homo sapien
gatcagaggctgacagagtagccca

SEQ ID NO: 2386569 - DNA, 25 bp, Homo sapien
tgttgcttgtggacgaggcttcaaa

SEQ ID NO: 2386570 - DNA, 25 bp, Homo sapien
tccacttggcctaccccttcagtca

SEQ ID NO: 2386571 - DNA, 25 bp, Homo sapien
ttcagtcaaagaccccgcatcccgt

SEQ ID NO: 2386572 - DNA, 25 bp, Homo sapien
gcatcccgtacccaacctcaacacc

SEQ ID NO: 2386573 - DNA, 25 bp, Homo sapien
ccaacctcaacaccgccgccatagc

SEQ ID NO: 2386574 - DNA, 25 bp, Homo sapien
tctgtgccgcgcgacgtccctgata

SEQ ID NO: 2386575 - DNA, 25 bp, Homo sapien
ttctgtgccgcgcgacgtccctgat

SEQ ID NO: 2386576 - DNA, 25 bp, Homo sapien
gtcctcttctgtgccgcgcgacgtc

SEQ ID NO: 2386577 - DNA, 25 bp, Homo sapien
ctcttctgtgccgcgcgacgtccct

SEQ ID NO: 2386578 - DNA, 25 bp, Homo sapien
gcaggcatagccgaaaaccaagagc

SEQ ID NO: 2386579 - DNA, 25 bp, Homo sapien
ctcgtcgtcccggaacagcttgcag

SEQ ID NO: 2386580 - DNA, 25 bp, Homo sapien
cgcgccgcttttcctctcgggtttg

SEQ ID NO: 2386581 - DNA, 25 bp, Homo sapien
tgtcgatgaggatcttgtggtcccc

SEQ ID NO: 2386582 - DNA, 25 bp, Homo sapien
taatggtctcaaacgatgggctttc

SEQ ID NO: 2386583 - DNA, 25 bp, Homo sapien
catggttagcttttcagtccgggcc

SEQ ID NO: 2386584 - DNA, 25 bp, Homo sapien
gtaaaatcttggctaggctcgcccc

SEQ ID NO: 2386585 - DNA, 25 bp, Homo sapien
gaaatcaaacgtcatgccggcaaag

SEQ ID NO: 2386586 - DNA, 25 bp, Homo sapien
tcagacagctgataatctctgttcc

SEQ ID NO: 2386587 - DNA, 25 bp, Homo sapien
tcgtactcagaaaggtcatgcaggt

SEQ ID NO: 2386588 - DNA, 25 bp, Homo sapien
tcatgcaggtgaccacgtccatcat

SEQ ID NO: 2386589 - DNA, 25 bp, Homo sapien
gttccacgtggaatactcagcatcg

SEQ ID NO: 2386590 - DNA, 25 bp, Homo sapien
caagcaagtccgtatgcaaggctaa

SEQ ID NO: 2386591 - DNA, 25 bp, Homo sapien
tgcctcctcctcaagcaagtccgta

SEQ ID NO: 2386592 - DNA, 25 bp, Homo sapien
caagtccgtatgcaaggctaaatac

SEQ ID NO: 2386593 - DNA, 25 bp, Homo sapien
cctcaagcaagtccgtatgcaaggc

SEQ ID NO: 2386594 - DNA, 25 bp, Homo sapien
gctgaatacacgtcttttgtggaaa

SEQ ID NO: 2386595 - DNA, 25 bp, Homo sapien
aatccactgggtactgtcaagataa

SEQ ID NO: 2386596 - DNA, 25 bp, Homo sapien
taaagactgttacggcaaagacaag

SEQ ID NO: 2386597 - DNA, 25 bp, Homo sapien
tgaggtcctctcagaacgcaaagac

SEQ ID NO: 2386598 - DNA, 25 bp, Homo sapien
tcactcaatcgcttgtattcttcct

SEQ ID NO: 2386599 - DNA, 25 bp, Homo sapien
tcctccgtcggctctgacgggtcgt

SEQ ID NO: 2386600 - DNA, 25 bp, Homo sapien
tctgacgggtcgtaatagtcgctac

SEQ ID NO: 2386601 - DNA, 25 bp, Homo sapien
taagtgaaccccacggcattgtagc

SEQ ID NO: 2386602 - DNA, 25 bp, Homo sapien
tagtcgctaccgtaagtgaacccca

SEQ ID NO: 2386603 - DNA, 25 bp, Homo sapien
acggtgcatgcagcctgtgcgtaca

SEQ ID NO: 2386604 - DNA, 25 bp, Homo sapien
ccgttttctcctgtggtcatagtgg

SEQ ID NO: 2386605 - DNA, 25 bp, Homo sapien
tgtgcgtacacgtgtagccctacac

SEQ ID NO: 2386606 - DNA, 25 bp, Homo sapien
gtggtgctatcatgagtgccagaga

SEQ ID NO: 2386607 - DNA, 25 bp, Homo sapien
cagacgggacgctcaatcctaaggg

SEQ ID NO: 2386608 - DNA, 25 bp, Homo sapien
taagggggcaacgaagggctcttca

SEQ ID NO: 2386609 - DNA, 25 bp, Homo sapien
aactccacgtcagacgggacgctca

SEQ ID NO: 2386610 - DNA, 25 bp, Homo sapien
cacgtcagacgggacgctcaatcct

SEQ ID NO: 2386611 - DNA, 25 bp, Homo sapien
aagacacattggggaccaagagtta

SEQ ID NO: 2386612 - DNA, 25 bp, Homo sapien
tgcaagacacattggggaccaagag

SEQ ID NO: 2386613 - DNA, 25 bp, Homo sapien
acacattggggaccaagagttaagg

SEQ ID NO: 2386614 - DNA, 25 bp, Homo sapien
gcaagacacattggggaccaagagt

SEQ ID NO: 2386615 - DNA, 25 bp, Homo sapien
aaactgggagttccgggcctgcttg

SEQ ID NO: 2386616 - DNA, 25 bp, Homo sapien
tcgatgatggcgtgcattttagcgg

SEQ ID NO: 2386617 - DNA, 25 bp, Homo sapien
ttctgccaggacagtgtagcgtccc

SEQ ID NO: 2386618 - DNA, 25 bp, Homo sapien
gtagtggtcgaagcgcagaaagtca

SEQ ID NO: 2386619 - DNA, 25 bp, Homo sapien
gaaggtaattcccatcttcttcatc

SEQ ID NO: 2386620 - DNA, 25 bp, Homo sapien
tcatcttcattgtcagagctgactc

SEQ ID NO: 2386621 - DNA, 25 bp, Homo sapien
gagggatgaaggtaattcccatctt

SEQ ID NO: 2386622 - DNA, 25 bp, Homo sapien
atcatcttcattgtcagagctgact

SEQ ID NO: 2386623 - DNA, 25 bp, Homo sapien
tcttcaaggcggttacacttcttgg

SEQ ID NO: 2386624 - DNA, 25 bp, Homo sapien
tcagctcttcaaggcggttacactt

SEQ ID NO: 2386625 - DNA, 25 bp, Homo sapien
gcggttacacttcttggaggcaaag

SEQ ID NO: 2386626 - DNA, 25 bp, Homo sapien
ttcatcagctcttcaaggcggttac

SEQ ID NO: 2386627 - DNA, 25 bp, Homo sapien
gcagaagttttgtggtggcataaaa

SEQ ID NO: 2386628 - DNA, 25 bp, Homo sapien
ggtggcataaaaatatagttcaaca

SEQ ID NO: 2386629 - DNA, 25 bp, Homo sapien
aatatagttcaacaatgagataaaa

SEQ ID NO: 2386630 - DNA, 25 bp, Homo sapien
ttagcagaagttttgtggtggcata

SEQ ID NO: 2386631 - DNA, 25 bp, Homo sapien
tgggagtggaactgtcagcctgtgc

SEQ ID NO: 2386632 - DNA, 25 bp, Homo sapien
gccttacgaacaagtgctgcgaggg

SEQ ID NO: 2386633 - DNA, 25 bp, Homo sapien
tgatctgggtccactaccttcaagg

SEQ ID NO: 2386634 - DNA, 25 bp, Homo sapien
tgcacaggcgcaccgtctgcgttgt

SEQ ID NO: 2386635 - DNA, 25 bp, Homo sapien
caggacatacacagtgagtactcac

SEQ ID NO: 2386636 - DNA, 25 bp, Homo sapien
tcaggacatacacagtgagtactca

SEQ ID NO: 2386637 - DNA, 25 bp, Homo sapien
gaactttagcatgacggaactcaac

SEQ ID NO: 2386638 - DNA, 25 bp, Homo sapien
gagaggtagctctgagcctcatagt

SEQ ID NO: 2386639 - DNA, 25 bp, Homo sapien
caaaaactatgaccagtgttccctc

SEQ ID NO: 2386640 - DNA, 25 bp, Homo sapien
tttaagcatagttgagatcccactg

SEQ ID NO: 2386641 - DNA, 25 bp, Homo sapien
agaacaccccttcctgttagcttgg

SEQ ID NO: 2386642 - DNA, 25 bp, Homo sapien
tagctctttgtgtcttagaacaccc

SEQ ID NO: 2386643 - DNA, 25 bp, Homo sapien
gttggctggtgccatgacaaacacc

SEQ ID NO: 2386644 - DNA, 25 bp, Homo sapien
tgctggtgccgccttgtttgaaaca

SEQ ID NO: 2386645 - DNA, 25 bp, Homo sapien
tttaggtccttcagactgtgccagc

SEQ ID NO: 2386646 - DNA, 25 bp, Homo sapien
gaaatcagggcggagaaactctttc

SEQ ID NO: 2386647 - DNA, 25 bp, Homo sapien
gaggaaagtgcctaatacacccagg

SEQ ID NO: 2386648 - DNA, 25 bp, Homo sapien
gaagatgcagatccctgaaacaggt

SEQ ID NO: 2386649 - DNA, 25 bp, Homo sapien
gatggcaccattacatgagtctaca

SEQ ID NO: 2386650 - DNA, 25 bp, Homo sapien
actgcaacaacgctgtaggtcctca

SEQ ID NO: 2386651 - DNA, 25 bp, Homo sapien
agagaagcttgctccgcctgggtct

SEQ ID NO: 2386652 - DNA, 25 bp, Homo sapien
caagacttgcttaaaagatggcacc

SEQ ID NO: 2386653 - DNA, 25 bp, Homo sapien
tggtccccttgtcatggccactttc

SEQ ID NO: 2386654 - DNA, 25 bp, Homo sapien
ttcctctggtctctggtcacaggag

SEQ ID NO: 2386655 - DNA, 25 bp, Homo sapien
tgtatgacgagaaccaagctgctta

SEQ ID NO: 2386656 - DNA, 25 bp, Homo sapien
cacagtccctaaaggcaagtatagt

SEQ ID NO: 2386657 - DNA, 25 bp, Homo sapien
caagtatagttgtatgacgagaacc

SEQ ID NO: 2386658 - DNA, 25 bp, Homo sapien
gagaaccaagctgcttaaaagcagg

SEQ ID NO: 2386659 - DNA, 25 bp, Homo sapien
cgcagactgttagtctatatgacct

SEQ ID NO: 2386660 - DNA, 25 bp, Homo sapien
tgttttcaaagctgagcgccattcc

SEQ ID NO: 2386661 - DNA, 25 bp, Homo sapien
ttcctttaaagaacacgcagactgt

SEQ ID NO: 2386662 - DNA, 25 bp, Homo sapien
gtaactgtgtaaagtgcaatcacac

SEQ ID NO: 2386663 - DNA, 25 bp, Homo sapien
tggagacacattgccccggagtgag

SEQ ID NO: 2386664 - DNA, 25 bp, Homo sapien
ctgtggagacacattgccccggagt

SEQ ID NO: 2386665 - DNA, 25 bp, Homo sapien
tgtggagacacattgccccggagtg

SEQ ID NO: 2386666 - DNA, 25 bp, Homo sapien
agacacattgccccggagtgagcat

SEQ ID NO: 2386667 - DNA, 25 bp, Homo sapien
cgtccggtagcatgtagtagctgta

SEQ ID NO: 2386668 - DNA, 25 bp, Homo sapien
taagtagtcacgtcgattccgggag

SEQ ID NO: 2386669 - DNA, 25 bp, Homo sapien
caggcagtaagtgccgtccggtagc

SEQ ID NO: 2386670 - DNA, 25 bp, Homo sapien
gggagttagacacggtcacgccagc

SEQ ID NO: 2386671 - DNA, 25 bp, Homo sapien
tgatggcggccacgggggcaagtgc

SEQ ID NO: 2386672 - DNA, 25 bp, Homo sapien
ggcggggggatgatggcggccacgg

SEQ ID NO: 2386673 - DNA, 25 bp, Homo sapien
gatggcggccacgggggcaagtgca

SEQ ID NO: 2386674 - DNA, 25 bp, Homo sapien
ggatgatggcggccacgggggcaag

SEQ ID NO: 2386675 - DNA, 25 bp, Homo sapien
tggcgacatactcggccagcttgtc

SEQ ID NO: 2386676 - DNA, 25 bp, Homo sapien
aacttcaggccgttcctggcgacat

SEQ ID NO: 2386677 - DNA, 25 bp, Homo sapien
gcttgtcaatcacgggctggacgtc

SEQ ID NO: 2386678 - DNA, 25 bp, Homo sapien
tcttggcacgaacactggtctcgaa

SEQ ID NO: 2386679 - DNA, 25 bp, Homo sapien
catgctatcgcccccttctttctgg

SEQ ID NO: 2386680 - DNA, 25 bp, Homo sapien
taagcattatactggtgccacggct

SEQ ID NO: 2386681 - DNA, 25 bp, Homo sapien
agcattatactggtgccacggctgc

SEQ ID NO: 2386682 - DNA, 25 bp, Homo sapien
cattatactggtgccacggctgcag

SEQ ID NO: 2386683 - DNA, 25 bp, Homo sapien
gcacttccaagtgcgccagcaccac

SEQ ID NO: 2386684 - DNA, 25 bp, Homo sapien
aaaagcacttccaagtgcgccagca

SEQ ID NO: 2386685 - DNA, 25 bp, Homo sapien
aaagcacttccaagtgcgccagcac

SEQ ID NO: 2386686 - DNA, 25 bp, Homo sapien
agcacttccaagtgcgccagcacca

SEQ ID NO: 2386687 - DNA, 25 bp, Homo sapien
acaaaaatgtcagggtgtctatata

SEQ ID NO: 2386688 - DNA, 25 bp, Homo sapien
caaaactggctttacaaaaatgtca

SEQ ID NO: 2386689 - DNA, 25 bp, Homo sapien
tttacaaaaatgtcagggtgtctat

SEQ ID NO: 2386690 - DNA, 25 bp, Homo sapien
ctttacaaaaatgtcagggtgtcta

SEQ ID NO: 2386691 - DNA, 25 bp, Homo sapien
ttggcttctcgggagcagagtctgt

SEQ ID NO: 2386692 - DNA, 25 bp, Homo sapien
tccgggacggtcttactggacgatg

SEQ ID NO: 2386693 - DNA, 25 bp, Homo sapien
tcggctgcgtcttcaggcgcgccat

SEQ ID NO: 2386694 - DNA, 25 bp, Homo sapien
gacggtcttactggacgatgcctcc

SEQ ID NO: 2386695 - DNA, 25 bp, Homo sapien
ctaaagcctgtcagatgtgctggcc

SEQ ID NO: 2386696 - DNA, 25 bp, Homo sapien
tcaggtaacctactcgaatgagagg

SEQ ID NO: 2386697 - DNA, 25 bp, Homo sapien
tgaagtcgctccagtggcttaaccg

SEQ ID NO: 2386698 - DNA, 25 bp, Homo sapien
tctccccgggtttctagagcagtaa

SEQ ID NO: 2386699 - DNA, 25 bp, Homo sapien
tttgcattcaggcactgatggtcca

SEQ ID NO: 2386700 - DNA, 25 bp, Homo sapien
tatgatttgcattcaggcactgatg

SEQ ID NO: 2386701 - DNA, 25 bp, Homo sapien
tcaggcactgatggtccactatctc

SEQ ID NO: 2386702 - DNA, 25 bp, Homo sapien
gcattcaggcactgatggtccacta

SEQ ID NO: 2386703 - DNA, 25 bp, Homo sapien
gtggaaatctttgcaggccctgcta

SEQ ID NO: 2386704 - DNA, 25 bp, Homo sapien
tgaaccatgctgtgagaaccgcact

SEQ ID NO: 2386705 - DNA, 25 bp, Homo sapien
tcagagcagacctgtgcagatgtgc

SEQ ID NO: 2386706 - DNA, 25 bp, Homo sapien
gccacatcatatgcagggtctacgg

SEQ ID NO: 2386707 - DNA, 25 bp, Homo sapien
caactgctgggttagtgtttgcagc

SEQ ID NO: 2386708 - DNA, 25 bp, Homo sapien
gcaaagcttattggagcaaaggaag

SEQ ID NO: 2386709 - DNA, 25 bp, Homo sapien
actgtcatcatctagcttaacacga

SEQ ID NO: 2386710 - DNA, 25 bp, Homo sapien
tgcagcactactagaactttcttgg

SEQ ID NO: 2386711 - DNA, 25 bp, Homo sapien
tggacaaatcaaattttgagagaat

SEQ ID NO: 2386712 - DNA, 25 bp, Homo sapien
acaaatcaaattttgagagaattag

SEQ ID NO: 2386713 - DNA, 25 bp, Homo sapien
attggacaaatcaaattttgagaga

SEQ ID NO: 2386714 - DNA, 25 bp, Homo sapien
ggacaaatcaaattttgagagaatt

SEQ ID NO: 2386715 - DNA, 25 bp, Homo sapien
gcagctgcgaggcgatcttccagct

SEQ ID NO: 2386716 - DNA, 25 bp, Homo sapien
cagcagctgcgaggcgatcttccag

SEQ ID NO: 2386717 - DNA, 25 bp, Homo sapien
ctgggccagcttttcccgggcagca

SEQ ID NO: 2386718 - DNA, 25 bp, Homo sapien
gcagcagctgcgaggcgatcttcca

SEQ ID NO: 2386719 - DNA, 25 bp, Homo sapien
tgagggtctgtaaaaataacgccgc

SEQ ID NO: 2386720 - DNA, 25 bp, Homo sapien
cgccgctttccttttacgttctgct

SEQ ID NO: 2386721 - DNA, 25 bp, Homo sapien
ccttttacgttctgcttgaagctgt

SEQ ID NO: 2386722 - DNA, 25 bp, Homo sapien
ctgcttccggcagaggatttttgag

SEQ ID NO: 2386723 - DNA, 25 bp, Homo sapien
tctggtctcggacacgcatgggagc

SEQ ID NO: 2386724 - DNA, 25 bp, Homo sapien
cctctggtctcggacacgcatggga

SEQ ID NO: 2386725 - DNA, 25 bp, Homo sapien
ctctggtctcggacacgcatgggag

SEQ ID NO: 2386726 - DNA, 25 bp, Homo sapien
tctcggacacgcatgggagcaatcc

SEQ ID NO: 2386727 - DNA, 25 bp, Homo sapien
caagggtaacctgtcccagaagttg

SEQ ID NO: 2386728 - DNA, 25 bp, Homo sapien
gtctcaacatcagcgagtaaagcag

SEQ ID NO: 2386729 - DNA, 25 bp, Homo sapien
tgtaagggagtgtcctcatgccacc

SEQ ID NO: 2386730 - DNA, 25 bp, Homo sapien
aattcctgccatgttatgccaggcc

SEQ ID NO: 2386731 - DNA, 25 bp, Homo sapien
catggtccctggcaaacgtctgtga

SEQ ID NO: 2386732 - DNA, 25 bp, Homo sapien
tgtctcagcggaaatgcggctctca

SEQ ID NO: 2386733 - DNA, 25 bp, Homo sapien
aaagggataaccaacactgcggcgt

SEQ ID NO: 2386734 - DNA, 25 bp, Homo sapien
gagagcattaacagcttaccgccgg

SEQ ID NO: 2386735 - DNA, 25 bp, Homo sapien
cctggacttggatgacgaatggtac

SEQ ID NO: 2386736 - DNA, 25 bp, Homo sapien
cgcactgtccgataggcactgggaa

SEQ ID NO: 2386737 - DNA, 25 bp, Homo sapien
ttttgagtgtgatctagacctggac

SEQ ID NO: 2386738 - DNA, 25 bp, Homo sapien
aacttctaaagtaggcagaggcctg

SEQ ID NO: 2386739 - DNA, 25 bp, Homo sapien
tgttcagcagcgaacccaaggtgta

SEQ ID NO: 2386740 - DNA, 25 bp, Homo sapien
tcccaaggcatgtgtatttttccca

SEQ ID NO: 2386741 - DNA, 25 bp, Homo sapien
caacctcctgtaggtcagccactgt

SEQ ID NO: 2386742 - DNA, 25 bp, Homo sapien
tagagaaaccgaggagagtcagcca

SEQ ID NO: 2386743 - DNA, 25 bp, Homo sapien
tggtagcctaccatcacggtggaaa

SEQ ID NO: 2386744 - DNA, 25 bp, Homo sapien
tttgctctgctgacgctgtaaagtg

SEQ ID NO: 2386745 - DNA, 25 bp, Homo sapien
cggtagaacttgctagacaatccaa

SEQ ID NO: 2386746 - DNA, 25 bp, Homo sapien
cggtggaaaccacactcaggtaact

SEQ ID NO: 2386747 - DNA, 25 bp, Homo sapien
gcatcagcctccttaagagccggga

SEQ ID NO: 2386748 - DNA, 25 bp, Homo sapien
agcctccttaagagccgggattata

SEQ ID NO: 2386749 - DNA, 25 bp, Homo sapien
ctgcatcagcctccttaagagccgg

SEQ ID NO: 2386750 - DNA, 25 bp, Homo sapien
atcagcctccttaagagccgggatt

SEQ ID NO: 2386751 - DNA, 25 bp, Homo sapien
tggtgcaagaaacaggagttccatt

SEQ ID NO: 2386752 - DNA, 25 bp, Homo sapien
tattgaccccacaacatggtgcaag

SEQ ID NO: 2386753 - DNA, 25 bp, Homo sapien
acccacggcctttctgtcacggaat

SEQ ID NO: 2386754 - DNA, 25 bp, Homo sapien
aaatcatccgtataatgtgaccagg

SEQ ID NO: 2386755 - DNA, 25 bp, Homo sapien
cgcgcgcagcgtccctggggaggct

SEQ ID NO: 2386756 - DNA, 25 bp, Homo sapien
tgccgctgtcactgacgcgctgctc

SEQ ID NO: 2386757 - DNA, 25 bp, Homo sapien
cgctgtcactgacgcgctgctctga

SEQ ID NO: 2386758 - DNA, 25 bp, Homo sapien
tgctctgacagggctccgcgcgcag

SEQ ID NO: 2386759 - DNA, 25 bp, Homo sapien
tggagctgcttcacgtggtcaatgg

SEQ ID NO: 2386760 - DNA, 25 bp, Homo sapien
ccaacatgcaactggcgtggaggct

SEQ ID NO: 2386761 - DNA, 25 bp, Homo sapien
tgaataccggcagtaagaaacccaa

SEQ ID NO: 2386762 - DNA, 25 bp, Homo sapien
catgagccacggtctgagtatgcag

SEQ ID NO: 2386763 - DNA, 25 bp, Homo sapien
cctccgtctctcaggggagtgggct

SEQ ID NO: 2386764 - DNA, 25 bp, Homo sapien
ctctcctccgaggggaccgggagcg

SEQ ID NO: 2386765 - DNA, 25 bp, Homo sapien
ggagcgggtccgcttcctactggcc

SEQ ID NO: 2386766 - DNA, 25 bp, Homo sapien
ggctgcggctcacgcggtaggcagt

SEQ ID NO: 2386767 - DNA, 25 bp, Homo sapien
tcgcttagcaaagtctacctggaat

SEQ ID NO: 2386768 - DNA, 25 bp, Homo sapien
tccatgtgcctcgtgcagtgttaag

SEQ ID NO: 2386769 - DNA, 25 bp, Homo sapien
taggttatgcatccttcgcttagca

SEQ ID NO: 2386770 - DNA, 25 bp, Homo sapien
taaaggcagatctttactgcagcag

SEQ ID NO: 2386771 - DNA, 25 bp, Homo sapien
tctgcgtcaacttgtggagaacagg

SEQ ID NO: 2386772 - DNA, 25 bp, Homo sapien
caatttctagaaaagccgtgggagc

SEQ ID NO: 2386773 - DNA, 25 bp, Homo sapien
ttaacacgcatgcacaccagtactg

SEQ ID NO: 2386774 - DNA, 25 bp, Homo sapien
catgcatgtgcaccagtactgatct

SEQ ID NO: 2386775 - DNA, 25 bp, Homo sapien
gagtccacgtcaccaaactggcaat

SEQ ID NO: 2386776 - DNA, 25 bp, Homo sapien
ggtgataccgcttagcctctgggca

SEQ ID NO: 2386777 - DNA, 25 bp, Homo sapien
agttgtccgccgcttggtgataccg

SEQ ID NO: 2386778 - DNA, 25 bp, Homo sapien
gcctcccagacagttaagactaggg

SEQ ID NO: 2386779 - DNA, 25 bp, Homo sapien
ctggccttggacttggtccgcgacc

SEQ ID NO: 2386780 - DNA, 25 bp, Homo sapien
tggccttggacttggtccgcgaccg

SEQ ID NO: 2386781 - DNA, 25 bp, Homo sapien
gggagacgctggctgagtgcgccga

SEQ ID NO: 2386782 - DNA, 25 bp, Homo sapien
ccgactctccacaggggagacgctg

SEQ ID NO: 2386783 - DNA, 25 bp, Homo sapien
ctggctggagccccgactctccaca

SEQ ID NO: 2386784 - DNA, 25 bp, Homo sapien
ctgagtgcgccgagtgggccgcggg

SEQ ID NO: 2386785 - DNA, 25 bp, Homo sapien
cggaagaaacgattgctgaagagat

SEQ ID NO: 2386786 - DNA, 25 bp, Homo sapien
aaacgattgctgaagagatctgggc

SEQ ID NO: 2386787 - DNA, 25 bp, Homo sapien
tgctctgcacggaagaaacgattgc

SEQ ID NO: 2386788 - DNA, 25 bp, Homo sapien
tgattttgctctgcacggaagaaac

SEQ ID NO: 2386789 - DNA, 25 bp, Homo sapien
tgcaagcatcgctctgactttggcc

SEQ ID NO: 2386790 - DNA, 25 bp, Homo sapien
tcgctctgactttggccatgagatc

SEQ ID NO: 2386791 - DNA, 25 bp, Homo sapien
aagcatcgctctgactttggccatg

SEQ ID NO: 2386792 - DNA, 25 bp, Homo sapien
catcgctctgactttggccatgaga

SEQ ID NO: 2386793 - DNA, 25 bp, Homo sapien
ggccggcgtctgcgtgagcctgccc

SEQ ID NO: 2386794 - DNA, 25 bp, Homo sapien
gcgtctgcgtgagcctgcccagaag

SEQ ID NO: 2386795 - DNA, 25 bp, Homo sapien
atggcaagcacgaacagccacggca

SEQ ID NO: 2386796 - DNA, 25 bp, Homo sapien
aaagacgagccacggcaaacatgag

SEQ ID NO: 2386797 - DNA, 25 bp, Homo sapien
acggcaaacacgaacagccacagca

SEQ ID NO: 2386798 - DNA, 25 bp, Homo sapien
cagcaaacatgaacagccacggcaa

SEQ ID NO: 2386799 - DNA, 25 bp, Homo sapien
cagatttctggctcatgatccccga

SEQ ID NO: 2386800 - DNA, 25 bp, Homo sapien
gatttctggctcatgatccccgacc

SEQ ID NO: 2386801 - DNA, 25 bp, Homo sapien
agatttctggctcatgatccccgac

SEQ ID NO: 2386802 - DNA, 25 bp, Homo sapien
ggtagaaccacgatcctgctgacgt

SEQ ID NO: 2386803 - DNA, 25 bp, Homo sapien
tgccgccggcataaacgtccacttg

SEQ ID NO: 2386804 - DNA, 25 bp, Homo sapien
tccacttggcggtgcacgggtagaa

SEQ ID NO: 2386805 - DNA, 25 bp, Homo sapien
ggtgcacgggtagaaccacgatcct

SEQ ID NO: 2386806 - DNA, 25 bp, Homo sapien
cgcggcagcctcaagcggcggggcg

SEQ ID NO: 2386807 - DNA, 25 bp, Homo sapien
ccccgccggactgagccccgcgcgg

SEQ ID NO: 2386808 - DNA, 25 bp, Homo sapien
gcggcgcccccgccggactgagccc

SEQ ID NO: 2386809 - DNA, 25 bp, Homo sapien
ccccgcgcggcagcctcaagcggcg

SEQ ID NO: 2386810 - DNA, 25 bp, Homo sapien
cggcgtgcagggtcccgcgccctcc

SEQ ID NO: 2386811 - DNA, 25 bp, Homo sapien
cctccgcttcgcgttccgcagcccg

SEQ ID NO: 2386812 - DNA, 25 bp, Homo sapien
gcggcgtgcagggtcccgcgccctc

SEQ ID NO: 2386813 - DNA, 25 bp, Homo sapien
ccgcttcgcgttccgcagcccggcg

SEQ ID NO: 2386814 - DNA, 25 bp, Homo sapien
gcagccgcgagagtccgggccctgg

SEQ ID NO: 2386815 - DNA, 25 bp, Homo sapien
aggctgaggtcctcggcgcgcggcg

SEQ ID NO: 2386816 - DNA, 25 bp, Homo sapien
caggctgaggtcctcggcgcgcggc

SEQ ID NO: 2386817 - DNA, 25 bp, Homo sapien
cggcagcggcagccgcgagagtccg

SEQ ID NO: 2386818 - DNA, 25 bp, Homo sapien
tggcaaagcccacgtccaaggcaaa

SEQ ID NO: 2386819 - DNA, 25 bp, Homo sapien
ccccattgcgcagacagggagactg

SEQ ID NO: 2386820 - DNA, 25 bp, Homo sapien
gcccggcacttagttgggtggcaaa

SEQ ID NO: 2386821 - DNA, 25 bp, Homo sapien
acaacatccccggagccatgaagac

SEQ ID NO: 2386822 - DNA, 25 bp, Homo sapien
ggagaccgctgtctccagggcaaca

SEQ ID NO: 2386823 - DNA, 25 bp, Homo sapien
gctgtcgccacggagaccgctgtct

SEQ ID NO: 2386824 - DNA, 25 bp, Homo sapien
aacagaggctgtggcgggcgggtgc

SEQ ID NO: 2386825 - DNA, 25 bp, Homo sapien
cagcagggtgaaccttccagaaggc

SEQ ID NO: 2386826 - DNA, 25 bp, Homo sapien
cagggaagaggcggcaggcagctca

SEQ ID NO: 2386827 - DNA, 25 bp, Homo sapien
tgcagggaagaggcggcaggcagct

SEQ ID NO: 2386828 - DNA, 25 bp, Homo sapien
agggaagaggcggcaggcagctcac

SEQ ID NO: 2386829 - DNA, 25 bp, Homo sapien
ctgcagggaagaggcggcaggcagc

SEQ ID NO: 2386830 - DNA, 25 bp, Homo sapien
ggaggcgcggctgtggggaggcctg

SEQ ID NO: 2386831 - DNA, 25 bp, Homo sapien
ctgtcctgtgctcccagtgtgggtg

SEQ ID NO: 2386832 - DNA, 25 bp, Homo sapien
ggcgcggctgtggggaggcctgagc

SEQ ID NO: 2386833 - DNA, 25 bp, Homo sapien
cagtgtgggtggaggcgcggctgtg

SEQ ID NO: 2386834 - DNA, 25 bp, Homo sapien
cagccttcccgtctataagctgagg

SEQ ID NO: 2386835 - DNA, 25 bp, Homo sapien
cccccagccttcccgtctataagct

SEQ ID NO: 2386836 - DNA, 25 bp, Homo sapien
cccagccttcccgtctataagctga

SEQ ID NO: 2386837 - DNA, 25 bp, Homo sapien
ccagccttcccgtctataagctgag

SEQ ID NO: 2386838 - DNA, 25 bp, Homo sapien
caaagtggacgttcatgactggggt

SEQ ID NO: 2386839 - DNA, 25 bp, Homo sapien
ccacttccgccctgacctccagggt

SEQ ID NO: 2386840 - DNA, 25 bp, Homo sapien
gtcaaagtggacgttcatgactggg

SEQ ID NO: 2386841 - DNA, 25 bp, Homo sapien
tcccacttccgccctgacctccagg

SEQ ID NO: 2386842 - DNA, 25 bp, Homo sapien
gagggcccggtcctacccagtgaga

SEQ ID NO: 2386843 - DNA, 25 bp, Homo sapien
agggtgagggggtgcaacagagggc

SEQ ID NO: 2386844 - DNA, 25 bp, Homo sapien
acagagggcccggtcctacccagtg

SEQ ID NO: 2386845 - DNA, 25 bp, Homo sapien
gccaccactgcttccgggcaggccc

SEQ ID NO: 2386846 - DNA, 25 bp, Homo sapien
ccttagacagctcctcttgcgtctg

SEQ ID NO: 2386847 - DNA, 25 bp, Homo sapien
ctgcagctgccctgttgtggggtca

SEQ ID NO: 2386848 - DNA, 25 bp, Homo sapien
gggcaggtaaccgaacctgcttagc

SEQ ID NO: 2386849 - DNA, 25 bp, Homo sapien
gtgatggccttagacagctcctctt

SEQ ID NO: 2386850 - DNA, 25 bp, Homo sapien
gcgctcccgctgccccctggagaac

SEQ ID NO: 2386851 - DNA, 25 bp, Homo sapien
gcgtctcctgcgagcctgggtcagg

SEQ ID NO: 2386852 - DNA, 25 bp, Homo sapien
ctggcagggagcagcgtggggtttt

SEQ ID NO: 2386853 - DNA, 25 bp, Homo sapien
cagggagcagcgtggggttttcatc

SEQ ID NO: 2386854 - DNA, 25 bp, Homo sapien
tggcgtctcctgcgagcctgggtca

SEQ ID NO: 2386855 - DNA, 25 bp, Homo sapien
ccttgagggcgtagtacatgagtgc

SEQ ID NO: 2386856 - DNA, 25 bp, Homo sapien
caggcctcgtcatcgtcaaagtggg

SEQ ID NO: 2386857 - DNA, 25 bp, Homo sapien
ggcgcaatgtcgctccagaccttga

SEQ ID NO: 2386858 - DNA, 25 bp, Homo sapien
ccttggagaagtcgatctggatgtc

SEQ ID NO: 2386859 - DNA, 25 bp, Homo sapien
gggtgaccatggggatgcctcgatg

SEQ ID NO: 2386860 - DNA, 25 bp, Homo sapien
tggggtgaccatggggatgcctcga

SEQ ID NO: 2386861 - DNA, 25 bp, Homo sapien
tgaccatggggatgcctcgatgccg

SEQ ID NO: 2386862 - DNA, 25 bp, Homo sapien
gtgaccatggggatgcctcgatgcc

SEQ ID NO: 2386863 - DNA, 25 bp, Homo sapien
ctggggacacagggagccatgtgaa

SEQ ID NO: 2386864 - DNA, 25 bp, Homo sapien
gcaaacaggtccatcccgtgggcat

SEQ ID NO: 2386865 - DNA, 25 bp, Homo sapien
tagtacggccgcatgatggagtgtg

SEQ ID NO: 2386866 - DNA, 25 bp, Homo sapien
catggcttaacccaatggcgtggcc

SEQ ID NO: 2386867 - DNA, 25 bp, Homo sapien
agacgcgcaccttgtcctcgtaggg

SEQ ID NO: 2386868 - DNA, 25 bp, Homo sapien
ggctcctcgggctgcgccgtgggag

SEQ ID NO: 2386869 - DNA, 25 bp, Homo sapien
ctggaccggttgtctgggggctccg

SEQ ID NO: 2386870 - DNA, 25 bp, Homo sapien
gctgcgccgtgggagacacagactc

SEQ ID NO: 2386871 - DNA, 25 bp, Homo sapien
gaccggttgtctgggggctccggca

SEQ ID NO: 2386872 - DNA, 25 bp, Homo sapien
ggcaataccagctctcaagacaact

SEQ ID NO: 2386873 - DNA, 25 bp, Homo sapien
gtcacagcttctaccggcctctggc

SEQ ID NO: 2386874 - DNA, 25 bp, Homo sapien
agctctcaagacaacttcactggga

SEQ ID NO: 2386875 - DNA, 25 bp, Homo sapien
ttctaccggcctctggcaataccag

SEQ ID NO: 2386876 - DNA, 25 bp, Homo sapien
catccttgtgtggagcccctatcct

SEQ ID NO: 2386877 - DNA, 25 bp, Homo sapien
tgagcggcatgggacaggcatcctt

SEQ ID NO: 2386878 - DNA, 25 bp, Homo sapien
tgggcagcgcgggacagggcatcct

SEQ ID NO: 2386879 - DNA, 25 bp, Homo sapien
tggagcccctatccttgcctagagg

SEQ ID NO: 2386880 - DNA, 25 bp, Homo sapien
tgctgcatctgtggggcacgtcctt

SEQ ID NO: 2386881 - DNA, 25 bp, Homo sapien
ctgggccaccgcgtcaaagtgagtg

SEQ ID NO: 2386882 - DNA, 25 bp, Homo sapien
tctgtggggcacgtccttcctgggc

SEQ ID NO: 2386883 - DNA, 25 bp, Homo sapien
aagaaagcttcaccccggatctggg

SEQ ID NO: 2386884 - DNA, 25 bp, Homo sapien
ttaaagaagacgatcttgtggtcgc

SEQ ID NO: 2386885 - DNA, 25 bp, Homo sapien
aagcggtgcatctgtgccggctgca

SEQ ID NO: 2386886 - DNA, 25 bp, Homo sapien
tggtgcgctcgtacacggcgtccac

SEQ ID NO: 2386887 - DNA, 25 bp, Homo sapien
ggtcccgcgtcagccgccagaagta

SEQ ID NO: 2386888 - DNA, 25 bp, Homo sapien
tcctgtaacactgccacgaggtggt

SEQ ID NO: 2386889 - DNA, 25 bp, Homo sapien
tgtaacactgccacgaggtggttcc

SEQ ID NO: 2386890 - DNA, 25 bp, Homo sapien
cggcccctcacgcttctgtcccgag

SEQ ID NO: 2386891 - DNA, 25 bp, Homo sapien
agtgcttcctgtaacactgccacga

SEQ ID NO: 2386892 - DNA, 25 bp, Homo sapien
aagtggttcccctgacagacacgca

SEQ ID NO: 2386893 - DNA, 25 bp, Homo sapien
caaggcccggcttccttataagaga

SEQ ID NO: 2386894 - DNA, 25 bp, Homo sapien
cacattggattgaatgacgtcctcc

SEQ ID NO: 2386895 - DNA, 25 bp, Homo sapien
gaatctcaggacgtgaccttacttg

SEQ ID NO: 2386896 - DNA, 25 bp, Homo sapien
gcgcgggtatccttcctctacgtta

SEQ ID NO: 2386897 - DNA, 25 bp, Homo sapien
tccttgaacacccagtacctgtctc

SEQ ID NO: 2386898 - DNA, 25 bp, Homo sapien
aataagtcctgtcattgtgggccca

SEQ ID NO: 2386899 - DNA, 25 bp, Homo sapien
ggagaaggcagcgtcgatgccgcca

SEQ ID NO: 2386900 - DNA, 25 bp, Homo sapien
agcgcatggcgtcgtccagcgtgct

SEQ ID NO: 2386901 - DNA, 25 bp, Homo sapien
gtcggaccagcgcatggcgtcgtcc

SEQ ID NO: 2386902 - DNA, 25 bp, Homo sapien
catcgtagcgccagtacagctggtc

SEQ ID NO: 2386903 - DNA, 25 bp, Homo sapien
tccatgtgcctcgtgtggtcatcgt

SEQ ID NO: 2386904 - DNA, 25 bp, Homo sapien
tccagtactcctggccacggaagaa

SEQ ID NO: 2386905 - DNA, 25 bp, Homo sapien
gtactcctggccacggaagaagtag

SEQ ID NO: 2386906 - DNA, 25 bp, Homo sapien
atccagcactttccagtactcctgg

SEQ ID NO: 2386907 - DNA, 25 bp, Homo sapien
actttccagtactcctggccacgga

SEQ ID NO: 2386908 - DNA, 25 bp, Homo sapien
cgtaaccgtcctccgagcggctctg

SEQ ID NO: 2386909 - DNA, 25 bp, Homo sapien
cacagatccatcggcctgtgagtct

SEQ ID NO: 2386910 - DNA, 25 bp, Homo sapien
cagatccatcggcctgtgagtctcc

SEQ ID NO: 2386911 - DNA, 25 bp, Homo sapien
cggctctggtcatgttgtcctggag

SEQ ID NO: 2386912 - DNA, 25 bp, Homo sapien
cgctgtccacagggcgcctggtgac

SEQ ID NO: 2386913 - DNA, 25 bp, Homo sapien
tgtccacagggcgcctggtgacagt

SEQ ID NO: 2386914 - DNA, 25 bp, Homo sapien
gctgtccacagggcgcctggtgaca

SEQ ID NO: 2386915 - DNA, 25 bp, Homo sapien
ccgctgtccacagggcgcctggtga

SEQ ID NO: 2386916 - DNA, 25 bp, Homo sapien
tcctctcatgggctcgcgctgtgtg

SEQ ID NO: 2386917 - DNA, 25 bp, Homo sapien
atgttggtctggaacgcgtcacagg

SEQ ID NO: 2386918 - DNA, 25 bp, Homo sapien
tctgctggccttccggtgccagggt

SEQ ID NO: 2386919 - DNA, 25 bp, Homo sapien
gtgcggcctgactgggcacccttct

SEQ ID NO: 2386920 - DNA, 25 bp, Homo sapien
tttttcaaatactgccacttggcca

SEQ ID NO: 2386921 - DNA, 25 bp, Homo sapien
tgcgggtgcagctttctatgaacat

SEQ ID NO: 2386922 - DNA, 25 bp, Homo sapien
gctgcgggtgcagctttctatgaac

SEQ ID NO: 2386923 - DNA, 25 bp, Homo sapien
ttccacaaaacaacacgccctgccc

SEQ ID NO: 2386924 - DNA, 25 bp, Homo sapien
ggtgcagctttctatgaacatgaga

SEQ ID NO: 2386925 - DNA, 25 bp, Homo sapien
gagacacagaagcgagctcagggtg

SEQ ID NO: 2386926 - DNA, 25 bp, Homo sapien
gtggtcagcgcctcccaaaggatgc

SEQ ID NO: 2386927 - DNA, 25 bp, Homo sapien
gacacagaagcgagctcagggtggt

SEQ ID NO: 2386928 - DNA, 25 bp, Homo sapien
acacagaagcgagctcagggtggtc

SEQ ID NO: 2386929 - DNA, 25 bp, Homo sapien
caaaagcctgggtcacgctaagggc

SEQ ID NO: 2386930 - DNA, 25 bp, Homo sapien
caggtgtttagatggtgactcaggc

SEQ ID NO: 2386931 - DNA, 25 bp, Homo sapien
tgaaaatccagaacgtcacgtgaag

SEQ ID NO: 2386932 - DNA, 25 bp, Homo sapien
gaggtcccatcacgaggaaggtgca

SEQ ID NO: 2386933 - DNA, 25 bp, Homo sapien
taagcccccacaatccactccccac

SEQ ID NO: 2386934 - DNA, 25 bp, Homo sapien
ccacaatccactccccacagggttt

SEQ ID NO: 2386935 - DNA, 25 bp, Homo sapien
cccccacaatccactccccacaggg

SEQ ID NO: 2386936 - DNA, 25 bp, Homo sapien
ctaagcccccacaatccactcccca

SEQ ID NO: 2386937 - DNA, 25 bp, Homo sapien
cactgcacactccacccacgggtga

SEQ ID NO: 2386938 - DNA, 25 bp, Homo sapien
tcactgcacactccacccacgggtg

SEQ ID NO: 2386939 - DNA, 25 bp, Homo sapien
atcactgcacactccacccacgggt

SEQ ID NO: 2386940 - DNA, 25 bp, Homo sapien
actgcacactccacccacgggtgac

SEQ ID NO: 2386941 - DNA, 25 bp, Homo sapien
cagtcggtgagtgggtgggtcagcg

SEQ ID NO: 2386942 - DNA, 25 bp, Homo sapien
gacgccctgcagtcggtgagtgggt

SEQ ID NO: 2386943 - DNA, 25 bp, Homo sapien
gactctattcaataccaagaggaaa

SEQ ID NO: 2386944 - DNA, 25 bp, Homo sapien
catccagacagtgggactctattca

SEQ ID NO: 2386945 - DNA, 25 bp, Homo sapien
aagatgtccctggattgtccccgcc

SEQ ID NO: 2386946 - DNA, 25 bp, Homo sapien
tctggttcatgcatgctgggaaaga

SEQ ID NO: 2386947 - DNA, 25 bp, Homo sapien
acacgctggtgttatttctggttca

SEQ ID NO: 2386948 - DNA, 25 bp, Homo sapien
gtttcttctcagacacgctggtgtt

SEQ ID NO: 2386949 - DNA, 25 bp, Homo sapien
ggcttcttgtgtgaattgcctgctc

SEQ ID NO: 2386950 - DNA, 25 bp, Homo sapien
gctccgccaatagctgtgaggccca

SEQ ID NO: 2386951 - DNA, 25 bp, Homo sapien
gcctggaacagagtaggcgctccgc

SEQ ID NO: 2386952 - DNA, 25 bp, Homo sapien
ggcatgcaggtgctaacaggccggg

SEQ ID NO: 2386953 - DNA, 25 bp, Homo sapien
actcttcccgggctgctaatccgaa

SEQ ID NO: 2386954 - DNA, 25 bp, Homo sapien
cgggctgctaatccgaatccggatc

SEQ ID NO: 2386955 - DNA, 25 bp, Homo sapien
tccgactccggctccaactagggcc

SEQ ID NO: 2386956 - DNA, 25 bp, Homo sapien
aatccgaatccggatccgactccga

SEQ ID NO: 2386957 - DNA, 25 bp, Homo sapien
aggtccttgcgggagaactcgaact

SEQ ID NO: 2386958 - DNA, 25 bp, Homo sapien
cgaaggcgccgtggccgatcaggtc

SEQ ID NO: 2386959 - DNA, 25 bp, Homo sapien
cgatcaggtccttgcgggagaactc

SEQ ID NO: 2386960 - DNA, 25 bp, Homo sapien
cgcgaaggcgccgtggccgatcagg

SEQ ID NO: 2386961 - DNA, 25 bp, Homo sapien
tcgcggtggcggcccttgaagacca

SEQ ID NO: 2386962 - DNA, 25 bp, Homo sapien
cgcggtggcggcccttgaagaccac

SEQ ID NO: 2386963 - DNA, 25 bp, Homo sapien
ctcgcggtggcggcccttgaagacc

SEQ ID NO: 2386964 - DNA, 25 bp, Homo sapien
gttcttcttgttaatgcacttgacg

SEQ ID NO: 2386965 - DNA, 25 bp, Homo sapien
tgacggcgacctccaaatcgtgctt

SEQ ID NO: 2386966 - DNA, 25 bp, Homo sapien
gcacttgacggcgacctccaaatcg

SEQ ID NO: 2386967 - DNA, 25 bp, Homo sapien
cagcgtctgagacttggcgaggttc

SEQ ID NO: 2386968 - DNA, 25 bp, Homo sapien
ggaagtcgtacagggccacgatgtt

SEQ ID NO: 2386969 - DNA, 25 bp, Homo sapien
tacagggccacgatgttttcatgtt

SEQ ID NO: 2386970 - DNA, 25 bp, Homo sapien
ctggaagtcgtacagggccacgatg

SEQ ID NO: 2386971 - DNA, 25 bp, Homo sapien
cgtacagggccacgatgttttcatg

SEQ ID NO: 2386972 - DNA, 25 bp, Homo sapien
ggtccccagcagaccgcagcccaga

SEQ ID NO: 2386973 - DNA, 25 bp, Homo sapien
cggtccccagcagaccgcagcccag

SEQ ID NO: 2386974 - DNA, 25 bp, Homo sapien
cagccgggcccgaggtcatctcctt

SEQ ID NO: 2386975 - DNA, 25 bp, Homo sapien
ccagccagcggcagccgcctgtgcc

SEQ ID NO: 2386976 - DNA, 25 bp, Homo sapien
cagccagcggcagccgcctgtgccc

SEQ ID NO: 2386977 - DNA, 25 bp, Homo sapien
gggcccgaggtcatctccttggcca

SEQ ID NO: 2386978 - DNA, 25 bp, Homo sapien
tcccagagccatgacgcatgtgcag

SEQ ID NO: 2386979 - DNA, 25 bp, Homo sapien
ttgtgacaagcctcggtccccaagg

SEQ ID NO: 2386980 - DNA, 25 bp, Homo sapien
caggacacagtgtgcctgggtttcc

SEQ ID NO: 2386981 - DNA, 25 bp, Homo sapien
gaggcttccaaacatggagaggatg

SEQ ID NO: 2386982 - DNA, 25 bp, Homo sapien
ctgagtagagaaagccgcagagttg

SEQ ID NO: 2386983 - DNA, 25 bp, Homo sapien
agtagagaaagccgcagagttgcca

SEQ ID NO: 2386984 - DNA, 25 bp, Homo sapien
gagtagagaaagccgcagagttgcc

SEQ ID NO: 2386985 - DNA, 25 bp, Homo sapien
tgagtagagaaagccgcagagttgc

SEQ ID NO: 2386986 - DNA, 25 bp, Homo sapien
caatccccacgcctgtgggggcgag

SEQ ID NO: 2386987 - DNA, 25 bp, Homo sapien
gtgcccggagacaggagcgcctgca

SEQ ID NO: 2386988 - DNA, 25 bp, Homo sapien
gcaacaatccccacgcctgtggggg

SEQ ID NO: 2386989 - DNA, 25 bp, Homo sapien
ggcgagggcaggctaagctgcagct

SEQ ID NO: 2386990 - DNA, 25 bp, Homo sapien
ctcgaccgcactccctcccgtaatg

SEQ ID NO: 2386991 - DNA, 25 bp, Homo sapien
cagcgggactcgatcgggggcagga

SEQ ID NO: 2386992 - DNA, 25 bp, Homo sapien
gggcaggactctagcctcgaccgca

SEQ ID NO: 2386993 - DNA, 25 bp, Homo sapien
ctgagaacggagggcagcgggactc

SEQ ID NO: 2386994 - DNA, 25 bp, Homo sapien
taaggatggctgtccccggtggccc

SEQ ID NO: 2386995 - DNA, 25 bp, Homo sapien
tgacaaaattcacggcgcagagagg

SEQ ID NO: 2386996 - DNA, 25 bp, Homo sapien
ggaaggacaccggtgaacacatcgc

SEQ ID NO: 2386997 - DNA, 25 bp, Homo sapien
tcgccttgtaaggatggctgtcccc

SEQ ID NO: 2386998 - DNA, 25 bp, Homo sapien
ttccccaagctctactcttttagag

SEQ ID NO: 2386999 - DNA, 25 bp, Homo sapien
ctggccgaggggtaaactttctgat

SEQ ID NO: 2387000 - DNA, 25 bp, Homo sapien
caagctctactcttttagagacagg

SEQ ID NO: 2387001 - DNA, 25 bp, Homo sapien
tggattgagccagcacagaaccttc

SEQ ID NO: 2387002 - DNA, 25 bp, Homo sapien
aggaggacggacgtgccctcgatag

SEQ ID NO: 2387003 - DNA, 25 bp, Homo sapien
gacggacgtgccctcgataggaggg

SEQ ID NO: 2387004 - DNA, 25 bp, Homo sapien
gacgtgccctcgataggagggagga

SEQ ID NO: 2387005 - DNA, 25 bp, Homo sapien
tgccctcgataggagggaggagagc

SEQ ID NO: 2387006 - DNA, 25 bp, Homo sapien
tgtggcaaagggagcgtgtgggaac

SEQ ID NO: 2387007 - DNA, 25 bp, Homo sapien
gtggcaaagggagcgtgtgggaacc

SEQ ID NO: 2387008 - DNA, 25 bp, Homo sapien
agggagcgtgtgggaaccaggagct

SEQ ID NO: 2387009 - DNA, 25 bp, Homo sapien
caaagggagcgtgtgggaaccagga

SEQ ID NO: 2387010 - DNA, 25 bp, Homo sapien
gggacagatgacagcttcagacagg

SEQ ID NO: 2387011 - DNA, 25 bp, Homo sapien
ggctgtgggcatccaactccctgag

SEQ ID NO: 2387012 - DNA, 25 bp, Homo sapien
agatgacagcttcagacaggccctc

SEQ ID NO: 2387013 - DNA, 25 bp, Homo sapien
cccctgggacagatgacagcttcag

SEQ ID NO: 2387014 - DNA, 25 bp, Homo sapien
cagggatgtgtcaaagtcagaggta

SEQ ID NO: 2387015 - DNA, 25 bp, Homo sapien
agggatgtgtcaaagtcagaggtat

SEQ ID NO: 2387016 - DNA, 25 bp, Homo sapien
gggatgtgtcaaagtcagaggtatc

SEQ ID NO: 2387017 - DNA, 25 bp, Homo sapien
ccaggaagagcacgtggggagccca

SEQ ID NO: 2387018 - DNA, 25 bp, Homo sapien
ccataaccaggtagacagaattagc

SEQ ID NO: 2387019 - DNA, 25 bp, Homo sapien
ctccataaccaggtagacagaatta

SEQ ID NO: 2387020 - DNA, 25 bp, Homo sapien
tccataaccaggtagacagaattag

SEQ ID NO: 2387021 - DNA, 25 bp, Homo sapien
agtcggccaggtccccaccgttgca

SEQ ID NO: 2387022 - DNA, 25 bp, Homo sapien
tagtcggccaggtccccaccgttgc

SEQ ID NO: 2387023 - DNA, 25 bp, Homo sapien
cgtgcaggtagtcggccaggtcccc

SEQ ID NO: 2387024 - DNA, 25 bp, Homo sapien
cggccaggtccccaccgttgcagta

SEQ ID NO: 2387025 - DNA, 25 bp, Homo sapien
ccggcggggttggacagcaggatgt

SEQ ID NO: 2387026 - DNA, 25 bp, Homo sapien
tgctgtgcagaagccgcatggcgcc

SEQ ID NO: 2387027 - DNA, 25 bp, Homo sapien
atgttctgcggtttcaggtcgcggt

SEQ ID NO: 2387028 - DNA, 25 bp, Homo sapien
cctgatggtgtcctcgctcagcgtg

SEQ ID NO: 2387029 - DNA, 25 bp, Homo sapien
aggtaccgcgcgaagccgaagtcag

SEQ ID NO: 2387030 - DNA, 25 bp, Homo sapien
ccatcatgttgctctggaggtaccg

SEQ ID NO: 2387031 - DNA, 25 bp, Homo sapien
gagccgcagagtgtggccgccatca

SEQ ID NO: 2387032 - DNA, 25 bp, Homo sapien
gccgcagagtgtggccgccatcatg

SEQ ID NO: 2387033 - DNA, 25 bp, Homo sapien
gccttcccgtcgtagtgctgggaca

SEQ ID NO: 2387034 - DNA, 25 bp, Homo sapien
acaggtccgccttcccgtcgtagtg

SEQ ID NO: 2387035 - DNA, 25 bp, Homo sapien
atggtgccgatgctccacaggtccg

SEQ ID NO: 2387036 - DNA, 25 bp, Homo sapien
tcaggcactggtagacgatggtgcc

SEQ ID NO: 2387037 - DNA, 25 bp, Homo sapien
tggcggacacttgcactgacggtgc

SEQ ID NO: 2387038 - DNA, 25 bp, Homo sapien
cggacacttgcactgacggtgcggc

SEQ ID NO: 2387039 - DNA, 25 bp, Homo sapien
gacacttgcactgacggtgcggcgt

SEQ ID NO: 2387040 - DNA, 25 bp, Homo sapien
cagctggcggacacttgcactgacg

SEQ ID NO: 2387041 - DNA, 25 bp, Homo sapien
ggtctcggtgcgttcgtccccagtc

SEQ ID NO: 2387042 - DNA, 25 bp, Homo sapien
aaaccgggtgctagcgcggctgttt

SEQ ID NO: 2387043 - DNA, 25 bp, Homo sapien
tgccccagacgctgcgaagcccggg

SEQ ID NO: 2387044 - DNA, 25 bp, Homo sapien
gggacggggacagcctgactgccag

SEQ ID NO: 2387045 - DNA, 25 bp, Homo sapien
cgtagaacaggcgcaggtcctgggg

SEQ ID NO: 2387046 - DNA, 25 bp, Homo sapien
ccaacgtcttgttcttctcgtagaa

SEQ ID NO: 2387047 - DNA, 25 bp, Homo sapien
tcgtagaacaggcgcaggtcctggg

SEQ ID NO: 2387048 - DNA, 25 bp, Homo sapien
ggaccaacgtcttgttcttctcgta

SEQ ID NO: 2387049 - DNA, 25 bp, Homo sapien
agtccatgcggtccttgtggttgcg

SEQ ID NO: 2387050 - DNA, 25 bp, Homo sapien
cgcagcggggccgaggtctcccggg

SEQ ID NO: 2387051 - DNA, 25 bp, Homo sapien
catgcggtccttgtggttgcgttgc

SEQ ID NO: 2387052 - DNA, 25 bp, Homo sapien
cggtccttgtggttgcgttgcagta

SEQ ID NO: 2387053 - DNA, 25 bp, Homo sapien
gggctggcatcgaggaaagggtgat

SEQ ID NO: 2387054 - DNA, 25 bp, Homo sapien
ccgaggggctggcatcgaggaaagg

SEQ ID NO: 2387055 - DNA, 25 bp, Homo sapien
tcctgaccgaggggctggcatcgag

SEQ ID NO: 2387056 - DNA, 25 bp, Homo sapien
gctggcatcgaggaaagggtgatga

SEQ ID NO: 2387057 - DNA, 25 bp, Homo sapien
tggagctgctgccggaccccgagct

SEQ ID NO: 2387058 - DNA, 25 bp, Homo sapien
ccccgagcttgggtacgagggcaca

SEQ ID NO: 2387059 - DNA, 25 bp, Homo sapien
tgccggaccccgagcttgggtacga

SEQ ID NO: 2387060 - DNA, 25 bp, Homo sapien
ggtacgagggcacaggcacgggtgg

SEQ ID NO: 2387061 - DNA, 25 bp, Homo sapien
gggaccatgacgaagtcgtctgtgt

SEQ ID NO: 2387062 - DNA, 25 bp, Homo sapien
tgcaggaagccagcggtgtcagccg

SEQ ID NO: 2387063 - DNA, 25 bp, Homo sapien
aaactgcgcggggaccatgacgaag

SEQ ID NO: 2387064 - DNA, 25 bp, Homo sapien
agtcgtctgtgtcacaggaagagtc

SEQ ID NO: 2387065 - DNA, 25 bp, Homo sapien
cactgcacatcaggctgtctggcgg

SEQ ID NO: 2387066 - DNA, 25 bp, Homo sapien
atcaggctgtctggcgggggtttgg

SEQ ID NO: 2387067 - DNA, 25 bp, Homo sapien
aggctgtctggcgggggtttggcac

SEQ ID NO: 2387068 - DNA, 25 bp, Homo sapien
ccactgcacatcaggctgtctggcg

SEQ ID NO: 2387069 - DNA, 25 bp, Homo sapien
ataacacgggccacttccaaggcca

SEQ ID NO: 2387070 - DNA, 25 bp, Homo sapien
ctcggctcattgtaaataacacggg

SEQ ID NO: 2387071 - DNA, 25 bp, Homo sapien
ttgtaaataacacgggccacttcca

SEQ ID NO: 2387072 - DNA, 25 bp, Homo sapien
tctctcccctaaaatacagaggtaa

SEQ ID NO: 2387073 - DNA, 25 bp, Homo sapien
tggagatggggtccggccgtggctc

SEQ ID NO: 2387074 - DNA, 25 bp, Homo sapien
ggagatggggtccggccgtggctct

SEQ ID NO: 2387075 - DNA, 25 bp, Homo sapien
gagatggggtccggccgtggctctc

SEQ ID NO: 2387076 - DNA, 25 bp, Homo sapien
agatggggtccggccgtggctctcc

SEQ ID NO: 2387077 - DNA, 25 bp, Homo sapien
cgctcaatgcgctggtagttctgca

SEQ ID NO: 2387078 - DNA, 25 bp, Homo sapien
cgctggtagttctgcacctgcgtgg

SEQ ID NO: 2387079 - DNA, 25 bp, Homo sapien
caggtttcgctcaatgcgctggtag

SEQ ID NO: 2387080 - DNA, 25 bp, Homo sapien
tgggtgactgcaggtttcgctcaat

SEQ ID NO: 2387081 - DNA, 25 bp, Homo sapien
gaggagatggcgtgtagggccggcc

SEQ ID NO: 2387082 - DNA, 25 bp, Homo sapien
cttgaggagatggcgtgtagggccg

SEQ ID NO: 2387083 - DNA, 25 bp, Homo sapien
tgtagggccggcctccacccagaga

SEQ ID NO: 2387084 - DNA, 25 bp, Homo sapien
agatggcgtgtagggccggcctcca

SEQ ID NO: 2387085 - DNA, 25 bp, Homo sapien
ggacgaggggacctgccaccccgca

SEQ ID NO: 2387086 - DNA, 25 bp, Homo sapien
cctggccgctcagggatggttccaa

SEQ ID NO: 2387087 - DNA, 25 bp, Homo sapien
gacgaggggacctgccaccccgcat

SEQ ID NO: 2387088 - DNA, 25 bp, Homo sapien
gtttgggcagcttggggcggacgac

SEQ ID NO: 2387089 - DNA, 25 bp, Homo sapien
gttgggggcgctgtgcaggcggcag

SEQ ID NO: 2387090 - DNA, 25 bp, Homo sapien
ggcggacgacgtgcaagtcagacag

SEQ ID NO: 2387091 - DNA, 25 bp, Homo sapien
cagggggtttcgctgcaggaagtcg

SEQ ID NO: 2387092 - DNA, 25 bp, Homo sapien
agggcccaacggctgaccatggaag

SEQ ID NO: 2387093 - DNA, 25 bp, Homo sapien
agaggtcgggcagcgtccggtttcg

SEQ ID NO: 2387094 - DNA, 25 bp, Homo sapien
gccgggctaggagggccagcaggtt

SEQ ID NO: 2387095 - DNA, 25 bp, Homo sapien
atggaagggtcccacctccgagagg

SEQ ID NO: 2387096 - DNA, 25 bp, Homo sapien
gcaggtcagtgaggcggctggtgct

SEQ ID NO: 2387097 - DNA, 25 bp, Homo sapien
tgtcccaaacgccgccttaaggagc

SEQ ID NO: 2387098 - DNA, 25 bp, Homo sapien
cccaaacgccgccttaaggagcagg

SEQ ID NO: 2387099 - DNA, 25 bp, Homo sapien
tcagtgaggcggctggtgctgaaag

SEQ ID NO: 2387100 - DNA, 25 bp, Homo sapien
agagcccacggtgaagaccaccggg

SEQ ID NO: 2387101 - DNA, 25 bp, Homo sapien
ggggagagcccacggtgaagaccac

SEQ ID NO: 2387102 - DNA, 25 bp, Homo sapien
ctgggggggcgtgctcccgctcggg

SEQ ID NO: 2387103 - DNA, 25 bp, Homo sapien
ggagagcccacggtgaagaccaccg

SEQ ID NO: 2387104 - DNA, 25 bp, Homo sapien
ccacgtccatttcgcagacggggag

SEQ ID NO: 2387105 - DNA, 25 bp, Homo sapien
cagagcaggggtttctcaggggcct

SEQ ID NO: 2387106 - DNA, 25 bp, Homo sapien
gctgcttcctcaggcacccctgggc

SEQ ID NO: 2387107 - DNA, 25 bp, Homo sapien
agggcccaatgtgcctctgcctcgg

SEQ ID NO: 2387108 - DNA, 25 bp, Homo sapien
ccaatgctccaacaggagaagcaca

SEQ ID NO: 2387109 - DNA, 25 bp, Homo sapien
tgttatatcccaatgctccaacagg

SEQ ID NO: 2387110 - DNA, 25 bp, Homo sapien
tctgcctcggtttacacctgttata

SEQ ID NO: 2387111 - DNA, 25 bp, Homo sapien
aggtcgggggcctcgaaggtcacag

SEQ ID NO: 2387112 - DNA, 25 bp, Homo sapien
taatggggtcggcaaagctgcagcc

SEQ ID NO: 2387113 - DNA, 25 bp, Homo sapien
agccccctccaggttcgcagtaatg

SEQ ID NO: 2387114 - DNA, 25 bp, Homo sapien
ctccaggttcgcagtaatggggtcg

SEQ ID NO: 2387115 - DNA, 25 bp, Homo sapien
agcggccgtcagggcggcaagtgct

SEQ ID NO: 2387116 - DNA, 25 bp, Homo sapien
ggaaggggcttgtctcccttcagac

SEQ ID NO: 2387117 - DNA, 25 bp, Homo sapien
gcggcaagtgctgcccgggcttgga

SEQ ID NO: 2387118 - DNA, 25 bp, Homo sapien
ggcttgtctcccttcagactcaccg

SEQ ID NO: 2387119 - DNA, 25 bp, Homo sapien
ccccattctcggctcagcaggctga

SEQ ID NO: 2387120 - DNA, 25 bp, Homo sapien
agggctgcgatctccaggacgtgct

SEQ ID NO: 2387121 - DNA, 25 bp, Homo sapien
tgcacgaacagcagcgtgaagcgca

SEQ ID NO: 2387122 - DNA, 25 bp, Homo sapien
tgaagcgcaggccacgcaggatctc

SEQ ID NO: 2387123 - DNA, 25 bp, Homo sapien
gcagatcagaggaggccggttggtc

SEQ ID NO: 2387124 - DNA, 25 bp, Homo sapien
tgcttcacagtggacgacaggcaga

SEQ ID NO: 2387125 - DNA, 25 bp, Homo sapien
ctttgcaggccggaggacagtagct

SEQ ID NO: 2387126 - DNA, 25 bp, Homo sapien
aggacagtagctcggccaccttcag

SEQ ID NO: 2387127 - DNA, 25 bp, Homo sapien
gatctggtcgatggcactttgcagg

SEQ ID NO: 2387128 - DNA, 25 bp, Homo sapien
gagtggccatgatctgcccggtgca

SEQ ID NO: 2387129 - DNA, 25 bp, Homo sapien
ccaggcagttgcaaggtgggcttcc

SEQ ID NO: 2387130 - DNA, 25 bp, Homo sapien
tgtgctctgcatactgggctccagg

SEQ ID NO: 2387131 - DNA, 25 bp, Homo sapien
agggtgctgtccgacccaatggcct

SEQ ID NO: 2387132 - DNA, 25 bp, Homo sapien
ctgtgaatgcggtccaggagccgct

SEQ ID NO: 2387133 - DNA, 25 bp, Homo sapien
tgaagatgagcctctcggcagtgat

SEQ ID NO: 2387134 - DNA, 25 bp, Homo sapien
tctgcacagcgtggctgaagatgag

SEQ ID NO: 2387135 - DNA, 25 bp, Homo sapien
gctggccttgtacagctcattcagc

SEQ ID NO: 2387136 - DNA, 25 bp, Homo sapien
tcagggcagtgacgtggagacataa

SEQ ID NO: 2387137 - DNA, 25 bp, Homo sapien
agcccggccccaggacaacagagtg

SEQ ID NO: 2387138 - DNA, 25 bp, Homo sapien
tgcctggaaccagatgaccctggcc

SEQ ID NO: 2387139 - DNA, 25 bp, Homo sapien
ggagacataagtgctggtgcagcct

SEQ ID NO: 2387140 - DNA, 25 bp, Homo sapien
tggtccgagagcatgtgctgcagcc

SEQ ID NO: 2387141 - DNA, 25 bp, Homo sapien
tggaacatctcgtccagggcagccg

SEQ ID NO: 2387142 - DNA, 25 bp, Homo sapien
ggacgcagccctcacggtgctggaa

SEQ ID NO: 2387143 - DNA, 25 bp, Homo sapien
acttggtgacgttctcgatgtcggc

SEQ ID NO: 2387144 - DNA, 25 bp, Homo sapien
gtcagcagcgccgagagtctccgct

SEQ ID NO: 2387145 - DNA, 25 bp, Homo sapien
gcgccgagagtctccgctcaatgca

SEQ ID NO: 2387146 - DNA, 25 bp, Homo sapien
cagtcagcagcgccgagagtctccg

SEQ ID NO: 2387147 - DNA, 25 bp, Homo sapien
agcagcgccgagagtctccgctcaa

SEQ ID NO: 2387148 - DNA, 25 bp, Homo sapien
tgtgatccccacctgtaaaagatgg

SEQ ID NO: 2387149 - DNA, 25 bp, Homo sapien
caggattccagtcggccatgaagca

SEQ ID NO: 2387150 - DNA, 25 bp, Homo sapien
gattacaagacgtatccagggctga

SEQ ID NO: 2387151 - DNA, 25 bp, Homo sapien
caacacaggtgtgcaaagcagcctc

SEQ ID NO: 2387152 - DNA, 25 bp, Homo sapien
gaccacgtgggcgaaggcggaagtg

SEQ ID NO: 2387153 - DNA, 25 bp, Homo sapien
gcggaagtggaacgaccgactgcac

SEQ ID NO: 2387154 - DNA, 25 bp, Homo sapien
ttcgcgacgcggctgactgagccgg

SEQ ID NO: 2387155 - DNA, 25 bp, Homo sapien
acccgcgtcgggaccagagaggctc

SEQ ID NO: 2387156 - DNA, 25 bp, Homo sapien
ggaccctgacggatcaactccaacg

SEQ ID NO: 2387157 - DNA, 25 bp, Homo sapien
gacggatcaactccaacgtcccctg

SEQ ID NO: 2387158 - DNA, 25 bp, Homo sapien
ggatcaactccaacgtcccctgacg

SEQ ID NO: 2387159 - DNA, 25 bp, Homo sapien
ctccaacgtcccctgacgcccaggt

SEQ ID NO: 2387160 - DNA, 25 bp, Homo sapien
tctcggacctggacgccccagcctc

SEQ ID NO: 2387161 - DNA, 25 bp, Homo sapien
ggacctggacgccccagcctcactc

SEQ ID NO: 2387162 - DNA, 25 bp, Homo sapien
ctctcggacctggacgccccagcct

SEQ ID NO: 2387163 - DNA, 25 bp, Homo sapien
tcggacctggacgccccagcctcac

SEQ ID NO: 2387164 - DNA, 25 bp, Homo sapien
taacctctcggaccctgacgctgca

SEQ ID NO: 2387165 - DNA, 25 bp, Homo sapien
ccaacagcgcgcgaagctggaggcc

SEQ ID NO: 2387166 - DNA, 25 bp, Homo sapien
ctggaggcccatgcgcaggctacca

SEQ ID NO: 2387167 - DNA, 25 bp, Homo sapien
gcgcagggtccaccgtccgaaggct

SEQ ID NO: 2387168 - DNA, 25 bp, Homo sapien
tcggcaccgcgcggggtggactggg

SEQ ID NO: 2387169 - DNA, 25 bp, Homo sapien
ggtcgcccggcgtcgcggtcattac

SEQ ID NO: 2387170 - DNA, 25 bp, Homo sapien
gagaagggcggcgtgagcgggggcc

SEQ ID NO: 2387171 - DNA, 25 bp, Homo sapien
gctgggcgggcatagcggggtcgcc

SEQ ID NO: 2387172 - DNA, 25 bp, Homo sapien
tcctgggggcatgcggctccggcgg

SEQ ID NO: 2387173 - DNA, 25 bp, Homo sapien
gtcctgggggcatgcggctccggcg

SEQ ID NO: 2387174 - DNA, 25 bp, Homo sapien
ccgctgcaggacctccggtcctggg

SEQ ID NO: 2387175 - DNA, 25 bp, Homo sapien
caggacctccggtcctgggggcatg

SEQ ID NO: 2387176 - DNA, 25 bp, Homo sapien
tgagcagcacgatcttccgcttggg

SEQ ID NO: 2387177 - DNA, 25 bp, Homo sapien
cttgcccgaataggccatgagcagc

SEQ ID NO: 2387178 - DNA, 25 bp, Homo sapien
cttgagcttcttcgccggatgttct

SEQ ID NO: 2387179 - DNA, 25 bp, Homo sapien
tgcatgccgtggtagcccttgcccg

SEQ ID NO: 2387180 - DNA, 25 bp, Homo sapien
cggcggccgcacctgcacctaaacc

SEQ ID NO: 2387181 - DNA, 25 bp, Homo sapien
ccgcacctgcacctaaaccccgcgg

SEQ ID NO: 2387182 - DNA, 25 bp, Homo sapien
cgcttccccggcggccgcacctgca

SEQ ID NO: 2387183 - DNA, 25 bp, Homo sapien
ccccggcggccgcacctgcacctaa

SEQ ID NO: 2387184 - DNA, 25 bp, Homo sapien
tgccacgctcatgtgaaaacactgt

SEQ ID NO: 2387185 - DNA, 25 bp, Homo sapien
tgtcagttacaaaatcagtgccgtg

SEQ ID NO: 2387186 - DNA, 25 bp, Homo sapien
gccgtgggtgctacctatactttaa

SEQ ID NO: 2387187 - DNA, 25 bp, Homo sapien
tatattttgcagacagaggtcgcca

SEQ ID NO: 2387188 - DNA, 25 bp, Homo sapien
tgaattgtgaggacccgacattcct

SEQ ID NO: 2387189 - DNA, 25 bp, Homo sapien
gttttgaattgtgaggacccgacat

SEQ ID NO: 2387190 - DNA, 25 bp, Homo sapien
aattgttttgaattgtgaggacccg

SEQ ID NO: 2387191 - DNA, 25 bp, Homo sapien
ttgttttgaattgtgaggacccgac

SEQ ID NO: 2387192 - DNA, 25 bp, Homo sapien
ctgaccggacgagggcggacaccaa

SEQ ID NO: 2387193 - DNA, 25 bp, Homo sapien
aggaatacagcctgaccggacgagg

SEQ ID NO: 2387194 - DNA, 25 bp, Homo sapien
ctggaaggacattttcctcatgtcc

SEQ ID NO: 2387195 - DNA, 25 bp, Homo sapien
catgattttcaggaatacagcctga

SEQ ID NO: 2387196 - DNA, 25 bp, Homo sapien
gcagggagcatctagatccagctat

SEQ ID NO: 2387197 - DNA, 25 bp, Homo sapien
gaaacagcataacaagccagaacac

SEQ ID NO: 2387198 - DNA, 25 bp, Homo sapien
tggacgtctcacctacataaggcgt

SEQ ID NO: 2387199 - DNA, 25 bp, Homo sapien
agaaagcaaagaccagagagaacac

SEQ ID NO: 2387200 - DNA, 25 bp, Homo sapien
tgggcaacagaatgagatcctgact

SEQ ID NO: 2387201 - DNA, 25 bp, Homo sapien
taaactgcccaatcttgagcagttc

SEQ ID NO: 2387202 - DNA, 25 bp, Homo sapien
aactgcccaatcttgagcagttctt

SEQ ID NO: 2387203 - DNA, 25 bp, Homo sapien
ttataaactgcccaatcttgagcag

SEQ ID NO: 2387204 - DNA, 25 bp, Homo sapien
ttctttataaactgcccaatcttga

SEQ ID NO: 2387205 - DNA, 25 bp, Homo sapien
ggatgacaggtatcacgttcactga

SEQ ID NO: 2387206 - DNA, 25 bp, Homo sapien
gatgcctcatacgtgctacagaaaa

SEQ ID NO: 2387207 - DNA, 25 bp, Homo sapien
aaaagttatgtctctgataggcccc

SEQ ID NO: 2387208 - DNA, 25 bp, Homo sapien
agctttattcagattcccggaggat

SEQ ID NO: 2387209 - DNA, 25 bp, Homo sapien
acgcccgtccaaaagtgaattatat

SEQ ID NO: 2387210 - DNA, 25 bp, Homo sapien
caccacgcccgtccaaaagtgaatt

SEQ ID NO: 2387211 - DNA, 25 bp, Homo sapien
ccacgcccgtccaaaagtgaattat

SEQ ID NO: 2387212 - DNA, 25 bp, Homo sapien
gccaccacgcccgtccaaaagtgaa

SEQ ID NO: 2387213 - DNA, 25 bp, Homo sapien
tgtgaatatactggaatcactaaac

SEQ ID NO: 2387214 - DNA, 25 bp, Homo sapien
cagcttgaaccgcacactttttgtt

SEQ ID NO: 2387215 - DNA, 25 bp, Homo sapien
gccaccttcgtcttctgtattcaag

SEQ ID NO: 2387216 - DNA, 25 bp, Homo sapien
gtgtcctatgtctggctgtggtgat

SEQ ID NO: 2387217 - DNA, 25 bp, Homo sapien
gagagggaaggtggctgttgatctt

SEQ ID NO: 2387218 - DNA, 25 bp, Homo sapien
cttttctagaatgtcgtcaatcagc

SEQ ID NO: 2387219 - DNA, 25 bp, Homo sapien
accttcagggataccacctggccgg

SEQ ID NO: 2387220 - DNA, 25 bp, Homo sapien
atgtgagagggaaggtggctgttga

SEQ ID NO: 2387221 - DNA, 25 bp, Homo sapien
aacaggcacaggaggacgatggaca

SEQ ID NO: 2387222 - DNA, 25 bp, Homo sapien
gatacggaatgtctccaacacaaag

SEQ ID NO: 2387223 - DNA, 25 bp, Homo sapien
gatggatatattatgctaattgccc

SEQ ID NO: 2387224 - DNA, 25 bp, Homo sapien
caggtgcagtgctctataaggtgac

SEQ ID NO: 2387225 - DNA, 25 bp, Homo sapien
tgcggccccttctgcgaggtgaaat

SEQ ID NO: 2387226 - DNA, 25 bp, Homo sapien
catcgttgccaaagcgctggttgta

SEQ ID NO: 2387227 - DNA, 25 bp, Homo sapien
atctccaggatgtagcggcaggcac

SEQ ID NO: 2387228 - DNA, 25 bp, Homo sapien
tgatgcatcatgaagctctggccct

SEQ ID NO: 2387229 - DNA, 25 bp, Homo sapien
ctcactgggccaccatgaaagaact

SEQ ID NO: 2387230 - DNA, 25 bp, Homo sapien
ctgggaatgtcaccctttgaaacct

SEQ ID NO: 2387231 - DNA, 25 bp, Homo sapien
ctagatgacaggaagaatctccctg

SEQ ID NO: 2387232 - DNA, 25 bp, Homo sapien
gaatgtcaccctttgaaacctcact

SEQ ID NO: 2387233 - DNA, 25 bp, Homo sapien
gggcctgcacacagttgaatctgcc

SEQ ID NO: 2387234 - DNA, 25 bp, Homo sapien
tgcacacagttgaatctgccaccca

SEQ ID NO: 2387235 - DNA, 25 bp, Homo sapien
cacagttgaatctgccacccaggta

SEQ ID NO: 2387236 - DNA, 25 bp, Homo sapien
ggcctgcacacagttgaatctgcca

SEQ ID NO: 2387237 - DNA, 25 bp, Homo sapien
gcaacgctggtttcccttgataaca

SEQ ID NO: 2387238 - DNA, 25 bp, Homo sapien
ccttcagatgaaacgaggctcctgg

SEQ ID NO: 2387239 - DNA, 25 bp, Homo sapien
tctcatcgccccatctataggacgg

SEQ ID NO: 2387240 - DNA, 25 bp, Homo sapien
catttaagcatacggtcactgtcac

SEQ ID NO: 2387241 - DNA, 25 bp, Homo sapien
tcaggagcagagtctggtgtttgtt

SEQ ID NO: 2387242 - DNA, 25 bp, Homo sapien
cagagtctggtgtttgttctcggtc

SEQ ID NO: 2387243 - DNA, 25 bp, Homo sapien
gttctcggtcattctcttaaccagg

SEQ ID NO: 2387244 - DNA, 25 bp, Homo sapien
tcattctcttaaccaggtcaggaac

SEQ ID NO: 2387245 - DNA, 25 bp, Homo sapien
tcagtcagtgtctccgtccccttca

SEQ ID NO: 2387246 - DNA, 25 bp, Homo sapien
tgtctccgtccccttcactgccttc

SEQ ID NO: 2387247 - DNA, 25 bp, Homo sapien
cagtgtctccgtccccttcactgcc

SEQ ID NO: 2387248 - DNA, 25 bp, Homo sapien
gtcagtgtctccgtccccttcactg

SEQ ID NO: 2387249 - DNA, 25 bp, Homo sapien
ggtcctgaggttacaacgccggcat

SEQ ID NO: 2387250 - DNA, 25 bp, Homo sapien
tggctgcagcgatcccagcttcttg

SEQ ID NO: 2387251 - DNA, 25 bp, Homo sapien
acaggggtggcacatctgggcacac

SEQ ID NO: 2387252 - DNA, 25 bp, Homo sapien
gcacacactgtgagctgctcagagg

SEQ ID NO: 2387253 - DNA, 25 bp, Homo sapien
aaacagattcgagaaaggctgttcc

SEQ ID NO: 2387254 - DNA, 25 bp, Homo sapien
tgctgaggttcatctatgcaatgca

SEQ ID NO: 2387255 - DNA, 25 bp, Homo sapien
gagctgaaaacagattcgagaaagg

SEQ ID NO: 2387256 - DNA, 25 bp, Homo sapien
aaaaaaatagttctttacatgctga

SEQ ID NO: 2387257 - DNA, 25 bp, Homo sapien
agctgaactacagggcatgccgcca

SEQ ID NO: 2387258 - DNA, 25 bp, Homo sapien
gttcagccgtatctgttctcaacgg

SEQ ID NO: 2387259 - DNA, 25 bp, Homo sapien
tgctcatctctgtggacgaaaaaaa

SEQ ID NO: 2387260 - DNA, 25 bp, Homo sapien
tggcaatcagggcagcctcgacttc

SEQ ID NO: 2387261 - DNA, 25 bp, Homo sapien
cacgcctggccagtttttttggttg

SEQ ID NO: 2387262 - DNA, 25 bp, Homo sapien
cccctctcggggatgcggcaggtca

SEQ ID NO: 2387263 - DNA, 25 bp, Homo sapien
tgccacccctctcggggatgcggca

SEQ ID NO: 2387264 - DNA, 25 bp, Homo sapien
gggctgtctaggaagaggagcccgt

SEQ ID NO: 2387265 - DNA, 25 bp, Homo sapien
tgtctaggaagaggagcccgtggct

SEQ ID NO: 2387266 - DNA, 25 bp, Homo sapien
gggacagtgctgaggcgagtaccga

SEQ ID NO: 2387267 - DNA, 25 bp, Homo sapien
accgggacagtgctgaggcgagtac

SEQ ID NO: 2387268 - DNA, 25 bp, Homo sapien
ggacagtgctgaggcgagtaccgac

SEQ ID NO: 2387269 - DNA, 25 bp, Homo sapien
ccgggacagtgctgaggcgagtacc

SEQ ID NO: 2387270 - DNA, 25 bp, Homo sapien
aaaataaagtcctgtctatcccagg

SEQ ID NO: 2387271 - DNA, 25 bp, Homo sapien
accccaggatcatcaaaagtgattt

SEQ ID NO: 2387272 - DNA, 25 bp, Homo sapien
ttaaatgggtcacccaggccgggca

SEQ ID NO: 2387273 - DNA, 25 bp, Homo sapien
ataccccaggatcatcaaaagtgat

SEQ ID NO: 2387274 - DNA, 25 bp, Homo sapien
gtggactatggaatccaggcagggg

SEQ ID NO: 2387275 - DNA, 25 bp, Homo sapien
tggtggactatggaatccaggcagg

SEQ ID NO: 2387276 - DNA, 25 bp, Homo sapien
tggaagtggtggactatggaatcca

SEQ ID NO: 2387277 - DNA, 25 bp, Homo sapien
cctggaagtggtggactatggaatc

SEQ ID NO: 2387278 - DNA, 25 bp, Homo sapien
gtagctgcgcttccgcggcgccgct

SEQ ID NO: 2387279 - DNA, 25 bp, Homo sapien
ggctgctacggcgagccggaaggga

SEQ ID NO: 2387280 - DNA, 25 bp, Homo sapien
gagggcgggaggatggaagccgcgc

SEQ ID NO: 2387281 - DNA, 25 bp, Homo sapien
gtccgcgcgcccgtagctgcgcttc

SEQ ID NO: 2387282 - DNA, 25 bp, Homo sapien
tggctcaccatgcctgtaatcccag

SEQ ID NO: 2387283 - DNA, 25 bp, Homo sapien
catgcctgtaatcccagcaaagggg

SEQ ID NO: 2387284 - DNA, 25 bp, Homo sapien
caccatgcctgtaatcccagcaaag

SEQ ID NO: 2387285 - DNA, 25 bp, Homo sapien
atacaaaaaaaaaggccaggtgcag

SEQ ID NO: 2387286 - DNA, 25 bp, Homo sapien
ccaaagggcacattacagaagtacc

SEQ ID NO: 2387287 - DNA, 25 bp, Homo sapien
tcctatactagaacaggtgggatct

SEQ ID NO: 2387288 - DNA, 25 bp, Homo sapien
tggtggatcaacaggaaagcctccc

SEQ ID NO: 2387289 - DNA, 25 bp, Homo sapien
ggccccgctaaggaacatctgtata

SEQ ID NO: 2387290 - DNA, 25 bp, Homo sapien
agctggagaaatgtgtcctcagtca

SEQ ID NO: 2387291 - DNA, 25 bp, Homo sapien
ccacacgggagtgggtgggtaatct

SEQ ID NO: 2387292 - DNA, 25 bp, Homo sapien
ggcacagctggagaaatgtgtcctc

SEQ ID NO: 2387293 - DNA, 25 bp, Homo sapien
cagggtgggccacacgggagtgggt

SEQ ID NO: 2387294 - DNA, 25 bp, Homo sapien
cttctgtatccaatgtgtcgttctc

SEQ ID NO: 2387295 - DNA, 25 bp, Homo sapien
ctgcagctgatgctggacgttctgg

SEQ ID NO: 2387296 - DNA, 25 bp, Homo sapien
cgttctgggggccagtgccatggtg

SEQ ID NO: 2387297 - DNA, 25 bp, Homo sapien
ggccctggacctctgcagctgatgc

SEQ ID NO: 2387298 - DNA, 25 bp, Homo sapien
tgatgctggacgttctgggggccag

SEQ ID NO: 2387299 - DNA, 25 bp, Homo sapien
tgggttggggtgggccggctgctcc

SEQ ID NO: 2387300 - DNA, 25 bp, Homo sapien
gacgacagggcccacgctctgcagg

SEQ ID NO: 2387301 - DNA, 25 bp, Homo sapien
atctgctggtttcccccgacgacag

SEQ ID NO: 2387302 - DNA, 25 bp, Homo sapien
tgcccggttgcagggctcctattca

SEQ ID NO: 2387303 - DNA, 25 bp, Homo sapien
ggtgccgacgggcttgctgagggag

SEQ ID NO: 2387304 - DNA, 25 bp, Homo sapien
gtacccgggtgctggagctgaacct

SEQ ID NO: 2387305 - DNA, 25 bp, Homo sapien
tgctgctgatctgcggtggcaagtt

SEQ ID NO: 2387306 - DNA, 25 bp, Homo sapien
ctcatctgtgccatctccggagagg

SEQ ID NO: 2387307 - DNA, 25 bp, Homo sapien
tcccgtgttccccacagacgtgagt

SEQ ID NO: 2387308 - DNA, 25 bp, Homo sapien
tctgcctaagatatgcttgtaatgg

SEQ ID NO: 2387309 - DNA, 25 bp, Homo sapien
gtgttgcaagaaaaacagttcaatc

SEQ ID NO: 2387310 - DNA, 25 bp, Homo sapien
catgttcccttgaaagtgttgcaag

SEQ ID NO: 2387311 - DNA, 25 bp, Homo sapien
caatgtccaaatcattctgcctaag

SEQ ID NO: 2387312 - DNA, 25 bp, Homo sapien
tgcagaatagccactctgttatatg

SEQ ID NO: 2387313 - DNA, 25 bp, Homo sapien
tatatgtagggtcagaatggcaaag

SEQ ID NO: 2387314 - DNA, 25 bp, Homo sapien
atttgcagaatagccactctgttat

SEQ ID NO: 2387315 - DNA, 25 bp, Homo sapien
cactctgttatatgtagggtcagaa

SEQ ID NO: 2387316 - DNA, 25 bp, Homo sapien
catcctttcctgtcacaacctttac

SEQ ID NO: 2387317 - DNA, 25 bp, Homo sapien
gcagaaacctttggcggaagctggg

SEQ ID NO: 2387318 - DNA, 25 bp, Homo sapien
ttgctatagcaacgggagtcccagt

SEQ ID NO: 2387319 - DNA, 25 bp, Homo sapien
cctttggcggaagctgggttgctat

SEQ ID NO: 2387320 - DNA, 25 bp, Homo sapien
acatttgagaaccatcgaaaagtac

SEQ ID NO: 2387321 - DNA, 25 bp, Homo sapien
tacatttgagaaccatcgaaaagta

SEQ ID NO: 2387322 - DNA, 25 bp, Homo sapien
tggacaggcctggtagaaaccacct

SEQ ID NO: 2387323 - DNA, 25 bp, Homo sapien
catgacaacttgatactggactagg

SEQ ID NO: 2387324 - DNA, 25 bp, Homo sapien
tcattagcgatggagaacaaaggtc

SEQ ID NO: 2387325 - DNA, 25 bp, Homo sapien
gactgaaaagcaacccagactagga

SEQ ID NO: 2387326 - DNA, 25 bp, Homo sapien
taaacaggtccgtctctactgtgct

SEQ ID NO: 2387327 - DNA, 25 bp, Homo sapien
atcgcctgctgcctcttaaacaggt

SEQ ID NO: 2387328 - DNA, 25 bp, Homo sapien
ggtccgtctctactgtgcttccggc

SEQ ID NO: 2387329 - DNA, 25 bp, Homo sapien
tcttaaacaggtccgtctctactgt

SEQ ID NO: 2387330 - DNA, 25 bp, Homo sapien
ttggtgacccacttcaaggcgaggc

SEQ ID NO: 2387331 - DNA, 25 bp, Homo sapien
cttgtgcggtcggcattagttgctg

SEQ ID NO: 2387332 - DNA, 25 bp, Homo sapien
ttgctggagaggaacgcctgcgtcc

SEQ ID NO: 2387333 - DNA, 25 bp, Homo sapien
tgctggaaaactaccccttggtgac

SEQ ID NO: 2387334 - DNA, 25 bp, Homo sapien
gctgactctgcctctgtccagcgag

SEQ ID NO: 2387335 - DNA, 25 bp, Homo sapien
caagctggcagcgttctgcacggga

SEQ ID NO: 2387336 - DNA, 25 bp, Homo sapien
gctgtgcaaactgcagcgcagagga

SEQ ID NO: 2387337 - DNA, 25 bp, Homo sapien
cccgtggaggggtcatactgctgct

SEQ ID NO: 2387338 - DNA, 25 bp, Homo sapien
cagggatgggaacattgggctgctg

SEQ ID NO: 2387339 - DNA, 25 bp, Homo sapien
gctgctgagtcttcaccgggatttg

SEQ ID NO: 2387340 - DNA, 25 bp, Homo sapien
agtcttcaccgggatttggagctgt

SEQ ID NO: 2387341 - DNA, 25 bp, Homo sapien
ttcaccgggatttggagctgtgtct

SEQ ID NO: 2387342 - DNA, 25 bp, Homo sapien
tgggaacgtggagggccagctgtgc

SEQ ID NO: 2387343 - DNA, 25 bp, Homo sapien
ggaacgtggagggccagctgtgcag

SEQ ID NO: 2387344 - DNA, 25 bp, Homo sapien
gggaacgtggagggccagctgtgca

SEQ ID NO: 2387345 - DNA, 25 bp, Homo sapien
gaacgtggagggccagctgtgcagg

SEQ ID NO: 2387346 - DNA, 25 bp, Homo sapien
ctgtggcagggaggaaagctgagag

SEQ ID NO: 2387347 - DNA, 25 bp, Homo sapien
ggcagggaggaaagctgagaggcct

SEQ ID NO: 2387348 - DNA, 25 bp, Homo sapien
cagggaggaaagctgagaggcctgc

SEQ ID NO: 2387349 - DNA, 25 bp, Homo sapien
gggaggaaagctgagaggcctgcac

SEQ ID NO: 2387350 - DNA, 25 bp, Homo sapien
taacacacaggtagccagcaaatcc

SEQ ID NO: 2387351 - DNA, 25 bp, Homo sapien
taatatcatagagccaaataaaact

SEQ ID NO: 2387352 - DNA, 25 bp, Homo sapien
aaattacagtgtggtgtgacactct

SEQ ID NO: 2387353 - DNA, 25 bp, Homo sapien
taaaactgtattgcaagtactgaat

SEQ ID NO: 2387354 - DNA, 25 bp, Homo sapien
cacactggtagaatgggtcgctgcc

SEQ ID NO: 2387355 - DNA, 25 bp, Homo sapien
tcacatggagctagggtcaagcccc

SEQ ID NO: 2387356 - DNA, 25 bp, Homo sapien
tacctgagggttgctaggcagatca

SEQ ID NO: 2387357 - DNA, 25 bp, Homo sapien
gagggacccctggtactaagagtga

SEQ ID NO: 2387358 - DNA, 25 bp, Homo sapien
agcagagatcgtgtcactgcattcc

SEQ ID NO: 2387359 - DNA, 25 bp, Homo sapien
agcctgggtgacagagccagaccct

SEQ ID NO: 2387360 - DNA, 25 bp, Homo sapien
tgagcagagatcgtgtcactgcatt

SEQ ID NO: 2387361 - DNA, 25 bp, Homo sapien
tgacagagccagaccctgtttcaaa

SEQ ID NO: 2387362 - DNA, 25 bp, Homo sapien
agtggtgaataagagatagctatta

SEQ ID NO: 2387363 - DNA, 25 bp, Homo sapien
tgcttgacaccacacctcacaagtg

SEQ ID NO: 2387364 - DNA, 25 bp, Homo sapien
tcgttatatacttaagactttgcca

SEQ ID NO: 2387365 - DNA, 25 bp, Homo sapien
taaatcgctcatcacagtgcttgac

SEQ ID NO: 2387366 - DNA, 25 bp, Homo sapien
cgcgagggacgaggtagaagaggtg

SEQ ID NO: 2387367 - DNA, 25 bp, Homo sapien
tccacagggagccttgtcgatgcta

SEQ ID NO: 2387368 - DNA, 25 bp, Homo sapien
aggcgcgagggacgaggtagaagag

SEQ ID NO: 2387369 - DNA, 25 bp, Homo sapien
cagggagccttgtcgatgctaccat

SEQ ID NO: 2387370 - DNA, 25 bp, Homo sapien
tagtgccttattggtggctgaggaa

SEQ ID NO: 2387371 - DNA, 25 bp, Homo sapien
agggtcctgggccggagccactcac

SEQ ID NO: 2387372 - DNA, 25 bp, Homo sapien
ggaagtgactggagatagtgcctta

SEQ ID NO: 2387373 - DNA, 25 bp, Homo sapien
tatttactggagaggatcgagcagg

SEQ ID NO: 2387374 - DNA, 25 bp, Homo sapien
tcctgagaactgtcttgggacgagg

SEQ ID NO: 2387375 - DNA, 25 bp, Homo sapien
tgttctgtcagcgtatcctgagaac

SEQ ID NO: 2387376 - DNA, 25 bp, Homo sapien
tcttgggacgaggtggcattctgag

SEQ ID NO: 2387377 - DNA, 25 bp, Homo sapien
tctgtcagcgtatcctgagaactgt

SEQ ID NO: 2387378 - DNA, 25 bp, Homo sapien
tcaaaggtaagattcgaacacaaag

SEQ ID NO: 2387379 - DNA, 25 bp, Homo sapien
caaggtcccagtttaatatcaaagg

SEQ ID NO: 2387380 - DNA, 25 bp, Homo sapien
ggtctaggagcatgtgacccttcca

SEQ ID NO: 2387381 - DNA, 25 bp, Homo sapien
tactatgcaaaaggctcagtcaggc

SEQ ID NO: 2387382 - DNA, 25 bp, Homo sapien
tggggtcggcatgtgatgagtgtgt

SEQ ID NO: 2387383 - DNA, 25 bp, Homo sapien
ggtcggcatgtgatgagtgtgttcc

SEQ ID NO: 2387384 - DNA, 25 bp, Homo sapien
ctgtagatgatacatgggggatggt

SEQ ID NO: 2387385 - DNA, 25 bp, Homo sapien
tggtggggtcggcatgtgatgagtg

SEQ ID NO: 2387386 - DNA, 25 bp, Homo sapien
agcagatagtcccagtgggacttgg

SEQ ID NO: 2387387 - DNA, 25 bp, Homo sapien
gctttcctcagctccgcaatgcgct

SEQ ID NO: 2387388 - DNA, 25 bp, Homo sapien
tcagctccgcaatgcgctgatgcac

SEQ ID NO: 2387389 - DNA, 25 bp, Homo sapien
ccgcaatgcgctgatgcacctggtt

SEQ ID NO: 2387390 - DNA, 25 bp, Homo sapien
ccacttacaccactgcaaactcaag

SEQ ID NO: 2387391 - DNA, 25 bp, Homo sapien
agcagctccacgcattccaacccac

SEQ ID NO: 2387392 - DNA, 25 bp, Homo sapien
ctccccaccacttacaccactgcaa

SEQ ID NO: 2387393 - DNA, 25 bp, Homo sapien
cccaccacttacaccactgcaaact

SEQ ID NO: 2387394 - DNA, 25 bp, Homo sapien
atatgaacaaagaccctagggccca

SEQ ID NO: 2387395 - DNA, 25 bp, Homo sapien
gaaaattctgggtacggagtggaca

SEQ ID NO: 2387396 - DNA, 25 bp, Homo sapien
gcttgatcccaacaacgcatgctgg

SEQ ID NO: 2387397 - DNA, 25 bp, Homo sapien
tagtgttagcagtagggcctccaga

SEQ ID NO: 2387398 - DNA, 25 bp, Homo sapien
cggagctgcttctcctcgtgatggc

SEQ ID NO: 2387399 - DNA, 25 bp, Homo sapien
tggaggcggctatccgcctcagtct

SEQ ID NO: 2387400 - DNA, 25 bp, Homo sapien
gatggcgcaccacagttctaacgag

SEQ ID NO: 2387401 - DNA, 25 bp, Homo sapien
aaagcactctatctcccgggccgtg

SEQ ID NO: 2387402 - DNA, 25 bp, Homo sapien
cttctaattctactcgtagttttat

SEQ ID NO: 2387403 - DNA, 25 bp, Homo sapien
tcttctaattctactcgtagtttta

SEQ ID NO: 2387404 - DNA, 25 bp, Homo sapien
tcctgtaatgcgtcaaatcctttag

SEQ ID NO: 2387405 - DNA, 25 bp, Homo sapien
aactttcctgtaatgcgtcaaatcc

SEQ ID NO: 2387406 - DNA, 25 bp, Homo sapien
cagagaactttcctgtaatgcgtca

SEQ ID NO: 2387407 - DNA, 25 bp, Homo sapien
aatgcgtcaaatcctttaggtctca

SEQ ID NO: 2387408 - DNA, 25 bp, Homo sapien
catcagtcaaagatatgctagcttt

SEQ ID NO: 2387409 - DNA, 25 bp, Homo sapien
cgtcatcagtcaaagatatgctagc

SEQ ID NO: 2387410 - DNA, 25 bp, Homo sapien
ttcgtcatcagtcaaagatatgcta

SEQ ID NO: 2387411 - DNA, 25 bp, Homo sapien
cagtcaaagatatgctagcttttct

SEQ ID NO: 2387412 - DNA, 25 bp, Homo sapien
tgaagatgacaagactaaaccccaa

SEQ ID NO: 2387413 - DNA, 25 bp, Homo sapien
ctggataaatacaaaggttgagctt

SEQ ID NO: 2387414 - DNA, 25 bp, Homo sapien
tgagctttccaaccagctgaagatg

SEQ ID NO: 2387415 - DNA, 25 bp, Homo sapien
aaccccaagtcgctgcagctctgtg

SEQ ID NO: 2387416 - DNA, 25 bp, Homo sapien
agagccccactgtggaaagcccaca

SEQ ID NO: 2387417 - DNA, 25 bp, Homo sapien
tgcagagccccactgtggaaagccc

SEQ ID NO: 2387418 - DNA, 25 bp, Homo sapien
cctgcagagccccactgtggaaagc

SEQ ID NO: 2387419 - DNA, 25 bp, Homo sapien
cttcctgcagagccccactgtggaa

SEQ ID NO: 2387420 - DNA, 25 bp, Homo sapien
ttctgtttggtggtccacaacgcct

SEQ ID NO: 2387421 - DNA, 25 bp, Homo sapien
ggtggtccacaacgccttcatttgc

SEQ ID NO: 2387422 - DNA, 25 bp, Homo sapien
tgtttggtggtccacaacgccttca

SEQ ID NO: 2387423 - DNA, 25 bp, Homo sapien
tttggtggtccacaacgccttcatt

SEQ ID NO: 2387424 - DNA, 25 bp, Homo sapien
gaacttacctaaccagacatcaaga

SEQ ID NO: 2387425 - DNA, 25 bp, Homo sapien
tatggaaagctatttaggaagacct

SEQ ID NO: 2387426 - DNA, 25 bp, Homo sapien
gaaacttgatgagctgattctagca

SEQ ID NO: 2387427 - DNA, 25 bp, Homo sapien
tttgatcatagactggaaaggctga

SEQ ID NO: 2387428 - DNA, 25 bp, Homo sapien
caatgttgtccaccactagcacgaa

SEQ ID NO: 2387429 - DNA, 25 bp, Homo sapien
cgtaggacacgtcaggccaaggctt

SEQ ID NO: 2387430 - DNA, 25 bp, Homo sapien
tctgccccacagagtatacagcgct

SEQ ID NO: 2387431 - DNA, 25 bp, Homo sapien
tgaccgtaggtgacttccaagactc

SEQ ID NO: 2387432 - DNA, 25 bp, Homo sapien
ggaaggcgccttcgtacagcttcat

SEQ ID NO: 2387433 - DNA, 25 bp, Homo sapien
agaactcggcaggaaggcgccttcg

SEQ ID NO: 2387434 - DNA, 25 bp, Homo sapien
gcgccttcgtacagcttcatcaggt

SEQ ID NO: 2387435 - DNA, 25 bp, Homo sapien
ctgagaactcggcaggaaggcgcct

SEQ ID NO: 2387436 - DNA, 25 bp, Homo sapien
agtgacgtccgcaatgtccttggcg

SEQ ID NO: 2387437 - DNA, 25 bp, Homo sapien
tgcccttcggcaggatggcttcagc

SEQ ID NO: 2387438 - DNA, 25 bp, Homo sapien
gatattcatcctctcggcagctttg

SEQ ID NO: 2387439 - DNA, 25 bp, Homo sapien
gcgagtcgatgagaaccaagtcctt

SEQ ID NO: 2387440 - DNA, 25 bp, Homo sapien
gagccccatacaacaaagatggagc

SEQ ID NO: 2387441 - DNA, 25 bp, Homo sapien
cttcgttacaagctaggtgggcaaa

SEQ ID NO: 2387442 - DNA, 25 bp, Homo sapien
ggccaatcttctgataatctctgag

SEQ ID NO: 2387443 - DNA, 25 bp, Homo sapien
gatctgcactgttttacccagccca

SEQ ID NO: 2387444 - DNA, 25 bp, Homo sapien
gctcccacttgagtatgttacaact

SEQ ID NO: 2387445 - DNA, 25 bp, Homo sapien
tatgagaggattttgagtccgggac

SEQ ID NO: 2387446 - DNA, 25 bp, Homo sapien
ctgtggctgccaatatatgagagga

SEQ ID NO: 2387447 - DNA, 25 bp, Homo sapien
caacgtttcaattcaagctcccact

SEQ ID NO: 2387448 - DNA, 25 bp, Homo sapien
tggaagctgttgggttcggcccact

SEQ ID NO: 2387449 - DNA, 25 bp, Homo sapien
tccagcgcactcgtgtgaaggcggt

SEQ ID NO: 2387450 - DNA, 25 bp, Homo sapien
agtgcctctcggtcatgcccttcac

SEQ ID NO: 2387451 - DNA, 25 bp, Homo sapien
ttcacgcgctgcatctcatcaatga

SEQ ID NO: 2387452 - DNA, 25 bp, Homo sapien
tctgcagggtgaaaaccgcttccca

SEQ ID NO: 2387453 - DNA, 25 bp, Homo sapien
agtaatcctggctctcttcactggg

SEQ ID NO: 2387454 - DNA, 25 bp, Homo sapien
cagagctccaggaaggtattgtgca

SEQ ID NO: 2387455 - DNA, 25 bp, Homo sapien
gtgtaaccttatgaccactttatgg

SEQ ID NO: 2387456 - DNA, 25 bp, Homo sapien
ttgtgcagcggcgagtcgatcagaa

SEQ ID NO: 2387457 - DNA, 25 bp, Homo sapien
ggcgacacttcaaaacatgctcata

SEQ ID NO: 2387458 - DNA, 25 bp, Homo sapien
ccaggttgcaggataacgtcctcgt

SEQ ID NO: 2387459 - DNA, 25 bp, Homo sapien
cgtcctcgtataaggctttttgtcg

SEQ ID NO: 2387460 - DNA, 25 bp, Homo sapien
tgtcggttagaaaggcgacacttca

SEQ ID NO: 2387461 - DNA, 25 bp, Homo sapien
caggattaagcatgctgcattcaca

SEQ ID NO: 2387462 - DNA, 25 bp, Homo sapien
cctgcctctcgagggtgcccaggct

SEQ ID NO: 2387463 - DNA, 25 bp, Homo sapien
atgctgcattcacaggcacctgcct

SEQ ID NO: 2387464 - DNA, 25 bp, Homo sapien
tggcgagcccatgagtgcacgccct

SEQ ID NO: 2387465 - DNA, 25 bp, Homo sapien
cttccctcctgaaatctccactcac

SEQ ID NO: 2387466 - DNA, 25 bp, Homo sapien
tggtaacagaaaggcaacttgccct

SEQ ID NO: 2387467 - DNA, 25 bp, Homo sapien
tggagctcgtggtacagaaacatgg

SEQ ID NO: 2387468 - DNA, 25 bp, Homo sapien
aatggctgagacgacggatggttcc

SEQ ID NO: 2387469 - DNA, 25 bp, Homo sapien
cccatatgaactggctggtaacaga

SEQ ID NO: 2387470 - DNA, 25 bp, Homo sapien
tcataccgagtgctctgaaagagaa

SEQ ID NO: 2387471 - DNA, 25 bp, Homo sapien
gtgagcgcagcagagtaaagcccct

SEQ ID NO: 2387472 - DNA, 25 bp, Homo sapien
agctctgacgcctggtcctacactg

SEQ ID NO: 2387473 - DNA, 25 bp, Homo sapien
gagctgacggaaagacagccactcc

SEQ ID NO: 2387474 - DNA, 25 bp, Homo sapien
gatgcggacggatactccagtggcc

SEQ ID NO: 2387475 - DNA, 25 bp, Homo sapien
ggacgttgacaaagtgcccgctctt

SEQ ID NO: 2387476 - DNA, 25 bp, Homo sapien
gccttcaggattagagatgcggacg

SEQ ID NO: 2387477 - DNA, 25 bp, Homo sapien
tgcagccgcacaaggatgctcagga

SEQ ID NO: 2387478 - DNA, 25 bp, Homo sapien
tagacagcaactctgcctcgtgacg

SEQ ID NO: 2387479 - DNA, 25 bp, Homo sapien
tcctccatgagtttccgcggtatct

SEQ ID NO: 2387480 - DNA, 25 bp, Homo sapien
ttctaagccgatgagatcaaacata

SEQ ID NO: 2387481 - DNA, 25 bp, Homo sapien
ggctgctgaagtggagatttcctcc

SEQ ID NO: 2387482 - DNA, 25 bp, Homo sapien
tactgatgaggggacggtgatccac

SEQ ID NO: 2387483 - DNA, 25 bp, Homo sapien
ccagtgaagccaaatacagaagtgc

SEQ ID NO: 2387484 - DNA, 25 bp, Homo sapien
gaagtgccaacaagaaagactgcag

SEQ ID NO: 2387485 - DNA, 25 bp, Homo sapien
ggacggtgatccactcaaagtcccc

SEQ ID NO: 2387486 - DNA, 25 bp, Homo sapien
tatggtacatccacccagattcctg

SEQ ID NO: 2387487 - DNA, 25 bp, Homo sapien
cctgggaatacaagggtgaatgctg

SEQ ID NO: 2387488 - DNA, 25 bp, Homo sapien
aatgtagatagaaaacaacgcatct

SEQ ID NO: 2387489 - DNA, 25 bp, Homo sapien
gactaagtacaccaaagtggtatgg

SEQ ID NO: 2387490 - DNA, 25 bp, Homo sapien
gaccctcgggcttctggccatactg

SEQ ID NO: 2387491 - DNA, 25 bp, Homo sapien
acggtgcgaccctcgggcttctggc

SEQ ID NO: 2387492 - DNA, 25 bp, Homo sapien
ctggggaaagccacggtgcgaccct

SEQ ID NO: 2387493 - DNA, 25 bp, Homo sapien
aagccacggtgcgaccctcgggctt

SEQ ID NO: 2387494 - DNA, 25 bp, Homo sapien
ctgtggagcagcagaggccgtggtg

SEQ ID NO: 2387495 - DNA, 25 bp, Homo sapien
aggccgtggtgggggctgccgtccg

SEQ ID NO: 2387496 - DNA, 25 bp, Homo sapien
ggctgccgtccggggcgggtgagtg

SEQ ID NO: 2387497 - DNA, 25 bp, Homo sapien
gtggagcagcagaggccgtggtggg

SEQ ID NO: 2387498 - DNA, 25 bp, Homo sapien
agaacgtggcgatgggcggccgtcc

SEQ ID NO: 2387499 - DNA, 25 bp, Homo sapien
cttttgcctccggattggcagagaa

SEQ ID NO: 2387500 - DNA, 25 bp, Homo sapien
cctccggattggcagagaacgtggc

SEQ ID NO: 2387501 - DNA, 25 bp, Homo sapien
tgcctccggattggcagagaacgtg

SEQ ID NO: 2387502 - DNA, 25 bp, Homo sapien
tctgggcccgcagtttcgcaggatg

SEQ ID NO: 2387503 - DNA, 25 bp, Homo sapien
cctgagaggtctgaaacggggctgc

SEQ ID NO: 2387504 - DNA, 25 bp, Homo sapien
tcgtggagcactggcggaagcctga

SEQ ID NO: 2387505 - DNA, 25 bp, Homo sapien
gatgggccgggctagcggctgtgct

SEQ ID NO: 2387506 - DNA, 25 bp, Homo sapien
gtcaccggcgtctctggctgagcca

SEQ ID NO: 2387507 - DNA, 25 bp, Homo sapien
gctctgtggtcctgtgatggatgcc

SEQ ID NO: 2387508 - DNA, 25 bp, Homo sapien
tgtgacagggtgaacttgctgccct

SEQ ID NO: 2387509 - DNA, 25 bp, Homo sapien
actgcagtgtcaccggcgtctctgg

SEQ ID NO: 2387510 - DNA, 25 bp, Homo sapien
tgagggaaggtagccgctgaggctg

SEQ ID NO: 2387511 - DNA, 25 bp, Homo sapien
ctgaggctgctgtcgaggaaggtga

SEQ ID NO: 2387512 - DNA, 25 bp, Homo sapien
ggctgctgtgggtgttccttgagcc

SEQ ID NO: 2387513 - DNA, 25 bp, Homo sapien
ggtagccgctgaggctgctgtcgag

SEQ ID NO: 2387514 - DNA, 25 bp, Homo sapien
tccaaacagtacaaaaataagttga

SEQ ID NO: 2387515 - DNA, 25 bp, Homo sapien
caaacagtacaaaaataagttgaca

SEQ ID NO: 2387516 - DNA, 25 bp, Homo sapien
gtacaaaaataagttgacaaactga

SEQ ID NO: 2387517 - DNA, 25 bp, Homo sapien
taagttgacaaactgaaaatcaaat

SEQ ID NO: 2387518 - DNA, 25 bp, Homo sapien
ctgcaatcataggtccactaggtgt

SEQ ID NO: 2387519 - DNA, 25 bp, Homo sapien
ggtccactaggtgtcaatgacaggc

SEQ ID NO: 2387520 - DNA, 25 bp, Homo sapien
aatgacaggcatgtgtacatcacag

SEQ ID NO: 2387521 - DNA, 25 bp, Homo sapien
gtcaatgacaggcatgtgtacatca

SEQ ID NO: 2387522 - DNA, 25 bp, Homo sapien
tcccagggcgccgtgcacagcgccc

SEQ ID NO: 2387523 - DNA, 25 bp, Homo sapien
agacacggtctgcatcaccacaggg

SEQ ID NO: 2387524 - DNA, 25 bp, Homo sapien
acagcgcccgcctgagacacggtct

SEQ ID NO: 2387525 - DNA, 25 bp, Homo sapien
gcggacacgatctggaggacgctgc

SEQ ID NO: 2387526 - DNA, 25 bp, Homo sapien
agccaaggcattcaccgccacgcgg

SEQ ID NO: 2387527 - DNA, 25 bp, Homo sapien
agaagctggtttggaggccgttccg

SEQ ID NO: 2387528 - DNA, 25 bp, Homo sapien
cgttccgggttctcctacagccaag

SEQ ID NO: 2387529 - DNA, 25 bp, Homo sapien
gggttctcctacagccaaggcattc

SEQ ID NO: 2387530 - DNA, 25 bp, Homo sapien
caggcgctctttcaagagtctggtc

SEQ ID NO: 2387531 - DNA, 25 bp, Homo sapien
tctctgccatagactggagcttgag

SEQ ID NO: 2387532 - DNA, 25 bp, Homo sapien
gcgccgctcgttgactaaataaatc

SEQ ID NO: 2387533 - DNA, 25 bp, Homo sapien
taaataaatctgatccaggcgctct

SEQ ID NO: 2387534 - DNA, 25 bp, Homo sapien
tgaagtgtaactgtgcgctggcccg

SEQ ID NO: 2387535 - DNA, 25 bp, Homo sapien
cttggactttctgaggatgaagtgt

SEQ ID NO: 2387536 - DNA, 25 bp, Homo sapien
gacaaagcgtcaacatcagctcact

SEQ ID NO: 2387537 - DNA, 25 bp, Homo sapien
tgcagagactctccacaccgacaaa

SEQ ID NO: 2387538 - DNA, 25 bp, Homo sapien
ggaagtacggcgcagcgtgctctct

SEQ ID NO: 2387539 - DNA, 25 bp, Homo sapien
tgccaccaccggaggaatcacaaag

SEQ ID NO: 2387540 - DNA, 25 bp, Homo sapien
gatcctcattctgtggctgtacagg

SEQ ID NO: 2387541 - DNA, 25 bp, Homo sapien
cagggaactgcagcaggcgtggagc

SEQ ID NO: 2387542 - DNA, 25 bp, Homo sapien
aacgaatcacatcaagagcgcctca

SEQ ID NO: 2387543 - DNA, 25 bp, Homo sapien
gccggtgcagctcccgcacgggcca

SEQ ID NO: 2387544 - DNA, 25 bp, Homo sapien
gaatcacatcaagagcgcctcatca

SEQ ID NO: 2387545 - DNA, 25 bp, Homo sapien
ggaaacgaatcacatcaagagcgcc

SEQ ID NO: 2387546 - DNA, 25 bp, Homo sapien
catcgattcttacataggtgaggta

SEQ ID NO: 2387547 - DNA, 25 bp, Homo sapien
ggtgaggtaatggaagttcaagaac

SEQ ID NO: 2387548 - DNA, 25 bp, Homo sapien
tcatctgtgataaaatcagcacccg

SEQ ID NO: 2387549 - DNA, 25 bp, Homo sapien
agcacccgacgtccttcagatttca

SEQ ID NO: 2387550 - DNA, 25 bp, Homo sapien
catcagagacaatgtaaacaatgtg

SEQ ID NO: 2387551 - DNA, 25 bp, Homo sapien
tgacccatcagagacaatgtaaaca

SEQ ID NO: 2387552 - DNA, 25 bp, Homo sapien
cccatcagagacaatgtaaacaatg

SEQ ID NO: 2387553 - DNA, 25 bp, Homo sapien
tcagagacaatgtaaacaatgtgct

SEQ ID NO: 2387554 - DNA, 25 bp, Homo sapien
agggcagcaacttggttttgcgctg

SEQ ID NO: 2387555 - DNA, 25 bp, Homo sapien
ctgacaagggcctagcacaccacgt

SEQ ID NO: 2387556 - DNA, 25 bp, Homo sapien
gacactgggccatgctactaaaact

SEQ ID NO: 2387557 - DNA, 25 bp, Homo sapien
caccacgtgaaatgctgggcagttt

SEQ ID NO: 2387558 - DNA, 25 bp, Homo sapien
aaaaagtccctggagtaaggctgag

SEQ ID NO: 2387559 - DNA, 25 bp, Homo sapien
aacagcgtcttactggggagggata

SEQ ID NO: 2387560 - DNA, 25 bp, Homo sapien
ctcatctatcctcaggcaatgccag

SEQ ID NO: 2387561 - DNA, 25 bp, Homo sapien
gatatgtgctttctcatctatcctc

SEQ ID NO: 2387562 - DNA, 25 bp, Homo sapien
aaaaaatccgcctgtctctgttgaa

SEQ ID NO: 2387563 - DNA, 25 bp, Homo sapien
gagaatggcacaaaaaatccgcctg

SEQ ID NO: 2387564 - DNA, 25 bp, Homo sapien
gcctgtctctgttgaaactcctcat

SEQ ID NO: 2387565 - DNA, 25 bp, Homo sapien
ggcacaaaaaatccgcctgtctctg

SEQ ID NO: 2387566 - DNA, 25 bp, Homo sapien
gtcataaaacacgacggtgtccgcc

SEQ ID NO: 2387567 - DNA, 25 bp, Homo sapien
taaaacacgacggtgtccgcctcta

SEQ ID NO: 2387568 - DNA, 25 bp, Homo sapien
tgtccgcctctacaaggtttatacc

SEQ ID NO: 2387569 - DNA, 25 bp, Homo sapien
catccatcactggattcaggtcatt

SEQ ID NO: 2387570 - DNA, 25 bp, Homo sapien
ggatgtctttgcatctcccgatcct

SEQ ID NO: 2387571 - DNA, 25 bp, Homo sapien
tttgcatctcccgatcctatcgcac

SEQ ID NO: 2387572 - DNA, 25 bp, Homo sapien
gatgtctttgcatctcccgatccta

SEQ ID NO: 2387573 - DNA, 25 bp, Homo sapien
ctttgcatctcccgatcctatcgca

SEQ ID NO: 2387574 - DNA, 25 bp, Homo sapien
tctcctgatcctatcccccgcaggc

SEQ ID NO: 2387575 - DNA, 25 bp, Homo sapien
ttgcatctcctgatcctatcccccg

SEQ ID NO: 2387576 - DNA, 25 bp, Homo sapien
gcatctcctgatcctatcccccgca

SEQ ID NO: 2387577 - DNA, 25 bp, Homo sapien
atctcctgatcctatcccccgcagg

SEQ ID NO: 2387578 - DNA, 25 bp, Homo sapien
catgatggcggccttcatcaggacg

SEQ ID NO: 2387579 - DNA, 25 bp, Homo sapien
caacagcacccttatgcagtttggg

SEQ ID NO: 2387580 - DNA, 25 bp, Homo sapien
atgggtgccgggctatctgccccga

SEQ ID NO: 2387581 - DNA, 25 bp, Homo sapien
tttgtaacatgcgaaatccccatgg

SEQ ID NO: 2387582 - DNA, 25 bp, Homo sapien
cgttccgtgtgaacctgggtgtgtt

SEQ ID NO: 2387583 - DNA, 25 bp, Homo sapien
cgttccgtgtgaacctgggtgtgtc

SEQ ID NO: 2387584 - DNA, 25 bp, Homo sapien
gggtgtgttgttccatgatgctcca

SEQ ID NO: 2387585 - DNA, 25 bp, Homo sapien
tccttcccacgacgttccgtgtgaa

SEQ ID NO: 2387586 - DNA, 25 bp, Homo sapien
ctgagcagccacttctcggatcaga

SEQ ID NO: 2387587 - DNA, 25 bp, Homo sapien
ctcttcaatggaattgccactcaca

SEQ ID NO: 2387588 - DNA, 25 bp, Homo sapien
ttctcggatcagatctttagttcca

SEQ ID NO: 2387589 - DNA, 25 bp, Homo sapien
ttcaatggaattgccactcacaagc

SEQ ID NO: 2387590 - DNA, 25 bp, Homo sapien
gccagcatcatccatgggagaataa

SEQ ID NO: 2387591 - DNA, 25 bp, Homo sapien
actcctcagctttgaccgggaagcc

SEQ ID NO: 2387592 - DNA, 25 bp, Homo sapien
caatggtttccgtgacagaaggttc

SEQ ID NO: 2387593 - DNA, 25 bp, Homo sapien
tgaaaggtcttgcaattttgggtgc

SEQ ID NO: 2387594 - DNA, 25 bp, Homo sapien
agacccgatgcacaccactgcccac

SEQ ID NO: 2387595 - DNA, 25 bp, Homo sapien
ctcagacccgatgcacaccactgcc

SEQ ID NO: 2387596 - DNA, 25 bp, Homo sapien
acccgatgcacaccactgcccacag

SEQ ID NO: 2387597 - DNA, 25 bp, Homo sapien
ccgatgcacaccactgcccacagct

SEQ ID NO: 2387598 - DNA, 25 bp, Homo sapien
caggcaaagcgtgccagggcaccca

SEQ ID NO: 2387599 - DNA, 25 bp, Homo sapien
agagctgagcactgatgcaggcaaa

SEQ ID NO: 2387600 - DNA, 25 bp, Homo sapien
gcaggccccatggaagagctgagca

SEQ ID NO: 2387601 - DNA, 25 bp, Homo sapien
gcacccagggccaaggaagcttgga

SEQ ID NO: 2387602 - DNA, 25 bp, Homo sapien
cacggcatgttctcagagtctgatg

SEQ ID NO: 2387603 - DNA, 25 bp, Homo sapien
tgacagagcatcagtgtgtggtccc

SEQ ID NO: 2387604 - DNA, 25 bp, Homo sapien
ggatggttcttcatcacacggcatg

SEQ ID NO: 2387605 - DNA, 25 bp, Homo sapien
cctcctgtgcggacttctgggcatc

SEQ ID NO: 2387606 - DNA, 25 bp, Homo sapien
gctcaatagaagtatggaataattc

SEQ ID NO: 2387607 - DNA, 25 bp, Homo sapien
caatagaagtatggaataattccag

SEQ ID NO: 2387608 - DNA, 25 bp, Homo sapien
tagaagtatggaataattccaggta

SEQ ID NO: 2387609 - DNA, 25 bp, Homo sapien
gaagtatggaataattccaggtaat

SEQ ID NO: 2387610 - DNA, 25 bp, Homo sapien
ctgcagggtcttcaggttccagaac

SEQ ID NO: 2387611 - DNA, 25 bp, Homo sapien
aactcccatgccctcactgcagtca

SEQ ID NO: 2387612 - DNA, 25 bp, Homo sapien
gcagggtcttcaggttccagaactc

SEQ ID NO: 2387613 - DNA, 25 bp, Homo sapien
aggttccagaactcccatgccctca

SEQ ID NO: 2387614 - DNA, 25 bp, Homo sapien
catgctgtaggcatcctctcgcgtg

SEQ ID NO: 2387615 - DNA, 25 bp, Homo sapien
gcatcctctcgcgtgtaggtcagga

SEQ ID NO: 2387616 - DNA, 25 bp, Homo sapien
cgcgtgtaggtcaggagctccgcct

SEQ ID NO: 2387617 - DNA, 25 bp, Homo sapien
tgtaggcatcctctcgcgtgtaggt

SEQ ID NO: 2387618 - DNA, 25 bp, Homo sapien
taagtgaggttgtgttgatatgaga

SEQ ID NO: 2387619 - DNA, 25 bp, Homo sapien
tgtacacagactttgaacaagccaa

SEQ ID NO: 2387620 - DNA, 25 bp, Homo sapien
agccaaacatggctgcacaagtgcc

SEQ ID NO: 2387621 - DNA, 25 bp, Homo sapien
cagagctggtcaatatctaactgac

SEQ ID NO: 2387622 - DNA, 25 bp, Homo sapien
tctgcccatcgacatcttcgtagac

SEQ ID NO: 2387623 - DNA, 25 bp, Homo sapien
gcccatcgacatcttcgtagacata

SEQ ID NO: 2387624 - DNA, 25 bp, Homo sapien
ccatcgacatcttcgtagacatact

SEQ ID NO: 2387625 - DNA, 25 bp, Homo sapien
tctgtctgcccatcgacatcttcgt

SEQ ID NO: 2387626 - DNA, 25 bp, Homo sapien
gtggcttcatacatgagacacatga

SEQ ID NO: 2387627 - DNA, 25 bp, Homo sapien
tctgttttgtgtcgcttccgctcct

SEQ ID NO: 2387628 - DNA, 25 bp, Homo sapien
tgaccgagtcgaggtagatgtcgct

SEQ ID NO: 2387629 - DNA, 25 bp, Homo sapien
tagatgtcgctgtcgtcctgcggcg

SEQ ID NO: 2387630 - DNA, 25 bp, Homo sapien
tggtcaattagaatgaaacacgaag

SEQ ID NO: 2387631 - DNA, 25 bp, Homo sapien
agaatgaaacacgaaggtttcctca

SEQ ID NO: 2387632 - DNA, 25 bp, Homo sapien
gctttcgggccttcatggtcaatta

SEQ ID NO: 2387633 - DNA, 25 bp, Homo sapien
ttcgggccttcatggtcaattagaa

SEQ ID NO: 2387634 - DNA, 25 bp, Homo sapien
ttggcgaatggcacctgctgcttca

SEQ ID NO: 2387635 - DNA, 25 bp, Homo sapien
ttttcagaagtcctggtgttgcgcg

SEQ ID NO: 2387636 - DNA, 25 bp, Homo sapien
agtcctcactgatgagccactcggg

SEQ ID NO: 2387637 - DNA, 25 bp, Homo sapien
tgccctctctgcgaattttcagaag

SEQ ID NO: 2387638 - DNA, 25 bp, Homo sapien
caagatcccaattaggtgtgtgagc

SEQ ID NO: 2387639 - DNA, 25 bp, Homo sapien
gacacgattgtgaggttcaaaggca

SEQ ID NO: 2387640 - DNA, 25 bp, Homo sapien
tagattcggctacaggagttaacaa

SEQ ID NO: 2387641 - DNA, 25 bp, Homo sapien
gacattctcgtagcgattccggcac

SEQ ID NO: 2387642 - DNA, 25 bp, Homo sapien
gggcacagtagagcatgcagacgct

SEQ ID NO: 2387643 - DNA, 25 bp, Homo sapien
cacagtagagcatgcagacgctgct

SEQ ID NO: 2387644 - DNA, 25 bp, Homo sapien
tgtggacactggcaacgtgggcaca

SEQ ID NO: 2387645 - DNA, 25 bp, Homo sapien
ggcacagtagagcatgcagacgctg

SEQ ID NO: 2387646 - DNA, 25 bp, Homo sapien
caaagtggctcgtgtacagctgggt

SEQ ID NO: 2387647 - DNA, 25 bp, Homo sapien
ggcattctcatcctgggcatagatc

SEQ ID NO: 2387648 - DNA, 25 bp, Homo sapien
tagatctggctcgtacggagaggac

SEQ ID NO: 2387649 - DNA, 25 bp, Homo sapien
cattaagtcaaagtggctcgtgtac

SEQ ID NO: 2387650 - DNA, 25 bp, Homo sapien
cttctgaaagggattcatgccaagc

SEQ ID NO: 2387651 - DNA, 25 bp, Homo sapien
ctttctgccaacacagacgcgtgct

SEQ ID NO: 2387652 - DNA, 25 bp, Homo sapien
tctgccaacacagacgcgtgcttgg

SEQ ID NO: 2387653 - DNA, 25 bp, Homo sapien
gttcttctgaaagggattcatgcca

SEQ ID NO: 2387654 - DNA, 25 bp, Homo sapien
aatccttccaaacagtaacaaatgt

SEQ ID NO: 2387655 - DNA, 25 bp, Homo sapien
cagtaacaaatgtgtcacgaataga

SEQ ID NO: 2387656 - DNA, 25 bp, Homo sapien
tccaaacagtaacaaatgtgtcacg

SEQ ID NO: 2387657 - DNA, 25 bp, Homo sapien
aaatgtgtcacgaatagagaaatac

SEQ ID NO: 2387658 - DNA, 25 bp, Homo sapien
cagtgggtctgaagacgtactggct

SEQ ID NO: 2387659 - DNA, 25 bp, Homo sapien
gatgagggcgtaaagcaaggtgccc

SEQ ID NO: 2387660 - DNA, 25 bp, Homo sapien
agatgagggcgtaaagcaaggtgcc

SEQ ID NO: 2387661 - DNA, 25 bp, Homo sapien
gagatgagggcgtaaagcaaggtgc

SEQ ID NO: 2387662 - DNA, 25 bp, Homo sapien
aagagatgagggcgtaaagcaaggt

SEQ ID NO: 2387663 - DNA, 25 bp, Homo sapien
cagcggcttgtcatagttgattcca

SEQ ID NO: 2387664 - DNA, 25 bp, Homo sapien
tcgctctgcacggagagatgccacc

SEQ ID NO: 2387665 - DNA, 25 bp, Homo sapien
tttctcttttgcgattcgctctgca

SEQ ID NO: 2387666 - DNA, 25 bp, Homo sapien
tttgcgattcgctctgcacggagag

SEQ ID NO: 2387667 - DNA, 25 bp, Homo sapien
tcaagcagaagggcccagggcgctg

SEQ ID NO: 2387668 - DNA, 25 bp, Homo sapien
caagcagaagggcccagggcgctga

SEQ ID NO: 2387669 - DNA, 25 bp, Homo sapien
aagcagaagggcccagggcgctgac

SEQ ID NO: 2387670 - DNA, 25 bp, Homo sapien
gggtggctgggccacggccggctgc

SEQ ID NO: 2387671 - DNA, 25 bp, Homo sapien
gctgcccgctgcctgtggttgtggc

SEQ ID NO: 2387672 - DNA, 25 bp, Homo sapien
gggctggacagctggtggccctgct

SEQ ID NO: 2387673 - DNA, 25 bp, Homo sapien
ctggcggctggctgcccgctgcctg

SEQ ID NO: 2387674 - DNA, 25 bp, Homo sapien
tggctgcccgctgcctgtggttgtg

SEQ ID NO: 2387675 - DNA, 25 bp, Homo sapien
cactgccccccgtcgtgattgcggg

SEQ ID NO: 2387676 - DNA, 25 bp, Homo sapien
tgccccccgtcgtgattgcgggctg

SEQ ID NO: 2387677 - DNA, 25 bp, Homo sapien
cccgtcgtgattgcgggctgcgcct

SEQ ID NO: 2387678 - DNA, 25 bp, Homo sapien
gctgcactgccccccgtcgtgattg

SEQ ID NO: 2387679 - DNA, 25 bp, Homo sapien
cagtaactgatgttttaatggttcc

SEQ ID NO: 2387680 - DNA, 25 bp, Homo sapien
gctcgtcccagtaactgatgtttta

SEQ ID NO: 2387681 - DNA, 25 bp, Homo sapien
taactgatgttttaatggttcctgc

SEQ ID NO: 2387682 - DNA, 25 bp, Homo sapien
ctcgtcccagtaactgatgttttaa

SEQ ID NO: 2387683 - DNA, 25 bp, Homo sapien
ggtgttcacgatcacatttccactc

SEQ ID NO: 2387684 - DNA, 25 bp, Homo sapien
cactggcgacgccaggcgcttgttg

SEQ ID NO: 2387685 - DNA, 25 bp, Homo sapien
gagccactggcgacgccaggcgctt

SEQ ID NO: 2387686 - DNA, 25 bp, Homo sapien
cagctgggacccctgcgatggtgtt

SEQ ID NO: 2387687 - DNA, 25 bp, Homo sapien
aaactagacagtttttcaccaatgg

SEQ ID NO: 2387688 - DNA, 25 bp, Homo sapien
aactagacagtttttcaccaatgga

SEQ ID NO: 2387689 - DNA, 25 bp, Homo sapien
actagacagtttttcaccaatggaa

SEQ ID NO: 2387690 - DNA, 25 bp, Homo sapien
gctgcaaaatgcatctgagagtcct

SEQ ID NO: 2387691 - DNA, 25 bp, Homo sapien
taggactgggctgtatgaatgtacc

SEQ ID NO: 2387692 - DNA, 25 bp, Homo sapien
ggttctacgaattctgacggacaca

SEQ ID NO: 2387693 - DNA, 25 bp, Homo sapien
tccatggagatgtatgtctcgggca

SEQ ID NO: 2387694 - DNA, 25 bp, Homo sapien
cctctctcatgttccagccacagca

SEQ ID NO: 2387695 - DNA, 25 bp, Homo sapien
tctgagtcccccgagtacaatcaca

SEQ ID NO: 2387696 - DNA, 25 bp, Homo sapien
aagactggccctgcattcagaaggg

SEQ ID NO: 2387697 - DNA, 25 bp, Homo sapien
gtacaatcacacatgtccaccactg

SEQ ID NO: 2387698 - DNA, 25 bp, Homo sapien
gagctgcaaactaccctgtggtttc

SEQ ID NO: 2387699 - DNA, 25 bp, Homo sapien
taaggtaatatcgacttgagctgca

SEQ ID NO: 2387700 - DNA, 25 bp, Homo sapien
catgctccactactcaatccaaggg

SEQ ID NO: 2387701 - DNA, 25 bp, Homo sapien
agcaggtagacttcacttgatgtga

SEQ ID NO: 2387702 - DNA, 25 bp, Homo sapien
gggcgggagcagagcctcccggcgt

SEQ ID NO: 2387703 - DNA, 25 bp, Homo sapien
tgggcgggagcagagcctcccggcg

SEQ ID NO: 2387704 - DNA, 25 bp, Homo sapien
ctgggcgggagcagagcctcccggc

SEQ ID NO: 2387705 - DNA, 25 bp, Homo sapien
gaacaccctgagtcgttgccatgga

SEQ ID NO: 2387706 - DNA, 25 bp, Homo sapien
cgttgccatggacaccaggtcaggg

SEQ ID NO: 2387707 - DNA, 25 bp, Homo sapien
gtcacagaagtgaccgctcgaacac

SEQ ID NO: 2387708 - DNA, 25 bp, Homo sapien
tcaggttggtagtgaccacggccga

SEQ ID NO: 2387709 - DNA, 25 bp, Homo sapien
cttcagatcctcattctcagacagc

SEQ ID NO: 2387710 - DNA, 25 bp, Homo sapien
tcagatcctcattctcagacagcaa

SEQ ID NO: 2387711 - DNA, 25 bp, Homo sapien
tcagacagcaagcagcagctgagcc

SEQ ID NO: 2387712 - DNA, 25 bp, Homo sapien
agatcctcattctcagacagcaagc

SEQ ID NO: 2387713 - DNA, 25 bp, Homo sapien
aagctggaaatgtgcaggtgtgatg

SEQ ID NO: 2387714 - DNA, 25 bp, Homo sapien
gagaagctggaaatgtgcaggtgtg

SEQ ID NO: 2387715 - DNA, 25 bp, Homo sapien
ctgagaggtcgtcgtcgtctgttgc

SEQ ID NO: 2387716 - DNA, 25 bp, Homo sapien
agaggtcgtcgtcgtctgttgctgc

SEQ ID NO: 2387717 - DNA, 25 bp, Homo sapien
cggcgtcagcttgcccacagctttg

SEQ ID NO: 2387718 - DNA, 25 bp, Homo sapien
tcagcttgcccacagctttgatctg

SEQ ID NO: 2387719 - DNA, 25 bp, Homo sapien
gcccacagctttgatctgtgctggg

SEQ ID NO: 2387720 - DNA, 25 bp, Homo sapien
tgggcctggccctggatctgtggaa

SEQ ID NO: 2387721 - DNA, 25 bp, Homo sapien
cgcaagacgcacacgttcatggtcc

SEQ ID NO: 2387722 - DNA, 25 bp, Homo sapien
aagacgcacacgttcatggtcctct

SEQ ID NO: 2387723 - DNA, 25 bp, Homo sapien
cgcacacgttcatggtcctctggga

SEQ ID NO: 2387724 - DNA, 25 bp, Homo sapien
gacgcacacgttcatggtcctctgg

SEQ ID NO: 2387725 - DNA, 25 bp, Homo sapien
tgtggctgtaggccggggggtcatc

SEQ ID NO: 2387726 - DNA, 25 bp, Homo sapien
ccggggcaggtgacaaggtacctgt

SEQ ID NO: 2387727 - DNA, 25 bp, Homo sapien
gtgtggctgtaggccggggggtcat

SEQ ID NO: 2387728 - DNA, 25 bp, Homo sapien
tgtgtggctgtaggccggggggtca

SEQ ID NO: 2387729 - DNA, 25 bp, Homo sapien
ttggggccgtgaccgtcgtgagctg

SEQ ID NO: 2387730 - DNA, 25 bp, Homo sapien
acggtggtgcccgtcagcagggcac

SEQ ID NO: 2387731 - DNA, 25 bp, Homo sapien
tgcggcggctgcgaggtctgcactt

SEQ ID NO: 2387732 - DNA, 25 bp, Homo sapien
gcggctgcgaggtctgcacttgcac

SEQ ID NO: 2387733 - DNA, 25 bp, Homo sapien
gcgcctgatgctagtcccttctgaa

SEQ ID NO: 2387734 - DNA, 25 bp, Homo sapien
tgaaagacacaagagaacgaagggc

SEQ ID NO: 2387735 - DNA, 25 bp, Homo sapien
cacgccgcagggaaatgtcaagtca

SEQ ID NO: 2387736 - DNA, 25 bp, Homo sapien
aaaactgagagatctgcacgccgca

SEQ ID NO: 2387737 - DNA, 25 bp, Homo sapien
gctgatccccgcgacgttcatgggc

SEQ ID NO: 2387738 - DNA, 25 bp, Homo sapien
accaccggaggcttcgccaaggcca

SEQ ID NO: 2387739 - DNA, 25 bp, Homo sapien
tggtgactcccggtgaggagaccac

SEQ ID NO: 2387740 - DNA, 25 bp, Homo sapien
tccccgcgacgttcatgggcagggt

SEQ ID NO: 2387741 - DNA, 25 bp, Homo sapien
caaggcacgtttgtgctagaacacg

SEQ ID NO: 2387742 - DNA, 25 bp, Homo sapien
ttgcgcctggaaagcgccaaggcac

SEQ ID NO: 2387743 - DNA, 25 bp, Homo sapien
aaagaacacgggtcgctggcgacca

SEQ ID NO: 2387744 - DNA, 25 bp, Homo sapien
tagaacacgtgatggcacgctcaag

SEQ ID NO: 2387745 - DNA, 25 bp, Homo sapien
caggcagcaaaagccccttagtcag

SEQ ID NO: 2387746 - DNA, 25 bp, Homo sapien
gcagcaaaagccccttagtcagcac

SEQ ID NO: 2387747 - DNA, 25 bp, Homo sapien
ctgcaggcagcaaaagccccttagt

SEQ ID NO: 2387748 - DNA, 25 bp, Homo sapien
cagcaaaagccccttagtcagcaca

SEQ ID NO: 2387749 - DNA, 25 bp, Homo sapien
cagctgctgcatgtgcacgggctgg

SEQ ID NO: 2387750 - DNA, 25 bp, Homo sapien
ctggggtccagactgtacggcatcc

SEQ ID NO: 2387751 - DNA, 25 bp, Homo sapien
gtccagactgtacggcatccctgtc

SEQ ID NO: 2387752 - DNA, 25 bp, Homo sapien
tggggtccagactgtacggcatccc

SEQ ID NO: 2387753 - DNA, 25 bp, Homo sapien
gggtccagactgtacggcatccctg

SEQ ID NO: 2387754 - DNA, 25 bp, Homo sapien
caggtatcgtctcagggagctggct

SEQ ID NO: 2387755 - DNA, 25 bp, Homo sapien
tccttcaacacagcactggctgctg

SEQ ID NO: 2387756 - DNA, 25 bp, Homo sapien
cacgtcgggccctggcgtgtttatc

SEQ ID NO: 2387757 - DNA, 25 bp, Homo sapien
ctgagactgtagacgcccttggagc

SEQ ID NO: 2387758 - DNA, 25 bp, Homo sapien
tgtccaatcgtaggaacacacagcc

SEQ ID NO: 2387759 - DNA, 25 bp, Homo sapien
tgctccctgaatagtcgggctggtg

SEQ ID NO: 2387760 - DNA, 25 bp, Homo sapien
caggaggtaagtcccagcactgtct

SEQ ID NO: 2387761 - DNA, 25 bp, Homo sapien
tcttgaggataagcaccaggtgcct

SEQ ID NO: 2387762 - DNA, 25 bp, Homo sapien
ggcgtaggcaaccttctgctgcgcg

SEQ ID NO: 2387763 - DNA, 25 bp, Homo sapien
gcgcggcgtaggcaaccttctgctg

SEQ ID NO: 2387764 - DNA, 25 bp, Homo sapien
cggctgcgcggcgtaggcaaccttc

SEQ ID NO: 2387765 - DNA, 25 bp, Homo sapien
ggcaaccttctgctgcgcgccaggg

SEQ ID NO: 2387766 - DNA, 25 bp, Homo sapien
ctggatctgggtctgcacttgctgg

SEQ ID NO: 2387767 - DNA, 25 bp, Homo sapien
gctgggccccggccagtttctgggc

SEQ ID NO: 2387768 - DNA, 25 bp, Homo sapien
ggagatgggtgtggtaagaaactgg

SEQ ID NO: 2387769 - DNA, 25 bp, Homo sapien
tgggagatgggtgtggtaagaaact

SEQ ID NO: 2387770 - DNA, 25 bp, Homo sapien
ctgtggatcgatggatgacagaatt

SEQ ID NO: 2387771 - DNA, 25 bp, Homo sapien
tggatcgatggatgacagaattggg

SEQ ID NO: 2387772 - DNA, 25 bp, Homo sapien
gtggatcgatggatgacagaattgg

SEQ ID NO: 2387773 - DNA, 25 bp, Homo sapien
tgtggatcgatggatgacagaattg

SEQ ID NO: 2387774 - DNA, 25 bp, Homo sapien
cacaggatctcaggtggaggcggca

SEQ ID NO: 2387775 - DNA, 25 bp, Homo sapien
tcactgccgctcatagcgagagcgc

SEQ ID NO: 2387776 - DNA, 25 bp, Homo sapien
tgagacaagaagccctgaacttccc

SEQ ID NO: 2387777 - DNA, 25 bp, Homo sapien
ctcatagcgagagcgccgtgggacc

SEQ ID NO: 2387778 - DNA, 25 bp, Homo sapien
gaaacagacctgacaaggcaggcag

SEQ ID NO: 2387779 - DNA, 25 bp, Homo sapien
caccccagaacacaatgattgaaca

SEQ ID NO: 2387780 - DNA, 25 bp, Homo sapien
cagagcgcacgaacgaggctgagct

SEQ ID NO: 2387781 - DNA, 25 bp, Homo sapien
aagcaggagcgcgtctcagaaacag

SEQ ID NO: 2387782 - DNA, 25 bp, Homo sapien
cagtggctgcttatttcctaaagac

SEQ ID NO: 2387783 - DNA, 25 bp, Homo sapien
gtctcgataacaggcagacagtggg

SEQ ID NO: 2387784 - DNA, 25 bp, Homo sapien
gagagactgcccgagattcaagaag

SEQ ID NO: 2387785 - DNA, 25 bp, Homo sapien
tgaccctggaagagagaaacgctgg

SEQ ID NO: 2387786 - DNA, 25 bp, Homo sapien
gacagggaaatcaccagatccagaa

SEQ ID NO: 2387787 - DNA, 25 bp, Homo sapien
caagcagtgttcctgtggcacctga

SEQ ID NO: 2387788 - DNA, 25 bp, Homo sapien
catctgtaagaaaagcacctgccct

SEQ ID NO: 2387789 - DNA, 25 bp, Homo sapien
caaagaccaggcattatttgggaac

SEQ ID NO: 2387790 - DNA, 25 bp, Homo sapien
gagcttgcaaaagagccccgtgcta

SEQ ID NO: 2387791 - DNA, 25 bp, Homo sapien
gtgatctccagggtcgcacaggaca

SEQ ID NO: 2387792 - DNA, 25 bp, Homo sapien
cagctgaccagacaccaggtatagg

SEQ ID NO: 2387793 - DNA, 25 bp, Homo sapien
ccaggtataggccagttctcggtgg

SEQ ID NO: 2387794 - DNA, 25 bp, Homo sapien
caaagagtcaggaactgccagtctc

SEQ ID NO: 2387795 - DNA, 25 bp, Homo sapien
tcacgagtcacggagcagaaaagct

SEQ ID NO: 2387796 - DNA, 25 bp, Homo sapien
actaagataagtgccctgagcgccc

SEQ ID NO: 2387797 - DNA, 25 bp, Homo sapien
ggatcgctggccacatggagacgca

SEQ ID NO: 2387798 - DNA, 25 bp, Homo sapien
tgtcctatcagcaccgtcatggcgt

SEQ ID NO: 2387799 - DNA, 25 bp, Homo sapien
tcttgacgtagtaagaggctctggg

SEQ ID NO: 2387800 - DNA, 25 bp, Homo sapien
tctgtgcacttgctactgcatgcat

SEQ ID NO: 2387801 - DNA, 25 bp, Homo sapien
ggctctgggccacctgtgtgtccta

SEQ ID NO: 2387802 - DNA, 25 bp, Homo sapien
gaagagcaattctcgtagtgtgccc

SEQ ID NO: 2387803 - DNA, 25 bp, Homo sapien
tctgcatatgacaggcctggacgac

SEQ ID NO: 2387804 - DNA, 25 bp, Homo sapien
tatttgagcgtcttgtgagtcccaa

SEQ ID NO: 2387805 - DNA, 25 bp, Homo sapien
cggtgacgcaccaaggttttgaggc

SEQ ID NO: 2387806 - DNA, 25 bp, Homo sapien
ggatgctggccacgggtgtttgctg

SEQ ID NO: 2387807 - DNA, 25 bp, Homo sapien
ctggatgctggccacgggtgtttgc

SEQ ID NO: 2387808 - DNA, 25 bp, Homo sapien
tgctggccacgggtgtttgctgttg

SEQ ID NO: 2387809 - DNA, 25 bp, Homo sapien
tggccacgggtgtttgctgttgaac

SEQ ID NO: 2387810 - DNA, 25 bp, Homo sapien
acaacagtgaaagcgcctgaagggc

SEQ ID NO: 2387811 - DNA, 25 bp, Homo sapien
tatggctgacacaacctctaaacgc

SEQ ID NO: 2387812 - DNA, 25 bp, Homo sapien
gagccgagagagtcagaaaacacac

SEQ ID NO: 2387813 - DNA, 25 bp, Homo sapien
ttttatgacacggaagaatgaccag

SEQ ID NO: 2387814 - DNA, 25 bp, Homo sapien
acctgggcagtcgcggtcactgcag

SEQ ID NO: 2387815 - DNA, 25 bp, Homo sapien
gggctgtcggagctggcgggcacct

SEQ ID NO: 2387816 - DNA, 25 bp, Homo sapien
gctgggttgggagcgcctggagtct

SEQ ID NO: 2387817 - DNA, 25 bp, Homo sapien
agtcgcggtcactgcagggatcatc

SEQ ID NO: 2387818 - DNA, 25 bp, Homo sapien
cggaggcttagtaggtgtctttagc

SEQ ID NO: 2387819 - DNA, 25 bp, Homo sapien
ggtgtctttagcctgacagcaggga

SEQ ID NO: 2387820 - DNA, 25 bp, Homo sapien
ctactggcacggaggcttagtaggt

SEQ ID NO: 2387821 - DNA, 25 bp, Homo sapien
taggtgtctttagcctgacagcagg

SEQ ID NO: 2387822 - DNA, 25 bp, Homo sapien
ccagtgctgaatctcttgcgtgaca

SEQ ID NO: 2387823 - DNA, 25 bp, Homo sapien
gaatctcttgcgtgacatggtccca

SEQ ID NO: 2387824 - DNA, 25 bp, Homo sapien
ctaataaagcgttttctgtgaggaa

SEQ ID NO: 2387825 - DNA, 25 bp, Homo sapien
tgacatggtcccaaggttcactaat

SEQ ID NO: 2387826 - DNA, 25 bp, Homo sapien
ggaagcccacgccttatctttagaa

SEQ ID NO: 2387827 - DNA, 25 bp, Homo sapien
tggctttcagaacacagtactatgg

SEQ ID NO: 2387828 - DNA, 25 bp, Homo sapien
gaacgcggcactccataaggaccat

SEQ ID NO: 2387829 - DNA, 25 bp, Homo sapien
tgagccacgtagtacagagaacgcg

SEQ ID NO: 2387830 - DNA, 25 bp, Homo sapien
cagagtgtcccaaaggttctcagga

SEQ ID NO: 2387831 - DNA, 25 bp, Homo sapien
gagaaaatctgctgtcgtaagtcca

SEQ ID NO: 2387832 - DNA, 25 bp, Homo sapien
cacaaggaagagttgactgggccca

SEQ ID NO: 2387833 - DNA, 25 bp, Homo sapien
cgaatcccattgcagggtagggcct

SEQ ID NO: 2387834 - DNA, 25 bp, Homo sapien
cctaatttcctggaccaaataatgt

SEQ ID NO: 2387835 - DNA, 25 bp, Homo sapien
gtgaaaacttcaaagtaaggagaca

SEQ ID NO: 2387836 - DNA, 25 bp, Homo sapien
caaaggatactattggatatggacc

SEQ ID NO: 2387837 - DNA, 25 bp, Homo sapien
taatgtaaaataggccaaaatcaag

SEQ ID NO: 2387838 - DNA, 25 bp, Homo sapien
gaatttaactcaggtcaacggtagc

SEQ ID NO: 2387839 - DNA, 25 bp, Homo sapien
tgtttcccagggtcgccaattagag

SEQ ID NO: 2387840 - DNA, 25 bp, Homo sapien
cacacttgagagacaggagaccctc

SEQ ID NO: 2387841 - DNA, 25 bp, Homo sapien
tacttgccgtattggaatgaaccca

SEQ ID NO: 2387842 - DNA, 25 bp, Homo sapien
tgccttttgtttggtatgctatcaa

SEQ ID NO: 2387843 - DNA, 25 bp, Homo sapien
tactattcaagtacaaatgctgatg

SEQ ID NO: 2387844 - DNA, 25 bp, Homo sapien
tggtatgctatcaatgccctttaaa

SEQ ID NO: 2387845 - DNA, 25 bp, Homo sapien
cagctaactggttacaacagttaac

SEQ ID NO: 2387846 - DNA, 25 bp, Homo sapien
tttgggaagcggctgcctggtggac

SEQ ID NO: 2387847 - DNA, 25 bp, Homo sapien
tctttcctccacgtgcggctttggg

SEQ ID NO: 2387848 - DNA, 25 bp, Homo sapien
ggcagggcggtgccagctctttcct

SEQ ID NO: 2387849 - DNA, 25 bp, Homo sapien
caggtccttctatggccacggaaga

SEQ ID NO: 2387850 - DNA, 25 bp, Homo sapien
ccccaggacattgacgacgggtgct

SEQ ID NO: 2387851 - DNA, 25 bp, Homo sapien
tggcccccaggacattgacgacggg

SEQ ID NO: 2387852 - DNA, 25 bp, Homo sapien
ccaggacattgacgacgggtgctgt

SEQ ID NO: 2387853 - DNA, 25 bp, Homo sapien
gcccccaggacattgacgacgggtg

SEQ ID NO: 2387854 - DNA, 25 bp, Homo sapien
ctgtgagccggtgtccctgccctta

SEQ ID NO: 2387855 - DNA, 25 bp, Homo sapien
agcacctgtgagccggtgtccctgc

SEQ ID NO: 2387856 - DNA, 25 bp, Homo sapien
acctgtgagccggtgtccctgccct

SEQ ID NO: 2387857 - DNA, 25 bp, Homo sapien
tgtgagccggtgtccctgcccttac

SEQ ID NO: 2387858 - DNA, 25 bp, Homo sapien
agtgtacgttgatttttgtaatcag

SEQ ID NO: 2387859 - DNA, 25 bp, Homo sapien
tgtgcgttttcaattaaaagtgtac

SEQ ID NO: 2387860 - DNA, 25 bp, Homo sapien
gagaagcaacaactcgcaggccatc

SEQ ID NO: 2387861 - DNA, 25 bp, Homo sapien
tgcgtaatgtgtgcgttttcaatta

SEQ ID NO: 2387862 - DNA, 25 bp, Homo sapien
acacgaagtgtgcaaccagaccctg

SEQ ID NO: 2387863 - DNA, 25 bp, Homo sapien
acgaagtgtgcaaccagaccctggg

SEQ ID NO: 2387864 - DNA, 25 bp, Homo sapien
cagacacgaagtgtgcaaccagacc

SEQ ID NO: 2387865 - DNA, 25 bp, Homo sapien
ctgcagacacgaagtgtgcaaccag

SEQ ID NO: 2387866 - DNA, 25 bp, Homo sapien
gggagcaccagccgggctttgcagc

SEQ ID NO: 2387867 - DNA, 25 bp, Homo sapien
ccaggcactgcagtacagaccccca

SEQ ID NO: 2387868 - DNA, 25 bp, Homo sapien
ggagcaccagccgggctttgcagct

SEQ ID NO: 2387869 - DNA, 25 bp, Homo sapien
gcactgcagtacagacccccagagg

SEQ ID NO: 2387870 - DNA, 25 bp, Homo sapien
aagactcttgcctgtgaccactgaa

SEQ ID NO: 2387871 - DNA, 25 bp, Homo sapien
tgtccactgtagacgggtgagcttt

SEQ ID NO: 2387872 - DNA, 25 bp, Homo sapien
gatccgaagatccacaagactcttg

SEQ ID NO: 2387873 - DNA, 25 bp, Homo sapien
cactgaaatggtgggacatgtccct

SEQ ID NO: 2387874 - DNA, 25 bp, Homo sapien
gggcggcgaggccactacaaccgac

SEQ ID NO: 2387875 - DNA, 25 bp, Homo sapien
ggcgaggccactacaaccgaccaaa

SEQ ID NO: 2387876 - DNA, 25 bp, Homo sapien
gctcccggcgcggatgagcgctgcg

SEQ ID NO: 2387877 - DNA, 25 bp, Homo sapien
atgagcgctgcgacagcggaccggg

SEQ ID NO: 2387878 - DNA, 25 bp, Homo sapien
gaaggcgggaaaacggcagttgcca

SEQ ID NO: 2387879 - DNA, 25 bp, Homo sapien
ttcactgagggaggtgggcgttcac

SEQ ID NO: 2387880 - DNA, 25 bp, Homo sapien
tcaccgggtgatgggacggagagag

SEQ ID NO: 2387881 - DNA, 25 bp, Homo sapien
gacggtcacagggatcgtgtcaccg

SEQ ID NO: 2387882 - DNA, 25 bp, Homo sapien
gcgtcagcgccgtagacagcggtct

SEQ ID NO: 2387883 - DNA, 25 bp, Homo sapien
cagaggcggcgtcagcgccgtagac

SEQ ID NO: 2387884 - DNA, 25 bp, Homo sapien
gtcagcgccgtagacagcggtctcg

SEQ ID NO: 2387885 - DNA, 25 bp, Homo sapien
agcgccgtagacagcggtctcgcga

SEQ ID NO: 2387886 - DNA, 25 bp, Homo sapien
tcacgtgcagcgcacactaagcgca

SEQ ID NO: 2387887 - DNA, 25 bp, Homo sapien
ggaatcaacttcactgctcacgtgc

SEQ ID NO: 2387888 - DNA, 25 bp, Homo sapien
tccgtggtcagttctgggacagctg

SEQ ID NO: 2387889 - DNA, 25 bp, Homo sapien
ccgagcagcgcagcgcgtggaatca

SEQ ID NO: 2387890 - DNA, 25 bp, Homo sapien
aggtggtggtattattagattcttc

SEQ ID NO: 2387891 - DNA, 25 bp, Homo sapien
cacaaaactcccagtgccggaaggc

SEQ ID NO: 2387892 - DNA, 25 bp, Homo sapien
ctgtaaaggtggtggtattattaga

SEQ ID NO: 2387893 - DNA, 25 bp, Homo sapien
acacaaaactcccagtgccggaagg

SEQ ID NO: 2387894 - DNA, 25 bp, Homo sapien
tctttattataaaaggcgtcaattc

SEQ ID NO: 2387895 - DNA, 25 bp, Homo sapien
ttataaaaggcgtcaattcgcagcg

SEQ ID NO: 2387896 - DNA, 25 bp, Homo sapien
aaggcgtcaattcgcagcgtcttta

SEQ ID NO: 2387897 - DNA, 25 bp, Homo sapien
taaaaggcgtcaattcgcagcgtct

SEQ ID NO: 2387898 - DNA, 25 bp, Homo sapien
acaaataagcctaagactcaaactt

SEQ ID NO: 2387899 - DNA, 25 bp, Homo sapien
gcacaaataagcctaagactcaaac

SEQ ID NO: 2387900 - DNA, 25 bp, Homo sapien
cggcacaaataagcctaagactcaa

SEQ ID NO: 2387901 - DNA, 25 bp, Homo sapien
cacaaataagcctaagactcaaact

SEQ ID NO: 2387902 - DNA, 25 bp, Homo sapien
caagactctatctggtcgtgagccc

SEQ ID NO: 2387903 - DNA, 25 bp, Homo sapien
tgtggtaacaacactcacttgtggt

SEQ ID NO: 2387904 - DNA, 25 bp, Homo sapien
tgttggaccgtatcccctgaagata

SEQ ID NO: 2387905 - DNA, 25 bp, Homo sapien
actgcacgtggattgagaggtgccc

SEQ ID NO: 2387906 - DNA, 25 bp, Homo sapien
gactatctctacaactgcgaggtgg

SEQ ID NO: 2387907 - DNA, 25 bp, Homo sapien
taatatttcggggactatctctaca

SEQ ID NO: 2387908 - DNA, 25 bp, Homo sapien
gggactatctctacaactgcgaggt

SEQ ID NO: 2387909 - DNA, 25 bp, Homo sapien
ttcggggactatctctacaactgcg

SEQ ID NO: 2387910 - DNA, 25 bp, Homo sapien
tcacaactgaacatatacatgtaat

SEQ ID NO: 2387911 - DNA, 25 bp, Homo sapien
gaacatatacatgtaatgcaattcc

SEQ ID NO: 2387912 - DNA, 25 bp, Homo sapien
taaaatgaagcaacataccatgttc

SEQ ID NO: 2387913 - DNA, 25 bp, Homo sapien
tccaaagaggattacaatgagtttg

SEQ ID NO: 2387914 - DNA, 25 bp, Homo sapien
caagattgcgccactacactccagc

SEQ ID NO: 2387915 - DNA, 25 bp, Homo sapien
tccaagattgcgccactacactcca

SEQ ID NO: 2387916 - DNA, 25 bp, Homo sapien
gatccaagattgcgccactacactc

SEQ ID NO: 2387917 - DNA, 25 bp, Homo sapien
gggagacggaggttgtggtgatcca

SEQ ID NO: 2387918 - DNA, 25 bp, Homo sapien
aaatagcactcgagcatccatttaa

SEQ ID NO: 2387919 - DNA, 25 bp, Homo sapien
tagcactcgagcatccatttaatgt

SEQ ID NO: 2387920 - DNA, 25 bp, Homo sapien
ctttttgcataaagggtgaccctcg

SEQ ID NO: 2387921 - DNA, 25 bp, Homo sapien
cataaagggtgaccctcgcaggtgg

SEQ ID NO: 2387922 - DNA, 25 bp, Homo sapien
gagatgctcctacaggccttcctaa

SEQ ID NO: 2387923 - DNA, 25 bp, Homo sapien
taaagaccgatcataccaagtgctg

SEQ ID NO: 2387924 - DNA, 25 bp, Homo sapien
tgtaagtgcgtgttcctcctaggct

SEQ ID NO: 2387925 - DNA, 25 bp, Homo sapien
ccttcctaagatggctaaagaccga

SEQ ID NO: 2387926 - DNA, 25 bp, Homo sapien
acacacactgtcgtctccagacacc

SEQ ID NO: 2387927 - DNA, 25 bp, Homo sapien
ttggccgctggtagagtctgcatga

SEQ ID NO: 2387928 - DNA, 25 bp, Homo sapien
ctgtgtgccctaggcacacacactg

SEQ ID NO: 2387929 - DNA, 25 bp, Homo sapien
gcagtcaacacacggccaaactgga

SEQ ID NO: 2387930 - DNA, 25 bp, Homo sapien
tctaagaaccagaccctcagttgcc

SEQ ID NO: 2387931 - DNA, 25 bp, Homo sapien
gaatctggtgaaagctgtggactgt

SEQ ID NO: 2387932 - DNA, 25 bp, Homo sapien
cagttgccagtaagggaatgaggcc

SEQ ID NO: 2387933 - DNA, 25 bp, Homo sapien
ccaatggtgggcaagagtcctaagt

SEQ ID NO: 2387934 - DNA, 25 bp, Homo sapien
gccactggacatggcgctggctgct

SEQ ID NO: 2387935 - DNA, 25 bp, Homo sapien
gggcagggacggctgggagcacgct

SEQ ID NO: 2387936 - DNA, 25 bp, Homo sapien
acggctgggagcacgctggctgctc

SEQ ID NO: 2387937 - DNA, 25 bp, Homo sapien
tctgggagctgctgacgtgctgcat

SEQ ID NO: 2387938 - DNA, 25 bp, Homo sapien
caagggggacgtgacctgaatgtat

SEQ ID NO: 2387939 - DNA, 25 bp, Homo sapien
tgatggagacccatgctcaaaccgc

SEQ ID NO: 2387940 - DNA, 25 bp, Homo sapien
cctgaatgtatgatggagacccatg

SEQ ID NO: 2387941 - DNA, 25 bp, Homo sapien
gctcaaaccgccgaggctgagcgct

SEQ ID NO: 2387942 - DNA, 25 bp, Homo sapien
tgtccaccactggaggggctcaagc

SEQ ID NO: 2387943 - DNA, 25 bp, Homo sapien
ctgcacgcacattctgcaaggcctg

SEQ ID NO: 2387944 - DNA, 25 bp, Homo sapien
ggactgggctgcgtgggactctggg

SEQ ID NO: 2387945 - DNA, 25 bp, Homo sapien
ctgcctcaccagcacgctggcatcc

SEQ ID NO: 2387946 - DNA, 25 bp, Homo sapien
ggtcccaggtggtggatggtgcccc

SEQ ID NO: 2387947 - DNA, 25 bp, Homo sapien
tacccgggtgctggagctgaacctg

SEQ ID NO: 2387948 - DNA, 25 bp, Homo sapien
actgtgatgggcgtacccgggtgct

SEQ ID NO: 2387949 - DNA, 25 bp, Homo sapien
caagttagccgtggtgatgtggctt

SEQ ID NO: 2387950 - DNA, 25 bp, Homo sapien
tgctgctgctgaaccagctggccct

SEQ ID NO: 2387951 - DNA, 25 bp, Homo sapien
agctggccctggatgatgctgctga

SEQ ID NO: 2387952 - DNA, 25 bp, Homo sapien
cctggatgatgctgctgatctgcgg

SEQ ID NO: 2387953 - DNA, 25 bp, Homo sapien
gctgctgctgaaccagctggccctg

SEQ ID NO: 2387954 - DNA, 25 bp, Homo sapien
ctgcctaagatatgcttgtaatggt

SEQ ID NO: 2387955 - DNA, 25 bp, Homo sapien
catcattaatgacttcaaagtgctc

SEQ ID NO: 2387956 - DNA, 25 bp, Homo sapien
tacagtctctccttgaaagctaaga

SEQ ID NO: 2387957 - DNA, 25 bp, Homo sapien
tatgcttgtaatggtccatacagtc

SEQ ID NO: 2387958 - DNA, 25 bp, Homo sapien
ctgagagggaatattcaaagggaag

SEQ ID NO: 2387959 - DNA, 25 bp, Homo sapien
tgagagggaatattcaaagggaagg

SEQ ID NO: 2387960 - DNA, 25 bp, Homo sapien
tcctcggcggtagctgggttgctat

SEQ ID NO: 2387961 - DNA, 25 bp, Homo sapien
gcccgtgctttctggccacaacctt

SEQ ID NO: 2387962 - DNA, 25 bp, Homo sapien
gccgcagaagtcctcggcggtagct

SEQ ID NO: 2387963 - DNA, 25 bp, Homo sapien
gctgcccgtgctttctggccacaac

SEQ ID NO: 2387964 - DNA, 25 bp, Homo sapien
gagtcctcaaatccgagtgaggaaa

SEQ ID NO: 2387965 - DNA, 25 bp, Homo sapien
ctcaaatccgagtgaggaaagtctg

SEQ ID NO: 2387966 - DNA, 25 bp, Homo sapien
catcgagtcctcaaatccgagtgag

SEQ ID NO: 2387967 - DNA, 25 bp, Homo sapien
gcacatcgagtcctcaaatccgagt

SEQ ID NO: 2387968 - DNA, 25 bp, Homo sapien
gcattaaaactaagagccttcacaa

SEQ ID NO: 2387969 - DNA, 25 bp, Homo sapien
gagccttcacaaagacgtttcaaga

SEQ ID NO: 2387970 - DNA, 25 bp, Homo sapien
tcacaaagacgtttcaagatgtatt

SEQ ID NO: 2387971 - DNA, 25 bp, Homo sapien
aataacagcatccatgcattaaaac

SEQ ID NO: 2387972 - DNA, 25 bp, Homo sapien
tccaatccgcagagacagacagtac

SEQ ID NO: 2387973 - DNA, 25 bp, Homo sapien
agtgcattccaatccgcagagacag

SEQ ID NO: 2387974 - DNA, 25 bp, Homo sapien
atccgcagagacagacagtacagtg

SEQ ID NO: 2387975 - DNA, 25 bp, Homo sapien
ctggagaagtgcattccaatccgca

SEQ ID NO: 2387976 - DNA, 25 bp, Homo sapien
gccctgccggccacaggtacagcac

SEQ ID NO: 2387977 - DNA, 25 bp, Homo sapien
ggccagaggcgccagccctgccggc

SEQ ID NO: 2387978 - DNA, 25 bp, Homo sapien
cctgccggccacaggtacagcacac

SEQ ID NO: 2387979 - DNA, 25 bp, Homo sapien
gccggccacaggtacagcacactgg

SEQ ID NO: 2387980 - DNA, 25 bp, Homo sapien
ggtactggagtccccatatgtattt

SEQ ID NO: 2387981 - DNA, 25 bp, Homo sapien
aggtactggagtccccatatgtatt

SEQ ID NO: 2387982 - DNA, 25 bp, Homo sapien
gtactggagtccccatatgtatttg

SEQ ID NO: 2387983 - DNA, 25 bp, Homo sapien
agtgttcactgcctcttagatgctt

SEQ ID NO: 2387984 - DNA, 25 bp, Homo sapien
ctgtgggcgccagtgttcactgcct

SEQ ID NO: 2387985 - DNA, 25 bp, Homo sapien
tgtgggcgccagtgttcactgcctc

SEQ ID NO: 2387986 - DNA, 25 bp, Homo sapien
actgcctcttagatgcttccatttt

SEQ ID NO: 2387987 - DNA, 25 bp, Homo sapien
cccaggatggcccacttgtaggtga

SEQ ID NO: 2387988 - DNA, 25 bp, Homo sapien
taggtgaggcctctgacatcaaagg

SEQ ID NO: 2387989 - DNA, 25 bp, Homo sapien
gatggcccacttgtaggtgaggcct

SEQ ID NO: 2387990 - DNA, 25 bp, Homo sapien
cttgtaggtgaggcctctgacatca

SEQ ID NO: 2387991 - DNA, 25 bp, Homo sapien
tgtgctgttggcattaactgctgga

SEQ ID NO: 2387992 - DNA, 25 bp, Homo sapien
ggttcttcggcacacagatgctttg

SEQ ID NO: 2387993 - DNA, 25 bp, Homo sapien
gatgctttgtgctgttggcattaac

SEQ ID NO: 2387994 - DNA, 25 bp, Homo sapien
tgccaggttcttcggcacacagatg

SEQ ID NO: 2387995 - DNA, 25 bp, Homo sapien
caataaacagatgcaagggcccact

SEQ ID NO: 2387996 - DNA, 25 bp, Homo sapien
caatcaacagatgacagagtgtgcg

SEQ ID NO: 2387997 - DNA, 25 bp, Homo sapien
cactctgcccaggaacaatcaacag

SEQ ID NO: 2387998 - DNA, 25 bp, Homo sapien
tgcggtagcttcaaagcctcagagc

SEQ ID NO: 2387999 - DNA, 25 bp, Homo sapien
gagcaaacatgacggcgcagggcgg

SEQ ID NO: 2388000 - DNA, 25 bp, Homo sapien
gagagcaaacatgacggcgcagggc

SEQ ID NO: 2388001 - DNA, 25 bp, Homo sapien
ctccaaggtgggccgtggagccaag

SEQ ID NO: 2388002 - DNA, 25 bp, Homo sapien
tgacgggagtgggcgctctgaggac

SEQ ID NO: 2388003 - DNA, 25 bp, Homo sapien
tgacagctgcacagcaacgtgaacg

SEQ ID NO: 2388004 - DNA, 25 bp, Homo sapien
taagaaattagggagcccactgctc

SEQ ID NO: 2388005 - DNA, 25 bp, Homo sapien
cttctgtaggtggacgcaggtgaca

SEQ ID NO: 2388006 - DNA, 25 bp, Homo sapien
tgacagcaaaacagagacgcgacct

SEQ ID NO: 2388007 - DNA, 25 bp, Homo sapien
ctcccgcaaacgcaaagaaagtcaa

SEQ ID NO: 2388008 - DNA, 25 bp, Homo sapien
caaagaaagtcaagcccagctctcc

SEQ ID NO: 2388009 - DNA, 25 bp, Homo sapien
tcccgcaaacgcaaagaaagtcaag

SEQ ID NO: 2388010 - DNA, 25 bp, Homo sapien
tcctcccgcaaacgcaaagaaagtc

SEQ ID NO: 2388011 - DNA, 25 bp, Homo sapien
gcgcggcgtgcggcgtggggggcat

SEQ ID NO: 2388012 - DNA, 25 bp, Homo sapien
tgcgcggcgtgcggcgtggggggca

SEQ ID NO: 2388013 - DNA, 25 bp, Homo sapien
ctgcgcggcgtgcggcgtggggggc

SEQ ID NO: 2388014 - DNA, 25 bp, Homo sapien
ggcagcctcccggcgtgtgcaagct

SEQ ID NO: 2388015 - DNA, 25 bp, Homo sapien
ccggcgtgtgcaagctggaggcgtt

SEQ ID NO: 2388016 - DNA, 25 bp, Homo sapien
agcctcccggcgtgtgcaagctgga

SEQ ID NO: 2388017 - DNA, 25 bp, Homo sapien
ggcgtgtgcaagctggaggcgttct

SEQ ID NO: 2388018 - DNA, 25 bp, Homo sapien
gtgcttgtggctctgtcgcctgctg

SEQ ID NO: 2388019 - DNA, 25 bp, Homo sapien
gcttgtggctctgtcgcctgctgct

SEQ ID NO: 2388020 - DNA, 25 bp, Homo sapien
ctgcctggtggcgagcgccggcctg

SEQ ID NO: 2388021 - DNA, 25 bp, Homo sapien
gaggtggagcgcaagctaaacagcc

SEQ ID NO: 2388022 - DNA, 25 bp, Homo sapien
ggcgggcctggggagctgcctgctc

SEQ ID NO: 2388023 - DNA, 25 bp, Homo sapien
cagaggctggcgggcctggggagct

SEQ ID NO: 2388024 - DNA, 25 bp, Homo sapien
ggatggtgccgcaggcagaggctgg

SEQ ID NO: 2388025 - DNA, 25 bp, Homo sapien
ctgggatggtgccgcaggcagaggc

SEQ ID NO: 2388026 - DNA, 25 bp, Homo sapien
gggaagcacagaccaccgagaatat

SEQ ID NO: 2388027 - DNA, 25 bp, Homo sapien
accgagaatattctggtactgcagc

SEQ ID NO: 2388028 - DNA, 25 bp, Homo sapien
tattctggtactgcagcccatgtgg

SEQ ID NO: 2388029 - DNA, 25 bp, Homo sapien
gcacagaccaccgagaatattctgg

SEQ ID NO: 2388030 - DNA, 25 bp, Homo sapien
gcaatcttgtcctaagggctctcta

SEQ ID NO: 2388031 - DNA, 25 bp, Homo sapien
taagggctctctatggccatagggc

SEQ ID NO: 2388032 - DNA, 25 bp, Homo sapien
gctctgcaatcttgtcctaagggct

SEQ ID NO: 2388033 - DNA, 25 bp, Homo sapien
ctaagggctctctatggccataggg

SEQ ID NO: 2388034 - DNA, 25 bp, Homo sapien
gctttcctcagctccgcaatgcgct

SEQ ID NO: 2388035 - DNA, 25 bp, Homo sapien
tcagctccgcaatgcgctgatgcac

SEQ ID NO: 2388036 - DNA, 25 bp, Homo sapien
agcagatagtcccagtgggacttgg

SEQ ID NO: 2388037 - DNA, 25 bp, Homo sapien
ccgcaatgcgctgatgcacctggtt

SEQ ID NO: 2388038 - DNA, 25 bp, Homo sapien
agtactagaccagggacgctcgatt

SEQ ID NO: 2388039 - DNA, 25 bp, Homo sapien
ctctggtagtacaggtgacgtctgc

SEQ ID NO: 2388040 - DNA, 25 bp, Homo sapien
gggacgctcgatttctctggtagta

SEQ ID NO: 2388041 - DNA, 25 bp, Homo sapien
ctgcgcagtactagaccagggacgc

SEQ ID NO: 2388042 - DNA, 25 bp, Homo sapien
ttttccagtggagcacttgcttcca

SEQ ID NO: 2388043 - DNA, 25 bp, Homo sapien
tttccagtggagcacttgcttccaa

SEQ ID NO: 2388044 - DNA, 25 bp, Homo sapien
tttattttccagtggagcacttgct

SEQ ID NO: 2388045 - DNA, 25 bp, Homo sapien
tattttccagtggagcacttgcttc

SEQ ID NO: 2388046 - DNA, 25 bp, Homo sapien
ccggcaaggacacgggcaccctgaa

SEQ ID NO: 2388047 - DNA, 25 bp, Homo sapien
tgctgaggagactggagaccggagc

SEQ ID NO: 2388048 - DNA, 25 bp, Homo sapien
tgaagcccctcacccggaacatgaa

SEQ ID NO: 2388049 - DNA, 25 bp, Homo sapien
gaacatgaagttctgatatcacaaa

SEQ ID NO: 2388050 - DNA, 25 bp, Homo sapien
gcaagaccacacgtttctgttttga

SEQ ID NO: 2388051 - DNA, 25 bp, Homo sapien
ggtcccaaagatcgtgagtagatct

SEQ ID NO: 2388052 - DNA, 25 bp, Homo sapien
catcctgagaaaattcgattttgaa

SEQ ID NO: 2388053 - DNA, 25 bp, Homo sapien
gacacagaggacagtcgaggtgccc

SEQ ID NO: 2388054 - DNA, 25 bp, Homo sapien
gacgtttccacagcaatagcaccca

SEQ ID NO: 2388055 - DNA, 25 bp, Homo sapien
tccttagggccacacagggtttgga

SEQ ID NO: 2388056 - DNA, 25 bp, Homo sapien
cactgagtgggcaaaacctttctgc

SEQ ID NO: 2388057 - DNA, 25 bp, Homo sapien
aaagtgttagggacggcatctggca

SEQ ID NO: 2388058 - DNA, 25 bp, Homo sapien
acctgaatacacacccacatttaga

SEQ ID NO: 2388059 - DNA, 25 bp, Homo sapien
cactgtggtactctaaagcctgggt

SEQ ID NO: 2388060 - DNA, 25 bp, Homo sapien
tttttaatcccaagtcacctgaata

SEQ ID NO: 2388061 - DNA, 25 bp, Homo sapien
aaattagttggatctggtggctcat

SEQ ID NO: 2388062 - DNA, 25 bp, Homo sapien
tgtgggcacaaaattaccagctttc

SEQ ID NO: 2388063 - DNA, 25 bp, Homo sapien
tcctaaagtgttctaccatggagtc

SEQ ID NO: 2388064 - DNA, 25 bp, Homo sapien
gattttgctcaatgctgtgaatgcc

SEQ ID NO: 2388065 - DNA, 25 bp, Homo sapien
taatcattcattgtgctgcagcctt

SEQ ID NO: 2388066 - DNA, 25 bp, Homo sapien
gggtcaagcttatttgtatctgtga

SEQ ID NO: 2388067 - DNA, 25 bp, Homo sapien
caagcttatttgtatctgtgaaaaa

SEQ ID NO: 2388068 - DNA, 25 bp, Homo sapien
cttaaaagacttgtcaacaacagaa

SEQ ID NO: 2388069 - DNA, 25 bp, Homo sapien
tttcttaaaagacttgtcaacaaca

SEQ ID NO: 2388070 - DNA, 25 bp, Homo sapien
agtcacatttcagctggatgcctgc

SEQ ID NO: 2388071 - DNA, 25 bp, Homo sapien
atcataggggtgcaccaagtcacat

SEQ ID NO: 2388072 - DNA, 25 bp, Homo sapien
gtcacatttcagctggatgcctgca

SEQ ID NO: 2388073 - DNA, 25 bp, Homo sapien
taggggtgcaccaagtcacatttca

SEQ ID NO: 2388074 - DNA, 25 bp, Homo sapien
tctgaagactcagcatgacctccgt

SEQ ID NO: 2388075 - DNA, 25 bp, Homo sapien
ggtatctctggtatcacgggcttgc

SEQ ID NO: 2388076 - DNA, 25 bp, Homo sapien
cacacaaggctcatgcagagacgcg

SEQ ID NO: 2388077 - DNA, 25 bp, Homo sapien
catgtgatgtgtgcgctactcctgc

SEQ ID NO: 2388078 - DNA, 25 bp, Homo sapien
gaagtttatgtctttcttcactcat

SEQ ID NO: 2388079 - DNA, 25 bp, Homo sapien
cggaagtttatgtctttcttcactc

SEQ ID NO: 2388080 - DNA, 25 bp, Homo sapien
tccggaagtttatgtctttcttcac

SEQ ID NO: 2388081 - DNA, 25 bp, Homo sapien
gcaaatccggaagtttatgtctttc

SEQ ID NO: 2388082 - DNA, 25 bp, Homo sapien
tgtttctggagtctaatcaagtgct

SEQ ID NO: 2388083 - DNA, 25 bp, Homo sapien
gtttctggagtctaatcaagtgctc

SEQ ID NO: 2388084 - DNA, 25 bp, Homo sapien
tctgtttctggagtctaatcaagtg

SEQ ID NO: 2388085 - DNA, 25 bp, Homo sapien
ctgtttctggagtctaatcaagtgc

SEQ ID NO: 2388086 - DNA, 25 bp, Homo sapien
tggttggctgtgccccgggcagggc

SEQ ID NO: 2388087 - DNA, 25 bp, Homo sapien
ctgtggtaggcgggtgacggctgca

SEQ ID NO: 2388088 - DNA, 25 bp, Homo sapien
tgtggtaggcgggtgacggctgcac

SEQ ID NO: 2388089 - DNA, 25 bp, Homo sapien
tcggggccgtgactgtggtgagctg

SEQ ID NO: 2388090 - DNA, 25 bp, Homo sapien
cggggccgtgactgtggtgagctgg

SEQ ID NO: 2388091 - DNA, 25 bp, Homo sapien
ctgggccatctggtacgtcagcgct

SEQ ID NO: 2388092 - DNA, 25 bp, Homo sapien
accacagggggcgtggccacagcaa

SEQ ID NO: 2388093 - DNA, 25 bp, Homo sapien
gcgctgacgtcagtcttgggccttg

SEQ ID NO: 2388094 - DNA, 25 bp, Homo sapien
gccatctggtacgtcagcgctgacg

SEQ ID NO: 2388095 - DNA, 25 bp, Homo sapien
tgcagctgccttatcacaacactga

SEQ ID NO: 2388096 - DNA, 25 bp, Homo sapien
gatcccgttgcgttgatggaagcac

SEQ ID NO: 2388097 - DNA, 25 bp, Homo sapien
cacaacactgatcccgttgcgttga

SEQ ID NO: 2388098 - DNA, 25 bp, Homo sapien
gttgcgttgatggaagcactgtgac

SEQ ID NO: 2388099 - DNA, 25 bp, Homo sapien
taaatggtgcgacttagtttctccc

SEQ ID NO: 2388100 - DNA, 25 bp, Homo sapien
tagaaaggtttgatgcaactcactc

SEQ ID NO: 2388101 - DNA, 25 bp, Homo sapien
gaacgttgtccctgagcttagctaa

SEQ ID NO: 2388102 - DNA, 25 bp, Homo sapien
gttaacacatggcagaacaactcag

SEQ ID NO: 2388103 - DNA, 25 bp, Homo sapien
aaaaggagaaataacgcccatgccg

SEQ ID NO: 2388104 - DNA, 25 bp, Homo sapien
aaaattaacacatgaggcgccgatg

SEQ ID NO: 2388105 - DNA, 25 bp, Homo sapien
gactctctacaggacgtgatatggc

SEQ ID NO: 2388106 - DNA, 25 bp, Homo sapien
aactgatggtgaaaagctcctaccg

SEQ ID NO: 2388107 - DNA, 25 bp, Homo sapien
ctggcaatgatggtaaaggaaatgc

SEQ ID NO: 2388108 - DNA, 25 bp, Homo sapien
tcattgccgctgatttgctcagagg

SEQ ID NO: 2388109 - DNA, 25 bp, Homo sapien
tgtttcagctttcggagctgctgca

SEQ ID NO: 2388110 - DNA, 25 bp, Homo sapien
cacgaagtgcgcatggacaaggatc

SEQ ID NO: 2388111 - DNA, 25 bp, Homo sapien
acagcacgcaggacacacgaagtgc

SEQ ID NO: 2388112 - DNA, 25 bp, Homo sapien
gtcagagttccttgacactcggccc

SEQ ID NO: 2388113 - DNA, 25 bp, Homo sapien
gcctcctcagctctgtttaacggct

SEQ ID NO: 2388114 - DNA, 25 bp, Homo sapien
tgtttaacggctgcctccaaaagga

SEQ ID NO: 2388115 - DNA, 25 bp, Homo sapien
tgtaaaaattacagggtcagagttc

SEQ ID NO: 2388116 - DNA, 25 bp, Homo sapien
gaactttggccctatacctgtgatg

SEQ ID NO: 2388117 - DNA, 25 bp, Homo sapien
gacccaggccatagagtgtctttag

SEQ ID NO: 2388118 - DNA, 25 bp, Homo sapien
gcaggtgtgcttcttttggccataa

SEQ ID NO: 2388119 - DNA, 25 bp, Homo sapien
tatagtctagggatcctgctggctg

SEQ ID NO: 2388120 - DNA, 25 bp, Homo sapien
catcagccggagcttgacaggttct

SEQ ID NO: 2388121 - DNA, 25 bp, Homo sapien
tgtagtcccaccaacaaggtatgag

SEQ ID NO: 2388122 - DNA, 25 bp, Homo sapien
gaaaacccgcgcctgtaattaagca

SEQ ID NO: 2388123 - DNA, 25 bp, Homo sapien
tgttttatggaaccggtgggctgcc

SEQ ID NO: 2388124 - DNA, 25 bp, Homo sapien
gggccacggaggctaggccactctc

SEQ ID NO: 2388125 - DNA, 25 bp, Homo sapien
cggacggtgggccacggaggctagg

SEQ ID NO: 2388126 - DNA, 25 bp, Homo sapien
gccgcggacggtgggccacggaggc

SEQ ID NO: 2388127 - DNA, 25 bp, Homo sapien
tggtgggccgcggacggtgggccac

SEQ ID NO: 2388128 - DNA, 25 bp, Homo sapien
atgtaggcctgcactggcgcggtcc

SEQ ID NO: 2388129 - DNA, 25 bp, Homo sapien
tgtaggcctgcactggcgcggtccc

SEQ ID NO: 2388130 - DNA, 25 bp, Homo sapien
gcctgcactggcgcggtccccgtgg

SEQ ID NO: 2388131 - DNA, 25 bp, Homo sapien
cactggcgcggtccccgtggccttg

SEQ ID NO: 2388132 - DNA, 25 bp, Homo sapien
agggctcaggcaggcgtccgtggct

SEQ ID NO: 2388133 - DNA, 25 bp, Homo sapien
ggctcaggcaggcgtccgtggctgg

SEQ ID NO: 2388134 - DNA, 25 bp, Homo sapien
tccgtggctgggcctcgagggctct

SEQ ID NO: 2388135 - DNA, 25 bp, Homo sapien
gctcaggcaggcgtccgtggctggg

SEQ ID NO: 2388136 - DNA, 25 bp, Homo sapien
ctgcagtgcattgggcaggcccgtc

SEQ ID NO: 2388137 - DNA, 25 bp, Homo sapien
ccccagagtttcgagatgtgagagg

SEQ ID NO: 2388138 - DNA, 25 bp, Homo sapien
gatccttccccagagtttcgagatg

SEQ ID NO: 2388139 - DNA, 25 bp, Homo sapien
ccttccccagagtttcgagatgtga

SEQ ID NO: 2388140 - DNA, 25 bp, Homo sapien
ggaggtgggaggagcgggcaccgtg

SEQ ID NO: 2388141 - DNA, 25 bp, Homo sapien
cgggaggtgggaggagcgggcaccg

SEQ ID NO: 2388142 - DNA, 25 bp, Homo sapien
accgtgggcacactcgggaggtggg

SEQ ID NO: 2388143 - DNA, 25 bp, Homo sapien
tcgggaggtgggaggagcgggcacc

SEQ ID NO: 2388144 - DNA, 25 bp, Homo sapien
ggaggtgggaggagcgggcaccgtg

SEQ ID NO: 2388145 - DNA, 25 bp, Homo sapien
cgggaggtgggaggagcgggcaccg

SEQ ID NO: 2388146 - DNA, 25 bp, Homo sapien
accgtgggcacactcgggaggtggg

SEQ ID NO: 2388147 - DNA, 25 bp, Homo sapien
tcgggaggtgggaggagcgggcacc

SEQ ID NO: 2388148 - DNA, 25 bp, Homo sapien
ggaggtgggaggagcgggcaccgtg

SEQ ID NO: 2388149 - DNA, 25 bp, Homo sapien
cgggaggtgggaggagcgggcaccg

SEQ ID NO: 2388150 - DNA, 25 bp, Homo sapien
accgtgggcacactcgggaggtggg

SEQ ID NO: 2388151 - DNA, 25 bp, Homo sapien
tcgggaggtgggaggagcgggcacc

SEQ ID NO: 2388152 - DNA, 25 bp, Homo sapien
ggaggtgggaggagcgggcaccgtg

SEQ ID NO: 2388153 - DNA, 25 bp, Homo sapien
cgggaggtgggaggagcgggcaccg

SEQ ID NO: 2388154 - DNA, 25 bp, Homo sapien
accgtgggcacactcgggaggtggg

SEQ ID NO: 2388155 - DNA, 25 bp, Homo sapien
tcgggaggtgggaggagcgggcacc

SEQ ID NO: 2388156 - DNA, 25 bp, Homo sapien
acataagatgtgggcctggccacac

SEQ ID NO: 2388157 - DNA, 25 bp, Homo sapien
gacataagatgtgggcctggccaca

SEQ ID NO: 2388158 - DNA, 25 bp, Homo sapien
cagacataagatgtgggcctggcca

SEQ ID NO: 2388159 - DNA, 25 bp, Homo sapien
ataagatgtgggcctggccacacac

SEQ ID NO: 2388160 - DNA, 25 bp, Homo sapien
ccgtcatgcttttgctgagagttgg

SEQ ID NO: 2388161 - DNA, 25 bp, Homo sapien
agctaatgttaaaaatcaagctctt

SEQ ID NO: 2388162 - DNA, 25 bp, Homo sapien
gagttgggggcattaaccttgagct

SEQ ID NO: 2388163 - DNA, 25 bp, Homo sapien
gcacccgtcatgcttttgctgagag

SEQ ID NO: 2388164 - DNA, 25 bp, Homo sapien
cagccactggtagggtgccagcaac

SEQ ID NO: 2388165 - DNA, 25 bp, Homo sapien
tggtctgcggcagtctctacagtgc

SEQ ID NO: 2388166 - DNA, 25 bp, Homo sapien
gaaccctgaaaagctgcagcagctg

SEQ ID NO: 2388167 - DNA, 25 bp, Homo sapien
tctggtgcacagaaccgcatcgtac

SEQ ID NO: 2388168 - DNA, 25 bp, Homo sapien
aacacggaacaacgcggattctcag

SEQ ID NO: 2388169 - DNA, 25 bp, Homo sapien
aacaacgcggattctcagccgccgg

SEQ ID NO: 2388170 - DNA, 25 bp, Homo sapien
cggaacaacgcggattctcagccgc

SEQ ID NO: 2388171 - DNA, 25 bp, Homo sapien
cccaacacggaacaacgcggattct

SEQ ID NO: 2388172 - DNA, 25 bp, Homo sapien
gtcgaacacggcgttggcctcactg

SEQ ID NO: 2388173 - DNA, 25 bp, Homo sapien
gcacggccaggatgtcgaacacggc

SEQ ID NO: 2388174 - DNA, 25 bp, Homo sapien
acggcgttggcctcactgcggctcg

SEQ ID NO: 2388175 - DNA, 25 bp, Homo sapien
ccaggatgtcgaacacggcgttggc

SEQ ID NO: 2388176 - DNA, 25 bp, Homo sapien
ccgaaaagacggctgcacgtgcgga

SEQ ID NO: 2388177 - DNA, 25 bp, Homo sapien
agacggctgcacgtgcggactgctt

SEQ ID NO: 2388178 - DNA, 25 bp, Homo sapien
tgcacgtgcggactgcttcctggat

SEQ ID NO: 2388179 - DNA, 25 bp, Homo sapien
cagcaaggccccgaaaagacggctg

SEQ ID NO: 2388180 - DNA, 25 bp, Homo sapien
cagcagctgtgatagcggtgtctca

SEQ ID NO: 2388181 - DNA, 25 bp, Homo sapien
tcatccacaccttgtacttccgtgt

SEQ ID NO: 2388182 - DNA, 25 bp, Homo sapien
caggagctctcccaagcgattgcag

SEQ ID NO: 2388183 - DNA, 25 bp, Homo sapien
tgtacttccgtgtggctccctggga

SEQ ID NO: 2388184 - DNA, 25 bp, Homo sapien
gtgcgctccttccagctgcacgaac

SEQ ID NO: 2388185 - DNA, 25 bp, Homo sapien
tccttccagctgcacgaacttcagg

SEQ ID NO: 2388186 - DNA, 25 bp, Homo sapien
ctctcgggggaacaggtagttgcct

SEQ ID NO: 2388187 - DNA, 25 bp, Homo sapien
tccagctgcacgaacttcaggagtg

SEQ ID NO: 2388188 - DNA, 25 bp, Homo sapien
cacggctgcctgcatggtgtggtag

SEQ ID NO: 2388189 - DNA, 25 bp, Homo sapien
caggtactcccggaactgggacagg

SEQ ID NO: 2388190 - DNA, 25 bp, Homo sapien
gtgctggccagtgacccgggccacg

SEQ ID NO: 2388191 - DNA, 25 bp, Homo sapien
cgggtgtcgtcgtagtccaggtact

SEQ ID NO: 2388192 - DNA, 25 bp, Homo sapien
agtgcctggacgccgccccccagtc

SEQ ID NO: 2388193 - DNA, 25 bp, Homo sapien
gagtgcctggacgccgccccccagt

SEQ ID NO: 2388194 - DNA, 25 bp, Homo sapien
ttcacatagaagctggagacggtgg

SEQ ID NO: 2388195 - DNA, 25 bp, Homo sapien
ccgcccgcttcacatagaagctgga

SEQ ID NO: 2388196 - DNA, 25 bp, Homo sapien
gcattgttccaaaaggcggggggca

SEQ ID NO: 2388197 - DNA, 25 bp, Homo sapien
gctggagacggtgggctcccggcgg

SEQ ID NO: 2388198 - DNA, 25 bp, Homo sapien
tcaggtgagcaaccttccaggtgtc

SEQ ID NO: 2388199 - DNA, 25 bp, Homo sapien
gagcaaccttccaggtgtcccacag

SEQ ID NO: 2388200 - DNA, 25 bp, Homo sapien
ggtgagcaaccttccaggtgtccca

SEQ ID NO: 2388201 - DNA, 25 bp, Homo sapien
cttcaggtgagcaaccttccaggtg

SEQ ID NO: 2388202 - DNA, 25 bp, Homo sapien
tggcctggaaaaccctcctgtgctc

SEQ ID NO: 2388203 - DNA, 25 bp, Homo sapien
aggatggcgtcatgcacaatcagca

SEQ ID NO: 2388204 - DNA, 25 bp, Homo sapien
tcgatcatgagcgtgggctgcgcca

SEQ ID NO: 2388205 - DNA, 25 bp, Homo sapien
gccagctgcggcaggatggcgtcat

SEQ ID NO: 2388206 - DNA, 25 bp, Homo sapien
caggcgcgggtgaggaagtcgatca

SEQ ID NO: 2388207 - DNA, 25 bp, Homo sapien
tgcccacactgagtgtaagtctgtg

SEQ ID NO: 2388208 - DNA, 25 bp, Homo sapien
gcccacactgagtgtaagtctgtgg

SEQ ID NO: 2388209 - DNA, 25 bp, Homo sapien
tggagctgcagtgacctcgctccca

SEQ ID NO: 2388210 - DNA, 25 bp, Homo sapien
aggctggagctgcagtgacctcgct

SEQ ID NO: 2388211 - DNA, 25 bp, Homo sapien
tgtgaatcaagatgaacagcccgtt

SEQ ID NO: 2388212 - DNA, 25 bp, Homo sapien
ggttgtgtttgtgaatcaagatgaa

SEQ ID NO: 2388213 - DNA, 25 bp, Homo sapien
gaacagcccgttcaaggccaagagg

SEQ ID NO: 2388214 - DNA, 25 bp, Homo sapien
tcaagatgaacagcccgttcaaggc

SEQ ID NO: 2388215 - DNA, 25 bp, Homo sapien
gggtctcactcggcgccccttcctc

SEQ ID NO: 2388216 - DNA, 25 bp, Homo sapien
agggtctcactcggcgccccttcct

SEQ ID NO: 2388217 - DNA, 25 bp, Homo sapien
agcagggcccgggaactgaggcctc

SEQ ID NO: 2388218 - DNA, 25 bp, Homo sapien
aagcgggcgcggtacttgacgtgaa

SEQ ID NO: 2388219 - DNA, 25 bp, Homo sapien
gtccaagaggccgtagagcttccgg

SEQ ID NO: 2388220 - DNA, 25 bp, Homo sapien
ggcgcggtacttgacgtgaaagaca

SEQ ID NO: 2388221 - DNA, 25 bp, Homo sapien
gcttccggtagaagtcagggtactc

SEQ ID NO: 2388222 - DNA, 25 bp, Homo sapien
gccgtgtggacggtgcacgaggacc

SEQ ID NO: 2388223 - DNA, 25 bp, Homo sapien
agggccgtgtggacggtgcacgagg

SEQ ID NO: 2388224 - DNA, 25 bp, Homo sapien
acggtgcacgaggacccggcaggca

SEQ ID NO: 2388225 - DNA, 25 bp, Homo sapien
gtgtggacggtgcacgaggacccgg

SEQ ID NO: 2388226 - DNA, 25 bp, Homo sapien
ctctccagggtcgtaggggtcggcg

SEQ ID NO: 2388227 - DNA, 25 bp, Homo sapien
ctcctctccagggtcgtaggggtcg

SEQ ID NO: 2388228 - DNA, 25 bp, Homo sapien
agcagtggcgcgatgctgacctcag

SEQ ID NO: 2388229 - DNA, 25 bp, Homo sapien
tgatgacgctggcggctttggacac

SEQ ID NO: 2388230 - DNA, 25 bp, Homo sapien
ctttggacacctcagggtggtagtg

SEQ ID NO: 2388231 - DNA, 25 bp, Homo sapien
ccgtgagctccagcagtggcgcgat

SEQ ID NO: 2388232 - DNA, 25 bp, Homo sapien
tgggcacagagttcacccggccgtc

SEQ ID NO: 2388233 - DNA, 25 bp, Homo sapien
gtgctgggcacagagttcacccggc

SEQ ID NO: 2388234 - DNA, 25 bp, Homo sapien
ggataaactccagtggcaccggctc

SEQ ID NO: 2388235 - DNA, 25 bp, Homo sapien
ataaactccagtggcaccggctcgg

SEQ ID NO: 2388236 - DNA, 25 bp, Homo sapien
gggtcagctgagatttattcacagg

SEQ ID NO: 2388237 - DNA, 25 bp, Homo sapien
gtcagctgagatttattcacaggtg

SEQ ID NO: 2388238 - DNA, 25 bp, Homo sapien
ggggtcagctgagatttattcacag

SEQ ID NO: 2388239 - DNA, 25 bp, Homo sapien
ggtcagctgagatttattcacaggt

SEQ ID NO: 2388240 - DNA, 25 bp, Homo sapien
tcctgcaaaaacatttattcacagg

SEQ ID NO: 2388241 - DNA, 25 bp, Homo sapien
aaattgacctcagttgtgtgtgctc

SEQ ID NO: 2388242 - DNA, 25 bp, Homo sapien
ggctaggggcatcagacctccagct

SEQ ID NO: 2388243 - DNA, 25 bp, Homo sapien
tctgcgagttcttggtccaggctag

SEQ ID NO: 2388244 - DNA, 25 bp, Homo sapien
aagccaccaggccagtctgcgagtt

SEQ ID NO: 2388245 - DNA, 25 bp, Homo sapien
caaagaagatgggagccttgtttgt

SEQ ID NO: 2388246 - DNA, 25 bp, Homo sapien
tgttctttcctgtgccccacagtca

SEQ ID NO: 2388247 - DNA, 25 bp, Homo sapien
ctgctcggggacaaagaagatggga

SEQ ID NO: 2388248 - DNA, 25 bp, Homo sapien
cttgtttgtggtttcttcttgttct

SEQ ID NO: 2388249 - DNA, 25 bp, Homo sapien
tggacaccctcacgggcactggggc

SEQ ID NO: 2388250 - DNA, 25 bp, Homo sapien
ggctccacggatgcagaaggcagcc

SEQ ID NO: 2388251 - DNA, 25 bp, Homo sapien
tggattcatgcacggccccacaggg

SEQ ID NO: 2388252 - DNA, 25 bp, Homo sapien
agaaggcagcctggcccggtagctc

SEQ ID NO: 2388253 - DNA, 25 bp, Homo sapien
cgagggcaacacgaggcccgtcgac

SEQ ID NO: 2388254 - DNA, 25 bp, Homo sapien
caatcagagtccgtgttcctgtgac

SEQ ID NO: 2388255 - DNA, 25 bp, Homo sapien
actcaagcccgacataggccaggac

SEQ ID NO: 2388256 - DNA, 25 bp, Homo sapien
tcagtgcggttcctcctcatctcgg

SEQ ID NO: 2388257 - DNA, 25 bp, Homo sapien
ctccaggtgcgcgcccccccacgcc

SEQ ID NO: 2388258 - DNA, 25 bp, Homo sapien
ccttattcacaatagtccagagccg

SEQ ID NO: 2388259 - DNA, 25 bp, Homo sapien
cccggtgcgtgagccctcaagtcag

SEQ ID NO: 2388260 - DNA, 25 bp, Homo sapien
cagagccgcaagcagcccggtgcgt

SEQ ID NO: 2388261 - DNA, 25 bp, Homo sapien
gggcctgtgcctgaaccggcccttg

SEQ ID NO: 2388262 - DNA, 25 bp, Homo sapien
cagggtggcctcatcttaatgttcc

SEQ ID NO: 2388263 - DNA, 25 bp, Homo sapien
gacgtgaattttggaaagacagccc

SEQ ID NO: 2388264 - DNA, 25 bp, Homo sapien
tattgcccaaataggcccagaaact

SEQ ID NO: 2388265 - DNA, 25 bp, Homo sapien
taatgttccatcagctaaggccttc

SEQ ID NO: 2388266 - DNA, 25 bp, Homo sapien
cagagcgtgggggtctcccaaacac

SEQ ID NO: 2388267 - DNA, 25 bp, Homo sapien
tggtgttgaccaggggcccaaccac

SEQ ID NO: 2388268 - DNA, 25 bp, Homo sapien
actccctcgtcatcacaggcaagtt

SEQ ID NO: 2388269 - DNA, 25 bp, Homo sapien
gctggtgttgaccaggggcccaacc

SEQ ID NO: 2388270 - DNA, 25 bp, Homo sapien
tggtggaagcagtgaacaaatacac

SEQ ID NO: 2388271 - DNA, 25 bp, Homo sapien
ctggtggaagcagtgaacaaataca

SEQ ID NO: 2388272 - DNA, 25 bp, Homo sapien
agcccgacgacaggggctcggagca

SEQ ID NO: 2388273 - DNA, 25 bp, Homo sapien
agccagtacgggtgcaggcactccc

SEQ ID NO: 2388274 - DNA, 25 bp, Homo sapien
gcagccagtacgggtgcaggcactc

SEQ ID NO: 2388275 - DNA, 25 bp, Homo sapien
gctcggagcagccagtacgggtgca

SEQ ID NO: 2388276 - DNA, 25 bp, Homo sapien
gatgtgcaacgtcccttatcttgca

SEQ ID NO: 2388277 - DNA, 25 bp, Homo sapien
tgaaggatgtgcaacgtcccttatc

SEQ ID NO: 2388278 - DNA, 25 bp, Homo sapien
tcccttatcttgcaacgtgcagtgc

SEQ ID NO: 2388279 - DNA, 25 bp, Homo sapien
gcaacgtcccttatcttgcaacgtg

SEQ ID NO: 2388280 - DNA, 25 bp, Homo sapien
tggtcatctcggcgaggagggagcg

SEQ ID NO: 2388281 - DNA, 25 bp, Homo sapien
gagcctggcgttagctgcgtgctgt

SEQ ID NO: 2388282 - DNA, 25 bp, Homo sapien
gtcagggagcctggcgttagctgcg

SEQ ID NO: 2388283 - DNA, 25 bp, Homo sapien
ctggcgttagctgcgtgctgtgtgg

SEQ ID NO: 2388284 - DNA, 25 bp, Homo sapien
gaaggccaaggtgcttcgaacccag

SEQ ID NO: 2388285 - DNA, 25 bp, Homo sapien
gttttgtgcctttaactaatctctc

SEQ ID NO: 2388286 - DNA, 25 bp, Homo sapien
cctttaactaatctctctggcacta

SEQ ID NO: 2388287 - DNA, 25 bp, Homo sapien
aactaatctctctggcactagagct

SEQ ID NO: 2388288 - DNA, 25 bp, Homo sapien
tgttgctttgcttgccttgaccaga

SEQ ID NO: 2388289 - DNA, 25 bp, Homo sapien
aggagaaccctacgagccctgttgc

SEQ ID NO: 2388290 - DNA, 25 bp, Homo sapien
gatgacagtttcacgatgaaggccg

SEQ ID NO: 2388291 - DNA, 25 bp, Homo sapien
gatgagtgtgacgtctgagcctcgc

SEQ ID NO: 2388292 - DNA, 25 bp, Homo sapien
tccgtgtcgtggtgtgaaggctgta

SEQ ID NO: 2388293 - DNA, 25 bp, Homo sapien
tccgtgtcgaggtctgaaggctgca

SEQ ID NO: 2388294 - DNA, 25 bp, Homo sapien
cgtgtcacggtctgaaggctggcat

SEQ ID NO: 2388295 - DNA, 25 bp, Homo sapien
cgctgccatgcggagtgtccactga

SEQ ID NO: 2388296 - DNA, 25 bp, Homo sapien
tttccgtgtcgaggtctgagggctg

SEQ ID NO: 2388297 - DNA, 25 bp, Homo sapien
gtggggtttccgtgtcgaggtctga

SEQ ID NO: 2388298 - DNA, 25 bp, Homo sapien
gtggggtttccgtgtcacggtctga

SEQ ID NO: 2388299 - DNA, 25 bp, Homo sapien
ggtttccgtgtcgaggtctgagggc

SEQ ID NO: 2388300 - DNA, 25 bp, Homo sapien
ggtgtccctggactcatgctgcagg

SEQ ID NO: 2388301 - DNA, 25 bp, Homo sapien
cattctgctcgagagagctggcagc

SEQ ID NO: 2388302 - DNA, 25 bp, Homo sapien
cacgcgcaccaactgatgcagtcga

SEQ ID NO: 2388303 - DNA, 25 bp, Homo sapien
gcttctgggacgtgtctgcattctg

SEQ ID NO: 2388304 - DNA, 25 bp, Homo sapien
cttaaacgggcaggacagcgtggca

SEQ ID NO: 2388305 - DNA, 25 bp, Homo sapien
cgattgtgtcgcgtttcctcccaaa

SEQ ID NO: 2388306 - DNA, 25 bp, Homo sapien
cccttaaacgggcaggacagcgtgg

SEQ ID NO: 2388307 - DNA, 25 bp, Homo sapien
ctggaaaccaacagcgattgtgtcg

SEQ ID NO: 2388308 - DNA, 25 bp, Homo sapien
gaaacctgtgtctgttctgccgaag

SEQ ID NO: 2388309 - DNA, 25 bp, Homo sapien
tgttctgccgaagcggccacaaagc

SEQ ID NO: 2388310 - DNA, 25 bp, Homo sapien
acccagagctgcggagacccggcgt

SEQ ID NO: 2388311 - DNA, 25 bp, Homo sapien
aggcagggccccgatgaaacctgtg

SEQ ID NO: 2388312 - DNA, 25 bp, Homo sapien
tccaggacgtcgtcagcaaatgacc

SEQ ID NO: 2388313 - DNA, 25 bp, Homo sapien
gtcgtcagcaaatgacccttccagg

SEQ ID NO: 2388314 - DNA, 25 bp, Homo sapien
agcaaatgacccttccaggaaagcc

SEQ ID NO: 2388315 - DNA, 25 bp, Homo sapien
gctggtctccaggacgtcgtcagca

SEQ ID NO: 2388316 - DNA, 25 bp, Homo sapien
ggcagactgcccacaagggcgaaaa

SEQ ID NO: 2388317 - DNA, 25 bp, Homo sapien
gaggtgaactttggccacagaagca

SEQ ID NO: 2388318 - DNA, 25 bp, Homo sapien
ctcgagctcagaacggtgccaagtg

SEQ ID NO: 2388319 - DNA, 25 bp, Homo sapien
aacacctcccaaggtagccacgtgg

SEQ ID NO: 2388320 - DNA, 25 bp, Homo sapien
tgttcctgctcattgagctcgtccc

SEQ ID NO: 2388321 - DNA, 25 bp, Homo sapien
tgctgcctctcgccatgggacactt

SEQ ID NO: 2388322 - DNA, 25 bp, Homo sapien
ggtccatcagagctggtttcagtgt

SEQ ID NO: 2388323 - DNA, 25 bp, Homo sapien
tgggacacttctggcggcagcccca

SEQ ID NO: 2388324 - DNA, 25 bp, Homo sapien
ccgtcgggaagaggccgtgtggtca

SEQ ID NO: 2388325 - DNA, 25 bp, Homo sapien
ctcgcaggcaggtttcggacaggtt

SEQ ID NO: 2388326 - DNA, 25 bp, Homo sapien
tcagatgggactcgcaggcaggttt

SEQ ID NO: 2388327 - DNA, 25 bp, Homo sapien
ctgccgttggcagctgtcagatggg

SEQ ID NO: 2388328 - DNA, 25 bp, Homo sapien
cacgcgtgcaccttgtggataagca

SEQ ID NO: 2388329 - DNA, 25 bp, Homo sapien
tgtgcggatccagacacgcgtgcac

SEQ ID NO: 2388330 - DNA, 25 bp, Homo sapien
tctggacgtgcgtgctcatgggcac

SEQ ID NO: 2388331 - DNA, 25 bp, Homo sapien
cagacgtgcgtctctctggacgtgc

SEQ ID NO: 2388332 - DNA, 25 bp, Homo sapien
cagtggcctcggatgttcaaatggt

SEQ ID NO: 2388333 - DNA, 25 bp, Homo sapien
taggaagggttgcaggtctctcctt

SEQ ID NO: 2388334 - DNA, 25 bp, Homo sapien
tgaagtcaggccacgtgataccctc

SEQ ID NO: 2388335 - DNA, 25 bp, Homo sapien
gaagggcatgccaaaatctggacag

SEQ ID NO: 2388336 - DNA, 25 bp, Homo sapien
aactctctgctgcaacaggtgaggg

SEQ ID NO: 2388337 - DNA, 25 bp, Homo sapien
tctctgctgcaacaggtgaggggct

SEQ ID NO: 2388338 - DNA, 25 bp, Homo sapien
tctgctgcaacaggtgaggggctgg

SEQ ID NO: 2388339 - DNA, 25 bp, Homo sapien
aaactctctgctgcaacaggtgagg

SEQ ID NO: 2388340 - DNA, 25 bp, Homo sapien
ctacaatcaggacgatgatgacgga

SEQ ID NO: 2388341 - DNA, 25 bp, Homo sapien
tacaatcaggacgatgatgacggat

SEQ ID NO: 2388342 - DNA, 25 bp, Homo sapien
caatcaggacgatgatgacggatgc

SEQ ID NO: 2388343 - DNA, 25 bp, Homo sapien
atcaggacgatgatgacggatgccg

SEQ ID NO: 2388344 - DNA, 25 bp, Homo sapien
tgttctccggagaggccgctacttg

SEQ ID NO: 2388345 - DNA, 25 bp, Homo sapien
gaaaccacgacacttctctgcatgg

SEQ ID NO: 2388346 - DNA, 25 bp, Homo sapien
tctctgcatggtgctcgtctgtgtt

SEQ ID NO: 2388347 - DNA, 25 bp, Homo sapien
catgtgagggtgagtgaaaccacga

SEQ ID NO: 2388348 - DNA, 25 bp, Homo sapien
gcagacagatgttcccagaggcatg

SEQ ID NO: 2388349 - DNA, 25 bp, Homo sapien
cttcagtcagcgttggagacccagt

SEQ ID NO: 2388350 - DNA, 25 bp, Homo sapien
gaagccattgacatgaacatcggca

SEQ ID NO: 2388351 - DNA, 25 bp, Homo sapien
tcagtcagcgttggagacccagtgg

SEQ ID NO: 2388352 - DNA, 25 bp, Homo sapien
cgtgttggcggcagggatggtggta

SEQ ID NO: 2388353 - DNA, 25 bp, Homo sapien
cggtggtgttgtgtctggcggtgct

SEQ ID NO: 2388354 - DNA, 25 bp, Homo sapien
tggcaaagacaagccggccggcagc

SEQ ID NO: 2388355 - DNA, 25 bp, Homo sapien
tcagcctgtcggtggcaaagacaag

SEQ ID NO: 2388356 - DNA, 25 bp, Homo sapien
cctactgcataaacagagattttat

SEQ ID NO: 2388357 - DNA, 25 bp, Homo sapien
attttattagtggatagttctctga

SEQ ID NO: 2388358 - DNA, 25 bp, Homo sapien
tgtcaacaaagctgtgccgggattg

SEQ ID NO: 2388359 - DNA, 25 bp, Homo sapien
tatagccttgaaactgtaaccaccc

SEQ ID NO: 2388360 - DNA, 25 bp, Homo sapien
tcccagaggtcgtgcccagacctgc

SEQ ID NO: 2388361 - DNA, 25 bp, Homo sapien
cctcccagaggtcgtgcccagacct

SEQ ID NO: 2388362 - DNA, 25 bp, Homo sapien
cccctcccagaggtcgtgcccagac

SEQ ID NO: 2388363 - DNA, 25 bp, Homo sapien
ccagaggtcgtgcccagacctgcat

SEQ ID NO: 2388364 - DNA, 25 bp, Homo sapien
tggctgccggagcaagtgaccgcaa

SEQ ID NO: 2388365 - DNA, 25 bp, Homo sapien
tccctccgtcttcagagcctcggcg

SEQ ID NO: 2388366 - DNA, 25 bp, Homo sapien
aagtgaccgcaacgccgcacagatt

SEQ ID NO: 2388367 - DNA, 25 bp, Homo sapien
gcacagatttatcatctcgcagctc

SEQ ID NO: 2388368 - DNA, 25 bp, Homo sapien
ctgcttccacggtgacgggcctgag

SEQ ID NO: 2388369 - DNA, 25 bp, Homo sapien
ccacggtgacgggcctgagatgggc

SEQ ID NO: 2388370 - DNA, 25 bp, Homo sapien
cttccacggtgacgggcctgagatg

SEQ ID NO: 2388371 - DNA, 25 bp, Homo sapien
cacggtgacgggcctgagatgggct

SEQ ID NO: 2388372 - DNA, 25 bp, Homo sapien
ggagatccaagctaagacccgaagt

SEQ ID NO: 2388373 - DNA, 25 bp, Homo sapien
acacagtctgctgctttgggcccag

SEQ ID NO: 2388374 - DNA, 25 bp, Homo sapien
gaacgctgggacgtcactgcatgtg

SEQ ID NO: 2388375 - DNA, 25 bp, Homo sapien
taagatcacgccctgataaacctgc

SEQ ID NO: 2388376 - DNA, 25 bp, Homo sapien
tcttattgacccaacaaggctgctg

SEQ ID NO: 2388377 - DNA, 25 bp, Homo sapien
gattctcttaatcagaagctccgag

SEQ ID NO: 2388378 - DNA, 25 bp, Homo sapien
cccaaatagaattcatcacaaggct

SEQ ID NO: 2388379 - DNA, 25 bp, Homo sapien
ggagtctatctttcctgagaccaag

SEQ ID NO: 2388380 - DNA, 25 bp, Homo sapien
gcccttcctggggaagacttccaga

SEQ ID NO: 2388381 - DNA, 25 bp, Homo sapien
cctggggaagacttccagaaaagtg

SEQ ID NO: 2388382 - DNA, 25 bp, Homo sapien
acactttccattctgcccttcctgg

SEQ ID NO: 2388383 - DNA, 25 bp, Homo sapien
gaagacttccagaaaagtgggccag

SEQ ID NO: 2388384 - DNA, 25 bp, Homo sapien
ggtcacaggtgtcccagtcacagct

SEQ ID NO: 2388385 - DNA, 25 bp, Homo sapien
ggtgtcccagtcacagctgtccccg

SEQ ID NO: 2388386 - DNA, 25 bp, Homo sapien
tcccagtcacagctgtccccggtca

SEQ ID NO: 2388387 - DNA, 25 bp, Homo sapien
tggtcacaggtgtcccagtcacagc

SEQ ID NO: 2388388 - DNA, 25 bp, Homo sapien
tgtccccggtcacaggtgtcccagg

SEQ ID NO: 2388389 - DNA, 25 bp, Homo sapien
aggtgtctccggtcacaggtgtccc

SEQ ID NO: 2388390 - DNA, 25 bp, Homo sapien
aggcacaggtgtccccggtcacagg

SEQ ID NO: 2388391 - DNA, 25 bp, Homo sapien
ccggtcacaggtgtctccggtcaca

SEQ ID NO: 2388392 - DNA, 25 bp, Homo sapien
gatcataggtaacccaggcacaggt

SEQ ID NO: 2388393 - DNA, 25 bp, Homo sapien
cctgatcataggtaacccaggcaca

SEQ ID NO: 2388394 - DNA, 25 bp, Homo sapien
tcacgactgagtccaggtgtcccca

SEQ ID NO: 2388395 - DNA, 25 bp, Homo sapien
cccagaacggatgtcactggtcaca

SEQ ID NO: 2388396 - DNA, 25 bp, Homo sapien
taaacgttcctgtgcactcttgggc

SEQ ID NO: 2388397 - DNA, 25 bp, Homo sapien
gccgccaggcgttttaacacagtga

SEQ ID NO: 2388398 - DNA, 25 bp, Homo sapien
aatagtctgctgtgtgaatccaccg

SEQ ID NO: 2388399 - DNA, 25 bp, Homo sapien
cgtttaacgttctgaggagccgcca

SEQ ID NO: 2388400 - DNA, 25 bp, Homo sapien
ttgtttatctgatctccgaagatgt

SEQ ID NO: 2388401 - DNA, 25 bp, Homo sapien
agatgtgtgaccccagtgaagggca

SEQ ID NO: 2388402 - DNA, 25 bp, Homo sapien
tgatctccgaagatgttcagatgtg

SEQ ID NO: 2388403 - DNA, 25 bp, Homo sapien
aggtgtccagatggccaaccaggga

SEQ ID NO: 2388404 - DNA, 25 bp, Homo sapien
gcgccgccgggctgagtgtgcgccg

SEQ ID NO: 2388405 - DNA, 25 bp, Homo sapien
cgccgccgggctgagtgtgcgccgc

SEQ ID NO: 2388406 - DNA, 25 bp, Homo sapien
gccgccgggctgagtgtgcgccgcg

SEQ ID NO: 2388407 - DNA, 25 bp, Homo sapien
ggcgccgccgggctgagtgtgcgcc

SEQ ID NO: 2388408 - DNA, 25 bp, Homo sapien
ggccggtgaccttgacgccccgcgc

SEQ ID NO: 2388409 - DNA, 25 bp, Homo sapien
ccggtgaccttgacgccccgcgcct

SEQ ID NO: 2388410 - DNA, 25 bp, Homo sapien
gccgcgcgtgcgccccgtcgggccg

SEQ ID NO: 2388411 - DNA, 25 bp, Homo sapien
gcgtgcgccccgtcgggccggtgac

SEQ ID NO: 2388412 - DNA, 25 bp, Homo sapien
cgttctccttgccggggctgggctc

SEQ ID NO: 2388413 - DNA, 25 bp, Homo sapien
ggctcgtcgcccgacgacggactct

SEQ ID NO: 2388414 - DNA, 25 bp, Homo sapien
gcggaggcccgcgttctccttgccg

SEQ ID NO: 2388415 - DNA, 25 bp, Homo sapien
gctgggctcgggctcgtcgcccgac

SEQ ID NO: 2388416 - DNA, 25 bp, Homo sapien
atggcgaagccgtcgatgacctcct

SEQ ID NO: 2388417 - DNA, 25 bp, Homo sapien
gcgatggcgaagccgtcgatgacct

SEQ ID NO: 2388418 - DNA, 25 bp, Homo sapien
gatggcgaagccgtcgatgacctcc

SEQ ID NO: 2388419 - DNA, 25 bp, Homo sapien
tggcgaagccgtcgatgacctcctc

SEQ ID NO: 2388420 - DNA, 25 bp, Homo sapien
tcttccagatgcgacggtctgggcg

SEQ ID NO: 2388421 - DNA, 25 bp, Homo sapien
atcgcccgacgcgtcaactccgggc

SEQ ID NO: 2388422 - DNA, 25 bp, Homo sapien
tgctgggtcttccagatgcgacggt

SEQ ID NO: 2388423 - DNA, 25 bp, Homo sapien
acggtctgggcgagcggtgggcacc

SEQ ID NO: 2388424 - DNA, 25 bp, Homo sapien
gtccccagagtttggatgagaactt

SEQ ID NO: 2388425 - DNA, 25 bp, Homo sapien
gatgagaacttgaagaggacttgct

SEQ ID NO: 2388426 - DNA, 25 bp, Homo sapien
agtccccagagtttggatgagaact

SEQ ID NO: 2388427 - DNA, 25 bp, Homo sapien
ttggatgagaacttgaagaggactt

SEQ ID NO: 2388428 - DNA, 25 bp, Homo sapien
aagtgacactgtcaggccccacacg

SEQ ID NO: 2388429 - DNA, 25 bp, Homo sapien
cacacgcggtgctcggcaggccggg

SEQ ID NO: 2388430 - DNA, 25 bp, Homo sapien
cagtgtggcctcagcggtccccgga

SEQ ID NO: 2388431 - DNA, 25 bp, Homo sapien
aggtccaagtgacactgtcaggccc

SEQ ID NO: 2388432 - DNA, 25 bp, Homo sapien
ggccagcgacgctgctttcagggcc

SEQ ID NO: 2388433 - DNA, 25 bp, Homo sapien
gggccagcgacgctgctttcagggc

SEQ ID NO: 2388434 - DNA, 25 bp, Homo sapien
cgaggggccagcgacgctgctttca

SEQ ID NO: 2388435 - DNA, 25 bp, Homo sapien
ggaccgaggggccagcgacgctgct

SEQ ID NO: 2388436 - DNA, 25 bp, Homo sapien
caggcacgcggcgtagccacggcaa

SEQ ID NO: 2388437 - DNA, 25 bp, Homo sapien
gcaccaggccccaaacgcgaaggtg

SEQ ID NO: 2388438 - DNA, 25 bp, Homo sapien
acgcggcgtagccacggcaaggaca

SEQ ID NO: 2388439 - DNA, 25 bp, Homo sapien
tgcgcagcacgtgcggaggtgcagg

SEQ ID NO: 2388440 - DNA, 25 bp, Homo sapien
ctttctccagagaagcaatcacaca

SEQ ID NO: 2388441 - DNA, 25 bp, Homo sapien
tatggcggacgtctggcgacagacc

SEQ ID NO: 2388442 - DNA, 25 bp, Homo sapien
caatcacacaaaggcgggatatggc

SEQ ID NO: 2388443 - DNA, 25 bp, Homo sapien
tcaggagccttaaaactgccagcca

SEQ ID NO: 2388444 - DNA, 25 bp, Homo sapien
tcagctcatctggacaggggcagga

SEQ ID NO: 2388445 - DNA, 25 bp, Homo sapien
ctgtggcccgcagtctcacccttca

SEQ ID NO: 2388446 - DNA, 25 bp, Homo sapien
gtggcccgcagtctcacccttcaaa

SEQ ID NO: 2388447 - DNA, 25 bp, Homo sapien
cccgcagtctcacccttcaaaccaa

SEQ ID NO: 2388448 - DNA, 25 bp, Homo sapien
tggctgtggcccgcagtctcaccct

SEQ ID NO: 2388449 - DNA, 25 bp, Homo sapien
cccaagcacccagtgagggcatgtg

SEQ ID NO: 2388450 - DNA, 25 bp, Homo sapien
ttcccaagcacccagtgagggcatg

SEQ ID NO: 2388451 - DNA, 25 bp, Homo sapien
gacattcccaagcacccagtgaggg

SEQ ID NO: 2388452 - DNA, 25 bp, Homo sapien
gggctggctgacattcccaagcacc

SEQ ID NO: 2388453 - DNA, 25 bp, Homo sapien
gcccctgcaggaccaccaaaagcat

SEQ ID NO: 2388454 - DNA, 25 bp, Homo sapien
gggctgcccctgcaggaccaccaaa

SEQ ID NO: 2388455 - DNA, 25 bp, Homo sapien
tgcccctgcaggaccaccaaaagca

SEQ ID NO: 2388456 - DNA, 25 bp, Homo sapien
gctgcccctgcaggaccaccaaaag

SEQ ID NO: 2388457 - DNA, 25 bp, Homo sapien
tgacacctcacttgttccagaggcc

SEQ ID NO: 2388458 - DNA, 25 bp, Homo sapien
acctcacttgttccagaggcctcca

SEQ ID NO: 2388459 - DNA, 25 bp, Homo sapien
acacctcacttgttccagaggcctc

SEQ ID NO: 2388460 - DNA, 25 bp, Homo sapien
gacacctcacttgttccagaggcct

SEQ ID NO: 2388461 - DNA, 25 bp, Homo sapien
cacagaaactgccccggcaagcctc

SEQ ID NO: 2388462 - DNA, 25 bp, Homo sapien
ccacagaaactgccccggcaagcct

SEQ ID NO: 2388463 - DNA, 25 bp, Homo sapien
cagaaactgccccggcaagcctcac

SEQ ID NO: 2388464 - DNA, 25 bp, Homo sapien
acagaaactgccccggcaagcctca

SEQ ID NO: 2388465 - DNA, 25 bp, Homo sapien
gaggagaggcctccgacatctccgg

SEQ ID NO: 2388466 - DNA, 25 bp, Homo sapien
ggagaggcctccgacatctccggct

SEQ ID NO: 2388467 - DNA, 25 bp, Homo sapien
aggaggagaggcctccgacatctcc

SEQ ID NO: 2388468 - DNA, 25 bp, Homo sapien
cgaggaggagaggcctccgacatct

SEQ ID NO: 2388469 - DNA, 25 bp, Homo sapien
tgtccctccggtaagggcagacgac

SEQ ID NO: 2388470 - DNA, 25 bp, Homo sapien
gctgtccctccggtaagggcagacg

SEQ ID NO: 2388471 - DNA, 25 bp, Homo sapien
cttggctgtccctccggtaagggca

SEQ ID NO: 2388472 - DNA, 25 bp, Homo sapien
tccctccggtaagggcagacgacag

SEQ ID NO: 2388473 - DNA, 25 bp, Homo sapien
tacggcgcgtcaagtttagggtcca

SEQ ID NO: 2388474 - DNA, 25 bp, Homo sapien
gacagaatcctctcggggagggcac

SEQ ID NO: 2388475 - DNA, 25 bp, Homo sapien
ctggtgcagacagatacggcgcgtc

SEQ ID NO: 2388476 - DNA, 25 bp, Homo sapien
ccagggagaagcgtccacgaaagga

SEQ ID NO: 2388477 - DNA, 25 bp, Homo sapien
gtcccatctcgactccttcagagca

SEQ ID NO: 2388478 - DNA, 25 bp, Homo sapien
cccaggccccctgtaaacctgctgg

SEQ ID NO: 2388479 - DNA, 25 bp, Homo sapien
ctggtcccctctcgtcccatctcga

SEQ ID NO: 2388480 - DNA, 25 bp, Homo sapien
agagcaccttctagcctgcggacag

SEQ ID NO: 2388481 - DNA, 25 bp, Homo sapien
tccttccgctcatgtggcttcaggg

SEQ ID NO: 2388482 - DNA, 25 bp, Homo sapien
catcgcaggcgggttcgaggtcctg

SEQ ID NO: 2388483 - DNA, 25 bp, Homo sapien
ggccgcctgttctcactgggctccg

SEQ ID NO: 2388484 - DNA, 25 bp, Homo sapien
ggcttcttgatgagacgacgctccc

SEQ ID NO: 2388485 - DNA, 25 bp, Homo sapien
cacgccgcacacgtgagcggatggc

SEQ ID NO: 2388486 - DNA, 25 bp, Homo sapien
tatagacactctggacacctgtagt

SEQ ID NO: 2388487 - DNA, 25 bp, Homo sapien
gacaggacagccctcggcaatgagc

SEQ ID NO: 2388488 - DNA, 25 bp, Homo sapien
cactgccgggaccaagtattccctt

SEQ ID NO: 2388489 - DNA, 25 bp, Homo sapien
agcggccccccttctggggagcaca

SEQ ID NO: 2388490 - DNA, 25 bp, Homo sapien
gcggccccccttctggggagcacac

SEQ ID NO: 2388491 - DNA, 25 bp, Homo sapien
ggagcggccccccttctggggagca

SEQ ID NO: 2388492 - DNA, 25 bp, Homo sapien
gagcggccccccttctggggagcac

SEQ ID NO: 2388493 - DNA, 25 bp, Homo sapien
gttgctggcgctgggccgggccgtt

SEQ ID NO: 2388494 - DNA, 25 bp, Homo sapien
ctgggctggagctgttgctggcgct

SEQ ID NO: 2388495 - DNA, 25 bp, Homo sapien
gctgttgctggcgctgggccgggcc

SEQ ID NO: 2388496 - DNA, 25 bp, Homo sapien
tggagctgttgctggcgctgggccg

SEQ ID NO: 2388497 - DNA, 25 bp, Homo sapien
tgcccagggtccgggagtgccgacg

SEQ ID NO: 2388498 - DNA, 25 bp, Homo sapien
tgcgctgacccaggagtggccgctg

SEQ ID NO: 2388499 - DNA, 25 bp, Homo sapien
gcccagaagtgaccgccggggctgg

SEQ ID NO: 2388500 - DNA, 25 bp, Homo sapien
tggcagggctgtttcaggcccagaa

SEQ ID NO: 2388501 - DNA, 25 bp, Homo sapien
ccagaagtgaccgctggggccagct

SEQ ID NO: 2388502 - DNA, 25 bp, Homo sapien
tgggagtgcccaatgcggccggcag

SEQ ID NO: 2388503 - DNA, 25 bp, Homo sapien
ctgggagtgcccaatgcggccggca

SEQ ID NO: 2388504 - DNA, 25 bp, Homo sapien
aggagccgctggggccggcagggct

SEQ ID NO: 2388505 - DNA, 25 bp, Homo sapien
ggagtgcccaatgcggccggcaggg

SEQ ID NO: 2388506 - DNA, 25 bp, Homo sapien
ggccacagtgacacgggctggccca

SEQ ID NO: 2388507 - DNA, 25 bp, Homo sapien
gctggccacagtgacacgggctggc

SEQ ID NO: 2388508 - DNA, 25 bp, Homo sapien
agtgacacgggctggcccacggccg

SEQ ID NO: 2388509 - DNA, 25 bp, Homo sapien
gcaggcgccggcagtagaggcaggg

SEQ ID NO: 2388510 - DNA, 25 bp, Homo sapien
gctgcgctgtcctgaggatgcccta

SEQ ID NO: 2388511 - DNA, 25 bp, Homo sapien
ctgcgctgtcctgaggatgccctac

SEQ ID NO: 2388512 - DNA, 25 bp, Homo sapien
ccggctgcgctgtcctgaggatgcc

SEQ ID NO: 2388513 - DNA, 25 bp, Homo sapien
ggctgcgctgtcctgaggatgccct

SEQ ID NO: 2388514 - DNA, 25 bp, Homo sapien
agatccaatagggaccgccgcggct

SEQ ID NO: 2388515 - DNA, 25 bp, Homo sapien
tccgggcccatgagcggctgcttct

SEQ ID NO: 2388516 - DNA, 25 bp, Homo sapien
ggccgtcggcgtggtcggagggtga

SEQ ID NO: 2388517 - DNA, 25 bp, Homo sapien
tcggcgtggtcggagggtgaggagt

SEQ ID NO: 2388518 - DNA, 25 bp, Homo sapien
caggatcgggtccaccgggaccgca

SEQ ID NO: 2388519 - DNA, 25 bp, Homo sapien
agatggggcctgacgggccatcccg

SEQ ID NO: 2388520 - DNA, 25 bp, Homo sapien
agcgagagccggggctgacgggccg

SEQ ID NO: 2388521 - DNA, 25 bp, Homo sapien
ggcacaggatcgggtccaccgggac

SEQ ID NO: 2388522 - DNA, 25 bp, Homo sapien
gaggaccactggttagagcctgccc

SEQ ID NO: 2388523 - DNA, 25 bp, Homo sapien
taagccctgcgcttctgggatggag

SEQ ID NO: 2388524 - DNA, 25 bp, Homo sapien
ccttgtagtgtgaggtgtgcccgac

SEQ ID NO: 2388525 - DNA, 25 bp, Homo sapien
tcccttttgggcgagtggcgtgcct

SEQ ID NO: 2388526 - DNA, 25 bp, Homo sapien
tcagtctggtactgcggtcctgggc

SEQ ID NO: 2388527 - DNA, 25 bp, Homo sapien
gagggactgtggctattcacctgca

SEQ ID NO: 2388528 - DNA, 25 bp, Homo sapien
tgcccagacaaggatcccgaatgag

SEQ ID NO: 2388529 - DNA, 25 bp, Homo sapien
gggatgtcccctatcactgcagctt

SEQ ID NO: 2388530 - DNA, 25 bp, Homo sapien
ctaggtcgtgtaccggccctaggag

SEQ ID NO: 2388531 - DNA, 25 bp, Homo sapien
ccctaggagaggcttcgtgccaaat

SEQ ID NO: 2388532 - DNA, 25 bp, Homo sapien
ggagccctctaggtcgtgtaccggc

SEQ ID NO: 2388533 - DNA, 25 bp, Homo sapien
gaggcttcgtgccaaatccctgcac

SEQ ID NO: 2388534 - DNA, 25 bp, Homo sapien
cagcatgggcatgagataagcactc

SEQ ID NO: 2388535 - DNA, 25 bp, Homo sapien
tgtaaatgtaaaacacctgctggct

SEQ ID NO: 2388536 - DNA, 25 bp, Homo sapien
cagccttgtggttattgggcgcaga

SEQ ID NO: 2388537 - DNA, 25 bp, Homo sapien
acagtgctgccctaggagagtccag

SEQ ID NO: 2388538 - DNA, 25 bp, Homo sapien
cgatgaggtagaggatgaggagaca

SEQ ID NO: 2388539 - DNA, 25 bp, Homo sapien
tcaaaccatagagccgatgaggtag

SEQ ID NO: 2388540 - DNA, 25 bp, Homo sapien
ccatagagccgatgaggtagaggat

SEQ ID NO: 2388541 - DNA, 25 bp, Homo sapien
ccgatgaggtagaggatgaggagac

SEQ ID NO: 2388542 - DNA, 25 bp, Homo sapien
tctggtttgtctgtgccaagtgagg

SEQ ID NO: 2388543 - DNA, 25 bp, Homo sapien
ggttccaggttcacccactgaaatg

SEQ ID NO: 2388544 - DNA, 25 bp, Homo sapien
ccataaattttgacgtagtattcct

SEQ ID NO: 2388545 - DNA, 25 bp, Homo sapien
gaatgactgtcaacttctagcccag

SEQ ID NO: 2388546 - DNA, 25 bp, Homo sapien
gaaggagaacgactctcagagttgg

SEQ ID NO: 2388547 - DNA, 25 bp, Homo sapien
ggtagccacttcttagcacccacag

SEQ ID NO: 2388548 - DNA, 25 bp, Homo sapien
gcacctactggtgaggtgtggcact

SEQ ID NO: 2388549 - DNA, 25 bp, Homo sapien
cccagctgtatgagactgcatagcc

SEQ ID NO: 2388550 - DNA, 25 bp, Homo sapien
tggatgatgactatgggcccctcac

SEQ ID NO: 2388551 - DNA, 25 bp, Homo sapien
ggcccctcacattcagcaagagcag

SEQ ID NO: 2388552 - DNA, 25 bp, Homo sapien
gctgccttcgctcccgaagggacag

SEQ ID NO: 2388553 - DNA, 25 bp, Homo sapien
agccatggatgatgactatgggccc

SEQ ID NO: 2388554 - DNA, 25 bp, Homo sapien
tgcaccttgtagtgacacgccccag

SEQ ID NO: 2388555 - DNA, 25 bp, Homo sapien
caacttggatctggaacaattctgc

SEQ ID NO: 2388556 - DNA, 25 bp, Homo sapien
cttgtagtgacacgccccagcacat

SEQ ID NO: 2388557 - DNA, 25 bp, Homo sapien
gaagcccagcggtctccctctctgg

SEQ ID NO: 2388558 - DNA, 25 bp, Homo sapien
cagcacctccttcggtcggctccat

SEQ ID NO: 2388559 - DNA, 25 bp, Homo sapien
ccacagcacctccttcggtcggctc

SEQ ID NO: 2388560 - DNA, 25 bp, Homo sapien
gctggttcgcaccaccccatctggc

SEQ ID NO: 2388561 - DNA, 25 bp, Homo sapien
ggctggttcgcaccaccccatctgg

SEQ ID NO: 2388562 - DNA, 25 bp, Homo sapien
cacgtgcttggagccgccccttcca

SEQ ID NO: 2388563 - DNA, 25 bp, Homo sapien
agtgacacgagaaccgccacgtgct

SEQ ID NO: 2388564 - DNA, 25 bp, Homo sapien
cggctcagtgacacgagaaccgcca

SEQ ID NO: 2388565 - DNA, 25 bp, Homo sapien
tccacaagccgctgactttgaaggc

SEQ ID NO: 2388566 - DNA, 25 bp, Homo sapien
cgaggacgctgtcgtcgtcactgtc

SEQ ID NO: 2388567 - DNA, 25 bp, Homo sapien
cccctttggacacggtgaccttcat

SEQ ID NO: 2388568 - DNA, 25 bp, Homo sapien
tgtcgtcgtcactgtcccggtcgcc

SEQ ID NO: 2388569 - DNA, 25 bp, Homo sapien
gagctggtggcttcgaggacgctgt

SEQ ID NO: 2388570 - DNA, 25 bp, Homo sapien
cgggcgcgggcagctgggtactcac

SEQ ID NO: 2388571 - DNA, 25 bp, Homo sapien
cagcggcttcctggacgcccttgtg

SEQ ID NO: 2388572 - DNA, 25 bp, Homo sapien
actcggactggacgcccttgtgcgg

SEQ ID NO: 2388573 - DNA, 25 bp, Homo sapien
tccgggcgcgggcagctgggtactc

SEQ ID NO: 2388574 - DNA, 25 bp, Homo sapien
gctgctgcattgtgcccagaatgtg

SEQ ID NO: 2388575 - DNA, 25 bp, Homo sapien
ggtgggagggccttcgttgccctga

SEQ ID NO: 2388576 - DNA, 25 bp, Homo sapien
gccttcgttgccctgagtttgagcc

SEQ ID NO: 2388577 - DNA, 25 bp, Homo sapien
gttgccctgagtttgagcctcagcc

SEQ ID NO: 2388578 - DNA, 25 bp, Homo sapien
tccccgagaccgcatgcgcagagct

SEQ ID NO: 2388579 - DNA, 25 bp, Homo sapien
tagcctctccccgagaccgcatgcg

SEQ ID NO: 2388580 - DNA, 25 bp, Homo sapien
agagtagcctctccccgagaccgca

SEQ ID NO: 2388581 - DNA, 25 bp, Homo sapien
ctctccccgagaccgcatgcgcaga

SEQ ID NO: 2388582 - DNA, 25 bp, Homo sapien
ggccttagcccatttccacactctg

SEQ ID NO: 2388583 - DNA, 25 bp, Homo sapien
caccaggagctggtctgtcaggaca

SEQ ID NO: 2388584 - DNA, 25 bp, Homo sapien
tcctgcccatggagtctgcatcagg

SEQ ID NO: 2388585 - DNA, 25 bp, Homo sapien
tgaccctgaacacgcacaccaggag

SEQ ID NO: 2388586 - DNA, 25 bp, Homo sapien
agatggctcttcttgatgggcacaa

SEQ ID NO: 2388587 - DNA, 25 bp, Homo sapien
ggcatgtgggcatagccaggcagat

SEQ ID NO: 2388588 - DNA, 25 bp, Homo sapien
ctcagtttgtgcagggtgggcatct

SEQ ID NO: 2388589 - DNA, 25 bp, Homo sapien
ctgggcagccgcatggaggagaatt

SEQ ID NO: 2388590 - DNA, 25 bp, Homo sapien
gtgcatgcccggccatggacacgct

SEQ ID NO: 2388591 - DNA, 25 bp, Homo sapien
tgtgcatgcccggccatggacacgc

SEQ ID NO: 2388592 - DNA, 25 bp, Homo sapien
tgcatgcccggccatggacacgctc

SEQ ID NO: 2388593 - DNA, 25 bp, Homo sapien
catgcccggccatggacacgctcag

SEQ ID NO: 2388594 - DNA, 25 bp, Homo sapien
taaagacagcgcctgtatcgggccc

SEQ ID NO: 2388595 - DNA, 25 bp, Homo sapien
gccttgtaaagacagcgcctgtatc

SEQ ID NO: 2388596 - DNA, 25 bp, Homo sapien
acagcgcctgtatcgggccctggca

SEQ ID NO: 2388597 - DNA, 25 bp, Homo sapien
cttgtaaagacagcgcctgtatcgg

SEQ ID NO: 2388598 - DNA, 25 bp, Homo sapien
tcacacactgtgatgtacacatggc

SEQ ID NO: 2388599 - DNA, 25 bp, Homo sapien
taccacacaggcatggcacaacatg

SEQ ID NO: 2388600 - DNA, 25 bp, Homo sapien
catgcacatgcagttatacgtacgc

SEQ ID NO: 2388601 - DNA, 25 bp, Homo sapien
catgcatgcaaagacaccgttacgt

SEQ ID NO: 2388602 - DNA, 25 bp, Homo sapien
ggactggcatttgcactgcgacgcc

SEQ ID NO: 2388603 - DNA, 25 bp, Homo sapien
tggactggcatttgcactgcgacgc

SEQ ID NO: 2388604 - DNA, 25 bp, Homo sapien
ctggactggcatttgcactgcgacg

SEQ ID NO: 2388605 - DNA, 25 bp, Homo sapien
agcccttgacctccagtccaggccc

SEQ ID NO: 2388606 - DNA, 25 bp, Homo sapien
ggcacagtccgtgcttgccttgggc

SEQ ID NO: 2388607 - DNA, 25 bp, Homo sapien
ctggcacagtccgtgcttgccttgg

SEQ ID NO: 2388608 - DNA, 25 bp, Homo sapien
gcccttgacctccagtccaggcccg

SEQ ID NO: 2388609 - DNA, 25 bp, Homo sapien
tgggctctgcgtcgcccactggagg

SEQ ID NO: 2388610 - DNA, 25 bp, Homo sapien
gagaggctgtgccacgtggcggccc

SEQ ID NO: 2388611 - DNA, 25 bp, Homo sapien
gaaagctctgggctctgcgtcgccc

SEQ ID NO: 2388612 - DNA, 25 bp, Homo sapien
tgccagggaaagctctgggctctgc

SEQ ID NO: 2388613 - DNA, 25 bp, Homo sapien
cttcctctcgctgtcctgggaggtg

SEQ ID NO: 2388614 - DNA, 25 bp, Homo sapien
tcctctcgctgtcctgggaggtgga

SEQ ID NO: 2388615 - DNA, 25 bp, Homo sapien
tgggaggtggaggcacccttgcaac

SEQ ID NO: 2388616 - DNA, 25 bp, Homo sapien
cctgggaggtggaggcacccttgca

SEQ ID NO: 2388617 - DNA, 25 bp, Homo sapien
ctagcatagacactctccgcccgct

SEQ ID NO: 2388618 - DNA, 25 bp, Homo sapien
cctgatcctagcatagacactctcc

SEQ ID NO: 2388619 - DNA, 25 bp, Homo sapien
agcatagacactctccgcccgctcc

SEQ ID NO: 2388620 - DNA, 25 bp, Homo sapien
tgatcctagcatagacactctccgc

SEQ ID NO: 2388621 - DNA, 25 bp, Homo sapien
ggtcagggggcgtgtggagtccact

SEQ ID NO: 2388622 - DNA, 25 bp, Homo sapien
ctcggaagcccacgggatggctggc

SEQ ID NO: 2388623 - DNA, 25 bp, Homo sapien
ccactgagaggggatgtctggcctc

SEQ ID NO: 2388624 - DNA, 25 bp, Homo sapien
acaggtggctcggaagcccacggga

SEQ ID NO: 2388625 - DNA, 25 bp, Homo sapien
ctattctgtctgaacctgcagccca

SEQ ID NO: 2388626 - DNA, 25 bp, Homo sapien
cccagaaactccagcaacccggatg

SEQ ID NO: 2388627 - DNA, 25 bp, Homo sapien
cagaaactccagcaacccggatggt

SEQ ID NO: 2388628 - DNA, 25 bp, Homo sapien
tgtctgaacctgcagcccagaaact

SEQ ID NO: 2388629 - DNA, 25 bp, Homo sapien
gaccccgacatgcagaccagctttg

SEQ ID NO: 2388630 - DNA, 25 bp, Homo sapien
gacatgcagaccagctttgctggtg

SEQ ID NO: 2388631 - DNA, 25 bp, Homo sapien
ctgggccacaggaccccgacatgca

SEQ ID NO: 2388632 - DNA, 25 bp, Homo sapien
agaccagctttgctggtggccctgg

SEQ ID NO: 2388633 - DNA, 25 bp, Homo sapien
cagcaggcccaggtggtcggggcgg

SEQ ID NO: 2388634 - DNA, 25 bp, Homo sapien
agcaggcccaggtggtcggggcggt

SEQ ID NO: 2388635 - DNA, 25 bp, Homo sapien
gaggaacctgggccagggcccagtg

SEQ ID NO: 2388636 - DNA, 25 bp, Homo sapien
taggaggaacctgggccagggccca

SEQ ID NO: 2388637 - DNA, 25 bp, Homo sapien
cgtccgggccgctctcgctgtcaca

SEQ ID NO: 2388638 - DNA, 25 bp, Homo sapien
tgtcgtccgggccgctctcgctgtc

SEQ ID NO: 2388639 - DNA, 25 bp, Homo sapien
cttgtcgtccgggccgctctcgctg

SEQ ID NO: 2388640 - DNA, 25 bp, Homo sapien
tcgtccgggccgctctcgctgtcac

SEQ ID NO: 2388641 - DNA, 25 bp, Homo sapien
cagacacggtaccggccccagccct

SEQ ID NO: 2388642 - DNA, 25 bp, Homo sapien
agacacggtaccggccccagccctg

SEQ ID NO: 2388643 - DNA, 25 bp, Homo sapien
cctccagacacggtaccggccccag

SEQ ID NO: 2388644 - DNA, 25 bp, Homo sapien
tccagacacggtaccggccccagcc

SEQ ID NO: 2388645 - DNA, 25 bp, Homo sapien
gcagaaggagagcccccccggaggc

SEQ ID NO: 2388646 - DNA, 25 bp, Homo sapien
cagaaggagagcccccccggaggct

SEQ ID NO: 2388647 - DNA, 25 bp, Homo sapien
gccctccggggcctgatgctcctcg

SEQ ID NO: 2388648 - DNA, 25 bp, Homo sapien
agcaggtgacggttcctccccgcag

SEQ ID NO: 2388649 - DNA, 25 bp, Homo sapien
cggccacagcaggtgacggttcctc

SEQ ID NO: 2388650 - DNA, 25 bp, Homo sapien
caggtgacggttcctccccgcaggg

SEQ ID NO: 2388651 - DNA, 25 bp, Homo sapien
cagcctgcacagacatcgtttgggt

SEQ ID NO: 2388652 - DNA, 25 bp, Homo sapien
tctcagaaataaacgccccagtgtg

SEQ ID NO: 2388653 - DNA, 25 bp, Homo sapien
gaccctccgtgtgcaggaatgccaa

SEQ ID NO: 2388654 - DNA, 25 bp, Homo sapien
gtctcggaggctggcgttacccttg

SEQ ID NO: 2388655 - DNA, 25 bp, Homo sapien
caaacgccgagttctaccacgtggg

SEQ ID NO: 2388656 - DNA, 25 bp, Homo sapien
ggtggtcatgatctcggtcctcaaa

SEQ ID NO: 2388657 - DNA, 25 bp, Homo sapien
cagatacaacaaaggcgcagcctgg

SEQ ID NO: 2388658 - DNA, 25 bp, Homo sapien
cctagggaagaatggatgggcctcc

SEQ ID NO: 2388659 - DNA, 25 bp, Homo sapien
cacccggaatgtcgggagaaaagca

SEQ ID NO: 2388660 - DNA, 25 bp, Homo sapien
actctctgagcaaggctgtggtgca

SEQ ID NO: 2388661 - DNA, 25 bp, Homo sapien
ccacgctggcagtgtggctttgcca

SEQ ID NO: 2388662 - DNA, 25 bp, Homo sapien
tctgtctgtcgcagaggtgtgcact

SEQ ID NO: 2388663 - DNA, 25 bp, Homo sapien
gctttgccatggaacgactctgagg

SEQ ID NO: 2388664 - DNA, 25 bp, Homo sapien
ctggagaggaacctcccacgggacg

SEQ ID NO: 2388665 - DNA, 25 bp, Homo sapien
cgacgagaaaacagacgtgctgctg

SEQ ID NO: 2388666 - DNA, 25 bp, Homo sapien
aaaacagacgtgctgctggcgtggc

SEQ ID NO: 2388667 - DNA, 25 bp, Homo sapien
aaacagacgtgctgctggcgtggct

SEQ ID NO: 2388668 - DNA, 25 bp, Homo sapien
gagaaaacagacgtgctgctggcgt

SEQ ID NO: 2388669 - DNA, 25 bp, Homo sapien
tgtgtccacataggcacttccgggc

SEQ ID NO: 2388670 - DNA, 25 bp, Homo sapien
gccctgaagcctgtactctgaggac

SEQ ID NO: 2388671 - DNA, 25 bp, Homo sapien
ttccgggcgcactgcatgccgcaag

SEQ ID NO: 2388672 - DNA, 25 bp, Homo sapien
actgcatgccgcaagccacagggcc

SEQ ID NO: 2388673 - DNA, 25 bp, Homo sapien
aagtcgcccccaaagccctgctgtt

SEQ ID NO: 2388674 - DNA, 25 bp, Homo sapien
ccaacaagtcgcccccaaagccctg

SEQ ID NO: 2388675 - DNA, 25 bp, Homo sapien
aacaagtcgcccccaaagccctgct

SEQ ID NO: 2388676 - DNA, 25 bp, Homo sapien
gtcgcccccaaagccctgctgtttc

SEQ ID NO: 2388677 - DNA, 25 bp, Homo sapien
agagcgacctcattgccactgtgga

SEQ ID NO: 2388678 - DNA, 25 bp, Homo sapien
gctgctgtagctgcaaacggctgtg

SEQ ID NO: 2388679 - DNA, 25 bp, Homo sapien
tgcaaagtcggagacagctccgagc

SEQ ID NO: 2388680 - DNA, 25 bp, Homo sapien
cctgaaccccgtgattttacacttg

SEQ ID NO: 2388681 - DNA, 25 bp, Homo sapien
gggtggccctggcccgtccaggcga

SEQ ID NO: 2388682 - DNA, 25 bp, Homo sapien
gccggggacgcgcatgtccgccgcg

SEQ ID NO: 2388683 - DNA, 25 bp, Homo sapien
tggccctggcccgtccaggcgaccc

SEQ ID NO: 2388684 - DNA, 25 bp, Homo sapien
caggcgacccctctccccgcgtgcc

SEQ ID NO: 2388685 - DNA, 25 bp, Homo sapien
tcgccggcgccccaggcagtcgccc

SEQ ID NO: 2388686 - DNA, 25 bp, Homo sapien
gcgccccaggcagtcgcccctagtc

SEQ ID NO: 2388687 - DNA, 25 bp, Homo sapien
cggcgccccaggcagtcgcccctag

SEQ ID NO: 2388688 - DNA, 25 bp, Homo sapien
gccccaggcagtcgcccctagtccc

SEQ ID NO: 2388689 - DNA, 25 bp, Homo sapien
ttctggggctcgttcctccacgcgg

SEQ ID NO: 2388690 - DNA, 25 bp, Homo sapien
cctccacgcggtccctcagctcttt

SEQ ID NO: 2388691 - DNA, 25 bp, Homo sapien
ccagacccgcttaacttctcggcca

SEQ ID NO: 2388692 - DNA, 25 bp, Homo sapien
cagatgacccaaatggggtggcagc

SEQ ID NO: 2388693 - DNA, 25 bp, Homo sapien
ggggtcggggtcctgcagcccaggc

SEQ ID NO: 2388694 - DNA, 25 bp, Homo sapien
ggtcggggtcctgcagcccaggctt

SEQ ID NO: 2388695 - DNA, 25 bp, Homo sapien
ccggggtcggggtcctgcagcccag

SEQ ID NO: 2388696 - DNA, 25 bp, Homo sapien
gggtcggggtcctgcagcccaggct

SEQ ID NO: 2388697 - DNA, 25 bp, Homo sapien
tcacgtcgcaagggcctgaaccaca

SEQ ID NO: 2388698 - DNA, 25 bp, Homo sapien
cacagagaagagcagcaggtccatg

SEQ ID NO: 2388699 - DNA, 25 bp, Homo sapien
accacagagaagagcagcaggtcca

SEQ ID NO: 2388700 - DNA, 25 bp, Homo sapien
gtcgcaagggcctgaaccacagaga

SEQ ID NO: 2388701 - DNA, 25 bp, Homo sapien
gctgtgggggccaggtgtggcgtag

SEQ ID NO: 2388702 - DNA, 25 bp, Homo sapien
gggggccagacatgggatgcaggct

SEQ ID NO: 2388703 - DNA, 25 bp, Homo sapien
gtgggggccagacatgggatgcagg

SEQ ID NO: 2388704 - DNA, 25 bp, Homo sapien
gccagacatgggatgcaggctgtgg

SEQ ID NO: 2388705 - DNA, 25 bp, Homo sapien
gaggcggctcagggtccaccggggc

SEQ ID NO: 2388706 - DNA, 25 bp, Homo sapien
cggctcagggtccaccggggcctgg

SEQ ID NO: 2388707 - DNA, 25 bp, Homo sapien
gctcagggtccaccggggcctggtg

SEQ ID NO: 2388708 - DNA, 25 bp, Homo sapien
gcggctcagggtccaccggggcctg

SEQ ID NO: 2388709 - DNA, 25 bp, Homo sapien
tcccctgaatcccacgtggcccagc

SEQ ID NO: 2388710 - DNA, 25 bp, Homo sapien
agctgcttcccctgaatcccacgtg

SEQ ID NO: 2388711 - DNA, 25 bp, Homo sapien
tgcttcccctgaatcccacgtggcc

SEQ ID NO: 2388712 - DNA, 25 bp, Homo sapien
ttcccctgaatcccacgtggcccag

SEQ ID NO: 2388713 - DNA, 25 bp, Homo sapien
tgggaagagacctgctgtccccatg

SEQ ID NO: 2388714 - DNA, 25 bp, Homo sapien
tcctatcaccccaaccaaaatccca

SEQ ID NO: 2388715 - DNA, 25 bp, Homo sapien
tctggaacacgtggattactaggtc

SEQ ID NO: 2388716 - DNA, 25 bp, Homo sapien
tgccacagcacacgtttcctatcac

SEQ ID NO: 2388717 - DNA, 25 bp, Homo sapien
taggtgcccgcgtgtcggcgtctat

SEQ ID NO: 2388718 - DNA, 25 bp, Homo sapien
gtagaatgtgtccaccaggagagag

SEQ ID NO: 2388719 - DNA, 25 bp, Homo sapien
gggcacaagagactaggcttaaact

SEQ ID NO: 2388720 - DNA, 25 bp, Homo sapien
catgtgtgtttacgtaggtgcccgc

SEQ ID NO: 2388721 - DNA, 25 bp, Homo sapien
tgtacgtgggcacactcgggttcac

SEQ ID NO: 2388722 - DNA, 25 bp, Homo sapien
ctcgggttcacgtacagggacacac

SEQ ID NO: 2388723 - DNA, 25 bp, Homo sapien
acgtgtacatgaggacagttgggta

SEQ ID NO: 2388724 - DNA, 25 bp, Homo sapien
ttgggtacgtgtacgtgggcacact

SEQ ID NO: 2388725 - DNA, 25 bp, Homo sapien
tcaagtacgtacacacaggcacata

SEQ ID NO: 2388726 - DNA, 25 bp, Homo sapien
cactcgggtacgtacacacacggat

SEQ ID NO: 2388727 - DNA, 25 bp, Homo sapien
cacgtacatgggcacaaactcaagt

SEQ ID NO: 2388728 - DNA, 25 bp, Homo sapien
catgaacatgggcacactcgggtac

SEQ ID NO: 2388729 - DNA, 25 bp, Homo sapien
gaggcaccctctatggaccaggaag

SEQ ID NO: 2388730 - DNA, 25 bp, Homo sapien
cagtgccttataaagggccccagag

SEQ ID NO: 2388731 - DNA, 25 bp, Homo sapien
gcccgcacggactaagacttgagat

SEQ ID NO: 2388732 - DNA, 25 bp, Homo sapien
catgtgaacactgtcaggcggcacg

SEQ ID NO: 2388733 - DNA, 25 bp, Homo sapien
ccaaccactgcccagcacaggcgcc

SEQ ID NO: 2388734 - DNA, 25 bp, Homo sapien
ctcctgctcccaaccactgcccagc

SEQ ID NO: 2388735 - DNA, 25 bp, Homo sapien
ctgctcccaaccactgcccagcaca

SEQ ID NO: 2388736 - DNA, 25 bp, Homo sapien
ctcccaaccactgcccagcacaggc

SEQ ID NO: 2388737 - DNA, 25 bp, Homo sapien
ctttatcggttcccggcgcaaagag

SEQ ID NO: 2388738 - DNA, 25 bp, Homo sapien
gttcccggcgcaaagagcttctcag

SEQ ID NO: 2388739 - DNA, 25 bp, Homo sapien
cggttcccggcgcaaagagcttctc

SEQ ID NO: 2388740 - DNA, 25 bp, Homo sapien
tcccggcgcaaagagcttctcagag

SEQ ID NO: 2388741 - DNA, 25 bp, Homo sapien
aaggccatgcctgctgaagggcagt

SEQ ID NO: 2388742 - DNA, 25 bp, Homo sapien
ctgatgtgaacaggcttccaacttg

SEQ ID NO: 2388743 - DNA, 25 bp, Homo sapien
gctttgctgtgatgctctgatgtga

SEQ ID NO: 2388744 - DNA, 25 bp, Homo sapien
ccaacttgaaggcaggtgaaggcca

SEQ ID NO: 2388745 - DNA, 25 bp, Homo sapien
agccaccacccagcgaccacagaga

SEQ ID NO: 2388746 - DNA, 25 bp, Homo sapien
gcagccaccacccagcgaccacaga

SEQ ID NO: 2388747 - DNA, 25 bp, Homo sapien
ccaccacccagcgaccacagagagg

SEQ ID NO: 2388748 - DNA, 25 bp, Homo sapien
tggggccaggccttccacagcagcc

SEQ ID NO: 2388749 - DNA, 25 bp, Homo sapien
gcggagggagctggcttgggagcct

SEQ ID NO: 2388750 - DNA, 25 bp, Homo sapien
cccgcccggcggagggagctggctt

SEQ ID NO: 2388751 - DNA, 25 bp, Homo sapien
gagcctgggccgtggccaggggtgg

SEQ ID NO: 2388752 - DNA, 25 bp, Homo sapien
gagctggcttgggagcctgggccgt

SEQ ID NO: 2388753 - DNA, 25 bp, Homo sapien
cttggcctccgacttctcaagcgct

SEQ ID NO: 2388754 - DNA, 25 bp, Homo sapien
ccttggcctccgacttctcaagcgc

SEQ ID NO: 2388755 - DNA, 25 bp, Homo sapien
ttggcctccgacttctcaagcgctg

SEQ ID NO: 2388756 - DNA, 25 bp, Homo sapien
tggcctccgacttctcaagcgctgg

SEQ ID NO: 2388757 - DNA, 25 bp, Homo sapien
cttcaccaagggattggcgcgggag

SEQ ID NO: 2388758 - DNA, 25 bp, Homo sapien
ggatgcaggcacgtgtgtcgggagc

SEQ ID NO: 2388759 - DNA, 25 bp, Homo sapien
gctgtggcccgcgaaggcgcccagg

SEQ ID NO: 2388760 - DNA, 25 bp, Homo sapien
ccagggatgcaggcacgtgtgtcgg

SEQ ID NO: 2388761 - DNA, 25 bp, Homo sapien
gtggcccgcgaaggcgcccagggat

SEQ ID NO: 2388762 - DNA, 25 bp, Homo sapien
gtggcgacagcgacacgtgcttccc

SEQ ID NO: 2388763 - DNA, 25 bp, Homo sapien
cgtgtggcgacagcgacacgtgctt

SEQ ID NO: 2388764 - DNA, 25 bp, Homo sapien
gggcccggcccgtgtggcgacagcg

SEQ ID NO: 2388765 - DNA, 25 bp, Homo sapien
cccgtgtggcgacagcgacacgtgc

SEQ ID NO: 2388766 - DNA, 25 bp, Homo sapien
ggggcagtgtcgggggtgcggcaaa

SEQ ID NO: 2388767 - DNA, 25 bp, Homo sapien
cgggggcagtgtcgggggtgcggca

SEQ ID NO: 2388768 - DNA, 25 bp, Homo sapien
gcagtgtcgggggtgcggcaaacat

SEQ ID NO: 2388769 - DNA, 25 bp, Homo sapien
ggcagtgtcgggggtgcggcaaaca

SEQ ID NO: 2388770 - DNA, 25 bp, Homo sapien
ggcaatacatgattggctggctgaa

SEQ ID NO: 2388771 - DNA, 25 bp, Homo sapien
gagaggagcctgtgaccaagtacca

SEQ ID NO: 2388772 - DNA, 25 bp, Homo sapien
atcagaattcccgaatgaggctggc

SEQ ID NO: 2388773 - DNA, 25 bp, Homo sapien
gctggctgaatgagaccgccaggct

SEQ ID NO: 2388774 - DNA, 25 bp, Homo sapien
tggccgcgggctcccggcggggcga

SEQ ID NO: 2388775 - DNA, 25 bp, Homo sapien
ccggcggggcgaggcggatagtcac

SEQ ID NO: 2388776 - DNA, 25 bp, Homo sapien
cgcgggctcccggcggggcgaggcg

SEQ ID NO: 2388777 - DNA, 25 bp, Homo sapien
ctcccggcggggcgaggcggatagt

SEQ ID NO: 2388778 - DNA, 25 bp, Homo sapien
agctcttgcctgagcagctcgtgat

SEQ ID NO: 2388779 - DNA, 25 bp, Homo sapien
cagaaaccgcgtgttcagctcttgc

SEQ ID NO: 2388780 - DNA, 25 bp, Homo sapien
gtgctgatggaactccgcccgcagc

SEQ ID NO: 2388781 - DNA, 25 bp, Homo sapien
cggggaagggggcgaatgtgtgttg

SEQ ID NO: 2388782 - DNA, 25 bp, Homo sapien
aagggggcgaatgtgtgttggtgct

SEQ ID NO: 2388783 - DNA, 25 bp, Homo sapien
gaagggggcgaatgtgtgttggtgc

SEQ ID NO: 2388784 - DNA, 25 bp, Homo sapien
gggggcgaatgtgtgttggtgctgg

SEQ ID NO: 2388785 - DNA, 25 bp, Homo sapien
gtgcggcgggcggcgtcgggggcag

SEQ ID NO: 2388786 - DNA, 25 bp, Homo sapien
gcggcgggcggcgtcgggggcagcc

SEQ ID NO: 2388787 - DNA, 25 bp, Homo sapien
tgcggcgggcggcgtcgggggcagc

SEQ ID NO: 2388788 - DNA, 25 bp, Homo sapien
ggtgcggcgggcggcgtcgggggca

SEQ ID NO: 2388789 - DNA, 25 bp, Homo sapien
gggctggtgtgtgtgcgagcgtgtg

SEQ ID NO: 2388790 - DNA, 25 bp, Homo sapien
gtgtgtgcctgctgcgtgtccccgc

SEQ ID NO: 2388791 - DNA, 25 bp, Homo sapien
cccctgccagcacgcgggcctacgc

SEQ ID NO: 2388792 - DNA, 25 bp, Homo sapien
gtctgtgtgtgcctgctgcgtgtcc

SEQ ID NO: 2388793 - DNA, 25 bp, Homo sapien
taagtccaggaccactgccgagggt

SEQ ID NO: 2388794 - DNA, 25 bp, Homo sapien
gaggcaccctgagtcatggtccctg

SEQ ID NO: 2388795 - DNA, 25 bp, Homo sapien
tctagtgcaggcgtgagggtgtccc

SEQ ID NO: 2388796 - DNA, 25 bp, Homo sapien
accggacagacgacagagaggtgcc

SEQ ID NO: 2388797 - DNA, 25 bp, Homo sapien
cattctaagggtccccttgcatggg

SEQ ID NO: 2388798 - DNA, 25 bp, Homo sapien
gctgggcagtgacaggacggcgttg

SEQ ID NO: 2388799 - DNA, 25 bp, Homo sapien
caccgggttactgacaaactggcca

SEQ ID NO: 2388800 - DNA, 25 bp, Homo sapien
tttccgaataaaactcgagagagtg

SEQ ID NO: 2388801 - DNA, 25 bp, Homo sapien
gaatgtcggaagtaggggctgtcca

SEQ ID NO: 2388802 - DNA, 25 bp, Homo sapien
agtaggggctgtccagcttgggcgc

SEQ ID NO: 2388803 - DNA, 25 bp, Homo sapien
ccagcttgggcgcatacttgtcaaa

SEQ ID NO: 2388804 - DNA, 25 bp, Homo sapien
gctgtccagcttgggcgcatacttg

SEQ ID NO: 2388805 - DNA, 25 bp, Homo sapien
ttaggctgaaaagcgccctgcaggg

SEQ ID NO: 2388806 - DNA, 25 bp, Homo sapien
ggctgaaaagcgccctgcagggacc

SEQ ID NO: 2388807 - DNA, 25 bp, Homo sapien
aggctgaaaagcgccctgcagggac

SEQ ID NO: 2388808 - DNA, 25 bp, Homo sapien
taggctgaaaagcgccctgcaggga

SEQ ID NO: 2388809 - DNA, 25 bp, Homo sapien
gaacctcctcgcagtgtggatggcc

SEQ ID NO: 2388810 - DNA, 25 bp, Homo sapien
cgcagtgtggatggccccgtaagaa

SEQ ID NO: 2388811 - DNA, 25 bp, Homo sapien
tccttgcggtaaggacggcctgtga

SEQ ID NO: 2388812 - DNA, 25 bp, Homo sapien
atggccccgtaagaacctccttgcg

SEQ ID NO: 2388813 - DNA, 25 bp, Homo sapien
tctgcaggagtgtgtgaaccgcacc

SEQ ID NO: 2388814 - DNA, 25 bp, Homo sapien
gcaggagtgtgtgaaccgcaccagc

SEQ ID NO: 2388815 - DNA, 25 bp, Homo sapien
gcgggccacctcaatggggcttgaa

SEQ ID NO: 2388816 - DNA, 25 bp, Homo sapien
tgtgtgaaccgcaccagcccggcgg

SEQ ID NO: 2388817 - DNA, 25 bp, Homo sapien
tgaccaccgcccggtacgggtcaga

SEQ ID NO: 2388818 - DNA, 25 bp, Homo sapien
cgacaggatggaagcgctcagtggg

SEQ ID NO: 2388819 - DNA, 25 bp, Homo sapien
ctgcgacaggatggaagcgctcagt

SEQ ID NO: 2388820 - DNA, 25 bp, Homo sapien
ggcaccagagtcctcccttgccacg

SEQ ID NO: 2388821 - DNA, 25 bp, Homo sapien
ggggcaccagagtcctcccttgcca

SEQ ID NO: 2388822 - DNA, 25 bp, Homo sapien
tgacggtagatctgccaggcgatct

SEQ ID NO: 2388823 - DNA, 25 bp, Homo sapien
tgctggtgacggtagatctgccagg

SEQ ID NO: 2388824 - DNA, 25 bp, Homo sapien
atctgccaggcgatctgcacgtgca

SEQ ID NO: 2388825 - DNA, 25 bp, Homo sapien
gtagatctgccaggcgatctgcacg

SEQ ID NO: 2388826 - DNA, 25 bp, Homo sapien
ttgccgaggagagggccttgcggca

SEQ ID NO: 2388827 - DNA, 25 bp, Homo sapien
cttgccgaggagagggccttgcggc

SEQ ID NO: 2388828 - DNA, 25 bp, Homo sapien
aagcctgcaaacacgcccggggcag

SEQ ID NO: 2388829 - DNA, 25 bp, Homo sapien
ggaagcctgcaaacacgcccggggc

SEQ ID NO: 2388830 - DNA, 25 bp, Homo sapien
ggcagggggtctgccgaacaggtcc

SEQ ID NO: 2388831 - DNA, 25 bp, Homo sapien
ggtccagctttgcacccacctccag

SEQ ID NO: 2388832 - DNA, 25 bp, Homo sapien
taaaggccaggcttactcaggaaac

SEQ ID NO: 2388833 - DNA, 25 bp, Homo sapien
tggctccagaaacgtaccgacagtt

SEQ ID NO: 2388834 - DNA, 25 bp, Homo sapien
tcatctggaacaaagcgctggaaca

SEQ ID NO: 2388835 - DNA, 25 bp, Homo sapien
ggcaaaccacccactcctagatatg

SEQ ID NO: 2388836 - DNA, 25 bp, Homo sapien
gcttgaggaataccacacccagtgg

SEQ ID NO: 2388837 - DNA, 25 bp, Homo sapien
aacattaagaattgccagggcctgc

SEQ ID NO: 2388838 - DNA, 25 bp, Homo sapien
tcgcgttactgaaaccgatgccaga

SEQ ID NO: 2388839 - DNA, 25 bp, Homo sapien
tcaacttactggaaacactcgcgtt

SEQ ID NO: 2388840 - DNA, 25 bp, Homo sapien
aaatactggtgaaattggccgggcg

SEQ ID NO: 2388841 - DNA, 25 bp, Homo sapien
ggagaggctgaggaattaatattct

SEQ ID NO: 2388842 - DNA, 25 bp, Homo sapien
caccagatcaagctagacagggcca

SEQ ID NO: 2388843 - DNA, 25 bp, Homo sapien
gacagggccagaaaagtgagcgaca

SEQ ID NO: 2388844 - DNA, 25 bp, Homo sapien
ccatctgcagctctgttcacaggga

SEQ ID NO: 2388845 - DNA, 25 bp, Homo sapien
gccaggtttgacagaagccaggaga

SEQ ID NO: 2388846 - DNA, 25 bp, Homo sapien
ttcacctcccattctctcgcatgcc

SEQ ID NO: 2388847 - DNA, 25 bp, Homo sapien
agctctgttcacagggagcacccca

SEQ ID NO: 2388848 - DNA, 25 bp, Homo sapien
tccaaatgggttggaggcaggatgg

SEQ ID NO: 2388849 - DNA, 25 bp, Homo sapien
ggtccaaatgggttggaggcaggat

SEQ ID NO: 2388850 - DNA, 25 bp, Homo sapien
gatgggctgagggtccaaatgggtt

SEQ ID NO: 2388851 - DNA, 25 bp, Homo sapien
ctgagggtccaaatgggttggaggc

SEQ ID NO: 2388852 - DNA, 25 bp, Homo sapien
caaaggtgctcggtctgctgaaagg

SEQ ID NO: 2388853 - DNA, 25 bp, Homo sapien
caggcccccaaaggtgctcggtctg

SEQ ID NO: 2388854 - DNA, 25 bp, Homo sapien
ccaaaggcgtggctgctcaggctgc

SEQ ID NO: 2388855 - DNA, 25 bp, Homo sapien
ccccaaaggcgtggctgctcaggct

SEQ ID NO: 2388856 - DNA, 25 bp, Homo sapien
tgcagtcggttccaggcctcatggg

SEQ ID NO: 2388857 - DNA, 25 bp, Homo sapien
gccgtgcacggaggagccctccttg

SEQ ID NO: 2388858 - DNA, 25 bp, Homo sapien
ccggctctcggtcatggttggtcag

SEQ ID NO: 2388859 - DNA, 25 bp, Homo sapien
ggttggtcagggctgacacccgctc

SEQ ID NO: 2388860 - DNA, 25 bp, Homo sapien
gggatgagccgcctgcagcgacttc

SEQ ID NO: 2388861 - DNA, 25 bp, Homo sapien
tgagccgcctgcagcgacttcggct

SEQ ID NO: 2388862 - DNA, 25 bp, Homo sapien
cgctgggcggcctggaaaccttggc

SEQ ID NO: 2388863 - DNA, 25 bp, Homo sapien
gaagcgggatgagccgcctgcagcg

SEQ ID NO: 2388864 - DNA, 25 bp, Homo sapien
ggaggccgctgacggggtggccagc

SEQ ID NO: 2388865 - DNA, 25 bp, Homo sapien
gggcccggagcaggaggccgctgac

SEQ ID NO: 2388866 - DNA, 25 bp, Homo sapien
cggaccggcccagctcgctctgggc

SEQ ID NO: 2388867 - DNA, 25 bp, Homo sapien
aggcccggctcagcaggcgcgtctt

SEQ ID NO: 2388868 - DNA, 25 bp, Homo sapien
ctgtggggcggggatgcgcgcgcgg

SEQ ID NO: 2388869 - DNA, 25 bp, Homo sapien
tccaggggccgccttgctgtggggc

SEQ ID NO: 2388870 - DNA, 25 bp, Homo sapien
tccttggccggggagcggctctcct

SEQ ID NO: 2388871 - DNA, 25 bp, Homo sapien
tgcgcgcgcgggcatcttggcggcc

SEQ ID NO: 2388872 - DNA, 25 bp, Homo sapien
aagcccggcgcgcccaggcgctcgc

SEQ ID NO: 2388873 - DNA, 25 bp, Homo sapien
tcgcggcccaggccgagctgcaggg

SEQ ID NO: 2388874 - DNA, 25 bp, Homo sapien
aggggcgcggggtgcaggccgcccg

SEQ ID NO: 2388875 - DNA, 25 bp, Homo sapien
ggctcggaggcctcgtcctccccgc

SEQ ID NO: 2388876 - DNA, 25 bp, Homo sapien
gctccaggccgcggaaaggctccca

SEQ ID NO: 2388877 - DNA, 25 bp, Homo sapien
agctccaggccgcggaaaggctccc

SEQ ID NO: 2388878 - DNA, 25 bp, Homo sapien
agaggcgcgggaagtgcagggctcc

SEQ ID NO: 2388879 - DNA, 25 bp, Homo sapien
tccgcgccaggagcccattgtgcag

SEQ ID NO: 2388880 - DNA, 25 bp, Homo sapien
ctcgcggtcgcggtaggggcgctcc

SEQ ID NO: 2388881 - DNA, 25 bp, Homo sapien
cccagcggagtagtccggctccgcg

SEQ ID NO: 2388882 - DNA, 25 bp, Homo sapien
ttcgggacggggagtagtcgcgcgc

SEQ ID NO: 2388883 - DNA, 25 bp, Homo sapien
caacagccgaatcccaaactcggaa

SEQ ID NO: 2388884 - DNA, 25 bp, Homo sapien
tccgctcggagaggcgtctgcggcc

SEQ ID NO: 2388885 - DNA, 25 bp, Homo sapien
tggagagacggacagcggtgcgctc

SEQ ID NO: 2388886 - DNA, 25 bp, Homo sapien
aagatcaccctcagaaaagccgaca

SEQ ID NO: 2388887 - DNA, 25 bp, Homo sapien
taatataatctgtaacttcggttcc

SEQ ID NO: 2388888 - DNA, 25 bp, Homo sapien
tgcgctggacaaagtgaccggtttt

SEQ ID NO: 2388889 - DNA, 25 bp, Homo sapien
ggatctgaggccattaaactgcaaa

SEQ ID NO: 2388890 - DNA, 25 bp, Homo sapien
tgcaaatcccaaccgaaaacgaaga

SEQ ID NO: 2388891 - DNA, 25 bp, Homo sapien
gaaattacacttctgcataataagg

SEQ ID NO: 2388892 - DNA, 25 bp, Homo sapien
gccgggaagcgcttgcatagttgaa

SEQ ID NO: 2388893 - DNA, 25 bp, Homo sapien
ccatgttagacaaacaaccagaggg

SEQ ID NO: 2388894 - DNA, 25 bp, Homo sapien
ctgataatgtttacagccagcagcg

SEQ ID NO: 2388895 - DNA, 25 bp, Homo sapien
acaggagccgcccaggagtgctgtt

SEQ ID NO: 2388896 - DNA, 25 bp, Homo sapien
tgaagcccacaggagccgcccagga

SEQ ID NO: 2388897 - DNA, 25 bp, Homo sapien
caggagtgctgttctgctggcccag

SEQ ID NO: 2388898 - DNA, 25 bp, Homo sapien
agcccacaggagccgcccaggagtg

SEQ ID NO: 2388899 - DNA, 25 bp, Homo sapien
ttctatacctccaccgatctggtct

SEQ ID NO: 2388900 - DNA, 25 bp, Homo sapien
gcctttagactcttgcacttctata

SEQ ID NO: 2388901 - DNA, 25 bp, Homo sapien
gatctggtctacagattccaagaac

SEQ ID NO: 2388902 - DNA, 25 bp, Homo sapien
acagcatcgcccttgcggctggagc

SEQ ID NO: 2388903 - DNA, 25 bp, Homo sapien
caccgtggaaatgtggctgaaacac

SEQ ID NO: 2388904 - DNA, 25 bp, Homo sapien
gaactgagcaaagcaagtggctcga

SEQ ID NO: 2388905 - DNA, 25 bp, Homo sapien
cgaccacaccgaggtgacgctgatg

SEQ ID NO: 2388906 - DNA, 25 bp, Homo sapien
gacgctgatgcctcaggcggaagaa

SEQ ID NO: 2388907 - DNA, 25 bp, Homo sapien
ccgcagcgcacgtcacccaccctct

SEQ ID NO: 2388908 - DNA, 25 bp, Homo sapien
agggcagatgctccgcagcgcacgt

SEQ ID NO: 2388909 - DNA, 25 bp, Homo sapien
gcagcgcacgtcacccaccctctcc

SEQ ID NO: 2388910 - DNA, 25 bp, Homo sapien
ctccgcagcgcacgtcacccaccct

SEQ ID NO: 2388911 - DNA, 25 bp, Homo sapien
gcggcagacgccacaccaacatggg

SEQ ID NO: 2388912 - DNA, 25 bp, Homo sapien
ccactgatttggagaagctctctgg

SEQ ID NO: 2388913 - DNA, 25 bp, Homo sapien
tcagttggcggcagacgccacacca

SEQ ID NO: 2388914 - DNA, 25 bp, Homo sapien
ctgcctggcgctcgggagacggtgg

SEQ ID NO: 2388915 - DNA, 25 bp, Homo sapien
caggggaaccactgtccgctgggaa

SEQ ID NO: 2388916 - DNA, 25 bp, Homo sapien
gtttgcctgatggctggggatgtgg

SEQ ID NO: 2388917 - DNA, 25 bp, Homo sapien
taagtttgcctgatggctggggatg

SEQ ID NO: 2388918 - DNA, 25 bp, Homo sapien
aagtttgcctgatggctggggatgt

SEQ ID NO: 2388919 - DNA, 25 bp, Homo sapien
agtttgcctgatggctggggatgtg

SEQ ID NO: 2388920 - DNA, 25 bp, Homo sapien
tgctggcgcctgacggaaaaaggta

SEQ ID NO: 2388921 - DNA, 25 bp, Homo sapien
tgtcaataggacgtgtgcacagccc

SEQ ID NO: 2388922 - DNA, 25 bp, Homo sapien
tgtcagccaccagggaagttttcag

SEQ ID NO: 2388923 - DNA, 25 bp, Homo sapien
gggaggcccaatctcacgagtcact

SEQ ID NO: 2388924 - DNA, 25 bp, Homo sapien
gcaagcccaggctctgagttcggag

SEQ ID NO: 2388925 - DNA, 25 bp, Homo sapien
gagataaagaaagaccacccagacg

SEQ ID NO: 2388926 - DNA, 25 bp, Homo sapien
ctttgtggtccggagtcagtagcct

SEQ ID NO: 2388927 - DNA, 25 bp, Homo sapien
tctcctgggaccgaaggagggaaca

SEQ ID NO: 2388928 - DNA, 25 bp, Homo sapien
agggctgagggtcggccccgctgcg

SEQ ID NO: 2388929 - DNA, 25 bp, Homo sapien
ctgcgcaccgagagcggggggcgcg

SEQ ID NO: 2388930 - DNA, 25 bp, Homo sapien
cctcgcggggacagagccgggggcg

SEQ ID NO: 2388931 - DNA, 25 bp, Homo sapien
gggtgcggcctcgagcccgccccgc

SEQ ID NO: 2388932 - DNA, 25 bp, Homo sapien
gtctcgtagtcccagagggcggacc

SEQ ID NO: 2388933 - DNA, 25 bp, Homo sapien
tcgtagtcccagagggcggaccagc

SEQ ID NO: 2388934 - DNA, 25 bp, Homo sapien
cacgatcaccttgggcgtctcgtag

SEQ ID NO: 2388935 - DNA, 25 bp, Homo sapien
cttgggcgtctcgtagtcccagagg

SEQ ID NO: 2388936 - DNA, 25 bp, Homo sapien
tgagcagctgcacggcgcggtacag

SEQ ID NO: 2388937 - DNA, 25 bp, Homo sapien
agctgcacggcgcggtacaggaccc

SEQ ID NO: 2388938 - DNA, 25 bp, Homo sapien
aggatgagcagctgcacggcgcggt

SEQ ID NO: 2388939 - DNA, 25 bp, Homo sapien
cacacgaagtagagcaggatgagca

SEQ ID NO: 2388940 - DNA, 25 bp, Homo sapien
cagcgcccccaatcccagcccctcc

SEQ ID NO: 2388941 - DNA, 25 bp, Homo sapien
agccccgcgcctccagcccagcgcc

SEQ ID NO: 2388942 - DNA, 25 bp, Homo sapien
ccagcccagcgcccccaatcccagc

SEQ ID NO: 2388943 - DNA, 25 bp, Homo sapien
cagccccgcgcctccagcccagcgc

SEQ ID NO: 2388944 - DNA, 25 bp, Homo sapien
tgcgggcaggggcggcgccggctcc

SEQ ID NO: 2388945 - DNA, 25 bp, Homo sapien
aggggcggcgccggctccggaggcg

SEQ ID NO: 2388946 - DNA, 25 bp, Homo sapien
ctgcgggcaggggcggcgccggctc

SEQ ID NO: 2388947 - DNA, 25 bp, Homo sapien
ggcggcgccggctccggaggcgacc

SEQ ID NO: 2388948 - DNA, 25 bp, Homo sapien
tgatggagctctcggggcccgtctc

SEQ ID NO: 2388949 - DNA, 25 bp, Homo sapien
gcccgtctcgctctcctggtagctt

SEQ ID NO: 2388950 - DNA, 25 bp, Homo sapien
tcggggggcttcacgtactcctcca

SEQ ID NO: 2388951 - DNA, 25 bp, Homo sapien
tgtgctcggacgtggtgatcccctt

SEQ ID NO: 2388952 - DNA, 25 bp, Homo sapien
tcagaaagagggggcggtcggccag

SEQ ID NO: 2388953 - DNA, 25 bp, Homo sapien
cctccgcccactagggtagggtgca

SEQ ID NO: 2388954 - DNA, 25 bp, Homo sapien
cccactagggtagggtgcacggcgg

SEQ ID NO: 2388955 - DNA, 25 bp, Homo sapien
cgcccactagggtagggtgcacggc

SEQ ID NO: 2388956 - DNA, 25 bp, Homo sapien
tctgggagtgggtggcctcgaccct

SEQ ID NO: 2388957 - DNA, 25 bp, Homo sapien
gcctcgaccctggtgatgatgctga

SEQ ID NO: 2388958 - DNA, 25 bp, Homo sapien
gtggcctcgaccctggtgatgatgc

SEQ ID NO: 2388959 - DNA, 25 bp, Homo sapien
gagtgggtggcctcgaccctggtga

SEQ ID NO: 2388960 - DNA, 25 bp, Homo sapien
agtcggcgtcggagaggcaggtggc

SEQ ID NO: 2388961 - DNA, 25 bp, Homo sapien
gaggcaggtggcgttgtggaccctt

SEQ ID NO: 2388962 - DNA, 25 bp, Homo sapien
aggtggcgttgtggacccttatgct

SEQ ID NO: 2388963 - DNA, 25 bp, Homo sapien
ccagccacgcagtcggcgtcggaga

SEQ ID NO: 2388964 - DNA, 25 bp, Homo sapien
ctggtaatagggcacacagcgccca

SEQ ID NO: 2388965 - DNA, 25 bp, Homo sapien
ggcaccagccgaacacctcgcaggt

SEQ ID NO: 2388966 - DNA, 25 bp, Homo sapien
cgaacacctcgcaggtcttggaggg

SEQ ID NO: 2388967 - DNA, 25 bp, Homo sapien
cagccgaacacctcgcaggtcttgg

SEQ ID NO: 2388968 - DNA, 25 bp, Homo sapien
tcttccaccgggcaccagccgaaca

SEQ ID NO: 2388969 - DNA, 25 bp, Homo sapien
aatttggggtagtggatgctgttct

SEQ ID NO: 2388970 - DNA, 25 bp, Homo sapien
gaatttggggtagtggatgctgttc

SEQ ID NO: 2388971 - DNA, 25 bp, Homo sapien
aagtggaatttggggtagtggatgc

SEQ ID NO: 2388972 - DNA, 25 bp, Homo sapien
tggaatttggggtagtggatgctgt

SEQ ID NO: 2388973 - DNA, 25 bp, Homo sapien
aacgtgcagcgcttcaggtacccgt

SEQ ID NO: 2388974 - DNA, 25 bp, Homo sapien
aggcctcgtggaacgtgcagcgctt

SEQ ID NO: 2388975 - DNA, 25 bp, Homo sapien
tcaggtacccgtctgtgcggtcggc

SEQ ID NO: 2388976 - DNA, 25 bp, Homo sapien
gcgcttcaggtacccgtctgtgcgg

SEQ ID NO: 2388977 - DNA, 25 bp, Homo sapien
tgtgcgagctctgtgaagctctccc

SEQ ID NO: 2388978 - DNA, 25 bp, Homo sapien
tgtgtgcgagctctgtgaagctctc

SEQ ID NO: 2388979 - DNA, 25 bp, Homo sapien
tgcgagctctgtgaagctctcccca

SEQ ID NO: 2388980 - DNA, 25 bp, Homo sapien
cttgtgtgcgagctctgtgaagctc

SEQ ID NO: 2388981 - DNA, 25 bp, Homo sapien
cccaggccctctctgtgcaggtggg

SEQ ID NO: 2388982 - DNA, 25 bp, Homo sapien
gccctctctgtgcaggtgggagccc

SEQ ID NO: 2388983 - DNA, 25 bp, Homo sapien
ccaggccctctctgtgcaggtggga

SEQ ID NO: 2388984 - DNA, 25 bp, Homo sapien
aggccctctctgtgcaggtgggagc

SEQ ID NO: 2388985 - DNA, 25 bp, Homo sapien
gcgctgatcgcatttcttttcctct

SEQ ID NO: 2388986 - DNA, 25 bp, Homo sapien
gccccatggccagtgtcaataattc

SEQ ID NO: 2388987 - DNA, 25 bp, Homo sapien
ataattcagcaagcgccacaccgga

SEQ ID NO: 2388988 - DNA, 25 bp, Homo sapien
acaccggatgggttgcgctgatcgc

SEQ ID NO: 2388989 - DNA, 25 bp, Homo sapien
ggctgcatgtgaggtgtgcactgag

SEQ ID NO: 2388990 - DNA, 25 bp, Homo sapien
ctgcatgtgaggtgtgcactgaggg

SEQ ID NO: 2388991 - DNA, 25 bp, Homo sapien
cctcgagagcccgggtcagtcccag

SEQ ID NO: 2388992 - DNA, 25 bp, Homo sapien
ctcgagagcccgggtcagtcccagg

SEQ ID NO: 2388993 - DNA, 25 bp, Homo sapien
tgaagttgtagcctgacgaggcagg

SEQ ID NO: 2388994 - DNA, 25 bp, Homo sapien
tcaagcctccggaaggagtacttgg

SEQ ID NO: 2388995 - DNA, 25 bp, Homo sapien
gcaggtccaggtcacagtcccagtt

SEQ ID NO: 2388996 - DNA, 25 bp, Homo sapien
ggttgcactccgatgcaggcaggtc

SEQ ID NO: 2388997 - DNA, 25 bp, Homo sapien
ccacagctatgccagtgtggacagc

SEQ ID NO: 2388998 - DNA, 25 bp, Homo sapien
ggacagcggtgtcccaagtacagca

SEQ ID NO: 2388999 - DNA, 25 bp, Homo sapien
ctgcaatgggaacgccagtgcccac

SEQ ID NO: 2389000 - DNA, 25 bp, Homo sapien
tgccccacaggcattgggcctctcg

SEQ ID NO: 2389001 - DNA, 25 bp, Homo sapien
tgcggatcccgtaggccttgatgag

SEQ ID NO: 2389002 - DNA, 25 bp, Homo sapien
ctgtccatgcacaatgacgtcaatg

SEQ ID NO: 2389003 - DNA, 25 bp, Homo sapien
tgcacaatgacgtcaatgcggatcc

SEQ ID NO: 2389004 - DNA, 25 bp, Homo sapien
gacgtcaatgcggatcccgtaggcc

SEQ ID NO: 2389005 - DNA, 25 bp, Homo sapien
tggtcagaatgtctgacggcgtctg

SEQ ID NO: 2389006 - DNA, 25 bp, Homo sapien
cagaatgtctgacggcgtctgatgg

SEQ ID NO: 2389007 - DNA, 25 bp, Homo sapien
gggtcgtggtcagaatgtctgacgg

SEQ ID NO: 2389008 - DNA, 25 bp, Homo sapien
tcgtggtcagaatgtctgacggcgt

SEQ ID NO: 2389009 - DNA, 25 bp, Homo sapien
taatggtgggaatcaggctgaactt

SEQ ID NO: 2389010 - DNA, 25 bp, Homo sapien
gtggccagattaataatggtgggaa

SEQ ID NO: 2389011 - DNA, 25 bp, Homo sapien
accccgacggaagtcagagctgtgg

SEQ ID NO: 2389012 - DNA, 25 bp, Homo sapien
caccccgacggaagtcagagctgtg

SEQ ID NO: 2389013 - DNA, 25 bp, Homo sapien
cagagaccggtgtgtaagggcctgg

SEQ ID NO: 2389014 - DNA, 25 bp, Homo sapien
gagaccggtgtgtaagggcctggtg

SEQ ID NO: 2389015 - DNA, 25 bp, Homo sapien
agcagagaccggtgtgtaagggcct

SEQ ID NO: 2389016 - DNA, 25 bp, Homo sapien
gcagagaccggtgtgtaagggcctg

SEQ ID NO: 2389017 - DNA, 25 bp, Homo sapien
cttatggctgtagaccttgtttttg

SEQ ID NO: 2389018 - DNA, 25 bp, Homo sapien
tcaaatttcttatggctgtagacct

SEQ ID NO: 2389019 - DNA, 25 bp, Homo sapien
ttgttcatgaatgttagcaagatcc

SEQ ID NO: 2389020 - DNA, 25 bp, Homo sapien
tagcaagatccagtcgcacaggaag

SEQ ID NO: 2389021 - DNA, 25 bp, Homo sapien
aatacacgggcaagggtcacaggcc

SEQ ID NO: 2389022 - DNA, 25 bp, Homo sapien
ggtcacaggccagctacctgagggg

SEQ ID NO: 2389023 - DNA, 25 bp, Homo sapien
ccaatacacgggcaagggtcacagg

SEQ ID NO: 2389024 - DNA, 25 bp, Homo sapien
ctggcccaatacacgggcaagggtc

SEQ ID NO: 2389025 - DNA, 25 bp, Homo sapien
agatggggcaaggccgcaggggcgg

SEQ ID NO: 2389026 - DNA, 25 bp, Homo sapien
ctgggccacactctgccccttgttg

SEQ ID NO: 2389027 - DNA, 25 bp, Homo sapien
ctggtcctcggagcggtggccgggt

SEQ ID NO: 2389028 - DNA, 25 bp, Homo sapien
gggccacactctgccccttgttggc

SEQ ID NO: 2389029 - DNA, 25 bp, Homo sapien
ggtctgtgggtgtggaggcttgggc

SEQ ID NO: 2389030 - DNA, 25 bp, Homo sapien
cagagttgagccaaacctttggggt

SEQ ID NO: 2389031 - DNA, 25 bp, Homo sapien
tcagagttgagccaaacctttgggg

SEQ ID NO: 2389032 - DNA, 25 bp, Homo sapien
tctgtgggtgtggaggcttgggcag

SEQ ID NO: 2389033 - DNA, 25 bp, Homo sapien
tcgtggagatgctccgctactgagg

SEQ ID NO: 2389034 - DNA, 25 bp, Homo sapien
accaggccgggtctgcagtccagtg

SEQ ID NO: 2389035 - DNA, 25 bp, Homo sapien
gtccacgtgcaggtccctagctggg

SEQ ID NO: 2389036 - DNA, 25 bp, Homo sapien
agggatcctgtggtgccccgtttcg

SEQ ID NO: 2389037 - DNA, 25 bp, Homo sapien
gtgagaggtgatgggaagtgagcag

SEQ ID NO: 2389038 - DNA, 25 bp, Homo sapien
tcccagggcccaagaccgggagcag

SEQ ID NO: 2389039 - DNA, 25 bp, Homo sapien
tctgggcagattcaaggttacaacg

SEQ ID NO: 2389040 - DNA, 25 bp, Homo sapien
aagagtctgggcagattcaaggtta

SEQ ID NO: 2389041 - DNA, 25 bp, Homo sapien
gattcaaggttacaacgcctgtggg

SEQ ID NO: 2389042 - DNA, 25 bp, Homo sapien
ggggccaggggacagccgctcgtcc

SEQ ID NO: 2389043 - DNA, 25 bp, Homo sapien
aggggacagccgctcgtcccccagg

SEQ ID NO: 2389044 - DNA, 25 bp, Homo sapien
ggacagccgctcgtcccccaggaag

SEQ ID NO: 2389045 - DNA, 25 bp, Homo sapien
ggccaggggacagccgctcgtcccc

SEQ ID NO: 2389046 - DNA, 25 bp, Homo sapien
cactgcagcccttgtccttcacctc

SEQ ID NO: 2389047 - DNA, 25 bp, Homo sapien
tcactgcagcccttgtccttcacct

SEQ ID NO: 2389048 - DNA, 25 bp, Homo sapien
cttgtccttcacctccacacaggac

SEQ ID NO: 2389049 - DNA, 25 bp, Homo sapien
gtccttcacctccacacaggaccag

SEQ ID NO: 2389050 - DNA, 25 bp, Homo sapien
gtgagccaccacaaatcacgtaact

SEQ ID NO: 2389051 - DNA, 25 bp, Homo sapien
gccaccacaaatcacgtaactttta

SEQ ID NO: 2389052 - DNA, 25 bp, Homo sapien
caccacaaatcacgtaacttttata

SEQ ID NO: 2389053 - DNA, 25 bp, Homo sapien
gagccaccacaaatcacgtaacttt

SEQ ID NO: 2389054 - DNA, 25 bp, Homo sapien
caagctatgcaggttagtgtgcaga

SEQ ID NO: 2389055 - DNA, 25 bp, Homo sapien
tgtttgtagttgacagccctaagtt

SEQ ID NO: 2389056 - DNA, 25 bp, Homo sapien
ggatgcggtcacagaggccttcgtt

SEQ ID NO: 2389057 - DNA, 25 bp, Homo sapien
cagatgaagtgtatcgaggaagcac

SEQ ID NO: 2389058 - DNA, 25 bp, Homo sapien
tgagctattcgagctcatctctgag

SEQ ID NO: 2389059 - DNA, 25 bp, Homo sapien
catgtctcggaagctggaagattac

SEQ ID NO: 2389060 - DNA, 25 bp, Homo sapien
tctctgagaaccgttccatgtctcg

SEQ ID NO: 2389061 - DNA, 25 bp, Homo sapien
tgcctgactctgagctattcgagct

SEQ ID NO: 2389062 - DNA, 25 bp, Homo sapien
aggccttcctcaagggcagcacgct

SEQ ID NO: 2389063 - DNA, 25 bp, Homo sapien
ggttctctggctgagctcaagggct

SEQ ID NO: 2389064 - DNA, 25 bp, Homo sapien
gaagaggtgtatggctctgtagcca

SEQ ID NO: 2389065 - DNA, 25 bp, Homo sapien
caatcctcggtgtttgaggccttcc

SEQ ID NO: 2389066 - DNA, 25 bp, Homo sapien
aggcaaggatatttggaggactggc

SEQ ID NO: 2389067 - DNA, 25 bp, Homo sapien
tgaggcaaggatatttggaggactg

SEQ ID NO: 2389068 - DNA, 25 bp, Homo sapien
gcaaggatatttggaggactggcat

SEQ ID NO: 2389069 - DNA, 25 bp, Homo sapien
ttgaggcaaggatatttggaggact

SEQ ID NO: 2389070 - DNA, 25 bp, Homo sapien
ctgggacggtgtgatacagtaacca

SEQ ID NO: 2389071 - DNA, 25 bp, Homo sapien
actgggacggtgtgatacagtaacc

SEQ ID NO: 2389072 - DNA, 25 bp, Homo sapien
actgggacggtgtgatatagtaacc

SEQ ID NO: 2389073 - DNA, 25 bp, Homo sapien
gacggtgtgatacagtaaccagtca

SEQ ID NO: 2389074 - DNA, 25 bp, Homo sapien
tgtgatacagtaaccagtcaatggt

SEQ ID NO: 2389075 - DNA, 25 bp, Homo sapien
actgggacggtgtgatacagtaacc

SEQ ID NO: 2389076 - DNA, 25 bp, Homo sapien
actgggacggtgtgatatagtaacc

SEQ ID NO: 2389077 - DNA, 25 bp, Homo sapien
gacggtgtgatacagtaaccagtca

SEQ ID NO: 2389078 - DNA, 25 bp, Homo sapien
atcgctgtctgtccatatcaggcaa

SEQ ID NO: 2389079 - DNA, 25 bp, Homo sapien
ctgctgttgtgctcatcgctgtctg

SEQ ID NO: 2389080 - DNA, 25 bp, Homo sapien
gctgttgtgctcatcgctgtctgtc

SEQ ID NO: 2389081 - DNA, 25 bp, Homo sapien
gctgtctgtccatatcaggcaagcc

SEQ ID NO: 2389082 - DNA, 25 bp, Homo sapien
caccgaccccacctcaggctggccg

SEQ ID NO: 2389083 - DNA, 25 bp, Homo sapien
ggcaccgaccccacctcaggctggc

SEQ ID NO: 2389084 - DNA, 25 bp, Homo sapien
agcgccgtgccgccgggggcaccga

SEQ ID NO: 2389085 - DNA, 25 bp, Homo sapien
ggggcaccgaccccacctcaggctg

SEQ ID NO: 2389086 - DNA, 25 bp, Homo sapien
gagcaggtactgggcgagcgcccgc

SEQ ID NO: 2389087 - DNA, 25 bp, Homo sapien
ccgagcccggcttcggcccgcagcc

SEQ ID NO: 2389088 - DNA, 25 bp, Homo sapien
gcaccgggtagagccgcaggaagag

SEQ ID NO: 2389089 - DNA, 25 bp, Homo sapien
ggccgccttggtgagcaccgggtag

SEQ ID NO: 2389090 - DNA, 25 bp, Homo sapien
gacatccagacttctagagttttct

SEQ ID NO: 2389091 - DNA, 25 bp, Homo sapien
ggaagttcccaagtgctgacaaaat

SEQ ID NO: 2389092 - DNA, 25 bp, Homo sapien
cgacatccagacttctagagttttc

SEQ ID NO: 2389093 - DNA, 25 bp, Homo sapien
tctgggccaggaagttcccaagtgc

SEQ ID NO: 2389094 - DNA, 25 bp, Homo sapien
cgtaaacggcatatctcagaggccc

SEQ ID NO: 2389095 - DNA, 25 bp, Homo sapien
taaacggcatatctcagaggcccac

SEQ ID NO: 2389096 - DNA, 25 bp, Homo sapien
ccgtaaacggcatatctcagaggcc

SEQ ID NO: 2389097 - DNA, 25 bp, Homo sapien
gtaaacggcatatctcagaggccca

SEQ ID NO: 2389098 - DNA, 25 bp, Homo sapien
ccctttccatgagcccagtctagga

SEQ ID NO: 2389099 - DNA, 25 bp, Homo sapien
gcctctcagcccaattaagacagtc

SEQ ID NO: 2389100 - DNA, 25 bp, Homo sapien
cagtctaggacgctttcagggtttt

SEQ ID NO: 2389101 - DNA, 25 bp, Homo sapien
gagttacttgtcctcaggtttgcct

SEQ ID NO: 2389102 - DNA, 25 bp, Homo sapien
ggagggatccaatgttccatgaaga

SEQ ID NO: 2389103 - DNA, 25 bp, Homo sapien
gtgcaaagacgaggcggtccaggag

SEQ ID NO: 2389104 - DNA, 25 bp, Homo sapien
gacctcaggagggatccaatgttcc

SEQ ID NO: 2389105 - DNA, 25 bp, Homo sapien
aacaacatgaggaaggccggtgcaa

SEQ ID NO: 2389106 - DNA, 25 bp, Homo sapien
ccaaaactccttgcggacaactgga

SEQ ID NO: 2389107 - DNA, 25 bp, Homo sapien
taggagcaattcctctggacgtccg

SEQ ID NO: 2389108 - DNA, 25 bp, Homo sapien
gctggtggattcaagacctgaaccc

SEQ ID NO: 2389109 - DNA, 25 bp, Homo sapien
caacagacagtctacagcctgggaa

SEQ ID NO: 2389110 - DNA, 25 bp, Homo sapien
gccagttcatcctcagcgccggcca

SEQ ID NO: 2389111 - DNA, 25 bp, Homo sapien
gtccacacccgccagttcatcctca

SEQ ID NO: 2389112 - DNA, 25 bp, Homo sapien
tgatgaactgtagtggcgtccacac

SEQ ID NO: 2389113 - DNA, 25 bp, Homo sapien
cttcagagggacgtagttgatgttg

SEQ ID NO: 2389114 - DNA, 25 bp, Homo sapien
cagggtcatgggcaaaatccaaggg

SEQ ID NO: 2389115 - DNA, 25 bp, Homo sapien
ccaagggtagttgaggagtctagac

SEQ ID NO: 2389116 - DNA, 25 bp, Homo sapien
gctagaaaactcataggcatccctg

SEQ ID NO: 2389117 - DNA, 25 bp, Homo sapien
aagaggcaaagacgaccactcggga

SEQ ID NO: 2389118 - DNA, 25 bp, Homo sapien
catcctcccagtgtgggagtggtcc

SEQ ID NO: 2389119 - DNA, 25 bp, Homo sapien
tctgggggtatcctgccatgctgca

SEQ ID NO: 2389120 - DNA, 25 bp, Homo sapien
cccatcctcccagtgtgggagtggt

SEQ ID NO: 2389121 - DNA, 25 bp, Homo sapien
cctgtagcatctgggggtatcctgc

SEQ ID NO: 2389122 - DNA, 25 bp, Homo sapien
ctgccgaaaagaacagtccaacagg

SEQ ID NO: 2389123 - DNA, 25 bp, Homo sapien
ggaggccgtggccagttatccagcc

SEQ ID NO: 2389124 - DNA, 25 bp, Homo sapien
tgtttacccgtttgttggtcagctg

SEQ ID NO: 2389125 - DNA, 25 bp, Homo sapien
gcctcagtcacccagttcatttgtt

SEQ ID NO: 2389126 - DNA, 25 bp, Homo sapien
ccaggttggcgaagagcacccggaa

SEQ ID NO: 2389127 - DNA, 25 bp, Homo sapien
cagaacagagctgccaggttggcga

SEQ ID NO: 2389128 - DNA, 25 bp, Homo sapien
aacagagctgccaggttggcgaaga

SEQ ID NO: 2389129 - DNA, 25 bp, Homo sapien
agctgccaggttggcgaagagcacc

SEQ ID NO: 2389130 - DNA, 25 bp, Homo sapien
tccccaaggaggccaggtaggcata

SEQ ID NO: 2389131 - DNA, 25 bp, Homo sapien
ttccccaaggaggccaggtaggcat

SEQ ID NO: 2389132 - DNA, 25 bp, Homo sapien
ccccaaggaggccaggtaggcatac

SEQ ID NO: 2389133 - DNA, 25 bp, Homo sapien
gatcctaattcggtccacagtaaca

SEQ ID NO: 2389134 - DNA, 25 bp, Homo sapien
gggcatcttgaatcacctgatttag

SEQ ID NO: 2389135 - DNA, 25 bp, Homo sapien
tcagtgacatcctgactggattggt

SEQ ID NO: 2389136 - DNA, 25 bp, Homo sapien
gtaacaattgaaactgcctcgacta

SEQ ID NO: 2389137 - DNA, 25 bp, Homo sapien
gcgctccgcgaggaacacgcttccc

SEQ ID NO: 2389138 - DNA, 25 bp, Homo sapien
cgctccgcgaggaacacgcttcccc

SEQ ID NO: 2389139 - DNA, 25 bp, Homo sapien
ggcgctccgcgaggaacacgcttcc

SEQ ID NO: 2389140 - DNA, 25 bp, Homo sapien
ctccgcgaggaacacgcttcccccg

SEQ ID NO: 2389141 - DNA, 25 bp, Homo sapien
gcgccggcccgcgcaggcgcccacg

SEQ ID NO: 2389142 - DNA, 25 bp, Homo sapien
cgcgccggcccgcgcaggcgcccac

SEQ ID NO: 2389143 - DNA, 25 bp, Homo sapien
ccgcgccggcccgcgcaggcgccca

SEQ ID NO: 2389144 - DNA, 25 bp, Homo sapien
gccgcttgctcccgcgccggcccgc

SEQ ID NO: 2389145 - DNA, 25 bp, Homo sapien
gaagagcacggcggccgagcccccg

SEQ ID NO: 2389146 - DNA, 25 bp, Homo sapien
gagaagagcacggcggccgagcccc

SEQ ID NO: 2389147 - DNA, 25 bp, Homo sapien
agaagagcacggcggccgagccccc

SEQ ID NO: 2389148 - DNA, 25 bp, Homo sapien
cgggcgtggctccgcgtccccgcct

SEQ ID NO: 2389149 - DNA, 25 bp, Homo sapien
gcgtggctccgcgtccccgcctgcg

SEQ ID NO: 2389150 - DNA, 25 bp, Homo sapien
tcagccgggcgtggctccgcgtccc

SEQ ID NO: 2389151 - DNA, 25 bp, Homo sapien
ctcagccgggcgtggctccgcgtcc

SEQ ID NO: 2389152 - DNA, 25 bp, Homo sapien
tttcaaacgctcaataaccgcacgc

SEQ ID NO: 2389153 - DNA, 25 bp, Homo sapien
cacccggccctgcttgcgttaagtt

SEQ ID NO: 2389154 - DNA, 25 bp, Homo sapien
tcaggaatcacacgagccatatttc

SEQ ID NO: 2389155 - DNA, 25 bp, Homo sapien
gatctcgatcccaacggtaacacct

SEQ ID NO: 2389156 - DNA, 25 bp, Homo sapien
ctgatgttgaaatacaagatatgtc

SEQ ID NO: 2389157 - DNA, 25 bp, Homo sapien
gatgttgaaatacaagatatgtcct

SEQ ID NO: 2389158 - DNA, 25 bp, Homo sapien
gttgaaatacaagatatgtccttga

SEQ ID NO: 2389159 - DNA, 25 bp, Homo sapien
tgttgaaatacaagatatgtccttg

SEQ ID NO: 2389160 - DNA, 25 bp, Homo sapien
tcttccgcacgttgatcagagacag

SEQ ID NO: 2389161 - DNA, 25 bp, Homo sapien
agagtgcggtccttctccagggagc

SEQ ID NO: 2389162 - DNA, 25 bp, Homo sapien
atgcctgatgaggaagatgtgccgc

SEQ ID NO: 2389163 - DNA, 25 bp, Homo sapien
ggagccatccacgtggtactgggaa

SEQ ID NO: 2389164 - DNA, 25 bp, Homo sapien
cactttctttgtgcacaagcagcca

SEQ ID NO: 2389165 - DNA, 25 bp, Homo sapien
actccactttctttgtgcacaagca

SEQ ID NO: 2389166 - DNA, 25 bp, Homo sapien
ctttctttgtgcacaagcagccagg

SEQ ID NO: 2389167 - DNA, 25 bp, Homo sapien
tccactttctttgtgcacaagcagc

SEQ ID NO: 2389168 - DNA, 25 bp, Homo sapien
tatggcgcgcgtcatagacgaatgg

SEQ ID NO: 2389169 - DNA, 25 bp, Homo sapien
catagacgaatggacgattttatta

SEQ ID NO: 2389170 - DNA, 25 bp, Homo sapien
tgatatcggtggtctctatggcgcg

SEQ ID NO: 2389171 - DNA, 25 bp, Homo sapien
ctggcaggtgccggctgatgatatc

SEQ ID NO: 2389172 - DNA, 25 bp, Homo sapien
agatctgtgctgactttgcagacgc

SEQ ID NO: 2389173 - DNA, 25 bp, Homo sapien
cacagcttccggcttccaatgagac

SEQ ID NO: 2389174 - DNA, 25 bp, Homo sapien
gccttcccgcagcagatctgtgctg

SEQ ID NO: 2389175 - DNA, 25 bp, Homo sapien
gcttccaatgagacacgggcgggtc

SEQ ID NO: 2389176 - DNA, 25 bp, Homo sapien
cagcagggccgctttgcccagggaa

SEQ ID NO: 2389177 - DNA, 25 bp, Homo sapien
cgatgtagcggatgacgttggcgtg

SEQ ID NO: 2389178 - DNA, 25 bp, Homo sapien
atgtagttccggaaggcggcctcga

SEQ ID NO: 2389179 - DNA, 25 bp, Homo sapien
tcgatccgggctccgtcttcgtaat

SEQ ID NO: 2389180 - DNA, 25 bp, Homo sapien
cgttggcgtgacagatgaagatctc

SEQ ID NO: 2389181 - DNA, 25 bp, Homo sapien
tcaggaccccagaagcacaaaatcc

SEQ ID NO: 2389182 - DNA, 25 bp, Homo sapien
ccagaagcacaaaatccccagcgga

SEQ ID NO: 2389183 - DNA, 25 bp, Homo sapien
ccccagcggacaacagcggcgggat

SEQ ID NO: 2389184 - DNA, 25 bp, Homo sapien
acaaaatccccagcggacaacagcg

SEQ ID NO: 2389185 - DNA, 25 bp, Homo sapien
gcatttagtgagatttggccaaccc

SEQ ID NO: 2389186 - DNA, 25 bp, Homo sapien
gcatgtaaccgtagagctggccctg

SEQ ID NO: 2389187 - DNA, 25 bp, Homo sapien
ggagcgcccacagatcagcaagtga

SEQ ID NO: 2389188 - DNA, 25 bp, Homo sapien
cccggatcattctgtggtgctgaga

SEQ ID NO: 2389189 - DNA, 25 bp, Homo sapien
cccagaaaagctctatctggtctgg

SEQ ID NO: 2389190 - DNA, 25 bp, Homo sapien
gctgctcttgaccatggtgctccca

SEQ ID NO: 2389191 - DNA, 25 bp, Homo sapien
tacatcctcgactttctgggagctg

SEQ ID NO: 2389192 - DNA, 25 bp, Homo sapien
gcttgagaatctcggcccgtacatc

SEQ ID NO: 2389193 - DNA, 25 bp, Homo sapien
atcgagtgatcttgtcgggaggcat

SEQ ID NO: 2389194 - DNA, 25 bp, Homo sapien
tgatcttgtcgggaggcatgaaccc

SEQ ID NO: 2389195 - DNA, 25 bp, Homo sapien
tcaggatcgagtgatcttgtcggga

SEQ ID NO: 2389196 - DNA, 25 bp, Homo sapien
ttgtcgggaggcatgaaccccgtgt

SEQ ID NO: 2389197 - DNA, 25 bp, Homo sapien
tgcaggtttctactttccgccggtc

SEQ ID NO: 2389198 - DNA, 25 bp, Homo sapien
tcagcctggtcacaagtcagttccc

SEQ ID NO: 2389199 - DNA, 25 bp, Homo sapien
caaaacgttaagtgtgtgcggcctg

SEQ ID NO: 2389200 - DNA, 25 bp, Homo sapien
aacaggcctgacttgtgcgtgagac

SEQ ID NO: 2389201 - DNA, 25 bp, Homo sapien
agcctggaccctcagcacgggtcag

SEQ ID NO: 2389202 - DNA, 25 bp, Homo sapien
aatggagcctggaccctcagcacgg

SEQ ID NO: 2389203 - DNA, 25 bp, Homo sapien
ggagcctggaccctcagcacgggtc

SEQ ID NO: 2389204 - DNA, 25 bp, Homo sapien
gccaatggagcctggaccctcagca

SEQ ID NO: 2389205 - DNA, 25 bp, Homo sapien
tcctcatccacgtgcctcagtcgcc

SEQ ID NO: 2389206 - DNA, 25 bp, Homo sapien
catccacgtgcctcagtcgccctcg

SEQ ID NO: 2389207 - DNA, 25 bp, Homo sapien
acgtgcctcagtcgccctcgtgcct

SEQ ID NO: 2389208 - DNA, 25 bp, Homo sapien
cctcctcatccacgtgcctcagtcg

SEQ ID NO: 2389209 - DNA, 25 bp, Homo sapien
taagaaattaaaaggatgtatgaag

SEQ ID NO: 2389210 - DNA, 25 bp, Homo sapien
aagtgaagtgagttgtgaacagaac

SEQ ID NO: 2389211 - DNA, 25 bp, Homo sapien
ccagccagaaaatctttaattgaca

SEQ ID NO: 2389212 - DNA, 25 bp, Homo sapien
taaaaggatgtatgaagtgaagtga

SEQ ID NO: 2389213 - DNA, 25 bp, Homo sapien
tgatcctcccaccctggcctcctga

SEQ ID NO: 2389214 - DNA, 25 bp, Homo sapien
atcctcccaccctggcctcctgagt

SEQ ID NO: 2389215 - DNA, 25 bp, Homo sapien
agtgatcctcccaccctggcctcct

SEQ ID NO: 2389216 - DNA, 25 bp, Homo sapien
ctcgctatgttgccttgtccaggct

SEQ ID NO: 2389217 - DNA, 25 bp, Homo sapien
caattctatattggtttctccatga

SEQ ID NO: 2389218 - DNA, 25 bp, Homo sapien
gcctgaacaattctatattggtttc

SEQ ID NO: 2389219 - DNA, 25 bp, Homo sapien
accagcctgaacaattctatattgg

SEQ ID NO: 2389220 - DNA, 25 bp, Homo sapien
gaacaattctatattggtttctcca

SEQ ID NO: 2389221 - DNA, 25 bp, Homo sapien
aaaattttttaggccaggcacgatg

SEQ ID NO: 2389222 - DNA, 25 bp, Homo sapien
aaattttttaggccaggcacgatgg

SEQ ID NO: 2389223 - DNA, 25 bp, Homo sapien
ctcacacctttaatcccagcacttt

SEQ ID NO: 2389224 - DNA, 25 bp, Homo sapien
tattgggctgtcactagcgtgtcac

SEQ ID NO: 2389225 - DNA, 25 bp, Homo sapien
taatcaagttggtgagttcagaccc

SEQ ID NO: 2389226 - DNA, 25 bp, Homo sapien
gtcaaaggcgaagccacctctgtag

SEQ ID NO: 2389227 - DNA, 25 bp, Homo sapien
gaatattttaatccctggccaggca

SEQ ID NO: 2389228 - DNA, 25 bp, Homo sapien
agtccagacaccctcagccttcccc

SEQ ID NO: 2389229 - DNA, 25 bp, Homo sapien
gtccagacaccctcagccttcccct

SEQ ID NO: 2389230 - DNA, 25 bp, Homo sapien
cagacaccctcagccttcccctcat

SEQ ID NO: 2389231 - DNA, 25 bp, Homo sapien
ccagtccagacaccctcagccttcc

SEQ ID NO: 2389232 - DNA, 25 bp, Homo sapien
taaacgtcggcatggcgacccctgg

SEQ ID NO: 2389233 - DNA, 25 bp, Homo sapien
tctggtggcattgcctttcccacca

SEQ ID NO: 2389234 - DNA, 25 bp, Homo sapien
tgggataaacgtcggcatggcgacc

SEQ ID NO: 2389235 - DNA, 25 bp, Homo sapien
ctttgggataaacgtcggcatggcg

SEQ ID NO: 2389236 - DNA, 25 bp, Homo sapien
caggcgtgtttgtcgtggttggaaa

SEQ ID NO: 2389237 - DNA, 25 bp, Homo sapien
ccagctgcagattcccgcccgtgct

SEQ ID NO: 2389238 - DNA, 25 bp, Homo sapien
cagctgcagattcccgcccgtgctc

SEQ ID NO: 2389239 - DNA, 25 bp, Homo sapien
cgtgcggggtgcaggcgtgtttgtc

SEQ ID NO: 2389240 - DNA, 25 bp, Homo sapien
tctgctgctcgtttctgggtaaaag

SEQ ID NO: 2389241 - DNA, 25 bp, Homo sapien
tttctggcatccgttaaaagagcac

SEQ ID NO: 2389242 - DNA, 25 bp, Homo sapien
aaagtgcccttctccagcgtggtgg

SEQ ID NO: 2389243 - DNA, 25 bp, Homo sapien
taccgttgctcttggcagtgggaaa

SEQ ID NO: 2389244 - DNA, 25 bp, Homo sapien
aatatggatattcgtagtgatgatc

SEQ ID NO: 2389245 - DNA, 25 bp, Homo sapien
tgctattctaaaaagccgcatttta

SEQ ID NO: 2389246 - DNA, 25 bp, Homo sapien
tcccagacagaaacaacacatgcta

SEQ ID NO: 2389247 - DNA, 25 bp, Homo sapien
ctaaaatcttaccatattgtctgta

SEQ ID NO: 2389248 - DNA, 25 bp, Homo sapien
tacagggatattaagtagacgcagg

SEQ ID NO: 2389249 - DNA, 25 bp, Homo sapien
ggtttcttgccgtgctgactgtagc

SEQ ID NO: 2389250 - DNA, 25 bp, Homo sapien
tcctgggtgttacgggcaactgctc

SEQ ID NO: 2389251 - DNA, 25 bp, Homo sapien
tgcatttagaggtttgagtcccatc

SEQ ID NO: 2389252 - DNA, 25 bp, Homo sapien
aactcgatcaggatgttttggccgc

SEQ ID NO: 2389253 - DNA, 25 bp, Homo sapien
tcttgaatgtgcagacgtcgacccc

SEQ ID NO: 2389254 - DNA, 25 bp, Homo sapien
tcagatcacacaggattctccggga

SEQ ID NO: 2389255 - DNA, 25 bp, Homo sapien
tatcagtggcttttcccaacgctgg

SEQ ID NO: 2389256 - DNA, 25 bp, Homo sapien
caattccatttccgtgagggcgttt

SEQ ID NO: 2389257 - DNA, 25 bp, Homo sapien
gcaattccatttccgtgagggcgtt

SEQ ID NO: 2389258 - DNA, 25 bp, Homo sapien
agcaattccatttccgtgagggcgt

SEQ ID NO: 2389259 - DNA, 25 bp, Homo sapien
cagcaattccatttccgtgagggcg

SEQ ID NO: 2389260 - DNA, 25 bp, Homo sapien
taataactagagattcgaatctgct

SEQ ID NO: 2389261 - DNA, 25 bp, Homo sapien
taaagcagatatacagtttaaactg

SEQ ID NO: 2389262 - DNA, 25 bp, Homo sapien
tagagattcgaatctgctaaaatac

SEQ ID NO: 2389263 - DNA, 25 bp, Homo sapien
aacagaaatttgctaataactagag

SEQ ID NO: 2389264 - DNA, 25 bp, Homo sapien
gtcttcaaacgacttgaaagttgca

SEQ ID NO: 2389265 - DNA, 25 bp, Homo sapien
tggtcttcaaacgacttgaaagttg

SEQ ID NO: 2389266 - DNA, 25 bp, Homo sapien
cgtctccgagcttcctactgatggc

SEQ ID NO: 2389267 - DNA, 25 bp, Homo sapien
tttccttacgtctccgagcttccta

SEQ ID NO: 2389268 - DNA, 25 bp, Homo sapien
gaaacagtcaacaaagagcgagcga

SEQ ID NO: 2389269 - DNA, 25 bp, Homo sapien
cttgtcggaatcagaaacagtcaac

SEQ ID NO: 2389270 - DNA, 25 bp, Homo sapien
tcaacaaagagcgagcgaacagtta

SEQ ID NO: 2389271 - DNA, 25 bp, Homo sapien
gacagatggtttgtgcttgtcggaa

SEQ ID NO: 2389272 - DNA, 25 bp, Homo sapien
aaaggaagcattgcaagctgtcaag

SEQ ID NO: 2389273 - DNA, 25 bp, Homo sapien
caagcaaaacgtccttaccactgtc

SEQ ID NO: 2389274 - DNA, 25 bp, Homo sapien
tcaagatgatcaaagggtcccgatt

SEQ ID NO: 2389275 - DNA, 25 bp, Homo sapien
ttttctaccagagaagacgctgaga

SEQ ID NO: 2389276 - DNA, 25 bp, Homo sapien
actgggaaatgatcatggtgcagtt

SEQ ID NO: 2389277 - DNA, 25 bp, Homo sapien
ggatcacgggcacgtgccagtacgc

SEQ ID NO: 2389278 - DNA, 25 bp, Homo sapien
gggcacgtgccagtacgcgccagtt

SEQ ID NO: 2389279 - DNA, 25 bp, Homo sapien
atcacgggcacgtgccagtacgcgc

SEQ ID NO: 2389280 - DNA, 25 bp, Homo sapien
cacgtgccagtacgcgccagttttt

SEQ ID NO: 2389281 - DNA, 25 bp, Homo sapien
caaagccggattgaaatgtggaccc

SEQ ID NO: 2389282 - DNA, 25 bp, Homo sapien
tccagtgtatgaggacgtcccagcg

SEQ ID NO: 2389283 - DNA, 25 bp, Homo sapien
tgtgacatccaagacctgctcggtg

SEQ ID NO: 2389284 - DNA, 25 bp, Homo sapien
gaagggaacccaactgatcaggctg

SEQ ID NO: 2389285 - DNA, 25 bp, Homo sapien
tattgctttgcggtagactgtcggg

SEQ ID NO: 2389286 - DNA, 25 bp, Homo sapien
cataaggcagagacggaaaaggcaa

SEQ ID NO: 2389287 - DNA, 25 bp, Homo sapien
cattgcggttactggtcatggaaca

SEQ ID NO: 2389288 - DNA, 25 bp, Homo sapien
cccggatgtgtttggaacgtgaagc

SEQ ID NO: 2389289 - DNA, 25 bp, Homo sapien
ggattccacagaagtcctggtgtca

SEQ ID NO: 2389290 - DNA, 25 bp, Homo sapien
ggtgccgagaacgaaagtgccttcc

SEQ ID NO: 2389291 - DNA, 25 bp, Homo sapien
agagaccctcaagcatgaaaacagg

SEQ ID NO: 2389292 - DNA, 25 bp, Homo sapien
gaaaacaggattgaccaggacagcc

SEQ ID NO: 2389293 - DNA, 25 bp, Homo sapien
tggcgatgccctcgttactgatgag

SEQ ID NO: 2389294 - DNA, 25 bp, Homo sapien
gtgaaagccgactgtgggcgcccaa

SEQ ID NO: 2389295 - DNA, 25 bp, Homo sapien
tactgatgaggtgggaacctctagc

SEQ ID NO: 2389296 - DNA, 25 bp, Homo sapien
tggctgccggtgaccttcacagtgt

SEQ ID NO: 2389297 - DNA, 25 bp, Homo sapien
tctgagctcactgaccggaaggtcc

SEQ ID NO: 2389298 - DNA, 25 bp, Homo sapien
aagtagctctatgttctcaccccgg

SEQ ID NO: 2389299 - DNA, 25 bp, Homo sapien
gcaaatctgagagaaccgtcctggg

SEQ ID NO: 2389300 - DNA, 25 bp, Homo sapien
caggctagggcacttcacgatgtca

SEQ ID NO: 2389301 - DNA, 25 bp, Homo sapien
tgtggttacaccagcatcatgtggc

SEQ ID NO: 2389302 - DNA, 25 bp, Homo sapien
tttaccattgtctgtgggagcgcct

SEQ ID NO: 2389303 - DNA, 25 bp, Homo sapien
tctgcagtcatcgagaagtcctgga

SEQ ID NO: 2389304 - DNA, 25 bp, Homo sapien
tcatgtggcaagcagaggcgacttc

SEQ ID NO: 2389305 - DNA, 25 bp, Homo sapien
gacgtgcgctgtagatgctctcgga

SEQ ID NO: 2389306 - DNA, 25 bp, Homo sapien
tacaaactcggatcttggcaggatg

SEQ ID NO: 2389307 - DNA, 25 bp, Homo sapien
ggaagacctgtccatgacccagaag

SEQ ID NO: 2389308 - DNA, 25 bp, Homo sapien
gaagaacaacatgaagaccctgctc

SEQ ID NO: 2389309 - DNA, 25 bp, Homo sapien
ctgtctttccaggtgccgaggtaaa

SEQ ID NO: 2389310 - DNA, 25 bp, Homo sapien
tgtctttccaggtgccgaggtaaac

SEQ ID NO: 2389311 - DNA, 25 bp, Homo sapien
tctgtctttccaggtgccgaggtaa

SEQ ID NO: 2389312 - DNA, 25 bp, Homo sapien
tctttccaggtgccgaggtaaacag

SEQ ID NO: 2389313 - DNA, 25 bp, Homo sapien
cgtggacaccagaggggctgtgggc

SEQ ID NO: 2389314 - DNA, 25 bp, Homo sapien
ggaaggacgtggacaccagaggggc

SEQ ID NO: 2389315 - DNA, 25 bp, Homo sapien
aggaaggacgtggacaccagagggg

SEQ ID NO: 2389316 - DNA, 25 bp, Homo sapien
ggacgtggacaccagaggggctgtg

SEQ ID NO: 2389317 - DNA, 25 bp, Homo sapien
agttcacgttagagcgtagaggtgt

SEQ ID NO: 2389318 - DNA, 25 bp, Homo sapien
tgagttcacgttagagcgtagaggt

SEQ ID NO: 2389319 - DNA, 25 bp, Homo sapien
gagttcacgttagagcgtagaggtg

SEQ ID NO: 2389320 - DNA, 25 bp, Homo sapien
cttagagcgtggaggagtggagggt

SEQ ID NO: 2389321 - DNA, 25 bp, Homo sapien
cttagagtgtggaggtgtggggggg

SEQ ID NO: 2389322 - DNA, 25 bp, Homo sapien
tagctagaattcagaagtcgtcccg

SEQ ID NO: 2389323 - DNA, 25 bp, Homo sapien
gaattcagaagtcgtcccgtagaga

SEQ ID NO: 2389324 - DNA, 25 bp, Homo sapien
agttgctgaatttgtaatagctaga

SEQ ID NO: 2389325 - DNA, 25 bp, Homo sapien
gtaatagctagaattcagaagtcgt

SEQ ID NO: 2389326 - DNA, 25 bp, Homo sapien
cctcttttacgggtgaccagtctag

SEQ ID NO: 2389327 - DNA, 25 bp, Homo sapien
tagatggcaggtagagtaaaaaccc

SEQ ID NO: 2389328 - DNA, 25 bp, Homo sapien
cagtctagatggcaggtagagtaaa

SEQ ID NO: 2389329 - DNA, 25 bp, Homo sapien
gtgaccagtctagatggcaggtaga

SEQ ID NO: 2389330 - DNA, 25 bp, Homo sapien
tattcagtggcgcagtcgagtccac

SEQ ID NO: 2389331 - DNA, 25 bp, Homo sapien
tgtagtcctccgtgccagtttgtaa

SEQ ID NO: 2389332 - DNA, 25 bp, Homo sapien
gtcgagtccacattccaccgcgtgt

SEQ ID NO: 2389333 - DNA, 25 bp, Homo sapien
cagatgtacagggtaccagtattca

SEQ ID NO: 2389334 - DNA, 25 bp, Homo sapien
gctcacagatgtttcagctggacta

SEQ ID NO: 2389335 - DNA, 25 bp, Homo sapien
actgaagatttaattcggcaaatta

SEQ ID NO: 2389336 - DNA, 25 bp, Homo sapien
gcaaattaaacctgtgttggcactt

SEQ ID NO: 2389337 - DNA, 25 bp, Homo sapien
ctcagcagaatcagcagaactgaag

SEQ ID NO: 2389338 - DNA, 25 bp, Homo sapien
tagtaccgcaggagcttctccttgc

SEQ ID NO: 2389339 - DNA, 25 bp, Homo sapien
gaccaatgttcttgtagtaccgcag

SEQ ID NO: 2389340 - DNA, 25 bp, Homo sapien
cagtagcctctttgggtgtcttgaa

SEQ ID NO: 2389341 - DNA, 25 bp, Homo sapien
cttttggtaggcacgctcagtctga

SEQ ID NO: 2389342 - DNA, 25 bp, Homo sapien
gagaggatccgccctcgaatggaga

SEQ ID NO: 2389343 - DNA, 25 bp, Homo sapien
acgccagagaggatccgccctcgaa

SEQ ID NO: 2389344 - DNA, 25 bp, Homo sapien
gccagagaggatccgccctcgaatg

SEQ ID NO: 2389345 - DNA, 25 bp, Homo sapien
gaggatccgccctcgaatggagaca

SEQ ID NO: 2389346 - DNA, 25 bp, Homo sapien
tgttcttgtggtgcttctcgaagtg

SEQ ID NO: 2389347 - DNA, 25 bp, Homo sapien
gcttctcgaagtggttgtacttgcg

SEQ ID NO: 2389348 - DNA, 25 bp, Homo sapien
cttgcggatgtagtgcaggtagtct

SEQ ID NO: 2389349 - DNA, 25 bp, Homo sapien
tagtctcggcggatgacagtggtcc

SEQ ID NO: 2389350 - DNA, 25 bp, Homo sapien
tgacctggagcacgttgaggtgcac

SEQ ID NO: 2389351 - DNA, 25 bp, Homo sapien
ggagcacgttgaggtgcactgtctt

SEQ ID NO: 2389352 - DNA, 25 bp, Homo sapien
cctggagcacgttgaggtgcactgt

SEQ ID NO: 2389353 - DNA, 25 bp, Homo sapien
tggtgacctggagcacgttgaggtg

SEQ ID NO: 2389354 - DNA, 25 bp, Homo sapien
cagcctcagaacttctggaactgct

SEQ ID NO: 2389355 - DNA, 25 bp, Homo sapien
tccagcctcagaacttctggaactg

SEQ ID NO: 2389356 - DNA, 25 bp, Homo sapien
gtccagcctcagaacttctggaact

SEQ ID NO: 2389357 - DNA, 25 bp, Homo sapien
gcctcagaacttctggaactgcttc

SEQ ID NO: 2389358 - DNA, 25 bp, Homo sapien
ctttatttcattgtggggagcgggc

SEQ ID NO: 2389359 - DNA, 25 bp, Homo sapien
taactttatttcattgtggggagcg

SEQ ID NO: 2389360 - DNA, 25 bp, Homo sapien
aataactttatttcattgtggggag

SEQ ID NO: 2389361 - DNA, 25 bp, Homo sapien
tttatttcattgtggggagcgggct

SEQ ID NO: 2389362 - DNA, 25 bp, Homo sapien
gtgatgcactggcagttgctcctcc

SEQ ID NO: 2389363 - DNA, 25 bp, Homo sapien
cccggagatcgctttttgtcagtag

SEQ ID NO: 2389364 - DNA, 25 bp, Homo sapien
gctgcccggagatcgctttttgtca

SEQ ID NO: 2389365 - DNA, 25 bp, Homo sapien
ctcgctgcccggagatcgctttttg

SEQ ID NO: 2389366 - DNA, 25 bp, Homo sapien
tctaatacccgataggaacaggtga

SEQ ID NO: 2389367 - DNA, 25 bp, Homo sapien
gatgttacccagctgtgaacctagg

SEQ ID NO: 2389368 - DNA, 25 bp, Homo sapien
cctagggttgtgtgtacctttcgca

SEQ ID NO: 2389369 - DNA, 25 bp, Homo sapien
tttggatactagtgtggcctccacc

SEQ ID NO: 2389370 - DNA, 25 bp, Homo sapien
cccgacgaatgtcagtcgtgtggcg

SEQ ID NO: 2389371 - DNA, 25 bp, Homo sapien
ggccgggcgttgtcacgggtatgaa

SEQ ID NO: 2389372 - DNA, 25 bp, Homo sapien
tcgtgtggcgggtcctgggtattgt

SEQ ID NO: 2389373 - DNA, 25 bp, Homo sapien
ggtatgaacccgacgaatgtcagtc

SEQ ID NO: 2389374 - DNA, 25 bp, Homo sapien
ctgaaaggcgtgacatggtgtcggg

SEQ ID NO: 2389375 - DNA, 25 bp, Homo sapien
ttgtctttgtcgctggccgacttgt

SEQ ID NO: 2389376 - DNA, 25 bp, Homo sapien
catggtgtcgggtggttcgtgggaa

SEQ ID NO: 2389377 - DNA, 25 bp, Homo sapien
gagtccgtgtacttccttgtttgtc

SEQ ID NO: 2389378 - DNA, 25 bp, Homo sapien
ctgaatgcttgtctgcgcccgacga

SEQ ID NO: 2389379 - DNA, 25 bp, Homo sapien
tggctctgtaaatgccggtgcccgc

SEQ ID NO: 2389380 - DNA, 25 bp, Homo sapien
caccactcgggcagtgcttgcttta

SEQ ID NO: 2389381 - DNA, 25 bp, Homo sapien
gagcgcggcctgtcccgaagctgtc

SEQ ID NO: 2389382 - DNA, 25 bp, Homo sapien
agctcgatccggaccctgtgggcag

SEQ ID NO: 2389383 - DNA, 25 bp, Homo sapien
tcacagtcggaggtgagctcgatcc

SEQ ID NO: 2389384 - DNA, 25 bp, Homo sapien
aaggcggcctcatcacagtcggagg

SEQ ID NO: 2389385 - DNA, 25 bp, Homo sapien
tcactttctgaaggcggcctcatca

SEQ ID NO: 2389386 - DNA, 25 bp, Homo sapien
ttcctccctggatgtaatgccttgg

SEQ ID NO: 2389387 - DNA, 25 bp, Homo sapien
catgaggacattcacgtaaccacgg

SEQ ID NO: 2389388 - DNA, 25 bp, Homo sapien
ggagcttcgtccaagttattgcaca

SEQ ID NO: 2389389 - DNA, 25 bp, Homo sapien
cagttcatgcagtgtagaccttcgg

SEQ ID NO: 2389390 - DNA, 25 bp, Homo sapien
ccttctgaggcggtgagtctagatg

SEQ ID NO: 2389391 - DNA, 25 bp, Homo sapien
gggtcttaaagttcctcacacagag

SEQ ID NO: 2389392 - DNA, 25 bp, Homo sapien
tcacttttcacggttgtctccttct

SEQ ID NO: 2389393 - DNA, 25 bp, Homo sapien
gtcttaaagttcctcacacagagca

SEQ ID NO: 2389394 - DNA, 25 bp, Homo sapien
ctgtggtggttttggagccctgctc

SEQ ID NO: 2389395 - DNA, 25 bp, Homo sapien
tttatggaagcaggtggccgtgaac

SEQ ID NO: 2389396 - DNA, 25 bp, Homo sapien
gaactcattccgtcttttcatgagc

SEQ ID NO: 2389397 - DNA, 25 bp, Homo sapien
cccagcaaaactgaccggctgtggt

SEQ ID NO: 2389398 - DNA, 25 bp, Homo sapien
ccttgctaaccggtgagtgaccgcg

SEQ ID NO: 2389399 - DNA, 25 bp, Homo sapien
tgctcccttgtgtgagtgaccacgg

SEQ ID NO: 2389400 - DNA, 25 bp, Homo sapien
tagtcgctccttgctaaccggtgag

SEQ ID NO: 2389401 - DNA, 25 bp, Homo sapien
tgctcccttgtgtgagtgaccgcgg

SEQ ID NO: 2389402 - DNA, 25 bp, Homo sapien
cagctctcggtgagggcttcttgaa

SEQ ID NO: 2389403 - DNA, 25 bp, Homo sapien
gaaggtgccgccctttagcaagacc

SEQ ID NO: 2389404 - DNA, 25 bp, Homo sapien
gcttttcttgtgcaacagcctgggc

SEQ ID NO: 2389405 - DNA, 25 bp, Homo sapien
tcccacgtctaggaagctacctcgg

SEQ ID NO: 2389406 - DNA, 25 bp, Homo sapien
caatcgcggtgtgttgtaacatccg

SEQ ID NO: 2389407 - DNA, 25 bp, Homo sapien
cagccatctgaagagtaacatccag

SEQ ID NO: 2389408 - DNA, 25 bp, Homo sapien
tgatggatgacatcccagccatctg

SEQ ID NO: 2389409 - DNA, 25 bp, Homo sapien
tgtaacattccggtgtggtgttccg

SEQ ID NO: 2389410 - DNA, 25 bp, Homo sapien
tgttcttgaggccttgttgcatccg

SEQ ID NO: 2389411 - DNA, 25 bp, Homo sapien
tcttgaggccttgttgcatccgctc

SEQ ID NO: 2389412 - DNA, 25 bp, Homo sapien
ttcttgaggccttgttgcatccgct

SEQ ID NO: 2389413 - DNA, 25 bp, Homo sapien
ttgaggccttgttgcatccgctcct

SEQ ID NO: 2389414 - DNA, 25 bp, Homo sapien
acattccatagcagtctgcagattc

SEQ ID NO: 2389415 - DNA, 25 bp, Homo sapien
tacattccatagcagtctgcagatt

SEQ ID NO: 2389416 - DNA, 25 bp, Homo sapien
ttacattccatagcagtctgcagat

SEQ ID NO: 2389417 - DNA, 25 bp, Homo sapien
ctcgtgacaactaagatggaccgtc

SEQ ID NO: 2389418 - DNA, 25 bp, Homo sapien
ttctactcctaggagtcatccccag

SEQ ID NO: 2389419 - DNA, 25 bp, Homo sapien
gatggaccgtcttctactcctagga

SEQ ID NO: 2389420 - DNA, 25 bp, Homo sapien
cctaggagtcatccccagattagcg

SEQ ID NO: 2389421 - DNA, 25 bp, Homo sapien
ctgaggcaaaagttacgcgcgttca

SEQ ID NO: 2389422 - DNA, 25 bp, Homo sapien
ttacgcgcgttcagaacaggaagac

SEQ ID NO: 2389423 - DNA, 25 bp, Homo sapien
aggcaaaagttacgcgcgttcagaa

SEQ ID NO: 2389424 - DNA, 25 bp, Homo sapien
aaagttacgcgcgttcagaacagga

SEQ ID NO: 2389425 - DNA, 25 bp, Homo sapien
aacgccgccggattccaagaagtga

SEQ ID NO: 2389426 - DNA, 25 bp, Homo sapien
tttcagggaataccctctggcgccc

SEQ ID NO: 2389427 - DNA, 25 bp, Homo sapien
catgagtgcagacattggcgcgttc

SEQ ID NO: 2389428 - DNA, 25 bp, Homo sapien
cgatgaggtctcaggctaatctcga

SEQ ID NO: 2389429 - DNA, 25 bp, Homo sapien
tgtggttccgtgagctcggcactcc

SEQ ID NO: 2389430 - DNA, 25 bp, Homo sapien
gttccgtgagctcggcactcctagg

SEQ ID NO: 2389431 - DNA, 25 bp, Homo sapien
gctgtggttccgtgagctcggcact

SEQ ID NO: 2389432 - DNA, 25 bp, Homo sapien
tggttccgtgagctcggcactccta

SEQ ID NO: 2389433 - DNA, 25 bp, Homo sapien
tacacgactactgaatgaactccag

SEQ ID NO: 2389434 - DNA, 25 bp, Homo sapien
ttcagattcacattggcctcagtca

SEQ ID NO: 2389435 - DNA, 25 bp, Homo sapien
gaagctgcttgtagttacacgacta

SEQ ID NO: 2389436 - DNA, 25 bp, Homo sapien
ggtggcctcgttggctcttttctga

SEQ ID NO: 2389437 - DNA, 25 bp, Homo sapien
gtggaggtgcggaatgatctcctgt

SEQ ID NO: 2389438 - DNA, 25 bp, Homo sapien
cagcagtggaggtgcggaatgatct

SEQ ID NO: 2389439 - DNA, 25 bp, Homo sapien
acacagcagtggaggtgcggaatga

SEQ ID NO: 2389440 - DNA, 25 bp, Homo sapien
cagtggaggtgcggaatgatctcct

SEQ ID NO: 2389441 - DNA, 25 bp, Homo sapien
gcgcacaaatatgaagggcacgttc

SEQ ID NO: 2389442 - DNA, 25 bp, Homo sapien
tggagcgcacaaatatgaagggcac

SEQ ID NO: 2389443 - DNA, 25 bp, Homo sapien
gagcgcacaaatatgaagggcacgt

SEQ ID NO: 2389444 - DNA, 25 bp, Homo sapien
cttggagcgcacaaatatgaagggc

SEQ ID NO: 2389445 - DNA, 25 bp, Homo sapien
ttataacaatagagagtagctgaaa

SEQ ID NO: 2389446 - DNA, 25 bp, Homo sapien
ataacaatagagagtagctgaaaat

SEQ ID NO: 2389447 - DNA, 25 bp, Homo sapien
tataacaatagagagtagctgaaaa

SEQ ID NO: 2389448 - DNA, 25 bp, Homo sapien
taacaatagagagtagctgaaaata

SEQ ID NO: 2389449 - DNA, 25 bp, Homo sapien
gggtgcgctcagctcctgcgctgcc

SEQ ID NO: 2389450 - DNA, 25 bp, Homo sapien
tacgattgtggctcgtggcgcgcat

SEQ ID NO: 2389451 - DNA, 25 bp, Homo sapien
gggaggcgcgcttctttcgctgatg

SEQ ID NO: 2389452 - DNA, 25 bp, Homo sapien
agggcgcgcccaaccctacgattgt

SEQ ID NO: 2389453 - DNA, 25 bp, Homo sapien
ccgcctctacgttgccgggagacag

SEQ ID NO: 2389454 - DNA, 25 bp, Homo sapien
tgttgtctgtttcagacacgttggc

SEQ ID NO: 2389455 - DNA, 25 bp, Homo sapien
gcagccgttggctaaaattgttgtc

SEQ ID NO: 2389456 - DNA, 25 bp, Homo sapien
ttcagacacgttggcgaattccccg

SEQ ID NO: 2389457 - DNA, 25 bp, Homo sapien
gaaatcaacgcagaagcggtgctgc

SEQ ID NO: 2389458 - DNA, 25 bp, Homo sapien
tgagcttcctgacggccgtgtccag

SEQ ID NO: 2389459 - DNA, 25 bp, Homo sapien
aacgacgctctgaaatttggctccc

SEQ ID NO: 2389460 - DNA, 25 bp, Homo sapien
ggctcccaggtaatacgttccggca

SEQ ID NO: 2389461 - DNA, 25 bp, Homo sapien
cctgggcgacagggtgagacgctgt

SEQ ID NO: 2389462 - DNA, 25 bp, Homo sapien
ccgtctctaccaaagatgcaaaaaa

SEQ ID NO: 2389463 - DNA, 25 bp, Homo sapien
tgtaatcccagctacttgggaagct

SEQ ID NO: 2389464 - DNA, 25 bp, Homo sapien
ttagccaggtgtggtggtgtgtgcc

SEQ ID NO: 2389465 - DNA, 25 bp, Homo sapien
gcagaatgtcgcattatgctttaaa

SEQ ID NO: 2389466 - DNA, 25 bp, Homo sapien
cacaaatcatataaactcatcggtt

SEQ ID NO: 2389467 - DNA, 25 bp, Homo sapien
tatacctggcaaacattaattgggt

SEQ ID NO: 2389468 - DNA, 25 bp, Homo sapien
cattaattgggtaacataagcttta

SEQ ID NO: 2389469 - DNA, 25 bp, Homo sapien
gaacagagctggaagactcgcactc

SEQ ID NO: 2389470 - DNA, 25 bp, Homo sapien
aaaattctagacactgcaccacagc

SEQ ID NO: 2389471 - DNA, 25 bp, Homo sapien
taaaaatgttgggacgctgggtgca

SEQ ID NO: 2389472 - DNA, 25 bp, Homo sapien
gaacttccaaagattgccatcagag

SEQ ID NO: 2389473 - DNA, 25 bp, Homo sapien
taacaaaccgaagacagcatgactg

SEQ ID NO: 2389474 - DNA, 25 bp, Homo sapien
aacagaaatctctaggcccagatgg

SEQ ID NO: 2389475 - DNA, 25 bp, Homo sapien
gcccagatggagaactgtaccagtc

SEQ ID NO: 2389476 - DNA, 25 bp, Homo sapien
tgaagttgagtatcgaaaagcccta

SEQ ID NO: 2389477 - DNA, 25 bp, Homo sapien
tataagccgtagtgtttgatccact

SEQ ID NO: 2389478 - DNA, 25 bp, Homo sapien
tttgatccactcatcattgcatggg

SEQ ID NO: 2389479 - DNA, 25 bp, Homo sapien
tctgtgaggagcatcttgtataagc

SEQ ID NO: 2389480 - DNA, 25 bp, Homo sapien
gcagctgtgcgaggtcagacctgtt

SEQ ID NO: 2389481 - DNA, 25 bp, Homo sapien
ttcacagtagtgctttttcctttca

SEQ ID NO: 2389482 - DNA, 25 bp, Homo sapien
taattgccgttaggcttcacagtag

SEQ ID NO: 2389483 - DNA, 25 bp, Homo sapien
tgaagggaaataattgccgttaggc

SEQ ID NO: 2389484 - DNA, 25 bp, Homo sapien
cacagtagtgctttttcctttcact

SEQ ID NO: 2389485 - DNA, 25 bp, Homo sapien
tcaaaaagcattgttatttaggtta

SEQ ID NO: 2389486 - DNA, 25 bp, Homo sapien
aagcattgttatttaggttaaatat

SEQ ID NO: 2389487 - DNA, 25 bp, Homo sapien
taaaatcccgagtggagagattaga

SEQ ID NO: 2389488 - DNA, 25 bp, Homo sapien
gatggaattagtagacaaggatatt

SEQ ID NO: 2389489 - DNA, 25 bp, Homo sapien
tgatgaaacctgaggtataagagat

SEQ ID NO: 2389490 - DNA, 25 bp, Homo sapien
aaaatatgacttataaccaggagaa

SEQ ID NO: 2389491 - DNA, 25 bp, Homo sapien
cagttcctaggttgcagttcaggga

SEQ ID NO: 2389492 - DNA, 25 bp, Homo sapien
tttttagacataggacaagcacagg

SEQ ID NO: 2389493 - DNA, 25 bp, Homo sapien
gaagagttctccttactgctgtgat

SEQ ID NO: 2389494 - DNA, 25 bp, Homo sapien
tgcagacagagtgaggtgagcacca

SEQ ID NO: 2389495 - DNA, 25 bp, Homo sapien
tgtacgtgtgtatcagtgtgtgcat

SEQ ID NO: 2389496 - DNA, 25 bp, Homo sapien
gtgatgtacgtgtgtatcagtgtgt

SEQ ID NO: 2389497 - DNA, 25 bp, Homo sapien
atgtacgtgtgtatcagtgtgtgca

SEQ ID NO: 2389498 - DNA, 25 bp, Homo sapien
tgtgtgatgtacgtgtgtatcagtg

SEQ ID NO: 2389499 - DNA, 25 bp, Homo sapien
gcaaatgctgctttcgtagcgagta

SEQ ID NO: 2389500 - DNA, 25 bp, Homo sapien
tctttcccgtgtgctcagaacagtg

SEQ ID NO: 2389501 - DNA, 25 bp, Homo sapien
cgtagcgagtaaatgagactgtgtg

SEQ ID NO: 2389502 - DNA, 25 bp, Homo sapien
gtatgtacgtgtgtgggaatgtgta

SEQ ID NO: 2389503 - DNA, 25 bp, Homo sapien
tgaccccagcgcgaacgagctggct

SEQ ID NO: 2389504 - DNA, 25 bp, Homo sapien
gaaatgtagttctgcgcgttcacgt

SEQ ID NO: 2389505 - DNA, 25 bp, Homo sapien
gcgagaaaggcctgcggaccggcct

SEQ ID NO: 2389506 - DNA, 25 bp, Homo sapien
aagtgtagttccagcgcgagcggga

SEQ ID NO: 2389507 - DNA, 25 bp, Homo sapien
tgcaatgagcgttcatggcaccact

SEQ ID NO: 2389508 - DNA, 25 bp, Homo sapien
ctgcaatgagcgttcatggcaccac

SEQ ID NO: 2389509 - DNA, 25 bp, Homo sapien
aatgagcgttcatggcaccactgca

SEQ ID NO: 2389510 - DNA, 25 bp, Homo sapien
caccttcggtcccttcagtgttctt

SEQ ID NO: 2389511 - DNA, 25 bp, Homo sapien
gtgatataactgcactgctgactct

SEQ ID NO: 2389512 - DNA, 25 bp, Homo sapien
gcccccagcctatgtagccatttga

SEQ ID NO: 2389513 - DNA, 25 bp, Homo sapien
taaactgtttgagcttatacctggc

SEQ ID NO: 2389514 - DNA, 25 bp, Homo sapien
cataacaggaggctcgcacttgtct

SEQ ID NO: 2389515 - DNA, 25 bp, Homo sapien
tggacagggcacctttccctgtttg

SEQ ID NO: 2389516 - DNA, 25 bp, Homo sapien
ccttttctaagcactgacgctaccg

SEQ ID NO: 2389517 - DNA, 25 bp, Homo sapien
tgctaagtaaccggtgccttttcta

SEQ ID NO: 2389518 - DNA, 25 bp, Homo sapien
cacttctgttcaaagttgcactgga

SEQ ID NO: 2389519 - DNA, 25 bp, Homo sapien
tggcaaaaactctcaacaatctagg

SEQ ID NO: 2389520 - DNA, 25 bp, Homo sapien
taatactgttcaacgttgcactgga

SEQ ID NO: 2389521 - DNA, 25 bp, Homo sapien
ggcatttagcaaaaccaacgtctat

SEQ ID NO: 2389522 - DNA, 25 bp, Homo sapien
gatttggaagtaaccgaagtgtcaa

SEQ ID NO: 2389523 - DNA, 25 bp, Homo sapien
tgtctgcactcccttgttgactgca

SEQ ID NO: 2389524 - DNA, 25 bp, Homo sapien
acaatgcagctatcccactcctagg

SEQ ID NO: 2389525 - DNA, 25 bp, Homo sapien
agctgtctgcactcccttgttgact

SEQ ID NO: 2389526 - DNA, 25 bp, Homo sapien
taccaggagtcgcacggatggattt

SEQ ID NO: 2389527 - DNA, 25 bp, Homo sapien
ccggaccgacggaagtgtttagctg

SEQ ID NO: 2389528 - DNA, 25 bp, Homo sapien
gatttgtgcctttccgtggccctga

SEQ ID NO: 2389529 - DNA, 25 bp, Homo sapien
tgactagacaacctcccggtctggg

SEQ ID NO: 2389530 - DNA, 25 bp, Homo sapien
ccagcacgaagctgtccggaaactg

SEQ ID NO: 2389531 - DNA, 25 bp, Homo sapien
gcacgaagctgtccggaaactggtg

SEQ ID NO: 2389532 - DNA, 25 bp, Homo sapien
aagctgtccggaaactggtggccat

SEQ ID NO: 2389533 - DNA, 25 bp, Homo sapien
gaagctgtccggaaactggtggcca

SEQ ID NO: 2389534 - DNA, 25 bp, Homo sapien
gcttccacgaatacaataaggtgtc

SEQ ID NO: 2389535 - DNA, 25 bp, Homo sapien
tatgtatttccagtttagacctccc

SEQ ID NO: 2389536 - DNA, 25 bp, Homo sapien
ttagacctcccatgtgagttacagg

SEQ ID NO: 2389537 - DNA, 25 bp, Homo sapien
tctgagcttccacgaatacaataag

SEQ ID NO: 2389538 - DNA, 25 bp, Homo sapien
tcctttcattaacctgagtcctcac

SEQ ID NO: 2389539 - DNA, 25 bp, Homo sapien
aatagaactcaataaagagcccaga

SEQ ID NO: 2389540 - DNA, 25 bp, Homo sapien
atcaagacagtgtggcagtgtggta

SEQ ID NO: 2389541 - DNA, 25 bp, Homo sapien
tctcgtttctttagcacaacagcct

SEQ ID NO: 2389542 - DNA, 25 bp, Homo sapien
agagggaatcctaactcagtctata

SEQ ID NO: 2389543 - DNA, 25 bp, Homo sapien
gccaagatgggttcactcactggtg

SEQ ID NO: 2389544 - DNA, 25 bp, Homo sapien
gtccacacatttcatgacctagatg

SEQ ID NO: 2389545 - DNA, 25 bp, Homo sapien
tagatgaaacagaccaaatccctga

SEQ ID NO: 2389546 - DNA, 25 bp, Homo sapien
ttttgtataggcaaggtctctgcgt

SEQ ID NO: 2389547 - DNA, 25 bp, Homo sapien
tataggcaaggtctctgcgttgccc

SEQ ID NO: 2389548 - DNA, 25 bp, Homo sapien
gttttgtataggcaaggtctctgcg

SEQ ID NO: 2389549 - DNA, 25 bp, Homo sapien
tgtataggcaaggtctctgcgttgc

SEQ ID NO: 2389550 - DNA, 25 bp, Homo sapien
cccgtcggagggcaacaagtaaatg

SEQ ID NO: 2389551 - DNA, 25 bp, Homo sapien
cttgagctcattagcaggctcctcc

SEQ ID NO: 2389552 - DNA, 25 bp, Homo sapien
ttgagctcattagcaggctcctcct

SEQ ID NO: 2389553 - DNA, 25 bp, Homo sapien
gaagattcccgaacttgacacttga

SEQ ID NO: 2389554 - DNA, 25 bp, Homo sapien
acccagaagattcccgaacttgaca

SEQ ID NO: 2389555 - DNA, 25 bp, Homo sapien
cagcgatggctacaacaggtgaaca

SEQ ID NO: 2389556 - DNA, 25 bp, Homo sapien
agatacactcaaaccacagcgatgg

SEQ ID NO: 2389557 - DNA, 25 bp, Homo sapien
gaaatgcggcctgaaaattctcttg

SEQ ID NO: 2389558 - DNA, 25 bp, Homo sapien
aatcaatcaaggagtgccaggcacg

SEQ ID NO: 2389559 - DNA, 25 bp, Homo sapien
ctgtgtagaatccagtagctgccat

SEQ ID NO: 2389560 - DNA, 25 bp, Homo sapien
tctgtgtagaatccagtagctgcca

SEQ ID NO: 2389561 - DNA, 25 bp, Homo sapien
ggttatgatagttttccaatatcac

SEQ ID NO: 2389562 - DNA, 25 bp, Homo sapien
ccactgatatcaggttatgatagtt

SEQ ID NO: 2389563 - DNA, 25 bp, Homo sapien
tctgagtaacattgagacgcagtac

SEQ ID NO: 2389564 - DNA, 25 bp, Homo sapien
tatctgagtaacattgagacgcagt

SEQ ID NO: 2389565 - DNA, 25 bp, Homo sapien
tgagtaacattgagacgcagtactt

SEQ ID NO: 2389566 - DNA, 25 bp, Homo sapien
agtaacattgagacgcagtacttac

SEQ ID NO: 2389567 - DNA, 25 bp, Homo sapien
ttgatgggaaatcacaaagggtggg

SEQ ID NO: 2389568 - DNA, 25 bp, Homo sapien
tgttgatgggaaatcacaaagggtg

SEQ ID NO: 2389569 - DNA, 25 bp, Homo sapien
ctgttgatgggaaatcacaaagggt

SEQ ID NO: 2389570 - DNA, 25 bp, Homo sapien
gatgggaaatcacaaagggtgggga

SEQ ID NO: 2389571 - DNA, 25 bp, Homo sapien
gattaagtcaggcttggtaccatga

SEQ ID NO: 2389572 - DNA, 25 bp, Homo sapien
cttgaagattaagtcaggcttggta

SEQ ID NO: 2389573 - DNA, 25 bp, Homo sapien
gaagattaagtcaggcttggtacca

SEQ ID NO: 2389574 - DNA, 25 bp, Homo sapien
ttccaacttgaagattaagtcaggc

SEQ ID NO: 2389575 - DNA, 25 bp, Homo sapien
ccaaaagcaaacctgaagcagagtt

SEQ ID NO: 2389576 - DNA, 25 bp, Homo sapien
tatatgaagagtgacggcgatgtcc

SEQ ID NO: 2389577 - DNA, 25 bp, Homo sapien
tccaatagctcaaggacttccagaa

SEQ ID NO: 2389578 - DNA, 25 bp, Homo sapien
ggcgatgtccttatctgaggagctc

SEQ ID NO: 2389579 - DNA, 25 bp, Homo sapien
tactgagagtaaagtctgggaaagc

SEQ ID NO: 2389580 - DNA, 25 bp, Homo sapien
gaggagtcaacagcttgaacggcaa

SEQ ID NO: 2389581 - DNA, 25 bp, Homo sapien
caggtaaaacccaggactcaagtgc

SEQ ID NO: 2389582 - DNA, 25 bp, Homo sapien
tgaacggcaagatggcactgctcct

SEQ ID NO: 2389583 - DNA, 25 bp, Homo sapien
accgtgcccagccagtctcaggtat

SEQ ID NO: 2389584 - DNA, 25 bp, Homo sapien
tctttatagcaatgaaagaatggcc

SEQ ID NO: 2389585 - DNA, 25 bp, Homo sapien
ccgtgcccagccagtctcaggtatt

SEQ ID NO: 2389586 - DNA, 25 bp, Homo sapien
atttctttatagcaatgaaagaatg

SEQ ID NO: 2389587 - DNA, 25 bp, Homo sapien
tgagctgtgacttacaacgaaaagc

SEQ ID NO: 2389588 - DNA, 25 bp, Homo sapien
ggacaatgagctgtgacctgaaaga

SEQ ID NO: 2389589 - DNA, 25 bp, Homo sapien
ccacgtgtgttatagagtctctgtc

SEQ ID NO: 2389590 - DNA, 25 bp, Homo sapien
tctggtgtacaacgaatggagactt

SEQ ID NO: 2389591 - DNA, 25 bp, Homo sapien
tgagctgttccttcctaccaaaggc

SEQ ID NO: 2389592 - DNA, 25 bp, Homo sapien
caaaaggctctctcacacaaactac

SEQ ID NO: 2389593 - DNA, 25 bp, Homo sapien
tttctggtgtatctgaagtgatgcc

SEQ ID NO: 2389594 - DNA, 25 bp, Homo sapien
tccgatgtatacgaagccctgaatt

SEQ ID NO: 2389595 - DNA, 25 bp, Homo sapien
gacatgagtgtaattttagggcctc

SEQ ID NO: 2389596 - DNA, 25 bp, Homo sapien
ggtgttcctagtgtaaattctctga

SEQ ID NO: 2389597 - DNA, 25 bp, Homo sapien
tcatcccaaatatggttggtctctc

SEQ ID NO: 2389598 - DNA, 25 bp, Homo sapien
gcctcctgcttgtaaatcctgtcta

SEQ ID NO: 2389599 - DNA, 25 bp, Homo sapien
taaatatccattaactttaagactc

SEQ ID NO: 2389600 - DNA, 25 bp, Homo sapien
aacaactttatactccaccatgaag

SEQ ID NO: 2389601 - DNA, 25 bp, Homo sapien
taactttaagactctgttccctgcg

SEQ ID NO: 2389602 - DNA, 25 bp, Homo sapien
actgggggatattattccacaaact

SEQ ID NO: 2389603 - DNA, 25 bp, Homo sapien
gagattaccattatccaacaatggg

SEQ ID NO: 2389604 - DNA, 25 bp, Homo sapien
cctgtagctagtggaacggatacct

SEQ ID NO: 2389605 - DNA, 25 bp, Homo sapien
taatgagttctcttaagcggcagcc

SEQ ID NO: 2389606 - DNA, 25 bp, Homo sapien
gcaggttctaaagggatcgtatcca

SEQ ID NO: 2389607 - DNA, 25 bp, Homo sapien
ggcctcaggttcttcgcagatactg

SEQ ID NO: 2389608 - DNA, 25 bp, Homo sapien
tactctatagccttaaatgaagcat

SEQ ID NO: 2389609 - DNA, 25 bp, Homo sapien
cagaagagtttgctaggctgaggcc

SEQ ID NO: 2389610 - DNA, 25 bp, Homo sapien
tttatatattgccaacatctactct

SEQ ID NO: 2389611 - DNA, 25 bp, Homo sapien
tgagggtcttaggaacacataatgg

SEQ ID NO: 2389612 - DNA, 25 bp, Homo sapien
cacttttattgggtcttggtggagg

SEQ ID NO: 2389613 - DNA, 25 bp, Homo sapien
tagctactactttcaataacacact

SEQ ID NO: 2389614 - DNA, 25 bp, Homo sapien
acgcccggccagtagctactacttt

SEQ ID NO: 2389615 - DNA, 25 bp, Homo sapien
caagttgataattgaggccgatgca

SEQ ID NO: 2389616 - DNA, 25 bp, Homo sapien
tcctctttgggaactcctatgccct

SEQ ID NO: 2389617 - DNA, 25 bp, Homo sapien
tttttacagatatgaggtcttgccc

SEQ ID NO: 2389618 - DNA, 25 bp, Homo sapien
tcaagagttccttttggcctccagc

SEQ ID NO: 2389619 - DNA, 25 bp, Homo sapien
tctgatattagaaagccactggaga

SEQ ID NO: 2389620 - DNA, 25 bp, Homo sapien
tcctcggcagtatggaagcttccca

SEQ ID NO: 2389621 - DNA, 25 bp, Homo sapien
aacagtgtacgagggctgtccttcc

SEQ ID NO: 2389622 - DNA, 25 bp, Homo sapien
tcttctctgagaaacgtctgtttgg

SEQ ID NO: 2389623 - DNA, 25 bp, Homo sapien
gccctctggctgtaacaattcacat

SEQ ID NO: 2389624 - DNA, 25 bp, Homo sapien
ggtgtcgacctcaactctcatggga

SEQ ID NO: 2389625 - DNA, 25 bp, Homo sapien
taatatcagattgaagaccaggatc

SEQ ID NO: 2389626 - DNA, 25 bp, Homo sapien
catgtttgggattaccacggtctgc

SEQ ID NO: 2389627 - DNA, 25 bp, Homo sapien
tatttataaagttgaactaggccag

SEQ ID NO: 2389628 - DNA, 25 bp, Homo sapien
tgtttcatatcactctatttctaca

SEQ ID NO: 2389629 - DNA, 25 bp, Homo sapien
taaagttgaactaggccagatgcaa

SEQ ID NO: 2389630 - DNA, 25 bp, Homo sapien
tatcactctatttctacattatttg

SEQ ID NO: 2389631 - DNA, 25 bp, Homo sapien
atactgttcgtaaggttctgcttga

SEQ ID NO: 2389632 - DNA, 25 bp, Homo sapien
aaggttctgcttgaagtatgtttgc

SEQ ID NO: 2389633 - DNA, 25 bp, Homo sapien
ttataatcgtaaaaaggtgttgcat

SEQ ID NO: 2389634 - DNA, 25 bp, Homo sapien
tgctgaggggtttataatcgtaaaa

SEQ ID NO: 2389635 - DNA, 25 bp, Homo sapien
cacctttgctcgagttttgctcagg

SEQ ID NO: 2389636 - DNA, 25 bp, Homo sapien
ccacacctctaagggagactgagag

SEQ ID NO: 2389637 - DNA, 25 bp, Homo sapien
gcactggagaatgcggtgttgccca

SEQ ID NO: 2389638 - DNA, 25 bp, Homo sapien
gttgcccaaaggcttggagacccca

SEQ ID NO: 2389639 - DNA, 25 bp, Homo sapien
gaagctggcagtgcattgctaaaat

SEQ ID NO: 2389640 - DNA, 25 bp, Homo sapien
gccagtgtgcttcttaatggtagaa

SEQ ID NO: 2389641 - DNA, 25 bp, Homo sapien
tattaccatcgcagtaagttaaggg

SEQ ID NO: 2389642 - DNA, 25 bp, Homo sapien
gattttaaccgtaaagccagtgtgc

SEQ ID NO: 2389643 - DNA, 25 bp, Homo sapien
ccatattcaaagcaagcgctgccag

SEQ ID NO: 2389644 - DNA, 25 bp, Homo sapien
actgcaaggcagcaacctggctttt

SEQ ID NO: 2389645 - DNA, 25 bp, Homo sapien
taggtggtggagcttcatcgtcaaa

SEQ ID NO: 2389646 - DNA, 25 bp, Homo sapien
ttaacaggtttagccagtcatctgc

SEQ ID NO: 2389647 - DNA, 25 bp, Homo sapien
cgcgcccaaaccgtcggcctttgtg

SEQ ID NO: 2389648 - DNA, 25 bp, Homo sapien
gtcggcctttgtgcgctcccgggcg

SEQ ID NO: 2389649 - DNA, 25 bp, Homo sapien
ggccgggacgagtcggggactgcac

SEQ ID NO: 2389650 - DNA, 25 bp, Homo sapien
gcggcctcgcgatcacgtgacaccg

SEQ ID NO: 2389651 - DNA, 25 bp, Homo sapien
cggacgcccagggccttgaagccga

SEQ ID NO: 2389652 - DNA, 25 bp, Homo sapien
acgcccagggccttgaagccgaagc

SEQ ID NO: 2389653 - DNA, 25 bp, Homo sapien
cgcgcggacgcccagggccttgaag

SEQ ID NO: 2389654 - DNA, 25 bp, Homo sapien
gcgcggacgcccagggccttgaagc

SEQ ID NO: 2389655 - DNA, 25 bp, Homo sapien
cggcccacggcatcttcacgacccg

SEQ ID NO: 2389656 - DNA, 25 bp, Homo sapien
cacggcatcttcacgacccggccca

SEQ ID NO: 2389657 - DNA, 25 bp, Homo sapien
gcccacggcatcttcacgacccggc

SEQ ID NO: 2389658 - DNA, 25 bp, Homo sapien
ggcatcttcacgacccggcccagcc

SEQ ID NO: 2389659 - DNA, 25 bp, Homo sapien
ctggcccgaggtcgaggctaaacgc

SEQ ID NO: 2389660 - DNA, 25 bp, Homo sapien
agggcagccgctccttagggccacg

SEQ ID NO: 2389661 - DNA, 25 bp, Homo sapien
ctttaaaagcctccttcgatagcgg

SEQ ID NO: 2389662 - DNA, 25 bp, Homo sapien
ctaaacgcgcccgaggctaaacgcg

SEQ ID NO: 2389663 - DNA, 25 bp, Homo sapien
gaatgaatatatgtataatttgagg

SEQ ID NO: 2389664 - DNA, 25 bp, Homo sapien
tttcgctacaccataccaaaagcaa

SEQ ID NO: 2389665 - DNA, 25 bp, Homo sapien
atttgaggggagatttcgctacacc

SEQ ID NO: 2389666 - DNA, 25 bp, Homo sapien
gaaaataaacgtagctatttcatac

SEQ ID NO: 2389667 - DNA, 25 bp, Homo sapien
acagtgtgtcttttaactgacaaat

SEQ ID NO: 2389668 - DNA, 25 bp, Homo sapien
tgtcccttataagcagctcagagct

SEQ ID NO: 2389669 - DNA, 25 bp, Homo sapien
gcactctcagggaaacagaatatag

SEQ ID NO: 2389670 - DNA, 25 bp, Homo sapien
cagtggaagcctaggtctctgcaaa

SEQ ID NO: 2389671 - DNA, 25 bp, Homo sapien
tctaaggccagaggtacgcttgcta

SEQ ID NO: 2389672 - DNA, 25 bp, Homo sapien
catgagcaggcttatttgtagggac

SEQ ID NO: 2389673 - DNA, 25 bp, Homo sapien
atgagcaggcttatttgtagggacc

SEQ ID NO: 2389674 - DNA, 25 bp, Homo sapien
tgagcaggcttatttgtagggacca

SEQ ID NO: 2389675 - DNA, 25 bp, Homo sapien
acatgagcaggcttatttgtaggga

SEQ ID NO: 2389676 - DNA, 25 bp, Homo sapien
gctaggtcttctacactgagaatga

SEQ ID NO: 2389677 - DNA, 25 bp, Homo sapien
tcagcaaggctgagatcggttctac

SEQ ID NO: 2389678 - DNA, 25 bp, Homo sapien
tgctgctgtacgagatgatcagcaa

SEQ ID NO: 2389679 - DNA, 25 bp, Homo sapien
gcttctgccccaaaactgtggagtg

SEQ ID NO: 2389680 - DNA, 25 bp, Homo sapien
aggcttatacatttcttctaattcc

SEQ ID NO: 2389681 - DNA, 25 bp, Homo sapien
cggaaggcttatacatttcttctaa

SEQ ID NO: 2389682 - DNA, 25 bp, Homo sapien
gaaggcttatacatttcttctaatt

SEQ ID NO: 2389683 - DNA, 25 bp, Homo sapien
ggaaggcttatacatttcttctaat

SEQ ID NO: 2389684 - DNA, 25 bp, Homo sapien
tgtgataaaatgtcattgtgcattc

SEQ ID NO: 2389685 - DNA, 25 bp, Homo sapien
gataaaatgtcattgtgcattcttc

SEQ ID NO: 2389686 - DNA, 25 bp, Homo sapien
taaaatgtcattgtgcattcttcca

SEQ ID NO: 2389687 - DNA, 25 bp, Homo sapien
gtgataaaatgtcattgtgcattct

SEQ ID NO: 2389688 - DNA, 25 bp, Homo sapien
ctgtaagagcacaatcctggtaaat

SEQ ID NO: 2389689 - DNA, 25 bp, Homo sapien
ccagtgacactaggctgctatagtt

SEQ ID NO: 2389690 - DNA, 25 bp, Homo sapien
cagtgacactaggctgctatagttc

SEQ ID NO: 2389691 - DNA, 25 bp, Homo sapien
aaataaaaggcaatgcattgggcat

SEQ ID NO: 2389692 - DNA, 25 bp, Homo sapien
aagcctagctataggcttctgaaac

SEQ ID NO: 2389693 - DNA, 25 bp, Homo sapien
gcaactgtgatctaagtttcaggtc

SEQ ID NO: 2389694 - DNA, 25 bp, Homo sapien
tattgaaaggtgagacccaaatact

SEQ ID NO: 2389695 - DNA, 25 bp, Homo sapien
tcactactgctcaaactattactac

SEQ ID NO: 2389696 - DNA, 25 bp, Homo sapien
gctatcactactgctcaaactatta

SEQ ID NO: 2389697 - DNA, 25 bp, Homo sapien
tgctatcactactgctcaaactatt

SEQ ID NO: 2389698 - DNA, 25 bp, Homo sapien
tatcactactgctcaaactattact

SEQ ID NO: 2389699 - DNA, 25 bp, Homo sapien
aaaggccttgggcccaactgcttgg

SEQ ID NO: 2389700 - DNA, 25 bp, Homo sapien
aaggccttgggcccaactgcttggg

SEQ ID NO: 2389701 - DNA, 25 bp, Homo sapien
cacaaaggccttgggcccaactgct

SEQ ID NO: 2389702 - DNA, 25 bp, Homo sapien
caaaggccttgggcccaactgcttg

SEQ ID NO: 2389703 - DNA, 25 bp, Homo sapien
tctccatctcctacccacggctctt

SEQ ID NO: 2389704 - DNA, 25 bp, Homo sapien
catctcctacccacggctcttctcc

SEQ ID NO: 2389705 - DNA, 25 bp, Homo sapien
ccatctcctacccacggctcttctc

SEQ ID NO: 2389706 - DNA, 25 bp, Homo sapien
ctccatctcctacccacggctcttc

SEQ ID NO: 2389707 - DNA, 25 bp, Homo sapien
aggtcacagatgggacttcagaaaa

SEQ ID NO: 2389708 - DNA, 25 bp, Homo sapien
tcaggtcacagatgggacttcagaa

SEQ ID NO: 2389709 - DNA, 25 bp, Homo sapien
caggtcacagatgggacttcagaaa

SEQ ID NO: 2389710 - DNA, 25 bp, Homo sapien
tgtgttggcaggaaatatatatcgc

SEQ ID NO: 2389711 - DNA, 25 bp, Homo sapien
agatagaaaagagcatcaggaccaa

SEQ ID NO: 2389712 - DNA, 25 bp, Homo sapien
gctaatgctctaatatacccatagt

SEQ ID NO: 2389713 - DNA, 25 bp, Homo sapien
ctattttatctgaagtagtctagat

SEQ ID NO: 2389714 - DNA, 25 bp, Homo sapien
catttgtggtgtatcccaaatagtc

SEQ ID NO: 2389715 - DNA, 25 bp, Homo sapien
tggtgtatcccaaatagtcccactc

SEQ ID NO: 2389716 - DNA, 25 bp, Homo sapien
tgtatcccaaatagtcccactctct

SEQ ID NO: 2389717 - DNA, 25 bp, Homo sapien
taaatttacatctgccttcccccat

SEQ ID NO: 2389718 - DNA, 25 bp, Homo sapien
aggtgtgcaaccacatagctggcta

SEQ ID NO: 2389719 - DNA, 25 bp, Homo sapien
tttcatctaaactattcaggcacag

SEQ ID NO: 2389720 - DNA, 25 bp, Homo sapien
gacagtttgacagtcatttgttaca

SEQ ID NO: 2389721 - DNA, 25 bp, Homo sapien
cactaaaactatcccaagacccaag

SEQ ID NO: 2389722 - DNA, 25 bp, Homo sapien
gagaatgagtcctatactacaatca

SEQ ID NO: 2389723 - DNA, 25 bp, Homo sapien
tgtcatgaacaattattctaggcac

SEQ ID NO: 2389724 - DNA, 25 bp, Homo sapien
taggcacttgacatggaataatttg

SEQ ID NO: 2389725 - DNA, 25 bp, Homo sapien
tattatggtattactggctaacaga

SEQ ID NO: 2389726 - DNA, 25 bp, Homo sapien
agttttcttggtgttctatcattca

SEQ ID NO: 2389727 - DNA, 25 bp, Homo sapien
tgttctatcattcataggtgttgaa

SEQ ID NO: 2389728 - DNA, 25 bp, Homo sapien
ttcttggtgttctatcattcatagg

SEQ ID NO: 2389729 - DNA, 25 bp, Homo sapien
aaaataccctgcttagtcatggtat

SEQ ID NO: 2389730 - DNA, 25 bp, Homo sapien
atatgcatcttcacattactattaa

SEQ ID NO: 2389731 - DNA, 25 bp, Homo sapien
tatgcatcttcacattactattaag

SEQ ID NO: 2389732 - DNA, 25 bp, Homo sapien
cccaggtagtgtgtaaggtactaga

SEQ ID NO: 2389733 - DNA, 25 bp, Homo sapien
gtaaggtactagagacacaagagaa

SEQ ID NO: 2389734 - DNA, 25 bp, Homo sapien
tactttctgagtatacactatgccc

SEQ ID NO: 2389735 - DNA, 25 bp, Homo sapien
tacactatgcccaggtagtgtgtaa

SEQ ID NO: 2389736 - DNA, 25 bp, Homo sapien
catgttaccatctactttccagact

SEQ ID NO: 2389737 - DNA, 25 bp, Homo sapien
atgttaccatctactttccagactt

SEQ ID NO: 2389738 - DNA, 25 bp, Homo sapien
tctaagtcaccttcactgtttgatt

SEQ ID NO: 2389739 - DNA, 25 bp, Homo sapien
tccatctaagtcaccttcactgttt

SEQ ID NO: 2389740 - DNA, 25 bp, Homo sapien
gcatcacattcatgacctcttttta

SEQ ID NO: 2389741 - DNA, 25 bp, Homo sapien
tgtcttggttatcctggtgccacat

SEQ ID NO: 2389742 - DNA, 25 bp, Homo sapien
ttttccataatctccttttggaata

SEQ ID NO: 2389743 - DNA, 25 bp, Homo sapien
caggtatcagtatcctcaggcttgg

SEQ ID NO: 2389744 - DNA, 25 bp, Homo sapien
ggtttcttactgaagcgcttcctac

SEQ ID NO: 2389745 - DNA, 25 bp, Homo sapien
gatatgagatgtgacttccgggaga

SEQ ID NO: 2389746 - DNA, 25 bp, Homo sapien
gatgtgtaataaactgagacttctg

SEQ ID NO: 2389747 - DNA, 25 bp, Homo sapien
gatgtgtaacgagttgtgacttcct

SEQ ID NO: 2389748 - DNA, 25 bp, Homo sapien
tgatgtgtaacgagttgtgacttcc

SEQ ID NO: 2389749 - DNA, 25 bp, Homo sapien
tgagttctgtgatgtgtaacgagtt

SEQ ID NO: 2389750 - DNA, 25 bp, Homo sapien
tctgtgatgtgtaacgagttgtgac

SEQ ID NO: 2389751 - DNA, 25 bp, Homo sapien
ctgatgattaatgagactcgacctc

SEQ ID NO: 2389752 - DNA, 25 bp, Homo sapien
taaatgctttcctacactcgctgca

SEQ ID NO: 2389753 - DNA, 25 bp, Homo sapien
gattaatgagactcgacctctctct

SEQ ID NO: 2389754 - DNA, 25 bp, Homo sapien
gactcgacctctctctaaatgcttt

SEQ ID NO: 2389755 - DNA, 25 bp, Homo sapien
gttctcagatgtctaattagctccg

SEQ ID NO: 2389756 - DNA, 25 bp, Homo sapien
tgtgacttccgagagaaagctttgc

SEQ ID NO: 2389757 - DNA, 25 bp, Homo sapien
tgatgtctaacgagctgtgatttcc

SEQ ID NO: 2389758 - DNA, 25 bp, Homo sapien
tgatgtggtataaggtgtgacttcc

SEQ ID NO: 2389759 - DNA, 25 bp, Homo sapien
cattcaatgcatcgataaggcttct

SEQ ID NO: 2389760 - DNA, 25 bp, Homo sapien
ttcaatgcatcgataaggcttctct

SEQ ID NO: 2389761 - DNA, 25 bp, Homo sapien
gagctgtgacttctgtgagaaagct

SEQ ID NO: 2389762 - DNA, 25 bp, Homo sapien
cacattcaatgcatcgataaggctt

SEQ ID NO: 2389763 - DNA, 25 bp, Homo sapien
aaaagtgtatggcttcccttgacag

SEQ ID NO: 2389764 - DNA, 25 bp, Homo sapien
catctgtcaaccacttagaattggg

SEQ ID NO: 2389765 - DNA, 25 bp, Homo sapien
tggagtacaaacacctaacatgacg

SEQ ID NO: 2389766 - DNA, 25 bp, Homo sapien
gatccactgcagtcataggttcact

SEQ ID NO: 2389767 - DNA, 25 bp, Homo sapien
ggataatgcaactagtgaaacaaag

SEQ ID NO: 2389768 - DNA, 25 bp, Homo sapien
cctgacttaagaggatgtgacttac

SEQ ID NO: 2389769 - DNA, 25 bp, Homo sapien
tgtttccttatacagatagttcctg

SEQ ID NO: 2389770 - DNA, 25 bp, Homo sapien
acttagctaagggatggttcatgca

SEQ ID NO: 2389771 - DNA, 25 bp, Homo sapien
cacttgaggtctccacttgaggtcc

SEQ ID NO: 2389772 - DNA, 25 bp, Homo sapien
taggcattaacaaggaacaagggca

SEQ ID NO: 2389773 - DNA, 25 bp, Homo sapien
gacaacctggacatagattgctgga

SEQ ID NO: 2389774 - DNA, 25 bp, Homo sapien
catttgcattagttggtctcccacg

SEQ ID NO: 2389775 - DNA, 25 bp, Homo sapien
tactggaacacaatcgggactcttt

SEQ ID NO: 2389776 - DNA, 25 bp, Homo sapien
aaccaggtactggaacacaatcggg

SEQ ID NO: 2389777 - DNA, 25 bp, Homo sapien
gaacacaatcgggactctttcttga

SEQ ID NO: 2389778 - DNA, 25 bp, Homo sapien
agaccagaagaaccaggtactggaa

SEQ ID NO: 2389779 - DNA, 25 bp, Homo sapien
gaagaattcaacaatcaagacatga

SEQ ID NO: 2389780 - DNA, 25 bp, Homo sapien
tcacagaagaattcaacaatcaaga

SEQ ID NO: 2389781 - DNA, 25 bp, Homo sapien
gatatttggagtatctcacagaaga

SEQ ID NO: 2389782 - DNA, 25 bp, Homo sapien
attaggatatttggagtatctcaca

SEQ ID NO: 2389783 - DNA, 25 bp, Homo sapien
gaggacagagtgttctaaattataa

SEQ ID NO: 2389784 - DNA, 25 bp, Homo sapien
tgtacccttgtgtccaaggaccagc

SEQ ID NO: 2389785 - DNA, 25 bp, Homo sapien
agatacagcatggaactttgtaccc

SEQ ID NO: 2389786 - DNA, 25 bp, Homo sapien
gggcattgacactgatcatcagcag

SEQ ID NO: 2389787 - DNA, 25 bp, Homo sapien
tactcctctctgctagaacactagt

SEQ ID NO: 2389788 - DNA, 25 bp, Homo sapien
taatggctatgctagaagcccaatc

SEQ ID NO: 2389789 - DNA, 25 bp, Homo sapien
aaacatgcaccaagtactccctgaa

SEQ ID NO: 2389790 - DNA, 25 bp, Homo sapien
taagataattctcacgagttactcc

SEQ ID NO: 2389791 - DNA, 25 bp, Homo sapien
tgaggccaagcgcacatcatcgaaa

SEQ ID NO: 2389792 - DNA, 25 bp, Homo sapien
tataactgccagagtgtctcgcggc

SEQ ID NO: 2389793 - DNA, 25 bp, Homo sapien
ccccgcgcgagagagcatatggctt

SEQ ID NO: 2389794 - DNA, 25 bp, Homo sapien
gagggcctgcgacaactacaattcc

SEQ ID NO: 2389795 - DNA, 25 bp, Homo sapien
ccacagaaggatgcgtttccgtggt

SEQ ID NO: 2389796 - DNA, 25 bp, Homo sapien
tgggcgtagcgttccagggctccgg

SEQ ID NO: 2389797 - DNA, 25 bp, Homo sapien
cgccaggtgggcgtagcgttccagg

SEQ ID NO: 2389798 - DNA, 25 bp, Homo sapien
agtggccacagaaggatgcgtttcc

SEQ ID NO: 2389799 - DNA, 25 bp, Homo sapien
gaaggaggagatcagaaaagtgtaa

SEQ ID NO: 2389800 - DNA, 25 bp, Homo sapien
gggcgctggagtaacgtaaagcact

SEQ ID NO: 2389801 - DNA, 25 bp, Homo sapien
cattctaacactgtgggaaagagga

SEQ ID NO: 2389802 - DNA, 25 bp, Homo sapien
ggaggcgatgtaacagctggcaccc

SEQ ID NO: 2389803 - DNA, 25 bp, Homo sapien
acatctggatagcttcctgtcactc

SEQ ID NO: 2389804 - DNA, 25 bp, Homo sapien
ggattatacacatgaacaatatgga

SEQ ID NO: 2389805 - DNA, 25 bp, Homo sapien
cagggtaataattcgctacagcaga

SEQ ID NO: 2389806 - DNA, 25 bp, Homo sapien
taggcaatgtgtctaagtagtaaca

SEQ ID NO: 2389807 - DNA, 25 bp, Homo sapien
tatttgcatgaccagcacgcatgcc

SEQ ID NO: 2389808 - DNA, 25 bp, Homo sapien
catctgtacaaatctctttgagcag

SEQ ID NO: 2389809 - DNA, 25 bp, Homo sapien
gaccagatggccatagttctccaac

SEQ ID NO: 2389810 - DNA, 25 bp, Homo sapien
ccaacattacacatctgtacaaatc

SEQ ID NO: 2389811 - DNA, 25 bp, Homo sapien
ccagtgagaccagatggccatagtt

SEQ ID NO: 2389812 - DNA, 25 bp, Homo sapien
ataaggaaaccacatctggcttaga

SEQ ID NO: 2389813 - DNA, 25 bp, Homo sapien
caataaggaaaccacatctggctta

SEQ ID NO: 2389814 - DNA, 25 bp, Homo sapien
aataaggaaaccacatctggcttag

SEQ ID NO: 2389815 - DNA, 25 bp, Homo sapien
gaaattcagagaccagacagaacta

SEQ ID NO: 2389816 - DNA, 25 bp, Homo sapien
cagacagaactaacaatgggaacaa

SEQ ID NO: 2389817 - DNA, 25 bp, Homo sapien
gaccagacagaactaacaatgggaa

SEQ ID NO: 2389818 - DNA, 25 bp, Homo sapien
agaaatgaaattcagagaccagaca

SEQ ID NO: 2389819 - DNA, 25 bp, Homo sapien
ttactcagggggctgaagcagcaga

SEQ ID NO: 2389820 - DNA, 25 bp, Homo sapien
gcctagggggcaagagcgagacttc

SEQ ID NO: 2389821 - DNA, 25 bp, Homo sapien
ctagggggcaagagcgagacttcgt

SEQ ID NO: 2389822 - DNA, 25 bp, Homo sapien
ccagcctagggggcaagagcgagac

SEQ ID NO: 2389823 - DNA, 25 bp, Homo sapien
aatattttgtgtgctccagaaacca

SEQ ID NO: 2389824 - DNA, 25 bp, Homo sapien
gacttttgtagctcaagttcttcaa

SEQ ID NO: 2389825 - DNA, 25 bp, Homo sapien
taatattttgtgtgctccagaaacc

SEQ ID NO: 2389826 - DNA, 25 bp, Homo sapien
caagttcttcaaccaatgagagaca

SEQ ID NO: 2389827 - DNA, 25 bp, Homo sapien
aaaggaacaaggctgggaattacag

SEQ ID NO: 2389828 - DNA, 25 bp, Homo sapien
gaacaaggctgggaattacagtagt

SEQ ID NO: 2389829 - DNA, 25 bp, Homo sapien
caaggctgggaattacagtagtcct

SEQ ID NO: 2389830 - DNA, 25 bp, Homo sapien
aggaacaaggctgggaattacagta

SEQ ID NO: 2389831 - DNA, 25 bp, Homo sapien
caaatactgggatgagtcatcataa

SEQ ID NO: 2389832 - DNA, 25 bp, Homo sapien
gatcaaatactgggatgagtcatca

SEQ ID NO: 2389833 - DNA, 25 bp, Homo sapien
aatactgggatgagtcatcataaat

SEQ ID NO: 2389834 - DNA, 25 bp, Homo sapien
aagtctttgatctcaccacttgact

SEQ ID NO: 2389835 - DNA, 25 bp, Homo sapien
tgtaacaccagggaaaagcgtcgac

SEQ ID NO: 2389836 - DNA, 25 bp, Homo sapien
tgcagcatctcagtatgatccttgc

SEQ ID NO: 2389837 - DNA, 25 bp, Homo sapien
tccatagggcctctccacagtactg

SEQ ID NO: 2389838 - DNA, 25 bp, Homo sapien
cagggccttgacttagaattctttc

SEQ ID NO: 2389839 - DNA, 25 bp, Homo sapien
ttggtgtttcacaaggtttgaaatc

SEQ ID NO: 2389840 - DNA, 25 bp, Homo sapien
tttattacagtccttacactcatgg

SEQ ID NO: 2389841 - DNA, 25 bp, Homo sapien
catttggtgtttcacaaggtttgaa

SEQ ID NO: 2389842 - DNA, 25 bp, Homo sapien
taaggtgtgagaaacggcgaaatgc

SEQ ID NO: 2389843 - DNA, 25 bp, Homo sapien
aatgagtgacaacggaaagctttcc

SEQ ID NO: 2389844 - DNA, 25 bp, Homo sapien
tctggtggcgaatgagttctgagcc

SEQ ID NO: 2389845 - DNA, 25 bp, Homo sapien
tagcaaggtttgagctccagctgaa

SEQ ID NO: 2389846 - DNA, 25 bp, Homo sapien
taagggactcctaccaaatgaagtc

SEQ ID NO: 2389847 - DNA, 25 bp, Homo sapien
tcctggttgacagatgcggaatgag

SEQ ID NO: 2389848 - DNA, 25 bp, Homo sapien
tctccagggtggtgaataaagtgtg

SEQ ID NO: 2389849 - DNA, 25 bp, Homo sapien
cggaatgagggctaatctctggctt

SEQ ID NO: 2389850 - DNA, 25 bp, Homo sapien
gtagttacattttcagaatcacatg

SEQ ID NO: 2389851 - DNA, 25 bp, Homo sapien
taactgtcagcattaccttaaatcc

SEQ ID NO: 2389852 - DNA, 25 bp, Homo sapien
caaatgtctatagtcagattcaagg

SEQ ID NO: 2389853 - DNA, 25 bp, Homo sapien
acattttcagaatcacatgctgtgg

SEQ ID NO: 2389854 - DNA, 25 bp, Homo sapien
ccagatcatgagagccaaattaata

SEQ ID NO: 2389855 - DNA, 25 bp, Homo sapien
tacttttgcaatattcctagactca

SEQ ID NO: 2389856 - DNA, 25 bp, Homo sapien
cctttcttgtgctattgtcgtgcta

SEQ ID NO: 2389857 - DNA, 25 bp, Homo sapien
ctgaaggtcctgagagtaaataaat

SEQ ID NO: 2389858 - DNA, 25 bp, Homo sapien
gaacttgcttctttggctacaggga

SEQ ID NO: 2389859 - DNA, 25 bp, Homo sapien
taagctggttagaccttgctgagag

SEQ ID NO: 2389860 - DNA, 25 bp, Homo sapien
gagaacttcgggtgaaatgcatccc

SEQ ID NO: 2389861 - DNA, 25 bp, Homo sapien
tattgcatgtcagtacaaatcccag

SEQ ID NO: 2389862 - DNA, 25 bp, Homo sapien
gctttggctttagccataggagaga

SEQ ID NO: 2389863 - DNA, 25 bp, Homo sapien
ttgctttggctttagccataggaga

SEQ ID NO: 2389864 - DNA, 25 bp, Homo sapien
tttggctttagccataggagagaca

SEQ ID NO: 2389865 - DNA, 25 bp, Homo sapien
ggctttagccataggagagacagga

SEQ ID NO: 2389866 - DNA, 25 bp, Homo sapien
ctgctagaagatgggtgacatgcgg

SEQ ID NO: 2389867 - DNA, 25 bp, Homo sapien
ttttgttgctgtgaatacctttcac

SEQ ID NO: 2389868 - DNA, 25 bp, Homo sapien
ttgggctgctagaagatgggtgaca

SEQ ID NO: 2389869 - DNA, 25 bp, Homo sapien
agtgtcttgggctgctagaagatgg

SEQ ID NO: 2389870 - DNA, 25 bp, Homo sapien
tcaatcttgtttctcctgagggtgc

SEQ ID NO: 2389871 - DNA, 25 bp, Homo sapien
cctgagggtgctcttctgaagatac

SEQ ID NO: 2389872 - DNA, 25 bp, Homo sapien
tctcctgagggtgctcttctgaaga

SEQ ID NO: 2389873 - DNA, 25 bp, Homo sapien
tttctcctgagggtgctcttctgaa

SEQ ID NO: 2389874 - DNA, 25 bp, Homo sapien
tgagcacaagtgtgttaccttctat

SEQ ID NO: 2389875 - DNA, 25 bp, Homo sapien
tagagcttcttcacaagcctgtgag

SEQ ID NO: 2389876 - DNA, 25 bp, Homo sapien
atcaggcctgatcaaggtgttgacc

SEQ ID NO: 2389877 - DNA, 25 bp, Homo sapien
aagcctgtgaggagggcatgttgac

SEQ ID NO: 2389878 - DNA, 25 bp, Homo sapien
ttcttcacaagcctgtgaggagggc

SEQ ID NO: 2389879 - DNA, 25 bp, Homo sapien
atgagcctccgtgcccggccctaag

SEQ ID NO: 2389880 - DNA, 25 bp, Homo sapien
tccacccgcctcagtactgggattt

SEQ ID NO: 2389881 - DNA, 25 bp, Homo sapien
cacccgcctcagtactgggatttca

SEQ ID NO: 2389882 - DNA, 25 bp, Homo sapien
ggcatgagcctccgtgcccggccct

SEQ ID NO: 2389883 - DNA, 25 bp, Homo sapien
ctaagcaacacgggagggctaaagg

SEQ ID NO: 2389884 - DNA, 25 bp, Homo sapien
aagggtgcacgcctctgtccagcag

SEQ ID NO: 2389885 - DNA, 25 bp, Homo sapien
tagtaatgagttgaatcacagccat

SEQ ID NO: 2389886 - DNA, 25 bp, Homo sapien
cttgaatctctaaacctagtaatga

SEQ ID NO: 2389887 - DNA, 25 bp, Homo sapien
gccggggatgcgcgtttgcctcctt

SEQ ID NO: 2389888 - DNA, 25 bp, Homo sapien
ggggccggggatgcgcgtttgcctc

SEQ ID NO: 2389889 - DNA, 25 bp, Homo sapien
cggggatgcgcgtttgcctccttct

SEQ ID NO: 2389890 - DNA, 25 bp, Homo sapien
ctggggggccggggatgcgcgtttg

SEQ ID NO: 2389891 - DNA, 25 bp, Homo sapien
cgcggggagcgagtggggaccaggg

SEQ ID NO: 2389892 - DNA, 25 bp, Homo sapien
ctgggaaacgtagttcggcctcgcg

SEQ ID NO: 2389893 - DNA, 25 bp, Homo sapien
gcggggcggcgcaggagctcctggg

SEQ ID NO: 2389894 - DNA, 25 bp, Homo sapien
tgcggggcggcgcaggagctcctgg

SEQ ID NO: 2389895 - DNA, 25 bp, Homo sapien
gcaggagctcctgggaaacgtagtt

SEQ ID NO: 2389896 - DNA, 25 bp, Homo sapien
gtccgtgacgcacagaccaggcccc

SEQ ID NO: 2389897 - DNA, 25 bp, Homo sapien
agcctggcgttcaggccacgctccg

SEQ ID NO: 2389898 - DNA, 25 bp, Homo sapien
tgtgccggaccctgcgggccttcgg

SEQ ID NO: 2389899 - DNA, 25 bp, Homo sapien
cgggaccctagagccggcgattcgt

SEQ ID NO: 2389900 - DNA, 25 bp, Homo sapien
aagcaactagaaggttcgatgggag

SEQ ID NO: 2389901 - DNA, 25 bp, Homo sapien
agcgatcccgtcacaaaggcagcag

SEQ ID NO: 2389902 - DNA, 25 bp, Homo sapien
cagcaaaacagagaacgcgactcca

SEQ ID NO: 2389903 - DNA, 25 bp, Homo sapien
cattcaccagcggagcgcgaagagc

SEQ ID NO: 2389904 - DNA, 25 bp, Homo sapien
gcctgatgacgatgcaaacacaaaa

SEQ ID NO: 2389905 - DNA, 25 bp, Homo sapien
aatacactgctacattactaaaggg

SEQ ID NO: 2389906 - DNA, 25 bp, Homo sapien
aaagggctcaacacgcgcctgatga

SEQ ID NO: 2389907 - DNA, 25 bp, Homo sapien
tacattactaaagggctcaacacgc

SEQ ID NO: 2389908 - DNA, 25 bp, Homo sapien
tcattgacgaaattaccgtctacct

SEQ ID NO: 2389909 - DNA, 25 bp, Homo sapien
atctccaggtgcagccgttattctc

SEQ ID NO: 2389910 - DNA, 25 bp, Homo sapien
tgacgatcaccgttaaattttttca

SEQ ID NO: 2389911 - DNA, 25 bp, Homo sapien
ttctccacagaacaagaacgtccgc

SEQ ID NO: 2389912 - DNA, 25 bp, Homo sapien
actagaaaggccatatgcaaaattt

SEQ ID NO: 2389913 - DNA, 25 bp, Homo sapien
gcccttgtgactggcatatgttaat

SEQ ID NO: 2389914 - DNA, 25 bp, Homo sapien
tgctcttgttaatttaagatgtgta

SEQ ID NO: 2389915 - DNA, 25 bp, Homo sapien
gatgtgtatctcaaatctctgccct

SEQ ID NO: 2389916 - DNA, 25 bp, Homo sapien
tgtgtatctcaaatctctgcccttg

SEQ ID NO: 2389917 - DNA, 25 bp, Homo sapien
tactatttgaggcacacgcagttcc

SEQ ID NO: 2389918 - DNA, 25 bp, Homo sapien
gacgccttcccactatctcagagag

SEQ ID NO: 2389919 - DNA, 25 bp, Homo sapien
gaagctccaagtatcggcaagaagg

SEQ ID NO: 2389920 - DNA, 25 bp, Homo sapien
tcaacgctgccttacggtaccaaga

SEQ ID NO: 2389921 - DNA, 25 bp, Homo sapien
tcagatgaaaccttggcataaaacc

SEQ ID NO: 2389922 - DNA, 25 bp, Homo sapien
gagatcagtttcaatacactagtgg

SEQ ID NO: 2389923 - DNA, 25 bp, Homo sapien
tgagaggaacaacagatggccatga

SEQ ID NO: 2389924 - DNA, 25 bp, Homo sapien
cagtaatattcagtagtgccacgta

SEQ ID NO: 2389925 - DNA, 25 bp, Homo sapien
aatcagtcaccacaacctataaatt

SEQ ID NO: 2389926 - DNA, 25 bp, Homo sapien
cagcaagtgtctttctagagtttct

SEQ ID NO: 2389927 - DNA, 25 bp, Homo sapien
actgcgcccaaccagcaagtgtctt

SEQ ID NO: 2389928 - DNA, 25 bp, Homo sapien
tcagtcaccacaacctataaattcc

SEQ ID NO: 2389929 - DNA, 25 bp, Homo sapien
tgagtatctgggaccaaaggcacat

SEQ ID NO: 2389930 - DNA, 25 bp, Homo sapien
gagtatctgggaccaaaggcacata

SEQ ID NO: 2389931 - DNA, 25 bp, Homo sapien
cagttataactaatgttttactatc

SEQ ID NO: 2389932 - DNA, 25 bp, Homo sapien
aatactttctattgctgtacttacc

SEQ ID NO: 2389933 - DNA, 25 bp, Homo sapien
catttcaggcaatataggttttctc

SEQ ID NO: 2389934 - DNA, 25 bp, Homo sapien
tgtacttaccttcttagcaatacga

SEQ ID NO: 2389935 - DNA, 25 bp, Homo sapien
cagtgctgtttactcgtttgtgtag

SEQ ID NO: 2389936 - DNA, 25 bp, Homo sapien
accattcgccagtgctgtttactcg

SEQ ID NO: 2389937 - DNA, 25 bp, Homo sapien
tgtttactcgtttgtgtagatccag

SEQ ID NO: 2389938 - DNA, 25 bp, Homo sapien
ctaggtagttaccattcgccagtgc

SEQ ID NO: 2389939 - DNA, 25 bp, Homo sapien
gaagtcagagatagaagcccaagaa

SEQ ID NO: 2389940 - DNA, 25 bp, Homo sapien
tgagaactcagtccaggtgacaccc

SEQ ID NO: 2389941 - DNA, 25 bp, Homo sapien
taccagctgggtatgacacaaacac

SEQ ID NO: 2389942 - DNA, 25 bp, Homo sapien
ccagctggtcacagaacggaagtca

SEQ ID NO: 2389943 - DNA, 25 bp, Homo sapien
cttgatgatacttccttgagtgaca

SEQ ID NO: 2389944 - DNA, 25 bp, Homo sapien
tcttgatgatacttccttgagtgac

SEQ ID NO: 2389945 - DNA, 25 bp, Homo sapien
gggaccaggcagttagtgacttagc

SEQ ID NO: 2389946 - DNA, 25 bp, Homo sapien
gaccaggcagttagtgacttagcat

SEQ ID NO: 2389947 - DNA, 25 bp, Homo sapien
caggcagttagtgacttagcatcca

SEQ ID NO: 2389948 - DNA, 25 bp, Homo sapien
ccgggaccaggcagttagtgactta

SEQ ID NO: 2389949 - DNA, 25 bp, Homo sapien
ttctgtacacgatctgctgagcagt

SEQ ID NO: 2389950 - DNA, 25 bp, Homo sapien
tcacatttctgtacacgatctgctg

SEQ ID NO: 2389951 - DNA, 25 bp, Homo sapien
atttctgtacacgatctgctgagca

SEQ ID NO: 2389952 - DNA, 25 bp, Homo sapien
catttctgtacacgatctgctgagc

SEQ ID NO: 2389953 - DNA, 25 bp, Homo sapien
aaatcttcaaaaacagagctagtct

SEQ ID NO: 2389954 - DNA, 25 bp, Homo sapien
taccttttgatcaatggagaaccaa

SEQ ID NO: 2389955 - DNA, 25 bp, Homo sapien
gcttcagggtctctgtaccttttga

SEQ ID NO: 2389956 - DNA, 25 bp, Homo sapien
tcttcaaaaacagagctagtcttac

SEQ ID NO: 2389957 - DNA, 25 bp, Homo sapien
tcccttctccaaccggaggatcaca

SEQ ID NO: 2389958 - DNA, 25 bp, Homo sapien
tcacatctggcttagtaagctgata

SEQ ID NO: 2389959 - DNA, 25 bp, Homo sapien
acatctggcttagtaagctgataac

SEQ ID NO: 2389960 - DNA, 25 bp, Homo sapien
tccaaccggaggatcacatctggct

SEQ ID NO: 2389961 - DNA, 25 bp, Homo sapien
tgctgcctatgacaactcttgactg

SEQ ID NO: 2389962 - DNA, 25 bp, Homo sapien
ggctgctgcctatgacaactcttga

SEQ ID NO: 2389963 - DNA, 25 bp, Homo sapien
gctgctgcctatgacaactcttgac

SEQ ID NO: 2389964 - DNA, 25 bp, Homo sapien
gctgcctatgacaactcttgactgg

SEQ ID NO: 2389965 - DNA, 25 bp, Homo sapien
aaaactggtgtttctgtgagcagcc

SEQ ID NO: 2389966 - DNA, 25 bp, Homo sapien
gaaaaactggtgtttctgtgagcag

SEQ ID NO: 2389967 - DNA, 25 bp, Homo sapien
actggtgtttctgtgagcagccatt

SEQ ID NO: 2389968 - DNA, 25 bp, Homo sapien
aaactggtgtttctgtgagcagcca

SEQ ID NO: 2389969 - DNA, 25 bp, Homo sapien
ctggaatgatatatccacaagccaa

SEQ ID NO: 2389970 - DNA, 25 bp, Homo sapien
agaccaagactggaatgatatatcc

SEQ ID NO: 2389971 - DNA, 25 bp, Homo sapien
gagaccatgtgaacatggagaccaa

SEQ ID NO: 2389972 - DNA, 25 bp, Homo sapien
aacatggagaccaagactggaatga

SEQ ID NO: 2389973 - DNA, 25 bp, Homo sapien
aaaatgctcctgctggaaactgatg

SEQ ID NO: 2389974 - DNA, 25 bp, Homo sapien
gaaactgatgatttgatttcaaatg

SEQ ID NO: 2389975 - DNA, 25 bp, Homo sapien
ttgatttcaaatgcagtctctgaat

SEQ ID NO: 2389976 - DNA, 25 bp, Homo sapien
tttaatgtcacaggattgcttatct

SEQ ID NO: 2389977 - DNA, 25 bp, Homo sapien
ggttttcctgatacttgtctaactg

SEQ ID NO: 2389978 - DNA, 25 bp, Homo sapien
aaataccagagatcattccttgcca

SEQ ID NO: 2389979 - DNA, 25 bp, Homo sapien
cttctaatgacaaataccagagatc

SEQ ID NO: 2389980 - DNA, 25 bp, Homo sapien
gtctaactggtctctacatttccag

SEQ ID NO: 2389981 - DNA, 25 bp, Homo sapien
ggaaatactctctcagtactagctg

SEQ ID NO: 2389982 - DNA, 25 bp, Homo sapien
tgtgagtcacgtttatggaaatact

SEQ ID NO: 2389983 - DNA, 25 bp, Homo sapien
ccccatatttaccactttcagagac

SEQ ID NO: 2389984 - DNA, 25 bp, Homo sapien
tcagagactctctcctgagtaagta

SEQ ID NO: 2389985 - DNA, 25 bp, Homo sapien
tagagcgccagctgaagaattttcc

SEQ ID NO: 2389986 - DNA, 25 bp, Homo sapien
tgaaccatgagtaagagagttgtca

SEQ ID NO: 2389987 - DNA, 25 bp, Homo sapien
tatgtatgccctttgatataccaag

SEQ ID NO: 2389988 - DNA, 25 bp, Homo sapien
tgttttgacagaaagtttgaccaca

SEQ ID NO: 2389989 - DNA, 25 bp, Homo sapien
tgatgagtaacaaggtgagagaacc

SEQ ID NO: 2389990 - DNA, 25 bp, Homo sapien
tgagaactccggctgaaagactttc

SEQ ID NO: 2389991 - DNA, 25 bp, Homo sapien
ccagtatgggtcttttgatgtccaa

SEQ ID NO: 2389992 - DNA, 25 bp, Homo sapien
aatgaggtgagaactccggctgaaa

SEQ ID NO: 2389993 - DNA, 25 bp, Homo sapien
tagaggtattaacaagcgctgtccc

SEQ ID NO: 2389994 - DNA, 25 bp, Homo sapien
tgatgcacaataagggcagaactct

SEQ ID NO: 2389995 - DNA, 25 bp, Homo sapien
tagggcctcactctcacatgggttc

SEQ ID NO: 2389996 - DNA, 25 bp, Homo sapien
tgaggtcattcttccggatgaaggc

SEQ ID NO: 2389997 - DNA, 25 bp, Homo sapien
taagcagcatgttcaagatcaccca

SEQ ID NO: 2389998 - DNA, 25 bp, Homo sapien
ggtcaagaatgctctcaggccaatt

SEQ ID NO: 2389999 - DNA, 25 bp, Homo sapien
taacaggtggtactcaaaagcttct

SEQ ID NO: 2390000 - DNA, 25 bp, Homo sapien
tcaatttgtacagcttatctccagg

SEQ ID NO: 2390001 - DNA, 25 bp, Homo sapien
caacgacaagtatgagctagaggct

SEQ ID NO: 2390002 - DNA, 25 bp, Homo sapien
gaatctgaagactgggatcctctcc

SEQ ID NO: 2390003 - DNA, 25 bp, Homo sapien
tccacatgacaacgctttgaggtag

SEQ ID NO: 2390004 - DNA, 25 bp, Homo sapien
aaatggagaatcatggtcagtccct

SEQ ID NO: 2390005 - DNA, 25 bp, Homo sapien
cataatcttccattacacggatatg

SEQ ID NO: 2390006 - DNA, 25 bp, Homo sapien
gcataatcttccattacacggatat

SEQ ID NO: 2390007 - DNA, 25 bp, Homo sapien
ataatcttccattacacggatatgc

SEQ ID NO: 2390008 - DNA, 25 bp, Homo sapien
gagcttattccatattaacaattat

SEQ ID NO: 2390009 - DNA, 25 bp, Homo sapien
catatttgagcttattccatattaa

SEQ ID NO: 2390010 - DNA, 25 bp, Homo sapien
ttgtaacacatgacagcatttttcc

SEQ ID NO: 2390011 - DNA, 25 bp, Homo sapien
ttttgtaacacatgacagcattttt

SEQ ID NO: 2390012 - DNA, 25 bp, Homo sapien
tgaagcatgcataccaagacattgc

SEQ ID NO: 2390013 - DNA, 25 bp, Homo sapien
taatccgcagtctcatggttgccca

SEQ ID NO: 2390014 - DNA, 25 bp, Homo sapien
tacacctatcctagaagatgtggag

SEQ ID NO: 2390015 - DNA, 25 bp, Homo sapien
caagagagtctgaaacatggccagc

SEQ ID NO: 2390016 - DNA, 25 bp, Homo sapien
catatcatagtgcaatgagggttgg

SEQ ID NO: 2390017 - DNA, 25 bp, Homo sapien
gctttcagtatatgattctgataga

SEQ ID NO: 2390018 - DNA, 25 bp, Homo sapien
taccttatgttttcacatatcatag

SEQ ID NO: 2390019 - DNA, 25 bp, Homo sapien
cccatgtttacagagtctgttgctt

SEQ ID NO: 2390020 - DNA, 25 bp, Homo sapien
ggcgatgaacgctatctgaggaaca

SEQ ID NO: 2390021 - DNA, 25 bp, Homo sapien
cagaatagagtccagggtactgcct

SEQ ID NO: 2390022 - DNA, 25 bp, Homo sapien
aatggcggccgctacgtatgtcgca

SEQ ID NO: 2390023 - DNA, 25 bp, Homo sapien
gaagggttcgcaaccactccagact

SEQ ID NO: 2390024 - DNA, 25 bp, Homo sapien
ccctacggtcagttttgtgtgcctc

SEQ ID NO: 2390025 - DNA, 25 bp, Homo sapien
tcagttttgtgtgcctcgctggaag

SEQ ID NO: 2390026 - DNA, 25 bp, Homo sapien
tacggtcagttttgtgtgcctcgct

SEQ ID NO: 2390027 - DNA, 25 bp, Homo sapien
ttgtgtgcctcgctggaagtgacag

SEQ ID NO: 2390028 - DNA, 25 bp, Homo sapien
aagctgtccggaccctggtggccat

SEQ ID NO: 2390029 - DNA, 25 bp, Homo sapien
ccaaatagaagctgtccggaccctg

SEQ ID NO: 2390030 - DNA, 25 bp, Homo sapien
aatagaagctgtccggaccctggtg

SEQ ID NO: 2390031 - DNA, 25 bp, Homo sapien
gaagctgtccggaccctggtggcca

SEQ ID NO: 2390032 - DNA, 25 bp, Homo sapien
ctgtggactcaagagcaaatttact

SEQ ID NO: 2390033 - DNA, 25 bp, Homo sapien
tcaagagcaaatttactttagcgag

SEQ ID NO: 2390034 - DNA, 25 bp, Homo sapien
gactcaagagcaaatttactttagc

SEQ ID NO: 2390035 - DNA, 25 bp, Homo sapien
gcaaatttactttagcgagcattat

SEQ ID NO: 2390036 - DNA, 25 bp, Homo sapien
caggagtcccttggcccaagatgga

SEQ ID NO: 2390037 - DNA, 25 bp, Homo sapien
agatggattcctgaccttggagctt

SEQ ID NO: 2390038 - DNA, 25 bp, Homo sapien
tcttgggaaataaacagccactcta

SEQ ID NO: 2390039 - DNA, 25 bp, Homo sapien
ggagctttctgatcctatcccatga

SEQ ID NO: 2390040 - DNA, 25 bp, Homo sapien
tgctgggtctagcagctgccactcc

SEQ ID NO: 2390041 - DNA, 25 bp, Homo sapien
tcctgtacaggcacttctgtgctgg

SEQ ID NO: 2390042 - DNA, 25 bp, Homo sapien
gtgctgggtctagcagctgccactc

SEQ ID NO: 2390043 - DNA, 25 bp, Homo sapien
ttggacaggtctgatttggaacttg

SEQ ID NO: 2390044 - DNA, 25 bp, Homo sapien
tgggcctgcaccatacacagctctt

SEQ ID NO: 2390045 - DNA, 25 bp, Homo sapien
atatcaggtttggtgtgttggtacc

SEQ ID NO: 2390046 - DNA, 25 bp, Homo sapien
ccaacttgaagatgatatcaggttt

SEQ ID NO: 2390047 - DNA, 25 bp, Homo sapien
cgtcatcttggaagcacagagcagg

SEQ ID NO: 2390048 - DNA, 25 bp, Homo sapien
caaacctgccagcaccttggctttg

SEQ ID NO: 2390049 - DNA, 25 bp, Homo sapien
atcttggaagcacagagcaggccct

SEQ ID NO: 2390050 - DNA, 25 bp, Homo sapien
acctgccagcaccttggctttggac

SEQ ID NO: 2390051 - DNA, 25 bp, Homo sapien
tgccctagaatcagatttgctcctg

SEQ ID NO: 2390052 - DNA, 25 bp, Homo sapien
tgagcactttcggttttcacaatgg

SEQ ID NO: 2390053 - DNA, 25 bp, Homo sapien
tgaataattactctgtgccctagaa

SEQ ID NO: 2390054 - DNA, 25 bp, Homo sapien
gacacctcaaggtagagttcaaaga

SEQ ID NO: 2390055 - DNA, 25 bp, Homo sapien
aaaaaaaaagaaagcagagcagatc

SEQ ID NO: 2390056 - DNA, 25 bp, Homo sapien
tctggtgtgaaacaagctggtcttt

SEQ ID NO: 2390057 - DNA, 25 bp, Homo sapien
tccatgcgtgccacatttatgaggt

SEQ ID NO: 2390058 - DNA, 25 bp, Homo sapien
tgctgatgcactagaaggtatgact

SEQ ID NO: 2390059 - DNA, 25 bp, Homo sapien
tcacaacagctgcatccaaagggtt

SEQ ID NO: 2390060 - DNA, 25 bp, Homo sapien
gaatacgaaccctggtgcttgagct

SEQ ID NO: 2390061 - DNA, 25 bp, Homo sapien
gagccaccacgtcagccccgtgctg

SEQ ID NO: 2390062 - DNA, 25 bp, Homo sapien
tgtggagaatacgaaccctggtgct

SEQ ID NO: 2390063 - DNA, 25 bp, Homo sapien
tgttgtgtggagaatacgaaccctg

SEQ ID NO: 2390064 - DNA, 25 bp, Homo sapien
ccacaagcagcttggtgcctctgaa

SEQ ID NO: 2390065 - DNA, 25 bp, Homo sapien
tatttctcactaagggaacatccaa

SEQ ID NO: 2390066 - DNA, 25 bp, Homo sapien
ctgggtcttccacaattgccgtgct

SEQ ID NO: 2390067 - DNA, 25 bp, Homo sapien
tggattccactgaccacgtgctgga

SEQ ID NO: 2390068 - DNA, 25 bp, Homo sapien
cgtatataatctcaattctgtgagg

SEQ ID NO: 2390069 - DNA, 25 bp, Homo sapien
tacgtatataatctcaattctgtga

SEQ ID NO: 2390070 - DNA, 25 bp, Homo sapien
tatataatctcaattctgtgagggc

SEQ ID NO: 2390071 - DNA, 25 bp, Homo sapien
ttacgtatataatctcaattctgtg

SEQ ID NO: 2390072 - DNA, 25 bp, Homo sapien
aatattactatctttcccttttatg

SEQ ID NO: 2390073 - DNA, 25 bp, Homo sapien
ttggagaaaaatgaggcttcgaagg

SEQ ID NO: 2390074 - DNA, 25 bp, Homo sapien
tactatctttcccttttatgattgg

SEQ ID NO: 2390075 - DNA, 25 bp, Homo sapien
tatctttcccttttatgattggaga

SEQ ID NO: 2390076 - DNA, 25 bp, Homo sapien
ggcctgccctctgtagggtgagaaa

SEQ ID NO: 2390077 - DNA, 25 bp, Homo sapien
atgacccactggagaccttacagct

SEQ ID NO: 2390078 - DNA, 25 bp, Homo sapien
ggagaccttacagctctcctgtcac

SEQ ID NO: 2390079 - DNA, 25 bp, Homo sapien
gaagccataaatgcatccttctcgg

SEQ ID NO: 2390080 - DNA, 25 bp, Homo sapien
caaaggaaggtcgatcaaagctcaa

SEQ ID NO: 2390081 - DNA, 25 bp, Homo sapien
cctcctctaggcagaactagaaggg

SEQ ID NO: 2390082 - DNA, 25 bp, Homo sapien
caacctgcagcttatgtgtagacag

SEQ ID NO: 2390083 - DNA, 25 bp, Homo sapien
taacttgtataatgagactccagag

SEQ ID NO: 2390084 - DNA, 25 bp, Homo sapien
ggcagagtatggtcccagctcacag

SEQ ID NO: 2390085 - DNA, 25 bp, Homo sapien
tgatgtgtacctccagcttgaagct

SEQ ID NO: 2390086 - DNA, 25 bp, Homo sapien
gctgtgagactttcaaggcccaggg

SEQ ID NO: 2390087 - DNA, 25 bp, Homo sapien
tcagggatactcaattcactaccat

SEQ ID NO: 2390088 - DNA, 25 bp, Homo sapien
acgtggctggcgtcgttgccgctag

SEQ ID NO: 2390089 - DNA, 25 bp, Homo sapien
gcgcgcttccgagaacggctgcggg

SEQ ID NO: 2390090 - DNA, 25 bp, Homo sapien
tgcctctttccatcggctgtgatgg

SEQ ID NO: 2390091 - DNA, 25 bp, Homo sapien
tcgttgccgctaggcagcagcaagg

SEQ ID NO: 2390092 - DNA, 25 bp, Homo sapien
tcgggcggtacagccgcgtcctctt

SEQ ID NO: 2390093 - DNA, 25 bp, Homo sapien
cttagggcggcagcgtgggtcggtc

SEQ ID NO: 2390094 - DNA, 25 bp, Homo sapien
tgcctgctccgggagtcgcatccag

SEQ ID NO: 2390095 - DNA, 25 bp, Homo sapien
caccacgcactggtggcttagggcg

SEQ ID NO: 2390096 - DNA, 25 bp, Homo sapien
agtgagagatgccacgaggaacatc

SEQ ID NO: 2390097 - DNA, 25 bp, Homo sapien
gaacatctaagctttctctagtcca

SEQ ID NO: 2390098 - DNA, 25 bp, Homo sapien
agtaacctttgtaggcgtagagatt

SEQ ID NO: 2390099 - DNA, 25 bp, Homo sapien
tagtccagggtattcggtaatgcag

SEQ ID NO: 2390100 - DNA, 25 bp, Homo sapien
caaatcgagtgggacacatctcccc

SEQ ID NO: 2390101 - DNA, 25 bp, Homo sapien
tgcaggcatggaaatccccatatgg

SEQ ID NO: 2390102 - DNA, 25 bp, Homo sapien
ctgagacacctggacagagtgggcc

SEQ ID NO: 2390103 - DNA, 25 bp, Homo sapien
cttggctcatgcgtgaggttgcctg

SEQ ID NO: 2390104 - DNA, 25 bp, Homo sapien
gctctggcaaggtctagtccgtccc

SEQ ID NO: 2390105 - DNA, 25 bp, Homo sapien
aaggtctagtccgtcccatgggata

SEQ ID NO: 2390106 - DNA, 25 bp, Homo sapien
atgggatagcaggtgttgggcgtgg

SEQ ID NO: 2390107 - DNA, 25 bp, Homo sapien
ttgggcgtggagaagaggcagtctt

SEQ ID NO: 2390108 - DNA, 25 bp, Homo sapien
cttgggcaggaccttccagctcggg

SEQ ID NO: 2390109 - DNA, 25 bp, Homo sapien
tcgggcttcgaatcagcatgaagtg

SEQ ID NO: 2390110 - DNA, 25 bp, Homo sapien
catgaagtgagttgatttcttgtct

SEQ ID NO: 2390111 - DNA, 25 bp, Homo sapien
tcttgtcttgtcactaacactggcc

SEQ ID NO: 2390112 - DNA, 25 bp, Homo sapien
cacaaaagtagaaacgacagtgtta

SEQ ID NO: 2390113 - DNA, 25 bp, Homo sapien
cgtagctatcatccagctgtaacca

SEQ ID NO: 2390114 - DNA, 25 bp, Homo sapien
ttaacacaacttcaagatatcatgc

SEQ ID NO: 2390115 - DNA, 25 bp, Homo sapien
tacttctgtatgcatctctgacatg

SEQ ID NO: 2390116 - DNA, 25 bp, Homo sapien
aataccagctcagcaagaacttcga

SEQ ID NO: 2390117 - DNA, 25 bp, Homo sapien
gaacttcgagaaaatccgcaactcg

SEQ ID NO: 2390118 - DNA, 25 bp, Homo sapien
aactcgcttctggagagccgcctgc

SEQ ID NO: 2390119 - DNA, 25 bp, Homo sapien
gatctccctgcgcaaggtgcggtca

SEQ ID NO: 2390120 - DNA, 25 bp, Homo sapien
tggccaagtccatcgacgacgcgct

SEQ ID NO: 2390121 - DNA, 25 bp, Homo sapien
gagcaggtgcaatccctggccaagt

SEQ ID NO: 2390122 - DNA, 25 bp, Homo sapien
gctggaggactccttcaccgagcag

SEQ ID NO: 2390123 - DNA, 25 bp, Homo sapien
acgtggagcctcaagaccatgtgct

SEQ ID NO: 2390124 - DNA, 25 bp, Homo sapien
ggagagtggcgcttaccagctccac

SEQ ID NO: 2390125 - DNA, 25 bp, Homo sapien
gggagagtggcgcttaccagctcca

SEQ ID NO: 2390126 - DNA, 25 bp, Homo sapien
ggtgcagatcgccaaccagaacata

SEQ ID NO: 2390127 - DNA, 25 bp, Homo sapien
ctcatgatggctttccgggacgtca

SEQ ID NO: 2390128 - DNA, 25 bp, Homo sapien
gcgtcagccgaggactcatgcgcag

SEQ ID NO: 2390129 - DNA, 25 bp, Homo sapien
tccacggctctgtcggtggccaact

SEQ ID NO: 2390130 - DNA, 25 bp, Homo sapien
gaaaacgcattagctcccagggttg

SEQ ID NO: 2390131 - DNA, 25 bp, Homo sapien
gattacgcagcaatcattcgggtgg

SEQ ID NO: 2390132 - DNA, 25 bp, Homo sapien
taaataacagtccaggccgtttgag

SEQ ID NO: 2390133 - DNA, 25 bp, Homo sapien
gagaggcgcctcgtaaagaatgccg

SEQ ID NO: 2390134 - DNA, 25 bp, Homo sapien
gaaatgcacacgatgaaatagctag

SEQ ID NO: 2390135 - DNA, 25 bp, Homo sapien
tacagaaaagaagccggctcacacc

SEQ ID NO: 2390136 - DNA, 25 bp, Homo sapien
caccagtaaggcgaaatgcacacga

SEQ ID NO: 2390137 - DNA, 25 bp, Homo sapien
gcagtatctacacagaggtattacc

SEQ ID NO: 2390138 - DNA, 25 bp, Homo sapien
tggcggaggtctcacctctgtttct

SEQ ID NO: 2390139 - DNA, 25 bp, Homo sapien
gagcagcatggcttcaaagcttgca

SEQ ID NO: 2390140 - DNA, 25 bp, Homo sapien
aaagggaagaggtggtgtggcggag

SEQ ID NO: 2390141 - DNA, 25 bp, Homo sapien
agcagcatggcttcaaagcttgcaa

SEQ ID NO: 2390142 - DNA, 25 bp, Homo sapien
cctctgggtacttctatgggtggaa

SEQ ID NO: 2390143 - DNA, 25 bp, Homo sapien
ggtcacacaccatcctctgcgtgag

SEQ ID NO: 2390144 - DNA, 25 bp, Homo sapien
aaagagtcatggatggcttcagctc

SEQ ID NO: 2390145 - DNA, 25 bp, Homo sapien
tccagttcctgatctcacgcggctt

SEQ ID NO: 2390146 - DNA, 25 bp, Homo sapien
gagtcattgattgagttcgccccag

SEQ ID NO: 2390147 - DNA, 25 bp, Homo sapien
acagtcagcagaagtgtctccccgg

SEQ ID NO: 2390148 - DNA, 25 bp, Homo sapien
tgtgcccatattgagaagcccctgt

SEQ ID NO: 2390149 - DNA, 25 bp, Homo sapien
catttctaaatccactgacgcggtg

SEQ ID NO: 2390150 - DNA, 25 bp, Homo sapien
ggtgagataggagaaatagctggac

SEQ ID NO: 2390151 - DNA, 25 bp, Homo sapien
tagggatcaggcttgggatgggtag

SEQ ID NO: 2390152 - DNA, 25 bp, Homo sapien
cagactcccgcgttggtacactctt

SEQ ID NO: 2390153 - DNA, 25 bp, Homo sapien
gaagaggcagcgtggtgagatagga

SEQ ID NO: 2390154 - DNA, 25 bp, Homo sapien
taagccctgatatgccctggtgaaa

SEQ ID NO: 2390155 - DNA, 25 bp, Homo sapien
tctcagggaacgtacagacccaggt

SEQ ID NO: 2390156 - DNA, 25 bp, Homo sapien
ggtgaaagccgcaatccctcatgct

SEQ ID NO: 2390157 - DNA, 25 bp, Homo sapien
gcttgattgtgtagccctgcaggcc

SEQ ID NO: 2390158 - DNA, 25 bp, Homo sapien
gcttcactgggattctatacggctc

SEQ ID NO: 2390159 - DNA, 25 bp, Homo sapien
gagccgatgagaaagcctctgagag

SEQ ID NO: 2390160 - DNA, 25 bp, Homo sapien
catccccttggagactaaaacagcc

SEQ ID NO: 2390161 - DNA, 25 bp, Homo sapien
gcctggtgacattcagcaagcggta

SEQ ID NO: 2390162 - DNA, 25 bp, Homo sapien
tgagcggcctctttctggcctggat

SEQ ID NO: 2390163 - DNA, 25 bp, Homo sapien
agcattggtgtctaccatctccatg

SEQ ID NO: 2390164 - DNA, 25 bp, Homo sapien
tctggtgtgaatcccatgcacgtgg

SEQ ID NO: 2390165 - DNA, 25 bp, Homo sapien
cagcaggtttaaagtccagcggatg

SEQ ID NO: 2390166 - DNA, 25 bp, Homo sapien
tgacttgaagtaacagctccacggc

SEQ ID NO: 2390167 - DNA, 25 bp, Homo sapien
ggtcagcccacacctaatgaaaatg

SEQ ID NO: 2390168 - DNA, 25 bp, Homo sapien
tgtatatcttaaagggccgacggat

SEQ ID NO: 2390169 - DNA, 25 bp, Homo sapien
gcaatccgtgcactaataaacccgc

SEQ ID NO: 2390170 - DNA, 25 bp, Homo sapien
tcaccaggaacactggcagatcctg

SEQ ID NO: 2390171 - DNA, 25 bp, Homo sapien
cctcaaaagagagtttcttcgtcct

SEQ ID NO: 2390172 - DNA, 25 bp, Homo sapien
aaaacgccttgacctttgttgagca

SEQ ID NO: 2390173 - DNA, 25 bp, Homo sapien
ttttcttagccgcatcgcactttgc

SEQ ID NO: 2390174 - DNA, 25 bp, Homo sapien
gaattctgacgaataaaataactct

SEQ ID NO: 2390175 - DNA, 25 bp, Homo sapien
gttatgaattctgacgaataaaata

SEQ ID NO: 2390176 - DNA, 25 bp, Homo sapien
tgaattctgacgaataaaataactc

SEQ ID NO: 2390177 - DNA, 25 bp, Homo sapien
tatgaattctgacgaataaaataac

SEQ ID NO: 2390178 - DNA, 25 bp, Homo sapien
cattccgtggcaataggtggtttag

SEQ ID NO: 2390179 - DNA, 25 bp, Homo sapien
gaaacctgggcttagtctcagccag

SEQ ID NO: 2390180 - DNA, 25 bp, Homo sapien
gatcacaggcgtgtaggacgcttca

SEQ ID NO: 2390181 - DNA, 25 bp, Homo sapien
ggagcacgagctagggcttcacctt

SEQ ID NO: 2390182 - DNA, 25 bp, Homo sapien
aggcagggaacatacatcctttttc

SEQ ID NO: 2390183 - DNA, 25 bp, Homo sapien
gcagggaacatacatcctttttccc

SEQ ID NO: 2390184 - DNA, 25 bp, Homo sapien
ggcagggaacatacatcctttttcc

SEQ ID NO: 2390185 - DNA, 25 bp, Homo sapien
gggccatttgcaagtccatcacagg

SEQ ID NO: 2390186 - DNA, 25 bp, Homo sapien
ggtctcggtgtcagctccagataat

SEQ ID NO: 2390187 - DNA, 25 bp, Homo sapien
tccagctgccggcatgcagtcattc

SEQ ID NO: 2390188 - DNA, 25 bp, Homo sapien
catcacaggtctcggtgtcagctcc

SEQ ID NO: 2390189 - DNA, 25 bp, Homo sapien
gtgacactccacattccataagcac

SEQ ID NO: 2390190 - DNA, 25 bp, Homo sapien
tgatcacctgatggacactgtgaca

SEQ ID NO: 2390191 - DNA, 25 bp, Homo sapien
ttatgctttattgtttgatcacctg

SEQ ID NO: 2390192 - DNA, 25 bp, Homo sapien
tccacattccataagcaccttaagg

SEQ ID NO: 2390193 - DNA, 25 bp, Homo sapien
gggaaggcactatgaaggccacaaa

SEQ ID NO: 2390194 - DNA, 25 bp, Homo sapien
tgtttattaagcaaccagatgactt

SEQ ID NO: 2390195 - DNA, 25 bp, Homo sapien
caaaccaggtgatagtacagagagt

SEQ ID NO: 2390196 - DNA, 25 bp, Homo sapien
gatgactttactaaaacgagctttc

SEQ ID NO: 2390197 - DNA, 25 bp, Homo sapien
acgtgtgtacacagatcagcaggca

SEQ ID NO: 2390198 - DNA, 25 bp, Homo sapien
aatagagtgtaaggacacgggctcc

SEQ ID NO: 2390199 - DNA, 25 bp, Homo sapien
ttttaccaggatgaccaagcgagct

SEQ ID NO: 2390200 - DNA, 25 bp, Homo sapien
tgaggcttgctagagtgcacacacg

SEQ ID NO: 2390201 - DNA, 25 bp, Homo sapien
taaaatgggatccatcggactggac

SEQ ID NO: 2390202 - DNA, 25 bp, Homo sapien
tccaggtcgcgcatgttagaaactg

SEQ ID NO: 2390203 - DNA, 25 bp, Homo sapien
cggactggactctggaactcaggta

SEQ ID NO: 2390204 - DNA, 25 bp, Homo sapien
taggtgcattgaccccactctgcag

SEQ ID NO: 2390205 - DNA, 25 bp, Homo sapien
gagaaagggaaggaacagctgaggg

SEQ ID NO: 2390206 - DNA, 25 bp, Homo sapien
gaagggtaggccagggagacaggga

SEQ ID NO: 2390207 - DNA, 25 bp, Homo sapien
gaagaggaagggtaggccagggaga

SEQ ID NO: 2390208 - DNA, 25 bp, Homo sapien
aagggaaggaacagctgagggaaga

SEQ ID NO: 2390209 - DNA, 25 bp, Homo sapien
ccagaagctcaagaacagccaacac

SEQ ID NO: 2390210 - DNA, 25 bp, Homo sapien
acagccaacacagcgagtcctcgtc

SEQ ID NO: 2390211 - DNA, 25 bp, Homo sapien
cactctgggaagctcaggagggagg

SEQ ID NO: 2390212 - DNA, 25 bp, Homo sapien
gcccagaagctcaagaacagccaac

SEQ ID NO: 2390213 - DNA, 25 bp, Homo sapien
gacgtcactgtgatatcacctagtg

SEQ ID NO: 2390214 - DNA, 25 bp, Homo sapien
agatgacctagtttcgttttgtgtg

SEQ ID NO: 2390215 - DNA, 25 bp, Homo sapien
gtgtgtgtgtggtcacccagacgtc

SEQ ID NO: 2390216 - DNA, 25 bp, Homo sapien
tatttctggccctgtcttcgtcggc

SEQ ID NO: 2390217 - DNA, 25 bp, Homo sapien
ctgatgcccttagccagggcaggga

SEQ ID NO: 2390218 - DNA, 25 bp, Homo sapien
ctctgatgcccttagccagggcagg

SEQ ID NO: 2390219 - DNA, 25 bp, Homo sapien
gatgcccttagccagggcagggatc

SEQ ID NO: 2390220 - DNA, 25 bp, Homo sapien
atgcccttagccagggcagggatcg

SEQ ID NO: 2390221 - DNA, 25 bp, Homo sapien
gagcaaactgtgtcggcgcagcttc

SEQ ID NO: 2390222 - DNA, 25 bp, Homo sapien
tcatgtcccatggttaggaacccct

SEQ ID NO: 2390223 - DNA, 25 bp, Homo sapien
tcttcaataaaggagactcgggtgt

SEQ ID NO: 2390224 - DNA, 25 bp, Homo sapien
gtcccacccctagatctgaagcaag

SEQ ID NO: 2390225 - DNA, 25 bp, Homo sapien
atacagctttcagccagtccagaaa

SEQ ID NO: 2390226 - DNA, 25 bp, Homo sapien
gatgaggaccacctctggcctgctt

SEQ ID NO: 2390227 - DNA, 25 bp, Homo sapien
tacaatggagaccaaaggcagctgt

SEQ ID NO: 2390228 - DNA, 25 bp, Homo sapien
aggaggctccacgacagtcagtgca

SEQ ID NO: 2390229 - DNA, 25 bp, Homo sapien
agtgagcagtcaggcgctctggaca

SEQ ID NO: 2390230 - DNA, 25 bp, Homo sapien
ccaggagaggaagtgcttgagagtg

SEQ ID NO: 2390231 - DNA, 25 bp, Homo sapien
gcaaatccagggcagacggtcacca

SEQ ID NO: 2390232 - DNA, 25 bp, Homo sapien
aagcaaaattggtcttctagcaaat

SEQ ID NO: 2390233 - DNA, 25 bp, Homo sapien
aaggtctgaagacgcccaggcaaga

SEQ ID NO: 2390234 - DNA, 25 bp, Homo sapien
caggcaagaaggacgctccgtccag

SEQ ID NO: 2390235 - DNA, 25 bp, Homo sapien
cagatgaaggtctgaagacgcccag

SEQ ID NO: 2390236 - DNA, 25 bp, Homo sapien
tggcccccggtgtcacagatgaagg

SEQ ID NO: 2390237 - DNA, 25 bp, Homo sapien
ccaggtcagagtcagggaggttaaa

SEQ ID NO: 2390238 - DNA, 25 bp, Homo sapien
cccaagatagaccaagcccaggtca

SEQ ID NO: 2390239 - DNA, 25 bp, Homo sapien
tccttccaggagaacgtgaggccca

SEQ ID NO: 2390240 - DNA, 25 bp, Homo sapien
gagggacaggtccagaagtggttct

SEQ ID NO: 2390241 - DNA, 25 bp, Homo sapien
caaactccttttcatgagcctggtg

SEQ ID NO: 2390242 - DNA, 25 bp, Homo sapien
gagcctggtgtaatctcaaaaacaa

SEQ ID NO: 2390243 - DNA, 25 bp, Homo sapien
taaagcagacaagcacggtatgaga

SEQ ID NO: 2390244 - DNA, 25 bp, Homo sapien
caacacccggccagatgattttaca

SEQ ID NO: 2390245 - DNA, 25 bp, Homo sapien
agggagcaagctcccctctctgtct

SEQ ID NO: 2390246 - DNA, 25 bp, Homo sapien
cctgtggatggacacgagcctgcaa

SEQ ID NO: 2390247 - DNA, 25 bp, Homo sapien
ccgttacttcccagtcacgtgccag

SEQ ID NO: 2390248 - DNA, 25 bp, Homo sapien
cagcaggttcctcagacctgacagg

SEQ ID NO: 2390249 - DNA, 25 bp, Homo sapien
tcgtaactgagagcatctggctgaa

SEQ ID NO: 2390250 - DNA, 25 bp, Homo sapien
cggcctcgtaactgagagcatctgg

SEQ ID NO: 2390251 - DNA, 25 bp, Homo sapien
ccagacccggcctcgtaactgagag

SEQ ID NO: 2390252 - DNA, 25 bp, Homo sapien
catctggctgaagccgttgctctcc

SEQ ID NO: 2390253 - DNA, 25 bp, Homo sapien
cataggcctgtcgaggacggaactc

SEQ ID NO: 2390254 - DNA, 25 bp, Homo sapien
agaagctaagagtacctgaggtggc

SEQ ID NO: 2390255 - DNA, 25 bp, Homo sapien
ggtccaggtgacatctatatacgaa

SEQ ID NO: 2390256 - DNA, 25 bp, Homo sapien
ctagccggtccaaggagcgagggca

SEQ ID NO: 2390257 - DNA, 25 bp, Homo sapien
tccagctagcacaagagaggagtct

SEQ ID NO: 2390258 - DNA, 25 bp, Homo sapien
cagttagcaatatcggccttgggca

SEQ ID NO: 2390259 - DNA, 25 bp, Homo sapien
tgttgcaatcagatggcggcctcca

SEQ ID NO: 2390260 - DNA, 25 bp, Homo sapien
taatgggaagacactggcctgagca

SEQ ID NO: 2390261 - DNA, 25 bp, Homo sapien
tgccatccaagcagggatgttgctt

SEQ ID NO: 2390262 - DNA, 25 bp, Homo sapien
tccaagcagggatgttgcttgggct

SEQ ID NO: 2390263 - DNA, 25 bp, Homo sapien
agggcccaaagttccggccagcact

SEQ ID NO: 2390264 - DNA, 25 bp, Homo sapien
ccttctccccggctatcagtccttc

SEQ ID NO: 2390265 - DNA, 25 bp, Homo sapien
tgactacgaatgagtgtgcgctgcc

SEQ ID NO: 2390266 - DNA, 25 bp, Homo sapien
cagcaccgcacagtatgagtgagtc

SEQ ID NO: 2390267 - DNA, 25 bp, Homo sapien
gaggcagcaataccgtgactacgaa

SEQ ID NO: 2390268 - DNA, 25 bp, Homo sapien
gcgcagaaggttcctcatgtgtgca

SEQ ID NO: 2390269 - DNA, 25 bp, Homo sapien
tggtactgctacgactgttggtggt

SEQ ID NO: 2390270 - DNA, 25 bp, Homo sapien
tcagtggtactgctacgactgttgg

SEQ ID NO: 2390271 - DNA, 25 bp, Homo sapien
tcttcttatcagtggtactgctacg

SEQ ID NO: 2390272 - DNA, 25 bp, Homo sapien
ttactattattatgtgctcaataag

SEQ ID NO: 2390273 - DNA, 25 bp, Homo sapien
acctttgtgggtcattggctatagc

SEQ ID NO: 2390274 - DNA, 25 bp, Homo sapien
tgaccatgaggtgataaacgtgatg

SEQ ID NO: 2390275 - DNA, 25 bp, Homo sapien
taagcagccaaaccaaataccagca

SEQ ID NO: 2390276 - DNA, 25 bp, Homo sapien
tccctaagggcctctttaagcagcc

SEQ ID NO: 2390277 - DNA, 25 bp, Homo sapien
tcttcaggagggtgatgacgacgaa

SEQ ID NO: 2390278 - DNA, 25 bp, Homo sapien
ccaatggagtatccccagggcgggt

SEQ ID NO: 2390279 - DNA, 25 bp, Homo sapien
tgacgacgaagagtgggacacagac

SEQ ID NO: 2390280 - DNA, 25 bp, Homo sapien
tgaaaggaccccgagtcttcaggag

SEQ ID NO: 2390281 - DNA, 25 bp, Homo sapien
agatagggggcgactgaaaccctct

SEQ ID NO: 2390282 - DNA, 25 bp, Homo sapien
ggggcgactgaaaccctctccgcag

SEQ ID NO: 2390283 - DNA, 25 bp, Homo sapien
cagccatgggtaagatagggggcga

SEQ ID NO: 2390284 - DNA, 25 bp, Homo sapien
catgggtaagatagggggcgactga

SEQ ID NO: 2390285 - DNA, 25 bp, Homo sapien
ccaggggccatggccggtagccaat

SEQ ID NO: 2390286 - DNA, 25 bp, Homo sapien
accaggggccatggccggtagccaa

SEQ ID NO: 2390287 - DNA, 25 bp, Homo sapien
atgttgtcatagaaacggtccgccc

SEQ ID NO: 2390288 - DNA, 25 bp, Homo sapien
actggaagcatagtagtcaaacagc

SEQ ID NO: 2390289 - DNA, 25 bp, Homo sapien
atacacccagcttatgcagaccact

SEQ ID NO: 2390290 - DNA, 25 bp, Homo sapien
tacacccagcttatgcagaccactt

SEQ ID NO: 2390291 - DNA, 25 bp, Homo sapien
aggcatatgccactggaagcatagt

SEQ ID NO: 2390292 - DNA, 25 bp, Homo sapien
catgtctatggaggctgtcaccagg

SEQ ID NO: 2390293 - DNA, 25 bp, Homo sapien
tcaggtagcacatgacggcgatggt

SEQ ID NO: 2390294 - DNA, 25 bp, Homo sapien
ccgcccgctcttccggagctgcctg

SEQ ID NO: 2390295 - DNA, 25 bp, Homo sapien
acatgtctatggaggctgtcaccag

SEQ ID NO: 2390296 - DNA, 25 bp, Homo sapien
ggctgtccagccctaggaatatgag

SEQ ID NO: 2390297 - DNA, 25 bp, Homo sapien
cagccctaggaatatgagcatgata

SEQ ID NO: 2390298 - DNA, 25 bp, Homo sapien
gcatcatagtcacagccttggggaa

SEQ ID NO: 2390299 - DNA, 25 bp, Homo sapien
tgtccagccctaggaatatgagcat

SEQ ID NO: 2390300 - DNA, 25 bp, Homo sapien
gccaggtacacagcacagtcaggga

SEQ ID NO: 2390301 - DNA, 25 bp, Homo sapien
ctgccaggtacacagcacagtcagg

SEQ ID NO: 2390302 - DNA, 25 bp, Homo sapien
tacacagcacagtcagggaggctcc

SEQ ID NO: 2390303 - DNA, 25 bp, Homo sapien
agggaggctccagggcgtgtgctgc

SEQ ID NO: 2390304 - DNA, 25 bp, Homo sapien
tggtggcactgttcaggaagcagag

SEQ ID NO: 2390305 - DNA, 25 bp, Homo sapien
ctggtggcactgttcaggaagcaga

SEQ ID NO: 2390306 - DNA, 25 bp, Homo sapien
gctggtggcactgttcaggaagcag

SEQ ID NO: 2390307 - DNA, 25 bp, Homo sapien
tgtgatacttgttgtagctgcccag

SEQ ID NO: 2390308 - DNA, 25 bp, Homo sapien
gctgcccagggctgtcaggcacccc

SEQ ID NO: 2390309 - DNA, 25 bp, Homo sapien
agatctgggtgcccgcatccatcca

SEQ ID NO: 2390310 - DNA, 25 bp, Homo sapien
tcaggcacccctggcagatggcaaa

SEQ ID NO: 2390311 - DNA, 25 bp, Homo sapien
gcaaaatgacaagcatcaggtacgg

SEQ ID NO: 2390312 - DNA, 25 bp, Homo sapien
gctccgggaagggtgacacctctga

SEQ ID NO: 2390313 - DNA, 25 bp, Homo sapien
tccttgaggcggaacaaatctggct

SEQ ID NO: 2390314 - DNA, 25 bp, Homo sapien
tcaggtacggaaacgtggctgtgaa

SEQ ID NO: 2390315 - DNA, 25 bp, Homo sapien
gagtcacacggagctcagtcccaac

SEQ ID NO: 2390316 - DNA, 25 bp, Homo sapien
caaggtcactcctggtggggacgca

SEQ ID NO: 2390317 - DNA, 25 bp, Homo sapien
ccacaggcagctcgagtcacacgga

SEQ ID NO: 2390318 - DNA, 25 bp, Homo sapien
gcagctcgagtcacacggagctcag

SEQ ID NO: 2390319 - DNA, 25 bp, Homo sapien
caggtcatggatgcccgaggtgatg

SEQ ID NO: 2390320 - DNA, 25 bp, Homo sapien
cgaggtgatgcccagaactcgtctc

SEQ ID NO: 2390321 - DNA, 25 bp, Homo sapien
tcccagcgcagggagcccaggtcat

SEQ ID NO: 2390322 - DNA, 25 bp, Homo sapien
tagcagatgacccaggcgagcagga

SEQ ID NO: 2390323 - DNA, 25 bp, Homo sapien
aatggggtcactgtgccggctcctg

SEQ ID NO: 2390324 - DNA, 25 bp, Homo sapien
ccggctcctgagtggttcagaaagt

SEQ ID NO: 2390325 - DNA, 25 bp, Homo sapien
tggttcagaaagtccgtgcaatgct

SEQ ID NO: 2390326 - DNA, 25 bp, Homo sapien
tcccagaattccatgacaggtgagg

SEQ ID NO: 2390327 - DNA, 25 bp, Homo sapien
gagctgaacaggtagaagagagccc

SEQ ID NO: 2390328 - DNA, 25 bp, Homo sapien
gtagacattcaaatatgactcgatg

SEQ ID NO: 2390329 - DNA, 25 bp, Homo sapien
ttcaaatatgactcgatgaccacag

SEQ ID NO: 2390330 - DNA, 25 bp, Homo sapien
aatatgactcgatgaccacagatgc

SEQ ID NO: 2390331 - DNA, 25 bp, Homo sapien
gtgctcactacttaacgaaggactg

SEQ ID NO: 2390332 - DNA, 25 bp, Homo sapien
cagcctggctgaaaaatcaatgctg

SEQ ID NO: 2390333 - DNA, 25 bp, Homo sapien
caatgctgactatgaacaaaacctc

SEQ ID NO: 2390334 - DNA, 25 bp, Homo sapien
gactgtggacctttcagaacagcct

SEQ ID NO: 2390335 - DNA, 25 bp, Homo sapien
ctgtgacactcccttggctggtgta

SEQ ID NO: 2390336 - DNA, 25 bp, Homo sapien
ggctggtgtattggcccaacgccac

SEQ ID NO: 2390337 - DNA, 25 bp, Homo sapien
gaagaacaccgggatgccgcagaca

SEQ ID NO: 2390338 - DNA, 25 bp, Homo sapien
gatgccgcagacaaagaagaagatg

SEQ ID NO: 2390339 - DNA, 25 bp, Homo sapien
gtagtggagctggaactcaaactca

SEQ ID NO: 2390340 - DNA, 25 bp, Homo sapien
tcagaatcctcccacggagggtggc

SEQ ID NO: 2390341 - DNA, 25 bp, Homo sapien
tgttctgttttgcacctagcgccgg

SEQ ID NO: 2390342 - DNA, 25 bp, Homo sapien
tggcacgtgacaggcctgcaatcat

SEQ ID NO: 2390343 - DNA, 25 bp, Homo sapien
tcctcgtcttcctggtccaacttct

SEQ ID NO: 2390344 - DNA, 25 bp, Homo sapien
tcttcctggtccaacttctctccct

SEQ ID NO: 2390345 - DNA, 25 bp, Homo sapien
gatccttcacctggtcctcgtcttc

SEQ ID NO: 2390346 - DNA, 25 bp, Homo sapien
tccattggccccgatccttcacctg

SEQ ID NO: 2390347 - DNA, 25 bp, Homo sapien
aagccccgctgggtgggcaggatga

SEQ ID NO: 2390348 - DNA, 25 bp, Homo sapien
tgtggtgggttgggaagccccgctg

SEQ ID NO: 2390349 - DNA, 25 bp, Homo sapien
tgggcaggatgacgagggccaaagc

SEQ ID NO: 2390350 - DNA, 25 bp, Homo sapien
gctgtgtggtgggttgggaagcccc

SEQ ID NO: 2390351 - DNA, 25 bp, Homo sapien
tgttcttcccaagtgctccatggca

SEQ ID NO: 2390352 - DNA, 25 bp, Homo sapien
cgttctcgtaactgtaagagcaaac

SEQ ID NO: 2390353 - DNA, 25 bp, Homo sapien
tgctccatggcatttacacctaaag

SEQ ID NO: 2390354 - DNA, 25 bp, Homo sapien
cacctaaagttccagttcgttctcg

SEQ ID NO: 2390355 - DNA, 25 bp, Homo sapien
cagctgtgtgctaaggtgatcgatc

SEQ ID NO: 2390356 - DNA, 25 bp, Homo sapien
tcagaagggatcaaagcctgccgag

SEQ ID NO: 2390357 - DNA, 25 bp, Homo sapien
cctgccgaggtagcaagggtcaacg

SEQ ID NO: 2390358 - DNA, 25 bp, Homo sapien
tcaggagtggaaccgtgatgaaaac

SEQ ID NO: 2390359 - DNA, 25 bp, Homo sapien
ctcaggcaaatcacaccccctctct

SEQ ID NO: 2390360 - DNA, 25 bp, Homo sapien
caagacaatgagtcgtggagctggg

SEQ ID NO: 2390361 - DNA, 25 bp, Homo sapien
aaatcacaccccctctctgaactct

SEQ ID NO: 2390362 - DNA, 25 bp, Homo sapien
gacaatgagtcgtggagctgggtct

SEQ ID NO: 2390363 - DNA, 25 bp, Homo sapien
gcatggcaccaaaacctggctctct

SEQ ID NO: 2390364 - DNA, 25 bp, Homo sapien
tggcaccaaaacctggctctctctg

SEQ ID NO: 2390365 - DNA, 25 bp, Homo sapien
ctgtgtgcatggcaccaaaacctgg

SEQ ID NO: 2390366 - DNA, 25 bp, Homo sapien
aaaacctggctctctctgtagtcct

SEQ ID NO: 2390367 - DNA, 25 bp, Homo sapien
ccctcccctcgtcagatgaccaccc

SEQ ID NO: 2390368 - DNA, 25 bp, Homo sapien
aatgccccgaggtttctcctgtcca

SEQ ID NO: 2390369 - DNA, 25 bp, Homo sapien
ctgggccctcgggaatgccccgagg

SEQ ID NO: 2390370 - DNA, 25 bp, Homo sapien
tgtgatcatttattgcagttcctgg

SEQ ID NO: 2390371 - DNA, 25 bp, Homo sapien
gaggccaaaagtttgtgaaccgaga

SEQ ID NO: 2390372 - DNA, 25 bp, Homo sapien
gattacaacatccaacctcaggaag

SEQ ID NO: 2390373 - DNA, 25 bp, Homo sapien
tcccagcgcagaatcccatgtgact

SEQ ID NO: 2390374 - DNA, 25 bp, Homo sapien
gcgcagaatcccatgtgacttgtcc

SEQ ID NO: 2390375 - DNA, 25 bp, Homo sapien
cgtgggcacagtcccatgatggccc

SEQ ID NO: 2390376 - DNA, 25 bp, Homo sapien
cccgtgggcacagtcccatgatggc

SEQ ID NO: 2390377 - DNA, 25 bp, Homo sapien
tccccgtgggcacagtcccatgatg

SEQ ID NO: 2390378 - DNA, 25 bp, Homo sapien
tgggcacagtcccatgatggcccct

SEQ ID NO: 2390379 - DNA, 25 bp, Homo sapien
agactcacaccctgacctcatctcc

SEQ ID NO: 2390380 - DNA, 25 bp, Homo sapien
gactcacaccctgacctcatctccc

SEQ ID NO: 2390381 - DNA, 25 bp, Homo sapien
gagactccaggctataaactgagaa

SEQ ID NO: 2390382 - DNA, 25 bp, Homo sapien
agactccaggctataaactgagaac

SEQ ID NO: 2390383 - DNA, 25 bp, Homo sapien
tgaggccggcagttccggcaacttt

SEQ ID NO: 2390384 - DNA, 25 bp, Homo sapien
cggcaactttggtcatacggatgga

SEQ ID NO: 2390385 - DNA, 25 bp, Homo sapien
aggaagctcctcgatgcgactcaga

SEQ ID NO: 2390386 - DNA, 25 bp, Homo sapien
gatgcgactcagatcacatctgggt

SEQ ID NO: 2390387 - DNA, 25 bp, Homo sapien
caaaggtgggcacacgggcaggccc

SEQ ID NO: 2390388 - DNA, 25 bp, Homo sapien
tgggcacacgggcaggcccccgagc

SEQ ID NO: 2390389 - DNA, 25 bp, Homo sapien
aggtgggcacacgggcaggcccccg

SEQ ID NO: 2390390 - DNA, 25 bp, Homo sapien
ctgaacaaaggtgggcacacgggca

SEQ ID NO: 2390391 - DNA, 25 bp, Homo sapien
atgaaggatgagagggcccgaagcc

SEQ ID NO: 2390392 - DNA, 25 bp, Homo sapien
agagggacactcttggcactggcct

SEQ ID NO: 2390393 - DNA, 25 bp, Homo sapien
cttcccaagggtctcagagggacac

SEQ ID NO: 2390394 - DNA, 25 bp, Homo sapien
gggtctcagagggacactcttggca

SEQ ID NO: 2390395 - DNA, 25 bp, Homo sapien
gttcaacaacccctgagctgaaaag

SEQ ID NO: 2390396 - DNA, 25 bp, Homo sapien
ggctgcttctgccacgttccctcca

SEQ ID NO: 2390397 - DNA, 25 bp, Homo sapien
agcaggtggactccaaaatacccct

SEQ ID NO: 2390398 - DNA, 25 bp, Homo sapien
caaaatacccctcttgtcttatcca

SEQ ID NO: 2390399 - DNA, 25 bp, Homo sapien
tcggctgggcacatgagctgacgga

SEQ ID NO: 2390400 - DNA, 25 bp, Homo sapien
ctgggcacatgagctgacggattct

SEQ ID NO: 2390401 - DNA, 25 bp, Homo sapien
tggcgggagccgagggtcctgctgg

SEQ ID NO: 2390402 - DNA, 25 bp, Homo sapien
ggtcctcggctgggcacatgagctg

SEQ ID NO: 2390403 - DNA, 25 bp, Homo sapien
ccaccacgggtacgtgtacttcttg

SEQ ID NO: 2390404 - DNA, 25 bp, Homo sapien
ggcccttgagggttccgagtctgta

SEQ ID NO: 2390405 - DNA, 25 bp, Homo sapien
cagcggagtgtactttatcagggag

SEQ ID NO: 2390406 - DNA, 25 bp, Homo sapien
cttgttgtaggtcagcggagtgtac

SEQ ID NO: 2390407 - DNA, 25 bp, Homo sapien
gataagaggccatggcctgtaccca

SEQ ID NO: 2390408 - DNA, 25 bp, Homo sapien
gtgaggaagagccaacagtatttga

SEQ ID NO: 2390409 - DNA, 25 bp, Homo sapien
cgatgttgtcgtagaagcgcttggc

SEQ ID NO: 2390410 - DNA, 25 bp, Homo sapien
ggcctgtacccaatcatgtcttcga

SEQ ID NO: 2390411 - DNA, 25 bp, Homo sapien
ggcacatgccactggccgcatagta

SEQ ID NO: 2390412 - DNA, 25 bp, Homo sapien
gaagatggccacgaacaggaggcac

SEQ ID NO: 2390413 - DNA, 25 bp, Homo sapien
tggccacgaacaggaggcacatgcc

SEQ ID NO: 2390414 - DNA, 25 bp, Homo sapien
gagggactcgaagatggccacgaac

SEQ ID NO: 2390415 - DNA, 25 bp, Homo sapien
aaggccagaggagggacctgcctac

SEQ ID NO: 2390416 - DNA, 25 bp, Homo sapien
gagggacctgcctactttgtcgttc

SEQ ID NO: 2390417 - DNA, 25 bp, Homo sapien
tcacttactgtggagccaaatggct

SEQ ID NO: 2390418 - DNA, 25 bp, Homo sapien
ggtgggtggtccatgcccaaaggcc

SEQ ID NO: 2390419 - DNA, 25 bp, Homo sapien
gtgagcatgatcagccccacaagga

SEQ ID NO: 2390420 - DNA, 25 bp, Homo sapien
gaacacgtgagggtacatgtccacc

SEQ ID NO: 2390421 - DNA, 25 bp, Homo sapien
cacaaggaaggagacgacagatact

SEQ ID NO: 2390422 - DNA, 25 bp, Homo sapien
ccggttcttcttgcggaacacgtga

SEQ ID NO: 2390423 - DNA, 25 bp, Homo sapien
ggagaacgaccatgaagaagaaaca

SEQ ID NO: 2390424 - DNA, 25 bp, Homo sapien
cgggtaagcgatgaaagccaggcca

SEQ ID NO: 2390425 - DNA, 25 bp, Homo sapien
taagcgatgaaagccaggccagggc

SEQ ID NO: 2390426 - DNA, 25 bp, Homo sapien
tggctatccagtcccaggagaacga

SEQ ID NO: 2390427 - DNA, 25 bp, Homo sapien
tgccagaggtttgaaccaggctcac

SEQ ID NO: 2390428 - DNA, 25 bp, Homo sapien
agatggcaaagccggccacaaagct

SEQ ID NO: 2390429 - DNA, 25 bp, Homo sapien
ggcaaagccggccacaaagctggtg

SEQ ID NO: 2390430 - DNA, 25 bp, Homo sapien
atggcaaagccggccacaaagctgg

SEQ ID NO: 2390431 - DNA, 25 bp, Homo sapien
gaagatggcaaagccggccacaaag

SEQ ID NO: 2390432 - DNA, 25 bp, Homo sapien
ttgaggaagcagagggcgatgcagt

SEQ ID NO: 2390433 - DNA, 25 bp, Homo sapien
tgttgaggaagcagagggcgatgca

SEQ ID NO: 2390434 - DNA, 25 bp, Homo sapien
gaggaagcagagggcgatgcagtcc

SEQ ID NO: 2390435 - DNA, 25 bp, Homo sapien
ctgttgaggaagcagagggcgatgc

SEQ ID NO: 2390436 - DNA, 25 bp, Homo sapien
gaatggcagggtcagaacagggctg

SEQ ID NO: 2390437 - DNA, 25 bp, Homo sapien
gaacagggctgcaacctctcctgct

SEQ ID NO: 2390438 - DNA, 25 bp, Homo sapien
agcacagcccctcctggcggacact

SEQ ID NO: 2390439 - DNA, 25 bp, Homo sapien
ccccttcacggacgccggagcaggg

SEQ ID NO: 2390440 - DNA, 25 bp, Homo sapien
catctggcatgctaatgggtaatcc

SEQ ID NO: 2390441 - DNA, 25 bp, Homo sapien
caaggtagtcctaaaagaatgcggc

SEQ ID NO: 2390442 - DNA, 25 bp, Homo sapien
ggatctagatgtgacaaaccgccac

SEQ ID NO: 2390443 - DNA, 25 bp, Homo sapien
ttcagaggaccacgcaaagcactgg

SEQ ID NO: 2390444 - DNA, 25 bp, Homo sapien
caagacagatggcgaaggagaagaa

SEQ ID NO: 2390445 - DNA, 25 bp, Homo sapien
gacagatggcgaaggagaagaatat

SEQ ID NO: 2390446 - DNA, 25 bp, Homo sapien
aagacagatggcgaaggagaagaat

SEQ ID NO: 2390447 - DNA, 25 bp, Homo sapien
cccaagacagatggcgaaggagaag

SEQ ID NO: 2390448 - DNA, 25 bp, Homo sapien
caggaccaccagcatgaggtaagga

SEQ ID NO: 2390449 - DNA, 25 bp, Homo sapien
cacagacgcgtgaggtttgggtaca

SEQ ID NO: 2390450 - DNA, 25 bp, Homo sapien
taaaactgaattccttgggctgccc

SEQ ID NO: 2390451 - DNA, 25 bp, Homo sapien
gcaacgtcacccctcgaattaacag

SEQ ID NO: 2390452 - DNA, 25 bp, Homo sapien
tatgaattagggaaccatgacttgt

SEQ ID NO: 2390453 - DNA, 25 bp, Homo sapien
gaagggagccacatcaaatcctcgc

SEQ ID NO: 2390454 - DNA, 25 bp, Homo sapien
gatcagattaccctggaggtgtcct

SEQ ID NO: 2390455 - DNA, 25 bp, Homo sapien
cccaaaaaccagaagtatgtgagtc

SEQ ID NO: 2390456 - DNA, 25 bp, Homo sapien
aggtgctggatcccatcagagatct

SEQ ID NO: 2390457 - DNA, 25 bp, Homo sapien
tgctggatcccatcagagatcttca

SEQ ID NO: 2390458 - DNA, 25 bp, Homo sapien
ggtgctggatcccatcagagatctt

SEQ ID NO: 2390459 - DNA, 25 bp, Homo sapien
gtgctggatcccatcagagatcttc

SEQ ID NO: 2390460 - DNA, 25 bp, Homo sapien
agaggtggcattctcagaggtacca

SEQ ID NO: 2390461 - DNA, 25 bp, Homo sapien
gcattctcagaggtaccattcaggg

SEQ ID NO: 2390462 - DNA, 25 bp, Homo sapien
agaggtaccattcagggagccgttg

SEQ ID NO: 2390463 - DNA, 25 bp, Homo sapien
cagggagccgttggtcttctggaac

SEQ ID NO: 2390464 - DNA, 25 bp, Homo sapien
caagtgtaggctggaacccaggtca

SEQ ID NO: 2390465 - DNA, 25 bp, Homo sapien
cattgtgcccatgaagacggtggat

SEQ ID NO: 2390466 - DNA, 25 bp, Homo sapien
gaaaacgtggatgtagagtgctcaa

SEQ ID NO: 2390467 - DNA, 25 bp, Homo sapien
agatcactctatgtcacaccccagg

SEQ ID NO: 2390468 - DNA, 25 bp, Homo sapien
tgttccctgcacacatgggttgtgt

SEQ ID NO: 2390469 - DNA, 25 bp, Homo sapien
cacacatgggttgtgttggatccat

SEQ ID NO: 2390470 - DNA, 25 bp, Homo sapien
gttgtgttggatccattcccacacc

SEQ ID NO: 2390471 - DNA, 25 bp, Homo sapien
catgggttgtgttggatccattccc

SEQ ID NO: 2390472 - DNA, 25 bp, Homo sapien
gcctgtgacgctggtgaattcttga

SEQ ID NO: 2390473 - DNA, 25 bp, Homo sapien
taagctctccatggtcgacttgggt

SEQ ID NO: 2390474 - DNA, 25 bp, Homo sapien
gatatagtgacaagcccaattccgg

SEQ ID NO: 2390475 - DNA, 25 bp, Homo sapien
atttctggtgtgtccgtgttaagcg

SEQ ID NO: 2390476 - DNA, 25 bp, Homo sapien
actcatggtagcagccgccccaggg

SEQ ID NO: 2390477 - DNA, 25 bp, Homo sapien
ggccaacacaatgatgtagtagacg

SEQ ID NO: 2390478 - DNA, 25 bp, Homo sapien
caatgatgtagtagacgttgaggag

SEQ ID NO: 2390479 - DNA, 25 bp, Homo sapien
cgatcatctgggaggcatagccaat

SEQ ID NO: 2390480 - DNA, 25 bp, Homo sapien
ctggctagtgtactggcctagtgct

SEQ ID NO: 2390481 - DNA, 25 bp, Homo sapien
cctccctggctagtgtactggccta

SEQ ID NO: 2390482 - DNA, 25 bp, Homo sapien
tgacgcctccctggctagtgtactg

SEQ ID NO: 2390483 - DNA, 25 bp, Homo sapien
aggctgtgacgcctccctggctagt

SEQ ID NO: 2390484 - DNA, 25 bp, Homo sapien
ctccttcctctgcctcgttgagctc

SEQ ID NO: 2390485 - DNA, 25 bp, Homo sapien
ctgcctcgttgagctccttggcagc

SEQ ID NO: 2390486 - DNA, 25 bp, Homo sapien
tctgcctcgttgagctccttggcag

SEQ ID NO: 2390487 - DNA, 25 bp, Homo sapien
ttcctctgcctcgttgagctccttg

SEQ ID NO: 2390488 - DNA, 25 bp, Homo sapien
ctgccaagagggacaaagtccacac

SEQ ID NO: 2390489 - DNA, 25 bp, Homo sapien
ttcccctccgcaggtaccaccatca

SEQ ID NO: 2390490 - DNA, 25 bp, Homo sapien
ccaggtacggactgaggagtgctga

SEQ ID NO: 2390491 - DNA, 25 bp, Homo sapien
agtgctgaagggcattctgcctctt

SEQ ID NO: 2390492 - DNA, 25 bp, Homo sapien
gccaagggggccaggtacggactga

SEQ ID NO: 2390493 - DNA, 25 bp, Homo sapien
ttgagcaacttggtctgccagcagc

SEQ ID NO: 2390494 - DNA, 25 bp, Homo sapien
tccaggcagttggagaggtctcagc

SEQ ID NO: 2390495 - DNA, 25 bp, Homo sapien
ggtctcagctgaaggcccgtgttct

SEQ ID NO: 2390496 - DNA, 25 bp, Homo sapien
gaatcctctttgtgtgggcatccca

SEQ ID NO: 2390497 - DNA, 25 bp, Homo sapien
tcctcgtcccatgactggaacttta

SEQ ID NO: 2390498 - DNA, 25 bp, Homo sapien
tggaactttaactgggcaggcccta

SEQ ID NO: 2390499 - DNA, 25 bp, Homo sapien
atcacgcctcctgcgttatccagca

SEQ ID NO: 2390500 - DNA, 25 bp, Homo sapien
tagaaaatcgtatttgctttccctc

SEQ ID NO: 2390501 - DNA, 25 bp, Homo sapien
aaattagatctaccacatgttgacg

SEQ ID NO: 2390502 - DNA, 25 bp, Homo sapien
tgttctatcatagccttgcctcagc

SEQ ID NO: 2390503 - DNA, 25 bp, Homo sapien
tgttgcttccgatttcagatgggct

SEQ ID NO: 2390504 - DNA, 25 bp, Homo sapien
ctccctaaaagcgtccctgttgctt

SEQ ID NO: 2390505 - DNA, 25 bp, Homo sapien
attacttaagaccacagaacagttt

SEQ ID NO: 2390506 - DNA, 25 bp, Homo sapien
aacagtttggttatcaacgtcatca

SEQ ID NO: 2390507 - DNA, 25 bp, Homo sapien
cacagaacagtttggttatcaacgt

SEQ ID NO: 2390508 - DNA, 25 bp, Homo sapien
ttacttaagaccacagaacagtttg

SEQ ID NO: 2390509 - DNA, 25 bp, Homo sapien
attacttaagaccacagaacagttt

SEQ ID NO: 2390510 - DNA, 25 bp, Homo sapien
cagtttggttatcaacgtcatcatc

SEQ ID NO: 2390511 - DNA, 25 bp, Homo sapien
ttacttaagaccacagaacagtttg

SEQ ID NO: 2390512 - DNA, 25 bp, Homo sapien
cacagaacagtttggttatcaacgt

SEQ ID NO: 2390513 - DNA, 25 bp, Homo sapien
attacttaagaccacagaacagttt

SEQ ID NO: 2390514 - DNA, 25 bp, Homo sapien
ttacttaagaccacagaacagtttg

SEQ ID NO: 2390515 - DNA, 25 bp, Homo sapien
cacagaacagtttggttatcaacgt

SEQ ID NO: 2390516 - DNA, 25 bp, Homo sapien
gttatcaacgtcatcatcagcagag

SEQ ID NO: 2390517 - DNA, 25 bp, Homo sapien
attacttaagaccacagaacagttt

SEQ ID NO: 2390518 - DNA, 25 bp, Homo sapien
ttacttaagaccacagaacagtttg

SEQ ID NO: 2390519 - DNA, 25 bp, Homo sapien
cacagaacagtttggttatcaacgt

SEQ ID NO: 2390520 - DNA, 25 bp, Homo sapien
agtttggttatcaacgtcatcatca

SEQ ID NO: 2390521 - DNA, 25 bp, Homo sapien
ttacttaagaccacagaacagtttg

SEQ ID NO: 2390522 - DNA, 25 bp, Homo sapien
attacttaagaccacagaacagttt

SEQ ID NO: 2390523 - DNA, 25 bp, Homo sapien
cagaacagtttggttatcaacgtca

SEQ ID NO: 2390524 - DNA, 25 bp, Homo sapien
cacagaacagtttggttatcaacgt

SEQ ID NO: 2390525 - DNA, 25 bp, Homo sapien
gagtgtccttaatgacctctaagcg

SEQ ID NO: 2390526 - DNA, 25 bp, Homo sapien
tatctcaatttgcaggagcggcaat

SEQ ID NO: 2390527 - DNA, 25 bp, Homo sapien
cacctggttccagcttgtgctcata

SEQ ID NO: 2390528 - DNA, 25 bp, Homo sapien
gagccctgggatagtcacgtaacct

SEQ ID NO: 2390529 - DNA, 25 bp, Homo sapien
gatggaagtatcctccttccaggag

SEQ ID NO: 2390530 - DNA, 25 bp, Homo sapien
tgcaggagatggaagtatcctcctt

SEQ ID NO: 2390531 - DNA, 25 bp, Homo sapien
ccagaggggccgtaagtgcaggaga

SEQ ID NO: 2390532 - DNA, 25 bp, Homo sapien
ggtggcacaagggctctcatctcac

SEQ ID NO: 2390533 - DNA, 25 bp, Homo sapien
ttgcctaagccaatgatctccccag

SEQ ID NO: 2390534 - DNA, 25 bp, Homo sapien
agacgttgcctaagccaatgatctc

SEQ ID NO: 2390535 - DNA, 25 bp, Homo sapien
tccagacgttgcctaagccaatgat

SEQ ID NO: 2390536 - DNA, 25 bp, Homo sapien
cctccagacgttgcctaagccaatg

SEQ ID NO: 2390537 - DNA, 25 bp, Homo sapien
gtgcccccgctccagggtgccatct

SEQ ID NO: 2390538 - DNA, 25 bp, Homo sapien
cgctccagggtgccatcttcctcct

SEQ ID NO: 2390539 - DNA, 25 bp, Homo sapien
tgttccagtgcccccgctccagggt

SEQ ID NO: 2390540 - DNA, 25 bp, Homo sapien
ccccgctccagggtgccatcttcct

SEQ ID NO: 2390541 - DNA, 25 bp, Homo sapien
gtctctccattactggttgtgcctg

SEQ ID NO: 2390542 - DNA, 25 bp, Homo sapien
ttttgtctctccattactggttgtg

SEQ ID NO: 2390543 - DNA, 25 bp, Homo sapien
tctctccattactggttgtgcctga

SEQ ID NO: 2390544 - DNA, 25 bp, Homo sapien
ttgtctctccattactggttgtgcc

SEQ ID NO: 2390545 - DNA, 25 bp, Homo sapien
ttgaggatgactggacgtggcccac

SEQ ID NO: 2390546 - DNA, 25 bp, Homo sapien
aaggaagttgcagctcagagaggtt

SEQ ID NO: 2390547 - DNA, 25 bp, Homo sapien
cattggctgcctaggttcactggtg

SEQ ID NO: 2390548 - DNA, 25 bp, Homo sapien
tccagaccactgttgggattgagga

SEQ ID NO: 2390549 - DNA, 25 bp, Homo sapien
tagtgaagctgctgccagaggtcca

SEQ ID NO: 2390550 - DNA, 25 bp, Homo sapien
tccagtcaggggagaagaattatct

SEQ ID NO: 2390551 - DNA, 25 bp, Homo sapien
cagaggtccagtcaggggagaagaa

SEQ ID NO: 2390552 - DNA, 25 bp, Homo sapien
cttagtgaagctgctgccagaggtc

SEQ ID NO: 2390553 - DNA, 25 bp, Homo sapien
tttgtttttacataactgctgccat

SEQ ID NO: 2390554 - DNA, 25 bp, Homo sapien
ctcttttgtttttacataactgctg

SEQ ID NO: 2390555 - DNA, 25 bp, Homo sapien
caactcttttgtttttacataactg

SEQ ID NO: 2390556 - DNA, 25 bp, Homo sapien
cttttgtttttacataactgctgcc

SEQ ID NO: 2390557 - DNA, 25 bp, Homo sapien
tgactcctattttattcctctccaa

SEQ ID NO: 2390558 - DNA, 25 bp, Homo sapien
ctctccaaatctttgttatccccaa

SEQ ID NO: 2390559 - DNA, 25 bp, Homo sapien
caaatctttgttatccccaatttct

SEQ ID NO: 2390560 - DNA, 25 bp, Homo sapien
gttgactcctattttattcctctcc

SEQ ID NO: 2390561 - DNA, 25 bp, Homo sapien
gctcacttggcagatactttaaaca

SEQ ID NO: 2390562 - DNA, 25 bp, Homo sapien
taagagcctaggagtgcttagctca

SEQ ID NO: 2390563 - DNA, 25 bp, Homo sapien
gaagacagtagagtaccatctgccc

SEQ ID NO: 2390564 - DNA, 25 bp, Homo sapien
cctcaatctccaggaatcagagctc

SEQ ID NO: 2390565 - DNA, 25 bp, Homo sapien
gatactcagattaatggccacctag

SEQ ID NO: 2390566 - DNA, 25 bp, Homo sapien
gaaggtcattctacgcacgtcggga

SEQ ID NO: 2390567 - DNA, 25 bp, Homo sapien
gatggaatcaacaccaatacgtgcg

SEQ ID NO: 2390568 - DNA, 25 bp, Homo sapien
caaccaggattgatgaggctacagg

SEQ ID NO: 2390569 - DNA, 25 bp, Homo sapien
gagtgacaggccagagtctatgcta

SEQ ID NO: 2390570 - DNA, 25 bp, Homo sapien
tatactcagtagcatgcagcagccc

SEQ ID NO: 2390571 - DNA, 25 bp, Homo sapien
gatccacggataaggttctgcagag

SEQ ID NO: 2390572 - DNA, 25 bp, Homo sapien
ccagggctgctaaactgcttcaaga

SEQ ID NO: 2390573 - DNA, 25 bp, Homo sapien
agaacatacaagtgagaaggggtga

SEQ ID NO: 2390574 - DNA, 25 bp, Homo sapien
cagaacatacaagtgagaaggggtg

SEQ ID NO: 2390575 - DNA, 25 bp, Homo sapien
tacagaacatacaagtgagaagggg

SEQ ID NO: 2390576 - DNA, 25 bp, Homo sapien
tttacagaacatacaagtgagaagg

SEQ ID NO: 2390577 - DNA, 25 bp, Homo sapien
ggccaagtccactgcaagcagagtc

SEQ ID NO: 2390578 - DNA, 25 bp, Homo sapien
ttcccaagaggtaatcagattcccc

SEQ ID NO: 2390579 - DNA, 25 bp, Homo sapien
tatctgcataagctgggatccttgg

SEQ ID NO: 2390580 - DNA, 25 bp, Homo sapien
tacttgatctaaactgggagggtcc

SEQ ID NO: 2390581 - DNA, 25 bp, Homo sapien
tacagtaggagataccacttgggac

SEQ ID NO: 2390582 - DNA, 25 bp, Homo sapien
ggatatgatccaggccaagacaaga

SEQ ID NO: 2390583 - DNA, 25 bp, Homo sapien
caaaaggagtacttaaggacctgct

SEQ ID NO: 2390584 - DNA, 25 bp, Homo sapien
agacattcctgtttagaccacttgg

SEQ ID NO: 2390585 - DNA, 25 bp, Homo sapien
tgtaacccacagagtccatgcaaag

SEQ ID NO: 2390586 - DNA, 25 bp, Homo sapien
tcttacaaagataaggtgacctgcc

SEQ ID NO: 2390587 - DNA, 25 bp, Homo sapien
caggcgggactcaaactcacaggtt

SEQ ID NO: 2390588 - DNA, 25 bp, Homo sapien
gaaactctgtcatatgctgctggta

SEQ ID NO: 2390589 - DNA, 25 bp, Homo sapien
tctctttaagatcctccattggtag

SEQ ID NO: 2390590 - DNA, 25 bp, Homo sapien
tcctccattggtagtttgtagctca

SEQ ID NO: 2390591 - DNA, 25 bp, Homo sapien
tccattggtagtttgtagctcatta

SEQ ID NO: 2390592 - DNA, 25 bp, Homo sapien
aagatcctccattggtagtttgtag

SEQ ID NO: 2390593 - DNA, 25 bp, Homo sapien
acacaaacttgatgaaaccactcat

SEQ ID NO: 2390594 - DNA, 25 bp, Homo sapien
atttctggagatacacccacacaaa

SEQ ID NO: 2390595 - DNA, 25 bp, Homo sapien
gccaccatcacattgtacccagtct

SEQ ID NO: 2390596 - DNA, 25 bp, Homo sapien
cagtttatacagatgtaatcttcat

SEQ ID NO: 2390597 - DNA, 25 bp, Homo sapien
agcctagaataaaagcaaaccaaag

SEQ ID NO: 2390598 - DNA, 25 bp, Homo sapien
ggttacataaacattaagcctagaa

SEQ ID NO: 2390599 - DNA, 25 bp, Homo sapien
tagaataaaagcaaaccaaagagct

SEQ ID NO: 2390600 - DNA, 25 bp, Homo sapien
tgtttaggttacataaacattaagc

SEQ ID NO: 2390601 - DNA, 25 bp, Homo sapien
caatgcaattatcaatcaagaaagg

SEQ ID NO: 2390602 - DNA, 25 bp, Homo sapien
atgcaattatcaatcaagaaaggaa

SEQ ID NO: 2390603 - DNA, 25 bp, Homo sapien
ctaagacaatgcaattatcaatcaa

SEQ ID NO: 2390604 - DNA, 25 bp, Homo sapien
gacaatgcaattatcaatcaagaaa

SEQ ID NO: 2390605 - DNA, 25 bp, Homo sapien
agataagccaaagtactaagagcat

SEQ ID NO: 2390606 - DNA, 25 bp, Homo sapien
taagccaaagtactaagagcattaa

SEQ ID NO: 2390607 - DNA, 25 bp, Homo sapien
tgtgaaggcaatcctgtgtattagc

SEQ ID NO: 2390608 - DNA, 25 bp, Homo sapien
ccaaagtactaagagcattaaatac

SEQ ID NO: 2390609 - DNA, 25 bp, Homo sapien
tagaaaagcagtcacataggccact

SEQ ID NO: 2390610 - DNA, 25 bp, Homo sapien
ttagaaaagcagtcacataggccac

SEQ ID NO: 2390611 - DNA, 25 bp, Homo sapien
tctcttcttccgttacaaatacaac

SEQ ID NO: 2390612 - DNA, 25 bp, Homo sapien
tcttcttccgttacaaatacaactc

SEQ ID NO: 2390613 - DNA, 25 bp, Homo sapien
tcttctcttcttccgttacaaatac

SEQ ID NO: 2390614 - DNA, 25 bp, Homo sapien
ttcttctcttcttccgttacaaata

SEQ ID NO: 2390615 - DNA, 25 bp, Homo sapien
tctgcaccttgatacaactgtcggc

SEQ ID NO: 2390616 - DNA, 25 bp, Homo sapien
tacaagattaccgagaggatccaat

SEQ ID NO: 2390617 - DNA, 25 bp, Homo sapien
tcaaaaccacagtagtcacgtcagt

SEQ ID NO: 2390618 - DNA, 25 bp, Homo sapien
cccaggatactggaggcactttcca

SEQ ID NO: 2390619 - DNA, 25 bp, Homo sapien
ggagcaaatctcacagttccttcaa

SEQ ID NO: 2390620 - DNA, 25 bp, Homo sapien
gcaaaacagcagtaacaggcaaaat

SEQ ID NO: 2390621 - DNA, 25 bp, Homo sapien
taaccctttgaataggcagggcacc

SEQ ID NO: 2390622 - DNA, 25 bp, Homo sapien
tatataaactaacaacatagggtgg

SEQ ID NO: 2390623 - DNA, 25 bp, Homo sapien
acagctcttacaatactggcccagg

SEQ ID NO: 2390624 - DNA, 25 bp, Homo sapien
caggccattgtgactatccgacaag

SEQ ID NO: 2390625 - DNA, 25 bp, Homo sapien
catatgaaatgcactgtttgccagg

SEQ ID NO: 2390626 - DNA, 25 bp, Homo sapien
gagtcaccttatagggaaggcacaa

SEQ ID NO: 2390627 - DNA, 25 bp, Homo sapien
cagtcatactttgaggggatgtcca

SEQ ID NO: 2390628 - DNA, 25 bp, Homo sapien
tggcagttctgtgctgcgcacacag

SEQ ID NO: 2390629 - DNA, 25 bp, Homo sapien
tctgctcctgaccagtcatactttg

SEQ ID NO: 2390630 - DNA, 25 bp, Homo sapien
tgtgctgcgcacacagcattctcat

SEQ ID NO: 2390631 - DNA, 25 bp, Homo sapien
gcttccgtttccgtttcttctctga

SEQ ID NO: 2390632 - DNA, 25 bp, Homo sapien
cttggccagtttattcagctccttt

SEQ ID NO: 2390633 - DNA, 25 bp, Homo sapien
gatttgtctgcacctaattttaatt

SEQ ID NO: 2390634 - DNA, 25 bp, Homo sapien
ggccagtttattcagctcctttgat

SEQ ID NO: 2390635 - DNA, 25 bp, Homo sapien
cagtattactctcttatatgaggta

SEQ ID NO: 2390636 - DNA, 25 bp, Homo sapien
aggtacctagaatagacacattcgg

SEQ ID NO: 2390637 - DNA, 25 bp, Homo sapien
ctagaatagacacattcggagagac

SEQ ID NO: 2390638 - DNA, 25 bp, Homo sapien
aacagtattactctcttatatgagg

SEQ ID NO: 2390639 - DNA, 25 bp, Homo sapien
cttccagttgtgccttagctccagg

SEQ ID NO: 2390640 - DNA, 25 bp, Homo sapien
tggcctgcaaaatccgccatatgtg

SEQ ID NO: 2390641 - DNA, 25 bp, Homo sapien
gcaagaatctgtcttcagagggtgg

SEQ ID NO: 2390642 - DNA, 25 bp, Homo sapien
ttgagtctcgtccagagatacttcc

SEQ ID NO: 2390643 - DNA, 25 bp, Homo sapien
tccactcgaaatggagtcacagtct

SEQ ID NO: 2390644 - DNA, 25 bp, Homo sapien
gtcacagtcttgattaacataatgc

SEQ ID NO: 2390645 - DNA, 25 bp, Homo sapien
tctgcttatgttccccacagttttt

SEQ ID NO: 2390646 - DNA, 25 bp, Homo sapien
ggccaaccattgtactccactcgaa

SEQ ID NO: 2390647 - DNA, 25 bp, Homo sapien
gcatgctctgcacaaaatgaaggtg

SEQ ID NO: 2390648 - DNA, 25 bp, Homo sapien
atgctctgcacaaaatgaaggtgct

SEQ ID NO: 2390649 - DNA, 25 bp, Homo sapien
taagcatgctctgcacaaaatgaag

SEQ ID NO: 2390650 - DNA, 25 bp, Homo sapien
aagcatgctctgcacaaaatgaagg

SEQ ID NO: 2390651 - DNA, 25 bp, Homo sapien
aaaagattgggttcaagactactag

SEQ ID NO: 2390652 - DNA, 25 bp, Homo sapien
tactagaggacttcacactggctgt

SEQ ID NO: 2390653 - DNA, 25 bp, Homo sapien
ggttcaagactactagaggacttca

SEQ ID NO: 2390654 - DNA, 25 bp, Homo sapien
gactactagaggacttcacactggc

SEQ ID NO: 2390655 - DNA, 25 bp, Homo sapien
gatattcaagaactgtacgcaactg

SEQ ID NO: 2390656 - DNA, 25 bp, Homo sapien
ccagcagaggaatctacgagcgtct

SEQ ID NO: 2390657 - DNA, 25 bp, Homo sapien
caacgtgcttaagaatgtaccgctg

SEQ ID NO: 2390658 - DNA, 25 bp, Homo sapien
tagtgtacctttcagcagactgcca

SEQ ID NO: 2390659 - DNA, 25 bp, Homo sapien
tatgtctctcgaatgtcttcatcag

SEQ ID NO: 2390660 - DNA, 25 bp, Homo sapien
tcaccacccggttaaaagcagactg

SEQ ID NO: 2390661 - DNA, 25 bp, Homo sapien
actgctggaaactaggtaagtgtcc

SEQ ID NO: 2390662 - DNA, 25 bp, Homo sapien
catcatagtccattgtttgtcgagg

SEQ ID NO: 2390663 - DNA, 25 bp, Homo sapien
ccaagatgaacagcaagacatgcta

SEQ ID NO: 2390664 - DNA, 25 bp, Homo sapien
atgatgccaaagtccacctgaatga

SEQ ID NO: 2390665 - DNA, 25 bp, Homo sapien
gcaaagtggctaacagagttcttca

SEQ ID NO: 2390666 - DNA, 25 bp, Homo sapien
cctaatcaattggtaagacagactc

SEQ ID NO: 2390667 - DNA, 25 bp, Homo sapien
cccatgaaatagaaaaagaatgtaa

SEQ ID NO: 2390668 - DNA, 25 bp, Homo sapien
tcccatgaaatagaaaaagaatgta

SEQ ID NO: 2390669 - DNA, 25 bp, Homo sapien
tgaaatagaaaaagaatgtaaatcc

SEQ ID NO: 2390670 - DNA, 25 bp, Homo sapien
catgaaatagaaaaagaatgtaaat

SEQ ID NO: 2390671 - DNA, 25 bp, Homo sapien
ctgtaagtctggattggcagctgct

SEQ ID NO: 2390672 - DNA, 25 bp, Homo sapien
tagttcatctgtggctagagcctgc

SEQ ID NO: 2390673 - DNA, 25 bp, Homo sapien
caacacagatagtttggccagggca

SEQ ID NO: 2390674 - DNA, 25 bp, Homo sapien
tcatagcacgttctgtcaaacactg

SEQ ID NO: 2390675 - DNA, 25 bp, Homo sapien
tgttccaccatacgctggctcaaca

SEQ ID NO: 2390676 - DNA, 25 bp, Homo sapien
agaccgcatacaaagagggcaaagg

SEQ ID NO: 2390677 - DNA, 25 bp, Homo sapien
tgggccttcgagaccgcatacaaag

SEQ ID NO: 2390678 - DNA, 25 bp, Homo sapien
tagtctctagcctgggccttcgaga

SEQ ID NO: 2390679 - DNA, 25 bp, Homo sapien
ccaggagtgacagaatagtctctag

SEQ ID NO: 2390680 - DNA, 25 bp, Homo sapien
catcttggctaggttggctgctctg

SEQ ID NO: 2390681 - DNA, 25 bp, Homo sapien
tttacttcttctatgcggtccacca

SEQ ID NO: 2390682 - DNA, 25 bp, Homo sapien
cccactggctgtcttgcggcaaatg

SEQ ID NO: 2390683 - DNA, 25 bp, Homo sapien
tcacactgtagcataaacccactgg

SEQ ID NO: 2390684 - DNA, 25 bp, Homo sapien
actcccatatacaccaatgtcggtc

SEQ ID NO: 2390685 - DNA, 25 bp, Homo sapien
tggctgtatctctggtttcctccaa

SEQ ID NO: 2390686 - DNA, 25 bp, Homo sapien
caccatggctgtatctctggtttcc

SEQ ID NO: 2390687 - DNA, 25 bp, Homo sapien
ccatatacaccaatgtcggtccggg

SEQ ID NO: 2390688 - DNA, 25 bp, Homo sapien
gtaacaatgtatggctagaattctt

SEQ ID NO: 2390689 - DNA, 25 bp, Homo sapien
acgtccgcccagtccgttctctcca

SEQ ID NO: 2390690 - DNA, 25 bp, Homo sapien
agtccgttctctccatgcccgtgct

SEQ ID NO: 2390691 - DNA, 25 bp, Homo sapien
ctgtaacaatgtatggctagaattc

SEQ ID NO: 2390692 - DNA, 25 bp, Homo sapien
ctgtgattccacttgcggcagtgct

SEQ ID NO: 2390693 - DNA, 25 bp, Homo sapien
gaatagggcgtcctttcgcagacaa

SEQ ID NO: 2390694 - DNA, 25 bp, Homo sapien
cttcaagacgcacaggaatagggcg

SEQ ID NO: 2390695 - DNA, 25 bp, Homo sapien
acttgcggcagtgcttcaagacgca

SEQ ID NO: 2390696 - DNA, 25 bp, Homo sapien
tcaagctgctccaaataagcgtaat

SEQ ID NO: 2390697 - DNA, 25 bp, Homo sapien
gctctcaagctgctccaaataagcg

SEQ ID NO: 2390698 - DNA, 25 bp, Homo sapien
tgctccaaataagcgtaattgctgc

SEQ ID NO: 2390699 - DNA, 25 bp, Homo sapien
ccaaataagcgtaattgctgccact

SEQ ID NO: 2390700 - DNA, 25 bp, Homo sapien
ctcacaatttgagttctcttatggg

SEQ ID NO: 2390701 - DNA, 25 bp, Homo sapien
gtttggcaatatactgttgaaagac

SEQ ID NO: 2390702 - DNA, 25 bp, Homo sapien
gggtttggcaatatactgttgaaag

SEQ ID NO: 2390703 - DNA, 25 bp, Homo sapien
aaaccaaagtagattctcacaattt

SEQ ID NO: 2390704 - DNA, 25 bp, Homo sapien
taacaaattccctactgcttaagag

SEQ ID NO: 2390705 - DNA, 25 bp, Homo sapien
tcatagcaaggagtcaataaaaaca

SEQ ID NO: 2390706 - DNA, 25 bp, Homo sapien
catctagaatagtagcaagagtact

SEQ ID NO: 2390707 - DNA, 25 bp, Homo sapien
caagagtactgtggtgctcagtaaa

SEQ ID NO: 2390708 - DNA, 25 bp, Homo sapien
taggtgggataatccaaaagtcttc

SEQ ID NO: 2390709 - DNA, 25 bp, Homo sapien
tgataggtgggataatccaaaagtc

SEQ ID NO: 2390710 - DNA, 25 bp, Homo sapien
gtgggataatccaaaagtcttctta

SEQ ID NO: 2390711 - DNA, 25 bp, Homo sapien
tgggataatccaaaagtcttcttac

SEQ ID NO: 2390712 - DNA, 25 bp, Homo sapien
tagcttccactttagcggtccattc

SEQ ID NO: 2390713 - DNA, 25 bp, Homo sapien
cattctcgagccttttgtaaggctt

SEQ ID NO: 2390714 - DNA, 25 bp, Homo sapien
aggacaacacattgggtagaaaggc

SEQ ID NO: 2390715 - DNA, 25 bp, Homo sapien
gctttctaaacttgccacactgtgc

SEQ ID NO: 2390716 - DNA, 25 bp, Homo sapien
gagttccacatagagactagagccc

SEQ ID NO: 2390717 - DNA, 25 bp, Homo sapien
tccaaagtgacttgttgcggatctg

SEQ ID NO: 2390718 - DNA, 25 bp, Homo sapien
tgtaaggagctcctgtagttcagcc

SEQ ID NO: 2390719 - DNA, 25 bp, Homo sapien
cagtcgtggtaattcagggagttcc

SEQ ID NO: 2390720 - DNA, 25 bp, Homo sapien
ccgagcttggctgatgacacacgga

SEQ ID NO: 2390721 - DNA, 25 bp, Homo sapien
tccgagtcctcccactatctgggct

SEQ ID NO: 2390722 - DNA, 25 bp, Homo sapien
actgtcagtttggtccgagtcctcc

SEQ ID NO: 2390723 - DNA, 25 bp, Homo sapien
tgccgagcttggctgatgacacacg

SEQ ID NO: 2390724 - DNA, 25 bp, Homo sapien
tcaaagataatgtacggcttcacag

SEQ ID NO: 2390725 - DNA, 25 bp, Homo sapien
taatgtacggcttcacaggccggat

SEQ ID NO: 2390726 - DNA, 25 bp, Homo sapien
gggaagcaagagacatggcaacaag

SEQ ID NO: 2390727 - DNA, 25 bp, Homo sapien
gagacatggcaacaagaggtcaaag

SEQ ID NO: 2390728 - DNA, 25 bp, Homo sapien
ttacagcatccctgagttttcgaaa

SEQ ID NO: 2390729 - DNA, 25 bp, Homo sapien
catccctgagttttcgaaagagatc

SEQ ID NO: 2390730 - DNA, 25 bp, Homo sapien
gagatcattctctgggtatttccta

SEQ ID NO: 2390731 - DNA, 25 bp, Homo sapien
cctgagttttcgaaagagatcattc

SEQ ID NO: 2390732 - DNA, 25 bp, Homo sapien
tgacccaagtgtcataggactgtgc

SEQ ID NO: 2390733 - DNA, 25 bp, Homo sapien
ttttttgtggttgaagttagcagac

SEQ ID NO: 2390734 - DNA, 25 bp, Homo sapien
tacaccatatagcagagaagggagg

SEQ ID NO: 2390735 - DNA, 25 bp, Homo sapien
aatgcttctgtaacacgactgaccc

SEQ ID NO: 2390736 - DNA, 25 bp, Homo sapien
tggtagagacatacaagccgctcag

SEQ ID NO: 2390737 - DNA, 25 bp, Homo sapien
tctgcatgctgaacactgccgctca

SEQ ID NO: 2390738 - DNA, 25 bp, Homo sapien
cacagatcagttggatggtagagac

SEQ ID NO: 2390739 - DNA, 25 bp, Homo sapien
ttacaggaacatgtgagagcagaga

SEQ ID NO: 2390740 - DNA, 25 bp, Homo sapien
ccactgaagattcttagtaaaggta

SEQ ID NO: 2390741 - DNA, 25 bp, Homo sapien
ctaagaaattctgataggacttgtt

SEQ ID NO: 2390742 - DNA, 25 bp, Homo sapien
gcatatcccataagcagtatcaaac

SEQ ID NO: 2390743 - DNA, 25 bp, Homo sapien
ttagcatatcccataagcagtatca

SEQ ID NO: 2390744 - DNA, 25 bp, Homo sapien
catagaaaatgtgctcagcaaactc

SEQ ID NO: 2390745 - DNA, 25 bp, Homo sapien
atcccataagcagtatcaaacatag

SEQ ID NO: 2390746 - DNA, 25 bp, Homo sapien
taagcattctggatctgctgccatc

SEQ ID NO: 2390747 - DNA, 25 bp, Homo sapien
ccttaggcgtcggtaatgatttaca

SEQ ID NO: 2390748 - DNA, 25 bp, Homo sapien
aaaagacacagtggcgccttaggcg

SEQ ID NO: 2390749 - DNA, 25 bp, Homo sapien
gagtcaattctttgcagaccatggc

SEQ ID NO: 2390750 - DNA, 25 bp, Homo sapien
gaaaatgagatttccaaattaaata

SEQ ID NO: 2390751 - DNA, 25 bp, Homo sapien
aatgagatttccaaattaaataact

SEQ ID NO: 2390752 - DNA, 25 bp, Homo sapien
ctgaaaatgagatttccaaattaaa

SEQ ID NO: 2390753 - DNA, 25 bp, Homo sapien
tgagatttccaaattaaataactcg

SEQ ID NO: 2390754 - DNA, 25 bp, Homo sapien
cctgtgtcttcccttagaaaagaag

SEQ ID NO: 2390755 - DNA, 25 bp, Homo sapien
ggattcagaaagaatcgactgacca

SEQ ID NO: 2390756 - DNA, 25 bp, Homo sapien
taaaatcacctagttgtctatcaga

SEQ ID NO: 2390757 - DNA, 25 bp, Homo sapien
cataaaagtatagcgcagagatctc

SEQ ID NO: 2390758 - DNA, 25 bp, Homo sapien
aacagccacttgctatagaacagac

SEQ ID NO: 2390759 - DNA, 25 bp, Homo sapien
cctggttaaatccagagtgataggc

SEQ ID NO: 2390760 - DNA, 25 bp, Homo sapien
agcaaagttgtagccctggttaaat

SEQ ID NO: 2390761 - DNA, 25 bp, Homo sapien
gagtgataggcacgaggaaatgtca

SEQ ID NO: 2390762 - DNA, 25 bp, Homo sapien
gaaatgtcacaacaaactcgccagc

SEQ ID NO: 2390763 - DNA, 25 bp, Homo sapien
aatgagcaatcatcgtgccgctgca

SEQ ID NO: 2390764 - DNA, 25 bp, Homo sapien
ctgggcaacacaataaggcttcgtc

SEQ ID NO: 2390765 - DNA, 25 bp, Homo sapien
tgtgattctatctaatcaaaagcta

SEQ ID NO: 2390766 - DNA, 25 bp, Homo sapien
acacaataaggcttcgtctctacaa

SEQ ID NO: 2390767 - DNA, 25 bp, Homo sapien
attcaaataactcgggggccagctc

SEQ ID NO: 2390768 - DNA, 25 bp, Homo sapien
gggttcatgatggtaactaactgat

SEQ ID NO: 2390769 - DNA, 25 bp, Homo sapien
tccattagcacgttggggttcatga

SEQ ID NO: 2390770 - DNA, 25 bp, Homo sapien
gatggtaactaactgatgcagaaga

SEQ ID NO: 2390771 - DNA, 25 bp, Homo sapien
gcagcatgagatggcacaccatacc

SEQ ID NO: 2390772 - DNA, 25 bp, Homo sapien
ctgcagcatgagatggcacaccata

SEQ ID NO: 2390773 - DNA, 25 bp, Homo sapien
agcatgagatggcacaccataccat

SEQ ID NO: 2390774 - DNA, 25 bp, Homo sapien
catgagatggcacaccataccatgt

SEQ ID NO: 2390775 - DNA, 25 bp, Homo sapien
agtagttgatggaataactccagtg

SEQ ID NO: 2390776 - DNA, 25 bp, Homo sapien
attcccacatagagccacggcactt

SEQ ID NO: 2390777 - DNA, 25 bp, Homo sapien
cacatagagccacggcactttcata

SEQ ID NO: 2390778 - DNA, 25 bp, Homo sapien
gcacattcccacatagagccacggc

SEQ ID NO: 2390779 - DNA, 25 bp, Homo sapien
tccaggacaggcatgttattcaaat

SEQ ID NO: 2390780 - DNA, 25 bp, Homo sapien
gagatgtccacattaatatgtgcaa

SEQ ID NO: 2390781 - DNA, 25 bp, Homo sapien
gaacagactgttccaggacaggcat

SEQ ID NO: 2390782 - DNA, 25 bp, Homo sapien
tatgtgcaagaacagactgttccag

SEQ ID NO: 2390783 - DNA, 25 bp, Homo sapien
ccacttccaaagtcttttgaggaga

SEQ ID NO: 2390784 - DNA, 25 bp, Homo sapien
gcagaatctttctccgcccatcctt

SEQ ID NO: 2390785 - DNA, 25 bp, Homo sapien
tgctgcttaccagccgccaaaattc

SEQ ID NO: 2390786 - DNA, 25 bp, Homo sapien
tttctactagttctgtgggaaccat

SEQ ID NO: 2390787 - DNA, 25 bp, Homo sapien
tactctcgtacagcttgttcaaatc

SEQ ID NO: 2390788 - DNA, 25 bp, Homo sapien
aatccaaaggcttctcgaggtttgc

SEQ ID NO: 2390789 - DNA, 25 bp, Homo sapien
gaagtgtatactctcgtacagcttg

SEQ ID NO: 2390790 - DNA, 25 bp, Homo sapien
aaagctctgaagtgtatactctcgt

SEQ ID NO: 2390791 - DNA, 25 bp, Homo sapien
attcttggcatacccagtggttttg

SEQ ID NO: 2390792 - DNA, 25 bp, Homo sapien
cttggcatacccagtggttttggcc

SEQ ID NO: 2390793 - DNA, 25 bp, Homo sapien
tcttggcatacccagtggttttggc

SEQ ID NO: 2390794 - DNA, 25 bp, Homo sapien
tggcatacccagtggttttggccat

SEQ ID NO: 2390795 - DNA, 25 bp, Homo sapien
tatcttcattgtttccccgaccaca

SEQ ID NO: 2390796 - DNA, 25 bp, Homo sapien
tcggcgacacatttaggacacctcc

SEQ ID NO: 2390797 - DNA, 25 bp, Homo sapien
tgtatgatagctgtcatcacatcca

SEQ ID NO: 2390798 - DNA, 25 bp, Homo sapien
catcaggtagtggaggaattagaca

SEQ ID NO: 2390799 - DNA, 25 bp, Homo sapien
ctgacctgttggtaacttttcgtct

SEQ ID NO: 2390800 - DNA, 25 bp, Homo sapien
catttgcatgttaaatgcgtctgac

SEQ ID NO: 2390801 - DNA, 25 bp, Homo sapien
acttttcgtcttcgggtgacctcat

SEQ ID NO: 2390802 - DNA, 25 bp, Homo sapien
cagagagagtgcctttccgttgtct

SEQ ID NO: 2390803 - DNA, 25 bp, Homo sapien
atctcttttcatgatcaaacaacaa

SEQ ID NO: 2390804 - DNA, 25 bp, Homo sapien
tttcatgatcaaacaacaaatttta

SEQ ID NO: 2390805 - DNA, 25 bp, Homo sapien
cttatctcttttcatgatcaaacaa

SEQ ID NO: 2390806 - DNA, 25 bp, Homo sapien
ttcatgatcaaacaacaaattttac

SEQ ID NO: 2390807 - DNA, 25 bp, Homo sapien
ttcttcagttccgtgtttctactca

SEQ ID NO: 2390808 - DNA, 25 bp, Homo sapien
gccaagcccacaaccttgggcccag

SEQ ID NO: 2390809 - DNA, 25 bp, Homo sapien
tcccattgccaagcccacaaccttg

SEQ ID NO: 2390810 - DNA, 25 bp, Homo sapien
cttcagttccgtgtttctactcaca

SEQ ID NO: 2390811 - DNA, 25 bp, Homo sapien
cttctaataaaaggcgaatggccag

SEQ ID NO: 2390812 - DNA, 25 bp, Homo sapien
catcttctaataaaaggcgaatggc

SEQ ID NO: 2390813 - DNA, 25 bp, Homo sapien
ttctaataaaaggcgaatggccaga

SEQ ID NO: 2390814 - DNA, 25 bp, Homo sapien
tcttctaataaaaggcgaatggcca

SEQ ID NO: 2390815 - DNA, 25 bp, Homo sapien
tgagagttctgagcattacaggcag

SEQ ID NO: 2390816 - DNA, 25 bp, Homo sapien
catgcagatgagacagctaaggaga

SEQ ID NO: 2390817 - DNA, 25 bp, Homo sapien
taaggagtggtcagaatataaggag

SEQ ID NO: 2390818 - DNA, 25 bp, Homo sapien
gaagatagaaaaggaccaaagatac

SEQ ID NO: 2390819 - DNA, 25 bp, Homo sapien
gaagtttgggtatcagtgctgagaa

SEQ ID NO: 2390820 - DNA, 25 bp, Homo sapien
tcttcacacgtcttgttctcttcgg

SEQ ID NO: 2390821 - DNA, 25 bp, Homo sapien
gctgagaacctcaggctccactttt

SEQ ID NO: 2390822 - DNA, 25 bp, Homo sapien
cagaatgttcatccttgtgcctggc

SEQ ID NO: 2390823 - DNA, 25 bp, Homo sapien
aaaagctcatatgggtagagaattc

SEQ ID NO: 2390824 - DNA, 25 bp, Homo sapien
cataatgtgacttcaaaagagaccc

SEQ ID NO: 2390825 - DNA, 25 bp, Homo sapien
cataaggctcacaccagactggaaa

SEQ ID NO: 2390826 - DNA, 25 bp, Homo sapien
tggcagatatcccaagcgactaccc

SEQ ID NO: 2390827 - DNA, 25 bp, Homo sapien
tgtgctgcacacattaactaatcac

SEQ ID NO: 2390828 - DNA, 25 bp, Homo sapien
gctgcacacattaactaatcactta

SEQ ID NO: 2390829 - DNA, 25 bp, Homo sapien
cctggaaagggcatgatctcatcct

SEQ ID NO: 2390830 - DNA, 25 bp, Homo sapien
acattaactaatcacttacattagg

SEQ ID NO: 2390831 - DNA, 25 bp, Homo sapien
gaatgtgtttgtacttccttctcta

SEQ ID NO: 2390832 - DNA, 25 bp, Homo sapien
atgtgtttgtacttccttctctagt

SEQ ID NO: 2390833 - DNA, 25 bp, Homo sapien
ttgaatgtgtttgtacttccttctc

SEQ ID NO: 2390834 - DNA, 25 bp, Homo sapien
ttttgaatgtgtttgtacttccttc

SEQ ID NO: 2390835 - DNA, 25 bp, Homo sapien
ctcctgaataaagcacactggtgga

SEQ ID NO: 2390836 - DNA, 25 bp, Homo sapien
aagcacactggtggatcttgactct

SEQ ID NO: 2390837 - DNA, 25 bp, Homo sapien
gtaatggccttgtctctgatctttg

SEQ ID NO: 2390838 - DNA, 25 bp, Homo sapien
atgtaatggccttgtctctgatctt

SEQ ID NO: 2390839 - DNA, 25 bp, Homo sapien
tttgatcttcaatcactgataccct

SEQ ID NO: 2390840 - DNA, 25 bp, Homo sapien
tttgaatgtcggcctgccttgctag

SEQ ID NO: 2390841 - DNA, 25 bp, Homo sapien
ttgaatgtcggcctgccttgctagg

SEQ ID NO: 2390842 - DNA, 25 bp, Homo sapien
atttgatcttcaatcactgataccc

SEQ ID NO: 2390843 - DNA, 25 bp, Homo sapien
tgctcaaagcatacagatccaggat

SEQ ID NO: 2390844 - DNA, 25 bp, Homo sapien
tttctctctaccacagggatcttca

SEQ ID NO: 2390845 - DNA, 25 bp, Homo sapien
tcagagtagatccttgaagttccca

SEQ ID NO: 2390846 - DNA, 25 bp, Homo sapien
tttgctagttgatccaagaaatcca

SEQ ID NO: 2390847 - DNA, 25 bp, Homo sapien
agctttttacttcacaggcaaatgg

SEQ ID NO: 2390848 - DNA, 25 bp, Homo sapien
ctcttggagtgaaacgaaagctttt

SEQ ID NO: 2390849 - DNA, 25 bp, Homo sapien
ttttacttcacaggcaaatggaggc

SEQ ID NO: 2390850 - DNA, 25 bp, Homo sapien
caagttcattcaggcgctggactct

SEQ ID NO: 2390851 - DNA, 25 bp, Homo sapien
tttctccgccaaaggccggatgcgg

SEQ ID NO: 2390852 - DNA, 25 bp, Homo sapien
tctggcggtggcacgaactccgccg

SEQ ID NO: 2390853 - DNA, 25 bp, Homo sapien
taaagctgagcggatctgtgaactc

SEQ ID NO: 2390854 - DNA, 25 bp, Homo sapien
ttgggcggccgaattttgcagatgc

SEQ ID NO: 2390855 - DNA, 25 bp, Homo sapien
gaagttaccgtgctgtcaaatccct

SEQ ID NO: 2390856 - DNA, 25 bp, Homo sapien
gaaacggaatccttccgcagctgca

SEQ ID NO: 2390857 - DNA, 25 bp, Homo sapien
cgaagcgcatcttcgcggacaagaa

SEQ ID NO: 2390858 - DNA, 25 bp, Homo sapien
cactgaggttcaggacttttccgga

SEQ ID NO: 2390859 - DNA, 25 bp, Homo sapien
ccagagggcgctagagactcaaacg

SEQ ID NO: 2390860 - DNA, 25 bp, Homo sapien
catctggaaagattcgggagacact

SEQ ID NO: 2390861 - DNA, 25 bp, Homo sapien
gactcaaacgaaatgtccatctgga

SEQ ID NO: 2390862 - DNA, 25 bp, Homo sapien
taagcttggctgagtgtccatggga

SEQ ID NO: 2390863 - DNA, 25 bp, Homo sapien
cctactctcttcaaacagccattcc

SEQ ID NO: 2390864 - DNA, 25 bp, Homo sapien
actctcttcaaacagccattccagc

SEQ ID NO: 2390865 - DNA, 25 bp, Homo sapien
tctcttcaaacagccattccagccc

SEQ ID NO: 2390866 - DNA, 25 bp, Homo sapien
tactctcttcaaacagccattccag

SEQ ID NO: 2390867 - DNA, 25 bp, Homo sapien
tgtctgcgttaagcgtccagtggct

SEQ ID NO: 2390868 - DNA, 25 bp, Homo sapien
cctctcggagatgtggttcaggctg

SEQ ID NO: 2390869 - DNA, 25 bp, Homo sapien
tcaaatctcaactggaaaacgaagc

SEQ ID NO: 2390870 - DNA, 25 bp, Homo sapien
cagcgcctctcggagatgtggttca

SEQ ID NO: 2390871 - DNA, 25 bp, Homo sapien
tgaggctaaagccttgggcgtcgcc

SEQ ID NO: 2390872 - DNA, 25 bp, Homo sapien
tgctgttggcgacgaaaggctctga

SEQ ID NO: 2390873 - DNA, 25 bp, Homo sapien
gcctctacttcgcttctgcctaaaa

SEQ ID NO: 2390874 - DNA, 25 bp, Homo sapien
aaccacaccgttaggcgcctgggtg

SEQ ID NO: 2390875 - DNA, 25 bp, Homo sapien
cttctgggcagcgagtgagggcggg

SEQ ID NO: 2390876 - DNA, 25 bp, Homo sapien
caggttccgcgagcaggagagccca

SEQ ID NO: 2390877 - DNA, 25 bp, Homo sapien
agcgagcctgcgacgggagaggcgt

SEQ ID NO: 2390878 - DNA, 25 bp, Homo sapien
ctcggctcccggagagacctgctgg

SEQ ID NO: 2390879 - DNA, 25 bp, Homo sapien
cctgaaccggagtaagtagcaccca

SEQ ID NO: 2390880 - DNA, 25 bp, Homo sapien
ctctggactctgtatctggaactgg

SEQ ID NO: 2390881 - DNA, 25 bp, Homo sapien
ctggcgctcgccgtggtgtctgtgg

SEQ ID NO: 2390882 - DNA, 25 bp, Homo sapien
tcctgcgcccggtgaagctgctgcg

SEQ ID NO: 2390883 - DNA, 25 bp, Homo sapien
ttagctgctgggtcgtgaagctgtc

SEQ ID NO: 2390884 - DNA, 25 bp, Homo sapien
tttagctgctgggtcgtgaagctgt

SEQ ID NO: 2390885 - DNA, 25 bp, Homo sapien
ctatctgtaccacatctctctggtt

SEQ ID NO: 2390886 - DNA, 25 bp, Homo sapien
ctgtaccacatctctctggttggcc

SEQ ID NO: 2390887 - DNA, 25 bp, Homo sapien
tctgtaccacatctctctggttggc

SEQ ID NO: 2390888 - DNA, 25 bp, Homo sapien
tatctgtaccacatctctctggttg

SEQ ID NO: 2390889 - DNA, 25 bp, Homo sapien
tggccggcgaacctcagcaacacat

SEQ ID NO: 2390890 - DNA, 25 bp, Homo sapien
atgtggccggcgaacctcagcaaca

SEQ ID NO: 2390891 - DNA, 25 bp, Homo sapien
agtccctgtgctgatgtggccggcg

SEQ ID NO: 2390892 - DNA, 25 bp, Homo sapien
ctgtgctgatgtggccggcgaacct

SEQ ID NO: 2390893 - DNA, 25 bp, Homo sapien
tagatttggaagttgcgcacgtcac

SEQ ID NO: 2390894 - DNA, 25 bp, Homo sapien
ggtctttcaaggctcagtcgcctga

SEQ ID NO: 2390895 - DNA, 25 bp, Homo sapien
gaagggaatatctttgacatctggc

SEQ ID NO: 2390896 - DNA, 25 bp, Homo sapien
tgaaccgagaggtggcagctctccc

SEQ ID NO: 2390897 - DNA, 25 bp, Homo sapien
tgcacaccaaaaactggagcaccag

SEQ ID NO: 2390898 - DNA, 25 bp, Homo sapien
gaacaggagtgtaggagaagaccca

SEQ ID NO: 2390899 - DNA, 25 bp, Homo sapien
gaagacccacagattgtccccttgt

SEQ ID NO: 2390900 - DNA, 25 bp, Homo sapien
gtactggacgctgggacattggaac

SEQ ID NO: 2390901 - DNA, 25 bp, Homo sapien
agctggacagtagaattgggaaatc

SEQ ID NO: 2390902 - DNA, 25 bp, Homo sapien
cagctggacagtagaattgggaaat

SEQ ID NO: 2390903 - DNA, 25 bp, Homo sapien
tcacgtgaatccatgagtgggcctg

SEQ ID NO: 2390904 - DNA, 25 bp, Homo sapien
tgaatccatgagtgggcctgggcca

SEQ ID NO: 2390905 - DNA, 25 bp, Homo sapien
agggtgacttgatggattcacgtga

SEQ ID NO: 2390906 - DNA, 25 bp, Homo sapien
ttcccctcgccctttattgctgcct

SEQ ID NO: 2390907 - DNA, 25 bp, Homo sapien
gctgtagggcccgtgactgtggcat

SEQ ID NO: 2390908 - DNA, 25 bp, Homo sapien
agtagtagcttggtggacgtctgtc

SEQ ID NO: 2390909 - DNA, 25 bp, Homo sapien
cctggaaatccagtagtaccttggt

SEQ ID NO: 2390910 - DNA, 25 bp, Homo sapien
gcccgtgactgtggcatgcggaaca

SEQ ID NO: 2390911 - DNA, 25 bp, Homo sapien
gaaatccagtagtagcttggtggac

SEQ ID NO: 2390912 - DNA, 25 bp, Homo sapien
tggaaatccagtagtagcttggtgg

SEQ ID NO: 2390913 - DNA, 25 bp, Homo sapien
ctggaaatccagtagtagcttggtg

SEQ ID NO: 2390914 - DNA, 25 bp, Homo sapien
aatccagtagtagcttggtggacac

SEQ ID NO: 2390915 - DNA, 25 bp, Homo sapien
aaagaaatttctcatgatcatccat

SEQ ID NO: 2390916 - DNA, 25 bp, Homo sapien
atctgaaaaatgactcggcccaagg

SEQ ID NO: 2390917 - DNA, 25 bp, Homo sapien
agatctgaaaaatgactcggcccaa

SEQ ID NO: 2390918 - DNA, 25 bp, Homo sapien
gatctgaaaaatgactcggcccaag

SEQ ID NO: 2390919 - DNA, 25 bp, Homo sapien
cacttcagccgaagtaagggagaac

SEQ ID NO: 2390920 - DNA, 25 bp, Homo sapien
gggagaactagacaactctctttgt

SEQ ID NO: 2390921 - DNA, 25 bp, Homo sapien
cgaagtaagggagaactagacaact

SEQ ID NO: 2390922 - DNA, 25 bp, Homo sapien
cagccgaagtaagggagaactagac

SEQ ID NO: 2390923 - DNA, 25 bp, Homo sapien
gggatcctggaagcacctctgtggc

SEQ ID NO: 2390924 - DNA, 25 bp, Homo sapien
cctctgtggcccttcgctaggtcca

SEQ ID NO: 2390925 - DNA, 25 bp, Homo sapien
ctctgtggcccttcgctaggtccat

SEQ ID NO: 2390926 - DNA, 25 bp, Homo sapien
ctcagacgttttacttggtgcacca

SEQ ID NO: 2390927 - DNA, 25 bp, Homo sapien
catctactactgtccgggagctgtc

SEQ ID NO: 2390928 - DNA, 25 bp, Homo sapien
gcctgggcttcatggagtgactgtt

SEQ ID NO: 2390929 - DNA, 25 bp, Homo sapien
ctgaggccagaagtcactccggaga

SEQ ID NO: 2390930 - DNA, 25 bp, Homo sapien
tgtgagtaacggctgcttcccaagg

SEQ ID NO: 2390931 - DNA, 25 bp, Homo sapien
aggccagtgtgccccattagcgcca

SEQ ID NO: 2390932 - DNA, 25 bp, Homo sapien
tgtgccccattagcgccacactctg

SEQ ID NO: 2390933 - DNA, 25 bp, Homo sapien
catccgttccagtctcccacttctg

SEQ ID NO: 2390934 - DNA, 25 bp, Homo sapien
gggtgaacatcagcaccaggttcct

SEQ ID NO: 2390935 - DNA, 25 bp, Homo sapien
gcgggtgtgggatgctcatcctcct

SEQ ID NO: 2390936 - DNA, 25 bp, Homo sapien
caggttcctgaaagaagtgctgggt

SEQ ID NO: 2390937 - DNA, 25 bp, Homo sapien
cagtgagaggagcaccggccccttt

SEQ ID NO: 2390938 - DNA, 25 bp, Homo sapien
agaggtgtctttttccgagtacgca

SEQ ID NO: 2390939 - DNA, 25 bp, Homo sapien
gcagtccgcagtaacacattttgag

SEQ ID NO: 2390940 - DNA, 25 bp, Homo sapien
taatgccacatttctagcagtccgc

SEQ ID NO: 2390941 - DNA, 25 bp, Homo sapien
taaattaggcgtacttaatgccaca

SEQ ID NO: 2390942 - DNA, 25 bp, Homo sapien
aaacaaattatactggccagacgca

SEQ ID NO: 2390943 - DNA, 25 bp, Homo sapien
gaaacaaattatactggccagacgc

SEQ ID NO: 2390944 - DNA, 25 bp, Homo sapien
ttgaaacaaattatactggccagac

SEQ ID NO: 2390945 - DNA, 25 bp, Homo sapien
tgaaacaaattatactggccagacg

SEQ ID NO: 2390946 - DNA, 25 bp, Homo sapien
tatgtcccttgggcgttgtccctgg

SEQ ID NO: 2390947 - DNA, 25 bp, Homo sapien
gattagggcattaacttcctccgga

SEQ ID NO: 2390948 - DNA, 25 bp, Homo sapien
ttgtccctggccgcgggactggtcc

SEQ ID NO: 2390949 - DNA, 25 bp, Homo sapien
aaacagctggccactgattagggca

SEQ ID NO: 2390950 - DNA, 25 bp, Homo sapien
cagaccagaagcacagaacgggctg

SEQ ID NO: 2390951 - DNA, 25 bp, Homo sapien
cagaagcacagaacgggctgtttct

SEQ ID NO: 2390952 - DNA, 25 bp, Homo sapien
tcagaccagaagcacagaacgggct

SEQ ID NO: 2390953 - DNA, 25 bp, Homo sapien
gaccagaagcacagaacgggctgtt

SEQ ID NO: 2390954 - DNA, 25 bp, Homo sapien
cctcccgagaggacatggagaagag

SEQ ID NO: 2390955 - DNA, 25 bp, Homo sapien
tgggtaaggcctcccgagaggacat

SEQ ID NO: 2390956 - DNA, 25 bp, Homo sapien
cgtgcctgtgggtaaggcctcccga

SEQ ID NO: 2390957 - DNA, 25 bp, Homo sapien
taaggcctcccgagaggacatggag

SEQ ID NO: 2390958 - DNA, 25 bp, Homo sapien
cttctcttgcactaataaccccggt

SEQ ID NO: 2390959 - DNA, 25 bp, Homo sapien
tcttgcactaataaccccggtgctt

SEQ ID NO: 2390960 - DNA, 25 bp, Homo sapien
ggagaccttgtacttctcttgcact

SEQ ID NO: 2390961 - DNA, 25 bp, Homo sapien
aataaccccggtgcttttgtggctg

SEQ ID NO: 2390962 - DNA, 25 bp, Homo sapien
tggtggggcataggctagggctgca

SEQ ID NO: 2390963 - DNA, 25 bp, Homo sapien
tgggaccactctcgtcctcgggcat

SEQ ID NO: 2390964 - DNA, 25 bp, Homo sapien
ttctgggaccactctcgtcctcggg

SEQ ID NO: 2390965 - DNA, 25 bp, Homo sapien
cataggctagggctgcagttggcca

SEQ ID NO: 2390966 - DNA, 25 bp, Homo sapien
ttaagccgggcagacttggccttag

SEQ ID NO: 2390967 - DNA, 25 bp, Homo sapien
tcagaaccagcatccttaagccggg

SEQ ID NO: 2390968 - DNA, 25 bp, Homo sapien
gacatgccttacttaggtccagcag

SEQ ID NO: 2390969 - DNA, 25 bp, Homo sapien
tccagcagatgctaccaggaaggta

SEQ ID NO: 2390970 - DNA, 25 bp, Homo sapien
tcagagaggattccttgaggccctg

SEQ ID NO: 2390971 - DNA, 25 bp, Homo sapien
tccttgaggccctggcagccaggaa

SEQ ID NO: 2390972 - DNA, 25 bp, Homo sapien
gagaggattccttgaggccctggca

SEQ ID NO: 2390973 - DNA, 25 bp, Homo sapien
ggattccttgaggccctggcagcca

SEQ ID NO: 2390974 - DNA, 25 bp, Homo sapien
tatgtgccccgaaggctgtaatgaa

SEQ ID NO: 2390975 - DNA, 25 bp, Homo sapien
cacagtgaagaagaccaagatggtg

SEQ ID NO: 2390976 - DNA, 25 bp, Homo sapien
tctacctcattcaggttcagccgtg

SEQ ID NO: 2390977 - DNA, 25 bp, Homo sapien
gttgagctggttgagtcgccactgc

SEQ ID NO: 2390978 - DNA, 25 bp, Homo sapien
caggtactgcggagggtctgctcca

SEQ ID NO: 2390979 - DNA, 25 bp, Homo sapien
cgtgtggttgcaaagctgcctgtgc

SEQ ID NO: 2390980 - DNA, 25 bp, Homo sapien
ctctgttagcggagggctcactgca

SEQ ID NO: 2390981 - DNA, 25 bp, Homo sapien
ctcactgcaggtcagcgtgtggttg

SEQ ID NO: 2390982 - DNA, 25 bp, Homo sapien
caatgaccacgagcaggacaccgat

SEQ ID NO: 2390983 - DNA, 25 bp, Homo sapien
atgaccacgagcaggacaccgatga

SEQ ID NO: 2390984 - DNA, 25 bp, Homo sapien
tgaccacgagcaggacaccgatgac

SEQ ID NO: 2390985 - DNA, 25 bp, Homo sapien
aatgaccacgagcaggacaccgatg

SEQ ID NO: 2390986 - DNA, 25 bp, Homo sapien
gaccagggtggtgtagtagtgagag

SEQ ID NO: 2390987 - DNA, 25 bp, Homo sapien
tggacatgaacagggccacgtccag

SEQ ID NO: 2390988 - DNA, 25 bp, Homo sapien
tagtgagaggatggtccctgctcca

SEQ ID NO: 2390989 - DNA, 25 bp, Homo sapien
cttcagccgcatggcgttggacatg

SEQ ID NO: 2390990 - DNA, 25 bp, Homo sapien
ggctcctggggtcggagcttccagg

SEQ ID NO: 2390991 - DNA, 25 bp, Homo sapien
aaagccggctctgagcggagaatcc

SEQ ID NO: 2390992 - DNA, 25 bp, Homo sapien
ccttgggtccttcctagcacggagt

SEQ ID NO: 2390993 - DNA, 25 bp, Homo sapien
cgggagcactggacgccttttctta

SEQ ID NO: 2390994 - DNA, 25 bp, Homo sapien
ttatcatctgcgaggtcgaagggac

SEQ ID NO: 2390995 - DNA, 25 bp, Homo sapien
tctcgtttttgctgaaccttagatt

SEQ ID NO: 2390996 - DNA, 25 bp, Homo sapien
gattttgtgatggagcctaaatcca

SEQ ID NO: 2390997 - DNA, 25 bp, Homo sapien
gagagcctctcgtttttgctgaacc

SEQ ID NO: 2390998 - DNA, 25 bp, Homo sapien
ccttagattttgtgatggagcctaa

SEQ ID NO: 2390999 - DNA, 25 bp, Homo sapien
gctgtagcagttaaggacacagaat

SEQ ID NO: 2391000 - DNA, 25 bp, Homo sapien
gggctgtagcagttaaggacacaga

SEQ ID NO: 2391001 - DNA, 25 bp, Homo sapien
tgtagcagttaaggacacagaatcc

SEQ ID NO: 2391002 - DNA, 25 bp, Homo sapien
ccagggctgtagcagttaaggacac

SEQ ID NO: 2391003 - DNA, 25 bp, Homo sapien
tgtccttcctcaggattcgaaatgg

SEQ ID NO: 2391004 - DNA, 25 bp, Homo sapien
tcctcaggattcgaaatggggccag

SEQ ID NO: 2391005 - DNA, 25 bp, Homo sapien
aggattcgaaatggggccagtcaca

SEQ ID NO: 2391006 - DNA, 25 bp, Homo sapien
cagctctgtgaagggggccagggtc

SEQ ID NO: 2391007 - DNA, 25 bp, Homo sapien
tcttaacccttagcgtgagcagatg

SEQ ID NO: 2391008 - DNA, 25 bp, Homo sapien
ggtagaactgcccatgccaagaggg

SEQ ID NO: 2391009 - DNA, 25 bp, Homo sapien
ccttagcgtgagcagatggtagaac

SEQ ID NO: 2391010 - DNA, 25 bp, Homo sapien
cctgctgcaagctcttaacccttag

SEQ ID NO: 2391011 - DNA, 25 bp, Homo sapien
caagtcagagtacagagggcatggc

SEQ ID NO: 2391012 - DNA, 25 bp, Homo sapien
tctgtggatctcagggccatctcag

SEQ ID NO: 2391013 - DNA, 25 bp, Homo sapien
tagaaaggaatagctcagacggagt

SEQ ID NO: 2391014 - DNA, 25 bp, Homo sapien
tgggaaccagtaccctaacagagga

SEQ ID NO: 2391015 - DNA, 25 bp, Homo sapien
aggatcacaggccttgggaaagcca

SEQ ID NO: 2391016 - DNA, 25 bp, Homo sapien
ttcattatttccatcccgggtcaag

SEQ ID NO: 2391017 - DNA, 25 bp, Homo sapien
cagatgatggtgtcaacaagaccag

SEQ ID NO: 2391018 - DNA, 25 bp, Homo sapien
tgagatggcccagccagatctggct

SEQ ID NO: 2391019 - DNA, 25 bp, Homo sapien
caggacgggctgcaaacggggaggt

SEQ ID NO: 2391020 - DNA, 25 bp, Homo sapien
aggaacccctggcaatgcagacagg

SEQ ID NO: 2391021 - DNA, 25 bp, Homo sapien
ggaacccctggcaatgcagacaggc

SEQ ID NO: 2391022 - DNA, 25 bp, Homo sapien
gctgcaaacggggaggtctgcatcc

SEQ ID NO: 2391023 - DNA, 25 bp, Homo sapien
gtagagcaagcattctgccccagca

SEQ ID NO: 2391024 - DNA, 25 bp, Homo sapien
tcagtagagcaagcattctgcccca

SEQ ID NO: 2391025 - DNA, 25 bp, Homo sapien
tcaggaggagatatcctgtgtgagc

SEQ ID NO: 2391026 - DNA, 25 bp, Homo sapien
caggaggagatatcctgtgtgagca

SEQ ID NO: 2391027 - DNA, 25 bp, Homo sapien
catatacatcatgactcagatccca

SEQ ID NO: 2391028 - DNA, 25 bp, Homo sapien
ccatttgctgacttggaactgaagc

SEQ ID NO: 2391029 - DNA, 25 bp, Homo sapien
tcatgactcagatcccatttgctga

SEQ ID NO: 2391030 - DNA, 25 bp, Homo sapien
tacatcatgactcagatcccatttg

SEQ ID NO: 2391031 - DNA, 25 bp, Homo sapien
catctattctttaaagaactctgtg

SEQ ID NO: 2391032 - DNA, 25 bp, Homo sapien
tctgtgccctaagttacgatagagg

SEQ ID NO: 2391033 - DNA, 25 bp, Homo sapien
aagttacgatagaggaagaggcaca

SEQ ID NO: 2391034 - DNA, 25 bp, Homo sapien
tgccctaagttacgatagaggaaga

SEQ ID NO: 2391035 - DNA, 25 bp, Homo sapien
tcagctcaaggctagcttctctggg

SEQ ID NO: 2391036 - DNA, 25 bp, Homo sapien
aatttcagcaggttcatcgcctcct

SEQ ID NO: 2391037 - DNA, 25 bp, Homo sapien
tattgcaaaggtagacatcagctca

SEQ ID NO: 2391038 - DNA, 25 bp, Homo sapien
catggaacttgtaatgagacctcta

SEQ ID NO: 2391039 - DNA, 25 bp, Homo sapien
gctccgccgcgacgcggctcacaaa

SEQ ID NO: 2391040 - DNA, 25 bp, Homo sapien
ctacatccgctccgccgcgacgcgg

SEQ ID NO: 2391041 - DNA, 25 bp, Homo sapien
atccgctccgccgcgacgcggctca

SEQ ID NO: 2391042 - DNA, 25 bp, Homo sapien
ccgctccgccgcgacgcggctcaca

SEQ ID NO: 2391043 - DNA, 25 bp, Homo sapien
ccgaggctcggagagatgaagcgtt

SEQ ID NO: 2391044 - DNA, 25 bp, Homo sapien
cgtgtcgtcattttagggctggaga

SEQ ID NO: 2391045 - DNA, 25 bp, Homo sapien
tgtacggccaccgagcggctgcttt

SEQ ID NO: 2391046 - DNA, 25 bp, Homo sapien
caacgaagccaaagccaacgttttg

SEQ ID NO: 2391047 - DNA, 25 bp, Homo sapien
agtgctgtgcgccactcttcacagc

SEQ ID NO: 2391048 - DNA, 25 bp, Homo sapien
gtgctgctgctacccatcccagtct

SEQ ID NO: 2391049 - DNA, 25 bp, Homo sapien
cctggcagggctaccagtgaaggca

SEQ ID NO: 2391050 - DNA, 25 bp, Homo sapien
agatgcgcaggcttagctccctggc

SEQ ID NO: 2391051 - DNA, 25 bp, Homo sapien
tgaaggtcgatgttttctcttgctg

SEQ ID NO: 2391052 - DNA, 25 bp, Homo sapien
ggaacagactgcgtgggctcctcca

SEQ ID NO: 2391053 - DNA, 25 bp, Homo sapien
ggctccgccgtctgagtctctgctg

SEQ ID NO: 2391054 - DNA, 25 bp, Homo sapien
accgggtgccgggaacagactgcgt

SEQ ID NO: 2391055 - DNA, 25 bp, Homo sapien
tcaagtcccttcacacgcaccgggt

SEQ ID NO: 2391056 - DNA, 25 bp, Homo sapien
cttcgggtgggagagagcacacagc

SEQ ID NO: 2391057 - DNA, 25 bp, Homo sapien
ttcgggtgggagagagcacacagct

SEQ ID NO: 2391058 - DNA, 25 bp, Homo sapien
cgggtgggagagagcacacagctgg

SEQ ID NO: 2391059 - DNA, 25 bp, Homo sapien
tcgggtgggagagagcacacagctg

SEQ ID NO: 2391060 - DNA, 25 bp, Homo sapien
tcatccctctgatgtgggatgcccg

SEQ ID NO: 2391061 - DNA, 25 bp, Homo sapien
ctgatgtgggatgcccgtcttggct

SEQ ID NO: 2391062 - DNA, 25 bp, Homo sapien
tccctctgatgtgggatgcccgtct

SEQ ID NO: 2391063 - DNA, 25 bp, Homo sapien
cctctgatgtgggatgcccgtcttg

SEQ ID NO: 2391064 - DNA, 25 bp, Homo sapien
gaggtgtgcacctgcacacacgtgt

SEQ ID NO: 2391065 - DNA, 25 bp, Homo sapien
acctgcacacacgtgtgagtgtatg

SEQ ID NO: 2391066 - DNA, 25 bp, Homo sapien
ggtgtgcacctgcacacacgtgtga

SEQ ID NO: 2391067 - DNA, 25 bp, Homo sapien
gtgcacctgcacacacgtgtgagtg

SEQ ID NO: 2391068 - DNA, 25 bp, Homo sapien
catgcacgccctggtgagacaactg

SEQ ID NO: 2391069 - DNA, 25 bp, Homo sapien
tgctgaaactgcacctacgtggagg

SEQ ID NO: 2391070 - DNA, 25 bp, Homo sapien
cataaaaacagaccggagttggctc

SEQ ID NO: 2391071 - DNA, 25 bp, Homo sapien
gagttggctccacaggctatagtct

SEQ ID NO: 2391072 - DNA, 25 bp, Homo sapien
aaagaaggtttacaaagcacagtca

SEQ ID NO: 2391073 - DNA, 25 bp, Homo sapien
aaaataattagccatgcgcggtggc

SEQ ID NO: 2391074 - DNA, 25 bp, Homo sapien
gcacagtcaaaattatagccactta

SEQ ID NO: 2391075 - DNA, 25 bp, Homo sapien
gaaggtttacaaagcacagtcaaaa

SEQ ID NO: 2391076 - DNA, 25 bp, Homo sapien
gcactttaggaagttgaggttcgag

SEQ ID NO: 2391077 - DNA, 25 bp, Homo sapien
aggaagttgaggttcgaggtgggtg

SEQ ID NO: 2391078 - DNA, 25 bp, Homo sapien
taaaaccacccggaggccagacaca

SEQ ID NO: 2391079 - DNA, 25 bp, Homo sapien
ctttaggaagttgaggttcgaggtg

SEQ ID NO: 2391080 - DNA, 25 bp, Homo sapien
tggaagatctaagaacgatatgcac

SEQ ID NO: 2391081 - DNA, 25 bp, Homo sapien
caatacatgtaagtggaagtgttac

SEQ ID NO: 2391082 - DNA, 25 bp, Homo sapien
acaatttaccgagctcttccctttg

SEQ ID NO: 2391083 - DNA, 25 bp, Homo sapien
cttccctttgctgtagtgatcatca

SEQ ID NO: 2391084 - DNA, 25 bp, Homo sapien
catccggcgttcacaaatgcatctg

SEQ ID NO: 2391085 - DNA, 25 bp, Homo sapien
cttccacgtcaacacggggagtgct

SEQ ID NO: 2391086 - DNA, 25 bp, Homo sapien
tgcatctgtgcatggatcacttttt

SEQ ID NO: 2391087 - DNA, 25 bp, Homo sapien
tcaacacggggagtgctgcgccaag

SEQ ID NO: 2391088 - DNA, 25 bp, Homo sapien
tgaagatggagaacgcaatgggttt

SEQ ID NO: 2391089 - DNA, 25 bp, Homo sapien
tctgaagatggagaacgcaatgggt

SEQ ID NO: 2391090 - DNA, 25 bp, Homo sapien
gatggagaacgcaatgggtttgtgc

SEQ ID NO: 2391091 - DNA, 25 bp, Homo sapien
ccgcaacaccaatgagacttctgaa

SEQ ID NO: 2391092 - DNA, 25 bp, Homo sapien
gtgtggtaataatgccaggcttctc

SEQ ID NO: 2391093 - DNA, 25 bp, Homo sapien
gaactgtcagaagcctgtgtggtaa

SEQ ID NO: 2391094 - DNA, 25 bp, Homo sapien
tgtgtggtaataatgccaggcttct

SEQ ID NO: 2391095 - DNA, 25 bp, Homo sapien
agcccacagcgtaagcgtagcagga

SEQ ID NO: 2391096 - DNA, 25 bp, Homo sapien
cgtaagcgtagcaggactaacacgt

SEQ ID NO: 2391097 - DNA, 25 bp, Homo sapien
ttgatagaacgccatcttcacaggt

SEQ ID NO: 2391098 - DNA, 25 bp, Homo sapien
gtaaactcttcggaatcctccagcc

SEQ ID NO: 2391099 - DNA, 25 bp, Homo sapien
gctcacacagatgggatagtggcag

SEQ ID NO: 2391100 - DNA, 25 bp, Homo sapien
agatgggatagtggcaggactctca

SEQ ID NO: 2391101 - DNA, 25 bp, Homo sapien
cacagatgggatagtggcaggactc

SEQ ID NO: 2391102 - DNA, 25 bp, Homo sapien
tcacacagatgggatagtggcagga

SEQ ID NO: 2391103 - DNA, 25 bp, Homo sapien
gccttctatataggagaatcaccga

SEQ ID NO: 2391104 - DNA, 25 bp, Homo sapien
tttcctgtcttgaatttgtatcagc

SEQ ID NO: 2391105 - DNA, 25 bp, Homo sapien
gaatttgtatcagctatgccttcta

SEQ ID NO: 2391106 - DNA, 25 bp, Homo sapien
cagctatgccttctatataggagaa

SEQ ID NO: 2391107 - DNA, 25 bp, Homo sapien
ggatggctacactgagaacctgaaa

SEQ ID NO: 2391108 - DNA, 25 bp, Homo sapien
tacttgaagccaaatcgcattccca

SEQ ID NO: 2391109 - DNA, 25 bp, Homo sapien
gaagccaaatcgcattcccaggcag

SEQ ID NO: 2391110 - DNA, 25 bp, Homo sapien
gaaatagcgtgcaaataactctctt

SEQ ID NO: 2391111 - DNA, 25 bp, Homo sapien
cagtcattgatttggagtcttctcc

SEQ ID NO: 2391112 - DNA, 25 bp, Homo sapien
cagagctagtcctgatggaggtcac

SEQ ID NO: 2391113 - DNA, 25 bp, Homo sapien
gggctcatggcatccacttaatgaa

SEQ ID NO: 2391114 - DNA, 25 bp, Homo sapien
tggaggtcaccagacaagtcttgcc

SEQ ID NO: 2391115 - DNA, 25 bp, Homo sapien
tagaccatcgcagtttcagatacct

SEQ ID NO: 2391116 - DNA, 25 bp, Homo sapien
gcttcacagtgccatgcagacctag

SEQ ID NO: 2391117 - DNA, 25 bp, Homo sapien
tctgacctacaccttaggacggcta

SEQ ID NO: 2391118 - DNA, 25 bp, Homo sapien
cgttagagttaacccaagacactgc

SEQ ID NO: 2391119 - DNA, 25 bp, Homo sapien
ctgctagtaaagttagtcactgtgt

SEQ ID NO: 2391120 - DNA, 25 bp, Homo sapien
actgtgtaggtgactctacggccga

SEQ ID NO: 2391121 - DNA, 25 bp, Homo sapien
actcatcccctttctgtgtctcagt

SEQ ID NO: 2391122 - DNA, 25 bp, Homo sapien
taggtgactctacggccgaactcat

SEQ ID NO: 2391123 - DNA, 25 bp, Homo sapien
aaagctgtctcctaggcaagtgtgg

SEQ ID NO: 2391124 - DNA, 25 bp, Homo sapien
gacttgtgtccaatgcagtgtggcc

SEQ ID NO: 2391125 - DNA, 25 bp, Homo sapien
cagggctcagtaaacaggaacaggc

SEQ ID NO: 2391126 - DNA, 25 bp, Homo sapien
tcctagtgaagcaacaattgggtaa

SEQ ID NO: 2391127 - DNA, 25 bp, Homo sapien
gttgcgtacgttttcagcgcttccc

SEQ ID NO: 2391128 - DNA, 25 bp, Homo sapien
gcgtacgttttcagcgcttcccgct

SEQ ID NO: 2391129 - DNA, 25 bp, Homo sapien
ttcccgctctccaccggttggactg

SEQ ID NO: 2391130 - DNA, 25 bp, Homo sapien
tctccaccggttggactgaggcttt

SEQ ID NO: 2391131 - DNA, 25 bp, Homo sapien
aaaaacattccatggcggcaagccg

SEQ ID NO: 2391132 - DNA, 25 bp, Homo sapien
cccgggcccagagcctttgtagaca

SEQ ID NO: 2391133 - DNA, 25 bp, Homo sapien
atggatccacatttcccgggcccag

SEQ ID NO: 2391134 - DNA, 25 bp, Homo sapien
tcttgagtagttgcgaagagcacag

SEQ ID NO: 2391135 - DNA, 25 bp, Homo sapien
tgttgtttcacgaagccaccagcag

SEQ ID NO: 2391136 - DNA, 25 bp, Homo sapien
ggtcaaagacccatagatccgtaga

SEQ ID NO: 2391137 - DNA, 25 bp, Homo sapien
gatccccgatttcagtaaggcagcc

SEQ ID NO: 2391138 - DNA, 25 bp, Homo sapien
gatagagttcactaggatccccgat

SEQ ID NO: 2391139 - DNA, 25 bp, Homo sapien
ctggtcccgtgctcgcggtgccgcc

SEQ ID NO: 2391140 - DNA, 25 bp, Homo sapien
tagcccgcccagctcggcgagcggc

SEQ ID NO: 2391141 - DNA, 25 bp, Homo sapien
gggcctagcccgcccagctcggcga

SEQ ID NO: 2391142 - DNA, 25 bp, Homo sapien
gcctagcccgcccagctcggcgagc

SEQ ID NO: 2391143 - DNA, 25 bp, Homo sapien
cctcgactcggtgccggcccctggc

SEQ ID NO: 2391144 - DNA, 25 bp, Homo sapien
cgcctcgactcggtgccggcccctg

SEQ ID NO: 2391145 - DNA, 25 bp, Homo sapien
gcctcgactcggtgccggcccctgg

SEQ ID NO: 2391146 - DNA, 25 bp, Homo sapien
ccaaggccgtgggaatgtctaacga

SEQ ID NO: 2391147 - DNA, 25 bp, Homo sapien
tgacatcgaaatcggcagaggctcc

SEQ ID NO: 2391148 - DNA, 25 bp, Homo sapien
gatggccgctttctcaagtttgaca

SEQ ID NO: 2391149 - DNA, 25 bp, Homo sapien
tctggacactgaaaccaccgtggaa

SEQ ID NO: 2391150 - DNA, 25 bp, Homo sapien
tcaccgattaggagtattggcaaat

SEQ ID NO: 2391151 - DNA, 25 bp, Homo sapien
taggatgagaatcagcgtaactttc

SEQ ID NO: 2391152 - DNA, 25 bp, Homo sapien
ttctgacccgtagtaacacagtctg

SEQ ID NO: 2391153 - DNA, 25 bp, Homo sapien
tgcaagagcctagtcatttaaaatt

SEQ ID NO: 2391154 - DNA, 25 bp, Homo sapien
tgtgtagaaagtagagagtaactga

SEQ ID NO: 2391155 - DNA, 25 bp, Homo sapien
agtagtccccactcttcttcttagg

SEQ ID NO: 2391156 - DNA, 25 bp, Homo sapien
gggcggactgttcttatgtgtagaa

SEQ ID NO: 2391157 - DNA, 25 bp, Homo sapien
aagtgtagagattccagtagtcccc

SEQ ID NO: 2391158 - DNA, 25 bp, Homo sapien
tttggacagtgggaagtgaagcctc

SEQ ID NO: 2391159 - DNA, 25 bp, Homo sapien
ggacctaaactagggagataataga

SEQ ID NO: 2391160 - DNA, 25 bp, Homo sapien
ctctagttaggatatgagtgtgaga

SEQ ID NO: 2391161 - DNA, 25 bp, Homo sapien
cctcaagtaagggagggctactcta

SEQ ID NO: 2391162 - DNA, 25 bp, Homo sapien
aagtctgttccaagccaattactgc

SEQ ID NO: 2391163 - DNA, 25 bp, Homo sapien
aaaccctaacctcaccattatgcag

SEQ ID NO: 2391164 - DNA, 25 bp, Homo sapien
aagtgtaggctgtttattctggtaa

SEQ ID NO: 2391165 - DNA, 25 bp, Homo sapien
tgataaggcgataaggttaggtaac

SEQ ID NO: 2391166 - DNA, 25 bp, Homo sapien
agttcagctatttattagcattgag

SEQ ID NO: 2391167 - DNA, 25 bp, Homo sapien
aactgtagttcagctatttattagc

SEQ ID NO: 2391168 - DNA, 25 bp, Homo sapien
agataaactgtagttcagctattta

SEQ ID NO: 2391169 - DNA, 25 bp, Homo sapien
aaagataaactgtagttcagctatt

SEQ ID NO: 2391170 - DNA, 25 bp, Homo sapien
gcataagggcctttgatagtcattg

SEQ ID NO: 2391171 - DNA, 25 bp, Homo sapien
attacaggcttgagaaaccctctta

SEQ ID NO: 2391172 - DNA, 25 bp, Homo sapien
taatttaaggactgcagaagcttac

SEQ ID NO: 2391173 - DNA, 25 bp, Homo sapien
tccaccttagttattgtaaccatcc

SEQ ID NO: 2391174 - DNA, 25 bp, Homo sapien
cacagggggaaaatactgtttactg

SEQ ID NO: 2391175 - DNA, 25 bp, Homo sapien
cttggtacaatttttggaagaatga

SEQ ID NO: 2391176 - DNA, 25 bp, Homo sapien
tggaagaatgaaaaactgcttttcc

SEQ ID NO: 2391177 - DNA, 25 bp, Homo sapien
aatgaaaaactgcttttccacaggg

SEQ ID NO: 2391178 - DNA, 25 bp, Homo sapien
tactcaataaccatacttggggctg

SEQ ID NO: 2391179 - DNA, 25 bp, Homo sapien
gcgtggtgacacatacatgcctgaa

SEQ ID NO: 2391180 - DNA, 25 bp, Homo sapien
taacatatctcggttcacaccagca

SEQ ID NO: 2391181 - DNA, 25 bp, Homo sapien
tcctggcctaaatatctttcagcat

SEQ ID NO: 2391182 - DNA, 25 bp, Homo sapien
caatgcttcatatcttactggtcag

SEQ ID NO: 2391183 - DNA, 25 bp, Homo sapien
tcagcatgtatttcaggctaatgcc

SEQ ID NO: 2391184 - DNA, 25 bp, Homo sapien
tttcatagatggtaaggcagtgtca

SEQ ID NO: 2391185 - DNA, 25 bp, Homo sapien
ggctaatgccccttatggccctatt

SEQ ID NO: 2391186 - DNA, 25 bp, Homo sapien
tgggaagtgttctaattcttggata

SEQ ID NO: 2391187 - DNA, 25 bp, Homo sapien
cgtggtatttctccccatctcctag

SEQ ID NO: 2391188 - DNA, 25 bp, Homo sapien
caactacttgcctgatattttaggt

SEQ ID NO: 2391189 - DNA, 25 bp, Homo sapien
ttttctctaccatctattgtacggg

SEQ ID NO: 2391190 - DNA, 25 bp, Homo sapien
gcttttattagtttgtgaccatgga

SEQ ID NO: 2391191 - DNA, 25 bp, Homo sapien
tagaatcctttcgtaacaagtgccc

SEQ ID NO: 2391192 - DNA, 25 bp, Homo sapien
tattttgatatgacgtagttgtggc

SEQ ID NO: 2391193 - DNA, 25 bp, Homo sapien
tactatttttgagcaaggagcttgg

SEQ ID NO: 2391194 - DNA, 25 bp, Homo sapien
gcccggccgggagcaataattcttc

SEQ ID NO: 2391195 - DNA, 25 bp, Homo sapien
ccggccgggagcaataattcttcta

SEQ ID NO: 2391196 - DNA, 25 bp, Homo sapien
cccggccgggagcaataattcttct

SEQ ID NO: 2391197 - DNA, 25 bp, Homo sapien
cggccgggagcaataattcttctat

SEQ ID NO: 2391198 - DNA, 25 bp, Homo sapien
tcttcagcatcccaatattgttaga

SEQ ID NO: 2391199 - DNA, 25 bp, Homo sapien
gaaagaagtgcattgttttggtgac

SEQ ID NO: 2391200 - DNA, 25 bp, Homo sapien
tatgacgtctggaacacttaaaacg

SEQ ID NO: 2391201 - DNA, 25 bp, Homo sapien
tggtgactgaacttatgacgtctgg

SEQ ID NO: 2391202 - DNA, 25 bp, Homo sapien
taactttttgaggaggcatcctacc

SEQ ID NO: 2391203 - DNA, 25 bp, Homo sapien
tctaatccgtgaacacagggtgtct

SEQ ID NO: 2391204 - DNA, 25 bp, Homo sapien
gatttggatgctcaagcctgtgcca

SEQ ID NO: 2391205 - DNA, 25 bp, Homo sapien
tcctaccgggagtgacatgatacct

SEQ ID NO: 2391206 - DNA, 25 bp, Homo sapien
tctggcaaccctgaagcgggcttct

SEQ ID NO: 2391207 - DNA, 25 bp, Homo sapien
tcagtcaagattggagacctcggtc

SEQ ID NO: 2391208 - DNA, 25 bp, Homo sapien
tatgtttcaggtgtaccttggagcc

SEQ ID NO: 2391209 - DNA, 25 bp, Homo sapien
gaactcaggaggtgatccattgtac

SEQ ID NO: 2391210 - DNA, 25 bp, Homo sapien
tgtgcatgcttgagatggctacatc

SEQ ID NO: 2391211 - DNA, 25 bp, Homo sapien
tctgaatatccttactcggagtgcc

SEQ ID NO: 2391212 - DNA, 25 bp, Homo sapien
catggcccctgagatgtatgaggag

SEQ ID NO: 2391213 - DNA, 25 bp, Homo sapien
aatgctgcacagatctaccgtcgcg

SEQ ID NO: 2391214 - DNA, 25 bp, Homo sapien
cagcccatgacataagtatggtttt

SEQ ID NO: 2391215 - DNA, 25 bp, Homo sapien
caaactatgcttcttggccaaattc

SEQ ID NO: 2391216 - DNA, 25 bp, Homo sapien
tctaaatggagtagcaaactatgct

SEQ ID NO: 2391217 - DNA, 25 bp, Homo sapien
ctggcccattctgtcgtattctaaa

SEQ ID NO: 2391218 - DNA, 25 bp, Homo sapien
gaacctggaaagactggtgtcactg

SEQ ID NO: 2391219 - DNA, 25 bp, Homo sapien
gatagtaagtttaacagaacctgga

SEQ ID NO: 2391220 - DNA, 25 bp, Homo sapien
tgtattctcagtatagtgtttaacc

SEQ ID NO: 2391221 - DNA, 25 bp, Homo sapien
ccaaatgcaaactcaaaagctcagt

SEQ ID NO: 2391222 - DNA, 25 bp, Homo sapien
tgtataccctggctattagtaacca

SEQ ID NO: 2391223 - DNA, 25 bp, Homo sapien
gaaacatgcgtggttatccattgga

SEQ ID NO: 2391224 - DNA, 25 bp, Homo sapien
catcccaggtctattgtgtataccc

SEQ ID NO: 2391225 - DNA, 25 bp, Homo sapien
cattggaagagatcgatcctagggc

SEQ ID NO: 2391226 - DNA, 25 bp, Homo sapien
tgacaaagtagcaattcctgaagtg

SEQ ID NO: 2391227 - DNA, 25 bp, Homo sapien
ggatgcatacgacaaaacaaagatg

SEQ ID NO: 2391228 - DNA, 25 bp, Homo sapien
gtgaaggaaattattgaaggatgca

SEQ ID NO: 2391229 - DNA, 25 bp, Homo sapien
aaagtagcaattcctgaagtgaagg

SEQ ID NO: 2391230 - DNA, 25 bp, Homo sapien
ccataaaattatggctacgtattga

SEQ ID NO: 2391231 - DNA, 25 bp, Homo sapien
gatttagagagagatgtcccagaag

SEQ ID NO: 2391232 - DNA, 25 bp, Homo sapien
caggagtacgggtagaattagcaga

SEQ ID NO: 2391233 - DNA, 25 bp, Homo sapien
caaagaccttttgaaccatgccttc

SEQ ID NO: 2391234 - DNA, 25 bp, Homo sapien
tgaaggtgatcacaagaccatggct

SEQ ID NO: 2391235 - DNA, 25 bp, Homo sapien
cattaattaagaggaaacgagagca

SEQ ID NO: 2391236 - DNA, 25 bp, Homo sapien
gaccatggctaaagctatcaaagac

SEQ ID NO: 2391237 - DNA, 25 bp, Homo sapien
agagcagcggcagttggtacgggag

SEQ ID NO: 2391238 - DNA, 25 bp, Homo sapien
tagccatattaaaccctgtgcctga

SEQ ID NO: 2391239 - DNA, 25 bp, Homo sapien
tattgatcatactgccttatagcca

SEQ ID NO: 2391240 - DNA, 25 bp, Homo sapien
aaatacttggtattggtgggccaca

SEQ ID NO: 2391241 - DNA, 25 bp, Homo sapien
gatttggcccaaagcattctacaca

SEQ ID NO: 2391242 - DNA, 25 bp, Homo sapien
ctgaggtttccagagctcttgcaaa

SEQ ID NO: 2391243 - DNA, 25 bp, Homo sapien
taaacctgtccttgactgacaacgc

SEQ ID NO: 2391244 - DNA, 25 bp, Homo sapien
aaaactgactttgtggaattgggag

SEQ ID NO: 2391245 - DNA, 25 bp, Homo sapien
tattcattgttttccctgtctgcac

SEQ ID NO: 2391246 - DNA, 25 bp, Homo sapien
gaactacccagttgtgcatgtctga

SEQ ID NO: 2391247 - DNA, 25 bp, Homo sapien
tgatacagcctcagtccatggcgca

SEQ ID NO: 2391248 - DNA, 25 bp, Homo sapien
gaaagtagccatttcccagcggcgt

SEQ ID NO: 2391249 - DNA, 25 bp, Homo sapien
tggtggcagcccaactaactggaca

SEQ ID NO: 2391250 - DNA, 25 bp, Homo sapien
tatcaactcctcatgtgtctacggc

SEQ ID NO: 2391251 - DNA, 25 bp, Homo sapien
tctacggctcagacaggtttctcat

SEQ ID NO: 2391252 - DNA, 25 bp, Homo sapien
ggcgaacctcagatcccagttgcga

SEQ ID NO: 2391253 - DNA, 25 bp, Homo sapien
cagttgcgacacaaccctcggttgt

SEQ ID NO: 2391254 - DNA, 25 bp, Homo sapien
tcctggcaacatcccagagtccggg

SEQ ID NO: 2391255 - DNA, 25 bp, Homo sapien
ctgctccaggtcaaggtaataaagc

SEQ ID NO: 2391256 - DNA, 25 bp, Homo sapien
tccgggcagaatcagctgttacagc

SEQ ID NO: 2391257 - DNA, 25 bp, Homo sapien
tgggagactagctgaccagaacaca

SEQ ID NO: 2391258 - DNA, 25 bp, Homo sapien
ccatagcggtaagaagcatgtgacc

SEQ ID NO: 2391259 - DNA, 25 bp, Homo sapien
cagtagttccgtgtcttgccatagc

SEQ ID NO: 2391260 - DNA, 25 bp, Homo sapien
aatagcaatccccttgtggctccag

SEQ ID NO: 2391261 - DNA, 25 bp, Homo sapien
ccccaggtggtaggatataagcttg

SEQ ID NO: 2391262 - DNA, 25 bp, Homo sapien
cagcagagccgaaatcaggcaggca

SEQ ID NO: 2391263 - DNA, 25 bp, Homo sapien
taacacgtgagatctggtaagacag

SEQ ID NO: 2391264 - DNA, 25 bp, Homo sapien
tcttgtcgcttctacatgggagtgc

SEQ ID NO: 2391265 - DNA, 25 bp, Homo sapien
gaatccttgagccaattgaaactga

SEQ ID NO: 2391266 - DNA, 25 bp, Homo sapien
cattgagccctcagaatggagagtc

SEQ ID NO: 2391267 - DNA, 25 bp, Homo sapien
tctccatgacctcgaacctgggtgg

SEQ ID NO: 2391268 - DNA, 25 bp, Homo sapien
tgcggaccacttagacctagagaca

SEQ ID NO: 2391269 - DNA, 25 bp, Homo sapien
tagaagtatatgttagcgccacaca

SEQ ID NO: 2391270 - DNA, 25 bp, Homo sapien
ggaaacaaacgtgatgcctggccag

SEQ ID NO: 2391271 - DNA, 25 bp, Homo sapien
aaagttctgtttcgggaatagtgag

SEQ ID NO: 2391272 - DNA, 25 bp, Homo sapien
gttggcatcagtggttaaaaacaga

SEQ ID NO: 2391273 - DNA, 25 bp, Homo sapien
caggtgtaagatgagtagggtggga

SEQ ID NO: 2391274 - DNA, 25 bp, Homo sapien
ccaaatggttgcaggatcataatct

SEQ ID NO: 2391275 - DNA, 25 bp, Homo sapien
tactccccgtaagtaataactgcaa

SEQ ID NO: 2391276 - DNA, 25 bp, Homo sapien
cagtgctatgcctccttgtaatggg

SEQ ID NO: 2391277 - DNA, 25 bp, Homo sapien
gagctttccggaaatactgtcctaa

SEQ ID NO: 2391278 - DNA, 25 bp, Homo sapien
gctggaggctcctgtaccctgttca

SEQ ID NO: 2391279 - DNA, 25 bp, Homo sapien
tgtaccctgttcattccttaagggc

SEQ ID NO: 2391280 - DNA, 25 bp, Homo sapien
gaggctcctgtaccctgttcattcc

SEQ ID NO: 2391281 - DNA, 25 bp, Homo sapien
cctgttcattccttaagggccctgc

SEQ ID NO: 2391282 - DNA, 25 bp, Homo sapien
aacatactttataccagaggagcag

SEQ ID NO: 2391283 - DNA, 25 bp, Homo sapien
tactttataccagaggagcagtgga

SEQ ID NO: 2391284 - DNA, 25 bp, Homo sapien
caagagtgaaacatactttatacca

SEQ ID NO: 2391285 - DNA, 25 bp, Homo sapien
tgaaacatactttataccagaggag

SEQ ID NO: 2391286 - DNA, 25 bp, Homo sapien
tcaggttcacagcttcccaaatggg

SEQ ID NO: 2391287 - DNA, 25 bp, Homo sapien
gaatagaaacggtcggctgccggct

SEQ ID NO: 2391288 - DNA, 25 bp, Homo sapien
tgtgacaagtcgcaaagcaccaggc

SEQ ID NO: 2391289 - DNA, 25 bp, Homo sapien
gaaacagttgcgtttgagcatccct

SEQ ID NO: 2391290 - DNA, 25 bp, Homo sapien
tcatgtcctggctcttcctatgaga

SEQ ID NO: 2391291 - DNA, 25 bp, Homo sapien
ttcatgtcctggctcttcctatgag

SEQ ID NO: 2391292 - DNA, 25 bp, Homo sapien
gtcctggctcttcctatgagattcc

SEQ ID NO: 2391293 - DNA, 25 bp, Homo sapien
ctggctcttcctatgagattcccag

SEQ ID NO: 2391294 - DNA, 25 bp, Homo sapien
tctccatgcagtcgtttccgcttcc

SEQ ID NO: 2391295 - DNA, 25 bp, Homo sapien
catgcagtcgtttccgcttcctgct

SEQ ID NO: 2391296 - DNA, 25 bp, Homo sapien
gctctccatgcagtcgtttccgctt

SEQ ID NO: 2391297 - DNA, 25 bp, Homo sapien
tccatgcagtcgtttccgcttcctg

SEQ ID NO: 2391298 - DNA, 25 bp, Homo sapien
ttttgtgcctaaacacctctctgct

SEQ ID NO: 2391299 - DNA, 25 bp, Homo sapien
taatttttgtgcctaaacacctctc

SEQ ID NO: 2391300 - DNA, 25 bp, Homo sapien
atttttgtgcctaaacacctctctg

SEQ ID NO: 2391301 - DNA, 25 bp, Homo sapien
ttgtgcctaaacacctctctgctac

SEQ ID NO: 2391302 - DNA, 25 bp, Homo sapien
gggagtcacagcccacttttcagag

SEQ ID NO: 2391303 - DNA, 25 bp, Homo sapien
tctagacgagggcttgaccacacca

SEQ ID NO: 2391304 - DNA, 25 bp, Homo sapien
cagcgctataagtttggaggtccca

SEQ ID NO: 2391305 - DNA, 25 bp, Homo sapien
ctgttgtgcgttggtcagcgctata

SEQ ID NO: 2391306 - DNA, 25 bp, Homo sapien
gcaaataatgaagtattctcacaga

SEQ ID NO: 2391307 - DNA, 25 bp, Homo sapien
ggaaaagtgcgtcatcagcaaataa

SEQ ID NO: 2391308 - DNA, 25 bp, Homo sapien
gaggtcaaggaaaagtgcgtcatca

SEQ ID NO: 2391309 - DNA, 25 bp, Homo sapien
cagcaaataatgaagtattctcaca

SEQ ID NO: 2391310 - DNA, 25 bp, Homo sapien
tacaggagtgctgtgcgtcacagga

SEQ ID NO: 2391311 - DNA, 25 bp, Homo sapien
ggttctgagacagttacaggagtgc

SEQ ID NO: 2391312 - DNA, 25 bp, Homo sapien
tgcaaggaagtctttctccaggagt

SEQ ID NO: 2391313 - DNA, 25 bp, Homo sapien
cctgcaaggaagtctttctccagga

SEQ ID NO: 2391314 - DNA, 25 bp, Homo sapien
gtttgaattcttctcaccagtggga

SEQ ID NO: 2391315 - DNA, 25 bp, Homo sapien
cactctctgagtaaggactacctac

SEQ ID NO: 2391316 - DNA, 25 bp, Homo sapien
atctacccgggagcttctgcaatgg

SEQ ID NO: 2391317 - DNA, 25 bp, Homo sapien
tcgatgggtctgagacaagcccttt

SEQ ID NO: 2391318 - DNA, 25 bp, Homo sapien
gaaaaactgggcaaaagctcgatgg

SEQ ID NO: 2391319 - DNA, 25 bp, Homo sapien
tctgtatcactattcccactcaatc

SEQ ID NO: 2391320 - DNA, 25 bp, Homo sapien
tgtatcactattcccactcaatctg

SEQ ID NO: 2391321 - DNA, 25 bp, Homo sapien
tatcactattcccactcaatctgga

SEQ ID NO: 2391322 - DNA, 25 bp, Homo sapien
atctgtatcactattcccactcaat

SEQ ID NO: 2391323 - DNA, 25 bp, Homo sapien
cagggccctgctcccacccctcgct

SEQ ID NO: 2391324 - DNA, 25 bp, Homo sapien
cccagggccctgctcccacccctcg

SEQ ID NO: 2391325 - DNA, 25 bp, Homo sapien
ggccctgctcccacccctcgctcac

SEQ ID NO: 2391326 - DNA, 25 bp, Homo sapien
gggccctgctcccacccctcgctca

SEQ ID NO: 2391327 - DNA, 25 bp, Homo sapien
tcagctgacggcgtggagactcgaa

SEQ ID NO: 2391328 - DNA, 25 bp, Homo sapien
cgtggagactcgaacctgctgcttc

SEQ ID NO: 2391329 - DNA, 25 bp, Homo sapien
ctcttctcagctgacggcgtggaga

SEQ ID NO: 2391330 - DNA, 25 bp, Homo sapien
ctgacggcgtggagactcgaacctg

SEQ ID NO: 2391331 - DNA, 25 bp, Homo sapien
tctgccggagcttccgctggtgcgt

SEQ ID NO: 2391332 - DNA, 25 bp, Homo sapien
ttccgctggtgcgtggcctcgctct

SEQ ID NO: 2391333 - DNA, 25 bp, Homo sapien
cctcgctctccacggcggatgagct

SEQ ID NO: 2391334 - DNA, 25 bp, Homo sapien
gcctcgctctccacggcggatgagc

SEQ ID NO: 2391335 - DNA, 25 bp, Homo sapien
acgggctcctgagcaacagccgcgg

SEQ ID NO: 2391336 - DNA, 25 bp, Homo sapien
cgaggacgggctcctgagcaacagc

SEQ ID NO: 2391337 - DNA, 25 bp, Homo sapien
aggacgggctcctgagcaacagccg

SEQ ID NO: 2391338 - DNA, 25 bp, Homo sapien
cggcggcgaggacgggctcctgagc

SEQ ID NO: 2391339 - DNA, 25 bp, Homo sapien
tggaggcagccccgtgacacaggag

SEQ ID NO: 2391340 - DNA, 25 bp, Homo sapien
gagctgcagtcctggtccgccggta

SEQ ID NO: 2391341 - DNA, 25 bp, Homo sapien
cctggtccgccggtatcacagcatg

SEQ ID NO: 2391342 - DNA, 25 bp, Homo sapien
tgcagtcctggtccgccggtatcac

SEQ ID NO: 2391343 - DNA, 25 bp, Homo sapien
ccggtatcacagcatggctgggtct

SEQ ID NO: 2391344 - DNA, 25 bp, Homo sapien
ctccacagacggttcaagatcttgt

SEQ ID NO: 2391345 - DNA, 25 bp, Homo sapien
ctcctccacagacggttcaagatct

SEQ ID NO: 2391346 - DNA, 25 bp, Homo sapien
ttgcctcctccacagacggttcaag

SEQ ID NO: 2391347 - DNA, 25 bp, Homo sapien
gcctcctccacagacggttcaagat

SEQ ID NO: 2391348 - DNA, 25 bp, Homo sapien
ggcgataccaagtgctgtcaaagat

SEQ ID NO: 2391349 - DNA, 25 bp, Homo sapien
gaaactgctgctcgtaccatgaatg

SEQ ID NO: 2391350 - DNA, 25 bp, Homo sapien
tggaacttacgcaatgccacgtggg

SEQ ID NO: 2391351 - DNA, 25 bp, Homo sapien
taacagcatctctaatcgaaacagc

SEQ ID NO: 2391352 - DNA, 25 bp, Homo sapien
cgtgcactcgtctaacctgtctata

SEQ ID NO: 2391353 - DNA, 25 bp, Homo sapien
gcagtgactgcaaggaacacagctg

SEQ ID NO: 2391354 - DNA, 25 bp, Homo sapien
cagctgggccttctcggtactggca

SEQ ID NO: 2391355 - DNA, 25 bp, Homo sapien
tgagcatggatgatacgtgcactcg

SEQ ID NO: 2391356 - DNA, 25 bp, Homo sapien
ggtagtctttgtccagaatacagtt

SEQ ID NO: 2391357 - DNA, 25 bp, Homo sapien
gtttccaagtgcattcccaaaactc

SEQ ID NO: 2391358 - DNA, 25 bp, Homo sapien
gatctcaggtagtctttgtccagaa

SEQ ID NO: 2391359 - DNA, 25 bp, Homo sapien
gaatacagtttccaagtgcattccc

SEQ ID NO: 2391360 - DNA, 25 bp, Homo sapien
tgcactcgcagtaggagtgggaagg

SEQ ID NO: 2391361 - DNA, 25 bp, Homo sapien
tgtgcactcgcagtaggagtgggaa

SEQ ID NO: 2391362 - DNA, 25 bp, Homo sapien
cactcgcagtaggagtgggaaggcc

SEQ ID NO: 2391363 - DNA, 25 bp, Homo sapien
ctgtgcactcgcagtaggagtggga

SEQ ID NO: 2391364 - DNA, 25 bp, Homo sapien
ctgagtgcacggagaagagagagta

SEQ ID NO: 2391365 - DNA, 25 bp, Homo sapien
aagagagagtacaggattctaccac

SEQ ID NO: 2391366 - DNA, 25 bp, Homo sapien
ggattctaccacttactcccagcaa

SEQ ID NO: 2391367 - DNA, 25 bp, Homo sapien
tgcacggagaagagagagtacagga

SEQ ID NO: 2391368 - DNA, 25 bp, Homo sapien
gggtgagaattaccttccacgctgc

SEQ ID NO: 2391369 - DNA, 25 bp, Homo sapien
ccacgctgcttggatttttgaacca

SEQ ID NO: 2391370 - DNA, 25 bp, Homo sapien
aaaaatcgaaatctgctctgaagca

SEQ ID NO: 2391371 - DNA, 25 bp, Homo sapien
gaaatgacgcaggttagactcccag

SEQ ID NO: 2391372 - DNA, 25 bp, Homo sapien
ccctcactaacaccataaccaacat

SEQ ID NO: 2391373 - DNA, 25 bp, Homo sapien
ctcactaacaccataaccaacatct

SEQ ID NO: 2391374 - DNA, 25 bp, Homo sapien
aggccctcactaacaccataaccaa

SEQ ID NO: 2391375 - DNA, 25 bp, Homo sapien
ggccctcactaacaccataaccaac

SEQ ID NO: 2391376 - DNA, 25 bp, Homo sapien
acccactgatccttccgggcagcag

SEQ ID NO: 2391377 - DNA, 25 bp, Homo sapien
tccttccgggcagcaggtctactcc

SEQ ID NO: 2391378 - DNA, 25 bp, Homo sapien
ttccgggcagcaggtctactccatc

SEQ ID NO: 2391379 - DNA, 25 bp, Homo sapien
cttctcctaccacccactgatcctt

SEQ ID NO: 2391380 - DNA, 25 bp, Homo sapien
gactcccacgtagaacttgccattg

SEQ ID NO: 2391381 - DNA, 25 bp, Homo sapien
cttcagctggaccctcacaaatgca

SEQ ID NO: 2391382 - DNA, 25 bp, Homo sapien
tcacaaatgcacagactcccacgta

SEQ ID NO: 2391383 - DNA, 25 bp, Homo sapien
tgcacagactcccacgtagaacttg

SEQ ID NO: 2391384 - DNA, 25 bp, Homo sapien
acactgaccgctgggccacaaccat

SEQ ID NO: 2391385 - DNA, 25 bp, Homo sapien
accgctgggccacaaccattcctcc

SEQ ID NO: 2391386 - DNA, 25 bp, Homo sapien
tgggccacaaccattcctcctgctg

SEQ ID NO: 2391387 - DNA, 25 bp, Homo sapien
gctgggccacaaccattcctcctgc

SEQ ID NO: 2391388 - DNA, 25 bp, Homo sapien
ccacagcagactttcagcaggagct

SEQ ID NO: 2391389 - DNA, 25 bp, Homo sapien
ggacagtgcagaagtccccactgct

SEQ ID NO: 2391390 - DNA, 25 bp, Homo sapien
cacccacagcagactttcagcagga

SEQ ID NO: 2391391 - DNA, 25 bp, Homo sapien
tcagcaggagctggacagtgcagaa

SEQ ID NO: 2391392 - DNA, 25 bp, Homo sapien
ccagccattgtaaccaaacatctca

SEQ ID NO: 2391393 - DNA, 25 bp, Homo sapien
cagccattgtaaccaaacatctcat

SEQ ID NO: 2391394 - DNA, 25 bp, Homo sapien
gcccagccattgtaaccaaacatct

SEQ ID NO: 2391395 - DNA, 25 bp, Homo sapien
agccattgtaaccaaacatctcatt

SEQ ID NO: 2391396 - DNA, 25 bp, Homo sapien
gcctggtactcttctgctgtgtact

SEQ ID NO: 2391397 - DNA, 25 bp, Homo sapien
gctacttatgtattctgggcccagc

SEQ ID NO: 2391398 - DNA, 25 bp, Homo sapien
tggtactcttctgctgtgtactggc

SEQ ID NO: 2391399 - DNA, 25 bp, Homo sapien
tccgccagccatgcggctacttatg

SEQ ID NO: 2391400 - DNA, 25 bp, Homo sapien
agcaggatggctgtcacgtcctcca

SEQ ID NO: 2391401 - DNA, 25 bp, Homo sapien
aagcataacactgagccgccgccag

SEQ ID NO: 2391402 - DNA, 25 bp, Homo sapien
aaagcataacactgagccgccgcca

SEQ ID NO: 2391403 - DNA, 25 bp, Homo sapien
gatggctgtcacgtcctccaagaat

SEQ ID NO: 2391404 - DNA, 25 bp, Homo sapien
cttcaaatcttcttggccttgtgtg

SEQ ID NO: 2391405 - DNA, 25 bp, Homo sapien
gtcactttgtccactccagctgtca

SEQ ID NO: 2391406 - DNA, 25 bp, Homo sapien
ttggccttgtgtgtccttgaggccc

SEQ ID NO: 2391407 - DNA, 25 bp, Homo sapien
ttggtcactttgtccactccagctg

SEQ ID NO: 2391408 - DNA, 25 bp, Homo sapien
gatcaaacacgtctgggttataacc

SEQ ID NO: 2391409 - DNA, 25 bp, Homo sapien
ctgatcaaacacgtctgggttataa

SEQ ID NO: 2391410 - DNA, 25 bp, Homo sapien
tgatcaaacacgtctgggttataac

SEQ ID NO: 2391411 - DNA, 25 bp, Homo sapien
tcaaacacgtctgggttataaccaa

SEQ ID NO: 2391412 - DNA, 25 bp, Homo sapien
ccatgcccggcgtcaaattcctttt

SEQ ID NO: 2391413 - DNA, 25 bp, Homo sapien
ggcagcatctccaaggaagcgccac

SEQ ID NO: 2391414 - DNA, 25 bp, Homo sapien
gcaactcaacttcgtttagctatta

SEQ ID NO: 2391415 - DNA, 25 bp, Homo sapien
tggtgccaagtttcctgtaccccgc

SEQ ID NO: 2391416 - DNA, 25 bp, Homo sapien
gctgagacctcaggatcaggtccac

SEQ ID NO: 2391417 - DNA, 25 bp, Homo sapien
ttctcgacccggaagctgagccttc

SEQ ID NO: 2391418 - DNA, 25 bp, Homo sapien
tctggactcagcatctctacgctga

SEQ ID NO: 2391419 - DNA, 25 bp, Homo sapien
gggaggcccggatactgagcccctc

SEQ ID NO: 2391420 - DNA, 25 bp, Homo sapien
ggtgcgcgagcgtctctgggaagaa

SEQ ID NO: 2391421 - DNA, 25 bp, Homo sapien
gctcgatctaggctatggacaaggg

SEQ ID NO: 2391422 - DNA, 25 bp, Homo sapien
gaagagatcttagatggaggccgcg

SEQ ID NO: 2391423 - DNA, 25 bp, Homo sapien
ggtgcacacagggagctcgatctag

SEQ ID NO: 2391424 - DNA, 25 bp, Homo sapien
aatctttttagccaaggactcctgt

SEQ ID NO: 2391425 - DNA, 25 bp, Homo sapien
tatggtatagctttccactgattcc

SEQ ID NO: 2391426 - DNA, 25 bp, Homo sapien
tcccatgtgaaaggtactgatctag

SEQ ID NO: 2391427 - DNA, 25 bp, Homo sapien
acaagttcccggcttggagcttata

SEQ ID NO: 2391428 - DNA, 25 bp, Homo sapien
caacaaccgagctattttgggtagg

SEQ ID NO: 2391429 - DNA, 25 bp, Homo sapien
ttctcatcaataaccaaagccaggt

SEQ ID NO: 2391430 - DNA, 25 bp, Homo sapien
agtaagtaggcggtccatgagacaa

SEQ ID NO: 2391431 - DNA, 25 bp, Homo sapien
ggtagggtatcacagcaaagggaat

SEQ ID NO: 2391432 - DNA, 25 bp, Homo sapien
gaaaggaacctgttttagcagctgc

SEQ ID NO: 2391433 - DNA, 25 bp, Homo sapien
taatatttggtctcagtaaccggac

SEQ ID NO: 2391434 - DNA, 25 bp, Homo sapien
taaccggacaaatagagctgccacc

SEQ ID NO: 2391435 - DNA, 25 bp, Homo sapien
cagacccctggagctgtagaaagga

SEQ ID NO: 2391436 - DNA, 25 bp, Homo sapien
tagctgaataccatggagtgacctc

SEQ ID NO: 2391437 - DNA, 25 bp, Homo sapien
aacagaagagttgcccagatgagac

SEQ ID NO: 2391438 - DNA, 25 bp, Homo sapien
ggtagctccgagcagccatttaaga

SEQ ID NO: 2391439 - DNA, 25 bp, Homo sapien
ccaaggtgccagatatgagcgtgaa

SEQ ID NO: 2391440 - DNA, 25 bp, Homo sapien
ggcatatgccaccatacttgactta

SEQ ID NO: 2391441 - DNA, 25 bp, Homo sapien
tgcagtggtgttatttcagttcact

SEQ ID NO: 2391442 - DNA, 25 bp, Homo sapien
atatgccaccatacttgacttattt

SEQ ID NO: 2391443 - DNA, 25 bp, Homo sapien
gcagtggtgttatttcagttcactg

SEQ ID NO: 2391444 - DNA, 25 bp, Homo sapien
ggcagcagcacatcgtctaacagtt

SEQ ID NO: 2391445 - DNA, 25 bp, Homo sapien
gcaatgatccaagtgcatgtcgatc

SEQ ID NO: 2391446 - DNA, 25 bp, Homo sapien
taccacactgctagggagtaacaag

SEQ ID NO: 2391447 - DNA, 25 bp, Homo sapien
tcctgggtaaatagccggatgtcca

SEQ ID NO: 2391448 - DNA, 25 bp, Homo sapien
cgcagggtcggaacgtggacactaa

SEQ ID NO: 2391449 - DNA, 25 bp, Homo sapien
gagaaaatcgggttgcaccaggccc

SEQ ID NO: 2391450 - DNA, 25 bp, Homo sapien
gtttgggaagacacgaagcggctcc

SEQ ID NO: 2391451 - DNA, 25 bp, Homo sapien
aagaccactaatttcgcggccgcgt

SEQ ID NO: 2391452 - DNA, 25 bp, Homo sapien
tgtgtgcagggacgctccgcgccca

SEQ ID NO: 2391453 - DNA, 25 bp, Homo sapien
gcgcccatcactctgtttcggtgct

SEQ ID NO: 2391454 - DNA, 25 bp, Homo sapien
taatcgaccgccgtggcgccgattt

SEQ ID NO: 2391455 - DNA, 25 bp, Homo sapien
ggagacaagcgccaccctgcgctcg

SEQ ID NO: 2391456 - DNA, 25 bp, Homo sapien
cgccgcgtcacgctcccgggaggct

SEQ ID NO: 2391457 - DNA, 25 bp, Homo sapien
ccgggccgccgcgtcacgctcccgg

SEQ ID NO: 2391458 - DNA, 25 bp, Homo sapien
ccgccgcgtcacgctcccgggaggc

SEQ ID NO: 2391459 - DNA, 25 bp, Homo sapien
gggccgccgcgtcacgctcccggga

SEQ ID NO: 2391460 - DNA, 25 bp, Homo sapien
tttagacaacttcgttccggcagcc

SEQ ID NO: 2391461 - DNA, 25 bp, Homo sapien
caggtaaattgtgagcgtggatgta

SEQ ID NO: 2391462 - DNA, 25 bp, Homo sapien
gatgtatctgaaagttttacaccga

SEQ ID NO: 2391463 - DNA, 25 bp, Homo sapien
gagggagatcttcggtttagacaac

SEQ ID NO: 2391464 - DNA, 25 bp, Homo sapien
tttcagaacaaaataggcaacctgg

SEQ ID NO: 2391465 - DNA, 25 bp, Homo sapien
cctgggagtgctaaggaaaggcaca

SEQ ID NO: 2391466 - DNA, 25 bp, Homo sapien
gaaaggcacatgacttcttattgtt

SEQ ID NO: 2391467 - DNA, 25 bp, Homo sapien
ctggcctcattctccgggtagattt

SEQ ID NO: 2391468 - DNA, 25 bp, Homo sapien
ggcatctctgagtacctatgataga

SEQ ID NO: 2391469 - DNA, 25 bp, Homo sapien
tattggtccgtctggctacaaagcc

SEQ ID NO: 2391470 - DNA, 25 bp, Homo sapien
tctagcaagtgacagatattggtcc

SEQ ID NO: 2391471 - DNA, 25 bp, Homo sapien
caagaataggtgtatcataggatcc

SEQ ID NO: 2391472 - DNA, 25 bp, Homo sapien
catgcagatgacaatccaggctctc

SEQ ID NO: 2391473 - DNA, 25 bp, Homo sapien
tgtcttggttctagcacatgcagat

SEQ ID NO: 2391474 - DNA, 25 bp, Homo sapien
tttgctacttgaggaggaaagctga

SEQ ID NO: 2391475 - DNA, 25 bp, Homo sapien
tttatgcaaagtgaggagtgagtgc

SEQ ID NO: 2391476 - DNA, 25 bp, Homo sapien
tccattgtagtaaaattgggaaata

SEQ ID NO: 2391477 - DNA, 25 bp, Homo sapien
aaatggcgtattcccaaagcagcaa

SEQ ID NO: 2391478 - DNA, 25 bp, Homo sapien
ctcaaagtattgttacctagtagta

SEQ ID NO: 2391479 - DNA, 25 bp, Homo sapien
cttaggtgagccttctgccttagcc

SEQ ID NO: 2391480 - DNA, 25 bp, Homo sapien
cctatgcctggcccgttattattat

SEQ ID NO: 2391481 - DNA, 25 bp, Homo sapien
tatgcctatgcctggcccgttatta

SEQ ID NO: 2391482 - DNA, 25 bp, Homo sapien
agattacaggcaatatgcctatgcc

SEQ ID NO: 2391483 - DNA, 25 bp, Homo sapien
ttacaggcaatatgcctatgcctgg

SEQ ID NO: 2391484 - DNA, 25 bp, Homo sapien
aggcaatatgcctatgcctggcccg

SEQ ID NO: 2391485 - DNA, 25 bp, Homo sapien
agattacaggcaatatgcctatgcc

SEQ ID NO: 2391486 - DNA, 25 bp, Homo sapien
tatgcctatgcctggcccgttatta

SEQ ID NO: 2391487 - DNA, 25 bp, Homo sapien
ttacaggcaatatgcctatgcctgg

SEQ ID NO: 2391488 - DNA, 25 bp, Homo sapien
aggcaatatgcctatgcctggcccg

SEQ ID NO: 2391489 - DNA, 25 bp, Homo sapien
agattacaggcaatatgcctatgcc

SEQ ID NO: 2391490 - DNA, 25 bp, Homo sapien
tatgcctatgcctggcccgttatta

SEQ ID NO: 2391491 - DNA, 25 bp, Homo sapien
ttacaggcaatatgcctatgcctgg

SEQ ID NO: 2391492 - DNA, 25 bp, Homo sapien
aggcaatatgcctatgcctggcccg

SEQ ID NO: 2391493 - DNA, 25 bp, Homo sapien
agattacaggcaatatgcctatgcc

SEQ ID NO: 2391494 - DNA, 25 bp, Homo sapien
tatgcctatgcctggcccgttatta

SEQ ID NO: 2391495 - DNA, 25 bp, Homo sapien
ttacaggcaatatgcctatgcctgg

SEQ ID NO: 2391496 - DNA, 25 bp, Homo sapien
aggcaatatgcctatgcctggcccg

SEQ ID NO: 2391497 - DNA, 25 bp, Homo sapien
agattacaggcaatatgcctatgcc

SEQ ID NO: 2391498 - DNA, 25 bp, Homo sapien
tatgcctatgcctggcccgttatta

SEQ ID NO: 2391499 - DNA, 25 bp, Homo sapien
ttacaggcaatatgcctatgcctgg

SEQ ID NO: 2391500 - DNA, 25 bp, Homo sapien
aggcaatatgcctatgcctggcccg

SEQ ID NO: 2391501 - DNA, 25 bp, Homo sapien
agattacaggcaatatgcctatgcc

SEQ ID NO: 2391502 - DNA, 25 bp, Homo sapien
ttacaggcaatatgcctatgcctgg

SEQ ID NO: 2391503 - DNA, 25 bp, Homo sapien
tatgcctatgcctggcccgttatta

SEQ ID NO: 2391504 - DNA, 25 bp, Homo sapien
aggcaatatgcctatgcctggcccg

SEQ ID NO: 2391505 - DNA, 25 bp, Homo sapien
agattacaggcaatatgcctatgcc

SEQ ID NO: 2391506 - DNA, 25 bp, Homo sapien
tatgcctatgcctggcccgttatta

SEQ ID NO: 2391507 - DNA, 25 bp, Homo sapien
aggcaatatgcctatgcctggcccg

SEQ ID NO: 2391508 - DNA, 25 bp, Homo sapien
ttacaggcaatatgcctatgcctgg

SEQ ID NO: 2391509 - DNA, 25 bp, Homo sapien
agattacaggcaatatgcctatgcc

SEQ ID NO: 2391510 - DNA, 25 bp, Homo sapien
gcaatatgcctatgcctggcccgtt

SEQ ID NO: 2391511 - DNA, 25 bp, Homo sapien
ttacaggcaatatgcctatgcctgg

SEQ ID NO: 2391512 - DNA, 25 bp, Homo sapien
caggcaatatgcctatgcctggccc

SEQ ID NO: 2391513 - DNA, 25 bp, Homo sapien
agattacaggcaatatgcctatgcc

SEQ ID NO: 2391514 - DNA, 25 bp, Homo sapien
tatgcctatgcctggcccgttatta

SEQ ID NO: 2391515 - DNA, 25 bp, Homo sapien
ttacaggcaatatgcctatgcctgg

SEQ ID NO: 2391516 - DNA, 25 bp, Homo sapien
aggcaatatgcctatgcctggcccg

SEQ ID NO: 2391517 - DNA, 25 bp, Homo sapien
tcagggcaggcatttgaacaccttg

SEQ ID NO: 2391518 - DNA, 25 bp, Homo sapien
tacaagatcccaagactacgtcagg

SEQ ID NO: 2391519 - DNA, 25 bp, Homo sapien
cattctctggattttagttggccga

SEQ ID NO: 2391520 - DNA, 25 bp, Homo sapien
agttggccgaaaacatacctgtgag

SEQ ID NO: 2391521 - DNA, 25 bp, Homo sapien
caggtacagtgactaaggatgcatc

SEQ ID NO: 2391522 - DNA, 25 bp, Homo sapien
caaaggactgatgcttgggacactc

SEQ ID NO: 2391523 - DNA, 25 bp, Homo sapien
cgtcagtgaccctgatgaattgcat

SEQ ID NO: 2391524 - DNA, 25 bp, Homo sapien
tagcaatgtggaggtcgtcagtgac

SEQ ID NO: 2391525 - DNA, 25 bp, Homo sapien
gggctccgaagttatatagacaaga

SEQ ID NO: 2391526 - DNA, 25 bp, Homo sapien
tagtgatgacagtgctgcgtggcac

SEQ ID NO: 2391527 - DNA, 25 bp, Homo sapien
gaggactagagaactgggctccgaa

SEQ ID NO: 2391528 - DNA, 25 bp, Homo sapien
gaataatgcctcgaatcaatcacac

SEQ ID NO: 2391529 - DNA, 25 bp, Homo sapien
gatttcctgactgcggcttgagagc

SEQ ID NO: 2391530 - DNA, 25 bp, Homo sapien
gaagactcataggtttgtggcctga

SEQ ID NO: 2391531 - DNA, 25 bp, Homo sapien
tagtggttcattccaggtggtggcc

SEQ ID NO: 2391532 - DNA, 25 bp, Homo sapien
tatgagtcatcacgcttggtcagga

SEQ ID NO: 2391533 - DNA, 25 bp, Homo sapien
tgttgacgttactgtattaaggtgg

SEQ ID NO: 2391534 - DNA, 25 bp, Homo sapien
tgtagacaattacctttatgcctgt

SEQ ID NO: 2391535 - DNA, 25 bp, Homo sapien
ggcctagtactgctttgtagacaat

SEQ ID NO: 2391536 - DNA, 25 bp, Homo sapien
gtgcttagatccttcccattctgtg

SEQ ID NO: 2391537 - DNA, 25 bp, Homo sapien
gttgtttctcaggagatcctgtagc

SEQ ID NO: 2391538 - DNA, 25 bp, Homo sapien
gtcagagtagtaaatacacagacac

SEQ ID NO: 2391539 - DNA, 25 bp, Homo sapien
ttagttgtttctcaggagatcctgt

SEQ ID NO: 2391540 - DNA, 25 bp, Homo sapien
tgtttctcaggagatcctgtagcag

SEQ ID NO: 2391541 - DNA, 25 bp, Homo sapien
atccagttgttctaatgcgagaggc

SEQ ID NO: 2391542 - DNA, 25 bp, Homo sapien
tctaatgcgagaggcccctagttcc

SEQ ID NO: 2391543 - DNA, 25 bp, Homo sapien
tgtgtcattgtatccagttgttcta

SEQ ID NO: 2391544 - DNA, 25 bp, Homo sapien
agcttttgtgtcattgtatccagtt

SEQ ID NO: 2391545 - DNA, 25 bp, Homo sapien
gactgaaaaaggactcacggcttaa

SEQ ID NO: 2391546 - DNA, 25 bp, Homo sapien
tctagatgtgtgttccttcttttag

SEQ ID NO: 2391547 - DNA, 25 bp, Homo sapien
cacggcttaagacactagagattgc

SEQ ID NO: 2391548 - DNA, 25 bp, Homo sapien
tttattctagatgtgtgttccttct

SEQ ID NO: 2391549 - DNA, 25 bp, Homo sapien
gattgagcgttgtttgcgaatattg

SEQ ID NO: 2391550 - DNA, 25 bp, Homo sapien
aagatgatgtgattgagcgttgttt

SEQ ID NO: 2391551 - DNA, 25 bp, Homo sapien
cgttgtttgcgaatattgtcttgaa

SEQ ID NO: 2391552 - DNA, 25 bp, Homo sapien
aggagagggatatctagaaatctag

SEQ ID NO: 2391553 - DNA, 25 bp, Homo sapien
caaaaatcacttaagtatgttacac

SEQ ID NO: 2391554 - DNA, 25 bp, Homo sapien
aatgtagctagctgtttggcctagg

SEQ ID NO: 2391555 - DNA, 25 bp, Homo sapien
tgagattgtgccatgcctagcaaca

SEQ ID NO: 2391556 - DNA, 25 bp, Homo sapien
ttggcctaggtattacaaatttcaa

SEQ ID NO: 2391557 - DNA, 25 bp, Homo sapien
ttaagctatagtcattctgaaccat

SEQ ID NO: 2391558 - DNA, 25 bp, Homo sapien
actttaagctatagtcattctgaac

SEQ ID NO: 2391559 - DNA, 25 bp, Homo sapien
ctcctccaactttaagctatagtca

SEQ ID NO: 2391560 - DNA, 25 bp, Homo sapien
ccaactttaagctatagtcattctg

SEQ ID NO: 2391561 - DNA, 25 bp, Homo sapien
gctgtgataaacattaaggtccttg

SEQ ID NO: 2391562 - DNA, 25 bp, Homo sapien
tagcatagcgctagagttagatata

SEQ ID NO: 2391563 - DNA, 25 bp, Homo sapien
ctagttctaggatgtttaaaactga

SEQ ID NO: 2391564 - DNA, 25 bp, Homo sapien
gacctgagtttgagtactagttcta

SEQ ID NO: 2391565 - DNA, 25 bp, Homo sapien
tgtatttaactcttggcaggcattc

SEQ ID NO: 2391566 - DNA, 25 bp, Homo sapien
tccctgaccattgtagctgaaatac

SEQ ID NO: 2391567 - DNA, 25 bp, Homo sapien
caaagcctttgtagttatgattctc

SEQ ID NO: 2391568 - DNA, 25 bp, Homo sapien
tttgctgaatagatgtgcgagggct

SEQ ID NO: 2391569 - DNA, 25 bp, Homo sapien
ctaacagtgtatgagtgctctccct

SEQ ID NO: 2391570 - DNA, 25 bp, Homo sapien
taacagtgtatgagtgctctccctt

SEQ ID NO: 2391571 - DNA, 25 bp, Homo sapien
gctttcttggtaatagccattttaa

SEQ ID NO: 2391572 - DNA, 25 bp, Homo sapien
ctgctttcttggtaatagccatttt

SEQ ID NO: 2391573 - DNA, 25 bp, Homo sapien
taggtttgaggaacaaggaccatgc

SEQ ID NO: 2391574 - DNA, 25 bp, Homo sapien
tataaggcctactctagacccaggc

SEQ ID NO: 2391575 - DNA, 25 bp, Homo sapien
gactgcccaaggcttaccagagatt

SEQ ID NO: 2391576 - DNA, 25 bp, Homo sapien
tctcaccgagatagagaagcctggg

SEQ ID NO: 2391577 - DNA, 25 bp, Homo sapien
taatgtagtgtgaccagcagtagct

SEQ ID NO: 2391578 - DNA, 25 bp, Homo sapien
gctttaaactaatgcccgagcgccc

SEQ ID NO: 2391579 - DNA, 25 bp, Homo sapien
tttttaggtcagaggatcaatgtcc

SEQ ID NO: 2391580 - DNA, 25 bp, Homo sapien
gagcgcccctttagttagtcaccaa

SEQ ID NO: 2391581 - DNA, 25 bp, Homo sapien
ccaagtagcttcactagtatatcac

SEQ ID NO: 2391582 - DNA, 25 bp, Homo sapien
caaagctgattagagaacatgactt

SEQ ID NO: 2391583 - DNA, 25 bp, Homo sapien
actagtatatcactcctgccaccag

SEQ ID NO: 2391584 - DNA, 25 bp, Homo sapien
tgacaaagctgattagagaacatga

SEQ ID NO: 2391585 - DNA, 25 bp, Homo sapien
agtagaacaggatggaccttctgca

SEQ ID NO: 2391586 - DNA, 25 bp, Homo sapien
gagtagaacaggatggaccttctgc

SEQ ID NO: 2391587 - DNA, 25 bp, Homo sapien
tagaacaggatggaccttctgcata

SEQ ID NO: 2391588 - DNA, 25 bp, Homo sapien
gagagtagaacaggatggaccttct

SEQ ID NO: 2391589 - DNA, 25 bp, Homo sapien
gcaggttacagcagtatcacttagg

SEQ ID NO: 2391590 - DNA, 25 bp, Homo sapien
tcctgcttgcaaaatggtggcatac

SEQ ID NO: 2391591 - DNA, 25 bp, Homo sapien
ggacgtgccaactggttaaacaaca

SEQ ID NO: 2391592 - DNA, 25 bp, Homo sapien
catgataccaatggttctgggctct

SEQ ID NO: 2391593 - DNA, 25 bp, Homo sapien
aagctgtatggctgattgttgctgc

SEQ ID NO: 2391594 - DNA, 25 bp, Homo sapien
tgtatggctgattgttgctgcttcc

SEQ ID NO: 2391595 - DNA, 25 bp, Homo sapien
cttgaaagctgtatggctgattgtt

SEQ ID NO: 2391596 - DNA, 25 bp, Homo sapien
ggctgattgttgctgcttcccaaca

SEQ ID NO: 2391597 - DNA, 25 bp, Homo sapien
ggatatgattgtggtatgaaactgc

SEQ ID NO: 2391598 - DNA, 25 bp, Homo sapien
gggatatgattgtggtatgaaactg

SEQ ID NO: 2391599 - DNA, 25 bp, Homo sapien
agggatatgattgtggtatgaaact

SEQ ID NO: 2391600 - DNA, 25 bp, Homo sapien
cagggatatgattgtggtatgaaac

SEQ ID NO: 2391601 - DNA, 25 bp, Homo sapien
gaaatgcatcattgaaatactagcg

SEQ ID NO: 2391602 - DNA, 25 bp, Homo sapien
ttggctaagatcaactgaaaaggga

SEQ ID NO: 2391603 - DNA, 25 bp, Homo sapien
tattagtcagtgtaaaatgcatcct

SEQ ID NO: 2391604 - DNA, 25 bp, Homo sapien
tggcaattttcacatggaccttcgt

SEQ ID NO: 2391605 - DNA, 25 bp, Homo sapien
cctgtatggccaatgatgaagaatc

SEQ ID NO: 2391606 - DNA, 25 bp, Homo sapien
aatgtataatgtccagccaggcgca

SEQ ID NO: 2391607 - DNA, 25 bp, Homo sapien
gtgtaaatgatctaccagtgcctct

SEQ ID NO: 2391608 - DNA, 25 bp, Homo sapien
taaggaaccactatgtgaccagtgt

SEQ ID NO: 2391609 - DNA, 25 bp, Homo sapien
gattgatgttcataatgcaccagga

SEQ ID NO: 2391610 - DNA, 25 bp, Homo sapien
agatggctgtgtttctatatccacg

SEQ ID NO: 2391611 - DNA, 25 bp, Homo sapien
tatatccacgttattaaagtctgca

SEQ ID NO: 2391612 - DNA, 25 bp, Homo sapien
tcagtgtcagtaatgcctcagatca

SEQ ID NO: 2391613 - DNA, 25 bp, Homo sapien
taaatcctcgataatgaggccagcc

SEQ ID NO: 2391614 - DNA, 25 bp, Homo sapien
ttgacccacagaaagcgcatgcatc

SEQ ID NO: 2391615 - DNA, 25 bp, Homo sapien
caaacggtgagaaataggccgcctc

SEQ ID NO: 2391616 - DNA, 25 bp, Homo sapien
aacacgtaactctccatgtggcaag

SEQ ID NO: 2391617 - DNA, 25 bp, Homo sapien
ccttgacggtgcctacttcatatct

SEQ ID NO: 2391618 - DNA, 25 bp, Homo sapien
ggtgcctacttcatatctgctgtgc

SEQ ID NO: 2391619 - DNA, 25 bp, Homo sapien
gacggtgcctacttcatatctgctg

SEQ ID NO: 2391620 - DNA, 25 bp, Homo sapien
ttgcccttgacggtgcctacttcat

SEQ ID NO: 2391621 - DNA, 25 bp, Homo sapien
ccttgatggtgactgttgttttatc

SEQ ID NO: 2391622 - DNA, 25 bp, Homo sapien
ttatctccttgatggtgactgttgt

SEQ ID NO: 2391623 - DNA, 25 bp, Homo sapien
tgttatctccttgatggtgactgtt

SEQ ID NO: 2391624 - DNA, 25 bp, Homo sapien
gatgttatctccttgatggtgactg

SEQ ID NO: 2391625 - DNA, 25 bp, Homo sapien
tactgctgtgcggtagtgaaggtcc

SEQ ID NO: 2391626 - DNA, 25 bp, Homo sapien
cttaggatgcccaaaggtactgtca

SEQ ID NO: 2391627 - DNA, 25 bp, Homo sapien
tattgcccagtggaggtagaagtcc

SEQ ID NO: 2391628 - DNA, 25 bp, Homo sapien
ggtactgtcagttcatctcccggag

SEQ ID NO: 2391629 - DNA, 25 bp, Homo sapien
agcatgccattgcaatctgtagagg

SEQ ID NO: 2391630 - DNA, 25 bp, Homo sapien
agccagttcagagcttgctactttg

SEQ ID NO: 2391631 - DNA, 25 bp, Homo sapien
gtggatcgtgaagacctcagcatgc

SEQ ID NO: 2391632 - DNA, 25 bp, Homo sapien
ttgcagtcagcagcaggtggatcgt

SEQ ID NO: 2391633 - DNA, 25 bp, Homo sapien
ttagaatggctttgcagtattcctt

SEQ ID NO: 2391634 - DNA, 25 bp, Homo sapien
ctgccttagaatggctttgcagtat

SEQ ID NO: 2391635 - DNA, 25 bp, Homo sapien
ccttagaatggctttgcagtattcc

SEQ ID NO: 2391636 - DNA, 25 bp, Homo sapien
gccttagaatggctttgcagtattc

SEQ ID NO: 2391637 - DNA, 25 bp, Homo sapien
tctgtggccgcttgctggcgctctg

SEQ ID NO: 2391638 - DNA, 25 bp, Homo sapien
ttctgtggccgcttgctggcgctct

SEQ ID NO: 2391639 - DNA, 25 bp, Homo sapien
tatcagtcactggttcagaagaata

SEQ ID NO: 2391640 - DNA, 25 bp, Homo sapien
ggttcagaagaatatcggataacct

SEQ ID NO: 2391641 - DNA, 25 bp, Homo sapien
cactggttcagaagaatatcggata

SEQ ID NO: 2391642 - DNA, 25 bp, Homo sapien
tgttatatagggatttatcagtcac

SEQ ID NO: 2391643 - DNA, 25 bp, Homo sapien
ttgtacattggacacctgacaaccc

SEQ ID NO: 2391644 - DNA, 25 bp, Homo sapien
tctgccatgaccgagaccccctgat

SEQ ID NO: 2391645 - DNA, 25 bp, Homo sapien
aaagttgtacattggacacctgaca

SEQ ID NO: 2391646 - DNA, 25 bp, Homo sapien
ttaaagttgtacattggacacctga

SEQ ID NO: 2391647 - DNA, 25 bp, Homo sapien
tgaccaggcggcttgggagaatgag

SEQ ID NO: 2391648 - DNA, 25 bp, Homo sapien
ctataacttggacgatgaccaggcg

SEQ ID NO: 2391649 - DNA, 25 bp, Homo sapien
cagcttcctataacttggacgatga

SEQ ID NO: 2391650 - DNA, 25 bp, Homo sapien
tcctataacttggacgatgaccagg

SEQ ID NO: 2391651 - DNA, 25 bp, Homo sapien
cagttgccgtgtagttgatgcagtg

SEQ ID NO: 2391652 - DNA, 25 bp, Homo sapien
gggaatccagttgccgtgtagttga

SEQ ID NO: 2391653 - DNA, 25 bp, Homo sapien
gctaccttggggaatcccgttgctg

SEQ ID NO: 2391654 - DNA, 25 bp, Homo sapien
tagttgatgcagtgggggctacctt

SEQ ID NO: 2391655 - DNA, 25 bp, Homo sapien
tccatttcaggttgtgctttcgcac

SEQ ID NO: 2391656 - DNA, 25 bp, Homo sapien
cacggttacacaagagaagttgatc

SEQ ID NO: 2391657 - DNA, 25 bp, Homo sapien
gctgtgcccacatgtaatactgctt

SEQ ID NO: 2391658 - DNA, 25 bp, Homo sapien
gatcaagcgccaatgaaatctgtcc

SEQ ID NO: 2391659 - DNA, 25 bp, Homo sapien
cagaagcccaattagaataaagact

SEQ ID NO: 2391660 - DNA, 25 bp, Homo sapien
ggctgtgaaatcactcccggctgtg

SEQ ID NO: 2391661 - DNA, 25 bp, Homo sapien
tacataaagcctcaagtaatgcatg

SEQ ID NO: 2391662 - DNA, 25 bp, Homo sapien
cagtggttatctctagatgatggta

SEQ ID NO: 2391663 - DNA, 25 bp, Homo sapien
gagtatctacttgtgggtggccatt

SEQ ID NO: 2391664 - DNA, 25 bp, Homo sapien
taaggacgtagcgtagacaacagca

SEQ ID NO: 2391665 - DNA, 25 bp, Homo sapien
tgacatctgcatgtacctcgtggaa

SEQ ID NO: 2391666 - DNA, 25 bp, Homo sapien
ttaaagtctgtagagtcagcacagc

SEQ ID NO: 2391667 - DNA, 25 bp, Homo sapien
tgagatttgcaaggactttgatacc

SEQ ID NO: 2391668 - DNA, 25 bp, Homo sapien
tgaacgggctttaacatgtttaaga

SEQ ID NO: 2391669 - DNA, 25 bp, Homo sapien
tttgcaaggactttgataccatttg

SEQ ID NO: 2391670 - DNA, 25 bp, Homo sapien
ggactttgataccatttgaaatgga

SEQ ID NO: 2391671 - DNA, 25 bp, Homo sapien
aggaattcaagctatggggcagcca

SEQ ID NO: 2391672 - DNA, 25 bp, Homo sapien
aaggaattcaagctatggggcagcc

SEQ ID NO: 2391673 - DNA, 25 bp, Homo sapien
ataaaggaattcaagctatggggca

SEQ ID NO: 2391674 - DNA, 25 bp, Homo sapien
taaaggaattcaagctatggggcag

SEQ ID NO: 2391675 - DNA, 25 bp, Homo sapien
tcagagcctcgcagttgtgccagga

SEQ ID NO: 2391676 - DNA, 25 bp, Homo sapien
ccttttggtaacagtagcagcctcc

SEQ ID NO: 2391677 - DNA, 25 bp, Homo sapien
acccgacgtgggttctagctcagtg

SEQ ID NO: 2391678 - DNA, 25 bp, Homo sapien
gacacctgccgagcaaaaggaacga

SEQ ID NO: 2391679 - DNA, 25 bp, Homo sapien
tccccgagcacagcctttgtggggc

SEQ ID NO: 2391680 - DNA, 25 bp, Homo sapien
ctcctccccgagcacagcctttgtg

SEQ ID NO: 2391681 - DNA, 25 bp, Homo sapien
cctccccgagcacagcctttgtggg

SEQ ID NO: 2391682 - DNA, 25 bp, Homo sapien
accgctcctccccgagcacagcctt

SEQ ID NO: 2391683 - DNA, 25 bp, Homo sapien
cacgtcattggagatgtgtcgggcc

SEQ ID NO: 2391684 - DNA, 25 bp, Homo sapien
cagggcttcgtcttccaggaccttc

SEQ ID NO: 2391685 - DNA, 25 bp, Homo sapien
gctggcacagttctagcccacgtca

SEQ ID NO: 2391686 - DNA, 25 bp, Homo sapien
tattagcctggacatccgttacgac

SEQ ID NO: 2391687 - DNA, 25 bp, Homo sapien
caaggggaatcccacttgctgcctc

SEQ ID NO: 2391688 - DNA, 25 bp, Homo sapien
gccttagctgccttggtgccgggcc

SEQ ID NO: 2391689 - DNA, 25 bp, Homo sapien
gcctctgcggaattccttgtttcca

SEQ ID NO: 2391690 - DNA, 25 bp, Homo sapien
acagcagggtctgccgcagccttag

SEQ ID NO: 2391691 - DNA, 25 bp, Homo sapien
gtgacaaagctgtccctccgtggag

SEQ ID NO: 2391692 - DNA, 25 bp, Homo sapien
agctggcgtctctgatttcctcggc

SEQ ID NO: 2391693 - DNA, 25 bp, Homo sapien
gtccctccgtggagctggcgtctct

SEQ ID NO: 2391694 - DNA, 25 bp, Homo sapien
cgtggagctggcgtctctgatttcc

SEQ ID NO: 2391695 - DNA, 25 bp, Homo sapien
ctctcgggttcacaccattttcccg

SEQ ID NO: 2391696 - DNA, 25 bp, Homo sapien
tctcgggttcacaccattttcccgc

SEQ ID NO: 2391697 - DNA, 25 bp, Homo sapien
tcgttagactttctggctgggaagg

SEQ ID NO: 2391698 - DNA, 25 bp, Homo sapien
tctgactagttctgatagggttttc

SEQ ID NO: 2391699 - DNA, 25 bp, Homo sapien
tcctcaataaaaagagcagtgatca

SEQ ID NO: 2391700 - DNA, 25 bp, Homo sapien
tacatatttgcatagggccaaatat

SEQ ID NO: 2391701 - DNA, 25 bp, Homo sapien
gggacttacagagcattcagctggg

SEQ ID NO: 2391702 - DNA, 25 bp, Homo sapien
agctcagggccaagcaaagtcatcc

SEQ ID NO: 2391703 - DNA, 25 bp, Homo sapien
tctaggcttcaaattagaggtcggc

SEQ ID NO: 2391704 - DNA, 25 bp, Homo sapien
tcatcctagactgtcagctcagggc

SEQ ID NO: 2391705 - DNA, 25 bp, Homo sapien
tcactccgaggtgagaaaagtcaca

SEQ ID NO: 2391706 - DNA, 25 bp, Homo sapien
cgcggatgaagagtcggaggcggcg

SEQ ID NO: 2391707 - DNA, 25 bp, Homo sapien
ccggccgcggatgaagagtcggagg

SEQ ID NO: 2391708 - DNA, 25 bp, Homo sapien
ggccgcggatgaagagtcggaggcg

SEQ ID NO: 2391709 - DNA, 25 bp, Homo sapien
gccccggccgcggatgaagagtcgg

SEQ ID NO: 2391710 - DNA, 25 bp, Homo sapien
ctttcttggagcctcggtggacgcg

SEQ ID NO: 2391711 - DNA, 25 bp, Homo sapien
gctttgtgcttctccggtcgctccg

SEQ ID NO: 2391712 - DNA, 25 bp, Homo sapien
tttctgcccggaccgcgcaggtaga

SEQ ID NO: 2391713 - DNA, 25 bp, Homo sapien
tatttgctgcagaccgctgggagag

SEQ ID NO: 2391714 - DNA, 25 bp, Homo sapien
ggtttctgttgagcgtcttcaccgt

SEQ ID NO: 2391715 - DNA, 25 bp, Homo sapien
ttctgttgagcgtcttcaccgttat

SEQ ID NO: 2391716 - DNA, 25 bp, Homo sapien
gtttctgttgagcgtcttcaccgtt

SEQ ID NO: 2391717 - DNA, 25 bp, Homo sapien
tttctgttgagcgtcttcaccgtta

SEQ ID NO: 2391718 - DNA, 25 bp, Homo sapien
gcctgtgtgctcccccaagcagcat

SEQ ID NO: 2391719 - DNA, 25 bp, Homo sapien
tctttgtgctgcatgagtcctcttc

SEQ ID NO: 2391720 - DNA, 25 bp, Homo sapien
tcctcctgggtgagttggaacctgg

SEQ ID NO: 2391721 - DNA, 25 bp, Homo sapien
ttctaaagttggtctctctccccgc

SEQ ID NO: 2391722 - DNA, 25 bp, Homo sapien
ttgagccactggcttgcggtctcgc

SEQ ID NO: 2391723 - DNA, 25 bp, Homo sapien
tgctggtgtcgtgccttcactggtg

SEQ ID NO: 2391724 - DNA, 25 bp, Homo sapien
cactggtgacacttcctgaacttaa

SEQ ID NO: 2391725 - DNA, 25 bp, Homo sapien
ttaaagaggtcaagcccagaaccga

SEQ ID NO: 2391726 - DNA, 25 bp, Homo sapien
cttaaccagtggatggacatgggca

SEQ ID NO: 2391727 - DNA, 25 bp, Homo sapien
cagctccaggtgactcagtgttgat

SEQ ID NO: 2391728 - DNA, 25 bp, Homo sapien
agtgttgattcatacctggcacttg

SEQ ID NO: 2391729 - DNA, 25 bp, Homo sapien
tgatacgcagaagggaactgtgacc

SEQ ID NO: 2391730 - DNA, 25 bp, Homo sapien
tgtttaaattcactgacaaagcaca

SEQ ID NO: 2391731 - DNA, 25 bp, Homo sapien
tttctttgggggctaatgtgtgctc

SEQ ID NO: 2391732 - DNA, 25 bp, Homo sapien
ttggcttttgtgagtagcagtttct

SEQ ID NO: 2391733 - DNA, 25 bp, Homo sapien
ttttgtgagtagcagtttctttggg

SEQ ID NO: 2391734 - DNA, 25 bp, Homo sapien
gctaatgtgtgctctgccgtctcac

SEQ ID NO: 2391735 - DNA, 25 bp, Homo sapien
ctgtgaggatcaaacgaagggatac

SEQ ID NO: 2391736 - DNA, 25 bp, Homo sapien
gcgtcacggacatgctgctaggttt

SEQ ID NO: 2391737 - DNA, 25 bp, Homo sapien
gatacgcgtgagagtgtcttgaacg

SEQ ID NO: 2391738 - DNA, 25 bp, Homo sapien
cacaaacctgaagcgtcacggacat

SEQ ID NO: 2391739 - DNA, 25 bp, Homo sapien
ctactgggacgggcagctggagaag

SEQ ID NO: 2391740 - DNA, 25 bp, Homo sapien
tctgtccagtgctgttgactgagca

SEQ ID NO: 2391741 - DNA, 25 bp, Homo sapien
aaggacaagggagcgtcccacttcg

SEQ ID NO: 2391742 - DNA, 25 bp, Homo sapien
tgagcattctgcctcacatgcagct

SEQ ID NO: 2391743 - DNA, 25 bp, Homo sapien
ccacttcgggacgttcgcaaggtct

SEQ ID NO: 2391744 - DNA, 25 bp, Homo sapien
ctgttacagtcgtgatggaagcttt

SEQ ID NO: 2391745 - DNA, 25 bp, Homo sapien
gttacagtcgtgatggaagcttttg

SEQ ID NO: 2391746 - DNA, 25 bp, Homo sapien
cagtcgtgatggaagcttttgtttc

SEQ ID NO: 2391747 - DNA, 25 bp, Homo sapien
cgtgatggaagcttttgtttccaca

SEQ ID NO: 2391748 - DNA, 25 bp, Homo sapien
cgtttagtggacgagcacactcgca

SEQ ID NO: 2391749 - DNA, 25 bp, Homo sapien
gttcatatgccgtgtgactccctca

SEQ ID NO: 2391750 - DNA, 25 bp, Homo sapien
gagccattgtgacagtgccagttgc

SEQ ID NO: 2391751 - DNA, 25 bp, Homo sapien
tttgtggaacccttcgtcagagggc

SEQ ID NO: 2391752 - DNA, 25 bp, Homo sapien
tgattatatcaagctgacacatcta

SEQ ID NO: 2391753 - DNA, 25 bp, Homo sapien
taagataccacacataagtgatatt

SEQ ID NO: 2391754 - DNA, 25 bp, Homo sapien
taaccaccattctacactgtaattc

SEQ ID NO: 2391755 - DNA, 25 bp, Homo sapien
ggttgccatgctgggtaatagatct

SEQ ID NO: 2391756 - DNA, 25 bp, Homo sapien
tataaggggctgaatcacttcccaa

SEQ ID NO: 2391757 - DNA, 25 bp, Homo sapien
ggggggtatagacatacattcagac

SEQ ID NO: 2391758 - DNA, 25 bp, Homo sapien
gaccatagcattccagctgtggccc

SEQ ID NO: 2391759 - DNA, 25 bp, Homo sapien
aaaatacattcgttcttcgttctat

SEQ ID NO: 2391760 - DNA, 25 bp, Homo sapien
ctcccaagcggggattacatgcatg

SEQ ID NO: 2391761 - DNA, 25 bp, Homo sapien
gctaattttgtatatttagtagaga

SEQ ID NO: 2391762 - DNA, 25 bp, Homo sapien
cccaagcggggattacatgcatgtg

SEQ ID NO: 2391763 - DNA, 25 bp, Homo sapien
ggctaattttgtatatttagtagag

SEQ ID NO: 2391764 - DNA, 25 bp, Homo sapien
tactttatgtatggtttcccagagc

SEQ ID NO: 2391765 - DNA, 25 bp, Homo sapien
aatatgcagtctttaacggctctcc

SEQ ID NO: 2391766 - DNA, 25 bp, Homo sapien
gctgaccgtctttggcattcctaga

SEQ ID NO: 2391767 - DNA, 25 bp, Homo sapien
cgggaacaaagtaccaccaagctgg

SEQ ID NO: 2391768 - DNA, 25 bp, Homo sapien
tagtttcctgtcgaagaagcttgca

SEQ ID NO: 2391769 - DNA, 25 bp, Homo sapien
gaggtctcagagcaaaccactgtcc

SEQ ID NO: 2391770 - DNA, 25 bp, Homo sapien
gctgtcatcaccagagtgccggagg

SEQ ID NO: 2391771 - DNA, 25 bp, Homo sapien
gagaaaccggcaggagaatgcagct

SEQ ID NO: 2391772 - DNA, 25 bp, Homo sapien
cttccccgagttctcacagtgaata

SEQ ID NO: 2391773 - DNA, 25 bp, Homo sapien
gaatctttgatgacgtgaccatcga

SEQ ID NO: 2391774 - DNA, 25 bp, Homo sapien
cagtgatggtgtagaccaagctgcc

SEQ ID NO: 2391775 - DNA, 25 bp, Homo sapien
tgaccatcgagaccaagcggtagta

SEQ ID NO: 2391776 - DNA, 25 bp, Homo sapien
ctcctcggcctctcttgatcttttt

SEQ ID NO: 2391777 - DNA, 25 bp, Homo sapien
aatggccctgaaagacgtgagatgc

SEQ ID NO: 2391778 - DNA, 25 bp, Homo sapien
aatgctgttttactcttctagtagg

SEQ ID NO: 2391779 - DNA, 25 bp, Homo sapien
gagtctgaaagatgattacattcca

SEQ ID NO: 2391780 - DNA, 25 bp, Homo sapien
taaaacaatggatattggctgggcg

SEQ ID NO: 2391781 - DNA, 25 bp, Homo sapien
agaaggctatctggcagggttggga

SEQ ID NO: 2391782 - DNA, 25 bp, Homo sapien
gcctgggatgctgaagtgaatgcct

SEQ ID NO: 2391783 - DNA, 25 bp, Homo sapien
tccaatcttgcggtgtatggacaca

SEQ ID NO: 2391784 - DNA, 25 bp, Homo sapien
tatggacacagagcgaacgctgccc

SEQ ID NO: 2391785 - DNA, 25 bp, Homo sapien
gtccagctgggattttttcccatca

SEQ ID NO: 2391786 - DNA, 25 bp, Homo sapien
ggaaagggacctgcagacttgtgta

SEQ ID NO: 2391787 - DNA, 25 bp, Homo sapien
ttccacttgattagaggcctttgtg

SEQ ID NO: 2391788 - DNA, 25 bp, Homo sapien
tagtaaaaccattatcaggggctta

SEQ ID NO: 2391789 - DNA, 25 bp, Homo sapien
catagacggcgacaggaaattcaga

SEQ ID NO: 2391790 - DNA, 25 bp, Homo sapien
tgggcgaatggacacctttagggtg

SEQ ID NO: 2391791 - DNA, 25 bp, Homo sapien
catgctggagtcctttaatgggcga

SEQ ID NO: 2391792 - DNA, 25 bp, Homo sapien
gacccctctcgacagtcttcataga

SEQ ID NO: 2391793 - DNA, 25 bp, Homo sapien
gaaactggagtcacgtggtttggat

SEQ ID NO: 2391794 - DNA, 25 bp, Homo sapien
ttgaagccaatagagtaattgctgc

SEQ ID NO: 2391795 - DNA, 25 bp, Homo sapien
gatggagaatgttgaagccaataga

SEQ ID NO: 2391796 - DNA, 25 bp, Homo sapien
gcaaaacggagcacagaaactggag

SEQ ID NO: 2391797 - DNA, 25 bp, Homo sapien
ctccaggctctggaaacttgaagac

SEQ ID NO: 2391798 - DNA, 25 bp, Homo sapien
actccaggctctggaaacttgaaga

SEQ ID NO: 2391799 - DNA, 25 bp, Homo sapien
ctactccaggctctggaaacttgaa

SEQ ID NO: 2391800 - DNA, 25 bp, Homo sapien
tactccaggctctggaaacttgaag

SEQ ID NO: 2391801 - DNA, 25 bp, Homo sapien
ctggatgaagttcagggggccacag

SEQ ID NO: 2391802 - DNA, 25 bp, Homo sapien
gctggatgaagttcagggggccaca

SEQ ID NO: 2391803 - DNA, 25 bp, Homo sapien
tcctgaaaactggctaaattctgtg

SEQ ID NO: 2391804 - DNA, 25 bp, Homo sapien
tgaaaactggctaaattctgtgcat

SEQ ID NO: 2391805 - DNA, 25 bp, Homo sapien
cctgcttttacagattcctgaaaac

SEQ ID NO: 2391806 - DNA, 25 bp, Homo sapien
gattcctgaaaactggctaaattct

SEQ ID NO: 2391807 - DNA, 25 bp, Homo sapien
tcttttgcacctcaactggagggct

SEQ ID NO: 2391808 - DNA, 25 bp, Homo sapien
ggtgctgctcagttaagatctcaag

SEQ ID NO: 2391809 - DNA, 25 bp, Homo sapien
ttaacataccccactctggtgctgc

SEQ ID NO: 2391810 - DNA, 25 bp, Homo sapien
tggagggcttggctttacatacgac

SEQ ID NO: 2391811 - DNA, 25 bp, Homo sapien
tataaatctccagtctaatcacatt

SEQ ID NO: 2391812 - DNA, 25 bp, Homo sapien
ataaatctccagtctaatcacattt

SEQ ID NO: 2391813 - DNA, 25 bp, Homo sapien
ccagggttgaaaagaccagtcactc

SEQ ID NO: 2391814 - DNA, 25 bp, Homo sapien
gaaataggtcctcaaatcccaatga

SEQ ID NO: 2391815 - DNA, 25 bp, Homo sapien
ggtagggtaggaaccccagctgcaa

SEQ ID NO: 2391816 - DNA, 25 bp, Homo sapien
aagggcatctttccagtctaggcac

SEQ ID NO: 2391817 - DNA, 25 bp, Homo sapien
tctcactgtccgtcatctgccagag

SEQ ID NO: 2391818 - DNA, 25 bp, Homo sapien
catgccctggatcacgtagctgagg

SEQ ID NO: 2391819 - DNA, 25 bp, Homo sapien
tcactgatgttgtcacaggagcgca

SEQ ID NO: 2391820 - DNA, 25 bp, Homo sapien
ccttgaggtactgggctatgcggcc

SEQ ID NO: 2391821 - DNA, 25 bp, Homo sapien
caccgacttgtggtaggcggcgtcc

SEQ ID NO: 2391822 - DNA, 25 bp, Homo sapien
tccggcctcgggcaggcgacgagag

SEQ ID NO: 2391823 - DNA, 25 bp, Homo sapien
gacgagagcgcttctccccagccgc

SEQ ID NO: 2391824 - DNA, 25 bp, Homo sapien
gctccggcctcgggcaggcgacgag

SEQ ID NO: 2391825 - DNA, 25 bp, Homo sapien
gcaggcgacgagagcgcttctcccc

SEQ ID NO: 2391826 - DNA, 25 bp, Homo sapien
gtgtcggtgacctctcttcccagtg

SEQ ID NO: 2391827 - DNA, 25 bp, Homo sapien
tgtaattatgtcaccctctagcggt

SEQ ID NO: 2391828 - DNA, 25 bp, Homo sapien
tatccttgaaaagcccactcgggtg

SEQ ID NO: 2391829 - DNA, 25 bp, Homo sapien
tggcctcgcaggaccaggaatgcgt

SEQ ID NO: 2391830 - DNA, 25 bp, Homo sapien
tacggctcctgttatcctactgcga

SEQ ID NO: 2391831 - DNA, 25 bp, Homo sapien
agcatgcgggcagtgatacggctcc

SEQ ID NO: 2391832 - DNA, 25 bp, Homo sapien
tagtcctctttagttggccgctggc

SEQ ID NO: 2391833 - DNA, 25 bp, Homo sapien
gaaaggcaggcatactctgagaggc

SEQ ID NO: 2391834 - DNA, 25 bp, Homo sapien
taaatccacatctgatggtgcctct

SEQ ID NO: 2391835 - DNA, 25 bp, Homo sapien
tggagcaaacgattaccagagcttt

SEQ ID NO: 2391836 - DNA, 25 bp, Homo sapien
taccagagcttttctaaatccacat

SEQ ID NO: 2391837 - DNA, 25 bp, Homo sapien
cattattggagcaaacgattaccag

SEQ ID NO: 2391838 - DNA, 25 bp, Homo sapien
ggtgctgtccttccgctgttccatt

SEQ ID NO: 2391839 - DNA, 25 bp, Homo sapien
gctgtccttccgctgttccattcat

SEQ ID NO: 2391840 - DNA, 25 bp, Homo sapien
tggggctcgccgttgaaggtgctgt

SEQ ID NO: 2391841 - DNA, 25 bp, Homo sapien
aggggtgctgtccttccgctgttcc

SEQ ID NO: 2391842 - DNA, 25 bp, Homo sapien
actactccaggccaagtgtattttt

SEQ ID NO: 2391843 - DNA, 25 bp, Homo sapien
gtgagccactactccaggccaagtg

SEQ ID NO: 2391844 - DNA, 25 bp, Homo sapien
gagccactactccaggccaagtgta

SEQ ID NO: 2391845 - DNA, 25 bp, Homo sapien
gccactactccaggccaagtgtatt

SEQ ID NO: 2391846 - DNA, 25 bp, Homo sapien
tacatctgtaaatagcccggagggc

SEQ ID NO: 2391847 - DNA, 25 bp, Homo sapien
cacggagatcgtggaccagtacatc

SEQ ID NO: 2391848 - DNA, 25 bp, Homo sapien
taaatgggtgggtgctatacaatgg

SEQ ID NO: 2391849 - DNA, 25 bp, Homo sapien
tacaaccagttcaagagcgtgcagg

SEQ ID NO: 2391850 - DNA, 25 bp, Homo sapien
gaaggtggcgggaactcagcttcaa

SEQ ID NO: 2391851 - DNA, 25 bp, Homo sapien
tttcatccacgtgcacttgtgcggc

SEQ ID NO: 2391852 - DNA, 25 bp, Homo sapien
agcttcaacctcgatgtcttcaggg

SEQ ID NO: 2391853 - DNA, 25 bp, Homo sapien
tgtagatgggttccgtaagaggcct

SEQ ID NO: 2391854 - DNA, 25 bp, Homo sapien
gcctgcctttccagcgagaattctt

SEQ ID NO: 2391855 - DNA, 25 bp, Homo sapien
agatctgcacctcccggacttcagg

SEQ ID NO: 2391856 - DNA, 25 bp, Homo sapien
tgcagtttacaggaacggctccttc

SEQ ID NO: 2391857 - DNA, 25 bp, Homo sapien
gagaattcttcatcctccacggttc

SEQ ID NO: 2391858 - DNA, 25 bp, Homo sapien
gaatgtttgcgcctgggctgcagaa

SEQ ID NO: 2391859 - DNA, 25 bp, Homo sapien
gaaagggggccatttgacctgacat

SEQ ID NO: 2391860 - DNA, 25 bp, Homo sapien
tgcatgaccaggctgcgtggacgtt

SEQ ID NO: 2391861 - DNA, 25 bp, Homo sapien
cctgacatgtcaggaaagccctaaa

SEQ ID NO: 2391862 - DNA, 25 bp, Homo sapien
agcgaaccctggcttgttccctggg

SEQ ID NO: 2391863 - DNA, 25 bp, Homo sapien
taaagcacgggtaatggggatgccc

SEQ ID NO: 2391864 - DNA, 25 bp, Homo sapien
atccaggaagggagatgttattatc

SEQ ID NO: 2391865 - DNA, 25 bp, Homo sapien
gcaattttggactccagtatctggg

SEQ ID NO: 2391866 - DNA, 25 bp, Homo sapien
tcttgctgcaggccttttggtcttc

SEQ ID NO: 2391867 - DNA, 25 bp, Homo sapien
ttgctgcaggccttttggtcttcat

SEQ ID NO: 2391868 - DNA, 25 bp, Homo sapien
cttgctgcaggccttttggtcttca

SEQ ID NO: 2391869 - DNA, 25 bp, Homo sapien
tgagatacagtcttgctcgttgccc

SEQ ID NO: 2391870 - DNA, 25 bp, Homo sapien
aggctggagtgcagttgtgagatct

SEQ ID NO: 2391871 - DNA, 25 bp, Homo sapien
caacctccacctcctgggctcaagc

SEQ ID NO: 2391872 - DNA, 25 bp, Homo sapien
gcagttgtgagatctcggctcactg

SEQ ID NO: 2391873 - DNA, 25 bp, Homo sapien
gaaaagggtaatggtatatcttaca

SEQ ID NO: 2391874 - DNA, 25 bp, Homo sapien
aagggtaatggtatatcttacatag

SEQ ID NO: 2391875 - DNA, 25 bp, Homo sapien
ggtatatcttacatagatatagata

SEQ ID NO: 2391876 - DNA, 25 bp, Homo sapien
gggtaatggtatatcttacatagat

SEQ ID NO: 2391877 - DNA, 25 bp, Homo sapien
accgctgtcggaggagtccggcgcc

SEQ ID NO: 2391878 - DNA, 25 bp, Homo sapien
tctgctcaccttcgggtgcagttgc

SEQ ID NO: 2391879 - DNA, 25 bp, Homo sapien
tttcgcggcggagggtcggagcctg

SEQ ID NO: 2391880 - DNA, 25 bp, Homo sapien
gccctccttgcgaccgctgtcggag

SEQ ID NO: 2391881 - DNA, 25 bp, Homo sapien
ctgcttggtacctggagtcctgttt

SEQ ID NO: 2391882 - DNA, 25 bp, Homo sapien
cccccgtccgtcagtgttcgcttct

SEQ ID NO: 2391883 - DNA, 25 bp, Homo sapien
tggtacctggagtcctgttttccca

SEQ ID NO: 2391884 - DNA, 25 bp, Homo sapien
ccaagcccccgtccgtcagtgttcg

SEQ ID NO: 2391885 - DNA, 25 bp, Homo sapien
gaaacttttgcccaaaggcatagaa

SEQ ID NO: 2391886 - DNA, 25 bp, Homo sapien
agaaacttttgcccaaaggcataga

SEQ ID NO: 2391887 - DNA, 25 bp, Homo sapien
aaaggcatagaagttagagggctta

SEQ ID NO: 2391888 - DNA, 25 bp, Homo sapien
aacttttgcccaaaggcatagaagt

SEQ ID NO: 2391889 - DNA, 25 bp, Homo sapien
ctggaaagacccccaacatcttcgg

SEQ ID NO: 2391890 - DNA, 25 bp, Homo sapien
gcagatgcccgtgcacacaggaaca

SEQ ID NO: 2391891 - DNA, 25 bp, Homo sapien
tggctgcagatgcccgtgcacacag

SEQ ID NO: 2391892 - DNA, 25 bp, Homo sapien
catcttcggggagcggtcccctaca

SEQ ID NO: 2391893 - DNA, 25 bp, Homo sapien
gagaagtctgtggtttgttgccctt

SEQ ID NO: 2391894 - DNA, 25 bp, Homo sapien
agggaagagaagtctgtggtttgtt

SEQ ID NO: 2391895 - DNA, 25 bp, Homo sapien
aagagaagtctgtggtttgttgccc

SEQ ID NO: 2391896 - DNA, 25 bp, Homo sapien
ctcagggaagagaagtctgtggttt

SEQ ID NO: 2391897 - DNA, 25 bp, Homo sapien
catgcataggttaccattgtcaaac

SEQ ID NO: 2391898 - DNA, 25 bp, Homo sapien
tacagtcaccatgcataggttacca

SEQ ID NO: 2391899 - DNA, 25 bp, Homo sapien
gtcaccatgcataggttaccattgt

SEQ ID NO: 2391900 - DNA, 25 bp, Homo sapien
cctacagtcaccatgcataggttac

SEQ ID NO: 2391901 - DNA, 25 bp, Homo sapien
cactttgtatttggcctcctcaggt

SEQ ID NO: 2391902 - DNA, 25 bp, Homo sapien
ttttctcactttgtatttggcctcc

SEQ ID NO: 2391903 - DNA, 25 bp, Homo sapien
ttctcactttgtatttggcctcctc

SEQ ID NO: 2391904 - DNA, 25 bp, Homo sapien
tttctcactttgtatttggcctcct

SEQ ID NO: 2391905 - DNA, 25 bp, Homo sapien
tatatgagttcggaccttgccatcg

SEQ ID NO: 2391906 - DNA, 25 bp, Homo sapien
ccatcgatcttaatgaacctctgca

SEQ ID NO: 2391907 - DNA, 25 bp, Homo sapien
cagggtaggttatatgagttcggac

SEQ ID NO: 2391908 - DNA, 25 bp, Homo sapien
atgagttcggaccttgccatcgatc

SEQ ID NO: 2391909 - DNA, 25 bp, Homo sapien
tctttacttcatctcctgtcagggc

SEQ ID NO: 2391910 - DNA, 25 bp, Homo sapien
gtaatcttctttacttcatctcctg

SEQ ID NO: 2391911 - DNA, 25 bp, Homo sapien
tttacttcatctcctgtcagggctt

SEQ ID NO: 2391912 - DNA, 25 bp, Homo sapien
tacttcatctcctgtcagggcttac

SEQ ID NO: 2391913 - DNA, 25 bp, Homo sapien
ctgttccttaggaatatgatgggga

SEQ ID NO: 2391914 - DNA, 25 bp, Homo sapien
taggaatatgatggggagacactct

SEQ ID NO: 2391915 - DNA, 25 bp, Homo sapien
ccttaggaatatgatggggagacac

SEQ ID NO: 2391916 - DNA, 25 bp, Homo sapien
tccttaggaatatgatggggagaca

SEQ ID NO: 2391917 - DNA, 25 bp, Homo sapien
caaagctggaaggatctggttcaac

SEQ ID NO: 2391918 - DNA, 25 bp, Homo sapien
taggtggaccgagcaaaagactcag

SEQ ID NO: 2391919 - DNA, 25 bp, Homo sapien
gatacagcgtataggtgcagccctg

SEQ ID NO: 2391920 - DNA, 25 bp, Homo sapien
tcttgggagcaacagcacgtatcag

SEQ ID NO: 2391921 - DNA, 25 bp, Homo sapien
ccgcccccgaaccacaacttcactg

SEQ ID NO: 2391922 - DNA, 25 bp, Homo sapien
ccccgaaccacaacttcactgagct

SEQ ID NO: 2391923 - DNA, 25 bp, Homo sapien
atgaagtggttgaagcattttccct

SEQ ID NO: 2391924 - DNA, 25 bp, Homo sapien
ttatgatatgcccactttcttgcct

SEQ ID NO: 2391925 - DNA, 25 bp, Homo sapien
caaaaccttttcgagcagcagctag

SEQ ID NO: 2391926 - DNA, 25 bp, Homo sapien
taccgggcaccatgaagcatcttga

SEQ ID NO: 2391927 - DNA, 25 bp, Homo sapien
cagatagagcttccctcccagtgga

SEQ ID NO: 2391928 - DNA, 25 bp, Homo sapien
acctagggcagatggtaccgggcac

SEQ ID NO: 2391929 - DNA, 25 bp, Homo sapien
gggcggcgaggctgaggtgtccgag

SEQ ID NO: 2391930 - DNA, 25 bp, Homo sapien
ggcgaggctgaggtgtccgaggcgc

SEQ ID NO: 2391931 - DNA, 25 bp, Homo sapien
gcggcgaggctgaggtgtccgaggc

SEQ ID NO: 2391932 - DNA, 25 bp, Homo sapien
gcagcaggagtaggggcggcgaggc

SEQ ID NO: 2391933 - DNA, 25 bp, Homo sapien
ttatatcacagtgtcacagggcata

SEQ ID NO: 2391934 - DNA, 25 bp, Homo sapien
catccctatatgctcctgtctgcag

SEQ ID NO: 2391935 - DNA, 25 bp, Homo sapien
acgcgaatgtttcccccgagaagca

SEQ ID NO: 2391936 - DNA, 25 bp, Homo sapien
tgtcacagggcataaacgcgaatgt

SEQ ID NO: 2391937 - DNA, 25 bp, Homo sapien
ggaaggcgtggcaggagtctggtcg

SEQ ID NO: 2391938 - DNA, 25 bp, Homo sapien
tctggatggaaggcgtggcaggagt

SEQ ID NO: 2391939 - DNA, 25 bp, Homo sapien
tggatggaaggcgtggcaggagtct

SEQ ID NO: 2391940 - DNA, 25 bp, Homo sapien
ctctggatggaaggcgtggcaggag

SEQ ID NO: 2391941 - DNA, 25 bp, Homo sapien
taaggtcaatatctcaggaccggag

SEQ ID NO: 2391942 - DNA, 25 bp, Homo sapien
ctgttaaggtcaatatctcaggacc

SEQ ID NO: 2391943 - DNA, 25 bp, Homo sapien
ggtcaatatctcaggaccggagccc

SEQ ID NO: 2391944 - DNA, 25 bp, Homo sapien
caatatctcaggaccggagcccatt

SEQ ID NO: 2391945 - DNA, 25 bp, Homo sapien
tgcagactggaaaaaggtctggaag

SEQ ID NO: 2391946 - DNA, 25 bp, Homo sapien
gcagactggaaaaaggtctggaaga

SEQ ID NO: 2391947 - DNA, 25 bp, Homo sapien
cactggtgggaagatgctgcagtca

SEQ ID NO: 2391948 - DNA, 25 bp, Homo sapien
aggaggaggttactgttgggaatct

SEQ ID NO: 2391949 - DNA, 25 bp, Homo sapien
tgcagtcacaggtggggtctgtcac

SEQ ID NO: 2391950 - DNA, 25 bp, Homo sapien
ttgggaatctgctgcaccacaaata

SEQ ID NO: 2391951 - DNA, 25 bp, Homo sapien
tgttaaatggtgtgccacgggcccg

SEQ ID NO: 2391952 - DNA, 25 bp, Homo sapien
cagccgtgtatactctcagccttca

SEQ ID NO: 2391953 - DNA, 25 bp, Homo sapien
gagcctttgcgacaagtgcacaggg

SEQ ID NO: 2391954 - DNA, 25 bp, Homo sapien
gagtgtctactctgaagccctcgct

SEQ ID NO: 2391955 - DNA, 25 bp, Homo sapien
acgatcccgttggcctcccggatgg

SEQ ID NO: 2391956 - DNA, 25 bp, Homo sapien
atggccggctggtacacgaacacgg

SEQ ID NO: 2391957 - DNA, 25 bp, Homo sapien
agggcccgcactccacgatcccgtt

SEQ ID NO: 2391958 - DNA, 25 bp, Homo sapien
ggtactccgtgtcgcagggctgcag

SEQ ID NO: 2391959 - DNA, 25 bp, Homo sapien
cgagaggagcaagcccacagcggcc

SEQ ID NO: 2391960 - DNA, 25 bp, Homo sapien
ccacagcggccagggctgtgagttt

SEQ ID NO: 2391961 - DNA, 25 bp, Homo sapien
gagcaagcccacagcggccagggct

SEQ ID NO: 2391962 - DNA, 25 bp, Homo sapien
gccagggctgtgagttttgtcccca

SEQ ID NO: 2391963 - DNA, 25 bp, Homo sapien
tccaagtccagtgcgccttcactgg

SEQ ID NO: 2391964 - DNA, 25 bp, Homo sapien
cagagaagagaaattctgagcaggc

SEQ ID NO: 2391965 - DNA, 25 bp, Homo sapien
cagattgagggggatcatcttcaac

SEQ ID NO: 2391966 - DNA, 25 bp, Homo sapien
ttcactggggacactgacatctgtg

SEQ ID NO: 2391967 - DNA, 25 bp, Homo sapien
tggccggaacataagcccagcacag

SEQ ID NO: 2391968 - DNA, 25 bp, Homo sapien
ctggccggaacataagcccagcaca

SEQ ID NO: 2391969 - DNA, 25 bp, Homo sapien
cccagcacagggtggacacggcaca

SEQ ID NO: 2391970 - DNA, 25 bp, Homo sapien
gggtggacacggcacaggaaaacat

SEQ ID NO: 2391971 - DNA, 25 bp, Homo sapien
ccccacagggaatggtctcacgtta

SEQ ID NO: 2391972 - DNA, 25 bp, Homo sapien
gatggcacatggagtggcggtgtcc

SEQ ID NO: 2391973 - DNA, 25 bp, Homo sapien
tggcggtgtcccaagatgatgtcac

SEQ ID NO: 2391974 - DNA, 25 bp, Homo sapien
tgtgaacaacgatgcttcagggtca

SEQ ID NO: 2391975 - DNA, 25 bp, Homo sapien
ggcccctctgtcgtaccaggagccc

SEQ ID NO: 2391976 - DNA, 25 bp, Homo sapien
ccctctgtcgtaccaggagccccag

SEQ ID NO: 2391977 - DNA, 25 bp, Homo sapien
ctctgtcgtaccaggagccccagac

SEQ ID NO: 2391978 - DNA, 25 bp, Homo sapien
ctcggcccctctgtcgtaccaggag

SEQ ID NO: 2391979 - DNA, 25 bp, Homo sapien
cttccctgcttgagggctctggttg

SEQ ID NO: 2391980 - DNA, 25 bp, Homo sapien
caaggagctggagtatccctgacag

SEQ ID NO: 2391981 - DNA, 25 bp, Homo sapien
atgcccagggattgtgccctccttc

SEQ ID NO: 2391982 - DNA, 25 bp, Homo sapien
tgaatctcggagacctctgagccct

SEQ ID NO: 2391983 - DNA, 25 bp, Homo sapien
tggtcgccgtcaagaaggcagaaat

SEQ ID NO: 2391984 - DNA, 25 bp, Homo sapien
tcgccgtcaagaaggcagaaattgg

SEQ ID NO: 2391985 - DNA, 25 bp, Homo sapien
agcagccacctggtcgccgtcaaga

SEQ ID NO: 2391986 - DNA, 25 bp, Homo sapien
cacctggtcgccgtcaagaaggcag

SEQ ID NO: 2391987 - DNA, 25 bp, Homo sapien
aggccagcagcccagcaccccccat

SEQ ID NO: 2391988 - DNA, 25 bp, Homo sapien
tgccctgccactgggagcaggggca

SEQ ID NO: 2391989 - DNA, 25 bp, Homo sapien
cagagagtgggctgccctgccactg

SEQ ID NO: 2391990 - DNA, 25 bp, Homo sapien
gggcagcagagcacaggccagcagc

SEQ ID NO: 2391991 - DNA, 25 bp, Homo sapien
gtgactcgagggtttgcacatggcc

SEQ ID NO: 2391992 - DNA, 25 bp, Homo sapien
tgtggtggtgactcgagggtttgca

SEQ ID NO: 2391993 - DNA, 25 bp, Homo sapien
agggtttgcacatggcctgatagtc

SEQ ID NO: 2391994 - DNA, 25 bp, Homo sapien
gactcgagggtttgcacatggcctg

SEQ ID NO: 2391995 - DNA, 25 bp, Homo sapien
catccacctcccccagaaatcttcc

SEQ ID NO: 2391996 - DNA, 25 bp, Homo sapien
accatccacctcccccagaaatctt

SEQ ID NO: 2391997 - DNA, 25 bp, Homo sapien
agcaccatccacctcccccagaaat

SEQ ID NO: 2391998 - DNA, 25 bp, Homo sapien
ctgggtcaggacagcaccatccacc

SEQ ID NO: 2391999 - DNA, 25 bp, Homo sapien
gagtggcacccaaagcatagcacga

SEQ ID NO: 2392000 - DNA, 25 bp, Homo sapien
gccttgtcgatttaggagccccaga

SEQ ID NO: 2392001 - DNA, 25 bp, Homo sapien
caaacgtcgacgtgggatgccttgt

SEQ ID NO: 2392002 - DNA, 25 bp, Homo sapien
tcacaaataagcagtggcccgtggg

SEQ ID NO: 2392003 - DNA, 25 bp, Homo sapien
ctggggacagcctccgtttcttctc

SEQ ID NO: 2392004 - DNA, 25 bp, Homo sapien
gggacagcctccgtttcttctctaa

SEQ ID NO: 2392005 - DNA, 25 bp, Homo sapien
ggggacagcctccgtttcttctcta

SEQ ID NO: 2392006 - DNA, 25 bp, Homo sapien
tggggacagcctccgtttcttctct

SEQ ID NO: 2392007 - DNA, 25 bp, Homo sapien
cagggcatgtggtgtcccggaagat

SEQ ID NO: 2392008 - DNA, 25 bp, Homo sapien
gaaggtagaaggagcaccgctgcca

SEQ ID NO: 2392009 - DNA, 25 bp, Homo sapien
agggccatttgggacgccaggaagg

SEQ ID NO: 2392010 - DNA, 25 bp, Homo sapien
ccatttgggacgccaggaaggtaga

SEQ ID NO: 2392011 - DNA, 25 bp, Homo sapien
tttctaggccccacatcgagggttg

SEQ ID NO: 2392012 - DNA, 25 bp, Homo sapien
gggtgccgcccagaagcaaatgaca

SEQ ID NO: 2392013 - DNA, 25 bp, Homo sapien
cagattcagggtgacagatccacta

SEQ ID NO: 2392014 - DNA, 25 bp, Homo sapien
caaatgacaggaatcggagtcccca

SEQ ID NO: 2392015 - DNA, 25 bp, Homo sapien
accactggtttcaactcttatcatc

SEQ ID NO: 2392016 - DNA, 25 bp, Homo sapien
aaaatacaaaggtccggtgctctgt

SEQ ID NO: 2392017 - DNA, 25 bp, Homo sapien
aaaaatacaaaggtccggtgctctg

SEQ ID NO: 2392018 - DNA, 25 bp, Homo sapien
tctcccagaacaacggaaaaataca

SEQ ID NO: 2392019 - DNA, 25 bp, Homo sapien
tgccctgttccgacgacttctttgg

SEQ ID NO: 2392020 - DNA, 25 bp, Homo sapien
gaccacagccctaccatgcgtggag

SEQ ID NO: 2392021 - DNA, 25 bp, Homo sapien
tttggatccgaagccgcatcccggt

SEQ ID NO: 2392022 - DNA, 25 bp, Homo sapien
gacttctttggatccgaagccgcat

SEQ ID NO: 2392023 - DNA, 25 bp, Homo sapien
tcaggtttgaatgggcttctttctc

SEQ ID NO: 2392024 - DNA, 25 bp, Homo sapien
caggaggcggttctgatgcttctgc

SEQ ID NO: 2392025 - DNA, 25 bp, Homo sapien
aatacatctggtgaatatatctgga

SEQ ID NO: 2392026 - DNA, 25 bp, Homo sapien
tagtagcaaagctcacacagaacca

SEQ ID NO: 2392027 - DNA, 25 bp, Homo sapien
aacccgttgttgtcgatgacgaagc

SEQ ID NO: 2392028 - DNA, 25 bp, Homo sapien
tgtcgatgacgaagcagtccagatc

SEQ ID NO: 2392029 - DNA, 25 bp, Homo sapien
ggagatcagaatgaacccgttgttg

SEQ ID NO: 2392030 - DNA, 25 bp, Homo sapien
ctcttggagatcagaatgaacccgt

SEQ ID NO: 2392031 - DNA, 25 bp, Homo sapien
agctctgtgtgcacggcccatccac

SEQ ID NO: 2392032 - DNA, 25 bp, Homo sapien
gtcctcgcagctctgtgtgcacggc

SEQ ID NO: 2392033 - DNA, 25 bp, Homo sapien
ctctgtgtgcacggcccatccacag

SEQ ID NO: 2392034 - DNA, 25 bp, Homo sapien
cctcgcagctctgtgtgcacggccc

SEQ ID NO: 2392035 - DNA, 25 bp, Homo sapien
ctgccgcgttgccgcccagaatttg

SEQ ID NO: 2392036 - DNA, 25 bp, Homo sapien
cgcgttgccgcccagaatttgcgct

SEQ ID NO: 2392037 - DNA, 25 bp, Homo sapien
ccgcccagaatttgcgctggaggaa

SEQ ID NO: 2392038 - DNA, 25 bp, Homo sapien
gaatttgcgctggaggaattccagc

SEQ ID NO: 2392039 - DNA, 25 bp, Homo sapien
tacagggcagaaagagagagggcaa

SEQ ID NO: 2392040 - DNA, 25 bp, Homo sapien
acagggcagaaagagagagggcaag

SEQ ID NO: 2392041 - DNA, 25 bp, Homo sapien
ctacagggcagaaagagagagggca

SEQ ID NO: 2392042 - DNA, 25 bp, Homo sapien
ccaagcaggtgctcacatatccaga

SEQ ID NO: 2392043 - DNA, 25 bp, Homo sapien
tgctcacatatccagagaaatctgg

SEQ ID NO: 2392044 - DNA, 25 bp, Homo sapien
ctgactttctggttcccaaataggc

SEQ ID NO: 2392045 - DNA, 25 bp, Homo sapien
tctggttcccaaataggcttggaga

SEQ ID NO: 2392046 - DNA, 25 bp, Homo sapien
cttgaacaggtcctgtgatatggga

SEQ ID NO: 2392047 - DNA, 25 bp, Homo sapien
cctcccttggagtctcatggcaatc

SEQ ID NO: 2392048 - DNA, 25 bp, Homo sapien
ggtcctgtgatatgggaacatttga

SEQ ID NO: 2392049 - DNA, 25 bp, Homo sapien
tcccttggagtctcatggcaatcct

SEQ ID NO: 2392050 - DNA, 25 bp, Homo sapien
tttgctggctcatgacaaagatgag

SEQ ID NO: 2392051 - DNA, 25 bp, Homo sapien
cccatttgctggctcatgacaaaga

SEQ ID NO: 2392052 - DNA, 25 bp, Homo sapien
gacccatttgctggctcatgacaaa

SEQ ID NO: 2392053 - DNA, 25 bp, Homo sapien
gagacccatttgctggctcatgaca

SEQ ID NO: 2392054 - DNA, 25 bp, Homo sapien
gaggatcatcagagcgaatcacgct

SEQ ID NO: 2392055 - DNA, 25 bp, Homo sapien
tcacgctactgctcagaatgaccag

SEQ ID NO: 2392056 - DNA, 25 bp, Homo sapien
ctcttcgggattgaagaaagcttcc

SEQ ID NO: 2392057 - DNA, 25 bp, Homo sapien
gaatgaccagctcttcgggattgaa

SEQ ID NO: 2392058 - DNA, 25 bp, Homo sapien
gcatggtgggcccctgttttagacc

SEQ ID NO: 2392059 - DNA, 25 bp, Homo sapien
cgagggaatgcaaagcactcggctt

SEQ ID NO: 2392060 - DNA, 25 bp, Homo sapien
ttcctgggagttatcaggaaagctt

SEQ ID NO: 2392061 - DNA, 25 bp, Homo sapien
gagaaattcaggcaaagggcccgag

SEQ ID NO: 2392062 - DNA, 25 bp, Homo sapien
cgtccccaggagggcctgtcatgac

SEQ ID NO: 2392063 - DNA, 25 bp, Homo sapien
cttcgtccccaggagggcctgtcat

SEQ ID NO: 2392064 - DNA, 25 bp, Homo sapien
ttcgtccccaggagggcctgtcatg

SEQ ID NO: 2392065 - DNA, 25 bp, Homo sapien
tcgtccccaggagggcctgtcatga

SEQ ID NO: 2392066 - DNA, 25 bp, Homo sapien
ccccgtcccccgtctgccacaagca

SEQ ID NO: 2392067 - DNA, 25 bp, Homo sapien
cagcagccccgtcccccgtctgcca

SEQ ID NO: 2392068 - DNA, 25 bp, Homo sapien
cccccgtctgccacaagcagtccac

SEQ ID NO: 2392069 - DNA, 25 bp, Homo sapien
ccgtcccccgtctgccacaagcagt

SEQ ID NO: 2392070 - DNA, 25 bp, Homo sapien
atttctataggaatcccaggagggt

SEQ ID NO: 2392071 - DNA, 25 bp, Homo sapien
tcagagtaaagacgggtgagtaccg

SEQ ID NO: 2392072 - DNA, 25 bp, Homo sapien
tactggagggttgagagccacctga

SEQ ID NO: 2392073 - DNA, 25 bp, Homo sapien
gccacctgattgaaggcgtttgcag

SEQ ID NO: 2392074 - DNA, 25 bp, Homo sapien
gcaggaatagctgcagttgcttcct

SEQ ID NO: 2392075 - DNA, 25 bp, Homo sapien
aggaatagctgcagttgcttcctac

SEQ ID NO: 2392076 - DNA, 25 bp, Homo sapien
gacagggggtggtcggggcatggga

SEQ ID NO: 2392077 - DNA, 25 bp, Homo sapien
ctgcaggaatagctgcagttgcttc

SEQ ID NO: 2392078 - DNA, 25 bp, Homo sapien
tgagcatcccaaaggtgcacgacac

SEQ ID NO: 2392079 - DNA, 25 bp, Homo sapien
gacactgggaactctgagcccacag

SEQ ID NO: 2392080 - DNA, 25 bp, Homo sapien
gccagatgacagtcccgggtggcat

SEQ ID NO: 2392081 - DNA, 25 bp, Homo sapien
cagcgctggcgccagatgacagtcc

SEQ ID NO: 2392082 - DNA, 25 bp, Homo sapien
ccaagagccttgtgctgtcgttgtg

SEQ ID NO: 2392083 - DNA, 25 bp, Homo sapien
gccaagagccttgtgctgtcgttgt

SEQ ID NO: 2392084 - DNA, 25 bp, Homo sapien
cagccaagagccttgtgctgtcgtt

SEQ ID NO: 2392085 - DNA, 25 bp, Homo sapien
agccaagagccttgtgctgtcgttg

SEQ ID NO: 2392086 - DNA, 25 bp, Homo sapien
tcatgggaagcggttgggatggcag

SEQ ID NO: 2392087 - DNA, 25 bp, Homo sapien
cggttgggatggcagtcaggtgctg

SEQ ID NO: 2392088 - DNA, 25 bp, Homo sapien
cagccccaagaaactcgggggtcat

SEQ ID NO: 2392089 - DNA, 25 bp, Homo sapien
cagacagccccaagaaactcggggg

SEQ ID NO: 2392090 - DNA, 25 bp, Homo sapien
ctgctggggtgtcccgcagctgtgc

SEQ ID NO: 2392091 - DNA, 25 bp, Homo sapien
tggggggtacacagcggggccaggc

SEQ ID NO: 2392092 - DNA, 25 bp, Homo sapien
gggagccttagtgggggctggacac

SEQ ID NO: 2392093 - DNA, 25 bp, Homo sapien
gcctggcttcttgacccacacaggg

SEQ ID NO: 2392094 - DNA, 25 bp, Homo sapien
ggccttcggcagactggcaccctcg

SEQ ID NO: 2392095 - DNA, 25 bp, Homo sapien
gcctgcggggccttcggcagactgg

SEQ ID NO: 2392096 - DNA, 25 bp, Homo sapien
tgtgcccagtcttgtgacccctctg

SEQ ID NO: 2392097 - DNA, 25 bp, Homo sapien
gacccctctgccaacgcctgcgggg

SEQ ID NO: 2392098 - DNA, 25 bp, Homo sapien
agggcccggagagccgtgggcctca

SEQ ID NO: 2392099 - DNA, 25 bp, Homo sapien
cgacagggcccggagagccgtgggc

SEQ ID NO: 2392100 - DNA, 25 bp, Homo sapien
acagggcccggagagccgtgggcct

SEQ ID NO: 2392101 - DNA, 25 bp, Homo sapien
tccccagagcgacagggcccggaga

SEQ ID NO: 2392102 - DNA, 25 bp, Homo sapien
gtactcctggcctgtgacttcaggg

SEQ ID NO: 2392103 - DNA, 25 bp, Homo sapien
agtactcctggcctgtgacttcagg

SEQ ID NO: 2392104 - DNA, 25 bp, Homo sapien
tactcctggcctgtgacttcagggc

SEQ ID NO: 2392105 - DNA, 25 bp, Homo sapien
ccttcttttggcgtgtgggctggta

SEQ ID NO: 2392106 - DNA, 25 bp, Homo sapien
ggccatggccacagtcttccttctt

SEQ ID NO: 2392107 - DNA, 25 bp, Homo sapien
agtcttccttcttttggcgtgtggg

SEQ ID NO: 2392108 - DNA, 25 bp, Homo sapien
tcttttggcgtgtgggctggtacca

SEQ ID NO: 2392109 - DNA, 25 bp, Homo sapien
aggcctggcgctcacacgcttacag

SEQ ID NO: 2392110 - DNA, 25 bp, Homo sapien
ggtgcgcaatcgtcaccatacagcc

SEQ ID NO: 2392111 - DNA, 25 bp, Homo sapien
cagtgccagccgtttccagggacag

SEQ ID NO: 2392112 - DNA, 25 bp, Homo sapien
ctcgagctcggtgcgcaatcgtcac

SEQ ID NO: 2392113 - DNA, 25 bp, Homo sapien
agggcctcggttacaaggcaggtgc

SEQ ID NO: 2392114 - DNA, 25 bp, Homo sapien
tggccagggcctcggttacaaggca

SEQ ID NO: 2392115 - DNA, 25 bp, Homo sapien
ccagggcctcggttacaaggcaggt

SEQ ID NO: 2392116 - DNA, 25 bp, Homo sapien
ggcctcggttacaaggcaggtgcct

SEQ ID NO: 2392117 - DNA, 25 bp, Homo sapien
gttggatcgcgcaacttttcagaac

SEQ ID NO: 2392118 - DNA, 25 bp, Homo sapien
ctgcgttcacggagccaggatggct

SEQ ID NO: 2392119 - DNA, 25 bp, Homo sapien
tcgaatgcctgttggatcgcgcaac

SEQ ID NO: 2392120 - DNA, 25 bp, Homo sapien
aggatggctgagctcgaatgcctgt

SEQ ID NO: 2392121 - DNA, 25 bp, Homo sapien
gcttgccgtcaccaccatgggttca

SEQ ID NO: 2392122 - DNA, 25 bp, Homo sapien
acagctgtgcttgccgtcaccacca

SEQ ID NO: 2392123 - DNA, 25 bp, Homo sapien
gctgtcctcttgtccacggtcaccg

SEQ ID NO: 2392124 - DNA, 25 bp, Homo sapien
gctgtgcttgccgtcaccaccatgg

SEQ ID NO: 2392125 - DNA, 25 bp, Homo sapien
taaaagcaggcgaaggcatccttgg

SEQ ID NO: 2392126 - DNA, 25 bp, Homo sapien
tttctgcgtgtttgtcggctgcggc

SEQ ID NO: 2392127 - DNA, 25 bp, Homo sapien
gcgctaccactttcttggaatagga

SEQ ID NO: 2392128 - DNA, 25 bp, Homo sapien
attttgcccacaacacctgtgttgt

SEQ ID NO: 2392129 - DNA, 25 bp, Homo sapien
ggtgggtgatcctggattgctctct

SEQ ID NO: 2392130 - DNA, 25 bp, Homo sapien
tgggtgatcctggattgctctctgt

SEQ ID NO: 2392131 - DNA, 25 bp, Homo sapien
gacaggctgcatttcagcactgggt

SEQ ID NO: 2392132 - DNA, 25 bp, Homo sapien
gggtgatcctggattgctctctgtg

SEQ ID NO: 2392133 - DNA, 25 bp, Homo sapien
gtgtctacagacatctcgaaggtgg

SEQ ID NO: 2392134 - DNA, 25 bp, Homo sapien
taggaaacgcagatgtgagcatgtg

SEQ ID NO: 2392135 - DNA, 25 bp, Homo sapien
tggcagccccgacaatattccctgg

SEQ ID NO: 2392136 - DNA, 25 bp, Homo sapien
gagcatgtggagaccctaatgaggc

SEQ ID NO: 2392137 - DNA, 25 bp, Homo sapien
gctggcctcgtcctcaggtgtcagg

SEQ ID NO: 2392138 - DNA, 25 bp, Homo sapien
tctgcccagcggaggttgaagacga

SEQ ID NO: 2392139 - DNA, 25 bp, Homo sapien
gtccagggtgaacacgctggcctcg

SEQ ID NO: 2392140 - DNA, 25 bp, Homo sapien
gctctgaggcctggcggtaccacag

SEQ ID NO: 2392141 - DNA, 25 bp, Homo sapien
ctgtcggagaccttctcggagccca

SEQ ID NO: 2392142 - DNA, 25 bp, Homo sapien
agaccttctcggagcccacgaacaa

SEQ ID NO: 2392143 - DNA, 25 bp, Homo sapien
ttctcggagcccacgaacaagctgc

SEQ ID NO: 2392144 - DNA, 25 bp, Homo sapien
ggagcccacgaacaagctgcttctc

SEQ ID NO: 2392145 - DNA, 25 bp, Homo sapien
gataatcagtttatctagatgcaga

SEQ ID NO: 2392146 - DNA, 25 bp, Homo sapien
gatgttgaagtctcgtatccaaaaa

SEQ ID NO: 2392147 - DNA, 25 bp, Homo sapien
cattaacttagggaggattaatatc

SEQ ID NO: 2392148 - DNA, 25 bp, Homo sapien
tgtctttccatgtgttccagcctct

SEQ ID NO: 2392149 - DNA, 25 bp, Homo sapien
tagaggaggtttgacatcttcacaa

SEQ ID NO: 2392150 - DNA, 25 bp, Homo sapien
gctgggaaaaccgaggtcaagttca

SEQ ID NO: 2392151 - DNA, 25 bp, Homo sapien
tattcaggagcaaggtatgacccac

SEQ ID NO: 2392152 - DNA, 25 bp, Homo sapien
tagtatcaggagaagaccagcaaag

SEQ ID NO: 2392153 - DNA, 25 bp, Homo sapien
gcgctgtccagtaggcttccatggg

SEQ ID NO: 2392154 - DNA, 25 bp, Homo sapien
gccagcgctgtccagtaggcttcca

SEQ ID NO: 2392155 - DNA, 25 bp, Homo sapien
tgagggccagcgctgtccagtaggc

SEQ ID NO: 2392156 - DNA, 25 bp, Homo sapien
caccgcgtcaaacagcacctcccgg

SEQ ID NO: 2392157 - DNA, 25 bp, Homo sapien
cttccggtggtctgggtcaatatct

SEQ ID NO: 2392158 - DNA, 25 bp, Homo sapien
ggtggtctgggtcaatatctgtgat

SEQ ID NO: 2392159 - DNA, 25 bp, Homo sapien
tgaggaagcggatcatggcctctag

SEQ ID NO: 2392160 - DNA, 25 bp, Homo sapien
gtgaggaagcggatcatggcctcta

SEQ ID NO: 2392161 - DNA, 25 bp, Homo sapien
ttccacagacgtgttccccagaagg

SEQ ID NO: 2392162 - DNA, 25 bp, Homo sapien
cccagaaggatgtattctccgtggc

SEQ ID NO: 2392163 - DNA, 25 bp, Homo sapien
tgtattctccgtggccccgggacag

SEQ ID NO: 2392164 - DNA, 25 bp, Homo sapien
ttcttccacagacgtgttccccaga

SEQ ID NO: 2392165 - DNA, 25 bp, Homo sapien
tgaaaggggtgtcgctgatgtccgt

SEQ ID NO: 2392166 - DNA, 25 bp, Homo sapien
tgaagaagtagtcattggtcaggaa

SEQ ID NO: 2392167 - DNA, 25 bp, Homo sapien
ccgtgaagaagtagtcattggtcag

SEQ ID NO: 2392168 - DNA, 25 bp, Homo sapien
aagaagtagtcattggtcaggaaaa

SEQ ID NO: 2392169 - DNA, 25 bp, Homo sapien
cccccagggctcttggggtcttcat

SEQ ID NO: 2392170 - DNA, 25 bp, Homo sapien
ccacctcgcccccagggctcttggg

SEQ ID NO: 2392171 - DNA, 25 bp, Homo sapien
ccccacctcgcccccagggctcttg

SEQ ID NO: 2392172 - DNA, 25 bp, Homo sapien
gcagagaagagcggcccccagcccc

SEQ ID NO: 2392173 - DNA, 25 bp, Homo sapien
tgatgaagcacatttgagaaatgtt

SEQ ID NO: 2392174 - DNA, 25 bp, Homo sapien
ttactctgccgtgtatggcaaatgc

SEQ ID NO: 2392175 - DNA, 25 bp, Homo sapien
actctgccgtgtatggcaaatgctg

SEQ ID NO: 2392176 - DNA, 25 bp, Homo sapien
tgctgcaagatgaacatcccatttg

SEQ ID NO: 2392177 - DNA, 25 bp, Homo sapien
gacaaggtgggcgatgagaacgagg

SEQ ID NO: 2392178 - DNA, 25 bp, Homo sapien
aggtgggcgatgagaacgaggaggc

SEQ ID NO: 2392179 - DNA, 25 bp, Homo sapien
tgccgacaaggtgggcgatgagaac

SEQ ID NO: 2392180 - DNA, 25 bp, Homo sapien
caaggtgggcgatgagaacgaggag

SEQ ID NO: 2392181 - DNA, 25 bp, Homo sapien
gcgtgttgttctcgcccagcagacg

SEQ ID NO: 2392182 - DNA, 25 bp, Homo sapien
agcagacgctcctccgcagatccga

SEQ ID NO: 2392183 - DNA, 25 bp, Homo sapien
gggatcggcgtgttgttctcgccca

SEQ ID NO: 2392184 - DNA, 25 bp, Homo sapien
ctccgcagatccgaactggttgcct

SEQ ID NO: 2392185 - DNA, 25 bp, Homo sapien
tgtagaattgccgatggctgcccgc

SEQ ID NO: 2392186 - DNA, 25 bp, Homo sapien
gctccgctccggctgtagaattgcc

SEQ ID NO: 2392187 - DNA, 25 bp, Homo sapien
aaaacgccttcgtgccgcggacacg

SEQ ID NO: 2392188 - DNA, 25 bp, Homo sapien
ccgcaatgctcgcagggagtcgttg

SEQ ID NO: 2392189 - DNA, 25 bp, Homo sapien
cagctggattcctcgtaggaaaatc

SEQ ID NO: 2392190 - DNA, 25 bp, Homo sapien
caaccggaagcccaggaccgtggtg

SEQ ID NO: 2392191 - DNA, 25 bp, Homo sapien
gggtcaggaagagtcgtattcagct

SEQ ID NO: 2392192 - DNA, 25 bp, Homo sapien
cgtaggaaaatccggctagaacctg

SEQ ID NO: 2392193 - DNA, 25 bp, Homo sapien
ctcctctctgggtgaggttcagctg

SEQ ID NO: 2392194 - DNA, 25 bp, Homo sapien
ggttcagctgcagtcccgcgctggc

SEQ ID NO: 2392195 - DNA, 25 bp, Homo sapien
aggccccgtgggtgccgctcacgct

SEQ ID NO: 2392196 - DNA, 25 bp, Homo sapien
gtcgcgtggtccctcctctctgggt

SEQ ID NO: 2392197 - DNA, 25 bp, Homo sapien
tccaaagcacaatcgcgtgcctggg

SEQ ID NO: 2392198 - DNA, 25 bp, Homo sapien
tcatcgagaaggcagcgaagctggc

SEQ ID NO: 2392199 - DNA, 25 bp, Homo sapien
cacttccgcattggatggcaggtca

SEQ ID NO: 2392200 - DNA, 25 bp, Homo sapien
tttactgcaagagccactgtcaagc

SEQ ID NO: 2392201 - DNA, 25 bp, Homo sapien
tattctacaacctgctgggaagcct

SEQ ID NO: 2392202 - DNA, 25 bp, Homo sapien
agtaaagctttcgtttcagatacgg

SEQ ID NO: 2392203 - DNA, 25 bp, Homo sapien
tagggctccaagaacatgtaattag

SEQ ID NO: 2392204 - DNA, 25 bp, Homo sapien
tagaccacttgataccatctcacag

SEQ ID NO: 2392205 - DNA, 25 bp, Homo sapien
gaaccttcacatccatcgagagagt

SEQ ID NO: 2392206 - DNA, 25 bp, Homo sapien
catcggaaccttcacatccatcgag

SEQ ID NO: 2392207 - DNA, 25 bp, Homo sapien
cacatccatcgagagagtacctgtt

SEQ ID NO: 2392208 - DNA, 25 bp, Homo sapien
ctttatccatcggaaccttcacatc

SEQ ID NO: 2392209 - DNA, 25 bp, Homo sapien
ggatgtagagcctaactagcttccc

SEQ ID NO: 2392210 - DNA, 25 bp, Homo sapien
tcctctaggacgagatattgcaatc

SEQ ID NO: 2392211 - DNA, 25 bp, Homo sapien
gactctgcagcttatacacatgatc

SEQ ID NO: 2392212 - DNA, 25 bp, Homo sapien
gagtgacctcaaagctcacagccac

SEQ ID NO: 2392213 - DNA, 25 bp, Homo sapien
ctccacttcggagagatccacactg

SEQ ID NO: 2392214 - DNA, 25 bp, Homo sapien
actccacttcggagagatccacact

SEQ ID NO: 2392215 - DNA, 25 bp, Homo sapien
agatccacactgttgtagttaggtt

SEQ ID NO: 2392216 - DNA, 25 bp, Homo sapien
cacactgttgtagttaggtttgggt

SEQ ID NO: 2392217 - DNA, 25 bp, Homo sapien
tacgtcctgctcaagtttatctctt

SEQ ID NO: 2392218 - DNA, 25 bp, Homo sapien
caaagcctttcaggtatattcataa

SEQ ID NO: 2392219 - DNA, 25 bp, Homo sapien
catgtggtcagtatacgtcctgctc

SEQ ID NO: 2392220 - DNA, 25 bp, Homo sapien
tcaatcaatccagtaattacttaag

SEQ ID NO: 2392221 - DNA, 25 bp, Homo sapien
gttcagaaaggcgtatccgtgcact

SEQ ID NO: 2392222 - DNA, 25 bp, Homo sapien
ttggtgttcagaaaggcgtatccgt

SEQ ID NO: 2392223 - DNA, 25 bp, Homo sapien
agaaaggcgtatccgtgcactccaa

SEQ ID NO: 2392224 - DNA, 25 bp, Homo sapien
gatgggagaggatgtagccattgtt

SEQ ID NO: 2392225 - DNA, 25 bp, Homo sapien
tctctcagggccacatctgagccca

SEQ ID NO: 2392226 - DNA, 25 bp, Homo sapien
taccggggcgccagcttcatcagct

SEQ ID NO: 2392227 - DNA, 25 bp, Homo sapien
caccacacccaggagaatgccatgg

SEQ ID NO: 2392228 - DNA, 25 bp, Homo sapien
cacccaggagaatgccatgggatcg

SEQ ID NO: 2392229 - DNA, 25 bp, Homo sapien
ttgctgaagactggcatggccacag

SEQ ID NO: 2392230 - DNA, 25 bp, Homo sapien
cttcttgctgaagactggcatggcc

SEQ ID NO: 2392231 - DNA, 25 bp, Homo sapien
cacagtggtgagcagtgtcaggctc

SEQ ID NO: 2392232 - DNA, 25 bp, Homo sapien
actggcatggccacagtggtgagca

SEQ ID NO: 2392233 - DNA, 25 bp, Homo sapien
catgtaggcctctgtccagatgatg

SEQ ID NO: 2392234 - DNA, 25 bp, Homo sapien
tccatcacgttctcctgggtgtccg

SEQ ID NO: 2392235 - DNA, 25 bp, Homo sapien
ccagcgttgagatctgcgtgtagta

SEQ ID NO: 2392236 - DNA, 25 bp, Homo sapien
tgagcacgtgcaggtattccatcac

SEQ ID NO: 2392237 - DNA, 25 bp, Homo sapien
gcccatggggaagcccgtgctcagc

SEQ ID NO: 2392238 - DNA, 25 bp, Homo sapien
aagcccgtgctcagcacttccaggg

SEQ ID NO: 2392239 - DNA, 25 bp, Homo sapien
gacatagcactgctcctcttagggg

SEQ ID NO: 2392240 - DNA, 25 bp, Homo sapien
gggaagcccgtgctcagcacttcca

SEQ ID NO: 2392241 - DNA, 25 bp, Homo sapien
cacttcatgcggtcagcaaaagaca

SEQ ID NO: 2392242 - DNA, 25 bp, Homo sapien
ctttgttgttgcatgcaatccactt

SEQ ID NO: 2392243 - DNA, 25 bp, Homo sapien
gttgcatgcaatccacttcatgcgg

SEQ ID NO: 2392244 - DNA, 25 bp, Homo sapien
catgcaatccacttcatgcggtcag

SEQ ID NO: 2392245 - DNA, 25 bp, Homo sapien
ggcttccttgcttggcctcttggaa

SEQ ID NO: 2392246 - DNA, 25 bp, Homo sapien
tacttctcaaacaccggctcgtagt

SEQ ID NO: 2392247 - DNA, 25 bp, Homo sapien
tacagtctggccagttatacttctc

SEQ ID NO: 2392248 - DNA, 25 bp, Homo sapien
ggctcgtagtcctccacggcgccgt

SEQ ID NO: 2392249 - DNA, 25 bp, Homo sapien
cctcccaggcctcattacagtgggc

SEQ ID NO: 2392250 - DNA, 25 bp, Homo sapien
ctgtgtagggaagaggagtgcccat

SEQ ID NO: 2392251 - DNA, 25 bp, Homo sapien
gtgcccatgaccacaggccaagccc

SEQ ID NO: 2392252 - DNA, 25 bp, Homo sapien
tcccaggcctcattacagtgggcac

SEQ ID NO: 2392253 - DNA, 25 bp, Homo sapien
acctttgaccatcaactcctccacc

SEQ ID NO: 2392254 - DNA, 25 bp, Homo sapien
cagggcttggtccacgacccccaca

SEQ ID NO: 2392255 - DNA, 25 bp, Homo sapien
ctttgaccatcaactcctccaccag

SEQ ID NO: 2392256 - DNA, 25 bp, Homo sapien
cttctctcagggcttggtccacgac

SEQ ID NO: 2392257 - DNA, 25 bp, Homo sapien
ccatgggtgagatattagagaagca

SEQ ID NO: 2392258 - DNA, 25 bp, Homo sapien
gtgagatattagagaagcatcaggg

SEQ ID NO: 2392259 - DNA, 25 bp, Homo sapien
ggttgagtgggccagtggagcttca

SEQ ID NO: 2392260 - DNA, 25 bp, Homo sapien
ctgccatgggtgagatattagagaa

SEQ ID NO: 2392261 - DNA, 25 bp, Homo sapien
tcggtccgcctggacgaggatccct

SEQ ID NO: 2392262 - DNA, 25 bp, Homo sapien
cgatgtaatggacgtagtcattgta

SEQ ID NO: 2392263 - DNA, 25 bp, Homo sapien
tccgcctggacgaggatccctttaa

SEQ ID NO: 2392264 - DNA, 25 bp, Homo sapien
cctttaaaacaaggctcgatgtaat

SEQ ID NO: 2392265 - DNA, 25 bp, Homo sapien
ttctagaacaggaaggcacatttac

SEQ ID NO: 2392266 - DNA, 25 bp, Homo sapien
tctagagcaagtgagagctattcta

SEQ ID NO: 2392267 - DNA, 25 bp, Homo sapien
gagcaagtgagagctattctagaac

SEQ ID NO: 2392268 - DNA, 25 bp, Homo sapien
tttctagagcaagtgagagctattc

SEQ ID NO: 2392269 - DNA, 25 bp, Homo sapien
cctcagccccttcatactgccgctc

SEQ ID NO: 2392270 - DNA, 25 bp, Homo sapien
cccccagggtgtccaagatggtggt

SEQ ID NO: 2392271 - DNA, 25 bp, Homo sapien
agccccttcatactgccgctcacgt

SEQ ID NO: 2392272 - DNA, 25 bp, Homo sapien
tcccccagggtgtccaagatggtgg

SEQ ID NO: 2392273 - DNA, 25 bp, Homo sapien
gcggtttcggcagtcaaaagtaatg

SEQ ID NO: 2392274 - DNA, 25 bp, Homo sapien
cagccgcggtttcggcagtcaaaag

SEQ ID NO: 2392275 - DNA, 25 bp, Homo sapien
agtcaaaagtaatgactccattctc

SEQ ID NO: 2392276 - DNA, 25 bp, Homo sapien
gccgcggtttcggcagtcaaaagta

SEQ ID NO: 2392277 - DNA, 25 bp, Homo sapien
taagcaactatacactaagacaaac

SEQ ID NO: 2392278 - DNA, 25 bp, Homo sapien
tctaataatacacctcaaggaaata

SEQ ID NO: 2392279 - DNA, 25 bp, Homo sapien
acaagctaccaagattgaactgaaa

SEQ ID NO: 2392280 - DNA, 25 bp, Homo sapien
tgaataccacataaatagagaccat

SEQ ID NO: 2392281 - DNA, 25 bp, Homo sapien
ggtcaacgttgggtctctctggaag

SEQ ID NO: 2392282 - DNA, 25 bp, Homo sapien
gttctccacgaagacagcattcaag

SEQ ID NO: 2392283 - DNA, 25 bp, Homo sapien
tcaaggcttcagacatgtagactcc

SEQ ID NO: 2392284 - DNA, 25 bp, Homo sapien
gaagaatccagttgcactgccaaaa

SEQ ID NO: 2392285 - DNA, 25 bp, Homo sapien
agctccacgaagttgcccttctcgt

SEQ ID NO: 2392286 - DNA, 25 bp, Homo sapien
tcaggaccgagttgtaatagtcgaa

SEQ ID NO: 2392287 - DNA, 25 bp, Homo sapien
ggtgttcaccggcaggttgctgaag

SEQ ID NO: 2392288 - DNA, 25 bp, Homo sapien
tccctctcgttgatcaggaccgagt

SEQ ID NO: 2392289 - DNA, 25 bp, Homo sapien
attcgtggttcaggtcggcctcctc

SEQ ID NO: 2392290 - DNA, 25 bp, Homo sapien
ggattcattgaattcgtggttcagg

SEQ ID NO: 2392291 - DNA, 25 bp, Homo sapien
caccagggattcattgaattcgtgg

SEQ ID NO: 2392292 - DNA, 25 bp, Homo sapien
cgtggttcaggtcggcctcctcggc

SEQ ID NO: 2392293 - DNA, 25 bp, Homo sapien
gagcagcacttctttggtctctgag

SEQ ID NO: 2392294 - DNA, 25 bp, Homo sapien
agcagcacttctttggtctctgagg

SEQ ID NO: 2392295 - DNA, 25 bp, Homo sapien
ggtggatgtccagtaacagagtcac

SEQ ID NO: 2392296 - DNA, 25 bp, Homo sapien
caggcttggtggatgtccagtaaca

SEQ ID NO: 2392297 - DNA, 25 bp, Homo sapien
ggcttggtggatgtccagtaacaga

SEQ ID NO: 2392298 - DNA, 25 bp, Homo sapien
ttggtggatgtccagtaacagagtc

SEQ ID NO: 2392299 - DNA, 25 bp, Homo sapien
gccctcagagcacttggaagccatg

SEQ ID NO: 2392300 - DNA, 25 bp, Homo sapien
gaagccatgaaggtgggtcctgatg

SEQ ID NO: 2392301 - DNA, 25 bp, Homo sapien
cccatccctgtaagcacctctgctg

SEQ ID NO: 2392302 - DNA, 25 bp, Homo sapien
caaggcccatccctgtaagcacctc

SEQ ID NO: 2392303 - DNA, 25 bp, Homo sapien
tctgccacctgcgtcatggggctgg

SEQ ID NO: 2392304 - DNA, 25 bp, Homo sapien
ccatgacatcgggagggtcactctg

SEQ ID NO: 2392305 - DNA, 25 bp, Homo sapien
gctggggagaaacgccctgcagatc

SEQ ID NO: 2392306 - DNA, 25 bp, Homo sapien
catcgggagggtcactctgccacct

SEQ ID NO: 2392307 - DNA, 25 bp, Homo sapien
tgtcctctgagaacttcctcaccag

SEQ ID NO: 2392308 - DNA, 25 bp, Homo sapien
ccatgtcctctgagaacttcctcac

SEQ ID NO: 2392309 - DNA, 25 bp, Homo sapien
ttcctccgcagcatgttctccatgt

SEQ ID NO: 2392310 - DNA, 25 bp, Homo sapien
ctggaccgcctcgactttcctccgc

SEQ ID NO: 2392311 - DNA, 25 bp, Homo sapien
gatgcattccggcacatggagcctg

SEQ ID NO: 2392312 - DNA, 25 bp, Homo sapien
tgttccaggtgctctagacgcattg

SEQ ID NO: 2392313 - DNA, 25 bp, Homo sapien
acatccccagtgatagaatagctgc

SEQ ID NO: 2392314 - DNA, 25 bp, Homo sapien
tggagcctggtttactcaactaggg

SEQ ID NO: 2392315 - DNA, 25 bp, Homo sapien
aaacggccacatccgtactgctcta

SEQ ID NO: 2392316 - DNA, 25 bp, Homo sapien
ggccacatccgtactgctctatgct

SEQ ID NO: 2392317 - DNA, 25 bp, Homo sapien
gctctatgctcctctccccgggctg

SEQ ID NO: 2392318 - DNA, 25 bp, Homo sapien
ctgtggtgctctgaagcataggagc

SEQ ID NO: 2392319 - DNA, 25 bp, Homo sapien
tatacaggtccccgccgaaggtgtc

SEQ ID NO: 2392320 - DNA, 25 bp, Homo sapien
gcagcaagagagagcctgagtattt

SEQ ID NO: 2392321 - DNA, 25 bp, Homo sapien
cgccgaaggtgtcagcccatagctt

SEQ ID NO: 2392322 - DNA, 25 bp, Homo sapien
gagtatttggtcacagtgttataca

SEQ ID NO: 2392323 - DNA, 25 bp, Homo sapien
tccagtgcactccactcaaagccac

SEQ ID NO: 2392324 - DNA, 25 bp, Homo sapien
tgccgaaccctctgttgaaacctca

SEQ ID NO: 2392325 - DNA, 25 bp, Homo sapien
caataaatcgttccctccagtgcac

SEQ ID NO: 2392326 - DNA, 25 bp, Homo sapien
aacctcagagaacgcgtgaggcaag

SEQ ID NO: 2392327 - DNA, 25 bp, Homo sapien
ccatgcaggcccagcggagcgcagt

SEQ ID NO: 2392328 - DNA, 25 bp, Homo sapien
cagcagagataagccgtgcccatgc

SEQ ID NO: 2392329 - DNA, 25 bp, Homo sapien
agcgcagtgccacggaagtcaagga

SEQ ID NO: 2392330 - DNA, 25 bp, Homo sapien
tgaggacagcagagataagccgtgc

SEQ ID NO: 2392331 - DNA, 25 bp, Homo sapien
ccaggccacgggcattggctggagg

SEQ ID NO: 2392332 - DNA, 25 bp, Homo sapien
tgcgaggaagttgggagttgcaggc

SEQ ID NO: 2392333 - DNA, 25 bp, Homo sapien
tttccagaggaatcttggcctgtcc

SEQ ID NO: 2392334 - DNA, 25 bp, Homo sapien
ggagggccgaggtcttctgcacaaa

SEQ ID NO: 2392335 - DNA, 25 bp, Homo sapien
gggaaggagggcagagcagccacag

SEQ ID NO: 2392336 - DNA, 25 bp, Homo sapien
aaggagggcagagcagccacagacc

SEQ ID NO: 2392337 - DNA, 25 bp, Homo sapien
ggagggcagagcagccacagaccat

SEQ ID NO: 2392338 - DNA, 25 bp, Homo sapien
gaaggagggcagagcagccacagac

SEQ ID NO: 2392339 - DNA, 25 bp, Homo sapien
cctttgtcttccgtgccttggcgag

SEQ ID NO: 2392340 - DNA, 25 bp, Homo sapien
catgaaaccctttaatccgctggcc

SEQ ID NO: 2392341 - DNA, 25 bp, Homo sapien
tatagtgcacccctctgctttaaag

SEQ ID NO: 2392342 - DNA, 25 bp, Homo sapien
gattaccacaactgcagctggttcc

SEQ ID NO: 2392343 - DNA, 25 bp, Homo sapien
gcagctgagtttgcacagtactctg

SEQ ID NO: 2392344 - DNA, 25 bp, Homo sapien
cacagtactctgattgacccacaaa

SEQ ID NO: 2392345 - DNA, 25 bp, Homo sapien
aatctcttgttgaccctgaggtggg

SEQ ID NO: 2392346 - DNA, 25 bp, Homo sapien
acccacaaatctcttgttgaccctg

SEQ ID NO: 2392347 - DNA, 25 bp, Homo sapien
tttgcagtgactccgtccagtaggg

SEQ ID NO: 2392348 - DNA, 25 bp, Homo sapien
gttgctagaaagtctggtctccagg

SEQ ID NO: 2392349 - DNA, 25 bp, Homo sapien
acaggtgttgaccatgttgctcctc

SEQ ID NO: 2392350 - DNA, 25 bp, Homo sapien
cgtccagtagggtcatgttgctaga

SEQ ID NO: 2392351 - DNA, 25 bp, Homo sapien
aatgcttcctcggagaaccaggcca

SEQ ID NO: 2392352 - DNA, 25 bp, Homo sapien
gaaacgccagagagggctggtcaac

SEQ ID NO: 2392353 - DNA, 25 bp, Homo sapien
cagcttgctgggaatttgctcttct

SEQ ID NO: 2392354 - DNA, 25 bp, Homo sapien
aaggacagcattccagaaacgccag

SEQ ID NO: 2392355 - DNA, 25 bp, Homo sapien
ttatgggtgtgaccgtttcgtgact

SEQ ID NO: 2392356 - DNA, 25 bp, Homo sapien
agaaatggtgcaagtgtctcctgtt

SEQ ID NO: 2392357 - DNA, 25 bp, Homo sapien
gtgtctcctgttagagaaatggaat

SEQ ID NO: 2392358 - DNA, 25 bp, Homo sapien
tggaattatgggtgtgaccgtttcg

SEQ ID NO: 2392359 - DNA, 25 bp, Homo sapien
agccccatggctcgccttagttggg

SEQ ID NO: 2392360 - DNA, 25 bp, Homo sapien
ctcgccttagttgggctgatgttcc

SEQ ID NO: 2392361 - DNA, 25 bp, Homo sapien
gctgatgttcccgtgctgaaatcct

SEQ ID NO: 2392362 - DNA, 25 bp, Homo sapien
aatccttgggcacgcctcggaggat

SEQ ID NO: 2392363 - DNA, 25 bp, Homo sapien
taacgacgtgatcttgggcacttcc

SEQ ID NO: 2392364 - DNA, 25 bp, Homo sapien
cagaaccccttagcatgatggcagt

SEQ ID NO: 2392365 - DNA, 25 bp, Homo sapien
ggcgagatctctataaaccctgtgg

SEQ ID NO: 2392366 - DNA, 25 bp, Homo sapien
catggagcactgacggatgacacgt

SEQ ID NO: 2392367 - DNA, 25 bp, Homo sapien
catccaacgtagaaaacgccagtgt

SEQ ID NO: 2392368 - DNA, 25 bp, Homo sapien
tctggcccaaagcaaccattgcaag

SEQ ID NO: 2392369 - DNA, 25 bp, Homo sapien
gggctgccatccaacgtagaaaacg

SEQ ID NO: 2392370 - DNA, 25 bp, Homo sapien
ggttcctacgactgacaccacagaa

SEQ ID NO: 2392371 - DNA, 25 bp, Homo sapien
tcctgccgtgcccttagttaacttg

SEQ ID NO: 2392372 - DNA, 25 bp, Homo sapien
cgtgcccttagttaacttgtccgag

SEQ ID NO: 2392373 - DNA, 25 bp, Homo sapien
tgccgtgcccttagttaacttgtcc

SEQ ID NO: 2392374 - DNA, 25 bp, Homo sapien
tgcccttagttaacttgtccgaggc

SEQ ID NO: 2392375 - DNA, 25 bp, Homo sapien
ggaggaggcggcacatgtctgaata

SEQ ID NO: 2392376 - DNA, 25 bp, Homo sapien
cagcctgcgtgctgcaaacgacgca

SEQ ID NO: 2392377 - DNA, 25 bp, Homo sapien
gcaaacgacgcatttgacctccaag

SEQ ID NO: 2392378 - DNA, 25 bp, Homo sapien
tccaagatgactccacgttccaaag

SEQ ID NO: 2392379 - DNA, 25 bp, Homo sapien
tttcttgaggtggaaacgcactttc

SEQ ID NO: 2392380 - DNA, 25 bp, Homo sapien
aaagcaggtctttctgtcctttctg

SEQ ID NO: 2392381 - DNA, 25 bp, Homo sapien
actttcagattttcacccttctcat

SEQ ID NO: 2392382 - DNA, 25 bp, Homo sapien
caaagagggctgttactcaatagtt

SEQ ID NO: 2392383 - DNA, 25 bp, Homo sapien
tgaaaagggcaggcaggctgctggt

SEQ ID NO: 2392384 - DNA, 25 bp, Homo sapien
ctgaaaagggcaggcaggctgctgg

SEQ ID NO: 2392385 - DNA, 25 bp, Homo sapien
aaaagggcaggcaggctgctggtgt

SEQ ID NO: 2392386 - DNA, 25 bp, Homo sapien
gaaaagggcaggcaggctgctggtg

SEQ ID NO: 2392387 - DNA, 25 bp, Homo sapien
tgaataacagatccaagtgtgtctc

SEQ ID NO: 2392388 - DNA, 25 bp, Homo sapien
agtgtgtctctgtcctcgccctgtt

SEQ ID NO: 2392389 - DNA, 25 bp, Homo sapien
catgtatcgctgaggcaagcactac

SEQ ID NO: 2392390 - DNA, 25 bp, Homo sapien
catgtatcgctgaggcaagcactat

SEQ ID NO: 2392391 - DNA, 25 bp, Homo sapien
taacacagcagactcctcgccaagg

SEQ ID NO: 2392392 - DNA, 25 bp, Homo sapien
cacataacaggggttcagtaacagt

SEQ ID NO: 2392393 - DNA, 25 bp, Homo sapien
ttcagtaacagtcaatcccttttcc

SEQ ID NO: 2392394 - DNA, 25 bp, Homo sapien
cagcagactcctcgccaaggtctgg

SEQ ID NO: 2392395 - DNA, 25 bp, Homo sapien
tcatgacgccctgaacatcacagtg

SEQ ID NO: 2392396 - DNA, 25 bp, Homo sapien
cctcagcgtgttctgctaagggtga

SEQ ID NO: 2392397 - DNA, 25 bp, Homo sapien
gagaataaaacacctgtcggctgtg

SEQ ID NO: 2392398 - DNA, 25 bp, Homo sapien
caagcccaggtctcagaaacggtag

SEQ ID NO: 2392399 - DNA, 25 bp, Homo sapien
ccaggtgtactgaaggacgtgattt

SEQ ID NO: 2392400 - DNA, 25 bp, Homo sapien
gttaacttgtgggacgacactgcca

SEQ ID NO: 2392401 - DNA, 25 bp, Homo sapien
tgggccatttgtcaactcctagaac

SEQ ID NO: 2392402 - DNA, 25 bp, Homo sapien
cgctcaattcttagtaccaggtgta

SEQ ID NO: 2392403 - DNA, 25 bp, Homo sapien
gagtctgtaacgacccaccttctga

SEQ ID NO: 2392404 - DNA, 25 bp, Homo sapien
tggaggagtctgtaacgacccacct

SEQ ID NO: 2392405 - DNA, 25 bp, Homo sapien
gaggagtctgtaacgacccaccttc

SEQ ID NO: 2392406 - DNA, 25 bp, Homo sapien
gcttggaggagtctgtaacgaccca

SEQ ID NO: 2392407 - DNA, 25 bp, Homo sapien
accaaaacagatatacagaccaagg

SEQ ID NO: 2392408 - DNA, 25 bp, Homo sapien
aaacagatatacagaccaaggaaca

SEQ ID NO: 2392409 - DNA, 25 bp, Homo sapien
caaaacagatatacagaccaaggaa

SEQ ID NO: 2392410 - DNA, 25 bp, Homo sapien
ccaaggaacagaacagaggccctca

SEQ ID NO: 2392411 - DNA, 25 bp, Homo sapien
catgaaagaaccttgtgccggagtt

SEQ ID NO: 2392412 - DNA, 25 bp, Homo sapien
gccggagttctagaaggaccttgaa

SEQ ID NO: 2392413 - DNA, 25 bp, Homo sapien
cactcaacatgaaagaaccttgtgc

SEQ ID NO: 2392414 - DNA, 25 bp, Homo sapien
tgaaggaaacaacactcaacatgaa

SEQ ID NO: 2392415 - DNA, 25 bp, Homo sapien
gagtcatgctgaagagataggcttc

SEQ ID NO: 2392416 - DNA, 25 bp, Homo sapien
tgcttgagtcatgctgaagagatag

SEQ ID NO: 2392417 - DNA, 25 bp, Homo sapien
tgagtcatgctgaagagataggctt

SEQ ID NO: 2392418 - DNA, 25 bp, Homo sapien
cttgagtcatgctgaagagataggc

SEQ ID NO: 2392419 - DNA, 25 bp, Homo sapien
tgaatgaggtacagcagtgcctcct

SEQ ID NO: 2392420 - DNA, 25 bp, Homo sapien
gaatgaggtacagcagtgcctcctg

SEQ ID NO: 2392421 - DNA, 25 bp, Homo sapien
ctgaatgaggtacagcagtgcctcc

SEQ ID NO: 2392422 - DNA, 25 bp, Homo sapien
cacaggcaagaggccgctctccctt

SEQ ID NO: 2392423 - DNA, 25 bp, Homo sapien
acaggcaagaggccgctctcccttt

SEQ ID NO: 2392424 - DNA, 25 bp, Homo sapien
caggcaagaggccgctctccctttc

SEQ ID NO: 2392425 - DNA, 25 bp, Homo sapien
cagggatgcgctgaggtgagatgac

SEQ ID NO: 2392426 - DNA, 25 bp, Homo sapien
gctgtagcagggatgcgctgaggtg

SEQ ID NO: 2392427 - DNA, 25 bp, Homo sapien
tggcgggacggaggtgggttgtgcg

SEQ ID NO: 2392428 - DNA, 25 bp, Homo sapien
gaggtgggttgtgcgaacaccatgg

SEQ ID NO: 2392429 - DNA, 25 bp, Homo sapien
tgatagcttgcagcggcagatacgg

SEQ ID NO: 2392430 - DNA, 25 bp, Homo sapien
tttatgggaaactgattcttgctcc

SEQ ID NO: 2392431 - DNA, 25 bp, Homo sapien
cagatacgggtggtctaagcattcc

SEQ ID NO: 2392432 - DNA, 25 bp, Homo sapien
tacacacagagagcggggttcagga

SEQ ID NO: 2392433 - DNA, 25 bp, Homo sapien
tattttgcccctggtacatatttac

SEQ ID NO: 2392434 - DNA, 25 bp, Homo sapien
ttattttgcccctggtacatattta

SEQ ID NO: 2392435 - DNA, 25 bp, Homo sapien
aaacttagcggccaaggctggccgg

SEQ ID NO: 2392436 - DNA, 25 bp, Homo sapien
cttccatgagcctgatgtcctactg

SEQ ID NO: 2392437 - DNA, 25 bp, Homo sapien
tggaagggagccattgaaataggcc

SEQ ID NO: 2392438 - DNA, 25 bp, Homo sapien
tgccagtctgactaccagagatggg

SEQ ID NO: 2392439 - DNA, 25 bp, Homo sapien
ggtactctgaagtttctcgaacagg

SEQ ID NO: 2392440 - DNA, 25 bp, Homo sapien
ttccaatgttgtgaggagaccctgg

SEQ ID NO: 2392441 - DNA, 25 bp, Homo sapien
tggaagcattttgtacaccacgaga

SEQ ID NO: 2392442 - DNA, 25 bp, Homo sapien
caggtgctggtgtactagggtcaca

SEQ ID NO: 2392443 - DNA, 25 bp, Homo sapien
ggtctgcgctcctgaccatgagttt

SEQ ID NO: 2392444 - DNA, 25 bp, Homo sapien
aattctcccgcagaatgggtactgc

SEQ ID NO: 2392445 - DNA, 25 bp, Homo sapien
acaatgggtggaggtctgcgctcct

SEQ ID NO: 2392446 - DNA, 25 bp, Homo sapien
ttcacaaggccggttttcaggcagc

SEQ ID NO: 2392447 - DNA, 25 bp, Homo sapien
tcataggacagggagcgtacaaccc

SEQ ID NO: 2392448 - DNA, 25 bp, Homo sapien
cataggacagggagcgtacaacccc

SEQ ID NO: 2392449 - DNA, 25 bp, Homo sapien
ctcataggacagggagcgtacaacc

SEQ ID NO: 2392450 - DNA, 25 bp, Homo sapien
cagagctgtcaaggataagtgttgg

SEQ ID NO: 2392451 - DNA, 25 bp, Homo sapien
gagagtctgcggaggctccacagtt

SEQ ID NO: 2392452 - DNA, 25 bp, Homo sapien
gaggctccacagtttcctgacatgt

SEQ ID NO: 2392453 - DNA, 25 bp, Homo sapien
ctggtggagagtctgcggaggctcc

SEQ ID NO: 2392454 - DNA, 25 bp, Homo sapien
gctgaggtatacgctgttgctggtt

SEQ ID NO: 2392455 - DNA, 25 bp, Homo sapien
ggttgggctgaggtatacgctgttg

SEQ ID NO: 2392456 - DNA, 25 bp, Homo sapien
ttgggctgaggtatacgctgttgct

SEQ ID NO: 2392457 - DNA, 25 bp, Homo sapien
gatgagatttggattgtcatagatg

SEQ ID NO: 2392458 - DNA, 25 bp, Homo sapien
tgcatgcacacctagttaggccggc

SEQ ID NO: 2392459 - DNA, 25 bp, Homo sapien
cactggcagctagcagggtgcatgc

SEQ ID NO: 2392460 - DNA, 25 bp, Homo sapien
tgtctcagaaccactttactcaggg

SEQ ID NO: 2392461 - DNA, 25 bp, Homo sapien
gaaacaggccctgaaagctggatca

SEQ ID NO: 2392462 - DNA, 25 bp, Homo sapien
taggaaagtagcgtgatcatgcagg

SEQ ID NO: 2392463 - DNA, 25 bp, Homo sapien
tgcaggtgtcctggcacactgtatc

SEQ ID NO: 2392464 - DNA, 25 bp, Homo sapien
agactaggaaagtagcgtgatcatg

SEQ ID NO: 2392465 - DNA, 25 bp, Homo sapien
tggcacactgtatcacaacatctgg

SEQ ID NO: 2392466 - DNA, 25 bp, Homo sapien
gaagattaatctttagtgtgcataa

SEQ ID NO: 2392467 - DNA, 25 bp, Homo sapien
tcacagaacattaagttcctggagg

SEQ ID NO: 2392468 - DNA, 25 bp, Homo sapien
cattgttacactgtcttcacagaac

SEQ ID NO: 2392469 - DNA, 25 bp, Homo sapien
tacactgtcttcacagaacattaag

SEQ ID NO: 2392470 - DNA, 25 bp, Homo sapien
taaaggatgttcttcgtactcaaga

SEQ ID NO: 2392471 - DNA, 25 bp, Homo sapien
gaatagttactgtctgaagctgaga

SEQ ID NO: 2392472 - DNA, 25 bp, Homo sapien
ccaggccatacaatagaaggataat

SEQ ID NO: 2392473 - DNA, 25 bp, Homo sapien
taagtactttgaagacaataaggga

SEQ ID NO: 2392474 - DNA, 25 bp, Homo sapien
ctttgtgtattcgtctttggccttg

SEQ ID NO: 2392475 - DNA, 25 bp, Homo sapien
ccctctcctgaattgaggatcactg

SEQ ID NO: 2392476 - DNA, 25 bp, Homo sapien
tggccttgatgagcattcgtaaaat

SEQ ID NO: 2392477 - DNA, 25 bp, Homo sapien
gagcattcgtaaaatgtctacttct

SEQ ID NO: 2392478 - DNA, 25 bp, Homo sapien
ctctggtccctttgagaagagtttg

SEQ ID NO: 2392479 - DNA, 25 bp, Homo sapien
tggtccctttgagaagagtttgcca

SEQ ID NO: 2392480 - DNA, 25 bp, Homo sapien
tctctggtccctttgagaagagttt

SEQ ID NO: 2392481 - DNA, 25 bp, Homo sapien
tccctttgagaagagtttgccaact

SEQ ID NO: 2392482 - DNA, 25 bp, Homo sapien
ttggcattcttccttatcataaaac

SEQ ID NO: 2392483 - DNA, 25 bp, Homo sapien
tggcattcttccttatcataaaacc

SEQ ID NO: 2392484 - DNA, 25 bp, Homo sapien
attcttccttatcataaaaccaaat

SEQ ID NO: 2392485 - DNA, 25 bp, Homo sapien
gcattcttccttatcataaaaccaa

SEQ ID NO: 2392486 - DNA, 25 bp, Homo sapien
ctggctgcgagatagcattgtttct

SEQ ID NO: 2392487 - DNA, 25 bp, Homo sapien
ggctgcgagatagcattgtttctac

SEQ ID NO: 2392488 - DNA, 25 bp, Homo sapien
cctggctgcgagatagcattgtttc

SEQ ID NO: 2392489 - DNA, 25 bp, Homo sapien
ttcctggctgcgagatagcattgtt

SEQ ID NO: 2392490 - DNA, 25 bp, Homo sapien
tctgaagcccatgtgctatgagagc

SEQ ID NO: 2392491 - DNA, 25 bp, Homo sapien
tttaagaacgtctgagttctgaagc

SEQ ID NO: 2392492 - DNA, 25 bp, Homo sapien
gatcattgaatgtgtatcttgaaac

SEQ ID NO: 2392493 - DNA, 25 bp, Homo sapien
gtgctatgagagcttttacatcaaa

SEQ ID NO: 2392494 - DNA, 25 bp, Homo sapien
caatgataggaatagctctgctgaa

SEQ ID NO: 2392495 - DNA, 25 bp, Homo sapien
tatataagcacctgaatgacctgaa

SEQ ID NO: 2392496 - DNA, 25 bp, Homo sapien
tagtcgcgtttgataatggcaatcc

SEQ ID NO: 2392497 - DNA, 25 bp, Homo sapien
taagtccagtctcctataatcgcag

SEQ ID NO: 2392498 - DNA, 25 bp, Homo sapien
gggtaactgacctgactacagccag

SEQ ID NO: 2392499 - DNA, 25 bp, Homo sapien
agtgagacatcacagctacacaggg

SEQ ID NO: 2392500 - DNA, 25 bp, Homo sapien
cattaggcaagcgtgcaagagtagc

SEQ ID NO: 2392501 - DNA, 25 bp, Homo sapien
tcaacagacaagtgctcaataacaa

SEQ ID NO: 2392502 - DNA, 25 bp, Homo sapien
attagaagataactccccactctcc

SEQ ID NO: 2392503 - DNA, 25 bp, Homo sapien
aaggttcattcacgttgtactatat

SEQ ID NO: 2392504 - DNA, 25 bp, Homo sapien
ggttcattcacgttgtactatatat

SEQ ID NO: 2392505 - DNA, 25 bp, Homo sapien
tcaaggttcattcacgttgtactat

SEQ ID NO: 2392506 - DNA, 25 bp, Homo sapien
ctttgatgcccgggattgaaaaggc

SEQ ID NO: 2392507 - DNA, 25 bp, Homo sapien
ttgatgcccgggattgaaaaggctt

SEQ ID NO: 2392508 - DNA, 25 bp, Homo sapien
tttgatgcccgggattgaaaaggct

SEQ ID NO: 2392509 - DNA, 25 bp, Homo sapien
tgatgcccgggattgaaaaggcttt

SEQ ID NO: 2392510 - DNA, 25 bp, Homo sapien
aaacactttgtcagctcactcggcc

SEQ ID NO: 2392511 - DNA, 25 bp, Homo sapien
gacagcacacgcttagaaccaaggt

SEQ ID NO: 2392512 - DNA, 25 bp, Homo sapien
gatcagcaatgggttcacactacaa

SEQ ID NO: 2392513 - DNA, 25 bp, Homo sapien
cacttcaggtactaaacggccacag

SEQ ID NO: 2392514 - DNA, 25 bp, Homo sapien
ctttagtaataggttctgtcctatt

SEQ ID NO: 2392515 - DNA, 25 bp, Homo sapien
cagcctattcataatggtgaatcca

SEQ ID NO: 2392516 - DNA, 25 bp, Homo sapien
agcctattcataatggtgaatccat

SEQ ID NO: 2392517 - DNA, 25 bp, Homo sapien
gcctattcataatggtgaatccatg

SEQ ID NO: 2392518 - DNA, 25 bp, Homo sapien
aacaaataaggttccttccacatca

SEQ ID NO: 2392519 - DNA, 25 bp, Homo sapien
acaaataaggttccttccacatcag

SEQ ID NO: 2392520 - DNA, 25 bp, Homo sapien
tgtctgacacaaactagctcaacgc

SEQ ID NO: 2392521 - DNA, 25 bp, Homo sapien
tcatcatgcatgtagcacgtgagtc

SEQ ID NO: 2392522 - DNA, 25 bp, Homo sapien
tcaaaaagtaggtctcaacttatcc

SEQ ID NO: 2392523 - DNA, 25 bp, Homo sapien
caagattagatgttccttagatcct

SEQ ID NO: 2392524 - DNA, 25 bp, Homo sapien
tcactgtaacagaactctgctctac

SEQ ID NO: 2392525 - DNA, 25 bp, Homo sapien
tcttccggccataaggtatcaggtc

SEQ ID NO: 2392526 - DNA, 25 bp, Homo sapien
tgctctactttctcgagcacatcgg

SEQ ID NO: 2392527 - DNA, 25 bp, Homo sapien
cctttccttcggctcttatggtgcc

SEQ ID NO: 2392528 - DNA, 25 bp, Homo sapien
gtcctgagtctgacgccccccgcct

SEQ ID NO: 2392529 - DNA, 25 bp, Homo sapien
ctgggctgcactgctccgccgcgtc

SEQ ID NO: 2392530 - DNA, 25 bp, Homo sapien
cgggtcctcaagtcctgagtctgac

SEQ ID NO: 2392531 - DNA, 25 bp, Homo sapien
aaccctgggctgcactgctccgccg

SEQ ID NO: 2392532 - DNA, 25 bp, Homo sapien
cgaaggtgtacagagccacctggct

SEQ ID NO: 2392533 - DNA, 25 bp, Homo sapien
cacgtccacgatgcggttgatatag

SEQ ID NO: 2392534 - DNA, 25 bp, Homo sapien
cgctaggctgatgtcgcgccccttt

SEQ ID NO: 2392535 - DNA, 25 bp, Homo sapien
actcgttggcccgatggccgaaggt

SEQ ID NO: 2392536 - DNA, 25 bp, Homo sapien
cgcagaacgagcgagctgcctcgca

SEQ ID NO: 2392537 - DNA, 25 bp, Homo sapien
taggcacggggctcttggaagccac

SEQ ID NO: 2392538 - DNA, 25 bp, Homo sapien
ctcccagacataggcacggggctct

SEQ ID NO: 2392539 - DNA, 25 bp, Homo sapien
ggaagccactctcaatagatcgcag

SEQ ID NO: 2392540 - DNA, 25 bp, Homo sapien
cacatgaagacctatgggagattct

SEQ ID NO: 2392541 - DNA, 25 bp, Homo sapien
aatactatgcagaaagagggcacac

SEQ ID NO: 2392542 - DNA, 25 bp, Homo sapien
tttgttacctcgaaagagcacaccc

SEQ ID NO: 2392543 - DNA, 25 bp, Homo sapien
ggatatgggcgtatactgcaagacc

SEQ ID NO: 2392544 - DNA, 25 bp, Homo sapien
cagtagtggaaaggagcagtttttg

SEQ ID NO: 2392545 - DNA, 25 bp, Homo sapien
tacagtttcactcgaggaggcagta

SEQ ID NO: 2392546 - DNA, 25 bp, Homo sapien
taatgggaatcaggtaatcgtcggc

SEQ ID NO: 2392547 - DNA, 25 bp, Homo sapien
aagaaacgctgcagaccacggcttc

SEQ ID NO: 2392548 - DNA, 25 bp, Homo sapien
cacgccgcgtgtgttctcattcgca

SEQ ID NO: 2392549 - DNA, 25 bp, Homo sapien
ttcgcacccacatgtgggctagcac

SEQ ID NO: 2392550 - DNA, 25 bp, Homo sapien
tgttctcattcgcacccacatgtgg

SEQ ID NO: 2392551 - DNA, 25 bp, Homo sapien
gcgtgtgttctcattcgcacccaca

SEQ ID NO: 2392552 - DNA, 25 bp, Homo sapien
agtgttttccgagcatctccatcct

SEQ ID NO: 2392553 - DNA, 25 bp, Homo sapien
gcggctccatactattgcccagtgt

SEQ ID NO: 2392554 - DNA, 25 bp, Homo sapien
tctccatccttggccgcgagtgtca

SEQ ID NO: 2392555 - DNA, 25 bp, Homo sapien
cggctccatactattgcccagtgtt

SEQ ID NO: 2392556 - DNA, 25 bp, Homo sapien
ccagtccgtcgcaggctcttcccac

SEQ ID NO: 2392557 - DNA, 25 bp, Homo sapien
aggctcttcccacagacgtctgttc

SEQ ID NO: 2392558 - DNA, 25 bp, Homo sapien
cagacgtctgttcccttccagcaca

SEQ ID NO: 2392559 - DNA, 25 bp, Homo sapien
ccacagacgtctgttcccttccagc

SEQ ID NO: 2392560 - DNA, 25 bp, Homo sapien
gaagcccgctggattgaatgattgg

SEQ ID NO: 2392561 - DNA, 25 bp, Homo sapien
cattgctgaatggagtcgtgaaagg

SEQ ID NO: 2392562 - DNA, 25 bp, Homo sapien
agcatttccaggaggccgtcattgc

SEQ ID NO: 2392563 - DNA, 25 bp, Homo sapien
gggaactgagaagcccgctggattg

SEQ ID NO: 2392564 - DNA, 25 bp, Homo sapien
tttctcctgggagcggatgtgccag

SEQ ID NO: 2392565 - DNA, 25 bp, Homo sapien
tgtagaacagtggagccaggttccc

SEQ ID NO: 2392566 - DNA, 25 bp, Homo sapien
gtggcgtcagtaccatggacttgtc

SEQ ID NO: 2392567 - DNA, 25 bp, Homo sapien
cttgtcccaacctcagatgtagaac

SEQ ID NO: 2392568 - DNA, 25 bp, Homo sapien
agtttctatgtggcagtcagacaac

SEQ ID NO: 2392569 - DNA, 25 bp, Homo sapien
tcaacaagactgggccggctgtcgc

SEQ ID NO: 2392570 - DNA, 25 bp, Homo sapien
gtttctatgtggcagtcagacaaca

SEQ ID NO: 2392571 - DNA, 25 bp, Homo sapien
cggctgtcgctccccagtttctatg

SEQ ID NO: 2392572 - DNA, 25 bp, Homo sapien
aggccctggccgtagatcccagcat

SEQ ID NO: 2392573 - DNA, 25 bp, Homo sapien
ctggccgtagatcccagcattgcca

SEQ ID NO: 2392574 - DNA, 25 bp, Homo sapien
ccaaagaggccctggccgtagatcc

SEQ ID NO: 2392575 - DNA, 25 bp, Homo sapien
cccaaagaggccctggccgtagatc

SEQ ID NO: 2392576 - DNA, 25 bp, Homo sapien
gctgcaatacttctggaggcacttg

SEQ ID NO: 2392577 - DNA, 25 bp, Homo sapien
tctgcaagtcccaaaagtatgcggg

SEQ ID NO: 2392578 - DNA, 25 bp, Homo sapien
atataactagcacccctctggactg

SEQ ID NO: 2392579 - DNA, 25 bp, Homo sapien
gcgggttacttgtccccattggcca

SEQ ID NO: 2392580 - DNA, 25 bp, Homo sapien
ttttcccattggctatggagagact

SEQ ID NO: 2392581 - DNA, 25 bp, Homo sapien
tcccattggctatggagagactgag

SEQ ID NO: 2392582 - DNA, 25 bp, Homo sapien
ttcccattggctatggagagactga

SEQ ID NO: 2392583 - DNA, 25 bp, Homo sapien
cccattggctatggagagactgagg

SEQ ID NO: 2392584 - DNA, 25 bp, Homo sapien
tgccccataaataacagagagcaag

SEQ ID NO: 2392585 - DNA, 25 bp, Homo sapien
ataaataacagagagcaagtgtggt

SEQ ID NO: 2392586 - DNA, 25 bp, Homo sapien
ccccataaataacagagagcaagtg

SEQ ID NO: 2392587 - DNA, 25 bp, Homo sapien
cataaataacagagagcaagtgtgg

SEQ ID NO: 2392588 - DNA, 25 bp, Homo sapien
tgaagtgctccaggctctttgcctt

SEQ ID NO: 2392589 - DNA, 25 bp, Homo sapien
ccttgttttggagcacatttgactg

SEQ ID NO: 2392590 - DNA, 25 bp, Homo sapien
ttcccattggcttgggcctctgaag

SEQ ID NO: 2392591 - DNA, 25 bp, Homo sapien
tacagttgtatttgagggagtactc

SEQ ID NO: 2392592 - DNA, 25 bp, Homo sapien
gggagaggaggaccggcagagtgac

SEQ ID NO: 2392593 - DNA, 25 bp, Homo sapien
ggagaggaggaccggcagagtgaca

SEQ ID NO: 2392594 - DNA, 25 bp, Homo sapien
ccggggagggtttccacctcagctg

SEQ ID NO: 2392595 - DNA, 25 bp, Homo sapien
cccagggagggtttccacttcagct

SEQ ID NO: 2392596 - DNA, 25 bp, Homo sapien
ggtgtcctgaagccactgggtgccc

SEQ ID NO: 2392597 - DNA, 25 bp, Homo sapien
ggtgtcctgaagccactgggtgctc

SEQ ID NO: 2392598 - DNA, 25 bp, Homo sapien
gggcgtccttaagccactgggcgcc

SEQ ID NO: 2392599 - DNA, 25 bp, Homo sapien
tcctgaagccgctgggcgtccttaa

SEQ ID NO: 2392600 - DNA, 25 bp, Homo sapien
gctggggtgtcctgaagccgctggg

SEQ ID NO: 2392601 - DNA, 25 bp, Homo sapien
aagccgctgggcgtccttaagccac

SEQ ID NO: 2392602 - DNA, 25 bp, Homo sapien
ctcagctgggcgtcctgaagccact

SEQ ID NO: 2392603 - DNA, 25 bp, Homo sapien
tggagagagtttccacctcagctgg

SEQ ID NO: 2392604 - DNA, 25 bp, Homo sapien
tgggcgtcctgaagccactgggtgc

SEQ ID NO: 2392605 - DNA, 25 bp, Homo sapien
cagctgggcgtcctgaagccactgg

SEQ ID NO: 2392606 - DNA, 25 bp, Homo sapien
ctctctaaatcgatgtgggtgtctg

SEQ ID NO: 2392607 - DNA, 25 bp, Homo sapien
accaaggccaagcagggtgactgct

SEQ ID NO: 2392608 - DNA, 25 bp, Homo sapien
ggaggagtgacctgcttttgtgctc

SEQ ID NO: 2392609 - DNA, 25 bp, Homo sapien
ctactcacggctgattggggggtcc

SEQ ID NO: 2392610 - DNA, 25 bp, Homo sapien
cacctgtatcatgacagcattatcg

SEQ ID NO: 2392611 - DNA, 25 bp, Homo sapien
gttacagtccttagcaaactgtgtt

SEQ ID NO: 2392612 - DNA, 25 bp, Homo sapien
cagcagtgttccttctacagtgtca

SEQ ID NO: 2392613 - DNA, 25 bp, Homo sapien
ctacagtgtcactgtagtccacctt

SEQ ID NO: 2392614 - DNA, 25 bp, Homo sapien
tcctcacttggacccttgcagagca

SEQ ID NO: 2392615 - DNA, 25 bp, Homo sapien
atgacacgaggctggccagaccgtg

SEQ ID NO: 2392616 - DNA, 25 bp, Homo sapien
agagcagaatgacacgaggctggcc

SEQ ID NO: 2392617 - DNA, 25 bp, Homo sapien
tgactcctaacttggactcctcact

SEQ ID NO: 2392618 - DNA, 25 bp, Homo sapien
gtcagacagagccagagcagactta

SEQ ID NO: 2392619 - DNA, 25 bp, Homo sapien
ttggtgtgtggcctgatctgcgagg

SEQ ID NO: 2392620 - DNA, 25 bp, Homo sapien
cagacagagccagagcagacttaaa

SEQ ID NO: 2392621 - DNA, 25 bp, Homo sapien
cctgatctgcgaggcagctgctcag

SEQ ID NO: 2392622 - DNA, 25 bp, Homo sapien
ccgagaggccatacctgtctgtctc

SEQ ID NO: 2392623 - DNA, 25 bp, Homo sapien
gagaggccatacctgtctgtctcac

SEQ ID NO: 2392624 - DNA, 25 bp, Homo sapien
cgagaggccatacctgtctgtctca

SEQ ID NO: 2392625 - DNA, 25 bp, Homo sapien
tcatgggaccgcagcaatgcgcaga

SEQ ID NO: 2392626 - DNA, 25 bp, Homo sapien
tagtcatgtcatgggaccgcagcaa

SEQ ID NO: 2392627 - DNA, 25 bp, Homo sapien
gccctagtcatgtcatgggaccgca

SEQ ID NO: 2392628 - DNA, 25 bp, Homo sapien
tgtgcagggccctagtcatgtcatg

SEQ ID NO: 2392629 - DNA, 25 bp, Homo sapien
gcacagccagctgccgtcttggtag

SEQ ID NO: 2392630 - DNA, 25 bp, Homo sapien
ctacctcgtgctccgggtgcaggga

SEQ ID NO: 2392631 - DNA, 25 bp, Homo sapien
tggtagcttctacctcgtgctccgg

SEQ ID NO: 2392632 - DNA, 25 bp, Homo sapien
gctgccgtcttggtagcttctacct

SEQ ID NO: 2392633 - DNA, 25 bp, Homo sapien
tcctgccctctttccaagtgttgtc

SEQ ID NO: 2392634 - DNA, 25 bp, Homo sapien
tgggtggtggatgtgttctcaggct

SEQ ID NO: 2392635 - DNA, 25 bp, Homo sapien
gccctctttccaagtgttgtcccca

SEQ ID NO: 2392636 - DNA, 25 bp, Homo sapien
gatgtgttctcaggctggggcttcc

SEQ ID NO: 2392637 - DNA, 25 bp, Homo sapien
gggctgggaatgccaacagttgggg

SEQ ID NO: 2392638 - DNA, 25 bp, Homo sapien
ggctgggaatgccaacagttgggga

SEQ ID NO: 2392639 - DNA, 25 bp, Homo sapien
gggaatgccaacagttggggacagg

SEQ ID NO: 2392640 - DNA, 25 bp, Homo sapien
ctgggaatgccaacagttggggaca

SEQ ID NO: 2392641 - DNA, 25 bp, Homo sapien
tgctgcagcaaccctccgtcgcccc

SEQ ID NO: 2392642 - DNA, 25 bp, Homo sapien
tgcctgctgcagcaaccctccgtcg

SEQ ID NO: 2392643 - DNA, 25 bp, Homo sapien
ctgctgcagcaaccctccgtcgccc

SEQ ID NO: 2392644 - DNA, 25 bp, Homo sapien
gcctgctgcagcaaccctccgtcgc

SEQ ID NO: 2392645 - DNA, 25 bp, Homo sapien
caccgaggcttcatcagatctgact

SEQ ID NO: 2392646 - DNA, 25 bp, Homo sapien
gcttcatcagatctgactggaagtg

SEQ ID NO: 2392647 - DNA, 25 bp, Homo sapien
tcagatctgactggaagtgctgtgg

SEQ ID NO: 2392648 - DNA, 25 bp, Homo sapien
cacgtctgcaccgaggcttcatcag

SEQ ID NO: 2392649 - DNA, 25 bp, Homo sapien
gtggctccgagtcccacttctgcta

SEQ ID NO: 2392650 - DNA, 25 bp, Homo sapien
cttgaaccctggcagttgggcacgg

SEQ ID NO: 2392651 - DNA, 25 bp, Homo sapien
ggctgggctgtgtacgcagctcaca

SEQ ID NO: 2392652 - DNA, 25 bp, Homo sapien
gcacggttgatagggacgggccttg

SEQ ID NO: 2392653 - DNA, 25 bp, Homo sapien
gcaagaagggatcacatctacacag

SEQ ID NO: 2392654 - DNA, 25 bp, Homo sapien
gaagggatcacatctacacagatcc

SEQ ID NO: 2392655 - DNA, 25 bp, Homo sapien
catctacacagatccagtgcagtac

SEQ ID NO: 2392656 - DNA, 25 bp, Homo sapien
ggatcacatctacacagatccagtg

SEQ ID NO: 2392657 - DNA, 25 bp, Homo sapien
ggagtacagctggggccttgcgcat

SEQ ID NO: 2392658 - DNA, 25 bp, Homo sapien
tggagtacagctggggccttgcgca

SEQ ID NO: 2392659 - DNA, 25 bp, Homo sapien
ctggagtacagctggggccttgcgc

SEQ ID NO: 2392660 - DNA, 25 bp, Homo sapien
ctggagcttgcaggataagcccgtg

SEQ ID NO: 2392661 - DNA, 25 bp, Homo sapien
caggataagcccgtgtctggctgca

SEQ ID NO: 2392662 - DNA, 25 bp, Homo sapien
tcagcttaggaacttttcatgttgg

SEQ ID NO: 2392663 - DNA, 25 bp, Homo sapien
gcttaggaacttttcatgttggtca

SEQ ID NO: 2392664 - DNA, 25 bp, Homo sapien
aaaaataacacggagaataggatgg

SEQ ID NO: 2392665 - DNA, 25 bp, Homo sapien
taacacggagaataggatgggtctt

SEQ ID NO: 2392666 - DNA, 25 bp, Homo sapien
aataacacggagaataggatgggtc

SEQ ID NO: 2392667 - DNA, 25 bp, Homo sapien
acggagaataggatgggtcttgtcc

SEQ ID NO: 2392668 - DNA, 25 bp, Homo sapien
gaactcaagaggagtgaatgtcacc

SEQ ID NO: 2392669 - DNA, 25 bp, Homo sapien
tcacagaactcaagaggagtgaatg

SEQ ID NO: 2392670 - DNA, 25 bp, Homo sapien
ctcaagaggagtgaatgtcacctcc

SEQ ID NO: 2392671 - DNA, 25 bp, Homo sapien
acatcacagaactcaagaggagtga

SEQ ID NO: 2392672 - DNA, 25 bp, Homo sapien
catagccaggattctttgtatatac

SEQ ID NO: 2392673 - DNA, 25 bp, Homo sapien
tataccactggctgaccagtggtag

SEQ ID NO: 2392674 - DNA, 25 bp, Homo sapien
tttgtatataccactggctgaccag

SEQ ID NO: 2392675 - DNA, 25 bp, Homo sapien
gattctttgtatataccactggctg

SEQ ID NO: 2392676 - DNA, 25 bp, Homo sapien
aagctccccgcaggacagtgggtag

SEQ ID NO: 2392677 - DNA, 25 bp, Homo sapien
gagcttcccgatgatcatgttggtg

SEQ ID NO: 2392678 - DNA, 25 bp, Homo sapien
ctggtctccggagccggctctgtgc

SEQ ID NO: 2392679 - DNA, 25 bp, Homo sapien
tggtgttgacaaagctccccaaagt

SEQ ID NO: 2392680 - DNA, 25 bp, Homo sapien
gaatgggatccagaagcgtcttcca

SEQ ID NO: 2392681 - DNA, 25 bp, Homo sapien
aagactttggcaggcgagttgacca

SEQ ID NO: 2392682 - DNA, 25 bp, Homo sapien
cagcatggtccaggtgccagaagac

SEQ ID NO: 2392683 - DNA, 25 bp, Homo sapien
ccctggtgggtacatcctgggtaca

SEQ ID NO: 2392684 - DNA, 25 bp, Homo sapien
gatcgattttgcagcggctctggcg

SEQ ID NO: 2392685 - DNA, 25 bp, Homo sapien
ttttggatcgattttgcagcggctc

SEQ ID NO: 2392686 - DNA, 25 bp, Homo sapien
tggattttggatcgattttgcagcg

SEQ ID NO: 2392687 - DNA, 25 bp, Homo sapien
ccctggattttggatcgattttgca

SEQ ID NO: 2392688 - DNA, 25 bp, Homo sapien
agcaagggctatttgtggctgatct

SEQ ID NO: 2392689 - DNA, 25 bp, Homo sapien
gagccacctgcatccgaggctggct

SEQ ID NO: 2392690 - DNA, 25 bp, Homo sapien
caagggctatttgtggctgatctaa

SEQ ID NO: 2392691 - DNA, 25 bp, Homo sapien
ctaaaacataactggagccacctgc

SEQ ID NO: 2392692 - DNA, 25 bp, Homo sapien
gtagataccaaaagtgacgtctctt

SEQ ID NO: 2392693 - DNA, 25 bp, Homo sapien
tcccgtgtggagtagataccaaaag

SEQ ID NO: 2392694 - DNA, 25 bp, Homo sapien
ccaaaagtgacgtctctttctttct

SEQ ID NO: 2392695 - DNA, 25 bp, Homo sapien
gttcacgttcccgtgtggagtagat

SEQ ID NO: 2392696 - DNA, 25 bp, Homo sapien
tagaacaggttgattgaggagcaca

SEQ ID NO: 2392697 - DNA, 25 bp, Homo sapien
tgttagaacaggttgattgaggagc

SEQ ID NO: 2392698 - DNA, 25 bp, Homo sapien
acaggttgattgaggagcacattac

SEQ ID NO: 2392699 - DNA, 25 bp, Homo sapien
ttctgttagaacaggttgattgagg

SEQ ID NO: 2392700 - DNA, 25 bp, Homo sapien
ctacttctggtgctccatctgggga

SEQ ID NO: 2392701 - DNA, 25 bp, Homo sapien
attagaggtctgcttcctaggcccg

SEQ ID NO: 2392702 - DNA, 25 bp, Homo sapien
tcctaggcccgtagattctagggag

SEQ ID NO: 2392703 - DNA, 25 bp, Homo sapien
caatacgcattagaggtctgcttcc

SEQ ID NO: 2392704 - DNA, 25 bp, Homo sapien
tcagtacgtaccacaatacgcatta

SEQ ID NO: 2392705 - DNA, 25 bp, Homo sapien
ctggcggatccctgaataggtgagg

SEQ ID NO: 2392706 - DNA, 25 bp, Homo sapien
tccctgaataggtgaggtggactcg

SEQ ID NO: 2392707 - DNA, 25 bp, Homo sapien
ggtgaggtggactcgggtctggaaa

SEQ ID NO: 2392708 - DNA, 25 bp, Homo sapien
cggatccctgaataggtgaggtgga

SEQ ID NO: 2392709 - DNA, 25 bp, Homo sapien
caggcatctccaaattgcaagtttc

SEQ ID NO: 2392710 - DNA, 25 bp, Homo sapien
aaattgcaagtttcttctcaaactg

SEQ ID NO: 2392711 - DNA, 25 bp, Homo sapien
agaagggcaggcatctccaaattgc

SEQ ID NO: 2392712 - DNA, 25 bp, Homo sapien
gggcaggcatctccaaattgcaagt

SEQ ID NO: 2392713 - DNA, 25 bp, Homo sapien
cgttgctagattgatctcccaagaa

SEQ ID NO: 2392714 - DNA, 25 bp, Homo sapien
gattgatctcccaagaatcagcttc

SEQ ID NO: 2392715 - DNA, 25 bp, Homo sapien
tctcccaagaatcagcttctaccat

SEQ ID NO: 2392716 - DNA, 25 bp, Homo sapien
gctagattgatctcccaagaatcag

SEQ ID NO: 2392717 - DNA, 25 bp, Homo sapien
tggcagggctgatcatagaccacat

SEQ ID NO: 2392718 - DNA, 25 bp, Homo sapien
acatgtttcttcgtcgttcctggca

SEQ ID NO: 2392719 - DNA, 25 bp, Homo sapien
tcttcggtgaatacgttagggtaca

SEQ ID NO: 2392720 - DNA, 25 bp, Homo sapien
gatctggttccctgataatttgaga

SEQ ID NO: 2392721 - DNA, 25 bp, Homo sapien
gcaggcaggcgagatagacaatggg

SEQ ID NO: 2392722 - DNA, 25 bp, Homo sapien
tgtgtggcaggcaggcgagatagac

SEQ ID NO: 2392723 - DNA, 25 bp, Homo sapien
tggcaggcaggcgagatagacaatg

SEQ ID NO: 2392724 - DNA, 25 bp, Homo sapien
gtgtggcaggcaggcgagatagaca

SEQ ID NO: 2392725 - DNA, 25 bp, Homo sapien
ttctgagtcagtgaccgacaggcca

SEQ ID NO: 2392726 - DNA, 25 bp, Homo sapien
tgagaaccggagtagccaaggaagc

SEQ ID NO: 2392727 - DNA, 25 bp, Homo sapien
aagatgtgggcactgcggtgagaac

SEQ ID NO: 2392728 - DNA, 25 bp, Homo sapien
tcagtgaccgacaggccagagggct

SEQ ID NO: 2392729 - DNA, 25 bp, Homo sapien
caaaagccgactttgctcggtgacc

SEQ ID NO: 2392730 - DNA, 25 bp, Homo sapien
gattactaaggagcaaaagccgact

SEQ ID NO: 2392731 - DNA, 25 bp, Homo sapien
aagccgactttgctcggtgacccct

SEQ ID NO: 2392732 - DNA, 25 bp, Homo sapien
tgtcctccggagaaagattactaag

SEQ ID NO: 2392733 - DNA, 25 bp, Homo sapien
caccgggagtcacgttctctggctg

SEQ ID NO: 2392734 - DNA, 25 bp, Homo sapien
caggctcaccgggagtcacgttctc

SEQ ID NO: 2392735 - DNA, 25 bp, Homo sapien
aggtgtctgtctccgcacatcttcc

SEQ ID NO: 2392736 - DNA, 25 bp, Homo sapien
ttctccagcgtaccggcatcacctg

SEQ ID NO: 2392737 - DNA, 25 bp, Homo sapien
ccagagtttcatgctgtgtgttttt

SEQ ID NO: 2392738 - DNA, 25 bp, Homo sapien
gccagagtttcatgctgtgtgtttt

SEQ ID NO: 2392739 - DNA, 25 bp, Homo sapien
gaagacttggcggtgctgtgatacg

SEQ ID NO: 2392740 - DNA, 25 bp, Homo sapien
tgctgtgatacgtgtagtgtgtgat

SEQ ID NO: 2392741 - DNA, 25 bp, Homo sapien
ctgcatccgtattggaatatctgaa

SEQ ID NO: 2392742 - DNA, 25 bp, Homo sapien
tgcatccgtattggaatatctgaaa

SEQ ID NO: 2392743 - DNA, 25 bp, Homo sapien
tctgatctaaggtcttctgaggaca

SEQ ID NO: 2392744 - DNA, 25 bp, Homo sapien
ctgatctaaggtcttctgaggacat

SEQ ID NO: 2392745 - DNA, 25 bp, Homo sapien
tttctgatctaaggtcttctgagga

SEQ ID NO: 2392746 - DNA, 25 bp, Homo sapien
gttttctgatctaaggtcttctgag

SEQ ID NO: 2392747 - DNA, 25 bp, Homo sapien
catcatctgggtggtgcctcttctg

SEQ ID NO: 2392748 - DNA, 25 bp, Homo sapien
ggtccttcagaaccacatcatctgg

SEQ ID NO: 2392749 - DNA, 25 bp, Homo sapien
cttcctcctcgaaggcagctctgcc

SEQ ID NO: 2392750 - DNA, 25 bp, Homo sapien
ttcttggtccttcagaaccacatca

SEQ ID NO: 2392751 - DNA, 25 bp, Homo sapien
taggatgggatgtccgcctgcgatc

SEQ ID NO: 2392752 - DNA, 25 bp, Homo sapien
aaagtatcaggccacaggagcgacc

SEQ ID NO: 2392753 - DNA, 25 bp, Homo sapien
cagttatggacattggacttttcct

SEQ ID NO: 2392754 - DNA, 25 bp, Homo sapien
acaggagcgaccagccaggactgag

SEQ ID NO: 2392755 - DNA, 25 bp, Homo sapien
agcaaccagaagtcccgcaccagct

SEQ ID NO: 2392756 - DNA, 25 bp, Homo sapien
atctcccgtggagcagactgctctg

SEQ ID NO: 2392757 - DNA, 25 bp, Homo sapien
tcgccatctcccgtggagcagactg

SEQ ID NO: 2392758 - DNA, 25 bp, Homo sapien
agcttctcgccatctcccgtggagc

SEQ ID NO: 2392759 - DNA, 25 bp, Homo sapien
gagctccaggagacttacaacccag

SEQ ID NO: 2392760 - DNA, 25 bp, Homo sapien
cctgggagcctgcttgagatccggc

SEQ ID NO: 2392761 - DNA, 25 bp, Homo sapien
ggatggctccgcgtaaaccgtgtct

SEQ ID NO: 2392762 - DNA, 25 bp, Homo sapien
ccgcgtaaaccgtgtctgcagcatc

SEQ ID NO: 2392763 - DNA, 25 bp, Homo sapien
tttgtgcatggcaaagctgagggcc

SEQ ID NO: 2392764 - DNA, 25 bp, Homo sapien
ccccatccagtaaatagagggtttg

SEQ ID NO: 2392765 - DNA, 25 bp, Homo sapien
ggtgtttgtgcagcacctggtatga

SEQ ID NO: 2392766 - DNA, 25 bp, Homo sapien
cagcgtccatgctgatggtggtgtt

SEQ ID NO: 2392767 - DNA, 25 bp, Homo sapien
tgtgcttgaagtttggtggctctct

SEQ ID NO: 2392768 - DNA, 25 bp, Homo sapien
gcttgaagtttggtggctctctgaa

SEQ ID NO: 2392769 - DNA, 25 bp, Homo sapien
catagtgtgcttgaagtttggtggc

SEQ ID NO: 2392770 - DNA, 25 bp, Homo sapien
gaggagtcatagtgtgcttgaagtt

SEQ ID NO: 2392771 - DNA, 25 bp, Homo sapien
cctctcttcacggatgggctgctgc

SEQ ID NO: 2392772 - DNA, 25 bp, Homo sapien
tccgtccacatttttaagcggtagc

SEQ ID NO: 2392773 - DNA, 25 bp, Homo sapien
tccatccgtccacatttttaagcgg

SEQ ID NO: 2392774 - DNA, 25 bp, Homo sapien
ccacatttttaagcggtagctgtag

SEQ ID NO: 2392775 - DNA, 25 bp, Homo sapien
ttgcacctgtcatgttcacgatcgg

SEQ ID NO: 2392776 - DNA, 25 bp, Homo sapien
ggtgggcatcctaacatatccgtat

SEQ ID NO: 2392777 - DNA, 25 bp, Homo sapien
gacactactgggttcaaatttgcac

SEQ ID NO: 2392778 - DNA, 25 bp, Homo sapien
taaagataacttaggtgccaggtcc

SEQ ID NO: 2392779 - DNA, 25 bp, Homo sapien
gagggaaattgagttaggatggctt

SEQ ID NO: 2392780 - DNA, 25 bp, Homo sapien
gcgcatctttcagctgccaaatgga

SEQ ID NO: 2392781 - DNA, 25 bp, Homo sapien
agcctagagctcagcgcatctttca

SEQ ID NO: 2392782 - DNA, 25 bp, Homo sapien
ggaaagaagtcctacgtccagccta

SEQ ID NO: 2392783 - DNA, 25 bp, Homo sapien
cacttgtttccggaaggcagctggt

SEQ ID NO: 2392784 - DNA, 25 bp, Homo sapien
tggcgctgagcgagagtttacattc

SEQ ID NO: 2392785 - DNA, 25 bp, Homo sapien
ttatcgaggatgaactatatgcgag

SEQ ID NO: 2392786 - DNA, 25 bp, Homo sapien
tatatgcgaggcactttgacaggca

SEQ ID NO: 2392787 - DNA, 25 bp, Homo sapien
ttggttcagcaagtccataggattt

SEQ ID NO: 2392788 - DNA, 25 bp, Homo sapien
ttcagcaagtccataggattttatc

SEQ ID NO: 2392789 - DNA, 25 bp, Homo sapien
cttttggttcagcaagtccatagga

SEQ ID NO: 2392790 - DNA, 25 bp, Homo sapien
tttcttttggttcagcaagtccata

SEQ ID NO: 2392791 - DNA, 25 bp, Homo sapien
gcttaacctctaatgcacagactct

SEQ ID NO: 2392792 - DNA, 25 bp, Homo sapien
aagtgaataaatcagtgggctggtg

SEQ ID NO: 2392793 - DNA, 25 bp, Homo sapien
ttcttaatacactgccatacatagg

SEQ ID NO: 2392794 - DNA, 25 bp, Homo sapien
ggctttgtgatcttgaacacgacgc

SEQ ID NO: 2392795 - DNA, 25 bp, Homo sapien
ccagagcccctttgatacatggttc

SEQ ID NO: 2392796 - DNA, 25 bp, Homo sapien
gttctgttacataaacctattggaa

SEQ ID NO: 2392797 - DNA, 25 bp, Homo sapien
gatacatggttcagctgttctgtta

SEQ ID NO: 2392798 - DNA, 25 bp, Homo sapien
tggaaaactgtaagtgaaatgctgc

SEQ ID NO: 2392799 - DNA, 25 bp, Homo sapien
gccttctgatcctaagaagaggacc

SEQ ID NO: 2392800 - DNA, 25 bp, Homo sapien
agtagtgccttctgatcctaagaag

SEQ ID NO: 2392801 - DNA, 25 bp, Homo sapien
gaactgcctggttggaaagaatgct

SEQ ID NO: 2392802 - DNA, 25 bp, Homo sapien
tacctgttcctggatggaactgcct

SEQ ID NO: 2392803 - DNA, 25 bp, Homo sapien
agatgtccttaggtggtgggctgcc

SEQ ID NO: 2392804 - DNA, 25 bp, Homo sapien
tgcaagatgtccttaggtggtgggc

SEQ ID NO: 2392805 - DNA, 25 bp, Homo sapien
tgattcttgatgcagtctcttccca

SEQ ID NO: 2392806 - DNA, 25 bp, Homo sapien
tgtccttaggtggtgggctgccatc

SEQ ID NO: 2392807 - DNA, 25 bp, Homo sapien
cgggcctggcgcgtctagctcgcgg

SEQ ID NO: 2392808 - DNA, 25 bp, Homo sapien
ctggagccgcgggcaggcagtgagg

SEQ ID NO: 2392809 - DNA, 25 bp, Homo sapien
gctcgcggtcagaggtcgggaaggg

SEQ ID NO: 2392810 - DNA, 25 bp, Homo sapien
ctggcgcgtctagctcgcggtcaga

SEQ ID NO: 2392811 - DNA, 25 bp, Homo sapien
tctgtattttggtgtatctgcttgc

SEQ ID NO: 2392812 - DNA, 25 bp, Homo sapien
caatgccttgtgatactcttgttct

SEQ ID NO: 2392813 - DNA, 25 bp, Homo sapien
ggggcatatgccaagtccagtagtg

SEQ ID NO: 2392814 - DNA, 25 bp, Homo sapien
atgagattactacaatgccttgtga

SEQ ID NO: 2392815 - DNA, 25 bp, Homo sapien
ctgcagactcggaagtttctcacat

SEQ ID NO: 2392816 - DNA, 25 bp, Homo sapien
tgcagactcggaagtttctcacatt

SEQ ID NO: 2392817 - DNA, 25 bp, Homo sapien
gcagactcggaagtttctcacattc

SEQ ID NO: 2392818 - DNA, 25 bp, Homo sapien
ccattgcgcccatctgttccccggg

SEQ ID NO: 2392819 - DNA, 25 bp, Homo sapien
gggctgcagccagcgagcatctgcg

SEQ ID NO: 2392820 - DNA, 25 bp, Homo sapien
gagcatctgcggggggcggtgaagg

SEQ ID NO: 2392821 - DNA, 25 bp, Homo sapien
attgcgcccatctgttccccgggct

SEQ ID NO: 2392822 - DNA, 25 bp, Homo sapien
catggtccttgaaatcagtgatatt

SEQ ID NO: 2392823 - DNA, 25 bp, Homo sapien
ccttgaaatcagtgatattgaacag

SEQ ID NO: 2392824 - DNA, 25 bp, Homo sapien
tggtccttgaaatcagtgatattga

SEQ ID NO: 2392825 - DNA, 25 bp, Homo sapien
ttgaaatcagtgatattgaacagtc

SEQ ID NO: 2392826 - DNA, 25 bp, Homo sapien
caccatggtaattgagctctgacga

SEQ ID NO: 2392827 - DNA, 25 bp, Homo sapien
tattactaataagtgtatgccctcc

SEQ ID NO: 2392828 - DNA, 25 bp, Homo sapien
tctaaccaggttgtgtgtgagtacc

SEQ ID NO: 2392829 - DNA, 25 bp, Homo sapien
agctgttaagtgctatgtgggtgca

SEQ ID NO: 2392830 - DNA, 25 bp, Homo sapien
aagggcactgtttatctggttttgc

SEQ ID NO: 2392831 - DNA, 25 bp, Homo sapien
tctggttttgccaatgctgggcact

SEQ ID NO: 2392832 - DNA, 25 bp, Homo sapien
gggcactgtttatctggttttgcca

SEQ ID NO: 2392833 - DNA, 25 bp, Homo sapien
ccaatgctgggcactgaattcctcg

SEQ ID NO: 2392834 - DNA, 25 bp, Homo sapien
actagcccaggaatgcggtgttgac

SEQ ID NO: 2392835 - DNA, 25 bp, Homo sapien
gcccaggaatgcggtgttgactcat

SEQ ID NO: 2392836 - DNA, 25 bp, Homo sapien
tagcccaggaatgcggtgttgactc

SEQ ID NO: 2392837 - DNA, 25 bp, Homo sapien
cactagcccaggaatgcggtgttga

SEQ ID NO: 2392838 - DNA, 25 bp, Homo sapien
tgctgaactgattgcctgaacgtac

SEQ ID NO: 2392839 - DNA, 25 bp, Homo sapien
tctggggctgtaaatgcaattctgc

SEQ ID NO: 2392840 - DNA, 25 bp, Homo sapien
ggggctgtaaatgcaattctgctgc

SEQ ID NO: 2392841 - DNA, 25 bp, Homo sapien
tgctgctgaactgattgcctgaacg

SEQ ID NO: 2392842 - DNA, 25 bp, Homo sapien
tgcttgatgtctttcaaaaagaaag

SEQ ID NO: 2392843 - DNA, 25 bp, Homo sapien
ttgtgtgcttgatgtctttcaaaaa

SEQ ID NO: 2392844 - DNA, 25 bp, Homo sapien
cttgatgtctttcaaaaagaaagtg

SEQ ID NO: 2392845 - DNA, 25 bp, Homo sapien
tgtgcttgatgtctttcaaaaagaa

SEQ ID NO: 2392846 - DNA, 25 bp, Homo sapien
gaaagtgcaaaagaggagcaggcaa

SEQ ID NO: 2392847 - DNA, 25 bp, Homo sapien
gcaaaagaggagcaggcaagacaga

SEQ ID NO: 2392848 - DNA, 25 bp, Homo sapien
ggcaagacagaaacagcatggccat

SEQ ID NO: 2392849 - DNA, 25 bp, Homo sapien
ctaggaaagtgcaaaagaggagcag

SEQ ID NO: 2392850 - DNA, 25 bp, Homo sapien
agccacggcgaaatctagacttcct

SEQ ID NO: 2392851 - DNA, 25 bp, Homo sapien
cacggcgaaatctagacttcctggt

SEQ ID NO: 2392852 - DNA, 25 bp, Homo sapien
gccacggcgaaatctagacttcctg

SEQ ID NO: 2392853 - DNA, 25 bp, Homo sapien
ggcgaaatctagacttcctggtccc

SEQ ID NO: 2392854 - DNA, 25 bp, Homo sapien
aaatataaccagtgagcagtgtctc

SEQ ID NO: 2392855 - DNA, 25 bp, Homo sapien
cattcccataatgtccacttcctgg

SEQ ID NO: 2392856 - DNA, 25 bp, Homo sapien
tataaccagtgagcagtgtctcttt

SEQ ID NO: 2392857 - DNA, 25 bp, Homo sapien
tacactgtacattcccataatgtcc

SEQ ID NO: 2392858 - DNA, 25 bp, Homo sapien
tcagtatctgcggagttcatttgtc

SEQ ID NO: 2392859 - DNA, 25 bp, Homo sapien
cagtatctgcggagttcatttgtct

SEQ ID NO: 2392860 - DNA, 25 bp, Homo sapien
tctggaggatgtaggctgagtctta

SEQ ID NO: 2392861 - DNA, 25 bp, Homo sapien
gagtatcagtacagaggagagcctc

SEQ ID NO: 2392862 - DNA, 25 bp, Homo sapien
gagtcttatcttctcaaccgccagt

SEQ ID NO: 2392863 - DNA, 25 bp, Homo sapien
ggctgtgaactctgtaaccctgtat

SEQ ID NO: 2392864 - DNA, 25 bp, Homo sapien
gaaacatggactcccttggcagcga

SEQ ID NO: 2392865 - DNA, 25 bp, Homo sapien
ggcagcgagtacttcctcaagagat

SEQ ID NO: 2392866 - DNA, 25 bp, Homo sapien
gttagaagcttcatgacctagggca

SEQ ID NO: 2392867 - DNA, 25 bp, Homo sapien
tctggcttgccctatcctgcgttgg

SEQ ID NO: 2392868 - DNA, 25 bp, Homo sapien
accttgactggctccaaacattttc

SEQ ID NO: 2392869 - DNA, 25 bp, Homo sapien
tccaggctcggtggctggaacaaag

SEQ ID NO: 2392870 - DNA, 25 bp, Homo sapien
ggaacaaagaatgttttgaaccaca

SEQ ID NO: 2392871 - DNA, 25 bp, Homo sapien
cggcaggatccagcgagatccaggc

SEQ ID NO: 2392872 - DNA, 25 bp, Homo sapien
ttttgaaccacacggggctctggca

SEQ ID NO: 2392873 - DNA, 25 bp, Homo sapien
tgggtggctgttgaccgactgtcca

SEQ ID NO: 2392874 - DNA, 25 bp, Homo sapien
ctgatgagcacctgatgggtggctg

SEQ ID NO: 2392875 - DNA, 25 bp, Homo sapien
cgtcctgtccagcacgcggcaggag

SEQ ID NO: 2392876 - DNA, 25 bp, Homo sapien
aggcagggcttgttcacctgcgtcc

SEQ ID NO: 2392877 - DNA, 25 bp, Homo sapien
ccttcaggtaataggggaagcatga

SEQ ID NO: 2392878 - DNA, 25 bp, Homo sapien
tccaagtacctgctgatgtttctga

SEQ ID NO: 2392879 - DNA, 25 bp, Homo sapien
cctgctgatgtttctgagctaggag

SEQ ID NO: 2392880 - DNA, 25 bp, Homo sapien
tgatgtttctgagctaggagggctt

SEQ ID NO: 2392881 - DNA, 25 bp, Homo sapien
gcagccactgggttgcagtgaaagt

SEQ ID NO: 2392882 - DNA, 25 bp, Homo sapien
gagacgtcctgagacacttcatcaa

SEQ ID NO: 2392883 - DNA, 25 bp, Homo sapien
ttttcagccgctggtgactgctctg

SEQ ID NO: 2392884 - DNA, 25 bp, Homo sapien
ttccttttgccccatggagagacgt

SEQ ID NO: 2392885 - DNA, 25 bp, Homo sapien
ggtgagcccgccagctgtaccgcat

SEQ ID NO: 2392886 - DNA, 25 bp, Homo sapien
gctcgtgcccgcacagattgtctgg

SEQ ID NO: 2392887 - DNA, 25 bp, Homo sapien
gcccgcacagattgtctggtgagcc

SEQ ID NO: 2392888 - DNA, 25 bp, Homo sapien
tggtgagcccgccagctgtaccgca

SEQ ID NO: 2392889 - DNA, 25 bp, Homo sapien
agggccgttctgcagatcctgggtt

SEQ ID NO: 2392890 - DNA, 25 bp, Homo sapien
tgggcgatgcccttcagtgagcggg

SEQ ID NO: 2392891 - DNA, 25 bp, Homo sapien
ggtagggccgttctgcagatcctgg

SEQ ID NO: 2392892 - DNA, 25 bp, Homo sapien
tggggtagggccgttctgcagatcc

SEQ ID NO: 2392893 - DNA, 25 bp, Homo sapien
ctaggctcccttccaccgttccctg

SEQ ID NO: 2392894 - DNA, 25 bp, Homo sapien
gctttgaaacaagactggcctgctt

SEQ ID NO: 2392895 - DNA, 25 bp, Homo sapien
ggcctgcttgaccttccatttagag

SEQ ID NO: 2392896 - DNA, 25 bp, Homo sapien
atttagagttaatgtcaaagcttgc

SEQ ID NO: 2392897 - DNA, 25 bp, Homo sapien
aagagctttgaaacaagactggcct

SEQ ID NO: 2392898 - DNA, 25 bp, Homo sapien
gatacgcgatcagtgtcccttgagg

SEQ ID NO: 2392899 - DNA, 25 bp, Homo sapien
cttgaggcagtgctgcacatggtgc

SEQ ID NO: 2392900 - DNA, 25 bp, Homo sapien
tggagtgtcgctggatacgcgatca

SEQ ID NO: 2392901 - DNA, 25 bp, Homo sapien
gaatgagaatgaacgtggctgctcg

SEQ ID NO: 2392902 - DNA, 25 bp, Homo sapien
tatgcccaatagtcatcctgaattt

SEQ ID NO: 2392903 - DNA, 25 bp, Homo sapien
ctatgcccaatagtcatcctgaatt

SEQ ID NO: 2392904 - DNA, 25 bp, Homo sapien
tgcccaatagtcatcctgaatttcc

SEQ ID NO: 2392905 - DNA, 25 bp, Homo sapien
atgcccaatagtcatcctgaatttc

SEQ ID NO: 2392906 - DNA, 25 bp, Homo sapien
ttagaaccatcagaagcccattttc

SEQ ID NO: 2392907 - DNA, 25 bp, Homo sapien
agaaccatcagaagcccattttcct

SEQ ID NO: 2392908 - DNA, 25 bp, Homo sapien
atcagaagcccattttcctgtggaa

SEQ ID NO: 2392909 - DNA, 25 bp, Homo sapien
ttttagaaccatcagaagcccattt

SEQ ID NO: 2392910 - DNA, 25 bp, Homo sapien
cgctcagtaatagaagcaactccga

SEQ ID NO: 2392911 - DNA, 25 bp, Homo sapien
tccgattgcatgagcaggcttctcg

SEQ ID NO: 2392912 - DNA, 25 bp, Homo sapien
gaagaaagatgtcaggtccaggaca

SEQ ID NO: 2392913 - DNA, 25 bp, Homo sapien
ggcttctcgagtgctgtcctgtcag

SEQ ID NO: 2392914 - DNA, 25 bp, Homo sapien
aggcacacttagcacggcccaagag

SEQ ID NO: 2392915 - DNA, 25 bp, Homo sapien
tggaaggtgagggtccctgttgtcc

SEQ ID NO: 2392916 - DNA, 25 bp, Homo sapien
atacactccgtgtcctgtcgtgagc

SEQ ID NO: 2392917 - DNA, 25 bp, Homo sapien
ccacttataactggggtcatctggg

SEQ ID NO: 2392918 - DNA, 25 bp, Homo sapien
caggaggcgcttggccccagggctg

SEQ ID NO: 2392919 - DNA, 25 bp, Homo sapien
gcaggaggcgcttggccccagggct

SEQ ID NO: 2392920 - DNA, 25 bp, Homo sapien
ggaggcgcttggccccagggctgag

SEQ ID NO: 2392921 - DNA, 25 bp, Homo sapien
ctgcaggaggcgcttggccccaggg

SEQ ID NO: 2392922 - DNA, 25 bp, Homo sapien
gggtggggtgtaggcgacaggagag

SEQ ID NO: 2392923 - DNA, 25 bp, Homo sapien
tggggtgtaggcgacaggagagcag

SEQ ID NO: 2392924 - DNA, 25 bp, Homo sapien
ggtgtaggcgacaggagagcaggtg

SEQ ID NO: 2392925 - DNA, 25 bp, Homo sapien
tgggtggggtgtaggcgacaggaga

SEQ ID NO: 2392926 - DNA, 25 bp, Homo sapien
ccttcttcagctggacatatttgtg

SEQ ID NO: 2392927 - DNA, 25 bp, Homo sapien
gtggaggtccagacacaactcagtc

SEQ ID NO: 2392928 - DNA, 25 bp, Homo sapien
gaggtccagacacaactcagtctgg

SEQ ID NO: 2392929 - DNA, 25 bp, Homo sapien
tccagacacaactcagtctgggtca

SEQ ID NO: 2392930 - DNA, 25 bp, Homo sapien
cctgtctgagcaggaaataattacc

SEQ ID NO: 2392931 - DNA, 25 bp, Homo sapien
tgagatgatctatcgcctccctgtc

SEQ ID NO: 2392932 - DNA, 25 bp, Homo sapien
ttatcgctttttatctattgacact

SEQ ID NO: 2392933 - DNA, 25 bp, Homo sapien
tttcaattaaggagtctcccctgag

SEQ ID NO: 2392934 - DNA, 25 bp, Homo sapien
gaaggcaggtgttgtacgccccgtg

SEQ ID NO: 2392935 - DNA, 25 bp, Homo sapien
ccgcaagctgtgagtgtcctcaaac

SEQ ID NO: 2392936 - DNA, 25 bp, Homo sapien
tcccacagagtcccgcaagctgtga

SEQ ID NO: 2392937 - DNA, 25 bp, Homo sapien
gcaggtgttgtacgccccgtgcctc

SEQ ID NO: 2392938 - DNA, 25 bp, Homo sapien
tgggttggattccagggtctccact

SEQ ID NO: 2392939 - DNA, 25 bp, Homo sapien
ggcagcgtacatgatggccagtgta

SEQ ID NO: 2392940 - DNA, 25 bp, Homo sapien
catgcatcaggaggaagagacctcg

SEQ ID NO: 2392941 - DNA, 25 bp, Homo sapien
gccagtgtacacgatgagcagccac

SEQ ID NO: 2392942 - DNA, 25 bp, Homo sapien
tcagggggagcgtttttgttcttca

SEQ ID NO: 2392943 - DNA, 25 bp, Homo sapien
cagggggagcgtttttgttcttcat

SEQ ID NO: 2392944 - DNA, 25 bp, Homo sapien
tgcctacgtaggtcaatgccatggg

SEQ ID NO: 2392945 - DNA, 25 bp, Homo sapien
ggaagacctgcgttctcgtaggaaa

SEQ ID NO: 2392946 - DNA, 25 bp, Homo sapien
cttgacctgagcatgagatgccggg

SEQ ID NO: 2392947 - DNA, 25 bp, Homo sapien
tctcgtaggaaatgtatcggtgtgg

SEQ ID NO: 2392948 - DNA, 25 bp, Homo sapien
ttataaatccttctccttcaggtta

SEQ ID NO: 2392949 - DNA, 25 bp, Homo sapien
tataaatccttctccttcaggttac

SEQ ID NO: 2392950 - DNA, 25 bp, Homo sapien
caaccaccagtgagtcagaaggtct

SEQ ID NO: 2392951 - DNA, 25 bp, Homo sapien
actctctggtattgtgaatctgaga

SEQ ID NO: 2392952 - DNA, 25 bp, Homo sapien
ttaaagagccgtgtttgactctgtc

SEQ ID NO: 2392953 - DNA, 25 bp, Homo sapien
tacacattgggcagtaggtttttaa

SEQ ID NO: 2392954 - DNA, 25 bp, Homo sapien
ttaatgaaatacagcgatacggcag

SEQ ID NO: 2392955 - DNA, 25 bp, Homo sapien
aatacagcgatacggcagtaggcac

SEQ ID NO: 2392956 - DNA, 25 bp, Homo sapien
tacggcagtaggcaccttcaacact

SEQ ID NO: 2392957 - DNA, 25 bp, Homo sapien
gcgatacggcagtaggcaccttcaa

SEQ ID NO: 2392958 - DNA, 25 bp, Homo sapien
ggagtgctggggcactggtcacaca

SEQ ID NO: 2392959 - DNA, 25 bp, Homo sapien
agtgctggggcactggtcacacaga

SEQ ID NO: 2392960 - DNA, 25 bp, Homo sapien
gggcactggtcacacagatcctggt

SEQ ID NO: 2392961 - DNA, 25 bp, Homo sapien
tggggcactggtcacacagatcctg

SEQ ID NO: 2392962 - DNA, 25 bp, Homo sapien
gcatcgtccaccgtgatgaagtaca

SEQ ID NO: 2392963 - DNA, 25 bp, Homo sapien
ccttccaagcctggagaatgactgc

SEQ ID NO: 2392964 - DNA, 25 bp, Homo sapien
gggcgtagtcactgcccttccaagc

SEQ ID NO: 2392965 - DNA, 25 bp, Homo sapien
tacaggctttgccagggcttagcag

SEQ ID NO: 2392966 - DNA, 25 bp, Homo sapien
ctccaaggcttgttaggggtgccat

SEQ ID NO: 2392967 - DNA, 25 bp, Homo sapien
tgcccttggatttgccaagtgcccc

SEQ ID NO: 2392968 - DNA, 25 bp, Homo sapien
gggctcagggagaatactccagttt

SEQ ID NO: 2392969 - DNA, 25 bp, Homo sapien
aagtcaaggtccgaagggccccatg

SEQ ID NO: 2392970 - DNA, 25 bp, Homo sapien
aggaagtggagcatgacccgtgcct

SEQ ID NO: 2392971 - DNA, 25 bp, Homo sapien
gaagctggcatctctgtttcctgat

SEQ ID NO: 2392972 - DNA, 25 bp, Homo sapien
aaagtaggtactagagagtggagct

SEQ ID NO: 2392973 - DNA, 25 bp, Homo sapien
caaggaagctggcatctctgtttcc

SEQ ID NO: 2392974 - DNA, 25 bp, Homo sapien
agagtggagctacccagaaaccagg

SEQ ID NO: 2392975 - DNA, 25 bp, Homo sapien
agtgtcttggactggataatggtgt

SEQ ID NO: 2392976 - DNA, 25 bp, Homo sapien
ataatggtgtgtattaaggtttggg

SEQ ID NO: 2392977 - DNA, 25 bp, Homo sapien
tcttggactggataatggtgtgtat

SEQ ID NO: 2392978 - DNA, 25 bp, Homo sapien
tgtcttggactggataatggtgtgt

SEQ ID NO: 2392979 - DNA, 25 bp, Homo sapien
tggccggcctgcaggccaggaggcc

SEQ ID NO: 2392980 - DNA, 25 bp, Homo sapien
cctgcaggccaggaggccagtgcca

SEQ ID NO: 2392981 - DNA, 25 bp, Homo sapien
ctgcaggccaggaggccagtgccat

SEQ ID NO: 2392982 - DNA, 25 bp, Homo sapien
cggcctgcaggccaggaggccagtg

SEQ ID NO: 2392983 - DNA, 25 bp, Homo sapien
cataaagggctacatgaggctgaaa

SEQ ID NO: 2392984 - DNA, 25 bp, Homo sapien
tgtagtcgaagctgacctgggttgc

SEQ ID NO: 2392985 - DNA, 25 bp, Homo sapien
taaagagaagcaaggtgtgtcctcc

SEQ ID NO: 2392986 - DNA, 25 bp, Homo sapien
tatgctctgtacagtcaggctcgtc

SEQ ID NO: 2392987 - DNA, 25 bp, Homo sapien
ttctgattccgcaggtctcaggtga

SEQ ID NO: 2392988 - DNA, 25 bp, Homo sapien
gcagaagttggaatagaaggcatca

SEQ ID NO: 2392989 - DNA, 25 bp, Homo sapien
tttacaacacaagcacctgaggagc

SEQ ID NO: 2392990 - DNA, 25 bp, Homo sapien
cagccgtaggatttctgcagtccca

SEQ ID NO: 2392991 - DNA, 25 bp, Homo sapien
gaattaaatcacagactggaggccg

SEQ ID NO: 2392992 - DNA, 25 bp, Homo sapien
tatatgatgtagacaaccacagatg

SEQ ID NO: 2392993 - DNA, 25 bp, Homo sapien
tgaaacccctcgttataagaacaga

SEQ ID NO: 2392994 - DNA, 25 bp, Homo sapien
ggagcggatgctgcaattttcttcc

SEQ ID NO: 2392995 - DNA, 25 bp, Homo sapien
ccatccaaaggaatgcacggtgttg

SEQ ID NO: 2392996 - DNA, 25 bp, Homo sapien
cacggtgttggcttctgtatgtcac

SEQ ID NO: 2392997 - DNA, 25 bp, Homo sapien
agcaagtccggtgccgagaagctcc

SEQ ID NO: 2392998 - DNA, 25 bp, Homo sapien
tatgtcacaaagtgggcagccagcc

SEQ ID NO: 2392999 - DNA, 25 bp, Homo sapien
tttcttctcttccttttctgattca

SEQ ID NO: 2393000 - DNA, 25 bp, Homo sapien
ttatttcttctcttccttttctgat

SEQ ID NO: 2393001 - DNA, 25 bp, Homo sapien
ttcttctcttccttttctgattcat

SEQ ID NO: 2393002 - DNA, 25 bp, Homo sapien
cagtgctcattatttcttctcttcc

SEQ ID NO: 2393003 - DNA, 25 bp, Homo sapien
ctctgccttcctctggtcctgtcat

SEQ ID NO: 2393004 - DNA, 25 bp, Homo sapien
tctctgccttcctctggtcctgtca

SEQ ID NO: 2393005 - DNA, 25 bp, Homo sapien
ctctctgccttcctctggtcctgtc

SEQ ID NO: 2393006 - DNA, 25 bp, Homo sapien
gtaggaatcgcagggaccatgatca

SEQ ID NO: 2393007 - DNA, 25 bp, Homo sapien
gatggtggtgccctaagaatgcaga

SEQ ID NO: 2393008 - DNA, 25 bp, Homo sapien
tacgcccactagctggccaggaatg

SEQ ID NO: 2393009 - DNA, 25 bp, Homo sapien
gctgttgtcacgttctgtgctctgc

SEQ ID NO: 2393010 - DNA, 25 bp, Homo sapien
agaatctgagagaggtagggagagc

SEQ ID NO: 2393011 - DNA, 25 bp, Homo sapien
gacgtatccaagtgtagttgatcag

SEQ ID NO: 2393012 - DNA, 25 bp, Homo sapien
tggagtttgcagtgcctatgacgta

SEQ ID NO: 2393013 - DNA, 25 bp, Homo sapien
aacatcatgactggatttgatgatg

SEQ ID NO: 2393014 - DNA, 25 bp, Homo sapien
acttgggctggaggaatgttgctga

SEQ ID NO: 2393015 - DNA, 25 bp, Homo sapien
ttattctgcatacagcgggacctga

SEQ ID NO: 2393016 - DNA, 25 bp, Homo sapien
tacagcgggacctgaacttgggctg

SEQ ID NO: 2393017 - DNA, 25 bp, Homo sapien
gaggcagaggattgtacctgagaac

SEQ ID NO: 2393018 - DNA, 25 bp, Homo sapien
gaaccctgtgtccttaccttgtgta

SEQ ID NO: 2393019 - DNA, 25 bp, Homo sapien
ctttatgtccatctgggctttgcta

SEQ ID NO: 2393020 - DNA, 25 bp, Homo sapien
caatccttgtgtccgtaagaaccct

SEQ ID NO: 2393021 - DNA, 25 bp, Homo sapien
catggatgagttcagcagaagtatg

SEQ ID NO: 2393022 - DNA, 25 bp, Homo sapien
ccggctgcccaagtggttcaggtca

SEQ ID NO: 2393023 - DNA, 25 bp, Homo sapien
ccaagaagaagagggatgatttttc

SEQ ID NO: 2393024 - DNA, 25 bp, Homo sapien
ggcttaactcggtctgtggcctctg

SEQ ID NO: 2393025 - DNA, 25 bp, Homo sapien
gtttctgctccctttcggtgtccga

SEQ ID NO: 2393026 - DNA, 25 bp, Homo sapien
gaataagcttttccaaactatatgc

SEQ ID NO: 2393027 - DNA, 25 bp, Homo sapien
aataagcttttccaaactatatgcc

SEQ ID NO: 2393028 - DNA, 25 bp, Homo sapien
atctctaaatataaagttttcacat

SEQ ID NO: 2393029 - DNA, 25 bp, Homo sapien
tgaataagcttttccaaactatatg

SEQ ID NO: 2393030 - DNA, 25 bp, Homo sapien
cgctgcagagggatggcgttggagg

SEQ ID NO: 2393031 - DNA, 25 bp, Homo sapien
tcttgtgtcaaggtgcgctgcagag

SEQ ID NO: 2393032 - DNA, 25 bp, Homo sapien
tcccctcttgtgtcaaggtgcgctg

SEQ ID NO: 2393033 - DNA, 25 bp, Homo sapien
tcattggacgagtgacttcccctct

SEQ ID NO: 2393034 - DNA, 25 bp, Homo sapien
ttcccaccacaagatgacgaagatg

SEQ ID NO: 2393035 - DNA, 25 bp, Homo sapien
tagacgtctgccacatcactcaggg

SEQ ID NO: 2393036 - DNA, 25 bp, Homo sapien
gctgcgtggagcactcggtgccttt

SEQ ID NO: 2393037 - DNA, 25 bp, Homo sapien
cgaagatgtggtgttgacagactgc

SEQ ID NO: 2393038 - DNA, 25 bp, Homo sapien
gggccccagggactttctcagagat

SEQ ID NO: 2393039 - DNA, 25 bp, Homo sapien
gccccagggactttctcagagatgc

SEQ ID NO: 2393040 - DNA, 25 bp, Homo sapien
ggggccccagggactttctcagaga

SEQ ID NO: 2393041 - DNA, 25 bp, Homo sapien
ctggggccccagggactttctcaga

SEQ ID NO: 2393042 - DNA, 25 bp, Homo sapien
tgtggatgccataaaagcactgtcc

SEQ ID NO: 2393043 - DNA, 25 bp, Homo sapien
aaggttgagaatcaccgctagtcca

SEQ ID NO: 2393044 - DNA, 25 bp, Homo sapien
tgtgccacactatggaaaaggttga

SEQ ID NO: 2393045 - DNA, 25 bp, Homo sapien
cacctctggttgtgggcgcttcatc

SEQ ID NO: 2393046 - DNA, 25 bp, Homo sapien
agacaccagcttcccgtggatggcc

SEQ ID NO: 2393047 - DNA, 25 bp, Homo sapien
cgtacataagccatgaggcagacac

SEQ ID NO: 2393048 - DNA, 25 bp, Homo sapien
catcaaaggtgaagtcgtacataag

SEQ ID NO: 2393049 - DNA, 25 bp, Homo sapien
ccgtggatggccggattttgattgc

SEQ ID NO: 2393050 - DNA, 25 bp, Homo sapien
tacccgccaccagtctccaatttgg

SEQ ID NO: 2393051 - DNA, 25 bp, Homo sapien
gccaagcttttcgtaatggggtcac

SEQ ID NO: 2393052 - DNA, 25 bp, Homo sapien
tgccctgtgctagggtcacttccac

SEQ ID NO: 2393053 - DNA, 25 bp, Homo sapien
acaccatctctgtacccgccaccag

SEQ ID NO: 2393054 - DNA, 25 bp, Homo sapien
ttccataattcgaatctcgtcctcc

SEQ ID NO: 2393055 - DNA, 25 bp, Homo sapien
tccataattcgaatctcgtcctcca

SEQ ID NO: 2393056 - DNA, 25 bp, Homo sapien
ccataattcgaatctcgtcctccat

SEQ ID NO: 2393057 - DNA, 25 bp, Homo sapien
aattccataattcgaatctcgtcct

SEQ ID NO: 2393058 - DNA, 25 bp, Homo sapien
tgaagtggcaaagtctgttccaggt

SEQ ID NO: 2393059 - DNA, 25 bp, Homo sapien
agtggcaaagtctgttccaggtact

SEQ ID NO: 2393060 - DNA, 25 bp, Homo sapien
gaagtggcaaagtctgttccaggta

SEQ ID NO: 2393061 - DNA, 25 bp, Homo sapien
aagtggcaaagtctgttccaggtac

SEQ ID NO: 2393062 - DNA, 25 bp, Homo sapien
gaggacgtggggcccactggactca

SEQ ID NO: 2393063 - DNA, 25 bp, Homo sapien
aggacgtggggcccactggactcac

SEQ ID NO: 2393064 - DNA, 25 bp, Homo sapien
ctggaggaggacgtggggcccactg

SEQ ID NO: 2393065 - DNA, 25 bp, Homo sapien
gaggaggacgtggggcccactggac

SEQ ID NO: 2393066 - DNA, 25 bp, Homo sapien
gaacttgcaacccaatgagatgtcc

SEQ ID NO: 2393067 - DNA, 25 bp, Homo sapien
tgtgacactcatggtcccactgaac

SEQ ID NO: 2393068 - DNA, 25 bp, Homo sapien
tgtgctgtgacactcatggtcccac

SEQ ID NO: 2393069 - DNA, 25 bp, Homo sapien
gtcctcctggttggctggacatttc

SEQ ID NO: 2393070 - DNA, 25 bp, Homo sapien
tctgcaccatatggtaagggtgtcc

SEQ ID NO: 2393071 - DNA, 25 bp, Homo sapien
taaggaggctgtatagatgctgccc

SEQ ID NO: 2393072 - DNA, 25 bp, Homo sapien
gaggttcctgttccacgcgtttgac

SEQ ID NO: 2393073 - DNA, 25 bp, Homo sapien
ttgacgtgtgtgctgatgactctgc

SEQ ID NO: 2393074 - DNA, 25 bp, Homo sapien
cgatcactcttcatcagcagctgtg

SEQ ID NO: 2393075 - DNA, 25 bp, Homo sapien
gcatctggatgcccgtggtgtgagg

SEQ ID NO: 2393076 - DNA, 25 bp, Homo sapien
tcagctcaaaagccaagtcatcttt

SEQ ID NO: 2393077 - DNA, 25 bp, Homo sapien
agagaaaaggccgatcactcttcat

SEQ ID NO: 2393078 - DNA, 25 bp, Homo sapien
ctctcgagtctgcatgcctcctgca

SEQ ID NO: 2393079 - DNA, 25 bp, Homo sapien
gcatggagcgttgctctgcaggctt

SEQ ID NO: 2393080 - DNA, 25 bp, Homo sapien
tctcgagtctgcatgcctcctgcaa

SEQ ID NO: 2393081 - DNA, 25 bp, Homo sapien
gcaatggcatggagcgttgctctgc

SEQ ID NO: 2393082 - DNA, 25 bp, Homo sapien
tactgcatgacgagaatgacagcaa

SEQ ID NO: 2393083 - DNA, 25 bp, Homo sapien
tgtatcccttccagtaagagtaccg

SEQ ID NO: 2393084 - DNA, 25 bp, Homo sapien
ggaacacggctaactgtgacatctt

SEQ ID NO: 2393085 - DNA, 25 bp, Homo sapien
ttccagtaagagtaccgcctccagg

SEQ ID NO: 2393086 - DNA, 25 bp, Homo sapien
tgccagccagtctttccagggtgct

SEQ ID NO: 2393087 - DNA, 25 bp, Homo sapien
tttccagggtgcttccgatgcctcc

SEQ ID NO: 2393088 - DNA, 25 bp, Homo sapien
ggtgcttccgatgcctccagtggaa

SEQ ID NO: 2393089 - DNA, 25 bp, Homo sapien
gccagccagtctttccagggtgctt

SEQ ID NO: 2393090 - DNA, 25 bp, Homo sapien
cagcaatacagggaactgtcaagag

SEQ ID NO: 2393091 - DNA, 25 bp, Homo sapien
actgtcaagagagccattcgtttta

SEQ ID NO: 2393092 - DNA, 25 bp, Homo sapien
cagattcactacttggagacttgct

SEQ ID NO: 2393093 - DNA, 25 bp, Homo sapien
cctgcggcagattcactacttggag

SEQ ID NO: 2393094 - DNA, 25 bp, Homo sapien
gatgaaatgggaaaactctatctga

SEQ ID NO: 2393095 - DNA, 25 bp, Homo sapien
ttagctaaagcacttgacatccaga

SEQ ID NO: 2393096 - DNA, 25 bp, Homo sapien
gggaaaactctatctgaacagttag

SEQ ID NO: 2393097 - DNA, 25 bp, Homo sapien
gctaaagcacttgacatccagaact

SEQ ID NO: 2393098 - DNA, 25 bp, Homo sapien
cacatgcttccatgtagtagctgga

SEQ ID NO: 2393099 - DNA, 25 bp, Homo sapien
tgctctcccatgcagtggcttgtgt

SEQ ID NO: 2393100 - DNA, 25 bp, Homo sapien
tagtgtcttcatgctctccagtgca

SEQ ID NO: 2393101 - DNA, 25 bp, Homo sapien
ataacttcccgttccccatgcaatg

SEQ ID NO: 2393102 - DNA, 25 bp, Homo sapien
tgtggcaaaggtagctcagactcca

SEQ ID NO: 2393103 - DNA, 25 bp, Homo sapien
tctgtttggcagatgcccagttccc

SEQ ID NO: 2393104 - DNA, 25 bp, Homo sapien
tctcctttggtatgggaatggactg

SEQ ID NO: 2393105 - DNA, 25 bp, Homo sapien
tgtggctgtcaacacaatgggtggt

SEQ ID NO: 2393106 - DNA, 25 bp, Homo sapien
tctagatgagcatataaaacatccc

SEQ ID NO: 2393107 - DNA, 25 bp, Homo sapien
aatttgcacgttaggaatggaagcc

SEQ ID NO: 2393108 - DNA, 25 bp, Homo sapien
agcaagctgagcacccctcgtgatg

SEQ ID NO: 2393109 - DNA, 25 bp, Homo sapien
gcaattcctttgtctcatcttctag

SEQ ID NO: 2393110 - DNA, 25 bp, Homo sapien
gctgctgctgcagcttggacatcag

SEQ ID NO: 2393111 - DNA, 25 bp, Homo sapien
catagcaacacccgctgctgctgca

SEQ ID NO: 2393112 - DNA, 25 bp, Homo sapien
cccgctgctgctgcagcttggacat

SEQ ID NO: 2393113 - DNA, 25 bp, Homo sapien
tcatagcaacacccgctgctgctgc

SEQ ID NO: 2393114 - DNA, 25 bp, Homo sapien
tgcttgtcaggctcccgttggtccc

SEQ ID NO: 2393115 - DNA, 25 bp, Homo sapien
acctgcttgtcaggctcccgttggt

SEQ ID NO: 2393116 - DNA, 25 bp, Homo sapien
tgacctgcttgtcaggctcccgttg

SEQ ID NO: 2393117 - DNA, 25 bp, Homo sapien
agactttcttgctgacggcacctgg

SEQ ID NO: 2393118 - DNA, 25 bp, Homo sapien
cattgcactagggaaaagccgtagc

SEQ ID NO: 2393119 - DNA, 25 bp, Homo sapien
tgtagtgccacgtaggagccaaagg

SEQ ID NO: 2393120 - DNA, 25 bp, Homo sapien
cccgtgagggttaggatgtgctcca

SEQ ID NO: 2393121 - DNA, 25 bp, Homo sapien
ccacctgggtaggatggacagctcc

SEQ ID NO: 2393122 - DNA, 25 bp, Homo sapien
catggtcatggatgttcccaatttc

SEQ ID NO: 2393123 - DNA, 25 bp, Homo sapien
tgccttaaatctaaccatcccactc

SEQ ID NO: 2393124 - DNA, 25 bp, Homo sapien
tcagccggtcaacttgtattcttgc

SEQ ID NO: 2393125 - DNA, 25 bp, Homo sapien
tactcaagtaagtccctgccttaaa

SEQ ID NO: 2393126 - DNA, 25 bp, Homo sapien
aggatggcaggagagggagccacac

SEQ ID NO: 2393127 - DNA, 25 bp, Homo sapien
gtgaggatggcaggagagggagcca

SEQ ID NO: 2393128 - DNA, 25 bp, Homo sapien
ttgctggaggtgaggatggcaggag

SEQ ID NO: 2393129 - DNA, 25 bp, Homo sapien
tttgctggaggtgaggatggcagga

SEQ ID NO: 2393130 - DNA, 25 bp, Homo sapien
gagtgagaggctgcgctccaagctt

SEQ ID NO: 2393131 - DNA, 25 bp, Homo sapien
ccaaggagggaatgcacaggagcct

SEQ ID NO: 2393132 - DNA, 25 bp, Homo sapien
tcgaggatgtctcagcaagggtact

SEQ ID NO: 2393133 - DNA, 25 bp, Homo sapien
cctttacggccaacaggatgaggct

SEQ ID NO: 2393134 - DNA, 25 bp, Homo sapien
ggaggacgctggaagggccttgacc

SEQ ID NO: 2393135 - DNA, 25 bp, Homo sapien
tctctggaatccaagtctcggtctc

SEQ ID NO: 2393136 - DNA, 25 bp, Homo sapien
ccactcagggagtagccagtgatca

SEQ ID NO: 2393137 - DNA, 25 bp, Homo sapien
tcacctccccaagaggaggacgctg

SEQ ID NO: 2393138 - DNA, 25 bp, Homo sapien
tcaggggcagccgtcctcgtatcca

SEQ ID NO: 2393139 - DNA, 25 bp, Homo sapien
ttggccctgacatgggtggccacag

SEQ ID NO: 2393140 - DNA, 25 bp, Homo sapien
tgattcttggccctgacatgggtgg

SEQ ID NO: 2393141 - DNA, 25 bp, Homo sapien
ggcagccgtcctcgtatccagtgtg

SEQ ID NO: 2393142 - DNA, 25 bp, Homo sapien
catgacccgaagatactgtggtccc

SEQ ID NO: 2393143 - DNA, 25 bp, Homo sapien
agatttagcatctggcctctttggg

SEQ ID NO: 2393144 - DNA, 25 bp, Homo sapien
gctctgtccatgtctagaaacttct

SEQ ID NO: 2393145 - DNA, 25 bp, Homo sapien
tctttgggcaaatagctttcgtcac

SEQ ID NO: 2393146 - DNA, 25 bp, Homo sapien
attgccaaattcatcaatggcggga

SEQ ID NO: 2393147 - DNA, 25 bp, Homo sapien
acattggggacacaaaaattgccaa

SEQ ID NO: 2393148 - DNA, 25 bp, Homo sapien
tcaatggcgggagctgtttcatgtt

SEQ ID NO: 2393149 - DNA, 25 bp, Homo sapien
caaattcatcaatggcgggagctgt

SEQ ID NO: 2393150 - DNA, 25 bp, Homo sapien
gggtggtctgccggaagagaaagca

SEQ ID NO: 2393151 - DNA, 25 bp, Homo sapien
ctccggagccgccatccgtgccgtg

SEQ ID NO: 2393152 - DNA, 25 bp, Homo sapien
ccgtgctcagcaggacttagcagca

SEQ ID NO: 2393153 - DNA, 25 bp, Homo sapien
gccatccgtgccgtgctcagcagga

SEQ ID NO: 2393154 - DNA, 25 bp, Homo sapien
ttcctgactgatgttcctacccctg

SEQ ID NO: 2393155 - DNA, 25 bp, Homo sapien
cagcacgctccgtgacccatgtgtc

SEQ ID NO: 2393156 - DNA, 25 bp, Homo sapien
caagggcccttcagaggacccgttg

SEQ ID NO: 2393157 - DNA, 25 bp, Homo sapien
cactctctgtctcaatctcagcagc

SEQ ID NO: 2393158 - DNA, 25 bp, Homo sapien
caacggtgatgacgagattcttgaa

SEQ ID NO: 2393159 - DNA, 25 bp, Homo sapien
caatctccagccgactagaataaag

SEQ ID NO: 2393160 - DNA, 25 bp, Homo sapien
ttttaagcgattgcacacagagggc

SEQ ID NO: 2393161 - DNA, 25 bp, Homo sapien
aaggtgtaatgaggtggaagcctct

SEQ ID NO: 2393162 - DNA, 25 bp, Homo sapien
aaagccccggcactagagaagaaga

SEQ ID NO: 2393163 - DNA, 25 bp, Homo sapien
gatgccgctgaacaactgccaggtg

SEQ ID NO: 2393164 - DNA, 25 bp, Homo sapien
gatcgggacccgcaaacttctgttc

SEQ ID NO: 2393165 - DNA, 25 bp, Homo sapien
gacgtatctgttagcccttggaggg

SEQ ID NO: 2393166 - DNA, 25 bp, Homo sapien
cttcttccgcctgttccgggtcatg

SEQ ID NO: 2393167 - DNA, 25 bp, Homo sapien
tccgggtcatgcgtctggtgaagct

SEQ ID NO: 2393168 - DNA, 25 bp, Homo sapien
gcctgttccgggtcatgcgtctggt

SEQ ID NO: 2393169 - DNA, 25 bp, Homo sapien
ggcatccggacgctgctgtggacct

SEQ ID NO: 2393170 - DNA, 25 bp, Homo sapien
tcgtgatgctgttcttcatctacgc

SEQ ID NO: 2393171 - DNA, 25 bp, Homo sapien
tgccctatgtggccctcctgatcgt

SEQ ID NO: 2393172 - DNA, 25 bp, Homo sapien
tatgtggccctcctgatcgtgatgc

SEQ ID NO: 2393173 - DNA, 25 bp, Homo sapien
gatcgtgatgctgttcttcatctac

SEQ ID NO: 2393174 - DNA, 25 bp, Homo sapien
tgaatgataccacagagatcaaccg

SEQ ID NO: 2393175 - DNA, 25 bp, Homo sapien
gaatgataccacagagatcaaccgg

SEQ ID NO: 2393176 - DNA, 25 bp, Homo sapien
aatgataccacagagatcaaccgga

SEQ ID NO: 2393177 - DNA, 25 bp, Homo sapien
atgataccacagagatcaaccggaa

SEQ ID NO: 2393178 - DNA, 25 bp, Homo sapien
gacagtcatgttcaatgccaccctg

SEQ ID NO: 2393179 - DNA, 25 bp, Homo sapien
tctgaacagcgacgggacagtcatg

SEQ ID NO: 2393180 - DNA, 25 bp, Homo sapien
ggtacgtcacatggacagacaggga

SEQ ID NO: 2393181 - DNA, 25 bp, Homo sapien
tatcactctgccacggtgttctgcg

SEQ ID NO: 2393182 - DNA, 25 bp, Homo sapien
tgtcatcccaagtccagtaccaagc

SEQ ID NO: 2393183 - DNA, 25 bp, Homo sapien
gaagcagagctgtcatcccaagtcc

SEQ ID NO: 2393184 - DNA, 25 bp, Homo sapien
ccaagccaaagaagcttctctcttg

SEQ ID NO: 2393185 - DNA, 25 bp, Homo sapien
caagtccagtaccaagccaaagaag

SEQ ID NO: 2393186 - DNA, 25 bp, Homo sapien
gaacaaccgtgatgtgacacttacg

SEQ ID NO: 2393187 - DNA, 25 bp, Homo sapien
caacacatacggctgggttcacagg

SEQ ID NO: 2393188 - DNA, 25 bp, Homo sapien
gacacttacggtgagtgacccacac

SEQ ID NO: 2393189 - DNA, 25 bp, Homo sapien
gacccacacaccctaaagagcattg

SEQ ID NO: 2393190 - DNA, 25 bp, Homo sapien
ttcaagaagcgcaaagagcagggcc

SEQ ID NO: 2393191 - DNA, 25 bp, Homo sapien
ccgagctaagctgaaccgttttgca

SEQ ID NO: 2393192 - DNA, 25 bp, Homo sapien
gatgaggtcaccgttggcaagttct

SEQ ID NO: 2393193 - DNA, 25 bp, Homo sapien
gagagctccagacctttccaaagat

SEQ ID NO: 2393194 - DNA, 25 bp, Homo sapien
tgggcagtgggcctgtctcagcagt

SEQ ID NO: 2393195 - DNA, 25 bp, Homo sapien
caatgggcagtgggcctgtctcagc

SEQ ID NO: 2393196 - DNA, 25 bp, Homo sapien
gcagtgggcctgtctcagcagtttc

SEQ ID NO: 2393197 - DNA, 25 bp, Homo sapien
ggcagtgggcctgtctcagcagttt

SEQ ID NO: 2393198 - DNA, 25 bp, Homo sapien
agtttgctcaagatcccaagttcat

SEQ ID NO: 2393199 - DNA, 25 bp, Homo sapien
caggtcttgatttcagaaggactgg

SEQ ID NO: 2393200 - DNA, 25 bp, Homo sapien
gctgggctccaggagtaatgttcct

SEQ ID NO: 2393201 - DNA, 25 bp, Homo sapien
agatcccaagttcatcgaggtcacc

SEQ ID NO: 2393202 - DNA, 25 bp, Homo sapien
cctttgtgaactgcagggacgcggg

SEQ ID NO: 2393203 - DNA, 25 bp, Homo sapien
tttgtgaactgcagggacgcggggc

SEQ ID NO: 2393204 - DNA, 25 bp, Homo sapien
ctttgtgaactgcagggacgcgggg

SEQ ID NO: 2393205 - DNA, 25 bp, Homo sapien
tgtgccaagcgaatataatgaattg

SEQ ID NO: 2393206 - DNA, 25 bp, Homo sapien
ccgttatacttgaattcaggtcagt

SEQ ID NO: 2393207 - DNA, 25 bp, Homo sapien
tttaaaactgaattgcaattgtgcc

SEQ ID NO: 2393208 - DNA, 25 bp, Homo sapien
ggttttcggattcacttcttgtata

SEQ ID NO: 2393209 - DNA, 25 bp, Homo sapien
tcctgtagagtcacaagagaagcaa

SEQ ID NO: 2393210 - DNA, 25 bp, Homo sapien
tgagaataacccatggcaaaacacg

SEQ ID NO: 2393211 - DNA, 25 bp, Homo sapien
tctcttgaatcccagccaggttata

SEQ ID NO: 2393212 - DNA, 25 bp, Homo sapien
tgtgcagaaagatccccttcaggag

SEQ ID NO: 2393213 - DNA, 25 bp, Homo sapien
caggcaggcactgaaacaggagaag

SEQ ID NO: 2393214 - DNA, 25 bp, Homo sapien
gcagaaacacatgctgggtgccaac

SEQ ID NO: 2393215 - DNA, 25 bp, Homo sapien
tggctttgctcaccacaggcaggca

SEQ ID NO: 2393216 - DNA, 25 bp, Homo sapien
cggtgctgtagtggttattggcttt

SEQ ID NO: 2393217 - DNA, 25 bp, Homo sapien
gaaagcacaggaggtggaaaagcaa

SEQ ID NO: 2393218 - DNA, 25 bp, Homo sapien
ctgcaggagaaagcacaggaggtgg

SEQ ID NO: 2393219 - DNA, 25 bp, Homo sapien
acaggaggtggaaaagcaaaatcat

SEQ ID NO: 2393220 - DNA, 25 bp, Homo sapien
agcacaggaggtggaaaagcaaaat

SEQ ID NO: 2393221 - DNA, 25 bp, Homo sapien
tacagtacagggatcagtgcagcca

SEQ ID NO: 2393222 - DNA, 25 bp, Homo sapien
ccacagagtacagtacagggatcag

SEQ ID NO: 2393223 - DNA, 25 bp, Homo sapien
aaaccaaaccacagctgctacccaa

SEQ ID NO: 2393224 - DNA, 25 bp, Homo sapien
cactccatacatggcaattaaacca

SEQ ID NO: 2393225 - DNA, 25 bp, Homo sapien
accataaagtctttggagctaaaag

SEQ ID NO: 2393226 - DNA, 25 bp, Homo sapien
tatagtttgataccacagatcatag

SEQ ID NO: 2393227 - DNA, 25 bp, Homo sapien
catagtataagcgaccataaagtct

SEQ ID NO: 2393228 - DNA, 25 bp, Homo sapien
ccacagatcatagtataagcgacca

SEQ ID NO: 2393229 - DNA, 25 bp, Homo sapien
tcgatggctggcacgtccaggagtc

SEQ ID NO: 2393230 - DNA, 25 bp, Homo sapien
catgcccaagttggtacctttttgg

SEQ ID NO: 2393231 - DNA, 25 bp, Homo sapien
ctgtctcgatggctggcacgtccag

SEQ ID NO: 2393232 - DNA, 25 bp, Homo sapien
gtccccagggtgatggacaaatcct

SEQ ID NO: 2393233 - DNA, 25 bp, Homo sapien
tacaataggcctgacaatacacacc

SEQ ID NO: 2393234 - DNA, 25 bp, Homo sapien
gaggaaactacttgctgatggagcc

SEQ ID NO: 2393235 - DNA, 25 bp, Homo sapien
gcaagagtgctatgtacagaagtca

SEQ ID NO: 2393236 - DNA, 25 bp, Homo sapien
tcatggagggacgtgttcagctcac

SEQ ID NO: 2393237 - DNA, 25 bp, Homo sapien
tgaagagatattcacggatgggaag

SEQ ID NO: 2393238 - DNA, 25 bp, Homo sapien
catgtggtttattgaaggaatggac

SEQ ID NO: 2393239 - DNA, 25 bp, Homo sapien
tccacaaatgctatgggaataatgg

SEQ ID NO: 2393240 - DNA, 25 bp, Homo sapien
tgtgcaaaatttgaacctcaacctg

SEQ ID NO: 2393241 - DNA, 25 bp, Homo sapien
taatggtatcccttctttagctccc

SEQ ID NO: 2393242 - DNA, 25 bp, Homo sapien
atttctcataatggtatcccttctt

SEQ ID NO: 2393243 - DNA, 25 bp, Homo sapien
tcataatggtatcccttctttagct

SEQ ID NO: 2393244 - DNA, 25 bp, Homo sapien
cacccccagactggcccggtgtgtg

SEQ ID NO: 2393245 - DNA, 25 bp, Homo sapien
gctgaccaggtgtgatttcctccag

SEQ ID NO: 2393246 - DNA, 25 bp, Homo sapien
ctgagggaagcgcaaatgggccatt

SEQ ID NO: 2393247 - DNA, 25 bp, Homo sapien
tctctaactctacagcagatgcaag

SEQ ID NO: 2393248 - DNA, 25 bp, Homo sapien
tcaacctaccctgtgagctaacatg

SEQ ID NO: 2393249 - DNA, 25 bp, Homo sapien
tccgtggtgcttaagcggcgtctgc

SEQ ID NO: 2393250 - DNA, 25 bp, Homo sapien
ttgggctgtatgagcccggccgcca

SEQ ID NO: 2393251 - DNA, 25 bp, Homo sapien
tctacttgtatgtagcggccccaag

SEQ ID NO: 2393252 - DNA, 25 bp, Homo sapien
gctgcaggagagtcggtgacccctc

SEQ ID NO: 2393253 - DNA, 25 bp, Homo sapien
gcgggcacaagggtgggcttgcagc

SEQ ID NO: 2393254 - DNA, 25 bp, Homo sapien
tggcgggcacaagggtgggcttgca

SEQ ID NO: 2393255 - DNA, 25 bp, Homo sapien
gggcacaagggtgggcttgcagcag

SEQ ID NO: 2393256 - DNA, 25 bp, Homo sapien
cgggcacaagggtgggcttgcagca

SEQ ID NO: 2393257 - DNA, 25 bp, Homo sapien
tcgtcgatgcgctggcgctggatgt

SEQ ID NO: 2393258 - DNA, 25 bp, Homo sapien
agagcccttgaggtacagcacggcg

SEQ ID NO: 2393259 - DNA, 25 bp, Homo sapien
cccagagcccttgaggtacagcacg

SEQ ID NO: 2393260 - DNA, 25 bp, Homo sapien
cagagcccttgaggtacagcacggc

SEQ ID NO: 2393261 - DNA, 25 bp, Homo sapien
agcccttgaggtacagcacggcgcg

SEQ ID NO: 2393262 - DNA, 25 bp, Homo sapien
ggctctcgatgccacccaccgccgc

SEQ ID NO: 2393263 - DNA, 25 bp, Homo sapien
agcaggctctcgatgccacccaccg

SEQ ID NO: 2393264 - DNA, 25 bp, Homo sapien
ttttccagcaggctctcgatgccac

SEQ ID NO: 2393265 - DNA, 25 bp, Homo sapien
cgggttttccagcaggctctcgatg

SEQ ID NO: 2393266 - DNA, 25 bp, Homo sapien
ctgggagcgcgagggcgcgggaacc

SEQ ID NO: 2393267 - DNA, 25 bp, Homo sapien
gagcgcgagggcgcgggaacccagc

SEQ ID NO: 2393268 - DNA, 25 bp, Homo sapien
gcgcgagggcgcgggaacccagcag

SEQ ID NO: 2393269 - DNA, 25 bp, Homo sapien
gcgagggcgcgggaacccagcagcc

SEQ ID NO: 2393270 - DNA, 25 bp, Homo sapien
cgcggcccagagcaccccttcctgt

SEQ ID NO: 2393271 - DNA, 25 bp, Homo sapien
ccagagcaccccttcctgtctcttg

SEQ ID NO: 2393272 - DNA, 25 bp, Homo sapien
gtctcttggtgtccagaggaggctc

SEQ ID NO: 2393273 - DNA, 25 bp, Homo sapien
cttggtgtccagaggaggctctgcc

SEQ ID NO: 2393274 - DNA, 25 bp, Homo sapien
atgctttggtagtgaccagcattcc

SEQ ID NO: 2393275 - DNA, 25 bp, Homo sapien
gctgagcccacggttgggggaaaca

SEQ ID NO: 2393276 - DNA, 25 bp, Homo sapien
gctttggtagtgaccagcattccat

SEQ ID NO: 2393277 - DNA, 25 bp, Homo sapien
tgagcccacggttgggggaaacagc

SEQ ID NO: 2393278 - DNA, 25 bp, Homo sapien
gggtcaggtatttcaaatccttgct

SEQ ID NO: 2393279 - DNA, 25 bp, Homo sapien
tatttaatgcatttgagtgggcaag

SEQ ID NO: 2393280 - DNA, 25 bp, Homo sapien
taattcttgccagcaacatatgaca

SEQ ID NO: 2393281 - DNA, 25 bp, Homo sapien
tgcgcccggccgatggtactatttt

SEQ ID NO: 2393282 - DNA, 25 bp, Homo sapien
ctgagatgctcagagacagggcact

SEQ ID NO: 2393283 - DNA, 25 bp, Homo sapien
gcctgagatgctcagagacagggca

SEQ ID NO: 2393284 - DNA, 25 bp, Homo sapien
cctgcctgagatgctcagagacagg

SEQ ID NO: 2393285 - DNA, 25 bp, Homo sapien
tgagatgctcagagacagggcactg

SEQ ID NO: 2393286 - DNA, 25 bp, Homo sapien
cttttcccaatgttgatgccctctg

SEQ ID NO: 2393287 - DNA, 25 bp, Homo sapien
tcagctccgaaaggatgaactggga

SEQ ID NO: 2393288 - DNA, 25 bp, Homo sapien
ttcccaatgttgatgccctctgggg

SEQ ID NO: 2393289 - DNA, 25 bp, Homo sapien
ctcagctccgaaaggatgaactggg

SEQ ID NO: 2393290 - DNA, 25 bp, Homo sapien
tatcttgaacattgtaggtgccact

SEQ ID NO: 2393291 - DNA, 25 bp, Homo sapien
tgaacattgtaggtgccactcccgg

SEQ ID NO: 2393292 - DNA, 25 bp, Homo sapien
aacattgtaggtgccactcccggga

SEQ ID NO: 2393293 - DNA, 25 bp, Homo sapien
gtaggtgccactcccgggagagcca

SEQ ID NO: 2393294 - DNA, 25 bp, Homo sapien
cctgtccctctgtggatctggactc

SEQ ID NO: 2393295 - DNA, 25 bp, Homo sapien
tgtccctctgtggatctggactcct

SEQ ID NO: 2393296 - DNA, 25 bp, Homo sapien
gtccctctgtggatctggactcctc

SEQ ID NO: 2393297 - DNA, 25 bp, Homo sapien
tccctctgtggatctggactcctcc

SEQ ID NO: 2393298 - DNA, 25 bp, Homo sapien
gctcagagagcgacaggaacttcct

SEQ ID NO: 2393299 - DNA, 25 bp, Homo sapien
cagagcatgctccagtagcaggtga

SEQ ID NO: 2393300 - DNA, 25 bp, Homo sapien
agcatgctccagtagcaggtgagaa

SEQ ID NO: 2393301 - DNA, 25 bp, Homo sapien
gctttgttctactatccagctcaga

SEQ ID NO: 2393302 - DNA, 25 bp, Homo sapien
atcttgggaacctcccacatccaca

SEQ ID NO: 2393303 - DNA, 25 bp, Homo sapien
gagcatataacagctttagggtgtt

SEQ ID NO: 2393304 - DNA, 25 bp, Homo sapien
aggcaatgggatgcggagcatataa

SEQ ID NO: 2393305 - DNA, 25 bp, Homo sapien
cacatttgacttgatgacggggtgc

SEQ ID NO: 2393306 - DNA, 25 bp, Homo sapien
gctgctgaggtaagggtgcggcccc

SEQ ID NO: 2393307 - DNA, 25 bp, Homo sapien
tgaggtaagggtgcggccccaggga

SEQ ID NO: 2393308 - DNA, 25 bp, Homo sapien
ggcttggttggcatagaaggtttat

SEQ ID NO: 2393309 - DNA, 25 bp, Homo sapien
ctgaggaccacgaaggccgagatgt

SEQ ID NO: 2393310 - DNA, 25 bp, Homo sapien
cacacatctgctgggtatcttcttc

SEQ ID NO: 2393311 - DNA, 25 bp, Homo sapien
ggcacacatctgctgggtatcttct

SEQ ID NO: 2393312 - DNA, 25 bp, Homo sapien
tagaatcttggcacacatctgctgg

SEQ ID NO: 2393313 - DNA, 25 bp, Homo sapien
catttgtagaatcttggcacacatc

SEQ ID NO: 2393314 - DNA, 25 bp, Homo sapien
tgagcccaacaaggtggtggatgat

SEQ ID NO: 2393315 - DNA, 25 bp, Homo sapien
gcagagtcatgtagctgtgctgccc

SEQ ID NO: 2393316 - DNA, 25 bp, Homo sapien
tggatgatgatgttcccctggggca

SEQ ID NO: 2393317 - DNA, 25 bp, Homo sapien
ctgtgctgccccagcgtcttgatga

SEQ ID NO: 2393318 - DNA, 25 bp, Homo sapien
ttgggtcacagaccatcacatgcat

SEQ ID NO: 2393319 - DNA, 25 bp, Homo sapien
tttgggtcacagaccatcacatgca

SEQ ID NO: 2393320 - DNA, 25 bp, Homo sapien
ctttgggtcacagaccatcacatgc

SEQ ID NO: 2393321 - DNA, 25 bp, Homo sapien
cccatacttcatatgcccgcagata

SEQ ID NO: 2393322 - DNA, 25 bp, Homo sapien
ttcccatacttcatatgcccgcaga

SEQ ID NO: 2393323 - DNA, 25 bp, Homo sapien
tcccatacttcatatgcccgcagat

SEQ ID NO: 2393324 - DNA, 25 bp, Homo sapien
aaattggcaggagtgttggtggagg

SEQ ID NO: 2393325 - DNA, 25 bp, Homo sapien
tgaaattggcaggagtgttggtgga

SEQ ID NO: 2393326 - DNA, 25 bp, Homo sapien
gtggaggggaatccaagtgaaggaa

SEQ ID NO: 2393327 - DNA, 25 bp, Homo sapien
attggcaggagtgttggtggagggg

SEQ ID NO: 2393328 - DNA, 25 bp, Homo sapien
ttctgtatcagcagaaccactgaac

SEQ ID NO: 2393329 - DNA, 25 bp, Homo sapien
tgtatcagcagaaccactgaactca

SEQ ID NO: 2393330 - DNA, 25 bp, Homo sapien
tatcagcagaaccactgaactcatc

SEQ ID NO: 2393331 - DNA, 25 bp, Homo sapien
tctttctgtatcagcagaaccactg

SEQ ID NO: 2393332 - DNA, 25 bp, Homo sapien
ccctgaagacttgcggggttgtcac

SEQ ID NO: 2393333 - DNA, 25 bp, Homo sapien
ctcgggtttgacgatgttttccagc

SEQ ID NO: 2393334 - DNA, 25 bp, Homo sapien
tggcagactcctcgggtttgacgat

SEQ ID NO: 2393335 - DNA, 25 bp, Homo sapien
aaatcaccagctgatccctgccata

SEQ ID NO: 2393336 - DNA, 25 bp, Homo sapien
gtgctgtcctgtcataagcaccttt

SEQ ID NO: 2393337 - DNA, 25 bp, Homo sapien
tcagtgctgtcctgtcataagcacc

SEQ ID NO: 2393338 - DNA, 25 bp, Homo sapien
cagtgctgtcctgtcataagcacct

SEQ ID NO: 2393339 - DNA, 25 bp, Homo sapien
agtgctgtcctgtcataagcacctt

SEQ ID NO: 2393340 - DNA, 25 bp, Homo sapien
aagctatggttcagcatggagtaac

SEQ ID NO: 2393341 - DNA, 25 bp, Homo sapien
ctcagagctaagctatggttcagca

SEQ ID NO: 2393342 - DNA, 25 bp, Homo sapien
taacaatccgagtagtatttgccac

SEQ ID NO: 2393343 - DNA, 25 bp, Homo sapien
gcatggagtaacaatccgagtagta

SEQ ID NO: 2393344 - DNA, 25 bp, Homo sapien
cccaggaggatggaaaccagggatc

SEQ ID NO: 2393345 - DNA, 25 bp, Homo sapien
gagaccaaggccttcaggcccagga

SEQ ID NO: 2393346 - DNA, 25 bp, Homo sapien
tagggagaccaaggccttcaggccc

SEQ ID NO: 2393347 - DNA, 25 bp, Homo sapien
ctgtagggagaccaaggccttcagg

SEQ ID NO: 2393348 - DNA, 25 bp, Homo sapien
ctacatgtggaggaggaaactgagg

SEQ ID NO: 2393349 - DNA, 25 bp, Homo sapien
acatgtggaggaggaaactgaggca

SEQ ID NO: 2393350 - DNA, 25 bp, Homo sapien
catgtggaggaggaaactgaggcat

SEQ ID NO: 2393351 - DNA, 25 bp, Homo sapien
tacatgtggaggaggaaactgaggc

SEQ ID NO: 2393352 - DNA, 25 bp, Homo sapien
gaagccatgcagtgcatggcaccag

SEQ ID NO: 2393353 - DNA, 25 bp, Homo sapien
aagccatgcagtgcatggcaccagg

SEQ ID NO: 2393354 - DNA, 25 bp, Homo sapien
gctggaacagcacccctgtgatatt

SEQ ID NO: 2393355 - DNA, 25 bp, Homo sapien
ccctgtgatattccccagctgggac

SEQ ID NO: 2393356 - DNA, 25 bp, Homo sapien
ggactccaagttaacacctccacag

SEQ ID NO: 2393357 - DNA, 25 bp, Homo sapien
agctgggactccaagttaacacctc

SEQ ID NO: 2393358 - DNA, 25 bp, Homo sapien
tataacatcggcctaacagaggcag

SEQ ID NO: 2393359 - DNA, 25 bp, Homo sapien
cagggccctggtatacacacatctt

SEQ ID NO: 2393360 - DNA, 25 bp, Homo sapien
gaaacaggagtcaatctaagcatcc

SEQ ID NO: 2393361 - DNA, 25 bp, Homo sapien
gtcactcaacacaaccaggactgga

SEQ ID NO: 2393362 - DNA, 25 bp, Homo sapien
ctcatctacccaaaaggtggcccca

SEQ ID NO: 2393363 - DNA, 25 bp, Homo sapien
tcatctacccaaaaggtggccccaa

SEQ ID NO: 2393364 - DNA, 25 bp, Homo sapien
tattaactcggctttctacggctgg

SEQ ID NO: 2393365 - DNA, 25 bp, Homo sapien
tacggctgggaggttgtctctgaca

SEQ ID NO: 2393366 - DNA, 25 bp, Homo sapien
tacagaatggcacagcgtttgcaga

SEQ ID NO: 2393367 - DNA, 25 bp, Homo sapien
acagtcagtccgcagtatacgtggg

SEQ ID NO: 2393368 - DNA, 25 bp, Homo sapien
caaaaacatgggtttgcctgtggct

SEQ ID NO: 2393369 - DNA, 25 bp, Homo sapien
tagatggtccttaggcttataagaa

SEQ ID NO: 2393370 - DNA, 25 bp, Homo sapien
catctcgtagcttgcttagaataat

SEQ ID NO: 2393371 - DNA, 25 bp, Homo sapien
ttgaagtgatcatctcgtagcttgc

SEQ ID NO: 2393372 - DNA, 25 bp, Homo sapien
aacatccattttccgctgccatctg

SEQ ID NO: 2393373 - DNA, 25 bp, Homo sapien
gccagcatgaagtctgcctcacctg

SEQ ID NO: 2393374 - DNA, 25 bp, Homo sapien
ctcatgagaaacatccattttccgc

SEQ ID NO: 2393375 - DNA, 25 bp, Homo sapien
agcatgaagtctgcctcacctgaat

SEQ ID NO: 2393376 - DNA, 25 bp, Homo sapien
tgacatcagattcactgtgagatac

SEQ ID NO: 2393377 - DNA, 25 bp, Homo sapien
tacagattttcttttagtaccatct

SEQ ID NO: 2393378 - DNA, 25 bp, Homo sapien
tagtaccatctttttctttaccagc

SEQ ID NO: 2393379 - DNA, 25 bp, Homo sapien
ttttgagaattaagaaaagcttcaa

SEQ ID NO: 2393380 - DNA, 25 bp, Homo sapien
cagcaggagtcacctacagataagg

SEQ ID NO: 2393381 - DNA, 25 bp, Homo sapien
taagaggctcagtgtgacgaaaaca

SEQ ID NO: 2393382 - DNA, 25 bp, Homo sapien
cattggcagcctaggaaggtcaaga

SEQ ID NO: 2393383 - DNA, 25 bp, Homo sapien
aagtgtgctgacttcctcccgcaaa

SEQ ID NO: 2393384 - DNA, 25 bp, Homo sapien
aaacgaccgttatttaccagctgcg

SEQ ID NO: 2393385 - DNA, 25 bp, Homo sapien
tagtttctgcctgtggtcccctagt

SEQ ID NO: 2393386 - DNA, 25 bp, Homo sapien
gaggcgaggactgagctagatacca

SEQ ID NO: 2393387 - DNA, 25 bp, Homo sapien
tatcagatcacactaaaacgaccgt

SEQ ID NO: 2393388 - DNA, 25 bp, Homo sapien
taaagagacgtcttcattatggctc

SEQ ID NO: 2393389 - DNA, 25 bp, Homo sapien
attgctgaagcgaagggctttttct

SEQ ID NO: 2393390 - DNA, 25 bp, Homo sapien
tgctgaagcgaagggctttttcttc

SEQ ID NO: 2393391 - DNA, 25 bp, Homo sapien
ctcatttgggctgtaaattgctgaa

SEQ ID NO: 2393392 - DNA, 25 bp, Homo sapien
catacagcggaaacttgaactcaga

SEQ ID NO: 2393393 - DNA, 25 bp, Homo sapien
tttttcaaaccaagtcttgctgcac

SEQ ID NO: 2393394 - DNA, 25 bp, Homo sapien
tcagatctctcagccttttgtctcc

SEQ ID NO: 2393395 - DNA, 25 bp, Homo sapien
tgaactcagatctctcagccttttg

SEQ ID NO: 2393396 - DNA, 25 bp, Homo sapien
caaagtttgactccagtctggatcg

SEQ ID NO: 2393397 - DNA, 25 bp, Homo sapien
tctggatcgcaaggacaaattctcc

SEQ ID NO: 2393398 - DNA, 25 bp, Homo sapien
gagtctttgtccactacactggctg

SEQ ID NO: 2393399 - DNA, 25 bp, Homo sapien
actggctggctattagatggcacaa

SEQ ID NO: 2393400 - DNA, 25 bp, Homo sapien
gtgctagggacatgggaaaaaccac

SEQ ID NO: 2393401 - DNA, 25 bp, Homo sapien
gactcctgggcagccgttttcctca

SEQ ID NO: 2393402 - DNA, 25 bp, Homo sapien
ggatgaggtctgataagaacccagg

SEQ ID NO: 2393403 - DNA, 25 bp, Homo sapien
ccccgacggtgtggctgatgatgtc

SEQ ID NO: 2393404 - DNA, 25 bp, Homo sapien
ggttgtgtcccaaaatcccctcagc

SEQ ID NO: 2393405 - DNA, 25 bp, Homo sapien
taatgggtagtagcacaatcaaggg

SEQ ID NO: 2393406 - DNA, 25 bp, Homo sapien
gaaacaataaaacctgggtgtcaga

SEQ ID NO: 2393407 - DNA, 25 bp, Homo sapien
tctctgcacgttgctgaaggtccag

SEQ ID NO: 2393408 - DNA, 25 bp, Homo sapien
gaggtctctgaactaatccagactc

SEQ ID NO: 2393409 - DNA, 25 bp, Homo sapien
tgaggtctctgaactaatccagact

SEQ ID NO: 2393410 - DNA, 25 bp, Homo sapien
ggtctctgaactaatccagactctc

SEQ ID NO: 2393411 - DNA, 25 bp, Homo sapien
ggtgaggtctctgaactaatccaga

SEQ ID NO: 2393412 - DNA, 25 bp, Homo sapien
caagacagagcagatccggaatcca

SEQ ID NO: 2393413 - DNA, 25 bp, Homo sapien
gaagactctcctacgaactatgata

SEQ ID NO: 2393414 - DNA, 25 bp, Homo sapien
gcagaactggattcaacatggaaag

SEQ ID NO: 2393415 - DNA, 25 bp, Homo sapien
taaatattgccctgattgacgaggc

SEQ ID NO: 2393416 - DNA, 25 bp, Homo sapien
tgctgattgcaactcactacattgt

SEQ ID NO: 2393417 - DNA, 25 bp, Homo sapien
accatgcaattatcagttattacga

SEQ ID NO: 2393418 - DNA, 25 bp, Homo sapien
attgttttcactcctaatgggtagt

SEQ ID NO: 2393419 - DNA, 25 bp, Homo sapien
acctgggagtcacttggtatattac

SEQ ID NO: 2393420 - DNA, 25 bp, Homo sapien
cagttagctacgtgcagcgcgtggc

SEQ ID NO: 2393421 - DNA, 25 bp, Homo sapien
gacgtaacttgctgccttaggtggc

SEQ ID NO: 2393422 - DNA, 25 bp, Homo sapien
tctgcctcggagacgttgataacga

SEQ ID NO: 2393423 - DNA, 25 bp, Homo sapien
aacgatacggtaggtgcatgcgcac

SEQ ID NO: 2393424 - DNA, 25 bp, Homo sapien
caaggactctgctacattctaggaa

SEQ ID NO: 2393425 - DNA, 25 bp, Homo sapien
gaactgctcattatgcaccaaggac

SEQ ID NO: 2393426 - DNA, 25 bp, Homo sapien
caggtcaagcaggtaaaacaatgcc

SEQ ID NO: 2393427 - DNA, 25 bp, Homo sapien
gcacacagtttagtgctcacttaag

SEQ ID NO: 2393428 - DNA, 25 bp, Homo sapien
acttagaacaatgtaggcactggcc

SEQ ID NO: 2393429 - DNA, 25 bp, Homo sapien
actgctatattctcaacacttagaa

SEQ ID NO: 2393430 - DNA, 25 bp, Homo sapien
tagaacaatgtaggcactggccggg

SEQ ID NO: 2393431 - DNA, 25 bp, Homo sapien
acacttagaacaatgtaggcactgg

SEQ ID NO: 2393432 - DNA, 25 bp, Homo sapien
taggtgtgctgcctctcgcctgtga

SEQ ID NO: 2393433 - DNA, 25 bp, Homo sapien
tataggctaggtgtgctgcctctcg

SEQ ID NO: 2393434 - DNA, 25 bp, Homo sapien
caggcatcactcaaggcactggaat

SEQ ID NO: 2393435 - DNA, 25 bp, Homo sapien
gtgctgagctcccatgataagccag

SEQ ID NO: 2393436 - DNA, 25 bp, Homo sapien
ctgtggtcgaggagtttgaaagcca

SEQ ID NO: 2393437 - DNA, 25 bp, Homo sapien
tcctttggtggattatggccagcat

SEQ ID NO: 2393438 - DNA, 25 bp, Homo sapien
tcctgctgtggtaagctgtggtcga

SEQ ID NO: 2393439 - DNA, 25 bp, Homo sapien
gagtacattgctctcagtgtaggta

SEQ ID NO: 2393440 - DNA, 25 bp, Homo sapien
aagacccaggaaagtggaccttgtg

SEQ ID NO: 2393441 - DNA, 25 bp, Homo sapien
tcaagactgtttcagcccaacggtc

SEQ ID NO: 2393442 - DNA, 25 bp, Homo sapien
tcaaaccagccagaaagactctcag

SEQ ID NO: 2393443 - DNA, 25 bp, Homo sapien
ctatggcacaagtgataagtgagcc

SEQ ID NO: 2393444 - DNA, 25 bp, Homo sapien
gattccaggacaatacaagcttaag

SEQ ID NO: 2393445 - DNA, 25 bp, Homo sapien
cagtgaattcaaaaaagcctctgtc

SEQ ID NO: 2393446 - DNA, 25 bp, Homo sapien
caagcttaagctcaagaggccagag

SEQ ID NO: 2393447 - DNA, 25 bp, Homo sapien
gggttagaaagccactgattccagg

SEQ ID NO: 2393448 - DNA, 25 bp, Homo sapien
tcgtgggccctctagtgaaaactcg

SEQ ID NO: 2393449 - DNA, 25 bp, Homo sapien
tcagccttatgagatggacattcct

SEQ ID NO: 2393450 - DNA, 25 bp, Homo sapien
gggtaatcaaactaactggcttcag

SEQ ID NO: 2393451 - DNA, 25 bp, Homo sapien
gctcggtgggtacaaaaagccagtg

SEQ ID NO: 2393452 - DNA, 25 bp, Homo sapien
tggaagggcagacaccatagtcccc

SEQ ID NO: 2393453 - DNA, 25 bp, Homo sapien
tcttctaaggcaaggtctttccctc

SEQ ID NO: 2393454 - DNA, 25 bp, Homo sapien
tacctggcttcaagagcccccgttc

SEQ ID NO: 2393455 - DNA, 25 bp, Homo sapien
ttccccacacgcctcttcttctaag

SEQ ID NO: 2393456 - DNA, 25 bp, Homo sapien
tcagccgcagcactccgtgctccag

SEQ ID NO: 2393457 - DNA, 25 bp, Homo sapien
aggcaggaagggtagctctgagaac

SEQ ID NO: 2393458 - DNA, 25 bp, Homo sapien
caggaagggtagctctgagaacggg

SEQ ID NO: 2393459 - DNA, 25 bp, Homo sapien
gggctttcagccgcagcactccgtg

SEQ ID NO: 2393460 - DNA, 25 bp, Homo sapien
ttgagagaaagcagagtctgcaggc

SEQ ID NO: 2393461 - DNA, 25 bp, Homo sapien
aggcccaggcagaattcaggactct

SEQ ID NO: 2393462 - DNA, 25 bp, Homo sapien
agtctgcaggcccaggcagaattca

SEQ ID NO: 2393463 - DNA, 25 bp, Homo sapien
tctgcaggcccaggcagaattcagg

SEQ ID NO: 2393464 - DNA, 25 bp, Homo sapien
acctgtgccgagcacaccacagtct

SEQ ID NO: 2393465 - DNA, 25 bp, Homo sapien
ctgtgccgagcacaccacagtctcc

SEQ ID NO: 2393466 - DNA, 25 bp, Homo sapien
accacctgtgccgagcacaccacag

SEQ ID NO: 2393467 - DNA, 25 bp, Homo sapien
cacctgtgccgagcacaccacagtc

SEQ ID NO: 2393468 - DNA, 25 bp, Homo sapien
gccaggtccccagctgaggctttta

SEQ ID NO: 2393469 - DNA, 25 bp, Homo sapien
caggtccccagctgaggcttttagg

SEQ ID NO: 2393470 - DNA, 25 bp, Homo sapien
ggtccccagctgaggcttttaggac

SEQ ID NO: 2393471 - DNA, 25 bp, Homo sapien
gggccaggtccccagctgaggcttt

SEQ ID NO: 2393472 - DNA, 25 bp, Homo sapien
caacggccactctaagcagctggtc

SEQ ID NO: 2393473 - DNA, 25 bp, Homo sapien
tgcctgtgtcaacggccactctaag

SEQ ID NO: 2393474 - DNA, 25 bp, Homo sapien
cagcagagatccgattgtattgggt

SEQ ID NO: 2393475 - DNA, 25 bp, Homo sapien
tccgattgtattgggtgcctgtgtc

SEQ ID NO: 2393476 - DNA, 25 bp, Homo sapien
ccatgaatcaggtcctgcatccggg

SEQ ID NO: 2393477 - DNA, 25 bp, Homo sapien
ccaccaggcgtctttggatcacact

SEQ ID NO: 2393478 - DNA, 25 bp, Homo sapien
ctccaccaggcgtctttggatcaca

SEQ ID NO: 2393479 - DNA, 25 bp, Homo sapien
ctggccatgaatcaggtcctgcatc

SEQ ID NO: 2393480 - DNA, 25 bp, Homo sapien
gtgccgagcctcttgaggctgtcca

SEQ ID NO: 2393481 - DNA, 25 bp, Homo sapien
gtggcctgtttgagccggcgctgct

SEQ ID NO: 2393482 - DNA, 25 bp, Homo sapien
caggtcggccgagtccttgtgcagg

SEQ ID NO: 2393483 - DNA, 25 bp, Homo sapien
ctcaggtgggctcggtctcgaagct

SEQ ID NO: 2393484 - DNA, 25 bp, Homo sapien
gggcgtcaccgagtcctctctgctt

SEQ ID NO: 2393485 - DNA, 25 bp, Homo sapien
ctctttccaacaggagggtctccac

SEQ ID NO: 2393486 - DNA, 25 bp, Homo sapien
gtgggggcgtcaccgagtcctctct

SEQ ID NO: 2393487 - DNA, 25 bp, Homo sapien
cagctctctttccaacaggagggtc

SEQ ID NO: 2393488 - DNA, 25 bp, Homo sapien
gtgagactccggctggaaaaaccca

SEQ ID NO: 2393489 - DNA, 25 bp, Homo sapien
gagcagccgcgtcagtctccaattt

SEQ ID NO: 2393490 - DNA, 25 bp, Homo sapien
aacccagtcctagaagagagggagg

SEQ ID NO: 2393491 - DNA, 25 bp, Homo sapien
caatttcccgagattgctgtagagg

SEQ ID NO: 2393492 - DNA, 25 bp, Homo sapien
agcaattctgaaccgttaggagtag

SEQ ID NO: 2393493 - DNA, 25 bp, Homo sapien
accgttaggagtagaagaagtgagc

SEQ ID NO: 2393494 - DNA, 25 bp, Homo sapien
tgagcgtattctcgtccaaaacact

SEQ ID NO: 2393495 - DNA, 25 bp, Homo sapien
aaaatgtctgttattctctgaagtg

SEQ ID NO: 2393496 - DNA, 25 bp, Homo sapien
ggctttgcaggttctagacatttca

SEQ ID NO: 2393497 - DNA, 25 bp, Homo sapien
caaccactacccctatctagttcaa

SEQ ID NO: 2393498 - DNA, 25 bp, Homo sapien
agtgtacgtacacttcagtggcttt

SEQ ID NO: 2393499 - DNA, 25 bp, Homo sapien
agcattgattgagaacactggagcc

SEQ ID NO: 2393500 - DNA, 25 bp, Homo sapien
ccagctcctggcgaaattattggga

SEQ ID NO: 2393501 - DNA, 25 bp, Homo sapien
cagagtccttttgctaccccagggc

SEQ ID NO: 2393502 - DNA, 25 bp, Homo sapien
gggtatcacgatcgtcccctctgga

SEQ ID NO: 2393503 - DNA, 25 bp, Homo sapien
tcttgaagctcgctggcggctggat

SEQ ID NO: 2393504 - DNA, 25 bp, Homo sapien
gctcttgcctcactcctcaacttga

SEQ ID NO: 2393505 - DNA, 25 bp, Homo sapien
gataacagtggatgaaggtcaggaa

SEQ ID NO: 2393506 - DNA, 25 bp, Homo sapien
cttttcatgtccacaaacgtgggat

SEQ ID NO: 2393507 - DNA, 25 bp, Homo sapien
cccatccaggagggaggggggatgg

SEQ ID NO: 2393508 - DNA, 25 bp, Homo sapien
ctgttttgccccatccaggagggag

SEQ ID NO: 2393509 - DNA, 25 bp, Homo sapien
tgttttgccccatccaggagggagg

SEQ ID NO: 2393510 - DNA, 25 bp, Homo sapien
tgccccatccaggagggagggggga

SEQ ID NO: 2393511 - DNA, 25 bp, Homo sapien
cattgctatcgtagggcctgtcagg

SEQ ID NO: 2393512 - DNA, 25 bp, Homo sapien
gcattggagtcggtcagccagcgcc

SEQ ID NO: 2393513 - DNA, 25 bp, Homo sapien
agacggcacacatcgagccacgtgt

SEQ ID NO: 2393514 - DNA, 25 bp, Homo sapien
gccacgtgtgaaagccccaggtgtg

SEQ ID NO: 2393515 - DNA, 25 bp, Homo sapien
tcatatctgtgcagggcggcagctt

SEQ ID NO: 2393516 - DNA, 25 bp, Homo sapien
gaggaagaactcacgctgagcccac

SEQ ID NO: 2393517 - DNA, 25 bp, Homo sapien
ttccaagggtggatgagccgctgac

SEQ ID NO: 2393518 - DNA, 25 bp, Homo sapien
gccgctgacgcaccttggacttcat

SEQ ID NO: 2393519 - DNA, 25 bp, Homo sapien
cctcctccgttctggcatccccaca

SEQ ID NO: 2393520 - DNA, 25 bp, Homo sapien
gaactggtgctccttagagggcaca

SEQ ID NO: 2393521 - DNA, 25 bp, Homo sapien
tccttagagggcacatcaggcctca

SEQ ID NO: 2393522 - DNA, 25 bp, Homo sapien
gagggcacatcaggcctcaggaaat

SEQ ID NO: 2393523 - DNA, 25 bp, Homo sapien
aatgtatgggccaggcagtctgctg

SEQ ID NO: 2393524 - DNA, 25 bp, Homo sapien
tagtgtcataggatgaaaaggggaa

SEQ ID NO: 2393525 - DNA, 25 bp, Homo sapien
ctgggttcctagtgtcataggatga

SEQ ID NO: 2393526 - DNA, 25 bp, Homo sapien
gagctctgggttcctagtgtcatag

SEQ ID NO: 2393527 - DNA, 25 bp, Homo sapien
ggtacaaaaaggtaggcggcagaga

SEQ ID NO: 2393528 - DNA, 25 bp, Homo sapien
gtacaaaaaggtaggcggcagagat

SEQ ID NO: 2393529 - DNA, 25 bp, Homo sapien
tgactgggccctctgagtgatcttt

SEQ ID NO: 2393530 - DNA, 25 bp, Homo sapien
tgagtgatctttgccggttactggc

SEQ ID NO: 2393531 - DNA, 25 bp, Homo sapien
gtgatctttgccggttactggccat

SEQ ID NO: 2393532 - DNA, 25 bp, Homo sapien
tctgagtgatctttgccggttactg

SEQ ID NO: 2393533 - DNA, 25 bp, Homo sapien
tccctggagcctcttgtgacccttg

SEQ ID NO: 2393534 - DNA, 25 bp, Homo sapien
ggagcctcttgtgacccttgggccc

SEQ ID NO: 2393535 - DNA, 25 bp, Homo sapien
ttctggcaccattgtttactcctgg

SEQ ID NO: 2393536 - DNA, 25 bp, Homo sapien
tctggcaccattgtttactcctggg

SEQ ID NO: 2393537 - DNA, 25 bp, Homo sapien
cagtgggaatgaagcacctgtaact

SEQ ID NO: 2393538 - DNA, 25 bp, Homo sapien
gtgcctgtgcaagtgctccaactgc

SEQ ID NO: 2393539 - DNA, 25 bp, Homo sapien
caaaaggcctaagttaaccagcagg

SEQ ID NO: 2393540 - DNA, 25 bp, Homo sapien
caggactagcactgggaaaactggc

SEQ ID NO: 2393541 - DNA, 25 bp, Homo sapien
ggcctagggtggctctttgcaaagc

SEQ ID NO: 2393542 - DNA, 25 bp, Homo sapien
tcagcctggaagaaaccgtgcactg

SEQ ID NO: 2393543 - DNA, 25 bp, Homo sapien
gttctcgtcaatgccagtctccctg

SEQ ID NO: 2393544 - DNA, 25 bp, Homo sapien
catctaatagcgcacatctgggcac

SEQ ID NO: 2393545 - DNA, 25 bp, Homo sapien
ttataattagaggataatttggaga

SEQ ID NO: 2393546 - DNA, 25 bp, Homo sapien
tggagaatttatactatttacacgg

SEQ ID NO: 2393547 - DNA, 25 bp, Homo sapien
ggataatttggagaatttatactat

SEQ ID NO: 2393548 - DNA, 25 bp, Homo sapien
gaatttatactatttacacggacca

SEQ ID NO: 2393549 - DNA, 25 bp, Homo sapien
cagtggctagggtgtgactgctact

SEQ ID NO: 2393550 - DNA, 25 bp, Homo sapien
cactgagccttggagtgcccgggat

SEQ ID NO: 2393551 - DNA, 25 bp, Homo sapien
tgcccgggatggtggacagcttgag

SEQ ID NO: 2393552 - DNA, 25 bp, Homo sapien
gacagcagaggaatcagatactctt

SEQ ID NO: 2393553 - DNA, 25 bp, Homo sapien
actgtagctcaggaataaactggga

SEQ ID NO: 2393554 - DNA, 25 bp, Homo sapien
tactgtagctcaggaataaactggg

SEQ ID NO: 2393555 - DNA, 25 bp, Homo sapien
gatgggcagcgtttccttaatgggt

SEQ ID NO: 2393556 - DNA, 25 bp, Homo sapien
agctccggctcatccacacagggag

SEQ ID NO: 2393557 - DNA, 25 bp, Homo sapien
gatgctgttttctccgagaccggct

SEQ ID NO: 2393558 - DNA, 25 bp, Homo sapien
actgaggagcctttgcggtgattca

SEQ ID NO: 2393559 - DNA, 25 bp, Homo sapien
cactgtaggacttcttgggtcttgg

SEQ ID NO: 2393560 - DNA, 25 bp, Homo sapien
tctccactttgatgggtctcgctaa

SEQ ID NO: 2393561 - DNA, 25 bp, Homo sapien
gtctcgctaagtgtggcatttcctc

SEQ ID NO: 2393562 - DNA, 25 bp, Homo sapien
gggacgaatcctcccaggagtgaga

SEQ ID NO: 2393563 - DNA, 25 bp, Homo sapien
cctctttccctggtcctgcagaaga

SEQ ID NO: 2393564 - DNA, 25 bp, Homo sapien
tctttccctggtcctgcagaagaaa

SEQ ID NO: 2393565 - DNA, 25 bp, Homo sapien
aagaggagctatcccctcctcagct

SEQ ID NO: 2393566 - DNA, 25 bp, Homo sapien
gaaagaggagctatcccctcctcag

SEQ ID NO: 2393567 - DNA, 25 bp, Homo sapien
gtgaaccaacggtcaccagacagga

SEQ ID NO: 2393568 - DNA, 25 bp, Homo sapien
cagacaggacgcacaaaaatatcac

SEQ ID NO: 2393569 - DNA, 25 bp, Homo sapien
aaatatcacatacgggttctgatcc

SEQ ID NO: 2393570 - DNA, 25 bp, Homo sapien
ggaaacagagataaggtgaaccaac

SEQ ID NO: 2393571 - DNA, 25 bp, Homo sapien
taccaaaatctcgcagatcgccact

SEQ ID NO: 2393572 - DNA, 25 bp, Homo sapien
tgtaccaaaatctcgcagatcgcca

SEQ ID NO: 2393573 - DNA, 25 bp, Homo sapien
gtgtaccaaaatctcgcagatcgcc

SEQ ID NO: 2393574 - DNA, 25 bp, Homo sapien
agataaaattaaacaagctggtgat

SEQ ID NO: 2393575 - DNA, 25 bp, Homo sapien
catgtaaccaaacaccacctgttcc

SEQ ID NO: 2393576 - DNA, 25 bp, Homo sapien
tcatgtaaccaaacaccacctgttc

SEQ ID NO: 2393577 - DNA, 25 bp, Homo sapien
tctgatggctgatccaagttggctc

SEQ ID NO: 2393578 - DNA, 25 bp, Homo sapien
ggttacatgtcagcccgtactcaca

SEQ ID NO: 2393579 - DNA, 25 bp, Homo sapien
gaggcatttggattgccgcgcctgt

SEQ ID NO: 2393580 - DNA, 25 bp, Homo sapien
ctagaccagtgatactcaagcaggg

SEQ ID NO: 2393581 - DNA, 25 bp, Homo sapien
caagctcatcaggtatttatgggcc

SEQ ID NO: 2393582 - DNA, 25 bp, Homo sapien
taagctctcaaggaacacttatcag

SEQ ID NO: 2393583 - DNA, 25 bp, Homo sapien
gctgaaggtccaacattcttaattg

SEQ ID NO: 2393584 - DNA, 25 bp, Homo sapien
acttatcagagtgctttgcaagctg

SEQ ID NO: 2393585 - DNA, 25 bp, Homo sapien
ctctgagctcatgagggaagccgcc

SEQ ID NO: 2393586 - DNA, 25 bp, Homo sapien
taggtaccaggtatgagctgacccg

SEQ ID NO: 2393587 - DNA, 25 bp, Homo sapien
gctgacccgtggtagcagtggcttc

SEQ ID NO: 2393588 - DNA, 25 bp, Homo sapien
cggactcgcttgctatggcgggcaa

SEQ ID NO: 2393589 - DNA, 25 bp, Homo sapien
ggttccctaaagatatggccccaga

SEQ ID NO: 2393590 - DNA, 25 bp, Homo sapien
gaggaaacacgagagatcaggagca

SEQ ID NO: 2393591 - DNA, 25 bp, Homo sapien
gaggtgggaacagaatcccagagtc

SEQ ID NO: 2393592 - DNA, 25 bp, Homo sapien
ggctcagatccctttgaggtgggaa

SEQ ID NO: 2393593 - DNA, 25 bp, Homo sapien
gctctggattcggtcgtttctgctg

SEQ ID NO: 2393594 - DNA, 25 bp, Homo sapien
ggagttcggttttgatggtcatgtt

SEQ ID NO: 2393595 - DNA, 25 bp, Homo sapien
tgatggtcatgttccggcggagctc

SEQ ID NO: 2393596 - DNA, 25 bp, Homo sapien
cggagctctggattcggtcgtttct

SEQ ID NO: 2393597 - DNA, 25 bp, Homo sapien
tgtggcagatggggagagaaagaaa

SEQ ID NO: 2393598 - DNA, 25 bp, Homo sapien
cttgtggcagatggggagagaaaga

SEQ ID NO: 2393599 - DNA, 25 bp, Homo sapien
ttgtggcagatggggagagaaagaa

SEQ ID NO: 2393600 - DNA, 25 bp, Homo sapien
gtggcagatggggagagaaagaaac

SEQ ID NO: 2393601 - DNA, 25 bp, Homo sapien
ctatgttaacacaataaggtaaaga

SEQ ID NO: 2393602 - DNA, 25 bp, Homo sapien
tatgttaacacaataaggtaaagag

SEQ ID NO: 2393603 - DNA, 25 bp, Homo sapien
atgttaacacaataaggtaaagagg

SEQ ID NO: 2393604 - DNA, 25 bp, Homo sapien
gggatggacgtaggcgagcagtctc

SEQ ID NO: 2393605 - DNA, 25 bp, Homo sapien
ctgaggggatggacgtaggcgagca

SEQ ID NO: 2393606 - DNA, 25 bp, Homo sapien
ggacgtaggcgagcagtctccaaaa

SEQ ID NO: 2393607 - DNA, 25 bp, Homo sapien
gatggacgtaggcgagcagtctcca

SEQ ID NO: 2393608 - DNA, 25 bp, Homo sapien
tgtgatgagtgggcaggtgggtggc

SEQ ID NO: 2393609 - DNA, 25 bp, Homo sapien
ctgtgatgagtgggcaggtgggtgg

SEQ ID NO: 2393610 - DNA, 25 bp, Homo sapien
tgctcgggcaattgtggagaccctg

SEQ ID NO: 2393611 - DNA, 25 bp, Homo sapien
tgattccaagtgctcgggcaattgt

SEQ ID NO: 2393612 - DNA, 25 bp, Homo sapien
attccaagtgctcgggcaattgtgg

SEQ ID NO: 2393613 - DNA, 25 bp, Homo sapien
caagtgctcgggcaattgtggagac

SEQ ID NO: 2393614 - DNA, 25 bp, Homo sapien
caccaacgtggtcaatttgaccgga

SEQ ID NO: 2393615 - DNA, 25 bp, Homo sapien
tgaagttaccaccaacgtggtcaat

SEQ ID NO: 2393616 - DNA, 25 bp, Homo sapien
tggtcaatttgaccggattgggaaa

SEQ ID NO: 2393617 - DNA, 25 bp, Homo sapien
gattgggaaaaacacttattcctga

SEQ ID NO: 2393618 - DNA, 25 bp, Homo sapien
gctctggtctggcacaaaaatgtgt

SEQ ID NO: 2393619 - DNA, 25 bp, Homo sapien
tgtaagaatcacctgagatgcttgc

SEQ ID NO: 2393620 - DNA, 25 bp, Homo sapien
tgttgggtcagaacagccttctcct

SEQ ID NO: 2393621 - DNA, 25 bp, Homo sapien
caagtcactaattgggtggctggct

SEQ ID NO: 2393622 - DNA, 25 bp, Homo sapien
tatttagaggaaagcagggcattca

SEQ ID NO: 2393623 - DNA, 25 bp, Homo sapien
ctatttagaggaaagcagggcattc

SEQ ID NO: 2393624 - DNA, 25 bp, Homo sapien
atttagaggaaagcagggcattcac

SEQ ID NO: 2393625 - DNA, 25 bp, Homo sapien
caatgtcaagtagcggttggcactg

SEQ ID NO: 2393626 - DNA, 25 bp, Homo sapien
caaacatgtcgtgcagggaaaggtt

SEQ ID NO: 2393627 - DNA, 25 bp, Homo sapien
attggcagacgtctcccggacaaac

SEQ ID NO: 2393628 - DNA, 25 bp, Homo sapien
gaaggagaccttgccattggcagac

SEQ ID NO: 2393629 - DNA, 25 bp, Homo sapien
gttgcagtacagcactggagagact

SEQ ID NO: 2393630 - DNA, 25 bp, Homo sapien
ctgctgtcccagatacaagttgcag

SEQ ID NO: 2393631 - DNA, 25 bp, Homo sapien
cctggattcaataagattgagtcac

SEQ ID NO: 2393632 - DNA, 25 bp, Homo sapien
tgtttatcattctagtgtcctttgc

SEQ ID NO: 2393633 - DNA, 25 bp, Homo sapien
ttttggttgctgtgggacacattac

SEQ ID NO: 2393634 - DNA, 25 bp, Homo sapien
tgattttggttgctgtgggacacat

SEQ ID NO: 2393635 - DNA, 25 bp, Homo sapien
cttgattttggttgctgtgggacac

SEQ ID NO: 2393636 - DNA, 25 bp, Homo sapien
gattttggttgctgtgggacacatt

SEQ ID NO: 2393637 - DNA, 25 bp, Homo sapien
gggaaagtggtcctcaatccacgta

SEQ ID NO: 2393638 - DNA, 25 bp, Homo sapien
ctgatggtctcgaaggctcctcaac

SEQ ID NO: 2393639 - DNA, 25 bp, Homo sapien
gagttctgccaggacgctgatggtc

SEQ ID NO: 2393640 - DNA, 25 bp, Homo sapien
gggtggccgctcagacacagagttc

SEQ ID NO: 2393641 - DNA, 25 bp, Homo sapien
tattgttgatagtgcagcctgctgc

SEQ ID NO: 2393642 - DNA, 25 bp, Homo sapien
cttgcttgatgctgcgggagcccag

SEQ ID NO: 2393643 - DNA, 25 bp, Homo sapien
gggagcccagtccatcagaactcat

SEQ ID NO: 2393644 - DNA, 25 bp, Homo sapien
tcgctgctccaggtgacaattctcc

SEQ ID NO: 2393645 - DNA, 25 bp, Homo sapien
ctgtgaatattagcattgttgggga

SEQ ID NO: 2393646 - DNA, 25 bp, Homo sapien
tctcccgtttctgctcgcaaagggc

SEQ ID NO: 2393647 - DNA, 25 bp, Homo sapien
tggccactacttgcgtgttgggcat

SEQ ID NO: 2393648 - DNA, 25 bp, Homo sapien
tttgaggccggagtcctggaggctg

SEQ ID NO: 2393649 - DNA, 25 bp, Homo sapien
cagctggaaacttgcaagagttgga

SEQ ID NO: 2393650 - DNA, 25 bp, Homo sapien
cttttgagaatcagtggccgacggg

SEQ ID NO: 2393651 - DNA, 25 bp, Homo sapien
cttggaggcctctgcttgattagac

SEQ ID NO: 2393652 - DNA, 25 bp, Homo sapien
ggttaataatcttgatcccagctgg

SEQ ID NO: 2393653 - DNA, 25 bp, Homo sapien
tatgaatctgcgttttcactctcca

SEQ ID NO: 2393654 - DNA, 25 bp, Homo sapien
atgaatctgcgttttcactctccat

SEQ ID NO: 2393655 - DNA, 25 bp, Homo sapien
ctcctccaacctgggggccgagcca

SEQ ID NO: 2393656 - DNA, 25 bp, Homo sapien
ccgttaggccgtagctccgaaggcg

SEQ ID NO: 2393657 - DNA, 25 bp, Homo sapien
agtcgccgccgccgttaggccgtag

SEQ ID NO: 2393658 - DNA, 25 bp, Homo sapien
tggggtctggcaccggagctttcag

SEQ ID NO: 2393659 - DNA, 25 bp, Homo sapien
caaccttgactcatctgctgaaaag

SEQ ID NO: 2393660 - DNA, 25 bp, Homo sapien
cagcttctacgacctgatggatgga

SEQ ID NO: 2393661 - DNA, 25 bp, Homo sapien
gctggcccagccgagatttgttttc

SEQ ID NO: 2393662 - DNA, 25 bp, Homo sapien
tgtgactctatggttgactgccacc

SEQ ID NO: 2393663 - DNA, 25 bp, Homo sapien
catagttcctttgagccaagttgct

SEQ ID NO: 2393664 - DNA, 25 bp, Homo sapien
gatgagaggtcatcactgcactgaa

SEQ ID NO: 2393665 - DNA, 25 bp, Homo sapien
gacatggatgcatattaggtagagt

SEQ ID NO: 2393666 - DNA, 25 bp, Homo sapien
tagtcttaccttcctatgatcttgc

SEQ ID NO: 2393667 - DNA, 25 bp, Homo sapien
tttgccagcgttgggtgggacaccc

SEQ ID NO: 2393668 - DNA, 25 bp, Homo sapien
gatccattagtgaggagcgacacac

SEQ ID NO: 2393669 - DNA, 25 bp, Homo sapien
tctcaggcatgtatcccaccaagtg

SEQ ID NO: 2393670 - DNA, 25 bp, Homo sapien
tggccggcaccaatcttagtcaaga

SEQ ID NO: 2393671 - DNA, 25 bp, Homo sapien
tcacgaatttgtgagctcggggcca

SEQ ID NO: 2393672 - DNA, 25 bp, Homo sapien
cttcacgaatttgtgagctcggggc

SEQ ID NO: 2393673 - DNA, 25 bp, Homo sapien
cacgaatttgtgagctcggggccat

SEQ ID NO: 2393674 - DNA, 25 bp, Homo sapien
ttcacgaatttgtgagctcggggcc

SEQ ID NO: 2393675 - DNA, 25 bp, Homo sapien
aatgcagtggcgaggtcacgactca

SEQ ID NO: 2393676 - DNA, 25 bp, Homo sapien
ggctgaagagatcctccaacctcgg

SEQ ID NO: 2393677 - DNA, 25 bp, Homo sapien
accagaggtgtgtgctactatgccc

SEQ ID NO: 2393678 - DNA, 25 bp, Homo sapien
tttatttggtagaggtaaggtctca

SEQ ID NO: 2393679 - DNA, 25 bp, Homo sapien
acctcctgggttcaagtgattctcc

SEQ ID NO: 2393680 - DNA, 25 bp, Homo sapien
gctgcagtgcaatgtcgtgatctca

SEQ ID NO: 2393681 - DNA, 25 bp, Homo sapien
tttcattctttttgcccaggctgca

SEQ ID NO: 2393682 - DNA, 25 bp, Homo sapien
cacctcctgggttcaagtgattctc

SEQ ID NO: 2393683 - DNA, 25 bp, Homo sapien
tgtacttcacgtggcgctgatatgc

SEQ ID NO: 2393684 - DNA, 25 bp, Homo sapien
gcatgaggtgtgaccaagccttgat

SEQ ID NO: 2393685 - DNA, 25 bp, Homo sapien
caaatgagggctgcgtcttcaacgc

SEQ ID NO: 2393686 - DNA, 25 bp, Homo sapien
aaacaactttggcatcgatagcact

SEQ ID NO: 2393687 - DNA, 25 bp, Homo sapien
ccgcaccctgggaccggtaaggctg

SEQ ID NO: 2393688 - DNA, 25 bp, Homo sapien
gactccttggaactggcttagcgca

SEQ ID NO: 2393689 - DNA, 25 bp, Homo sapien
tcagtcccattctgggaaaactcct

SEQ ID NO: 2393690 - DNA, 25 bp, Homo sapien
cttggtaggactttgccggagggca

SEQ ID NO: 2393691 - DNA, 25 bp, Homo sapien
cgccaccatcaaggtaaagactgtt

SEQ ID NO: 2393692 - DNA, 25 bp, Homo sapien
tggaatcatgcagttacatagctct

SEQ ID NO: 2393693 - DNA, 25 bp, Homo sapien
catccatgcattggccccttggagg

SEQ ID NO: 2393694 - DNA, 25 bp, Homo sapien
tctttcactcagcaaggtcatagct

SEQ ID NO: 2393695 - DNA, 25 bp, Homo sapien
actctgaaagtgaggtgagagtttg

SEQ ID NO: 2393696 - DNA, 25 bp, Homo sapien
ttctggaatgggaggcgcggtaact

SEQ ID NO: 2393697 - DNA, 25 bp, Homo sapien
tggccttgtttccaaaccggatgat

SEQ ID NO: 2393698 - DNA, 25 bp, Homo sapien
aaaacaaatgttcatgtccagcctg

SEQ ID NO: 2393699 - DNA, 25 bp, Homo sapien
tgttcatgtccagcctgcatttcaa

SEQ ID NO: 2393700 - DNA, 25 bp, Homo sapien
tgtccaagctcattctaaccccgcc

SEQ ID NO: 2393701 - DNA, 25 bp, Homo sapien
caagctcattctaaccccgcctgct

SEQ ID NO: 2393702 - DNA, 25 bp, Homo sapien
tccaagctcattctaaccccgcctg

SEQ ID NO: 2393703 - DNA, 25 bp, Homo sapien
ttccagaggtgcttagggcgtaggg

SEQ ID NO: 2393704 - DNA, 25 bp, Homo sapien
ctccacgatgccatctgtcccccgc

SEQ ID NO: 2393705 - DNA, 25 bp, Homo sapien
gctccacgatgccatctgtcccccg

SEQ ID NO: 2393706 - DNA, 25 bp, Homo sapien
tccacgatgccatctgtcccccgcc

SEQ ID NO: 2393707 - DNA, 25 bp, Homo sapien
gcagataggagaagctcgccagtga

SEQ ID NO: 2393708 - DNA, 25 bp, Homo sapien
tgggccgcgggcagataggagaagc

SEQ ID NO: 2393709 - DNA, 25 bp, Homo sapien
gacggctgtgaacctggagcaccag

SEQ ID NO: 2393710 - DNA, 25 bp, Homo sapien
gaagctcgccagtgacggctgtgaa

SEQ ID NO: 2393711 - DNA, 25 bp, Homo sapien
gttagaacccctgtcacaagcatgg

SEQ ID NO: 2393712 - DNA, 25 bp, Homo sapien
cagagctatgcagtctggaggccca

SEQ ID NO: 2393713 - DNA, 25 bp, Homo sapien
gaaccacagatccagtagcctagag

SEQ ID NO: 2393714 - DNA, 25 bp, Homo sapien
gaagacagtcatgcctgcccttgtg

SEQ ID NO: 2393715 - DNA, 25 bp, Homo sapien
gatagtgtgtttcgggctcttccca

SEQ ID NO: 2393716 - DNA, 25 bp, Homo sapien
gaaactcggctctgcacagtgagac

SEQ ID NO: 2393717 - DNA, 25 bp, Homo sapien
tgacatgatccgagttagcaggcag

SEQ ID NO: 2393718 - DNA, 25 bp, Homo sapien
tttctagaaaacgacagtgggctgc

SEQ ID NO: 2393719 - DNA, 25 bp, Homo sapien
aggtcgcagccaccgaggccatcac

SEQ ID NO: 2393720 - DNA, 25 bp, Homo sapien
tacacaaaggcctttgtgtgcgtga

SEQ ID NO: 2393721 - DNA, 25 bp, Homo sapien
cttcagtaaagtctgctacatacac

SEQ ID NO: 2393722 - DNA, 25 bp, Homo sapien
cacaaaggcctttgtgtgcgtgatc

SEQ ID NO: 2393723 - DNA, 25 bp, Homo sapien
ggcgatacagcagccagccacgtga

SEQ ID NO: 2393724 - DNA, 25 bp, Homo sapien
tctctgaggcgatacagcagccagc

SEQ ID NO: 2393725 - DNA, 25 bp, Homo sapien
tcagagtgggtggtccttgaaggcc

SEQ ID NO: 2393726 - DNA, 25 bp, Homo sapien
aggcctctctgaggcgatacagcag

SEQ ID NO: 2393727 - DNA, 25 bp, Homo sapien
ccctaatctataacaaaacaacact

SEQ ID NO: 2393728 - DNA, 25 bp, Homo sapien
aaagcctcctgacacaaggtcaccg

SEQ ID NO: 2393729 - DNA, 25 bp, Homo sapien
cacacacactagatcaacagaggga

SEQ ID NO: 2393730 - DNA, 25 bp, Homo sapien
gcagaagtgagaggcggcaggtgcc

SEQ ID NO: 2393731 - DNA, 25 bp, Homo sapien
ttccccacatcccacttcctccacc

SEQ ID NO: 2393732 - DNA, 25 bp, Homo sapien
ccccacatcccacttcctccaccat

SEQ ID NO: 2393733 - DNA, 25 bp, Homo sapien
tccccacatcccacttcctccacca

SEQ ID NO: 2393734 - DNA, 25 bp, Homo sapien
cttccccacatcccacttcctccac

SEQ ID NO: 2393735 - DNA, 25 bp, Homo sapien
gatggtgtacatgtccacgtgtgag

SEQ ID NO: 2393736 - DNA, 25 bp, Homo sapien
agttcccatgtgtttctgaatactg

SEQ ID NO: 2393737 - DNA, 25 bp, Homo sapien
tacatcaggttgtcgaatgccaaca

SEQ ID NO: 2393738 - DNA, 25 bp, Homo sapien
gaagcacttgcagatagttcccatg

SEQ ID NO: 2393739 - DNA, 25 bp, Homo sapien
taggtgtccgtgacgagtaaccacc

SEQ ID NO: 2393740 - DNA, 25 bp, Homo sapien
tccagcgtttgaggtcctcttggtg

SEQ ID NO: 2393741 - DNA, 25 bp, Homo sapien
cctcttggtgcctggtaggtgtccg

SEQ ID NO: 2393742 - DNA, 25 bp, Homo sapien
tgtgggagctccagcgtttgaggtc

SEQ ID NO: 2393743 - DNA, 25 bp, Homo sapien
attctccaagtgctttcaagtaatc

SEQ ID NO: 2393744 - DNA, 25 bp, Homo sapien
tctccaagtgctttcaagtaatctc

SEQ ID NO: 2393745 - DNA, 25 bp, Homo sapien
ttctccaagtgctttcaagtaatct

SEQ ID NO: 2393746 - DNA, 25 bp, Homo sapien
actgctgctgcccccgggtcccgca

SEQ ID NO: 2393747 - DNA, 25 bp, Homo sapien
ctgctgctgcccccgggtcccgcac

SEQ ID NO: 2393748 - DNA, 25 bp, Homo sapien
ggactgctgctgcccccgggtcccg

SEQ ID NO: 2393749 - DNA, 25 bp, Homo sapien
ccggactgctgctgcccccgggtcc

SEQ ID NO: 2393750 - DNA, 25 bp, Homo sapien
caagcatgaggaatgaacagtcttt

SEQ ID NO: 2393751 - DNA, 25 bp, Homo sapien
aggccaggccaagcatgaggaatga

SEQ ID NO: 2393752 - DNA, 25 bp, Homo sapien
accagggtctgtgggtcttgaggac

SEQ ID NO: 2393753 - DNA, 25 bp, Homo sapien
ccagggtgatgatggaggaagggca

SEQ ID NO: 2393754 - DNA, 25 bp, Homo sapien
ccatgttcttttcggcctgtttccg

SEQ ID NO: 2393755 - DNA, 25 bp, Homo sapien
gtcagttttcttctccatgttcttt

SEQ ID NO: 2393756 - DNA, 25 bp, Homo sapien
cttcttccggtagtggatcttggcc

SEQ ID NO: 2393757 - DNA, 25 bp, Homo sapien
tctccatgttcttttcggcctgttt

SEQ ID NO: 2393758 - DNA, 25 bp, Homo sapien
ttgtaggcctcagacgcacgatctt

SEQ ID NO: 2393759 - DNA, 25 bp, Homo sapien
gtaggcctcagacgcacgatcttga

SEQ ID NO: 2393760 - DNA, 25 bp, Homo sapien
caccatccggtttttctcgtcgtag

SEQ ID NO: 2393761 - DNA, 25 bp, Homo sapien
tcttgtaggcctcagacgcacgatc

SEQ ID NO: 2393762 - DNA, 25 bp, Homo sapien
gaaggccaggtgctttaacatgcaa

SEQ ID NO: 2393763 - DNA, 25 bp, Homo sapien
atgcgttgggggcccggacgtggca

SEQ ID NO: 2393764 - DNA, 25 bp, Homo sapien
aggccaggtgctttaacatgcaaca

SEQ ID NO: 2393765 - DNA, 25 bp, Homo sapien
ccgcccgcaggaagatgcgttgggg

SEQ ID NO: 2393766 - DNA, 25 bp, Homo sapien
ctgcacctccgccgtcttccccggt

SEQ ID NO: 2393767 - DNA, 25 bp, Homo sapien
tgcacctccgccgtcttccccggtc

SEQ ID NO: 2393768 - DNA, 25 bp, Homo sapien
acctgcacctccgccgtcttccccg

SEQ ID NO: 2393769 - DNA, 25 bp, Homo sapien
cctgcacctccgccgtcttccccgg

SEQ ID NO: 2393770 - DNA, 25 bp, Homo sapien
gtgccctgtagtcgcccttggaggc

SEQ ID NO: 2393771 - DNA, 25 bp, Homo sapien
ggtgccctgtagtcgcccttggagg

SEQ ID NO: 2393772 - DNA, 25 bp, Homo sapien
gggaaggcgggatcatagcacctcg

SEQ ID NO: 2393773 - DNA, 25 bp, Homo sapien
cgggaagaggcccgttcgccgcagg

SEQ ID NO: 2393774 - DNA, 25 bp, Homo sapien
atcatagcacctcggaggagcggcc

SEQ ID NO: 2393775 - DNA, 25 bp, Homo sapien
gcgggatcatagcacctcggaggag

SEQ ID NO: 2393776 - DNA, 25 bp, Homo sapien
taactcttagttcagagacccagtc

SEQ ID NO: 2393777 - DNA, 25 bp, Homo sapien
actcttagttcagagacccagtctc

SEQ ID NO: 2393778 - DNA, 25 bp, Homo sapien
gtaactcttagttcagagacccagt

SEQ ID NO: 2393779 - DNA, 25 bp, Homo sapien
aactcttagttcagagacccagtct

SEQ ID NO: 2393780 - DNA, 25 bp, Homo sapien
agctgtccttttccctggggtgact

SEQ ID NO: 2393781 - DNA, 25 bp, Homo sapien
ttccctggggtgactcaggtatttc

SEQ ID NO: 2393782 - DNA, 25 bp, Homo sapien
ccctggggtgactcaggtatttcct

SEQ ID NO: 2393783 - DNA, 25 bp, Homo sapien
ggtgactcaggtatttcctcctcca

SEQ ID NO: 2393784 - DNA, 25 bp, Homo sapien
tgaacccaatggtgtagtcggtgga

SEQ ID NO: 2393785 - DNA, 25 bp, Homo sapien
acccaatggtgtagtcggtggagca

SEQ ID NO: 2393786 - DNA, 25 bp, Homo sapien
tccctgaacccaatggtgtagtcgg

SEQ ID NO: 2393787 - DNA, 25 bp, Homo sapien
cttccctgaacccaatggtgtagtc

SEQ ID NO: 2393788 - DNA, 25 bp, Homo sapien
gtgtctcctgccctatggctctgag

SEQ ID NO: 2393789 - DNA, 25 bp, Homo sapien
gggaaactggcaaacactcgatctt

SEQ ID NO: 2393790 - DNA, 25 bp, Homo sapien
tcatccccagatgggtcatccaggg

SEQ ID NO: 2393791 - DNA, 25 bp, Homo sapien
ctagcgctggcagaggcttggactt

SEQ ID NO: 2393792 - DNA, 25 bp, Homo sapien
tcgacaccgtgacttcccgcaaggt

SEQ ID NO: 2393793 - DNA, 25 bp, Homo sapien
cgtgacttcccgcaaggtgttcgtt

SEQ ID NO: 2393794 - DNA, 25 bp, Homo sapien
aatggactcgacaccgtgacttccc

SEQ ID NO: 2393795 - DNA, 25 bp, Homo sapien
tcatcacctgccttagtggctgttc

SEQ ID NO: 2393796 - DNA, 25 bp, Homo sapien
tcaggagcacagtagcaacatcttt

SEQ ID NO: 2393797 - DNA, 25 bp, Homo sapien
cactgcttatccaaatgggtctcag

SEQ ID NO: 2393798 - DNA, 25 bp, Homo sapien
cacattggatgtccccgtaaggaca

SEQ ID NO: 2393799 - DNA, 25 bp, Homo sapien
ccctgggcgctgaggattgttcttc

SEQ ID NO: 2393800 - DNA, 25 bp, Homo sapien
gatgctgacacgaattgtgggacac

SEQ ID NO: 2393801 - DNA, 25 bp, Homo sapien
gtcctgaatcatacacattgtcttc

SEQ ID NO: 2393802 - DNA, 25 bp, Homo sapien
aagcattcagagtcctggcgttgtc

SEQ ID NO: 2393803 - DNA, 25 bp, Homo sapien
tttgggatgctgacacgaattgtgg

SEQ ID NO: 2393804 - DNA, 25 bp, Homo sapien
acttctgcggcctcactggcattct

SEQ ID NO: 2393805 - DNA, 25 bp, Homo sapien
gacttctgcggcctcactggcattc

SEQ ID NO: 2393806 - DNA, 25 bp, Homo sapien
tggcatgggacttctgcggcctcac

SEQ ID NO: 2393807 - DNA, 25 bp, Homo sapien
catgggacttctgcggcctcactgg

SEQ ID NO: 2393808 - DNA, 25 bp, Homo sapien
accatcagcaaaaccaagaccttgg

SEQ ID NO: 2393809 - DNA, 25 bp, Homo sapien
ccatcagcaaaaccaagaccttggc

SEQ ID NO: 2393810 - DNA, 25 bp, Homo sapien
taccatcagcaaaaccaagaccttg

SEQ ID NO: 2393811 - DNA, 25 bp, Homo sapien
ggtattgaaaggaataagacacagt

SEQ ID NO: 2393812 - DNA, 25 bp, Homo sapien
tccagagtctgtggcgtagacagtg

SEQ ID NO: 2393813 - DNA, 25 bp, Homo sapien
ccctgtgctgaaggtattgaaagga

SEQ ID NO: 2393814 - DNA, 25 bp, Homo sapien
gtgagtcatcggatgctacaatgtg

SEQ ID NO: 2393815 - DNA, 25 bp, Homo sapien
tccaggagatgcccgtcccctttcg

SEQ ID NO: 2393816 - DNA, 25 bp, Homo sapien
ggagatgcccgtcccctttcgccag

SEQ ID NO: 2393817 - DNA, 25 bp, Homo sapien
atgcccgtcccctttcgccagcctc

SEQ ID NO: 2393818 - DNA, 25 bp, Homo sapien
caggagatgcccgtcccctttcgcc

SEQ ID NO: 2393819 - DNA, 25 bp, Homo sapien
gaacgagttcgaacaggatcttggg

SEQ ID NO: 2393820 - DNA, 25 bp, Homo sapien
tgggaggaattccaaggccataact

SEQ ID NO: 2393821 - DNA, 25 bp, Homo sapien
ttggaacctggctgattaaacctgg

SEQ ID NO: 2393822 - DNA, 25 bp, Homo sapien
cctgagccctcaagcgtggaaagtt

SEQ ID NO: 2393823 - DNA, 25 bp, Homo sapien
tggtttctatttactggcaggttga

SEQ ID NO: 2393824 - DNA, 25 bp, Homo sapien
acagtggatgcttcagggttggtca

SEQ ID NO: 2393825 - DNA, 25 bp, Homo sapien
aatgccaaacagagagcttgcgttt

SEQ ID NO: 2393826 - DNA, 25 bp, Homo sapien
aggttgaaagcaggtgaccccgcct

SEQ ID NO: 2393827 - DNA, 25 bp, Homo sapien
ttgtttttgctgagcggctctttgc

SEQ ID NO: 2393828 - DNA, 25 bp, Homo sapien
agggcagaaccttcaaggtcgttgg

SEQ ID NO: 2393829 - DNA, 25 bp, Homo sapien
ttgctgagcggctctttgctgtgct

SEQ ID NO: 2393830 - DNA, 25 bp, Homo sapien
gttgtagccgcatcggatttcaagg

SEQ ID NO: 2393831 - DNA, 25 bp, Homo sapien
ctttgacggggtacacacgctctac

SEQ ID NO: 2393832 - DNA, 25 bp, Homo sapien
tccccgaggaaagtcctgttgctcc

SEQ ID NO: 2393833 - DNA, 25 bp, Homo sapien
cctgtgcagttactgagggcactgt

SEQ ID NO: 2393834 - DNA, 25 bp, Homo sapien
cccagcttggtagcctgtgcagtta

SEQ ID NO: 2393835 - DNA, 25 bp, Homo sapien
tgtccccgaggaaagtcctgttgct

SEQ ID NO: 2393836 - DNA, 25 bp, Homo sapien
ctgctccttggtgccagaaccttct

SEQ ID NO: 2393837 - DNA, 25 bp, Homo sapien
tccttggtgccagaaccttcttcct

SEQ ID NO: 2393838 - DNA, 25 bp, Homo sapien
ctcagcttccccaactctctccaca

SEQ ID NO: 2393839 - DNA, 25 bp, Homo sapien
tctctccacacaaaggcagctgtgg

SEQ ID NO: 2393840 - DNA, 25 bp, Homo sapien
cagtgctcttgtttgggaaatgacc

SEQ ID NO: 2393841 - DNA, 25 bp, Homo sapien
tctagactcttgagcacgtgcacag

SEQ ID NO: 2393842 - DNA, 25 bp, Homo sapien
tcaaggctctctcccgttgtgtcct

SEQ ID NO: 2393843 - DNA, 25 bp, Homo sapien
gaacttgttttgacgtgccagcttg

SEQ ID NO: 2393844 - DNA, 25 bp, Homo sapien
tgggcagggagcgtggccgtggttg

SEQ ID NO: 2393845 - DNA, 25 bp, Homo sapien
gctggcagggtatggaacgtgggca

SEQ ID NO: 2393846 - DNA, 25 bp, Homo sapien
ctttgtggaatccagagacgactgc

SEQ ID NO: 2393847 - DNA, 25 bp, Homo sapien
gtgcacatgaccacactgccaagtg

SEQ ID NO: 2393848 - DNA, 25 bp, Homo sapien
tctccagctcggctgggaagctgcc

SEQ ID NO: 2393849 - DNA, 25 bp, Homo sapien
ccagctccatcagtcacgtccaagg

SEQ ID NO: 2393850 - DNA, 25 bp, Homo sapien
gcagctgtcccagctccatcagtca

SEQ ID NO: 2393851 - DNA, 25 bp, Homo sapien
cctctccagctcggctgggaagctg

SEQ ID NO: 2393852 - DNA, 25 bp, Homo sapien
gcctccagggtagggagatggggtc

SEQ ID NO: 2393853 - DNA, 25 bp, Homo sapien
ctccagggtagggagatggggtctt

SEQ ID NO: 2393854 - DNA, 25 bp, Homo sapien
ccagggtagggagatggggtctttg

SEQ ID NO: 2393855 - DNA, 25 bp, Homo sapien
ctgcctccagggtagggagatgggg

SEQ ID NO: 2393856 - DNA, 25 bp, Homo sapien
tgcagccagatacatgccttgcctt

SEQ ID NO: 2393857 - DNA, 25 bp, Homo sapien
ccatcctggcattaccattttctgc

SEQ ID NO: 2393858 - DNA, 25 bp, Homo sapien
tgcccatcctggcattaccattttc

SEQ ID NO: 2393859 - DNA, 25 bp, Homo sapien
taaggatgggtgtattttgtcctcc

SEQ ID NO: 2393860 - DNA, 25 bp, Homo sapien
ttgaagtctctaacaaccttgcatt

SEQ ID NO: 2393861 - DNA, 25 bp, Homo sapien
cttgaagtctctaacaaccttgcat

SEQ ID NO: 2393862 - DNA, 25 bp, Homo sapien
tagagatatggtatggttggcccat

SEQ ID NO: 2393863 - DNA, 25 bp, Homo sapien
ggttcttagaattagagatatggta

SEQ ID NO: 2393864 - DNA, 25 bp, Homo sapien
tcttagaattagagatatggtatgg

SEQ ID NO: 2393865 - DNA, 25 bp, Homo sapien
gaattagagatatggtatggttggc

SEQ ID NO: 2393866 - DNA, 25 bp, Homo sapien
ttccgctcaacgttaaactctgtca

SEQ ID NO: 2393867 - DNA, 25 bp, Homo sapien
ttcatccaagcctttgtccttccgc

SEQ ID NO: 2393868 - DNA, 25 bp, Homo sapien
tgtccttccgctcaacgttaaactc

SEQ ID NO: 2393869 - DNA, 25 bp, Homo sapien
aagcctttgtccttccgctcaacgt

SEQ ID NO: 2393870 - DNA, 25 bp, Homo sapien
gccactccttcaccccagttcctga

SEQ ID NO: 2393871 - DNA, 25 bp, Homo sapien
gatttccctctccaattgattaggc

SEQ ID NO: 2393872 - DNA, 25 bp, Homo sapien
gctgtcattaatgtagaggctggat

SEQ ID NO: 2393873 - DNA, 25 bp, Homo sapien
tcattaatgtagaggctggatttcc

SEQ ID NO: 2393874 - DNA, 25 bp, Homo sapien
tctgcagaacgcacccaactctgtt

SEQ ID NO: 2393875 - DNA, 25 bp, Homo sapien
gtcttcctccttagtctgcagaacg

SEQ ID NO: 2393876 - DNA, 25 bp, Homo sapien
actctgtttcgggtgggtgtgggca

SEQ ID NO: 2393877 - DNA, 25 bp, Homo sapien
gaaggtttgattggctttggcattc

SEQ ID NO: 2393878 - DNA, 25 bp, Homo sapien
actcctggtacaagtgaggactgag

SEQ ID NO: 2393879 - DNA, 25 bp, Homo sapien
gaggcatgctggcttcgtaatcagc

SEQ ID NO: 2393880 - DNA, 25 bp, Homo sapien
tccatcagcaatgtcgcttagcgag

SEQ ID NO: 2393881 - DNA, 25 bp, Homo sapien
gggccagttcgttgaccagctcttg

SEQ ID NO: 2393882 - DNA, 25 bp, Homo sapien
cactgacctggtcggctgtgcctgg

SEQ ID NO: 2393883 - DNA, 25 bp, Homo sapien
tgcccactgacctggtcggctgtgc

SEQ ID NO: 2393884 - DNA, 25 bp, Homo sapien
tgacaagtctctccaagctgtcctt

SEQ ID NO: 2393885 - DNA, 25 bp, Homo sapien
acagcttcctgacaagtctctccaa

SEQ ID NO: 2393886 - DNA, 25 bp, Homo sapien
cttgaggacatcagggtgtctgggc

SEQ ID NO: 2393887 - DNA, 25 bp, Homo sapien
tgaggacatcagggtgtctgggctc

SEQ ID NO: 2393888 - DNA, 25 bp, Homo sapien
ttgaggacatcagggtgtctgggct

SEQ ID NO: 2393889 - DNA, 25 bp, Homo sapien
ccagagcccgtctttaaatattcca

SEQ ID NO: 2393890 - DNA, 25 bp, Homo sapien
ctggctgagaatcgtgcacctttca

SEQ ID NO: 2393891 - DNA, 25 bp, Homo sapien
tgagaatcgtgcacctttcaggccc

SEQ ID NO: 2393892 - DNA, 25 bp, Homo sapien
ggtctttccttgattacccaccaga

SEQ ID NO: 2393893 - DNA, 25 bp, Homo sapien
gcggaggaatgagagttattctgta

SEQ ID NO: 2393894 - DNA, 25 bp, Homo sapien
tgtcaatgttggcattagacaggaa

SEQ ID NO: 2393895 - DNA, 25 bp, Homo sapien
aatgtgtgatttgaacaatgctggg

SEQ ID NO: 2393896 - DNA, 25 bp, Homo sapien
ggattcctctgtcaatgttggcatt

SEQ ID NO: 2393897 - DNA, 25 bp, Homo sapien
aggccacctgcagcgtcccatgggt

SEQ ID NO: 2393898 - DNA, 25 bp, Homo sapien
cgtcccatgggtgcctgagctcaaa

SEQ ID NO: 2393899 - DNA, 25 bp, Homo sapien
tctgacaggccacctgcagcgtccc

SEQ ID NO: 2393900 - DNA, 25 bp, Homo sapien
cctgcagcgtcccatgggtgcctga

SEQ ID NO: 2393901 - DNA, 25 bp, Homo sapien
cacgtgcacatgtgttgtgtgcttg

SEQ ID NO: 2393902 - DNA, 25 bp, Homo sapien
gaatccaagctgactgagaggtgtt

SEQ ID NO: 2393903 - DNA, 25 bp, Homo sapien
cacagccagaatccaagctgactga

SEQ ID NO: 2393904 - DNA, 25 bp, Homo sapien
aagctgactgagaggtgttcccaca

SEQ ID NO: 2393905 - DNA, 25 bp, Homo sapien
ctgatgttgcttcagctgagcgatt

SEQ ID NO: 2393906 - DNA, 25 bp, Homo sapien
tgttgcttcagctgagcgattagag

SEQ ID NO: 2393907 - DNA, 25 bp, Homo sapien
cagctgagcgattagagccacggga

SEQ ID NO: 2393908 - DNA, 25 bp, Homo sapien
cgattagagccacgggatgctgccg

SEQ ID NO: 2393909 - DNA, 25 bp, Homo sapien
ccgtcctgccctgcatggttttgct

SEQ ID NO: 2393910 - DNA, 25 bp, Homo sapien
gcttgcacccggagttcctgttctg

SEQ ID NO: 2393911 - DNA, 25 bp, Homo sapien
ttggggatgggaatagcttgcaccc

SEQ ID NO: 2393912 - DNA, 25 bp, Homo sapien
gaatagcttgcacccggagttcctg

SEQ ID NO: 2393913 - DNA, 25 bp, Homo sapien
cttgggtgtccatggcagagcaggg

SEQ ID NO: 2393914 - DNA, 25 bp, Homo sapien
atggctggtggatttgagggtgggc

SEQ ID NO: 2393915 - DNA, 25 bp, Homo sapien
ctggtggatttgagggtgggcctgg

SEQ ID NO: 2393916 - DNA, 25 bp, Homo sapien
ttgagggtgggcctgggagtttcca

SEQ ID NO: 2393917 - DNA, 25 bp, Homo sapien
gctggtggatttgagggtgggcctg

SEQ ID NO: 2393918 - DNA, 25 bp, Homo sapien
ctcggtactgcccagggttagccat

SEQ ID NO: 2393919 - DNA, 25 bp, Homo sapien
ttggccttagctccggccctcggta

SEQ ID NO: 2393920 - DNA, 25 bp, Homo sapien
ctcaggggccttcagacttggtgtt

SEQ ID NO: 2393921 - DNA, 25 bp, Homo sapien
gccctcggtactgcccagggttagc

SEQ ID NO: 2393922 - DNA, 25 bp, Homo sapien
tcgtgggtagactgtacacacagcc

SEQ ID NO: 2393923 - DNA, 25 bp, Homo sapien
gggtagactgtacacacagccaagg

SEQ ID NO: 2393924 - DNA, 25 bp, Homo sapien
cgtgggtagactgtacacacagcca

SEQ ID NO: 2393925 - DNA, 25 bp, Homo sapien
ctgtcgtgggtagactgtacacaca

SEQ ID NO: 2393926 - DNA, 25 bp, Homo sapien
gcccttctgcaagggacagctcggt

SEQ ID NO: 2393927 - DNA, 25 bp, Homo sapien
ccttctgcaagggacagctcggtgc

SEQ ID NO: 2393928 - DNA, 25 bp, Homo sapien
gagcccttctgcaagggacagctcg

SEQ ID NO: 2393929 - DNA, 25 bp, Homo sapien
agagagcccttctgcaagggacagc

SEQ ID NO: 2393930 - DNA, 25 bp, Homo sapien
gcccttgacatttagcgagtgctcg

SEQ ID NO: 2393931 - DNA, 25 bp, Homo sapien
tgtttaggcacacagcagaacgcta

SEQ ID NO: 2393932 - DNA, 25 bp, Homo sapien
tcgcgcccattggtcgaatgcaaag

SEQ ID NO: 2393933 - DNA, 25 bp, Homo sapien
tgctcgcggcgcacttgtttaggca

SEQ ID NO: 2393934 - DNA, 25 bp, Homo sapien
atggtttcccactcatcttgactca

SEQ ID NO: 2393935 - DNA, 25 bp, Homo sapien
ccactcatcttgactcagagtgctt

SEQ ID NO: 2393936 - DNA, 25 bp, Homo sapien
aatgtgtttattgagatggtttccc

SEQ ID NO: 2393937 - DNA, 25 bp, Homo sapien
gtttcccactcatcttgactcagag

SEQ ID NO: 2393938 - DNA, 25 bp, Homo sapien
gatgaaggagatcctttgcgagagg

SEQ ID NO: 2393939 - DNA, 25 bp, Homo sapien
gaaggagatcctttgcgagaggcat

SEQ ID NO: 2393940 - DNA, 25 bp, Homo sapien
aactactgtttgtgcatggctaaag

SEQ ID NO: 2393941 - DNA, 25 bp, Homo sapien
atggctaaagaccgtggtgatttta

SEQ ID NO: 2393942 - DNA, 25 bp, Homo sapien
tgcgtaggtcgtcaccaccggaaag

SEQ ID NO: 2393943 - DNA, 25 bp, Homo sapien
tgtgcgtaggtcgtcaccaccggaa

SEQ ID NO: 2393944 - DNA, 25 bp, Homo sapien
gtgtgcgtaggtcgtcaccaccgga

SEQ ID NO: 2393945 - DNA, 25 bp, Homo sapien
tcgtgtgcgtaggtcgtcaccaccg

SEQ ID NO: 2393946 - DNA, 25 bp, Homo sapien
aactcctgttggatttgcctcttcg

SEQ ID NO: 2393947 - DNA, 25 bp, Homo sapien
gatttgcctcttcggacctccagtt

SEQ ID NO: 2393948 - DNA, 25 bp, Homo sapien
gggacaggagcgctgggttccaggg

SEQ ID NO: 2393949 - DNA, 25 bp, Homo sapien
gggagaatcttccctgttagcccat

SEQ ID NO: 2393950 - DNA, 25 bp, Homo sapien
tggccctgggtccacatctcttttg

SEQ ID NO: 2393951 - DNA, 25 bp, Homo sapien
agatggcttttgctgggaccttcca

SEQ ID NO: 2393952 - DNA, 25 bp, Homo sapien
ctactgactaagcagccagatggct

SEQ ID NO: 2393953 - DNA, 25 bp, Homo sapien
gaccttccagatgtgggagtaggtt

SEQ ID NO: 2393954 - DNA, 25 bp, Homo sapien
tgtcattgaggcagcggtgagggcc

SEQ ID NO: 2393955 - DNA, 25 bp, Homo sapien
gaggcagcggtgagggccctgtttg

SEQ ID NO: 2393956 - DNA, 25 bp, Homo sapien
attgaggcagcggtgagggccctgt

SEQ ID NO: 2393957 - DNA, 25 bp, Homo sapien
gtcattgaggcagcggtgagggccc

SEQ ID NO: 2393958 - DNA, 25 bp, Homo sapien
tgatggcggtaggagcgggcctggc

SEQ ID NO: 2393959 - DNA, 25 bp, Homo sapien
gccaggggtgatggcggtaggagcg

SEQ ID NO: 2393960 - DNA, 25 bp, Homo sapien
ggggtgatggcggtaggagcgggcc

SEQ ID NO: 2393961 - DNA, 25 bp, Homo sapien
gtgatggcggtaggagcgggcctgg

SEQ ID NO: 2393962 - DNA, 25 bp, Homo sapien
ccggcaatccatcctctggaatata

SEQ ID NO: 2393963 - DNA, 25 bp, Homo sapien
cccggcaatccatcctctggaatat

SEQ ID NO: 2393964 - DNA, 25 bp, Homo sapien
cggcaatccatcctctggaatatag

SEQ ID NO: 2393965 - DNA, 25 bp, Homo sapien
cccccggcaatccatcctctggaat

SEQ ID NO: 2393966 - DNA, 25 bp, Homo sapien
catagctcacaaatattggccgaga

SEQ ID NO: 2393967 - DNA, 25 bp, Homo sapien
gcagaggtgaagcttcgtcgattct

SEQ ID NO: 2393968 - DNA, 25 bp, Homo sapien
tagtctgcggcacagcatagctcac

SEQ ID NO: 2393969 - DNA, 25 bp, Homo sapien
tccagcggtgcctgcatagtctgcg

SEQ ID NO: 2393970 - DNA, 25 bp, Homo sapien
tgagaaatgtgctgtagtcgtcatc

SEQ ID NO: 2393971 - DNA, 25 bp, Homo sapien
tgcagagtaattgcagtacatgggt

SEQ ID NO: 2393972 - DNA, 25 bp, Homo sapien
taacatgagaaatgtgctgtagtcg

SEQ ID NO: 2393973 - DNA, 25 bp, Homo sapien
tacatgggtagttggatgacattaa

SEQ ID NO: 2393974 - DNA, 25 bp, Homo sapien
gatcgtcacgaatggatttgacggg

SEQ ID NO: 2393975 - DNA, 25 bp, Homo sapien
ccctgggcagagatcgtcacgaatg

SEQ ID NO: 2393976 - DNA, 25 bp, Homo sapien
ggcagagatcgtcacgaatggattt

SEQ ID NO: 2393977 - DNA, 25 bp, Homo sapien
tcacgaatggatttgacgggaatgg

SEQ ID NO: 2393978 - DNA, 25 bp, Homo sapien
tgtggcatgttttctatgccgtttg

SEQ ID NO: 2393979 - DNA, 25 bp, Homo sapien
tccaaccctccctggcttttgtggc

SEQ ID NO: 2393980 - DNA, 25 bp, Homo sapien
ccggtggagatgtgggacagggacc

SEQ ID NO: 2393981 - DNA, 25 bp, Homo sapien
gacctcgtttgttccagagcctgtt

SEQ ID NO: 2393982 - DNA, 25 bp, Homo sapien
gtgaaatttgcattgcgtgcttgga

SEQ ID NO: 2393983 - DNA, 25 bp, Homo sapien
gaaatttgcattgcgtgcttggaga

SEQ ID NO: 2393984 - DNA, 25 bp, Homo sapien
cattgcgtgcttggagagtggcaag

SEQ ID NO: 2393985 - DNA, 25 bp, Homo sapien
atttgcattgcgtgcttggagagtg

SEQ ID NO: 2393986 - DNA, 25 bp, Homo sapien
tcctggcagcaccaggaagccgcag

SEQ ID NO: 2393987 - DNA, 25 bp, Homo sapien
ttaatgcttcctggcagcaccagga

SEQ ID NO: 2393988 - DNA, 25 bp, Homo sapien
tggcagcaccaggaagccgcaggta

SEQ ID NO: 2393989 - DNA, 25 bp, Homo sapien
ttcctggcagcaccaggaagccgca

SEQ ID NO: 2393990 - DNA, 25 bp, Homo sapien
ggaggaagccggttggcaggcccca

SEQ ID NO: 2393991 - DNA, 25 bp, Homo sapien
gtccatgggaggcttgaagacagga

SEQ ID NO: 2393992 - DNA, 25 bp, Homo sapien
gggacttaggtgtgctcacttgcag

SEQ ID NO: 2393993 - DNA, 25 bp, Homo sapien
gtcgggccacgtcctctccatgtga

SEQ ID NO: 2393994 - DNA, 25 bp, Homo sapien
atgcaaatgaagccccttccagcca

SEQ ID NO: 2393995 - DNA, 25 bp, Homo sapien
ggctgaatgcaaatgaagccccttc

SEQ ID NO: 2393996 - DNA, 25 bp, Homo sapien
tgcaaatgaagccccttccagccat

SEQ ID NO: 2393997 - DNA, 25 bp, Homo sapien
gctgaatgcaaatgaagccccttcc

SEQ ID NO: 2393998 - DNA, 25 bp, Homo sapien
gcgcccatagggacttttctttcat

SEQ ID NO: 2393999 - DNA, 25 bp, Homo sapien
agaaggtagtgttttctattgtagg

SEQ ID NO: 2394000 - DNA, 25 bp, Homo sapien
tctattgtagggtggcgcccatagg

SEQ ID NO: 2394001 - DNA, 25 bp, Homo sapien
tagtgttttctattgtagggtggcg

SEQ ID NO: 2394002 - DNA, 25 bp, Homo sapien
tcttcaacacttcggagtgtggtct

SEQ ID NO: 2394003 - DNA, 25 bp, Homo sapien
cacggagcgctcttcaacacttcgg

SEQ ID NO: 2394004 - DNA, 25 bp, Homo sapien
cttctgcaagcgtaggtgcccacgg

SEQ ID NO: 2394005 - DNA, 25 bp, Homo sapien
tttgcttctgcaagcgtaggtgccc

SEQ ID NO: 2394006 - DNA, 25 bp, Homo sapien
taggatctcagtgcgtaccttcctg

SEQ ID NO: 2394007 - DNA, 25 bp, Homo sapien
ttcagtaggatctcagtgcgtacct

SEQ ID NO: 2394008 - DNA, 25 bp, Homo sapien
cagtaggatctcagtgcgtaccttc

SEQ ID NO: 2394009 - DNA, 25 bp, Homo sapien
cattcagtaggatctcagtgcgtac

SEQ ID NO: 2394010 - DNA, 25 bp, Homo sapien
ttgctgagagactgcggctttctgg

SEQ ID NO: 2394011 - DNA, 25 bp, Homo sapien
ccagcccgtggaatttgctgagaga

SEQ ID NO: 2394012 - DNA, 25 bp, Homo sapien
tggaatttgctgagagactgcggct

SEQ ID NO: 2394013 - DNA, 25 bp, Homo sapien
ccgtggaatttgctgagagactgcg

SEQ ID NO: 2394014 - DNA, 25 bp, Homo sapien
aggttgagtttcccgtgatgatgga

SEQ ID NO: 2394015 - DNA, 25 bp, Homo sapien
gatggaaagcttggttataaagcca

SEQ ID NO: 2394016 - DNA, 25 bp, Homo sapien
gaaagcttggttataaagccagcag

SEQ ID NO: 2394017 - DNA, 25 bp, Homo sapien
tgagtttcccgtgatgatggaaagc

SEQ ID NO: 2394018 - DNA, 25 bp, Homo sapien
ccatgggcatgcagcatacgtaggt

SEQ ID NO: 2394019 - DNA, 25 bp, Homo sapien
tgtgtgtgtaacaccttcattccca

SEQ ID NO: 2394020 - DNA, 25 bp, Homo sapien
catgggcatgcagcatacgtaggtg

SEQ ID NO: 2394021 - DNA, 25 bp, Homo sapien
tttgtgtgtgtaacaccttcattcc

SEQ ID NO: 2394022 - DNA, 25 bp, Homo sapien
gaagcagccaggcatcggccctcct

SEQ ID NO: 2394023 - DNA, 25 bp, Homo sapien
aagcagccaggcatcggccctcctg

SEQ ID NO: 2394024 - DNA, 25 bp, Homo sapien
agaagcagccaggcatcggccctcc

SEQ ID NO: 2394025 - DNA, 25 bp, Homo sapien
gcagccaggcatcggccctcctgct

SEQ ID NO: 2394026 - DNA, 25 bp, Homo sapien
ttgacgcccgtggtctggtcttgcc

SEQ ID NO: 2394027 - DNA, 25 bp, Homo sapien
tgtaggccccattgattttctgtct

SEQ ID NO: 2394028 - DNA, 25 bp, Homo sapien
tcttcagggagggtgacagcgtagg

SEQ ID NO: 2394029 - DNA, 25 bp, Homo sapien
ctgaggagggccatgtaggccccat

SEQ ID NO: 2394030 - DNA, 25 bp, Homo sapien
cagtcagtcataagttctctggtgc

SEQ ID NO: 2394031 - DNA, 25 bp, Homo sapien
tttcagcttgcccgttgggactgct

SEQ ID NO: 2394032 - DNA, 25 bp, Homo sapien
cagcttgcccgttgggactgctggg

SEQ ID NO: 2394033 - DNA, 25 bp, Homo sapien
gcagtcagtcataagttctctggtg

SEQ ID NO: 2394034 - DNA, 25 bp, Homo sapien
gaggccatgtccttattctctgcca

SEQ ID NO: 2394035 - DNA, 25 bp, Homo sapien
aaggaggccatgtccttattctctg

SEQ ID NO: 2394036 - DNA, 25 bp, Homo sapien
ggaggccatgtccttattctctgcc

SEQ ID NO: 2394037 - DNA, 25 bp, Homo sapien
ggccatgtccttattctctgccagc

SEQ ID NO: 2394038 - DNA, 25 bp, Homo sapien
accagatggcgatcccccagccacc

SEQ ID NO: 2394039 - DNA, 25 bp, Homo sapien
cggaccacgcgctgcaggcagacag

SEQ ID NO: 2394040 - DNA, 25 bp, Homo sapien
caggtcccaccagatggcgatcccc

SEQ ID NO: 2394041 - DNA, 25 bp, Homo sapien
gccccaccggaccacgcgctgcagg

SEQ ID NO: 2394042 - DNA, 25 bp, Homo sapien
agcagccctggaaggtgccaagccc

SEQ ID NO: 2394043 - DNA, 25 bp, Homo sapien
gcaggaaggatgaccctggaaccac

SEQ ID NO: 2394044 - DNA, 25 bp, Homo sapien
tgactcttgccgagggagagaaatg

SEQ ID NO: 2394045 - DNA, 25 bp, Homo sapien
cctggaaggtgccaagcccatttct

SEQ ID NO: 2394046 - DNA, 25 bp, Homo sapien
cacggagccatcgtcagcatggatg

SEQ ID NO: 2394047 - DNA, 25 bp, Homo sapien
tggcacggagccatcgtcagcatgg

SEQ ID NO: 2394048 - DNA, 25 bp, Homo sapien
catcgtcagcatggatgctgtatct

SEQ ID NO: 2394049 - DNA, 25 bp, Homo sapien
gagccatcgtcagcatggatgctgt

SEQ ID NO: 2394050 - DNA, 25 bp, Homo sapien
ggagctgcggtgacagctgcttgtg

SEQ ID NO: 2394051 - DNA, 25 bp, Homo sapien
acagctgcttgtggctgatgagcat

SEQ ID NO: 2394052 - DNA, 25 bp, Homo sapien
ctgcggtgacagctgcttgtggctg

SEQ ID NO: 2394053 - DNA, 25 bp, Homo sapien
gctgcggtgacagctgcttgtggct

SEQ ID NO: 2394054 - DNA, 25 bp, Homo sapien
catgacaccagaaccctttcctggt

SEQ ID NO: 2394055 - DNA, 25 bp, Homo sapien
gagcagcccggtgaatggccatgat

SEQ ID NO: 2394056 - DNA, 25 bp, Homo sapien
cgccagaggtatgcagagcttggct

SEQ ID NO: 2394057 - DNA, 25 bp, Homo sapien
gctttcgggtgactgttggctgcca

SEQ ID NO: 2394058 - DNA, 25 bp, Homo sapien
gaagggcctcgggccctgagaggga

SEQ ID NO: 2394059 - DNA, 25 bp, Homo sapien
gaggaagggcctcgggccctgagag

SEQ ID NO: 2394060 - DNA, 25 bp, Homo sapien
aggaagggcctcgggccctgagagg

SEQ ID NO: 2394061 - DNA, 25 bp, Homo sapien
ctgaggaagggcctcgggccctgag

SEQ ID NO: 2394062 - DNA, 25 bp, Homo sapien
ggcctgggccgactcttgcaagatc

SEQ ID NO: 2394063 - DNA, 25 bp, Homo sapien
cttgtcatcacagccggagtcagct

SEQ ID NO: 2394064 - DNA, 25 bp, Homo sapien
gaaatataaccctcctgttagccaa

SEQ ID NO: 2394065 - DNA, 25 bp, Homo sapien
ccctggtccaatgtttcacggtgcg

SEQ ID NO: 2394066 - DNA, 25 bp, Homo sapien
cagtcgcagccagcatgacggaggc

SEQ ID NO: 2394067 - DNA, 25 bp, Homo sapien
gggtccggcagtcgcagccagcatg

SEQ ID NO: 2394068 - DNA, 25 bp, Homo sapien
ccggcagtcgcagccagcatgacgg

SEQ ID NO: 2394069 - DNA, 25 bp, Homo sapien
gggaaggcacttgccgcaggggtcc

SEQ ID NO: 2394070 - DNA, 25 bp, Homo sapien
cgagtgggttataaatagcggatga

SEQ ID NO: 2394071 - DNA, 25 bp, Homo sapien
taaatagcggatgacgggctgtagc

SEQ ID NO: 2394072 - DNA, 25 bp, Homo sapien
taatcgtcgatttcgggagcggccc

SEQ ID NO: 2394073 - DNA, 25 bp, Homo sapien
gagctgcctctagcgtaatcgtcga

SEQ ID NO: 2394074 - DNA, 25 bp, Homo sapien
caaagtcacgactatttcgcattgc

SEQ ID NO: 2394075 - DNA, 25 bp, Homo sapien
gcggcgcccctgatcttgactttgg

SEQ ID NO: 2394076 - DNA, 25 bp, Homo sapien
tgactttggtagctgggttaactct

SEQ ID NO: 2394077 - DNA, 25 bp, Homo sapien
ccggatgaggttaaattcggccttg

SEQ ID NO: 2394078 - DNA, 25 bp, Homo sapien
gtgctggacatagtttttggcatag

SEQ ID NO: 2394079 - DNA, 25 bp, Homo sapien
tgtgcggtgctggacatagtttttg

SEQ ID NO: 2394080 - DNA, 25 bp, Homo sapien
tcataagcatatgcggagaggcgca

SEQ ID NO: 2394081 - DNA, 25 bp, Homo sapien
tctgtcagctcataagcatatgcgg

SEQ ID NO: 2394082 - DNA, 25 bp, Homo sapien
ctgtctgtcagctcataagcatatg

SEQ ID NO: 2394083 - DNA, 25 bp, Homo sapien
tcagctcataagcatatgcggagag

SEQ ID NO: 2394084 - DNA, 25 bp, Homo sapien
ctctccacgtgtggcggtggacggg

SEQ ID NO: 2394085 - DNA, 25 bp, Homo sapien
ccacgtgtggcggtggacgggcaga

SEQ ID NO: 2394086 - DNA, 25 bp, Homo sapien
tgtggcggtggacgggcagatggcc

SEQ ID NO: 2394087 - DNA, 25 bp, Homo sapien
tggacgggcagatggcccttctcct

SEQ ID NO: 2394088 - DNA, 25 bp, Homo sapien
atactagggaattgtgcagagaggt

SEQ ID NO: 2394089 - DNA, 25 bp, Homo sapien
cagcattgtgcttgatactagggaa

SEQ ID NO: 2394090 - DNA, 25 bp, Homo sapien
ttccctccttcactcgggctcccac

SEQ ID NO: 2394091 - DNA, 25 bp, Homo sapien
ggctcccacaatccatatatgtctg

SEQ ID NO: 2394092 - DNA, 25 bp, Homo sapien
ggagctggctttccgcttatcttaa

SEQ ID NO: 2394093 - DNA, 25 bp, Homo sapien
ttggatttgcctcggccccttctgg

SEQ ID NO: 2394094 - DNA, 25 bp, Homo sapien
tttacggtccagagcacagacggca

SEQ ID NO: 2394095 - DNA, 25 bp, Homo sapien
aaagcaagccgcctcccggagatgg

SEQ ID NO: 2394096 - DNA, 25 bp, Homo sapien
tgcaaacaggatgggtcacagtctc

SEQ ID NO: 2394097 - DNA, 25 bp, Homo sapien
ccagcagctttcaacggagtaacct

SEQ ID NO: 2394098 - DNA, 25 bp, Homo sapien
atgttgcaaacaggatgggtcacag

SEQ ID NO: 2394099 - DNA, 25 bp, Homo sapien
gagtaacctgaattgccatgcacat

SEQ ID NO: 2394100 - DNA, 25 bp, Homo sapien
ttaaggcccgctgtcaggtggcctg

SEQ ID NO: 2394101 - DNA, 25 bp, Homo sapien
gatgctggcacccaagaaagtggac

SEQ ID NO: 2394102 - DNA, 25 bp, Homo sapien
caagaaagtggacttaaggcccgct

SEQ ID NO: 2394103 - DNA, 25 bp, Homo sapien
gtttgagaagtagaaagatgctggc

SEQ ID NO: 2394104 - DNA, 25 bp, Homo sapien
cctgcgccctcagaacgtgtgggaa

SEQ ID NO: 2394105 - DNA, 25 bp, Homo sapien
ggtccttagacttttcactgatgag

SEQ ID NO: 2394106 - DNA, 25 bp, Homo sapien
gcgtttgctaaccaatcgagctgga

SEQ ID NO: 2394107 - DNA, 25 bp, Homo sapien
gtctcaatcaggacagaccaccgtg

SEQ ID NO: 2394108 - DNA, 25 bp, Homo sapien
cattgggcggaagtctgtgtgcaca

SEQ ID NO: 2394109 - DNA, 25 bp, Homo sapien
gcaggtgtcacggtgcaagtctccc

SEQ ID NO: 2394110 - DNA, 25 bp, Homo sapien
tctttactcactctgcgcttggccg

SEQ ID NO: 2394111 - DNA, 25 bp, Homo sapien
cagagtgggtgttccttcgagcccc

SEQ ID NO: 2394112 - DNA, 25 bp, Homo sapien
gagtagatgtccaggtccaatggga

SEQ ID NO: 2394113 - DNA, 25 bp, Homo sapien
tccaatgggacagatgacggtgagc

SEQ ID NO: 2394114 - DNA, 25 bp, Homo sapien
gaacgactgaacattggccaaggag

SEQ ID NO: 2394115 - DNA, 25 bp, Homo sapien
tcagtacctgctaggaagtagtggc

SEQ ID NO: 2394116 - DNA, 25 bp, Homo sapien
gggctggggctctcgtgcgaagcgg

SEQ ID NO: 2394117 - DNA, 25 bp, Homo sapien
tctcgtgcgaagcgggtccccgctg

SEQ ID NO: 2394118 - DNA, 25 bp, Homo sapien
tgcgaagcgggtccccgctggacct

SEQ ID NO: 2394119 - DNA, 25 bp, Homo sapien
gggctctcgtgcgaagcgggtcccc

SEQ ID NO: 2394120 - DNA, 25 bp, Homo sapien
cctggtaaacggtgtgaagatattg

SEQ ID NO: 2394121 - DNA, 25 bp, Homo sapien
ggctggttgcgcatcctggtaaacg

SEQ ID NO: 2394122 - DNA, 25 bp, Homo sapien
cgcatcctggtaaacggtgtgaaga

SEQ ID NO: 2394123 - DNA, 25 bp, Homo sapien
tcttaacaggctggttgcgcatcct

SEQ ID NO: 2394124 - DNA, 25 bp, Homo sapien
cccctgcctgaaatccttgaagagg

SEQ ID NO: 2394125 - DNA, 25 bp, Homo sapien
tgaaatccttgaagaggggcccgga

SEQ ID NO: 2394126 - DNA, 25 bp, Homo sapien
tgcccctgcctgaaatccttgaaga

SEQ ID NO: 2394127 - DNA, 25 bp, Homo sapien
gcccggagtggcagactctgagacc

SEQ ID NO: 2394128 - DNA, 25 bp, Homo sapien
ctttggccgtgcacaaggtgaactt

SEQ ID NO: 2394129 - DNA, 25 bp, Homo sapien
ccacattgggcccttctggctgtca

SEQ ID NO: 2394130 - DNA, 25 bp, Homo sapien
caggcgcttcgtatagcatggagaa

SEQ ID NO: 2394131 - DNA, 25 bp, Homo sapien
cacaaggtgaacttcccaaaacaga

SEQ ID NO: 2394132 - DNA, 25 bp, Homo sapien
ggaggtggtcaacacacccccaggc

SEQ ID NO: 2394133 - DNA, 25 bp, Homo sapien
ctgagggggaggtggtcaacacacc

SEQ ID NO: 2394134 - DNA, 25 bp, Homo sapien
aggtggtcaacacacccccaggcgt

SEQ ID NO: 2394135 - DNA, 25 bp, Homo sapien
caggctggctctggcagggggcgtg

SEQ ID NO: 2394136 - DNA, 25 bp, Homo sapien
tctccacacgggcatgagattccac

SEQ ID NO: 2394137 - DNA, 25 bp, Homo sapien
gtgatctccacacgggcatgagatt

SEQ ID NO: 2394138 - DNA, 25 bp, Homo sapien
ccacaccctgtgtgaaggctccgag

SEQ ID NO: 2394139 - DNA, 25 bp, Homo sapien
gggcatgagattccacaccctgtgt

SEQ ID NO: 2394140 - DNA, 25 bp, Homo sapien
aggcttctgcaccacgcacatgtgc

SEQ ID NO: 2394141 - DNA, 25 bp, Homo sapien
gctgttgccaggctcgcttgctgcc

SEQ ID NO: 2394142 - DNA, 25 bp, Homo sapien
gcattggcacctgagacgatgggcc

SEQ ID NO: 2394143 - DNA, 25 bp, Homo sapien
cgatgggccgggctgttgccaggct

SEQ ID NO: 2394144 - DNA, 25 bp, Homo sapien
gcccagatgccagattccgttcaac

SEQ ID NO: 2394145 - DNA, 25 bp, Homo sapien
ctggcccagatgccagattccgttc

SEQ ID NO: 2394146 - DNA, 25 bp, Homo sapien
tggcccagatgccagattccgttca

SEQ ID NO: 2394147 - DNA, 25 bp, Homo sapien
ggcccagatgccagattccgttcaa

SEQ ID NO: 2394148 - DNA, 25 bp, Homo sapien
taactgcaagcgaatgtactgacgg

SEQ ID NO: 2394149 - DNA, 25 bp, Homo sapien
gacaacagccattattgctgaccag

SEQ ID NO: 2394150 - DNA, 25 bp, Homo sapien
ctatcggatggtgccctgagggaca

SEQ ID NO: 2394151 - DNA, 25 bp, Homo sapien
ggtgccgaagctgctgctatcggat

SEQ ID NO: 2394152 - DNA, 25 bp, Homo sapien
gcttttgccctatacaggactggtg

SEQ ID NO: 2394153 - DNA, 25 bp, Homo sapien
tgtgtgggatcccagtacctgttgc

SEQ ID NO: 2394154 - DNA, 25 bp, Homo sapien
gactccagccattgtgcattcctag

SEQ ID NO: 2394155 - DNA, 25 bp, Homo sapien
tgatgactttccacaggcatgtcct

SEQ ID NO: 2394156 - DNA, 25 bp, Homo sapien
tggcccaacccaacacatggggctg

SEQ ID NO: 2394157 - DNA, 25 bp, Homo sapien
gctggcccaacccaacacatggggc

SEQ ID NO: 2394158 - DNA, 25 bp, Homo sapien
ggcccaacccaacacatggggctgg

SEQ ID NO: 2394159 - DNA, 25 bp, Homo sapien
ggctggcccaacccaacacatgggg

SEQ ID NO: 2394160 - DNA, 25 bp, Homo sapien
gacaggtcaaaccatagccctccta

SEQ ID NO: 2394161 - DNA, 25 bp, Homo sapien
ggcccagcacgctccctctttctca

SEQ ID NO: 2394162 - DNA, 25 bp, Homo sapien
ggcagacaggtcaaaccatagccct

SEQ ID NO: 2394163 - DNA, 25 bp, Homo sapien
cagggcagacaggtcaaaccatagc

SEQ ID NO: 2394164 - DNA, 25 bp, Homo sapien
agttttcgatgatctgcacgaagcc

SEQ ID NO: 2394165 - DNA, 25 bp, Homo sapien
gagtcacgatcagttttcgatgatc

SEQ ID NO: 2394166 - DNA, 25 bp, Homo sapien
gatcagttttcgatgatctgcacga

SEQ ID NO: 2394167 - DNA, 25 bp, Homo sapien
cacgatcagttttcgatgatctgca

SEQ ID NO: 2394168 - DNA, 25 bp, Homo sapien
tcctgtgtacgggagcaagcacacc

SEQ ID NO: 2394169 - DNA, 25 bp, Homo sapien
tacctacccttcatgagactgccag

SEQ ID NO: 2394170 - DNA, 25 bp, Homo sapien
tcccgtgttatgctcaaggtgccca

SEQ ID NO: 2394171 - DNA, 25 bp, Homo sapien
aaaaatgtcgctggagcctcggtgc

SEQ ID NO: 2394172 - DNA, 25 bp, Homo sapien
gtgggccgtacccacttgtctctca

SEQ ID NO: 2394173 - DNA, 25 bp, Homo sapien
tgcctgtgggccgtacccacttgtc

SEQ ID NO: 2394174 - DNA, 25 bp, Homo sapien
cttgcgaatctggatgtagagggca

SEQ ID NO: 2394175 - DNA, 25 bp, Homo sapien
aggtgcctgtgggccgtacccactt

SEQ ID NO: 2394176 - DNA, 25 bp, Homo sapien
cagcttaagcaagtggctgtcacag

SEQ ID NO: 2394177 - DNA, 25 bp, Homo sapien
tggctgtcacagcccctccacccac

SEQ ID NO: 2394178 - DNA, 25 bp, Homo sapien
aagtggctgtcacagcccctccacc

SEQ ID NO: 2394179 - DNA, 25 bp, Homo sapien
agcttaagcaagtggctgtcacagc

SEQ ID NO: 2394180 - DNA, 25 bp, Homo sapien
taggtgttatgcggcatgccctctt

SEQ ID NO: 2394181 - DNA, 25 bp, Homo sapien
gtgttatgcggcatgccctcttccc

SEQ ID NO: 2394182 - DNA, 25 bp, Homo sapien
gtaggtgttatgcggcatgccctct

SEQ ID NO: 2394183 - DNA, 25 bp, Homo sapien
ggtgttatgcggcatgccctcttcc

SEQ ID NO: 2394184 - DNA, 25 bp, Homo sapien
atgggttgatgattttcctgtgcac

SEQ ID NO: 2394185 - DNA, 25 bp, Homo sapien
tgggttgatgattttcctgtgcact

SEQ ID NO: 2394186 - DNA, 25 bp, Homo sapien
ctcatgggttgatgattttcctgtg

SEQ ID NO: 2394187 - DNA, 25 bp, Homo sapien
catgggttgatgattttcctgtgca

SEQ ID NO: 2394188 - DNA, 25 bp, Homo sapien
atctctctcctgacagaagacgcga

SEQ ID NO: 2394189 - DNA, 25 bp, Homo sapien
ccgccggatccctgagtaagcatca

SEQ ID NO: 2394190 - DNA, 25 bp, Homo sapien
agacgcgaagaaaccagcacggaat

SEQ ID NO: 2394191 - DNA, 25 bp, Homo sapien
ccggatccctgagtaagcatcagca

SEQ ID NO: 2394192 - DNA, 25 bp, Homo sapien
gtgctttttttcggcagctgcctgg

SEQ ID NO: 2394193 - DNA, 25 bp, Homo sapien
gggtgtggcactcggccacacgtgg

SEQ ID NO: 2394194 - DNA, 25 bp, Homo sapien
ctttttttcggcagctgcctgggtg

SEQ ID NO: 2394195 - DNA, 25 bp, Homo sapien
ggtgtggcactcggccacacgtggg

SEQ ID NO: 2394196 - DNA, 25 bp, Homo sapien
tggcgacgatgactgcgagcccttt

SEQ ID NO: 2394197 - DNA, 25 bp, Homo sapien
gtgtctgcctgctggcgacgatgac

SEQ ID NO: 2394198 - DNA, 25 bp, Homo sapien
tttctcaagacttcggcccacctgg

SEQ ID NO: 2394199 - DNA, 25 bp, Homo sapien
cgatgactgcgagccctttctcaag

SEQ ID NO: 2394200 - DNA, 25 bp, Homo sapien
gaccttagggctcagggcatctgca

SEQ ID NO: 2394201 - DNA, 25 bp, Homo sapien
ggttgagcgccatcaggagccattc

SEQ ID NO: 2394202 - DNA, 25 bp, Homo sapien
agttccatccaccttgaccttaggg

SEQ ID NO: 2394203 - DNA, 25 bp, Homo sapien
gagaaagcgtccactcacctgaaag

SEQ ID NO: 2394204 - DNA, 25 bp, Homo sapien
agcacatgggacagaagacctgccc

SEQ ID NO: 2394205 - DNA, 25 bp, Homo sapien
tgccccagttcccagtggtgactcc

SEQ ID NO: 2394206 - DNA, 25 bp, Homo sapien
gccaggcttggtcggagtccataca

SEQ ID NO: 2394207 - DNA, 25 bp, Homo sapien
ggaggtgcaaaagagcggcaatgct

SEQ ID NO: 2394208 - DNA, 25 bp, Homo sapien
ggcaggccaccctgatgcccatcgc

SEQ ID NO: 2394209 - DNA, 25 bp, Homo sapien
ccaggcaggccaccctgatgcccat

SEQ ID NO: 2394210 - DNA, 25 bp, Homo sapien
ctccaggcaggccaccctgatgccc

SEQ ID NO: 2394211 - DNA, 25 bp, Homo sapien
aggccaccctgatgcccatcgcccc

SEQ ID NO: 2394212 - DNA, 25 bp, Homo sapien
gagtagcaggtagcttggtgaggca

SEQ ID NO: 2394213 - DNA, 25 bp, Homo sapien
gcaagggaagggcaggtgtcatggc

SEQ ID NO: 2394214 - DNA, 25 bp, Homo sapien
aagggaagggcaggtgtcatggctt

SEQ ID NO: 2394215 - DNA, 25 bp, Homo sapien
ctgcaagggaagggcaggtgtcatg

SEQ ID NO: 2394216 - DNA, 25 bp, Homo sapien
gggaagggcaggtgtcatggctttg

SEQ ID NO: 2394217 - DNA, 25 bp, Homo sapien
gctggctgcagagcgccaccactgc

SEQ ID NO: 2394218 - DNA, 25 bp, Homo sapien
gctgcagagcgccaccactgccttg

SEQ ID NO: 2394219 - DNA, 25 bp, Homo sapien
ggctggctgcagagcgccaccactg

SEQ ID NO: 2394220 - DNA, 25 bp, Homo sapien
tggctgcagagcgccaccactgcct

SEQ ID NO: 2394221 - DNA, 25 bp, Homo sapien
gctgcgctgccagtcgctgagctat

SEQ ID NO: 2394222 - DNA, 25 bp, Homo sapien
gagctattgcatccgtagcacttga

SEQ ID NO: 2394223 - DNA, 25 bp, Homo sapien
aggtacgtgctgcgctgccagtcgc

SEQ ID NO: 2394224 - DNA, 25 bp, Homo sapien
acgtgctgcgctgccagtcgctgag

SEQ ID NO: 2394225 - DNA, 25 bp, Homo sapien
cagtcacccaggtcctttaaggaga

SEQ ID NO: 2394226 - DNA, 25 bp, Homo sapien
ctttaaggagattatgctgggtgtc

SEQ ID NO: 2394227 - DNA, 25 bp, Homo sapien
taaggagattatgctgggtgtcctg

SEQ ID NO: 2394228 - DNA, 25 bp, Homo sapien
tcacccaggtcctttaaggagatta

SEQ ID NO: 2394229 - DNA, 25 bp, Homo sapien
tagcctgcccgcagttcttggtcag

SEQ ID NO: 2394230 - DNA, 25 bp, Homo sapien
tgtggctctagcctgcccgcagttc

SEQ ID NO: 2394231 - DNA, 25 bp, Homo sapien
tggctctagcctgcccgcagttctt

SEQ ID NO: 2394232 - DNA, 25 bp, Homo sapien
ctgctgcagccggtctactgaggcg

SEQ ID NO: 2394233 - DNA, 25 bp, Homo sapien
caccagctcaaccagataataagtg

SEQ ID NO: 2394234 - DNA, 25 bp, Homo sapien
cctctggtaacacacatgggccggg

SEQ ID NO: 2394235 - DNA, 25 bp, Homo sapien
ctcaaccagataataagtgacaggc

SEQ ID NO: 2394236 - DNA, 25 bp, Homo sapien
ctggtaacacacatgggccgggact

SEQ ID NO: 2394237 - DNA, 25 bp, Homo sapien
agctctggacatcccagccttgctg

SEQ ID NO: 2394238 - DNA, 25 bp, Homo sapien
tgctggcagcgagtttcctactcat

SEQ ID NO: 2394239 - DNA, 25 bp, Homo sapien
tggctgctggcagcgagtttcctac

SEQ ID NO: 2394240 - DNA, 25 bp, Homo sapien
agcagctctggacatcccagccttg

SEQ ID NO: 2394241 - DNA, 25 bp, Homo sapien
agtgtggctgcttccacccgcaccc

SEQ ID NO: 2394242 - DNA, 25 bp, Homo sapien
tcccactgtggtgcacaggccgact

SEQ ID NO: 2394243 - DNA, 25 bp, Homo sapien
tttcccgctggctccaaattgccct

SEQ ID NO: 2394244 - DNA, 25 bp, Homo sapien
ggagccgcctggcccatcagacaga

SEQ ID NO: 2394245 - DNA, 25 bp, Homo sapien
agtcacggctcctggtgtgacagcc

SEQ ID NO: 2394246 - DNA, 25 bp, Homo sapien
tcacggctcctggtgtgacagcccc

SEQ ID NO: 2394247 - DNA, 25 bp, Homo sapien
acggctcctggtgtgacagccccag

SEQ ID NO: 2394248 - DNA, 25 bp, Homo sapien
gtcacggctcctggtgtgacagccc

SEQ ID NO: 2394249 - DNA, 25 bp, Homo sapien
agatattatctttgatcctggaccc

SEQ ID NO: 2394250 - DNA, 25 bp, Homo sapien
ctgagcccagatattatctttgatc

SEQ ID NO: 2394251 - DNA, 25 bp, Homo sapien
gcccagatattatctttgatcctgg

SEQ ID NO: 2394252 - DNA, 25 bp, Homo sapien
ccagatattatctttgatcctggac

SEQ ID NO: 2394253 - DNA, 25 bp, Homo sapien
ggtcaccatgacgagagtacccgct

SEQ ID NO: 2394254 - DNA, 25 bp, Homo sapien
atgacgagagtacccgctcagatga

SEQ ID NO: 2394255 - DNA, 25 bp, Homo sapien
accatgacgagagtacccgctcaga

SEQ ID NO: 2394256 - DNA, 25 bp, Homo sapien
gccggtcaccatgacgagagtaccc

SEQ ID NO: 2394257 - DNA, 25 bp, Homo sapien
gctacagtagatctagagtccctga

SEQ ID NO: 2394258 - DNA, 25 bp, Homo sapien
caagttgtgcggtgcctgggctaca

SEQ ID NO: 2394259 - DNA, 25 bp, Homo sapien
ctgggctacagtagatctagagtcc

SEQ ID NO: 2394260 - DNA, 25 bp, Homo sapien
cccaggaagcaagttgtgcggtgcc

SEQ ID NO: 2394261 - DNA, 25 bp, Homo sapien
cagaggccacgttcagtggggtgat

SEQ ID NO: 2394262 - DNA, 25 bp, Homo sapien
tgtttttcctcaaatggcaagccca

SEQ ID NO: 2394263 - DNA, 25 bp, Homo sapien
gtccgaggtgaagggctttctagct

SEQ ID NO: 2394264 - DNA, 25 bp, Homo sapien
tggggtgatgctgtccgaggtgaag

SEQ ID NO: 2394265 - DNA, 25 bp, Homo sapien
ctccctagatcctgaagtgatgctc

SEQ ID NO: 2394266 - DNA, 25 bp, Homo sapien
aagaggtgagcagaaggccccacca

SEQ ID NO: 2394267 - DNA, 25 bp, Homo sapien
agaggtgagcagaaggccccaccag

SEQ ID NO: 2394268 - DNA, 25 bp, Homo sapien
ccaaactcctaggtcatggctcttc

SEQ ID NO: 2394269 - DNA, 25 bp, Homo sapien
atagcatctaatgactgtcttttca

SEQ ID NO: 2394270 - DNA, 25 bp, Homo sapien
catcccaaactcctaggtcatggct

SEQ ID NO: 2394271 - DNA, 25 bp, Homo sapien
actttttaatagcatctaatgactg

SEQ ID NO: 2394272 - DNA, 25 bp, Homo sapien
tctaagactctgtaaagggtcttct

SEQ ID NO: 2394273 - DNA, 25 bp, Homo sapien
taagactctgtaaagggtcttctcc

SEQ ID NO: 2394274 - DNA, 25 bp, Homo sapien
caggaaagatgctcaaaactcagac

SEQ ID NO: 2394275 - DNA, 25 bp, Homo sapien
gatgctcaaaactcagacatatccc

SEQ ID NO: 2394276 - DNA, 25 bp, Homo sapien
ggaaacctggctgccttatctgagg

SEQ ID NO: 2394277 - DNA, 25 bp, Homo sapien
ttgtccagataatggccccaagcgg

SEQ ID NO: 2394278 - DNA, 25 bp, Homo sapien
gcaaatgggcttcggttggaaacaa

SEQ ID NO: 2394279 - DNA, 25 bp, Homo sapien
gggaaacaggctcctcgaacttcag

SEQ ID NO: 2394280 - DNA, 25 bp, Homo sapien
tcagtgctcgggaaaggggatgtgt

SEQ ID NO: 2394281 - DNA, 25 bp, Homo sapien
aaggggatgtgtgtgcagaattcac

SEQ ID NO: 2394282 - DNA, 25 bp, Homo sapien
ggatgtgtgtgcagaattcactcat

SEQ ID NO: 2394283 - DNA, 25 bp, Homo sapien
ggggatgtgtgtgcagaattcactc

SEQ ID NO: 2394284 - DNA, 25 bp, Homo sapien
ccagaagcagaagttgaagacaagg

SEQ ID NO: 2394285 - DNA, 25 bp, Homo sapien
gaagcagaagttgaagacaaggagt

SEQ ID NO: 2394286 - DNA, 25 bp, Homo sapien
cagaagcagaagttgaagacaagga

SEQ ID NO: 2394287 - DNA, 25 bp, Homo sapien
agcagaagttgaagacaaggagtaa

SEQ ID NO: 2394288 - DNA, 25 bp, Homo sapien
tggtcttgtaatgggccatggctgc

SEQ ID NO: 2394289 - DNA, 25 bp, Homo sapien
cctgcttggtcttgtaatgggccat

SEQ ID NO: 2394290 - DNA, 25 bp, Homo sapien
cttggtcttgtaatgggccatggct

SEQ ID NO: 2394291 - DNA, 25 bp, Homo sapien
tgcttggtcttgtaatgggccatgg

SEQ ID NO: 2394292 - DNA, 25 bp, Homo sapien
catggggatcatagggatgcaccat

SEQ ID NO: 2394293 - DNA, 25 bp, Homo sapien
tgtccatgaaggatacatggggatc

SEQ ID NO: 2394294 - DNA, 25 bp, Homo sapien
catgaaggatacatggggatcatag

SEQ ID NO: 2394295 - DNA, 25 bp, Homo sapien
tccatgaaggatacatggggatcat

SEQ ID NO: 2394296 - DNA, 25 bp, Homo sapien
gaggtgaatattttcaaatgagaag

SEQ ID NO: 2394297 - DNA, 25 bp, Homo sapien
ggaggtgaatattttcaaatgagaa

SEQ ID NO: 2394298 - DNA, 25 bp, Homo sapien
ctggaggtgaatattttcaaatgag

SEQ ID NO: 2394299 - DNA, 25 bp, Homo sapien
aggtgaatattttcaaatgagaagg

SEQ ID NO: 2394300 - DNA, 25 bp, Homo sapien
taggacttcttcagacccttgaaat

SEQ ID NO: 2394301 - DNA, 25 bp, Homo sapien
tcttctgaagcggagaagtaggact

SEQ ID NO: 2394302 - DNA, 25 bp, Homo sapien
gagaagtaggacttcttcagaccct

SEQ ID NO: 2394303 - DNA, 25 bp, Homo sapien
tctgaagcggagaagtaggacttct

SEQ ID NO: 2394304 - DNA, 25 bp, Homo sapien
caagaccccagcgtgctgaggttca

SEQ ID NO: 2394305 - DNA, 25 bp, Homo sapien
gaccccagcgtgctgaggttcagca

SEQ ID NO: 2394306 - DNA, 25 bp, Homo sapien
cagcagcaacaggagtgcccaagac

SEQ ID NO: 2394307 - DNA, 25 bp, Homo sapien
aacaggagtgcccaagaccccagcg

SEQ ID NO: 2394308 - DNA, 25 bp, Homo sapien
actgggaaatgactctggttggatg

SEQ ID NO: 2394309 - DNA, 25 bp, Homo sapien
cactgggaaatgactctggttggat

SEQ ID NO: 2394310 - DNA, 25 bp, Homo sapien
taacgatactaagccatcagaagct

SEQ ID NO: 2394311 - DNA, 25 bp, Homo sapien
tcagaagctaatgagcacacagcgc

SEQ ID NO: 2394312 - DNA, 25 bp, Homo sapien
tggctgtaaccaaggataacgatac

SEQ ID NO: 2394313 - DNA, 25 bp, Homo sapien
tccattctcaagtcgatcaagtctg

SEQ ID NO: 2394314 - DNA, 25 bp, Homo sapien
taagcagggccatgcgcttgcacat

SEQ ID NO: 2394315 - DNA, 25 bp, Homo sapien
ttcagctctaagcagggccatgcgc

SEQ ID NO: 2394316 - DNA, 25 bp, Homo sapien
ggacacttcagctctaagcagggcc

SEQ ID NO: 2394317 - DNA, 25 bp, Homo sapien
catgcgcttgcacatgagcggtgag

SEQ ID NO: 2394318 - DNA, 25 bp, Homo sapien
ctggaagccggcatgtaacttagat

SEQ ID NO: 2394319 - DNA, 25 bp, Homo sapien
gatgaaccccaagctgctggtgtga

SEQ ID NO: 2394320 - DNA, 25 bp, Homo sapien
cccaagctgctggtgtgagggatcc

SEQ ID NO: 2394321 - DNA, 25 bp, Homo sapien
catgtaacttagatgaaccccaagc

SEQ ID NO: 2394322 - DNA, 25 bp, Homo sapien
cggctgcaaacaggagggtgttcct

SEQ ID NO: 2394323 - DNA, 25 bp, Homo sapien
cttggctgggaacgcttcttcatct

SEQ ID NO: 2394324 - DNA, 25 bp, Homo sapien
gggcataagcccactggttcatctg

SEQ ID NO: 2394325 - DNA, 25 bp, Homo sapien
ggtgttccttactgcttcatttggc

SEQ ID NO: 2394326 - DNA, 25 bp, Homo sapien
tccgccacgcggtgatggaagctga

SEQ ID NO: 2394327 - DNA, 25 bp, Homo sapien
acacgggctccgccacgcggtgatg

SEQ ID NO: 2394328 - DNA, 25 bp, Homo sapien
ccggacacgggctccgccacgcggt

SEQ ID NO: 2394329 - DNA, 25 bp, Homo sapien
cgggctccgccacgcggtgatggaa

SEQ ID NO: 2394330 - DNA, 25 bp, Homo sapien
cggagagcggcggctcgcagggcca

SEQ ID NO: 2394331 - DNA, 25 bp, Homo sapien
agcggcggctcgcagggccacccag

SEQ ID NO: 2394332 - DNA, 25 bp, Homo sapien
ccacccagcggcacacggcccgcgc

SEQ ID NO: 2394333 - DNA, 25 bp, Homo sapien
cacccagcggcacacggcccgcgcc

SEQ ID NO: 2394334 - DNA, 25 bp, Homo sapien
ctgcggtgcccagtgcccgccgtcc

SEQ ID NO: 2394335 - DNA, 25 bp, Homo sapien
tgcggtgcccagtgcccgccgtcct

SEQ ID NO: 2394336 - DNA, 25 bp, Homo sapien
ggtgcccagtgcccgccgtcctcac

SEQ ID NO: 2394337 - DNA, 25 bp, Homo sapien
gcggtgcccagtgcccgccgtcctc

SEQ ID NO: 2394338 - DNA, 25 bp, Homo sapien
tcagagcacgcggagcgaattaagt

SEQ ID NO: 2394339 - DNA, 25 bp, Homo sapien
gggcgggccgcctctttgttagcaa

SEQ ID NO: 2394340 - DNA, 25 bp, Homo sapien
tctgtgattcagagcacgcggagcg

SEQ ID NO: 2394341 - DNA, 25 bp, Homo sapien
tactgtgcgactgtctgcgggaaac

SEQ ID NO: 2394342 - DNA, 25 bp, Homo sapien
cccagagcttgctgtgcgcggtgca

SEQ ID NO: 2394343 - DNA, 25 bp, Homo sapien
ctgggaaaggcttcgcacagggcca

SEQ ID NO: 2394344 - DNA, 25 bp, Homo sapien
aaaggcttcgcacagggccatgcgg

SEQ ID NO: 2394345 - DNA, 25 bp, Homo sapien
gcagaagctgccgcgaaggagtccc

SEQ ID NO: 2394346 - DNA, 25 bp, Homo sapien
ttgggtctgtgctccatttgacaga

SEQ ID NO: 2394347 - DNA, 25 bp, Homo sapien
ctttgggtctgtgctccatttgaca

SEQ ID NO: 2394348 - DNA, 25 bp, Homo sapien
ccggttcttcactgtcatgtgactc

SEQ ID NO: 2394349 - DNA, 25 bp, Homo sapien
tcttcactgtcatgtgactctttgg

SEQ ID NO: 2394350 - DNA, 25 bp, Homo sapien
aagcactagagcaacactcatctac

SEQ ID NO: 2394351 - DNA, 25 bp, Homo sapien
actagagcaacactcatctactgcc

SEQ ID NO: 2394352 - DNA, 25 bp, Homo sapien
gcactagagcaacactcatctactg

SEQ ID NO: 2394353 - DNA, 25 bp, Homo sapien
ctaagcactagagcaacactcatct

SEQ ID NO: 2394354 - DNA, 25 bp, Homo sapien
tcaggtgcattccagtaggagcctg

SEQ ID NO: 2394355 - DNA, 25 bp, Homo sapien
tcactatgctgctcatccaaccatc

SEQ ID NO: 2394356 - DNA, 25 bp, Homo sapien
ctgcgtccagctcaggagtggtgat

SEQ ID NO: 2394357 - DNA, 25 bp, Homo sapien
gagccctcagacattgcacagtgaa

SEQ ID NO: 2394358 - DNA, 25 bp, Homo sapien
gaaccacactgggttctaaatatgc

SEQ ID NO: 2394359 - DNA, 25 bp, Homo sapien
cactgggttctaaatatgcagtggg

SEQ ID NO: 2394360 - DNA, 25 bp, Homo sapien
atctggcaatgaaccacactgggtt

SEQ ID NO: 2394361 - DNA, 25 bp, Homo sapien
ctgagttcatctgatagatctggca

SEQ ID NO: 2394362 - DNA, 25 bp, Homo sapien
attgtgctctccctcacagtgaagt

SEQ ID NO: 2394363 - DNA, 25 bp, Homo sapien
gctctccctcacagtgaagttaggg

SEQ ID NO: 2394364 - DNA, 25 bp, Homo sapien
tcacagtgaagttagggacaaccat

SEQ ID NO: 2394365 - DNA, 25 bp, Homo sapien
tccctcacagtgaagttagggacaa

SEQ ID NO: 2394366 - DNA, 25 bp, Homo sapien
cactccagtgaggtttatgggatta

SEQ ID NO: 2394367 - DNA, 25 bp, Homo sapien
ccagtgaggtttatgggattatttt

SEQ ID NO: 2394368 - DNA, 25 bp, Homo sapien
cactcgtacttcactccagtgaggt

SEQ ID NO: 2394369 - DNA, 25 bp, Homo sapien
tttcccattattgaagggactttga

SEQ ID NO: 2394370 - DNA, 25 bp, Homo sapien
cctggctcccctcccggttgactgc

SEQ ID NO: 2394371 - DNA, 25 bp, Homo sapien
ggctcccctcccggttgactgccat

SEQ ID NO: 2394372 - DNA, 25 bp, Homo sapien
tggctcccctcccggttgactgcca

SEQ ID NO: 2394373 - DNA, 25 bp, Homo sapien
ctggctcccctcccggttgactgcc

SEQ ID NO: 2394374 - DNA, 25 bp, Homo sapien
gtctcctcccttacaaccaagttga

SEQ ID NO: 2394375 - DNA, 25 bp, Homo sapien
ggtcagtatgaaagggtcgtaattg

SEQ ID NO: 2394376 - DNA, 25 bp, Homo sapien
ggtcgtaattgattgagcaagtggg

SEQ ID NO: 2394377 - DNA, 25 bp, Homo sapien
atgcaccagtaatcagaactgaaca

SEQ ID NO: 2394378 - DNA, 25 bp, Homo sapien
tgtttgcaatggtggagtaaacacc

SEQ ID NO: 2394379 - DNA, 25 bp, Homo sapien
gtggagtaaacaccaaggcgatatt

SEQ ID NO: 2394380 - DNA, 25 bp, Homo sapien
ccaaggcgatatttactgcggtcag

SEQ ID NO: 2394381 - DNA, 25 bp, Homo sapien
aaacaccaaggcgatatttactgcg

SEQ ID NO: 2394382 - DNA, 25 bp, Homo sapien
tctccagtcaaatccttattccttt

SEQ ID NO: 2394383 - DNA, 25 bp, Homo sapien
ttgcccccagtctgctctgagagtc

SEQ ID NO: 2394384 - DNA, 25 bp, Homo sapien
ctgtctctccagtcaaatccttatt

SEQ ID NO: 2394385 - DNA, 25 bp, Homo sapien
tgcttgcccccagtctgctctgaga

SEQ ID NO: 2394386 - DNA, 25 bp, Homo sapien
cagcaatctaggtgccccttgggat

SEQ ID NO: 2394387 - DNA, 25 bp, Homo sapien
tggcattacttctcggaccacaggc

SEQ ID NO: 2394388 - DNA, 25 bp, Homo sapien
tgagatcatggacatcaccggcttc

SEQ ID NO: 2394389 - DNA, 25 bp, Homo sapien
taaacaacttctgggctgtccaaaa

SEQ ID NO: 2394390 - DNA, 25 bp, Homo sapien
aacctccattctccgataggcccca

SEQ ID NO: 2394391 - DNA, 25 bp, Homo sapien
ggacaactgcctgaaagactctgtc

SEQ ID NO: 2394392 - DNA, 25 bp, Homo sapien
tcaggattacatgtgtaggttatac

SEQ ID NO: 2394393 - DNA, 25 bp, Homo sapien
tgaaagactctgtcccagataccct

SEQ ID NO: 2394394 - DNA, 25 bp, Homo sapien
taactgcaggcggatggaaaagaca

SEQ ID NO: 2394395 - DNA, 25 bp, Homo sapien
gaaaccagtctgttaagtcacacca

SEQ ID NO: 2394396 - DNA, 25 bp, Homo sapien
cttcaggctgaaagtggtagaaacc

SEQ ID NO: 2394397 - DNA, 25 bp, Homo sapien
tgtgttagacagacctggctagtcc

SEQ ID NO: 2394398 - DNA, 25 bp, Homo sapien
taaaactctagtggaggttcactgc

SEQ ID NO: 2394399 - DNA, 25 bp, Homo sapien
ctgggaggttggacttgcataaaac

SEQ ID NO: 2394400 - DNA, 25 bp, Homo sapien
ggttcactgcagcatagatggaaaa

SEQ ID NO: 2394401 - DNA, 25 bp, Homo sapien
aaatatcaagaaaggctataattgc

SEQ ID NO: 2394402 - DNA, 25 bp, Homo sapien
gtcgcacagacacccgagcagtctg

SEQ ID NO: 2394403 - DNA, 25 bp, Homo sapien
acagacacccgagcagtctgagaag

SEQ ID NO: 2394404 - DNA, 25 bp, Homo sapien
cagacacccgagcagtctgagaaga

SEQ ID NO: 2394405 - DNA, 25 bp, Homo sapien
gcacagacacccgagcagtctgaga

SEQ ID NO: 2394406 - DNA, 25 bp, Homo sapien
gtcaccatggcccttgtaagtaccc

SEQ ID NO: 2394407 - DNA, 25 bp, Homo sapien
tggcccttgtaagtacccacttcca

SEQ ID NO: 2394408 - DNA, 25 bp, Homo sapien
gagagaatttaataaggctgattgg

SEQ ID NO: 2394409 - DNA, 25 bp, Homo sapien
agaatttaataaggctgattggtca

SEQ ID NO: 2394410 - DNA, 25 bp, Homo sapien
aaatggcacctctttcgacctctgg

SEQ ID NO: 2394411 - DNA, 25 bp, Homo sapien
cacgctttgataggctccattggga

SEQ ID NO: 2394412 - DNA, 25 bp, Homo sapien
tcctcaagtgcgtgatccagggcga

SEQ ID NO: 2394413 - DNA, 25 bp, Homo sapien
ctttgtaaacccctgaactgatggc

SEQ ID NO: 2394414 - DNA, 25 bp, Homo sapien
attacagagtcccagcacaaggcag

SEQ ID NO: 2394415 - DNA, 25 bp, Homo sapien
cttttgtgtaggagaacggcccagg

SEQ ID NO: 2394416 - DNA, 25 bp, Homo sapien
gagatagacctccttacagtgtggg

SEQ ID NO: 2394417 - DNA, 25 bp, Homo sapien
tatgcgttttcaggtcgggttgccc

SEQ ID NO: 2394418 - DNA, 25 bp, Homo sapien
ttcctggagaaacggtgcgccgaga

SEQ ID NO: 2394419 - DNA, 25 bp, Homo sapien
agatcatcccttactcagtggcagg

SEQ ID NO: 2394420 - DNA, 25 bp, Homo sapien
tgtgtgaagatcatcccttactcag

SEQ ID NO: 2394421 - DNA, 25 bp, Homo sapien
catgtgtgtgaagatcatcccttac

SEQ ID NO: 2394422 - DNA, 25 bp, Homo sapien
tcaatttcaaaacaaacacgctccg

SEQ ID NO: 2394423 - DNA, 25 bp, Homo sapien
acgctccgggacttgaacgcagcgg

SEQ ID NO: 2394424 - DNA, 25 bp, Homo sapien
tctccttgagttagggcaaagcctg

SEQ ID NO: 2394425 - DNA, 25 bp, Homo sapien
tcagtagcgaatgctgtctccttga

SEQ ID NO: 2394426 - DNA, 25 bp, Homo sapien
tatgtgttcctaacgcctgtctctc

SEQ ID NO: 2394427 - DNA, 25 bp, Homo sapien
ttttgaatttgtgggcctgacacac

SEQ ID NO: 2394428 - DNA, 25 bp, Homo sapien
tgaacaaactcttgagcctaatggg

SEQ ID NO: 2394429 - DNA, 25 bp, Homo sapien
ttttcctattgcaagataattggct

SEQ ID NO: 2394430 - DNA, 25 bp, Homo sapien
accaggcatagttctctgaggatgg

SEQ ID NO: 2394431 - DNA, 25 bp, Homo sapien
tactttcagctgaagaatgtggtcc

SEQ ID NO: 2394432 - DNA, 25 bp, Homo sapien
tgtggtcccattattacaggggtta

SEQ ID NO: 2394433 - DNA, 25 bp, Homo sapien
ggaaccaggcatagttctctgagga

SEQ ID NO: 2394434 - DNA, 25 bp, Homo sapien
taaattccccgtcttcttggcgcta

SEQ ID NO: 2394435 - DNA, 25 bp, Homo sapien
tggtacagctaaggccaaattgggc

SEQ ID NO: 2394436 - DNA, 25 bp, Homo sapien
tgctcctaccgagagaaactgaggc

SEQ ID NO: 2394437 - DNA, 25 bp, Homo sapien
cacaggctgacatgacaatttggag

SEQ ID NO: 2394438 - DNA, 25 bp, Homo sapien
caagtggtggcctttcaagcctggg

SEQ ID NO: 2394439 - DNA, 25 bp, Homo sapien
tcccatagtcacattaaattcaagg

SEQ ID NO: 2394440 - DNA, 25 bp, Homo sapien
gattatagcccatcagaagtgtaga

SEQ ID NO: 2394441 - DNA, 25 bp, Homo sapien
ggctcagtcaaaggattccacaaat

SEQ ID NO: 2394442 - DNA, 25 bp, Homo sapien
tccagacatgcccatgggtgctgaa

SEQ ID NO: 2394443 - DNA, 25 bp, Homo sapien
ctccagggtagctccatgcctgtct

SEQ ID NO: 2394444 - DNA, 25 bp, Homo sapien
aattcgtgctgttgaaaatggagag

SEQ ID NO: 2394445 - DNA, 25 bp, Homo sapien
gtagctccatgcctgtcttccctta

SEQ ID NO: 2394446 - DNA, 25 bp, Homo sapien
tcaaggatctagactgttctgaata

SEQ ID NO: 2394447 - DNA, 25 bp, Homo sapien
caaggatctagactgttctgaatat

SEQ ID NO: 2394448 - DNA, 25 bp, Homo sapien
aaggatctagactgttctgaatatg

SEQ ID NO: 2394449 - DNA, 25 bp, Homo sapien
ggatctagactgttctgaatatgaa

SEQ ID NO: 2394450 - DNA, 25 bp, Homo sapien
gagcctctccaaatccatccgtact

SEQ ID NO: 2394451 - DNA, 25 bp, Homo sapien
ccagcaccagattgctgttggggtg

SEQ ID NO: 2394452 - DNA, 25 bp, Homo sapien
gacgtggtttagagaggggttgctc

SEQ ID NO: 2394453 - DNA, 25 bp, Homo sapien
gcattcgggctgcaagacgtggttt

SEQ ID NO: 2394454 - DNA, 25 bp, Homo sapien
tacataacacgtggagccttttttc

SEQ ID NO: 2394455 - DNA, 25 bp, Homo sapien
gaagatgtccaatataagcgggtca

SEQ ID NO: 2394456 - DNA, 25 bp, Homo sapien
ctgagtgtgccagcatcccacatgt

SEQ ID NO: 2394457 - DNA, 25 bp, Homo sapien
caatataagcgggtcagggtcaccc

SEQ ID NO: 2394458 - DNA, 25 bp, Homo sapien
gaaactttcgtgtagcagaccccat

SEQ ID NO: 2394459 - DNA, 25 bp, Homo sapien
ttcgtgtagcagaccccatactcct

SEQ ID NO: 2394460 - DNA, 25 bp, Homo sapien
aactttcgtgtagcagaccccatac

SEQ ID NO: 2394461 - DNA, 25 bp, Homo sapien
ctgaaactttcgtgtagcagacccc

SEQ ID NO: 2394462 - DNA, 25 bp, Homo sapien
cttgcctcctacatctaggggtcat

SEQ ID NO: 2394463 - DNA, 25 bp, Homo sapien
tcttgcctcctacatctaggggtca

SEQ ID NO: 2394464 - DNA, 25 bp, Homo sapien
tcaaacaaaggcgactactcggctc

SEQ ID NO: 2394465 - DNA, 25 bp, Homo sapien
tcaataagcctatgggaaaactccc

SEQ ID NO: 2394466 - DNA, 25 bp, Homo sapien
ggtcaagttctagagcaatcccctt

SEQ ID NO: 2394467 - DNA, 25 bp, Homo sapien
ccctgggctaatgtctggtggtact

SEQ ID NO: 2394468 - DNA, 25 bp, Homo sapien
ccaaaataggtgtatgagcaaggac

SEQ ID NO: 2394469 - DNA, 25 bp, Homo sapien
gatcactaacttcagatcctacggg

SEQ ID NO: 2394470 - DNA, 25 bp, Homo sapien
gcacaggacctgctctctgaaagag

SEQ ID NO: 2394471 - DNA, 25 bp, Homo sapien
ggcagccagcatgggtgtcaccaaa

SEQ ID NO: 2394472 - DNA, 25 bp, Homo sapien
gaagcacatttagatgacgaagtgg

SEQ ID NO: 2394473 - DNA, 25 bp, Homo sapien
cacatttagatgacgaagtggaggc

SEQ ID NO: 2394474 - DNA, 25 bp, Homo sapien
tgagaagcacatttagatgacgaag

SEQ ID NO: 2394475 - DNA, 25 bp, Homo sapien
ttagatgacgaagtggaggcccatg

SEQ ID NO: 2394476 - DNA, 25 bp, Homo sapien
gggtttctgatatcatgacaactgc

SEQ ID NO: 2394477 - DNA, 25 bp, Homo sapien
tggttagctccgttggatagagcat

SEQ ID NO: 2394478 - DNA, 25 bp, Homo sapien
ctccgtgggttgtaatgggtttctg

SEQ ID NO: 2394479 - DNA, 25 bp, Homo sapien
ctgctttttggccatggttggttag

SEQ ID NO: 2394480 - DNA, 25 bp, Homo sapien
tgggaataattccaaaggtggcttc

SEQ ID NO: 2394481 - DNA, 25 bp, Homo sapien
aattccaaaggtggcttcggagata

SEQ ID NO: 2394482 - DNA, 25 bp, Homo sapien
gaataattccaaaggtggcttcgga

SEQ ID NO: 2394483 - DNA, 25 bp, Homo sapien
tcacgtggccaaagagagaaggcac

SEQ ID NO: 2394484 - DNA, 25 bp, Homo sapien
tttctattgagtgggcctctggcaa

SEQ ID NO: 2394485 - DNA, 25 bp, Homo sapien
ctattgagtgggcctctggcaatgt

SEQ ID NO: 2394486 - DNA, 25 bp, Homo sapien
gtgtttctattgagtgggcctctgg

SEQ ID NO: 2394487 - DNA, 25 bp, Homo sapien
gtttctattgagtgggcctctggca

SEQ ID NO: 2394488 - DNA, 25 bp, Homo sapien
aagtatttcaggccattaacaaaag

SEQ ID NO: 2394489 - DNA, 25 bp, Homo sapien
tcagcacgtattgaaacttgggtgg

SEQ ID NO: 2394490 - DNA, 25 bp, Homo sapien
ctcagcacgtattgaaacttgggtg

SEQ ID NO: 2394491 - DNA, 25 bp, Homo sapien
gtatttcaggccattaacaaaagga

SEQ ID NO: 2394492 - DNA, 25 bp, Homo sapien
tgatctcctgattccagcgactgca

SEQ ID NO: 2394493 - DNA, 25 bp, Homo sapien
gacacagtgcagtccggccagggca

SEQ ID NO: 2394494 - DNA, 25 bp, Homo sapien
gggctgatctcctgattccagcgac

SEQ ID NO: 2394495 - DNA, 25 bp, Homo sapien
gctgatctcctgattccagcgactg

SEQ ID NO: 2394496 - DNA, 25 bp, Homo sapien
gctcagactaaaggcttcctgtgcc

SEQ ID NO: 2394497 - DNA, 25 bp, Homo sapien
gccactgctcagactaaaggcttcc

SEQ ID NO: 2394498 - DNA, 25 bp, Homo sapien
aaaggcttcctgtgccaccgagtgg

SEQ ID NO: 2394499 - DNA, 25 bp, Homo sapien
tctctggcagagttgagggaagcca

SEQ ID NO: 2394500 - DNA, 25 bp, Homo sapien
tcttttgtgtagaggcgtggagccc

SEQ ID NO: 2394501 - DNA, 25 bp, Homo sapien
ttttgaccttcacacgagcctgcga

SEQ ID NO: 2394502 - DNA, 25 bp, Homo sapien
gaaccttgtcgtctgtgatgctggg

SEQ ID NO: 2394503 - DNA, 25 bp, Homo sapien
gacggatgctttgttgggcaccaca

SEQ ID NO: 2394504 - DNA, 25 bp, Homo sapien
gccctagccccagaacgataaatga

SEQ ID NO: 2394505 - DNA, 25 bp, Homo sapien
tagcaatgttctccctaagtagggc

SEQ ID NO: 2394506 - DNA, 25 bp, Homo sapien
ctaaattattagagccctgtgggca

SEQ ID NO: 2394507 - DNA, 25 bp, Homo sapien
tcagacactggaccaaacatgtggc

SEQ ID NO: 2394508 - DNA, 25 bp, Homo sapien
tcagaaacctgtgagacaccatcaa

SEQ ID NO: 2394509 - DNA, 25 bp, Homo sapien
gaagaaagaactagtgagcctaaag

SEQ ID NO: 2394510 - DNA, 25 bp, Homo sapien
caagtgtgaggataatgtctcacca

SEQ ID NO: 2394511 - DNA, 25 bp, Homo sapien
tgtcaaacgcacataacgggaaccc

SEQ ID NO: 2394512 - DNA, 25 bp, Homo sapien
tattaatggtaatccccagggcaac

SEQ ID NO: 2394513 - DNA, 25 bp, Homo sapien
tatcagacaaaattggcacggtggc

SEQ ID NO: 2394514 - DNA, 25 bp, Homo sapien
tgacagagacaaacggttgagccat

SEQ ID NO: 2394515 - DNA, 25 bp, Homo sapien
gtataaatatgtccctggaagccac

SEQ ID NO: 2394516 - DNA, 25 bp, Homo sapien
tcttggtttggcaactcagcactga

SEQ ID NO: 2394517 - DNA, 25 bp, Homo sapien
cactgcgttgtgatgaggttcttgg

SEQ ID NO: 2394518 - DNA, 25 bp, Homo sapien
gcagggagaaagctaaggtatcaca

SEQ ID NO: 2394519 - DNA, 25 bp, Homo sapien
gagaagaagcatctcagagtgggta

SEQ ID NO: 2394520 - DNA, 25 bp, Homo sapien
tgaggtacacatcgaaaattccagt

SEQ ID NO: 2394521 - DNA, 25 bp, Homo sapien
tataaaactgaagcaaggcaagtgg

SEQ ID NO: 2394522 - DNA, 25 bp, Homo sapien
cagatatgagctcagaactcaggca

SEQ ID NO: 2394523 - DNA, 25 bp, Homo sapien
tcaaggccattacaacgatgtgaat

SEQ ID NO: 2394524 - DNA, 25 bp, Homo sapien
tattggaacgccttgagaactctgg

SEQ ID NO: 2394525 - DNA, 25 bp, Homo sapien
caactcgggtatctcaaggtccacg

SEQ ID NO: 2394526 - DNA, 25 bp, Homo sapien
aagtcagtaactatggccctcgcgc

SEQ ID NO: 2394527 - DNA, 25 bp, Homo sapien
tgcttaggatcacggagcgccttct

SEQ ID NO: 2394528 - DNA, 25 bp, Homo sapien
gccgcaagtcgagccctgcatagtt

SEQ ID NO: 2394529 - DNA, 25 bp, Homo sapien
tgcaggaagccgcaagtcgagccct

SEQ ID NO: 2394530 - DNA, 25 bp, Homo sapien
tagttgtcacggcaacagcagtgct

SEQ ID NO: 2394531 - DNA, 25 bp, Homo sapien
gagccctgcatagttgtcacggcaa

SEQ ID NO: 2394532 - DNA, 25 bp, Homo sapien
ggaggtgagtgactgacaaagaaaa

SEQ ID NO: 2394533 - DNA, 25 bp, Homo sapien
gcgggccccggtgggtggcatctgt

SEQ ID NO: 2394534 - DNA, 25 bp, Homo sapien
tggcatctgtgcaggagccgtgtgc

SEQ ID NO: 2394535 - DNA, 25 bp, Homo sapien
tgggggcagtccttgtaggacccta

SEQ ID NO: 2394536 - DNA, 25 bp, Homo sapien
gccacagcaggatttcttcttagca

SEQ ID NO: 2394537 - DNA, 25 bp, Homo sapien
tcagccacagcaggatttcttctta

SEQ ID NO: 2394538 - DNA, 25 bp, Homo sapien
gatttcttcttagcagggtggccga

SEQ ID NO: 2394539 - DNA, 25 bp, Homo sapien
atttcttcttagcagggtggccgac

SEQ ID NO: 2394540 - DNA, 25 bp, Homo sapien
gtcctctctcactgtgtcttcttgc

SEQ ID NO: 2394541 - DNA, 25 bp, Homo sapien
cctctctcactgtgtcttcttgctc

SEQ ID NO: 2394542 - DNA, 25 bp, Homo sapien
gtgtcctctctcactgtgtcttctt

SEQ ID NO: 2394543 - DNA, 25 bp, Homo sapien
ctgaatggtgtcctctctcactgtg

SEQ ID NO: 2394544 - DNA, 25 bp, Homo sapien
tgttgtgaccagagtaggcgctgca

SEQ ID NO: 2394545 - DNA, 25 bp, Homo sapien
agcagggactctttggtgttgtgac

SEQ ID NO: 2394546 - DNA, 25 bp, Homo sapien
gagtaggcgctgcattcatagaaga

SEQ ID NO: 2394547 - DNA, 25 bp, Homo sapien
cagggactctttggtgttgtgacca

SEQ ID NO: 2394548 - DNA, 25 bp, Homo sapien
tgtccagagagatggaaatgcttgc

SEQ ID NO: 2394549 - DNA, 25 bp, Homo sapien
tcccatggcacttccagagaaagtc

SEQ ID NO: 2394550 - DNA, 25 bp, Homo sapien
gagaaagtccccaccaaggctcttg

SEQ ID NO: 2394551 - DNA, 25 bp, Homo sapien
accaaggctcttgggcacttgccca

SEQ ID NO: 2394552 - DNA, 25 bp, Homo sapien
tctcgttgtcaagcttattacccag

SEQ ID NO: 2394553 - DNA, 25 bp, Homo sapien
tcaagcttattacccagcagaagaa

SEQ ID NO: 2394554 - DNA, 25 bp, Homo sapien
cgctccttctcgttgtcaagcttat

SEQ ID NO: 2394555 - DNA, 25 bp, Homo sapien
tattacccagcagaagaacaggcac

SEQ ID NO: 2394556 - DNA, 25 bp, Homo sapien
tctgtgaaggaatcagccgaggcct

SEQ ID NO: 2394557 - DNA, 25 bp, Homo sapien
gggcgggacatcctgcttggctgtt

SEQ ID NO: 2394558 - DNA, 25 bp, Homo sapien
gccgaggcctggcaaaaagcaattt

SEQ ID NO: 2394559 - DNA, 25 bp, Homo sapien
tttgtagcttgtccacactggcagt

SEQ ID NO: 2394560 - DNA, 25 bp, Homo sapien
tcgtacatgacgatgacaccatctg

SEQ ID NO: 2394561 - DNA, 25 bp, Homo sapien
catgacgatgacaccatctgccttt

SEQ ID NO: 2394562 - DNA, 25 bp, Homo sapien
caccgccggaccgacaggaacgact

SEQ ID NO: 2394563 - DNA, 25 bp, Homo sapien
gtgagatcgtacatgacgatgacac

SEQ ID NO: 2394564 - DNA, 25 bp, Homo sapien
aacgtcttcacacggtaatcaatgc

SEQ ID NO: 2394565 - DNA, 25 bp, Homo sapien
cacattcaacgtcttcacacggtaa

SEQ ID NO: 2394566 - DNA, 25 bp, Homo sapien
tgagagttgtccacattcaacgtct

SEQ ID NO: 2394567 - DNA, 25 bp, Homo sapien
gggccacctgagagttgtccacatt

SEQ ID NO: 2394568 - DNA, 25 bp, Homo sapien
gggagaaccggtcctcacagaatct

SEQ ID NO: 2394569 - DNA, 25 bp, Homo sapien
ggatgtcttccccaccgcggaattg

SEQ ID NO: 2394570 - DNA, 25 bp, Homo sapien
cacaatcttgaagagccggtcaggg

SEQ ID NO: 2394571 - DNA, 25 bp, Homo sapien
cgcggaattgcccacgaacacaatc

SEQ ID NO: 2394572 - DNA, 25 bp, Homo sapien
ctccaagtgtgacggggcacagagg

SEQ ID NO: 2394573 - DNA, 25 bp, Homo sapien
ggataaggacaactcggtgctccaa

SEQ ID NO: 2394574 - DNA, 25 bp, Homo sapien
ataaggacaactcggtgctccaagt

SEQ ID NO: 2394575 - DNA, 25 bp, Homo sapien
gatctgagcggtggcttcaagaggg

SEQ ID NO: 2394576 - DNA, 25 bp, Homo sapien
gcctttgttaaatgcccaggcacgc

SEQ ID NO: 2394577 - DNA, 25 bp, Homo sapien
cagtctagcttaagtaggtgcccag

SEQ ID NO: 2394578 - DNA, 25 bp, Homo sapien
gaaattgtatgcgaggagcttggca

SEQ ID NO: 2394579 - DNA, 25 bp, Homo sapien
gattcgctgattaagaaccaagaga

SEQ ID NO: 2394580 - DNA, 25 bp, Homo sapien
gatttgtccctgtaccccctggtca

SEQ ID NO: 2394581 - DNA, 25 bp, Homo sapien
ggggtcttcttcaacggagatgatt

SEQ ID NO: 2394582 - DNA, 25 bp, Homo sapien
tgtaccccctggtcagagacctctt

SEQ ID NO: 2394583 - DNA, 25 bp, Homo sapien
gcagggggtcttcttcaacggagat

SEQ ID NO: 2394584 - DNA, 25 bp, Homo sapien
ttaggggatatccactcaggcccag

SEQ ID NO: 2394585 - DNA, 25 bp, Homo sapien
ttctccttgggatgccaaacacctc

SEQ ID NO: 2394586 - DNA, 25 bp, Homo sapien
cttctccttgggatgccaaacacct

SEQ ID NO: 2394587 - DNA, 25 bp, Homo sapien
cttctgttaggggatatccactcag

SEQ ID NO: 2394588 - DNA, 25 bp, Homo sapien
agttgggaggatttcacaaaatatt

SEQ ID NO: 2394589 - DNA, 25 bp, Homo sapien
cacaaaatatttcaatacgggctgc

SEQ ID NO: 2394590 - DNA, 25 bp, Homo sapien
gcataacagcttttgtgacgaacag

SEQ ID NO: 2394591 - DNA, 25 bp, Homo sapien
gaacagatacccaaggagcatcaca

SEQ ID NO: 2394592 - DNA, 25 bp, Homo sapien
acatagcaggtctgctggctcacag

SEQ ID NO: 2394593 - DNA, 25 bp, Homo sapien
gatgatcaggcccaaaggttttact

SEQ ID NO: 2394594 - DNA, 25 bp, Homo sapien
cactattgcagagatttggctccca

SEQ ID NO: 2394595 - DNA, 25 bp, Homo sapien
cacagtaggtaatcagtaaacgtct

SEQ ID NO: 2394596 - DNA, 25 bp, Homo sapien
tctgatactgaagagtcgggatgcc

SEQ ID NO: 2394597 - DNA, 25 bp, Homo sapien
ggcactgagtatgggcccagagcca

SEQ ID NO: 2394598 - DNA, 25 bp, Homo sapien
aggcactgagtatgggcccagagcc

SEQ ID NO: 2394599 - DNA, 25 bp, Homo sapien
gcactgagtatgggcccagagccag

SEQ ID NO: 2394600 - DNA, 25 bp, Homo sapien
tccacatatttgcctatcacagagc

SEQ ID NO: 2394601 - DNA, 25 bp, Homo sapien
ccacatatttgcctatcacagagcc

SEQ ID NO: 2394602 - DNA, 25 bp, Homo sapien
gtccacatatttgcctatcacagag

SEQ ID NO: 2394603 - DNA, 25 bp, Homo sapien
catatttgcctatcacagagccaga

SEQ ID NO: 2394604 - DNA, 25 bp, Homo sapien
aacatatgtcccgttcatcccgaag

SEQ ID NO: 2394605 - DNA, 25 bp, Homo sapien
catatgtcccgttcatcccgaaggt

SEQ ID NO: 2394606 - DNA, 25 bp, Homo sapien
aaaacatatgtcccgttcatcccga

SEQ ID NO: 2394607 - DNA, 25 bp, Homo sapien
atatgtcccgttcatcccgaaggtg

SEQ ID NO: 2394608 - DNA, 25 bp, Homo sapien
tcctgtgaatgaactgccctactca

SEQ ID NO: 2394609 - DNA, 25 bp, Homo sapien
gagtagctgtgtcgcctgtggtaaa

SEQ ID NO: 2394610 - DNA, 25 bp, Homo sapien
gaataaactggatgtgggcgcatgt

SEQ ID NO: 2394611 - DNA, 25 bp, Homo sapien
tctgctcgcatgagatcaagtacca

SEQ ID NO: 2394612 - DNA, 25 bp, Homo sapien
ttccagcacgtaggcaaggatgacc

SEQ ID NO: 2394613 - DNA, 25 bp, Homo sapien
gaattgagggcactctctcagcagg

SEQ ID NO: 2394614 - DNA, 25 bp, Homo sapien
taatagagtggctacttggtggtcc

SEQ ID NO: 2394615 - DNA, 25 bp, Homo sapien
tctctcagcaggcacgtttttccag

SEQ ID NO: 2394616 - DNA, 25 bp, Homo sapien
gcttctgggaggtgctctcagcaca

SEQ ID NO: 2394617 - DNA, 25 bp, Homo sapien
tcagactggtccttccgaccccagg

SEQ ID NO: 2394618 - DNA, 25 bp, Homo sapien
ttctgggaggtgctctcagcacagg

SEQ ID NO: 2394619 - DNA, 25 bp, Homo sapien
tggtccttccgaccccaggcttctg

SEQ ID NO: 2394620 - DNA, 25 bp, Homo sapien
gctgcttgaggagcccggccttctc

SEQ ID NO: 2394621 - DNA, 25 bp, Homo sapien
ttctcacgctgtagactctccgtca

SEQ ID NO: 2394622 - DNA, 25 bp, Homo sapien
tagactctccgtcacacggtacact

SEQ ID NO: 2394623 - DNA, 25 bp, Homo sapien
ccagctgcttgaggagcccggcctt

SEQ ID NO: 2394624 - DNA, 25 bp, Homo sapien
agctcccaggtggaagccggatgcc

SEQ ID NO: 2394625 - DNA, 25 bp, Homo sapien
gaggaggaggcaaacacatggcagt

SEQ ID NO: 2394626 - DNA, 25 bp, Homo sapien
tggaagccggatgcccggacccctc

SEQ ID NO: 2394627 - DNA, 25 bp, Homo sapien
caaacacatggcagtgagctcccag

SEQ ID NO: 2394628 - DNA, 25 bp, Homo sapien
gaaaatcattcaccagggacttaag

SEQ ID NO: 2394629 - DNA, 25 bp, Homo sapien
gccagttcccaaattctaagtcttc

SEQ ID NO: 2394630 - DNA, 25 bp, Homo sapien
cagggacttaaggtctgggttctca

SEQ ID NO: 2394631 - DNA, 25 bp, Homo sapien
cacggagcgttttaccaaatagcca

SEQ ID NO: 2394632 - DNA, 25 bp, Homo sapien
tccttctcttggtggagtttgcagg

SEQ ID NO: 2394633 - DNA, 25 bp, Homo sapien
ctggttagtgagtttcagcttggta

SEQ ID NO: 2394634 - DNA, 25 bp, Homo sapien
tcttggtggagtttgcaggcctctt

SEQ ID NO: 2394635 - DNA, 25 bp, Homo sapien
cagccttggtctcatgcttgtcatg

SEQ ID NO: 2394636 - DNA, 25 bp, Homo sapien
ctgctccagctcttgactgcgggct

SEQ ID NO: 2394637 - DNA, 25 bp, Homo sapien
cagctcttgactgcgggcttgaaac

SEQ ID NO: 2394638 - DNA, 25 bp, Homo sapien
tgcgggcttgaaacctctctgtgtc

SEQ ID NO: 2394639 - DNA, 25 bp, Homo sapien
cttgactgcgggcttgaaacctctc

SEQ ID NO: 2394640 - DNA, 25 bp, Homo sapien
tggcaaagaagaggatttcgccaat

SEQ ID NO: 2394641 - DNA, 25 bp, Homo sapien
gcaaagaagaggatttcgccaatcc

SEQ ID NO: 2394642 - DNA, 25 bp, Homo sapien
cttggcaaagaagaggatttcgcca

SEQ ID NO: 2394643 - DNA, 25 bp, Homo sapien
aaagaagaggatttcgccaatcctg

SEQ ID NO: 2394644 - DNA, 25 bp, Homo sapien
tcctccgtggtatctgtggaaggtg

SEQ ID NO: 2394645 - DNA, 25 bp, Homo sapien
ctgataagggtcagaccaggaagag

SEQ ID NO: 2394646 - DNA, 25 bp, Homo sapien
gttaccacttcctccgtggtatctg

SEQ ID NO: 2394647 - DNA, 25 bp, Homo sapien
tatctgtggaaggtgggatttgttt

SEQ ID NO: 2394648 - DNA, 25 bp, Homo sapien
catctcctcatagagatgctggatt

SEQ ID NO: 2394649 - DNA, 25 bp, Homo sapien
tctcctcatagagatgctggatttc

SEQ ID NO: 2394650 - DNA, 25 bp, Homo sapien
acttttgatttgttgttccatctcc

SEQ ID NO: 2394651 - DNA, 25 bp, Homo sapien
tctcacttttgatttgttgttccat

SEQ ID NO: 2394652 - DNA, 25 bp, Homo sapien
ggcaaaaggagagtctcattgaggt

SEQ ID NO: 2394653 - DNA, 25 bp, Homo sapien
aggttcccctactccacagcggtag

SEQ ID NO: 2394654 - DNA, 25 bp, Homo sapien
ccacagcggtagctcctggagctca

SEQ ID NO: 2394655 - DNA, 25 bp, Homo sapien
gtctcattgaggttcccctactcca

SEQ ID NO: 2394656 - DNA, 25 bp, Homo sapien
ctgtccctttctcacctgccacctg

SEQ ID NO: 2394657 - DNA, 25 bp, Homo sapien
ccaaggctttgccacagcccaattt

SEQ ID NO: 2394658 - DNA, 25 bp, Homo sapien
cacctgccacctgttgggagagcat

SEQ ID NO: 2394659 - DNA, 25 bp, Homo sapien
cttctctgctgtccaaggctttgcc

SEQ ID NO: 2394660 - DNA, 25 bp, Homo sapien
cagttcttcagcagcttcttcaggg

SEQ ID NO: 2394661 - DNA, 25 bp, Homo sapien
tcagttcttcagcagcttcttcagg

SEQ ID NO: 2394662 - DNA, 25 bp, Homo sapien
ttgtttctaacaatgcttggtcctg

SEQ ID NO: 2394663 - DNA, 25 bp, Homo sapien
ggttgtttctaacaatgcttggtcc

SEQ ID NO: 2394664 - DNA, 25 bp, Homo sapien
gggttgtttctaacaatgcttggtc

SEQ ID NO: 2394665 - DNA, 25 bp, Homo sapien
ctgggttgtttctaacaatgcttgg

SEQ ID NO: 2394666 - DNA, 25 bp, Homo sapien
tcaaagttggacagtaaatgaggtt

SEQ ID NO: 2394667 - DNA, 25 bp, Homo sapien
attctggtcaggaagtcttcaaagt

SEQ ID NO: 2394668 - DNA, 25 bp, Homo sapien
aagttggacagtaaatgaggttcct

SEQ ID NO: 2394669 - DNA, 25 bp, Homo sapien
tctggtcaggaagtcttcaaagttg

SEQ ID NO: 2394670 - DNA, 25 bp, Homo sapien
tacaccttctgtggtcgacacctgc

SEQ ID NO: 2394671 - DNA, 25 bp, Homo sapien
acttgcctatccctttcttgcctgg

SEQ ID NO: 2394672 - DNA, 25 bp, Homo sapien
acctgccagctacaccttctgtggt

SEQ ID NO: 2394673 - DNA, 25 bp, Homo sapien
tggaacacactttcgccagcctttc

SEQ ID NO: 2394674 - DNA, 25 bp, Homo sapien
tcttccaacaccttttgggctccaa

SEQ ID NO: 2394675 - DNA, 25 bp, Homo sapien
cctctggacagatacaccttctctt

SEQ ID NO: 2394676 - DNA, 25 bp, Homo sapien
tcatcttcgcccatgtcgcccagat

SEQ ID NO: 2394677 - DNA, 25 bp, Homo sapien
caagtctgtccatcagcatccggaa

SEQ ID NO: 2394678 - DNA, 25 bp, Homo sapien
cgtggacacgttccagattctgtga

SEQ ID NO: 2394679 - DNA, 25 bp, Homo sapien
ccagcaaagatccatggacatgggt

SEQ ID NO: 2394680 - DNA, 25 bp, Homo sapien
gaaggttcatctgagagaaggaaag

SEQ ID NO: 2394681 - DNA, 25 bp, Homo sapien
aaacaccccatcagtgatgctagaa

SEQ ID NO: 2394682 - DNA, 25 bp, Homo sapien
aactcctgtggggtcagatagccat

SEQ ID NO: 2394683 - DNA, 25 bp, Homo sapien
gggtcagatagccattgccatcagc

SEQ ID NO: 2394684 - DNA, 25 bp, Homo sapien
ctccaggctgagcggtagctcctta

SEQ ID NO: 2394685 - DNA, 25 bp, Homo sapien
gctgagcggtagctccttatgcagc

SEQ ID NO: 2394686 - DNA, 25 bp, Homo sapien
acaacccagagtgtactggttaaca

SEQ ID NO: 2394687 - DNA, 25 bp, Homo sapien
agagtgtactggttaacactgacac

SEQ ID NO: 2394688 - DNA, 25 bp, Homo sapien
aacccagagtgtactggttaacact

SEQ ID NO: 2394689 - DNA, 25 bp, Homo sapien
cccagagtgtactggttaacactga

SEQ ID NO: 2394690 - DNA, 25 bp, Homo sapien
tggaggcccctggtgtcccattgcc

SEQ ID NO: 2394691 - DNA, 25 bp, Homo sapien
gtgtcccattgcctcagcactgcat

SEQ ID NO: 2394692 - DNA, 25 bp, Homo sapien
ctggtgtcccattgcctcagcactg

SEQ ID NO: 2394693 - DNA, 25 bp, Homo sapien
cccattgcctcagcactgcatttgt

SEQ ID NO: 2394694 - DNA, 25 bp, Homo sapien
gtggcacgcacagcttttcacacac

SEQ ID NO: 2394695 - DNA, 25 bp, Homo sapien
aaatcagaacacaaagtctctcttg

SEQ ID NO: 2394696 - DNA, 25 bp, Homo sapien
gagatcctgtggcacgcacagcttt

SEQ ID NO: 2394697 - DNA, 25 bp, Homo sapien
tcagaacacaaagtctctcttgcca

SEQ ID NO: 2394698 - DNA, 25 bp, Homo sapien
taatgtccttggtagtttgacatga

SEQ ID NO: 2394699 - DNA, 25 bp, Homo sapien
tagtgatactgattcttctgatgca

SEQ ID NO: 2394700 - DNA, 25 bp, Homo sapien
tcagtttcagagctcataatttgtc

SEQ ID NO: 2394701 - DNA, 25 bp, Homo sapien
taatggtttttcgtgttccaatctc

SEQ ID NO: 2394702 - DNA, 25 bp, Homo sapien
cagccccatgtggaagtgacaagcc

SEQ ID NO: 2394703 - DNA, 25 bp, Homo sapien
catgtggaagtgacaagccaacaac

SEQ ID NO: 2394704 - DNA, 25 bp, Homo sapien
gccccatgtggaagtgacaagccaa

SEQ ID NO: 2394705 - DNA, 25 bp, Homo sapien
cgcagccccatgtggaagtgacaag

SEQ ID NO: 2394706 - DNA, 25 bp, Homo sapien
ctgcatatccttcctggcgatgaag

SEQ ID NO: 2394707 - DNA, 25 bp, Homo sapien
gcatatccttcctggcgatgaagcc

SEQ ID NO: 2394708 - DNA, 25 bp, Homo sapien
tgcatatccttcctggcgatgaagc

SEQ ID NO: 2394709 - DNA, 25 bp, Homo sapien
tggcccgacgtttgctcctgagtct

SEQ ID NO: 2394710 - DNA, 25 bp, Homo sapien
actagctggcccgacgtttgctcct

SEQ ID NO: 2394711 - DNA, 25 bp, Homo sapien
atgcaggcaggctccactccccttt

SEQ ID NO: 2394712 - DNA, 25 bp, Homo sapien
ggagactaccctcccgtcaggggca

SEQ ID NO: 2394713 - DNA, 25 bp, Homo sapien
cgcgattagtcagtttcttgaagtc

SEQ ID NO: 2394714 - DNA, 25 bp, Homo sapien
tcagtttcttgaagtctttttcaga

SEQ ID NO: 2394715 - DNA, 25 bp, Homo sapien
gattagtcagtttcttgaagtcttt

SEQ ID NO: 2394716 - DNA, 25 bp, Homo sapien
cagtttcttgaagtctttttcagaa

SEQ ID NO: 2394717 - DNA, 25 bp, Homo sapien
tccacttaaccagatttgtcaagag

SEQ ID NO: 2394718 - DNA, 25 bp, Homo sapien
tgatcttccacttaaccagatttgt

SEQ ID NO: 2394719 - DNA, 25 bp, Homo sapien
tgttgatttcagtgatgatcttcca

SEQ ID NO: 2394720 - DNA, 25 bp, Homo sapien
tccagagcaatgtaaaatctgttga

SEQ ID NO: 2394721 - DNA, 25 bp, Homo sapien
gctcctcggaggacctgcaactctt

SEQ ID NO: 2394722 - DNA, 25 bp, Homo sapien
tggccactggtgacttgaattccac

SEQ ID NO: 2394723 - DNA, 25 bp, Homo sapien
ttcacacctggagggtactttggcc

SEQ ID NO: 2394724 - DNA, 25 bp, Homo sapien
ggtactttggccactggtgacttga

SEQ ID NO: 2394725 - DNA, 25 bp, Homo sapien
aaagcctaggggctacataaggagg

SEQ ID NO: 2394726 - DNA, 25 bp, Homo sapien
tgcagtaggatgtacaagaaagcct

SEQ ID NO: 2394727 - DNA, 25 bp, Homo sapien
taagcattgtggcaagaatcactgc

SEQ ID NO: 2394728 - DNA, 25 bp, Homo sapien
tttgaagatagcgatgtaagcattg

SEQ ID NO: 2394729 - DNA, 25 bp, Homo sapien
aagcattccaactcggtggtgtggc

SEQ ID NO: 2394730 - DNA, 25 bp, Homo sapien
caatgacaccttcatctccaaagca

SEQ ID NO: 2394731 - DNA, 25 bp, Homo sapien
tccaaagcattccaactcggtggtg

SEQ ID NO: 2394732 - DNA, 25 bp, Homo sapien
atctccaaagcattccaactcggtg

SEQ ID NO: 2394733 - DNA, 25 bp, Homo sapien
agcatgctccagtgggtggaaccga

SEQ ID NO: 2394734 - DNA, 25 bp, Homo sapien
cagccgggcttgcagggatgctctt

SEQ ID NO: 2394735 - DNA, 25 bp, Homo sapien
caagccatagacctgtactgtccaa

SEQ ID NO: 2394736 - DNA, 25 bp, Homo sapien
ggcagagtcttgatcccaagccata

SEQ ID NO: 2394737 - DNA, 25 bp, Homo sapien
ttatacaagtggctcatgttgcatt

SEQ ID NO: 2394738 - DNA, 25 bp, Homo sapien
gaaaattatacaagtggctcatgtt

SEQ ID NO: 2394739 - DNA, 25 bp, Homo sapien
tttaaaacaatgtggccaaaatgga

SEQ ID NO: 2394740 - DNA, 25 bp, Homo sapien
gcatttctgatgtgcagcgctggtc

SEQ ID NO: 2394741 - DNA, 25 bp, Homo sapien
ttccaattttagtatacgtgctgcc

SEQ ID NO: 2394742 - DNA, 25 bp, Homo sapien
agccatgctaatcttctttgtatca

SEQ ID NO: 2394743 - DNA, 25 bp, Homo sapien
gtatacgtgctgccaaagtgagcac

SEQ ID NO: 2394744 - DNA, 25 bp, Homo sapien
cacttggcatgtcatcttgtgcagg

SEQ ID NO: 2394745 - DNA, 25 bp, Homo sapien
ccagagagctgccagttgtggtcat

SEQ ID NO: 2394746 - DNA, 25 bp, Homo sapien
gagctgccagttgtggtcatgttca

SEQ ID NO: 2394747 - DNA, 25 bp, Homo sapien
cagttgtggtcatgttcatcctggg

SEQ ID NO: 2394748 - DNA, 25 bp, Homo sapien
accccgagtggcctccagagagctg

SEQ ID NO: 2394749 - DNA, 25 bp, Homo sapien
tgagcgcttttgtcccagtcagaga

SEQ ID NO: 2394750 - DNA, 25 bp, Homo sapien
caatttctagaagctgtcgccactg

SEQ ID NO: 2394751 - DNA, 25 bp, Homo sapien
caagctttactaggtgtggagacaa

SEQ ID NO: 2394752 - DNA, 25 bp, Homo sapien
taaacaatggctgagtacccgacct

SEQ ID NO: 2394753 - DNA, 25 bp, Homo sapien
tgttgaattctcctggcactcctgc

SEQ ID NO: 2394754 - DNA, 25 bp, Homo sapien
tgtgttgaattctcctggcactcct

SEQ ID NO: 2394755 - DNA, 25 bp, Homo sapien
cctgtgttgaattctcctggcactc

SEQ ID NO: 2394756 - DNA, 25 bp, Homo sapien
ttgaattctcctggcactcctgctg

SEQ ID NO: 2394757 - DNA, 25 bp, Homo sapien
aggtggctccgtgccagcctcctga

SEQ ID NO: 2394758 - DNA, 25 bp, Homo sapien
ggctccgtgccagcctcctgaaggg

SEQ ID NO: 2394759 - DNA, 25 bp, Homo sapien
tgacaaacagcccaatggccccagg

SEQ ID NO: 2394760 - DNA, 25 bp, Homo sapien
aaacagcccaatggccccaggtggc

SEQ ID NO: 2394761 - DNA, 25 bp, Homo sapien
gactttcctgtctgcccgcttccag

SEQ ID NO: 2394762 - DNA, 25 bp, Homo sapien
tgactttcctgtctgcccgcttcca

SEQ ID NO: 2394763 - DNA, 25 bp, Homo sapien
ctgatacggcgtcggcggcttctgc

SEQ ID NO: 2394764 - DNA, 25 bp, Homo sapien
tgatacggcgtcggcggcttctgcc

SEQ ID NO: 2394765 - DNA, 25 bp, Homo sapien
agctgaacgggaagcggcgccccct

SEQ ID NO: 2394766 - DNA, 25 bp, Homo sapien
tccgcccgactctttccgctccgag

SEQ ID NO: 2394767 - DNA, 25 bp, Homo sapien
cgctcggctctcagctgtcaagcag

SEQ ID NO: 2394768 - DNA, 25 bp, Homo sapien
cttgggcgtgtaggcttcccgtgga

SEQ ID NO: 2394769 - DNA, 25 bp, Homo sapien
cacagggacacttccaatgaggcgt

SEQ ID NO: 2394770 - DNA, 25 bp, Homo sapien
tccaggccctgaatggaggatttca

SEQ ID NO: 2394771 - DNA, 25 bp, Homo sapien
ggaaagtggatgcagagctcccaga

SEQ ID NO: 2394772 - DNA, 25 bp, Homo sapien
atcaaagccaccatacgttcaaggg

SEQ ID NO: 2394773 - DNA, 25 bp, Homo sapien
tacctgagagaaggacgattagcca

SEQ ID NO: 2394774 - DNA, 25 bp, Homo sapien
ttcaagggcctactctccgagggaa

SEQ ID NO: 2394775 - DNA, 25 bp, Homo sapien
tctaggcagacacatgggcaactct

SEQ ID NO: 2394776 - DNA, 25 bp, Homo sapien
tgtacgctgcagaggcaagcttcac

SEQ ID NO: 2394777 - DNA, 25 bp, Homo sapien
agaccgtctggaagctagggagcaa

SEQ ID NO: 2394778 - DNA, 25 bp, Homo sapien
tcaaaaatagagaacgcgacagggc

SEQ ID NO: 2394779 - DNA, 25 bp, Homo sapien
aagctgaggaatttagagtccgctg

SEQ ID NO: 2394780 - DNA, 25 bp, Homo sapien
tttagagtccgctgttccagggcag

SEQ ID NO: 2394781 - DNA, 25 bp, Homo sapien
actggcacctttgacccaaatcgac

SEQ ID NO: 2394782 - DNA, 25 bp, Homo sapien
tcacttctcccattgaactggcacc

SEQ ID NO: 2394783 - DNA, 25 bp, Homo sapien
gaatagtgtgacataagggttaaag

SEQ ID NO: 2394784 - DNA, 25 bp, Homo sapien
tgtaagaatctatttccaatttgct

SEQ ID NO: 2394785 - DNA, 25 bp, Homo sapien
tgcatctatcatcataagggactga

SEQ ID NO: 2394786 - DNA, 25 bp, Homo sapien
tattgagcttgaaaagttccactct

SEQ ID NO: 2394787 - DNA, 25 bp, Homo sapien
aatattgcactcctgaaataaaccc

SEQ ID NO: 2394788 - DNA, 25 bp, Homo sapien
cgtaaggagaaagcatacagttttc

SEQ ID NO: 2394789 - DNA, 25 bp, Homo sapien
tatgctcttactgtatggaatgttc

SEQ ID NO: 2394790 - DNA, 25 bp, Homo sapien
tctcggcgtatgttctatgtagaca

SEQ ID NO: 2394791 - DNA, 25 bp, Homo sapien
ctaggactatatagacactcatcac

SEQ ID NO: 2394792 - DNA, 25 bp, Homo sapien
cctggtatatggtctatctcggcgt

SEQ ID NO: 2394793 - DNA, 25 bp, Homo sapien
ccatctattctttgctccgtttttg

SEQ ID NO: 2394794 - DNA, 25 bp, Homo sapien
aatttgccatcttactaccagcttc

SEQ ID NO: 2394795 - DNA, 25 bp, Homo sapien
cttacaatttctggctttgaactgc

SEQ ID NO: 2394796 - DNA, 25 bp, Homo sapien
aatatagcttatagttgagacttgc

SEQ ID NO: 2394797 - DNA, 25 bp, Homo sapien
gatgtgtttatgtccttttgcaggg

SEQ ID NO: 2394798 - DNA, 25 bp, Homo sapien
aaaaggatgtgtttatgtccttttg

SEQ ID NO: 2394799 - DNA, 25 bp, Homo sapien
ggatgtgtttatgtccttttgcagg

SEQ ID NO: 2394800 - DNA, 25 bp, Homo sapien
aaggatgtgtttatgtccttttgca

SEQ ID NO: 2394801 - DNA, 25 bp, Homo sapien
tacagggtactccagccagattggc

SEQ ID NO: 2394802 - DNA, 25 bp, Homo sapien
ggcaccaggactacaggcagcatgt

SEQ ID NO: 2394803 - DNA, 25 bp, Homo sapien
tgcgcgcgtgcttgccattaataca

SEQ ID NO: 2394804 - DNA, 25 bp, Homo sapien
tatgcagtttaacagcgggtaccct

SEQ ID NO: 2394805 - DNA, 25 bp, Homo sapien
tagactggaatatgcatctgaccca

SEQ ID NO: 2394806 - DNA, 25 bp, Homo sapien
caaggtagctcaatcatagactggg

SEQ ID NO: 2394807 - DNA, 25 bp, Homo sapien
ttcaaagtagcaaggccaggcagtc

SEQ ID NO: 2394808 - DNA, 25 bp, Homo sapien
caatcacccagtagttagtagccct

SEQ ID NO: 2394809 - DNA, 25 bp, Homo sapien
tattatagcccaggctgcgtcctgt

SEQ ID NO: 2394810 - DNA, 25 bp, Homo sapien
gcgtcctgtgccctctacataggtt

SEQ ID NO: 2394811 - DNA, 25 bp, Homo sapien
ctcagtgccagactatacagttaga

SEQ ID NO: 2394812 - DNA, 25 bp, Homo sapien
tgatctagtagtgatgataccacaa

SEQ ID NO: 2394813 - DNA, 25 bp, Homo sapien
acatccatggacatgcatcttaatt

SEQ ID NO: 2394814 - DNA, 25 bp, Homo sapien
ttgatttccatcagaggttctttcc

SEQ ID NO: 2394815 - DNA, 25 bp, Homo sapien
cacatcgtgctgtcagtactccttg

SEQ ID NO: 2394816 - DNA, 25 bp, Homo sapien
tatcactcttttgctatcatcaaaa

SEQ ID NO: 2394817 - DNA, 25 bp, Homo sapien
gttctaatcgaccttcacatacagc

SEQ ID NO: 2394818 - DNA, 25 bp, Homo sapien
tagcttgtctcctcagaccagactg

SEQ ID NO: 2394819 - DNA, 25 bp, Homo sapien
gaccagactgacatggggaccttca

SEQ ID NO: 2394820 - DNA, 25 bp, Homo sapien
tcacatacagcaaatcccatttttg

SEQ ID NO: 2394821 - DNA, 25 bp, Homo sapien
cacactggtccgtgatttgtaggga

SEQ ID NO: 2394822 - DNA, 25 bp, Homo sapien
tacaagattcaggtaaaacgttgcc

SEQ ID NO: 2394823 - DNA, 25 bp, Homo sapien
tagggaattcatgtctctgaccagc

SEQ ID NO: 2394824 - DNA, 25 bp, Homo sapien
catataactgctggcacatagtgga

SEQ ID NO: 2394825 - DNA, 25 bp, Homo sapien
tcagagctgtgaactagaaagggag

SEQ ID NO: 2394826 - DNA, 25 bp, Homo sapien
tctgtcagagcctcacagtggcctg

SEQ ID NO: 2394827 - DNA, 25 bp, Homo sapien
cattcaaatgtcactccccaggaaa

SEQ ID NO: 2394828 - DNA, 25 bp, Homo sapien
tccctggcacgccacaagaattcag

SEQ ID NO: 2394829 - DNA, 25 bp, Homo sapien
ctctggtgagttatccaaggtcaca

SEQ ID NO: 2394830 - DNA, 25 bp, Homo sapien
gagcttgcacgctgattctctgaga

SEQ ID NO: 2394831 - DNA, 25 bp, Homo sapien
tgaaaagtgaaccttccctctctgg

SEQ ID NO: 2394832 - DNA, 25 bp, Homo sapien
tctgagactgttcatcaaacgtggg

SEQ ID NO: 2394833 - DNA, 25 bp, Homo sapien
cagcgttcgcagagattgcctcaca

SEQ ID NO: 2394834 - DNA, 25 bp, Homo sapien
taccttcttacaatggctactgcag

SEQ ID NO: 2394835 - DNA, 25 bp, Homo sapien
gggttggcagtacattctcagacca

SEQ ID NO: 2394836 - DNA, 25 bp, Homo sapien
ccactctatgggatgataacaggaa

SEQ ID NO: 2394837 - DNA, 25 bp, Homo sapien
ggtgtaagaatccaagagccctgat

SEQ ID NO: 2394838 - DNA, 25 bp, Homo sapien
ggttgtcaacagctacttcaaagga

SEQ ID NO: 2394839 - DNA, 25 bp, Homo sapien
gagagactcttcaccatcacatggg

SEQ ID NO: 2394840 - DNA, 25 bp, Homo sapien
gctggtctataacggaaatctggga

SEQ ID NO: 2394841 - DNA, 25 bp, Homo sapien
agcttccttgaccaccgagatttgg

SEQ ID NO: 2394842 - DNA, 25 bp, Homo sapien
tgaccaccgagatttggaagtgaaa

SEQ ID NO: 2394843 - DNA, 25 bp, Homo sapien
tccttgaccaccgagatttggaagt

SEQ ID NO: 2394844 - DNA, 25 bp, Homo sapien
gcttccttgaccaccgagatttgga

SEQ ID NO: 2394845 - DNA, 25 bp, Homo sapien
tgcagaaacgactggaataagcagc

SEQ ID NO: 2394846 - DNA, 25 bp, Homo sapien
tgtaatctccaattagcactcgagc

SEQ ID NO: 2394847 - DNA, 25 bp, Homo sapien
gatgccgctgttgcaagctgacacc

SEQ ID NO: 2394848 - DNA, 25 bp, Homo sapien
tatatgttctaaacagatgccgctg

SEQ ID NO: 2394849 - DNA, 25 bp, Homo sapien
tggtagacacaagagatagacatca

SEQ ID NO: 2394850 - DNA, 25 bp, Homo sapien
gcagcatatcctgatcctaaacagt

SEQ ID NO: 2394851 - DNA, 25 bp, Homo sapien
cacatgaaaactcgataaagcagcc

SEQ ID NO: 2394852 - DNA, 25 bp, Homo sapien
gctggaagcaaggtacaaagtaagg

SEQ ID NO: 2394853 - DNA, 25 bp, Homo sapien
gttcattaatctgaggcacacctct

SEQ ID NO: 2394854 - DNA, 25 bp, Homo sapien
catttattctccaatcaaagttatg

SEQ ID NO: 2394855 - DNA, 25 bp, Homo sapien
acaaattcactgctggtaccatgaa

SEQ ID NO: 2394856 - DNA, 25 bp, Homo sapien
gttatgaatgcagattgcttccaca

SEQ ID NO: 2394857 - DNA, 25 bp, Homo sapien
gaattcttttaattcggttgcgatc

SEQ ID NO: 2394858 - DNA, 25 bp, Homo sapien
gaactcccacaaatctaggttttga

SEQ ID NO: 2394859 - DNA, 25 bp, Homo sapien
tgcgatccatcgtcttcccaaagag

SEQ ID NO: 2394860 - DNA, 25 bp, Homo sapien
cccaaagagattagcaacttcatta

SEQ ID NO: 2394861 - DNA, 25 bp, Homo sapien
ctgatatggtacttgagtattcaca

SEQ ID NO: 2394862 - DNA, 25 bp, Homo sapien
gtattcacattctcccagtgtggtg

SEQ ID NO: 2394863 - DNA, 25 bp, Homo sapien
tgtggtggcatagggatggcctcgt

SEQ ID NO: 2394864 - DNA, 25 bp, Homo sapien
tacttgagtattcacattctcccag

SEQ ID NO: 2394865 - DNA, 25 bp, Homo sapien
ctaaacagtcctctccttttattat

SEQ ID NO: 2394866 - DNA, 25 bp, Homo sapien
tttattaagcgctgctttccagtgg

SEQ ID NO: 2394867 - DNA, 25 bp, Homo sapien
ttttattaagcgctgctttccagtg

SEQ ID NO: 2394868 - DNA, 25 bp, Homo sapien
tctttttattaagcgctgctttcca

SEQ ID NO: 2394869 - DNA, 25 bp, Homo sapien
ggctctttttattaagcgctgcttt

SEQ ID NO: 2394870 - DNA, 25 bp, Homo sapien
aatggagccacaagggtttgttttg

SEQ ID NO: 2394871 - DNA, 25 bp, Homo sapien
ttttcgatatcttcactgctaactg

SEQ ID NO: 2394872 - DNA, 25 bp, Homo sapien
tgctaactgaacactgactgttggt

SEQ ID NO: 2394873 - DNA, 25 bp, Homo sapien
ctgcaaagtctatcttgtagctgaa

SEQ ID NO: 2394874 - DNA, 25 bp, Homo sapien
caaaccagaaagtttcatttaccag

SEQ ID NO: 2394875 - DNA, 25 bp, Homo sapien
tgtactgacaccatgcaactctcag

SEQ ID NO: 2394876 - DNA, 25 bp, Homo sapien
caaacttggagttgctcagatgtac

SEQ ID NO: 2394877 - DNA, 25 bp, Homo sapien
ggaaaagcactggaagaatttctaa

SEQ ID NO: 2394878 - DNA, 25 bp, Homo sapien
taatacctggcatacagaagtgttt

SEQ ID NO: 2394879 - DNA, 25 bp, Homo sapien
gccccactgggtatctgacgtgtcc

SEQ ID NO: 2394880 - DNA, 25 bp, Homo sapien
tgaaacatgtgccacttcccacatt

SEQ ID NO: 2394881 - DNA, 25 bp, Homo sapien
aacatgtgccacttcccacattctg

SEQ ID NO: 2394882 - DNA, 25 bp, Homo sapien
cccactgggtatctgacgtgtccat

SEQ ID NO: 2394883 - DNA, 25 bp, Homo sapien
tagaaaataattcttctgctttgtg

SEQ ID NO: 2394884 - DNA, 25 bp, Homo sapien
tgttttagaaaataattcttctgct

SEQ ID NO: 2394885 - DNA, 25 bp, Homo sapien
gtcatccacttcattgtttgttgtt

SEQ ID NO: 2394886 - DNA, 25 bp, Homo sapien
tcatccacttcattgtttgttgttt

SEQ ID NO: 2394887 - DNA, 25 bp, Homo sapien
aggaggtggaggaagaaataattct

SEQ ID NO: 2394888 - DNA, 25 bp, Homo sapien
cagaaggaggtggaggaagaaataa

SEQ ID NO: 2394889 - DNA, 25 bp, Homo sapien
gaggtggaggaagaaataattctat

SEQ ID NO: 2394890 - DNA, 25 bp, Homo sapien
ctgaaaagccagaaggaggtggagg

SEQ ID NO: 2394891 - DNA, 25 bp, Homo sapien
gaacgtgcctgtatctgtgtaagtg

SEQ ID NO: 2394892 - DNA, 25 bp, Homo sapien
cctggcttcagggtctacgcactta

SEQ ID NO: 2394893 - DNA, 25 bp, Homo sapien
cttagccgccgtcatatactgtctt

SEQ ID NO: 2394894 - DNA, 25 bp, Homo sapien
tatacttactcctgtgaacgtgcct

SEQ ID NO: 2394895 - DNA, 25 bp, Homo sapien
tcttggttgggtattgtaatgaaga

SEQ ID NO: 2394896 - DNA, 25 bp, Homo sapien
acattcttggttgggtattgtaatg

SEQ ID NO: 2394897 - DNA, 25 bp, Homo sapien
attcttggttgggtattgtaatgaa

SEQ ID NO: 2394898 - DNA, 25 bp, Homo sapien
cttggttgggtattgtaatgaagaa

SEQ ID NO: 2394899 - DNA, 25 bp, Homo sapien
aaattaaactcaatctggaatttgg

SEQ ID NO: 2394900 - DNA, 25 bp, Homo sapien
attaaactcaatctggaatttggct

SEQ ID NO: 2394901 - DNA, 25 bp, Homo sapien
gaaaggagacaaagaggctggtcaa

SEQ ID NO: 2394902 - DNA, 25 bp, Homo sapien
caaagaggctggtcaaagaaaatta

SEQ ID NO: 2394903 - DNA, 25 bp, Homo sapien
caaactgtccagtaaactattcaca

SEQ ID NO: 2394904 - DNA, 25 bp, Homo sapien
actattcacaattcctactgctttt

SEQ ID NO: 2394905 - DNA, 25 bp, Homo sapien
ctgtccagtaaactattcacaattc

SEQ ID NO: 2394906 - DNA, 25 bp, Homo sapien
tattcacaattcctactgctttttt

SEQ ID NO: 2394907 - DNA, 25 bp, Homo sapien
ccactgacagagcggagaaacttca

SEQ ID NO: 2394908 - DNA, 25 bp, Homo sapien
cactgacagagcggagaaacttcat

SEQ ID NO: 2394909 - DNA, 25 bp, Homo sapien
acgaaggccggacagagcaatcttc

SEQ ID NO: 2394910 - DNA, 25 bp, Homo sapien
cctgaagcaagtgtgagcagtaagc

SEQ ID NO: 2394911 - DNA, 25 bp, Homo sapien
gacgaaggccggacagagcaatctt

SEQ ID NO: 2394912 - DNA, 25 bp, Homo sapien
ctgaagcaagtgtgagcagtaagcc

SEQ ID NO: 2394913 - DNA, 25 bp, Homo sapien
acaatctggacaaactggtatagca

SEQ ID NO: 2394914 - DNA, 25 bp, Homo sapien
gctccagattcccagagggaaggca

SEQ ID NO: 2394915 - DNA, 25 bp, Homo sapien
ggtatagcacggctcaaagactcgg

SEQ ID NO: 2394916 - DNA, 25 bp, Homo sapien
ggtcttcaccgtaaactgcattgct

SEQ ID NO: 2394917 - DNA, 25 bp, Homo sapien
tccataaatgccaagcagatcaagt

SEQ ID NO: 2394918 - DNA, 25 bp, Homo sapien
caagttagttgacagtggtgttcaa

SEQ ID NO: 2394919 - DNA, 25 bp, Homo sapien
tccatttaggtcagaaagtacatct

SEQ ID NO: 2394920 - DNA, 25 bp, Homo sapien
aaacccatgtattcagctgttgatg

SEQ ID NO: 2394921 - DNA, 25 bp, Homo sapien
caattggacaaactacctgtggaga

SEQ ID NO: 2394922 - DNA, 25 bp, Homo sapien
tcagtccttgacacatatacagtat

SEQ ID NO: 2394923 - DNA, 25 bp, Homo sapien
gaaaacttatagtacagggaagaca

SEQ ID NO: 2394924 - DNA, 25 bp, Homo sapien
tactgtcatgttgagtgctttagca

SEQ ID NO: 2394925 - DNA, 25 bp, Homo sapien
tagcgtgaacctactacttcagggc

SEQ ID NO: 2394926 - DNA, 25 bp, Homo sapien
gactattcagagtatgcgctctcag

SEQ ID NO: 2394927 - DNA, 25 bp, Homo sapien
cacgcaagtttgctggctgtcaagg

SEQ ID NO: 2394928 - DNA, 25 bp, Homo sapien
tctagaggcctgcttaagtggagta

SEQ ID NO: 2394929 - DNA, 25 bp, Homo sapien
gattagctaattacctcccttttgc

SEQ ID NO: 2394930 - DNA, 25 bp, Homo sapien
gaaatcttacatgcatctcaatggg

SEQ ID NO: 2394931 - DNA, 25 bp, Homo sapien
tcagccatgttgtatctctttgacc

SEQ ID NO: 2394932 - DNA, 25 bp, Homo sapien
tgtatgagagaatctatttccgtgg

SEQ ID NO: 2394933 - DNA, 25 bp, Homo sapien
aaccaaattgcgcttactgatatca

SEQ ID NO: 2394934 - DNA, 25 bp, Homo sapien
tggtaagtgaaaccaggaaagcgaa

SEQ ID NO: 2394935 - DNA, 25 bp, Homo sapien
gagaaacccacacgtagaatgttga

SEQ ID NO: 2394936 - DNA, 25 bp, Homo sapien
gctctgctgaaattagcaaaatcac

SEQ ID NO: 2394937 - DNA, 25 bp, Homo sapien
tccctgtcacaagccagcgtttaca

SEQ ID NO: 2394938 - DNA, 25 bp, Homo sapien
ggattcgcttcccacataacggtga

SEQ ID NO: 2394939 - DNA, 25 bp, Homo sapien
caaaatcgagcggagagagcctgtg

SEQ ID NO: 2394940 - DNA, 25 bp, Homo sapien
gcgaagggacggagatgcaaccttt

SEQ ID NO: 2394941 - DNA, 25 bp, Homo sapien
cttcagggggcacagaaccatactc

SEQ ID NO: 2394942 - DNA, 25 bp, Homo sapien
aaccatactcagaaagaggatcacc

SEQ ID NO: 2394943 - DNA, 25 bp, Homo sapien
agaaccatactcagaaagaggatca

SEQ ID NO: 2394944 - DNA, 25 bp, Homo sapien
ccatactcagaaagaggatcaccat

SEQ ID NO: 2394945 - DNA, 25 bp, Homo sapien
tttctgaacataccaggagatctat

SEQ ID NO: 2394946 - DNA, 25 bp, Homo sapien
ggcagagcatttccgtaggtctcca

SEQ ID NO: 2394947 - DNA, 25 bp, Homo sapien
tcctgctcccgaagctacggcagag

SEQ ID NO: 2394948 - DNA, 25 bp, Homo sapien
taggtctccagtcacatgtctttgc

SEQ ID NO: 2394949 - DNA, 25 bp, Homo sapien
cagagtatggttgtatcaccaaggc

SEQ ID NO: 2394950 - DNA, 25 bp, Homo sapien
actataaccaccaaacaagttctgt

SEQ ID NO: 2394951 - DNA, 25 bp, Homo sapien
tacccaagctagtatcaatctcctg

SEQ ID NO: 2394952 - DNA, 25 bp, Homo sapien
tgttaagctaacacctaagttgagt

SEQ ID NO: 2394953 - DNA, 25 bp, Homo sapien
tgacagcaggaggtctggactctcg

SEQ ID NO: 2394954 - DNA, 25 bp, Homo sapien
ctctggtttgctggcattcaggtgg

SEQ ID NO: 2394955 - DNA, 25 bp, Homo sapien
ggactctggtttgctggcattcagg

SEQ ID NO: 2394956 - DNA, 25 bp, Homo sapien
acagcaggaggctcgggcgtctgtc

SEQ ID NO: 2394957 - DNA, 25 bp, Homo sapien
agacgcctccatttggcttttcaga

SEQ ID NO: 2394958 - DNA, 25 bp, Homo sapien
ctagacgcctccatttggcttttca

SEQ ID NO: 2394959 - DNA, 25 bp, Homo sapien
tagacgcctccatttggcttttcag

SEQ ID NO: 2394960 - DNA, 25 bp, Homo sapien
ccttgcaagagtgtagggccagttc

SEQ ID NO: 2394961 - DNA, 25 bp, Homo sapien
tatttctgccataaatccacacttg

SEQ ID NO: 2394962 - DNA, 25 bp, Homo sapien
ccacacttgatctaatctgtctagg

SEQ ID NO: 2394963 - DNA, 25 bp, Homo sapien
aacgtgccccaactcccatgtggtg

SEQ ID NO: 2394964 - DNA, 25 bp, Homo sapien
tgggtcattaacatggcagcaacag

SEQ ID NO: 2394965 - DNA, 25 bp, Homo sapien
caacaaagacctttacagccgctgc

SEQ ID NO: 2394966 - DNA, 25 bp, Homo sapien
cagcaacaaagacctttacagccgc

SEQ ID NO: 2394967 - DNA, 25 bp, Homo sapien
ggtcattaacatggcagcaacagca

SEQ ID NO: 2394968 - DNA, 25 bp, Homo sapien
aagccagcccattcctcacatgtca

SEQ ID NO: 2394969 - DNA, 25 bp, Homo sapien
gcagaccaagccagcccattcctca

SEQ ID NO: 2394970 - DNA, 25 bp, Homo sapien
gtctcttgagtggactgcccgaccc

SEQ ID NO: 2394971 - DNA, 25 bp, Homo sapien
tggactgcccgacccagtgggcaag

SEQ ID NO: 2394972 - DNA, 25 bp, Homo sapien
gctcatttcccggggagatgctgtc

SEQ ID NO: 2394973 - DNA, 25 bp, Homo sapien
tctgctcgcacacagccggtgagct

SEQ ID NO: 2394974 - DNA, 25 bp, Homo sapien
ctcatttcccggggagatgctgtct

SEQ ID NO: 2394975 - DNA, 25 bp, Homo sapien
ttttcagccgcctgttcattctctt

SEQ ID NO: 2394976 - DNA, 25 bp, Homo sapien
taatgaagcatagggctggtgatac

SEQ ID NO: 2394977 - DNA, 25 bp, Homo sapien
tgtcacacaggacatcccggctggc

SEQ ID NO: 2394978 - DNA, 25 bp, Homo sapien
ttctctttgcatctgctgtcacaca

SEQ ID NO: 2394979 - DNA, 25 bp, Homo sapien
ctgcagaagcaaggggtgagcagag

SEQ ID NO: 2394980 - DNA, 25 bp, Homo sapien
caaggggtgagcagaggggcacccc

SEQ ID NO: 2394981 - DNA, 25 bp, Homo sapien
agcaaggggtgagcagaggggcacc

SEQ ID NO: 2394982 - DNA, 25 bp, Homo sapien
aggggtgagcagaggggcaccccat

SEQ ID NO: 2394983 - DNA, 25 bp, Homo sapien
cttgcagaagcccagggttcactac

SEQ ID NO: 2394984 - DNA, 25 bp, Homo sapien
tgcagaagcccagggttcactacaa

SEQ ID NO: 2394985 - DNA, 25 bp, Homo sapien
gaagcccagggttcactacaatgtt

SEQ ID NO: 2394986 - DNA, 25 bp, Homo sapien
cagaagcccagggttcactacaatg

SEQ ID NO: 2394987 - DNA, 25 bp, Homo sapien
actgtttctggcactaacaattgac

SEQ ID NO: 2394988 - DNA, 25 bp, Homo sapien
tgacacagcccgctcatgggtatcc

SEQ ID NO: 2394989 - DNA, 25 bp, Homo sapien
acaattgacacagcccgctcatggg

SEQ ID NO: 2394990 - DNA, 25 bp, Homo sapien
gcactaacaattgacacagcccgct

SEQ ID NO: 2394991 - DNA, 25 bp, Homo sapien
tggtacgtgtggttgtgtcattttc

SEQ ID NO: 2394992 - DNA, 25 bp, Homo sapien
aactctgagctgtggtacgtgtggt

SEQ ID NO: 2394993 - DNA, 25 bp, Homo sapien
aactcttcttccgtgacttgcatcg

SEQ ID NO: 2394994 - DNA, 25 bp, Homo sapien
tctccgccatggtgtaattggaaac

SEQ ID NO: 2394995 - DNA, 25 bp, Homo sapien
ctggggcaccgctgcagttcgggca

SEQ ID NO: 2394996 - DNA, 25 bp, Homo sapien
caccgcattgatgccctgttccctg

SEQ ID NO: 2394997 - DNA, 25 bp, Homo sapien
cctggacacggccttaacctcattt

SEQ ID NO: 2394998 - DNA, 25 bp, Homo sapien
ggctcttggactccgcaggagccca

SEQ ID NO: 2394999 - DNA, 25 bp, Homo sapien
ttttgacttgaatgtgtgacctggc

SEQ ID NO: 2395000 - DNA, 25 bp, Homo sapien
ttcttttgacttgaatgtgtgacct

SEQ ID NO: 2395001 - DNA, 25 bp, Homo sapien
tgggttcttttgacttgaatgtgtg

SEQ ID NO: 2395002 - DNA, 25 bp, Homo sapien
ctgggttcttttgacttgaatgtgt

SEQ ID NO: 2395003 - DNA, 25 bp, Homo sapien
ggcctcccggatacctgtctagatt

SEQ ID NO: 2395004 - DNA, 25 bp, Homo sapien
tggtgtcagtctttccacgatgctg

SEQ ID NO: 2395005 - DNA, 25 bp, Homo sapien
actggcagtgtgtcgggacagtccc

SEQ ID NO: 2395006 - DNA, 25 bp, Homo sapien
gatgtagcctttgccccagcattca

SEQ ID NO: 2395007 - DNA, 25 bp, Homo sapien
acaggtgagggaatgtgagagattt

SEQ ID NO: 2395008 - DNA, 25 bp, Homo sapien
tcagtacttttcaatgatatgggga

SEQ ID NO: 2395009 - DNA, 25 bp, Homo sapien
tacttttcaatgatatggggaagaa

SEQ ID NO: 2395010 - DNA, 25 bp, Homo sapien
agtacttttcaatgatatggggaag

SEQ ID NO: 2395011 - DNA, 25 bp, Homo sapien
tgaagtacgtctgggcagtacgtca

SEQ ID NO: 2395012 - DNA, 25 bp, Homo sapien
tctgggcagtacgtcacagcattca

SEQ ID NO: 2395013 - DNA, 25 bp, Homo sapien
tggaggaatgtatgcttcatcctga

SEQ ID NO: 2395014 - DNA, 25 bp, Homo sapien
agctggaggaatgtatgcttcatcc

SEQ ID NO: 2395015 - DNA, 25 bp, Homo sapien
aaaagtatgaacaattgactcatac

SEQ ID NO: 2395016 - DNA, 25 bp, Homo sapien
caattctaataatctaaacaggttt

SEQ ID NO: 2395017 - DNA, 25 bp, Homo sapien
tacatcactgttgcagagagggtgg

SEQ ID NO: 2395018 - DNA, 25 bp, Homo sapien
caattgactcatacatcactgttgc

SEQ ID NO: 2395019 - DNA, 25 bp, Homo sapien
aacaggattaagtcggtgggcccag

SEQ ID NO: 2395020 - DNA, 25 bp, Homo sapien
ctgtttaaattgacagaccgggcaa

SEQ ID NO: 2395021 - DNA, 25 bp, Homo sapien
gaatggtttacatggatgagcagga

SEQ ID NO: 2395022 - DNA, 25 bp, Homo sapien
tgcagaatggtttacatggatgagc

SEQ ID NO: 2395023 - DNA, 25 bp, Homo sapien
gccaagcactgtcagtaggaaggcg

SEQ ID NO: 2395024 - DNA, 25 bp, Homo sapien
ccgccaagcactgtcagtaggaagg

SEQ ID NO: 2395025 - DNA, 25 bp, Homo sapien
gaggtgagcccatgctgtcacagag

SEQ ID NO: 2395026 - DNA, 25 bp, Homo sapien
taggaaggcgctcgctagaggtgag

SEQ ID NO: 2395027 - DNA, 25 bp, Homo sapien
gctgcatttgcccttaagatataga

SEQ ID NO: 2395028 - DNA, 25 bp, Homo sapien
catgtcgtctgagcattctcgtgca

SEQ ID NO: 2395029 - DNA, 25 bp, Homo sapien
cattctcgtgcattagtgtagctga

SEQ ID NO: 2395030 - DNA, 25 bp, Homo sapien
gatcatcctaagagataccatgtcg

SEQ ID NO: 2395031 - DNA, 25 bp, Homo sapien
cattgcagtcatggtggtagcgaat

SEQ ID NO: 2395032 - DNA, 25 bp, Homo sapien
tgcagtcatggtggtagcgaatcat

SEQ ID NO: 2395033 - DNA, 25 bp, Homo sapien
aaatatgcattgcagtcatggtggt

SEQ ID NO: 2395034 - DNA, 25 bp, Homo sapien
atttaaatatgcattgcagtcatgg

SEQ ID NO: 2395035 - DNA, 25 bp, Homo sapien
ttcatttgctctgtgatgttttcca

SEQ ID NO: 2395036 - DNA, 25 bp, Homo sapien
tcatttgctctgtgatgttttccat

SEQ ID NO: 2395037 - DNA, 25 bp, Homo sapien
tttcatttgctctgtgatgttttcc

SEQ ID NO: 2395038 - DNA, 25 bp, Homo sapien
ttctgtccccaacagtcctgcatgt

SEQ ID NO: 2395039 - DNA, 25 bp, Homo sapien
gctttagacgattaaaacatccctc

SEQ ID NO: 2395040 - DNA, 25 bp, Homo sapien
ggtggttagtcatcacactgcaaag

SEQ ID NO: 2395041 - DNA, 25 bp, Homo sapien
gaatacactcttgcctatagccaac

SEQ ID NO: 2395042 - DNA, 25 bp, Homo sapien
atttgaagagctgtaacctcagctc

SEQ ID NO: 2395043 - DNA, 25 bp, Homo sapien
tttgaagagctgtaacctcagctcc

SEQ ID NO: 2395044 - DNA, 25 bp, Homo sapien
tagttgtacttgccttcttgtgctc

SEQ ID NO: 2395045 - DNA, 25 bp, Homo sapien
ctagttgtacttgccttcttgtgct

SEQ ID NO: 2395046 - DNA, 25 bp, Homo sapien
cttcaggatactgttaaaacaggtg

SEQ ID NO: 2395047 - DNA, 25 bp, Homo sapien
tttatggatccagtcttgattccca

SEQ ID NO: 2395048 - DNA, 25 bp, Homo sapien
aaaacaggtgtcttttatggatcca

SEQ ID NO: 2395049 - DNA, 25 bp, Homo sapien
tcagtgcttttgtgccccatgccct

SEQ ID NO: 2395050 - DNA, 25 bp, Homo sapien
cagagtccatactgtaggctctgaa

SEQ ID NO: 2395051 - DNA, 25 bp, Homo sapien
gacatgctccaaaagatggcccaag

SEQ ID NO: 2395052 - DNA, 25 bp, Homo sapien
aacctccactgtggaaccacatggg

SEQ ID NO: 2395053 - DNA, 25 bp, Homo sapien
ccacggaaaagccaggacatgctcc

SEQ ID NO: 2395054 - DNA, 25 bp, Homo sapien
aggttgatgtccaggatactgttta

SEQ ID NO: 2395055 - DNA, 25 bp, Homo sapien
aattctggctgtaaattgtaacaag

SEQ ID NO: 2395056 - DNA, 25 bp, Homo sapien
caagatatcggatagcctctccatt

SEQ ID NO: 2395057 - DNA, 25 bp, Homo sapien
agagaggttgatgtccaggatactg

SEQ ID NO: 2395058 - DNA, 25 bp, Homo sapien
gcctcggaggaccctttctgaaatc

SEQ ID NO: 2395059 - DNA, 25 bp, Homo sapien
tcctcttttcatacacggttacttg

SEQ ID NO: 2395060 - DNA, 25 bp, Homo sapien
agtgaattcaaatcccttgtgggtg

SEQ ID NO: 2395061 - DNA, 25 bp, Homo sapien
caaatcccttgtgggtgtttagagc

SEQ ID NO: 2395062 - DNA, 25 bp, Homo sapien
ctgcagatggattaactgatgattc

SEQ ID NO: 2395063 - DNA, 25 bp, Homo sapien
ggattaactgatgattcctgttcat

SEQ ID NO: 2395064 - DNA, 25 bp, Homo sapien
gatggattaactgatgattcctgtt

SEQ ID NO: 2395065 - DNA, 25 bp, Homo sapien
cagatggattaactgatgattcctg

SEQ ID NO: 2395066 - DNA, 25 bp, Homo sapien
cataaaggagttaaacgtttgccag

SEQ ID NO: 2395067 - DNA, 25 bp, Homo sapien
gagttaaacgtttgccagatgggca

SEQ ID NO: 2395068 - DNA, 25 bp, Homo sapien
ggccagctgaaagagaacgtcactg

SEQ ID NO: 2395069 - DNA, 25 bp, Homo sapien
ttggcagcgactctgggcgaaacca

SEQ ID NO: 2395070 - DNA, 25 bp, Homo sapien
ccatgtggtggtgactccacacaaa

SEQ ID NO: 2395071 - DNA, 25 bp, Homo sapien
tccacacaaaatgcagtgggtgaca

SEQ ID NO: 2395072 - DNA, 25 bp, Homo sapien
gagccgtcgaagagcacaggtctca

SEQ ID NO: 2395073 - DNA, 25 bp, Homo sapien
tcacgggaatgaggaatgcccatgt

SEQ ID NO: 2395074 - DNA, 25 bp, Homo sapien
ctgatcccaacagggtacgatgtcc

SEQ ID NO: 2395075 - DNA, 25 bp, Homo sapien
tcccttgtctactgggcatatgctg

SEQ ID NO: 2395076 - DNA, 25 bp, Homo sapien
agggtacgatgtcctcatccgcagc

SEQ ID NO: 2395077 - DNA, 25 bp, Homo sapien
ttcttcacgtggctcccttgtctac

SEQ ID NO: 2395078 - DNA, 25 bp, Homo sapien
tagatgttgacagaatggggcaggg

SEQ ID NO: 2395079 - DNA, 25 bp, Homo sapien
tgggactgaaacatctccagctggc

SEQ ID NO: 2395080 - DNA, 25 bp, Homo sapien
tgtgctttacgggaaactgtcagcg

SEQ ID NO: 2395081 - DNA, 25 bp, Homo sapien
tcatctgtttgcagacttgatgcaa

SEQ ID NO: 2395082 - DNA, 25 bp, Homo sapien
ctggctctcagacccaaggagtttg

SEQ ID NO: 2395083 - DNA, 25 bp, Homo sapien
gcttgaaggtggaggggatgtaaga

SEQ ID NO: 2395084 - DNA, 25 bp, Homo sapien
cgagatactgcagctccaggatgct

SEQ ID NO: 2395085 - DNA, 25 bp, Homo sapien
actgcagctccaggatgcttgaagg

SEQ ID NO: 2395086 - DNA, 25 bp, Homo sapien
cagctccaggatgcttgaaggtgga

SEQ ID NO: 2395087 - DNA, 25 bp, Homo sapien
tgtcctcaatgaagggcagggaaga

SEQ ID NO: 2395088 - DNA, 25 bp, Homo sapien
cctcatggacttgcctgcacttgaa

SEQ ID NO: 2395089 - DNA, 25 bp, Homo sapien
agtgtcgggccttttgaaattgtca

SEQ ID NO: 2395090 - DNA, 25 bp, Homo sapien
ccaagtgccaagtgacgaaagtgtc

SEQ ID NO: 2395091 - DNA, 25 bp, Homo sapien
ccactgaaccagacaaggtagattc

SEQ ID NO: 2395092 - DNA, 25 bp, Homo sapien
aatctgcagacctccactgaaccag

SEQ ID NO: 2395093 - DNA, 25 bp, Homo sapien
acaggcaatctgcagacctccactg

SEQ ID NO: 2395094 - DNA, 25 bp, Homo sapien
gaaccagacaaggtagattctcatg

SEQ ID NO: 2395095 - DNA, 25 bp, Homo sapien
ggctgtaagaccccgaggccaggac

SEQ ID NO: 2395096 - DNA, 25 bp, Homo sapien
caggacccctctctatcgaggtggc

SEQ ID NO: 2395097 - DNA, 25 bp, Homo sapien
aggccaggacccctctctatcgagg

SEQ ID NO: 2395098 - DNA, 25 bp, Homo sapien
gacccctctctatcgaggtggccat

SEQ ID NO: 2395099 - DNA, 25 bp, Homo sapien
tcttaacttctggcccaattgtcag

SEQ ID NO: 2395100 - DNA, 25 bp, Homo sapien
ctgagaactcggtgaaaattcttaa

SEQ ID NO: 2395101 - DNA, 25 bp, Homo sapien
taacttctggcccaattgtcagcag

SEQ ID NO: 2395102 - DNA, 25 bp, Homo sapien
acttctggcccaattgtcagcagca

SEQ ID NO: 2395103 - DNA, 25 bp, Homo sapien
gtctcctgatacatggtgttagcca

SEQ ID NO: 2395104 - DNA, 25 bp, Homo sapien
cactccagctgccttgttctgtagg

SEQ ID NO: 2395105 - DNA, 25 bp, Homo sapien
caggcaggacgagagagtccatttc

SEQ ID NO: 2395106 - DNA, 25 bp, Homo sapien
ccatttctgcctcttcgaaggagtc

SEQ ID NO: 2395107 - DNA, 25 bp, Homo sapien
tggcctctgacaccaatggttgtca

SEQ ID NO: 2395108 - DNA, 25 bp, Homo sapien
tctgacaccaatggttgtcatgtgg

SEQ ID NO: 2395109 - DNA, 25 bp, Homo sapien
gacaccaatggttgtcatgtggaac

SEQ ID NO: 2395110 - DNA, 25 bp, Homo sapien
aaggcactggcctctgacaccaatg

SEQ ID NO: 2395111 - DNA, 25 bp, Homo sapien
ccattgcctctggtcctaaaatatt

SEQ ID NO: 2395112 - DNA, 25 bp, Homo sapien
gaatgaaccattgcctctggtccta

SEQ ID NO: 2395113 - DNA, 25 bp, Homo sapien
gagattactggaatgaaccattgcc

SEQ ID NO: 2395114 - DNA, 25 bp, Homo sapien
tactctcaccccagcataccaaagt

SEQ ID NO: 2395115 - DNA, 25 bp, Homo sapien
gggctggcccttggggtggacatag

SEQ ID NO: 2395116 - DNA, 25 bp, Homo sapien
aggcctggccgaaatgcctgtacac

SEQ ID NO: 2395117 - DNA, 25 bp, Homo sapien
ccaggcctggccgaaatgcctgtac

SEQ ID NO: 2395118 - DNA, 25 bp, Homo sapien
ggggctggcccttggggtggacata

SEQ ID NO: 2395119 - DNA, 25 bp, Homo sapien
cttggcccttgtaagtatgggagag

SEQ ID NO: 2395120 - DNA, 25 bp, Homo sapien
ttgcccaggcttgaggatgcggctg

SEQ ID NO: 2395121 - DNA, 25 bp, Homo sapien
caggcttgaggatgcggctgtagat

SEQ ID NO: 2395122 - DNA, 25 bp, Homo sapien
gctgggcaaaggtgagggttttgcc

SEQ ID NO: 2395123 - DNA, 25 bp, Homo sapien
acaacatccattatgatccccacaa

SEQ ID NO: 2395124 - DNA, 25 bp, Homo sapien
gcacgggcacaacatccattatgat

SEQ ID NO: 2395125 - DNA, 25 bp, Homo sapien
ggcacaacatccattatgatcccca

SEQ ID NO: 2395126 - DNA, 25 bp, Homo sapien
tccagcacgggcacaacatccatta

SEQ ID NO: 2395127 - DNA, 25 bp, Homo sapien
tttctgtgactcattaacaatgtct

SEQ ID NO: 2395128 - DNA, 25 bp, Homo sapien
ttctgtgactcattaacaatgtctt

SEQ ID NO: 2395129 - DNA, 25 bp, Homo sapien
gtttctgtgactcattaacaatgtc

SEQ ID NO: 2395130 - DNA, 25 bp, Homo sapien
tcctgatgccgaaccttttggtcct

SEQ ID NO: 2395131 - DNA, 25 bp, Homo sapien
cttgggctcctgatgccgaaccttt

SEQ ID NO: 2395132 - DNA, 25 bp, Homo sapien
catctggccggaaacctgaacagct

SEQ ID NO: 2395133 - DNA, 25 bp, Homo sapien
ttggttcatctggccggaaacctga

SEQ ID NO: 2395134 - DNA, 25 bp, Homo sapien
accctgcccgtgcttatggttcctt

SEQ ID NO: 2395135 - DNA, 25 bp, Homo sapien
gtgacagctgcaaccccgagtgttc

SEQ ID NO: 2395136 - DNA, 25 bp, Homo sapien
ccagcaactgtcctttctggtcttc

SEQ ID NO: 2395137 - DNA, 25 bp, Homo sapien
gggatcttacacacccttccataat

SEQ ID NO: 2395138 - DNA, 25 bp, Homo sapien
agcctcctccgtgggtgcggcaggt

SEQ ID NO: 2395139 - DNA, 25 bp, Homo sapien
tataggtgctttccccgcctgtagc

SEQ ID NO: 2395140 - DNA, 25 bp, Homo sapien
tcctccgtgggtgcggcaggtagaa

SEQ ID NO: 2395141 - DNA, 25 bp, Homo sapien
gaagggcatataggtgctttccccg

SEQ ID NO: 2395142 - DNA, 25 bp, Homo sapien
atggagctgctcatgctttccacca

SEQ ID NO: 2395143 - DNA, 25 bp, Homo sapien
tcctgaatggagctgctcatgcttt

SEQ ID NO: 2395144 - DNA, 25 bp, Homo sapien
agctcccttgccatcaggctcttcc

SEQ ID NO: 2395145 - DNA, 25 bp, Homo sapien
tgctttccaccagcctgctactggt

SEQ ID NO: 2395146 - DNA, 25 bp, Homo sapien
tagctgcatgtcatcccggagttct

SEQ ID NO: 2395147 - DNA, 25 bp, Homo sapien
catagctgcatgtcatcccggagtt

SEQ ID NO: 2395148 - DNA, 25 bp, Homo sapien
gctgcatgtcatcccggagttctct

SEQ ID NO: 2395149 - DNA, 25 bp, Homo sapien
tccatagctgcatgtcatcccggag

SEQ ID NO: 2395150 - DNA, 25 bp, Homo sapien
ccaagcaatggccccagctggtcag

SEQ ID NO: 2395151 - DNA, 25 bp, Homo sapien
atggccccagctggtcagccaccag

SEQ ID NO: 2395152 - DNA, 25 bp, Homo sapien
tggccccagctggtcagccaccagc

SEQ ID NO: 2395153 - DNA, 25 bp, Homo sapien
agcaatggccccagctggtcagcca

SEQ ID NO: 2395154 - DNA, 25 bp, Homo sapien
gaaggggcagtagtatggtatagtc

SEQ ID NO: 2395155 - DNA, 25 bp, Homo sapien
ctttttgaaggggcagtagtatggt

SEQ ID NO: 2395156 - DNA, 25 bp, Homo sapien
aaggggcagtagtatggtatagtca

SEQ ID NO: 2395157 - DNA, 25 bp, Homo sapien
tttgaaggggcagtagtatggtata

SEQ ID NO: 2395158 - DNA, 25 bp, Homo sapien
ggagcccttcttgtgaagtgtagta

SEQ ID NO: 2395159 - DNA, 25 bp, Homo sapien
caggagcccttcttgtgaagtgtag

SEQ ID NO: 2395160 - DNA, 25 bp, Homo sapien
gagcccttcttgtgaagtgtagtac

SEQ ID NO: 2395161 - DNA, 25 bp, Homo sapien
tcaggagcccttcttgtgaagtgta

SEQ ID NO: 2395162 - DNA, 25 bp, Homo sapien
ctgcctgaggtgctgtaatgggaac

SEQ ID NO: 2395163 - DNA, 25 bp, Homo sapien
tcagctgcctgaggtgctgtaatgg

SEQ ID NO: 2395164 - DNA, 25 bp, Homo sapien
agctgcctgaggtgctgtaatggga

SEQ ID NO: 2395165 - DNA, 25 bp, Homo sapien
gctgcctgaggtgctgtaatgggaa

SEQ ID NO: 2395166 - DNA, 25 bp, Homo sapien
ctgaacaaggatgcgcgaagcctgt

SEQ ID NO: 2395167 - DNA, 25 bp, Homo sapien
gaaatggcacacgagtgttccgccg

SEQ ID NO: 2395168 - DNA, 25 bp, Homo sapien
gaagcctgtgcggatggtcgccata

SEQ ID NO: 2395169 - DNA, 25 bp, Homo sapien
tgttccgccgactgtagaaaggcag

SEQ ID NO: 2395170 - DNA, 25 bp, Homo sapien
ctctcttgatacaccgtgtggagga

SEQ ID NO: 2395171 - DNA, 25 bp, Homo sapien
cagagttcgtgttggtttcctctct

SEQ ID NO: 2395172 - DNA, 25 bp, Homo sapien
caccgtgtggaggatttcaccaccc

SEQ ID NO: 2395173 - DNA, 25 bp, Homo sapien
gccatgtaagttgtctggcataaca

SEQ ID NO: 2395174 - DNA, 25 bp, Homo sapien
agcttctccaggtcctccacggcca

SEQ ID NO: 2395175 - DNA, 25 bp, Homo sapien
gcttctccaggtcctccacggccat

SEQ ID NO: 2395176 - DNA, 25 bp, Homo sapien
cactgtagtgataaggataaggtga

SEQ ID NO: 2395177 - DNA, 25 bp, Homo sapien
ctagtcactgtagtgataaggataa

SEQ ID NO: 2395178 - DNA, 25 bp, Homo sapien
gtgataaggataaggtgataactga

SEQ ID NO: 2395179 - DNA, 25 bp, Homo sapien
gtagtgataaggataaggtgataac

SEQ ID NO: 2395180 - DNA, 25 bp, Homo sapien
tgcccttgccatcgccggatgcagt

SEQ ID NO: 2395181 - DNA, 25 bp, Homo sapien
ttgcccttgccatcgccggatgcag

SEQ ID NO: 2395182 - DNA, 25 bp, Homo sapien
tgccccaagaggatgaccaggtgcc

SEQ ID NO: 2395183 - DNA, 25 bp, Homo sapien
aggatgaccaggtgccgcctccatc

SEQ ID NO: 2395184 - DNA, 25 bp, Homo sapien
accaggcaggacacggccaaaagct

SEQ ID NO: 2395185 - DNA, 25 bp, Homo sapien
caccaggcaggacacggccaaaagc

SEQ ID NO: 2395186 - DNA, 25 bp, Homo sapien
tctgtgtatatgcaagttccgctcc

SEQ ID NO: 2395187 - DNA, 25 bp, Homo sapien
tgttctgtgtatatgcaagttccgc

SEQ ID NO: 2395188 - DNA, 25 bp, Homo sapien
ctgttctgtgtatatgcaagttccg

SEQ ID NO: 2395189 - DNA, 25 bp, Homo sapien
tgtgtatatgcaagttccgctcccc

SEQ ID NO: 2395190 - DNA, 25 bp, Homo sapien
tatcttgacattatacaggtgttgg

SEQ ID NO: 2395191 - DNA, 25 bp, Homo sapien
gatctggtaaagagctatcttgaca

SEQ ID NO: 2395192 - DNA, 25 bp, Homo sapien
aaagctaaatcgcttagtgatctgg

SEQ ID NO: 2395193 - DNA, 25 bp, Homo sapien
cgcttagtgatctggtaaagagcta

SEQ ID NO: 2395194 - DNA, 25 bp, Homo sapien
tctggtgtctaggacttgggaaaca

SEQ ID NO: 2395195 - DNA, 25 bp, Homo sapien
cttcatggtggtcacgataactctg

SEQ ID NO: 2395196 - DNA, 25 bp, Homo sapien
tgcctgtttgacagctttggtcacc

SEQ ID NO: 2395197 - DNA, 25 bp, Homo sapien
gacagctttggtcaccctcactggc

SEQ ID NO: 2395198 - DNA, 25 bp, Homo sapien
tcctggccttcgatcacaggattcc

SEQ ID NO: 2395199 - DNA, 25 bp, Homo sapien
gatcacaggattcccactgttgtga

SEQ ID NO: 2395200 - DNA, 25 bp, Homo sapien
cccatctctacttggcaaaatccct

SEQ ID NO: 2395201 - DNA, 25 bp, Homo sapien
ttgtccttcaagactgatacctcct

SEQ ID NO: 2395202 - DNA, 25 bp, Homo sapien
ctctacttggcaaaatccctttctt

SEQ ID NO: 2395203 - DNA, 25 bp, Homo sapien
atctctacttggcaaaatccctttc

SEQ ID NO: 2395204 - DNA, 25 bp, Homo sapien
ggtcaattgaccaaaacactcagag

SEQ ID NO: 2395205 - DNA, 25 bp, Homo sapien
gaagcatggcaacagagtatctggc

SEQ ID NO: 2395206 - DNA, 25 bp, Homo sapien
ccttaggaaggctagagcgaggcat

SEQ ID NO: 2395207 - DNA, 25 bp, Homo sapien
tgatcttgcagggttccagcttgag

SEQ ID NO: 2395208 - DNA, 25 bp, Homo sapien
tatttggtttacaactgatgagacc

SEQ ID NO: 2395209 - DNA, 25 bp, Homo sapien
tgatgagaccacaacgaaagtatga

SEQ ID NO: 2395210 - DNA, 25 bp, Homo sapien
tttgcatcatgcataggtgcagact

SEQ ID NO: 2395211 - DNA, 25 bp, Homo sapien
tatgatttgagatagctaagagcag

SEQ ID NO: 2395212 - DNA, 25 bp, Homo sapien
ccgaagtcccatctgcaactcctgg

SEQ ID NO: 2395213 - DNA, 25 bp, Homo sapien
actccgaagtcccatctgcaactcc

SEQ ID NO: 2395214 - DNA, 25 bp, Homo sapien
ggtcccgactccgaagtcccatctg

SEQ ID NO: 2395215 - DNA, 25 bp, Homo sapien
cccgactccgaagtcccatctgcaa

SEQ ID NO: 2395216 - DNA, 25 bp, Homo sapien
taggtaaaaagctgatcacttggga

SEQ ID NO: 2395217 - DNA, 25 bp, Homo sapien
tacatgttactggtgagttctacgg

SEQ ID NO: 2395218 - DNA, 25 bp, Homo sapien
aacgtacgatgtagtgcatatgccc

SEQ ID NO: 2395219 - DNA, 25 bp, Homo sapien
taaatcgctaggtggactcacgtgg

SEQ ID NO: 2395220 - DNA, 25 bp, Homo sapien
tgccacggggaagtagcgccgctct

SEQ ID NO: 2395221 - DNA, 25 bp, Homo sapien
aagtagcgccgctctgtggagaggg

SEQ ID NO: 2395222 - DNA, 25 bp, Homo sapien
caccgtgatccattctattgtctcc

SEQ ID NO: 2395223 - DNA, 25 bp, Homo sapien
tgaatttgccggctggtagacaccg

SEQ ID NO: 2395224 - DNA, 25 bp, Homo sapien
ggaacacactgctcctttggtgcca

SEQ ID NO: 2395225 - DNA, 25 bp, Homo sapien
gatgctcgtcttctgtgtagcgggc

SEQ ID NO: 2395226 - DNA, 25 bp, Homo sapien
tccagcggcgtctctcctctggctg

SEQ ID NO: 2395227 - DNA, 25 bp, Homo sapien
ggatcccgaggaagatgctcgtctt

SEQ ID NO: 2395228 - DNA, 25 bp, Homo sapien
cttccagaagttcattcgtatgcca

SEQ ID NO: 2395229 - DNA, 25 bp, Homo sapien
ttcgtatgccaataataagagttgg

SEQ ID NO: 2395230 - DNA, 25 bp, Homo sapien
tttgctagcagtgggacagcagaga

SEQ ID NO: 2395231 - DNA, 25 bp, Homo sapien
agttggttttgctagcagtgggaca

SEQ ID NO: 2395232 - DNA, 25 bp, Homo sapien
agcagagcaagaggcagggaggctg

SEQ ID NO: 2395233 - DNA, 25 bp, Homo sapien
gggaggctggctttgtcacactgtt

SEQ ID NO: 2395234 - DNA, 25 bp, Homo sapien
ggaggctggctttgtcacactgttc

SEQ ID NO: 2395235 - DNA, 25 bp, Homo sapien
gcagggaggctggctttgtcacact

SEQ ID NO: 2395236 - DNA, 25 bp, Homo sapien
cacacgctgaggctgtaaggcgcac

SEQ ID NO: 2395237 - DNA, 25 bp, Homo sapien
tcttggcttttcgagaccgcaggca

SEQ ID NO: 2395238 - DNA, 25 bp, Homo sapien
ttttccacgggcaggacagggactg

SEQ ID NO: 2395239 - DNA, 25 bp, Homo sapien
tgccatatttgtacacgctgccagg

SEQ ID NO: 2395240 - DNA, 25 bp, Homo sapien
ggcatgtctggttcacagtttagca

SEQ ID NO: 2395241 - DNA, 25 bp, Homo sapien
tactcttcgcttctggtatctggcg

SEQ ID NO: 2395242 - DNA, 25 bp, Homo sapien
aaaattgttcccgagcgatagatgg

SEQ ID NO: 2395243 - DNA, 25 bp, Homo sapien
ggcgttctttggtacacagttctgg

SEQ ID NO: 2395244 - DNA, 25 bp, Homo sapien
taggctcagatgtcgtaatttgcac

SEQ ID NO: 2395245 - DNA, 25 bp, Homo sapien
tgagttcttcgtactggaaaagccc

SEQ ID NO: 2395246 - DNA, 25 bp, Homo sapien
ggtaccaggtgtcaggaaacagact

SEQ ID NO: 2395247 - DNA, 25 bp, Homo sapien
gaatctgcgagtagatgaacctgca

SEQ ID NO: 2395248 - DNA, 25 bp, Homo sapien
gaaggaatcctggattttgccctct

SEQ ID NO: 2395249 - DNA, 25 bp, Homo sapien
gccagagttttctcaagagccagct

SEQ ID NO: 2395250 - DNA, 25 bp, Homo sapien
aagtggagcagccagcaagtaagct

SEQ ID NO: 2395251 - DNA, 25 bp, Homo sapien
ataaggaagggcacaagcctacccg

SEQ ID NO: 2395252 - DNA, 25 bp, Homo sapien
tatcagaccctattctcggctcagg

SEQ ID NO: 2395253 - DNA, 25 bp, Homo sapien
cataattaaactccatgcgggtcca

SEQ ID NO: 2395254 - DNA, 25 bp, Homo sapien
caaatgtgtacgtgcatgctgtagc

SEQ ID NO: 2395255 - DNA, 25 bp, Homo sapien
caggattggcaactcttcagacgga

SEQ ID NO: 2395256 - DNA, 25 bp, Homo sapien
catgatcagtgtatgcgaaaaggtt

SEQ ID NO: 2395257 - DNA, 25 bp, Homo sapien
caagtgtgatgccatatcaagtcca

SEQ ID NO: 2395258 - DNA, 25 bp, Homo sapien
tcaagtccatgttattctctcacag

SEQ ID NO: 2395259 - DNA, 25 bp, Homo sapien
tctctcacagtgtactctataagag

SEQ ID NO: 2395260 - DNA, 25 bp, Homo sapien
gtgcttcaccagcttataggtgatg

SEQ ID NO: 2395261 - DNA, 25 bp, Homo sapien
caccagcttataggtgatggagaac

SEQ ID NO: 2395262 - DNA, 25 bp, Homo sapien
gcttcaccagcttataggtgatgga

SEQ ID NO: 2395263 - DNA, 25 bp, Homo sapien
atgccgggccggcagtgcttcacca

SEQ ID NO: 2395264 - DNA, 25 bp, Homo sapien
tgcggccgctggcacgcactgtaca

SEQ ID NO: 2395265 - DNA, 25 bp, Homo sapien
agcgagttctgtttccgccgcaggc

SEQ ID NO: 2395266 - DNA, 25 bp, Homo sapien
cagcagcgagttctgtttccgccgc

SEQ ID NO: 2395267 - DNA, 25 bp, Homo sapien
ggttcacttgcggccgctggcacgc

SEQ ID NO: 2395268 - DNA, 25 bp, Homo sapien
tcgcaggacacgtcccgtcccgcag

SEQ ID NO: 2395269 - DNA, 25 bp, Homo sapien
tgctcgcaggacacgtcccgtcccg

SEQ ID NO: 2395270 - DNA, 25 bp, Homo sapien
gtcccgtcccgcagctggtccaagt

SEQ ID NO: 2395271 - DNA, 25 bp, Homo sapien
cgtcccgtcccgcagctggtccaag

SEQ ID NO: 2395272 - DNA, 25 bp, Homo sapien
tgtgccgcggtaggtgagtttgcgg

SEQ ID NO: 2395273 - DNA, 25 bp, Homo sapien
gtgccgcggtaggtgagtttgcgga

SEQ ID NO: 2395274 - DNA, 25 bp, Homo sapien
ctgtgccgcggtaggtgagtttgcg

SEQ ID NO: 2395275 - DNA, 25 bp, Homo sapien
ctcggccatcttgtcggatcctcag

SEQ ID NO: 2395276 - DNA, 25 bp, Homo sapien
catgttgagggtatgcaatccctgc

SEQ ID NO: 2395277 - DNA, 25 bp, Homo sapien
gataaaagggtaaacagatttgtca

SEQ ID NO: 2395278 - DNA, 25 bp, Homo sapien
caggatagacacagagctaaaaagt

SEQ ID NO: 2395279 - DNA, 25 bp, Homo sapien
tcactgaagttctgtcatttcccag

SEQ ID NO: 2395280 - DNA, 25 bp, Homo sapien
tagagttccaattagatgcatgtta

SEQ ID NO: 2395281 - DNA, 25 bp, Homo sapien
ggtgttccatggtaggaaatatgtc

SEQ ID NO: 2395282 - DNA, 25 bp, Homo sapien
taactcccaatatgatgacattagg

SEQ ID NO: 2395283 - DNA, 25 bp, Homo sapien
tctttgggtggttattaggtcacaa

SEQ ID NO: 2395284 - DNA, 25 bp, Homo sapien
ttaattcagacagcggtattccagg

SEQ ID NO: 2395285 - DNA, 25 bp, Homo sapien
tattccaggattagcagccagtgtc

SEQ ID NO: 2395286 - DNA, 25 bp, Homo sapien
aatggactgactgaaactcgctaag

SEQ ID NO: 2395287 - DNA, 25 bp, Homo sapien
ttttgagcctctgaagggagtgcca

SEQ ID NO: 2395288 - DNA, 25 bp, Homo sapien
gaatcaagaatccaatcaatccagg

SEQ ID NO: 2395289 - DNA, 25 bp, Homo sapien
cccctgaaacattggagagtaactt

SEQ ID NO: 2395290 - DNA, 25 bp, Homo sapien
gaaaaatcactgagctactgtatcc

SEQ ID NO: 2395291 - DNA, 25 bp, Homo sapien
ggaatggctgtatactcttcacact

SEQ ID NO: 2395292 - DNA, 25 bp, Homo sapien
gaaggcggtgaaaccccatgacttg

SEQ ID NO: 2395293 - DNA, 25 bp, Homo sapien
caaagtcttgagctcaggaacccac

SEQ ID NO: 2395294 - DNA, 25 bp, Homo sapien
taaatactgccacatgacgagggat

SEQ ID NO: 2395295 - DNA, 25 bp, Homo sapien
ttaactaatcgaagagccactgctg

SEQ ID NO: 2395296 - DNA, 25 bp, Homo sapien
ggatctcgttcctccgggacaggaa

SEQ ID NO: 2395297 - DNA, 25 bp, Homo sapien
taatgggtcactggccatcgggctg

SEQ ID NO: 2395298 - DNA, 25 bp, Homo sapien
ccagcgtctggtgttggaacctgca

SEQ ID NO: 2395299 - DNA, 25 bp, Homo sapien
aacctgcagttctccgggtcgaaat

SEQ ID NO: 2395300 - DNA, 25 bp, Homo sapien
tgtaatcaccacaaagccagcatcc

SEQ ID NO: 2395301 - DNA, 25 bp, Homo sapien
cctgtaatcaccacaaagccagcat

SEQ ID NO: 2395302 - DNA, 25 bp, Homo sapien
gtaatcaccacaaagccagcatcct

SEQ ID NO: 2395303 - DNA, 25 bp, Homo sapien
acacctgtaatcaccacaaagccag

SEQ ID NO: 2395304 - DNA, 25 bp, Homo sapien
tcctggaattcttctacctgtgctg

SEQ ID NO: 2395305 - DNA, 25 bp, Homo sapien
tgttgcctgtatggggcactctgag

SEQ ID NO: 2395306 - DNA, 25 bp, Homo sapien
aattcttctacctgtgctgaacaca

SEQ ID NO: 2395307 - DNA, 25 bp, Homo sapien
tcatcttgttgcctgtatggggcac

SEQ ID NO: 2395308 - DNA, 25 bp, Homo sapien
gtacaggtggatcaggccaccccag

SEQ ID NO: 2395309 - DNA, 25 bp, Homo sapien
tggtctgatggggtgcgccatccac

SEQ ID NO: 2395310 - DNA, 25 bp, Homo sapien
accccagctggagccgagcagtggg

SEQ ID NO: 2395311 - DNA, 25 bp, Homo sapien
ggcattgggataggctctgaggacg

SEQ ID NO: 2395312 - DNA, 25 bp, Homo sapien
ctgcacaaggcacagacccagagcc

SEQ ID NO: 2395313 - DNA, 25 bp, Homo sapien
acagacccagagcctgaggcgggcc

SEQ ID NO: 2395314 - DNA, 25 bp, Homo sapien
agagcctgaggcgggcccccaacat

SEQ ID NO: 2395315 - DNA, 25 bp, Homo sapien
acccagagcctgaggcgggccccca

SEQ ID NO: 2395316 - DNA, 25 bp, Homo sapien
tggtgtgaggatcctagactggatt

SEQ ID NO: 2395317 - DNA, 25 bp, Homo sapien
gatcctagactggattccctccttt

SEQ ID NO: 2395318 - DNA, 25 bp, Homo sapien
tgacactcctgtcgggactctcctg

SEQ ID NO: 2395319 - DNA, 25 bp, Homo sapien
acctgacactcctgtcgggactctc

SEQ ID NO: 2395320 - DNA, 25 bp, Homo sapien
tgtcacttcgtccactgcctgagac

SEQ ID NO: 2395321 - DNA, 25 bp, Homo sapien
gtagttagttgtcacttcgtccact

SEQ ID NO: 2395322 - DNA, 25 bp, Homo sapien
gttagttgtcacttcgtccactgcc

SEQ ID NO: 2395323 - DNA, 25 bp, Homo sapien
gttgtcacttcgtccactgcctgag

SEQ ID NO: 2395324 - DNA, 25 bp, Homo sapien
ctgcaagcacaggctggacccgcag

SEQ ID NO: 2395325 - DNA, 25 bp, Homo sapien
cagcttgaggggttggggtgggtct

SEQ ID NO: 2395326 - DNA, 25 bp, Homo sapien
gttggggtgggtctgcttctcccat

SEQ ID NO: 2395327 - DNA, 25 bp, Homo sapien
gcacaggctggacccgcagcttgag

SEQ ID NO: 2395328 - DNA, 25 bp, Homo sapien
taatctgtgcttcgttgacttctgg

SEQ ID NO: 2395329 - DNA, 25 bp, Homo sapien
taactgtaacactggtctgagcaca

SEQ ID NO: 2395330 - DNA, 25 bp, Homo sapien
gctaaatgaatggaggcagcccaat

SEQ ID NO: 2395331 - DNA, 25 bp, Homo sapien
taatgaatgtttacccacgaatggg

SEQ ID NO: 2395332 - DNA, 25 bp, Homo sapien
tccggtttgtaatggacctctgaag

SEQ ID NO: 2395333 - DNA, 25 bp, Homo sapien
tgcaagcaaggaactttcaggaata

SEQ ID NO: 2395334 - DNA, 25 bp, Homo sapien
tggtatggccagaaaagtataaccg

SEQ ID NO: 2395335 - DNA, 25 bp, Homo sapien
tgggccgtctagctacattaatcct

SEQ ID NO: 2395336 - DNA, 25 bp, Homo sapien
tgctcgggctgggataacccttttc

SEQ ID NO: 2395337 - DNA, 25 bp, Homo sapien
gttctttgctcgggctgggataacc

SEQ ID NO: 2395338 - DNA, 25 bp, Homo sapien
tttgcctttacaccttggctggggc

SEQ ID NO: 2395339 - DNA, 25 bp, Homo sapien
cttgggttctttgctcgggctggga

SEQ ID NO: 2395340 - DNA, 25 bp, Homo sapien
aatagcttcacgagtgaagagagac

SEQ ID NO: 2395341 - DNA, 25 bp, Homo sapien
tgaggggcaccgtggaccactgtgt

SEQ ID NO: 2395342 - DNA, 25 bp, Homo sapien
aaggcttgacatgtgtctctgaagc

SEQ ID NO: 2395343 - DNA, 25 bp, Homo sapien
ccccatggaaggcttgacatgtgtc

SEQ ID NO: 2395344 - DNA, 25 bp, Homo sapien
ttgttttcacggtatctgttattag

SEQ ID NO: 2395345 - DNA, 25 bp, Homo sapien
ggtattgttttcacggtatctgtta

SEQ ID NO: 2395346 - DNA, 25 bp, Homo sapien
ttttcacggtatctgttattagctt

SEQ ID NO: 2395347 - DNA, 25 bp, Homo sapien
ttaatggatcatggacacattccag

SEQ ID NO: 2395348 - DNA, 25 bp, Homo sapien
tcacccccagagatggcatgaaagg

SEQ ID NO: 2395349 - DNA, 25 bp, Homo sapien
cacagcaggaacgtggcacggagat

SEQ ID NO: 2395350 - DNA, 25 bp, Homo sapien
cagagttgctcgactgaaggcacat

SEQ ID NO: 2395351 - DNA, 25 bp, Homo sapien
acatagatttatttggaacccagag

SEQ ID NO: 2395352 - DNA, 25 bp, Homo sapien
tatcccagaaacctagcctagtccg

SEQ ID NO: 2395353 - DNA, 25 bp, Homo sapien
gcgggacttggagatctatgtctta

SEQ ID NO: 2395354 - DNA, 25 bp, Homo sapien
tatgtcttaacgtgctcttgggtga

SEQ ID NO: 2395355 - DNA, 25 bp, Homo sapien
tgtattaaacgtgtagactcctggg

SEQ ID NO: 2395356 - DNA, 25 bp, Homo sapien
gggcataatcgcatcctccacctgt

SEQ ID NO: 2395357 - DNA, 25 bp, Homo sapien
catgatggaccagattcaggacctg

SEQ ID NO: 2395358 - DNA, 25 bp, Homo sapien
gaggtactcagcgatttacagaaag

SEQ ID NO: 2395359 - DNA, 25 bp, Homo sapien
cagctctctggtgccggaatttcag

SEQ ID NO: 2395360 - DNA, 25 bp, Homo sapien
tatgcaacccatgtagttagtggcc

SEQ ID NO: 2395361 - DNA, 25 bp, Homo sapien
cctcgtttgaatgggctacatgccg

SEQ ID NO: 2395362 - DNA, 25 bp, Homo sapien
ccgataccttctctcctcgagggag

SEQ ID NO: 2395363 - DNA, 25 bp, Homo sapien
tctccccaagcacaggataagcctg

SEQ ID NO: 2395364 - DNA, 25 bp, Homo sapien
tctgtgagccttcttttgtgggtcc

SEQ ID NO: 2395365 - DNA, 25 bp, Homo sapien
atctgtgagccttcttttgtgggtc

SEQ ID NO: 2395366 - DNA, 25 bp, Homo sapien
gagtgacagtcatgatcggggacac

SEQ ID NO: 2395367 - DNA, 25 bp, Homo sapien
caagtctgactcgtaggcattgtaa

SEQ ID NO: 2395368 - DNA, 25 bp, Homo sapien
tgggcaggagggtttctctgaactt

SEQ ID NO: 2395369 - DNA, 25 bp, Homo sapien
ccgtccgtatttgctcagggcaatg

SEQ ID NO: 2395370 - DNA, 25 bp, Homo sapien
tgtaggtcccttggtacaagtctga

SEQ ID NO: 2395371 - DNA, 25 bp, Homo sapien
tgatgggattttcccgatgcccaga

SEQ ID NO: 2395372 - DNA, 25 bp, Homo sapien
gaagaacgcactcgagccaagtgaa

SEQ ID NO: 2395373 - DNA, 25 bp, Homo sapien
tcagagccctgagctttgagttctc

SEQ ID NO: 2395374 - DNA, 25 bp, Homo sapien
catggcttgggaatgttggcccctc

SEQ ID NO: 2395375 - DNA, 25 bp, Homo sapien
tgaagatcaaatgcacctcctaggg

SEQ ID NO: 2395376 - DNA, 25 bp, Homo sapien
gagatcatgctcgtgaagccctctg

SEQ ID NO: 2395377 - DNA, 25 bp, Homo sapien
acagctgtggctggacgtgtgaccc

SEQ ID NO: 2395378 - DNA, 25 bp, Homo sapien
gaagttcagtgacgttgcccaaagt

SEQ ID NO: 2395379 - DNA, 25 bp, Homo sapien
ccacgcctcgctccacagtggaaat

SEQ ID NO: 2395380 - DNA, 25 bp, Homo sapien
cgttgcgtacaatcttcctttactg

SEQ ID NO: 2395381 - DNA, 25 bp, Homo sapien
gaagagggcacttctcactccaaag

SEQ ID NO: 2395382 - DNA, 25 bp, Homo sapien
cctttactgttcatggcaacgaaga

SEQ ID NO: 2395383 - DNA, 25 bp, Homo sapien
tgcaggcagcttgcaggataagaac

SEQ ID NO: 2395384 - DNA, 25 bp, Homo sapien
catacagcaagctggcagcttgcag

SEQ ID NO: 2395385 - DNA, 25 bp, Homo sapien
acagcaagctggcagcttgcaggca

SEQ ID NO: 2395386 - DNA, 25 bp, Homo sapien
gcttgcaggcagcttgcaggataag

SEQ ID NO: 2395387 - DNA, 25 bp, Homo sapien
accaaatagccactttcccagttca

SEQ ID NO: 2395388 - DNA, 25 bp, Homo sapien
cgtgttgttggcacgggtgcctgca

SEQ ID NO: 2395389 - DNA, 25 bp, Homo sapien
cctcgagtccagcagcgtgttgttg

SEQ ID NO: 2395390 - DNA, 25 bp, Homo sapien
ctagcccggcgcgagacctggacag

SEQ ID NO: 2395391 - DNA, 25 bp, Homo sapien
agacgagagcccacagcgtgccctg

SEQ ID NO: 2395392 - DNA, 25 bp, Homo sapien
ctgcagacgtcctgctccccgggac

SEQ ID NO: 2395393 - DNA, 25 bp, Homo sapien
aggaagacgagagcccacagcgtgc

SEQ ID NO: 2395394 - DNA, 25 bp, Homo sapien
ctaggaagacgagagcccacagcgt

SEQ ID NO: 2395395 - DNA, 25 bp, Homo sapien
ccatcgggcactcgggttgagagca

SEQ ID NO: 2395396 - DNA, 25 bp, Homo sapien
caaagcctccatcgggcactcgggt

SEQ ID NO: 2395397 - DNA, 25 bp, Homo sapien
ttgcctctcaggcacgtggtcagaa

SEQ ID NO: 2395398 - DNA, 25 bp, Homo sapien
cgtggtcagaattaatggccctaaa

SEQ ID NO: 2395399 - DNA, 25 bp, Homo sapien
agttcttcattgccatccgccacag

SEQ ID NO: 2395400 - DNA, 25 bp, Homo sapien
tgccatccgccacagcatatgttgt

SEQ ID NO: 2395401 - DNA, 25 bp, Homo sapien
tgggagagacacgtgggcttccagt

SEQ ID NO: 2395402 - DNA, 25 bp, Homo sapien
agacacgtgggcttccagttcttca

SEQ ID NO: 2395403 - DNA, 25 bp, Homo sapien
cagccttaaaatagacagcagtcct

SEQ ID NO: 2395404 - DNA, 25 bp, Homo sapien
gcaaagcaccgaaaggcaaatactg

SEQ ID NO: 2395405 - DNA, 25 bp, Homo sapien
tatgtggaaccttaacaagtcgaac

SEQ ID NO: 2395406 - DNA, 25 bp, Homo sapien
tatagctctccttatatgacaggca

SEQ ID NO: 2395407 - DNA, 25 bp, Homo sapien
tcaggcaaactttccatttggaatt

SEQ ID NO: 2395408 - DNA, 25 bp, Homo sapien
caggcaaactttccatttggaattt

SEQ ID NO: 2395409 - DNA, 25 bp, Homo sapien
tcctgacattcagatcctttgtatc

SEQ ID NO: 2395410 - DNA, 25 bp, Homo sapien
tgacattcagatcctttgtatctga

SEQ ID NO: 2395411 - DNA, 25 bp, Homo sapien
cctgacattcagatcctttgtatct

SEQ ID NO: 2395412 - DNA, 25 bp, Homo sapien
cccatctgccaggaggatttgtgct

SEQ ID NO: 2395413 - DNA, 25 bp, Homo sapien
cacaaatgatggtgtgtactgtgcc

SEQ ID NO: 2395414 - DNA, 25 bp, Homo sapien
tgaggctcgtctctaactttagtgg

SEQ ID NO: 2395415 - DNA, 25 bp, Homo sapien
tactgtgccaataagagatctgcca

SEQ ID NO: 2395416 - DNA, 25 bp, Homo sapien
tcttgtgagaattagccaggatcca

SEQ ID NO: 2395417 - DNA, 25 bp, Homo sapien
cattccgatatctgggctgcactga

SEQ ID NO: 2395418 - DNA, 25 bp, Homo sapien
tataggctctaagggcaaaacacct

SEQ ID NO: 2395419 - DNA, 25 bp, Homo sapien
tggacaaacctttccctcgagtaga

SEQ ID NO: 2395420 - DNA, 25 bp, Homo sapien
caagaagccctttagaacactcaga

SEQ ID NO: 2395421 - DNA, 25 bp, Homo sapien
gaaaaagtcaaatgcctccatgtaa

SEQ ID NO: 2395422 - DNA, 25 bp, Homo sapien
gggttgatcaccagtttgtgcagta

SEQ ID NO: 2395423 - DNA, 25 bp, Homo sapien
gagaaattcataaagagactttaag

SEQ ID NO: 2395424 - DNA, 25 bp, Homo sapien
cctgagacgagtcaagcctcttgaa

SEQ ID NO: 2395425 - DNA, 25 bp, Homo sapien
gcatcttttgcttgacagattccca

SEQ ID NO: 2395426 - DNA, 25 bp, Homo sapien
agcatagcacaagttcctggagagt

SEQ ID NO: 2395427 - DNA, 25 bp, Homo sapien
atgtatcttgatttgtggattgagc

SEQ ID NO: 2395428 - DNA, 25 bp, Homo sapien
tctgccagcatgtcaatctataagg

SEQ ID NO: 2395429 - DNA, 25 bp, Homo sapien
tgagtgttgatgatactcggaagat

SEQ ID NO: 2395430 - DNA, 25 bp, Homo sapien
gtgagtgttgatgatactcggaaga

SEQ ID NO: 2395431 - DNA, 25 bp, Homo sapien
atgttactaagttgataaaacattt

SEQ ID NO: 2395432 - DNA, 25 bp, Homo sapien
tgttactaagttgataaaacatttc

SEQ ID NO: 2395433 - DNA, 25 bp, Homo sapien
gaaattcctccatcccatgaagcca

SEQ ID NO: 2395434 - DNA, 25 bp, Homo sapien
ttgcactgtcctagaaattcctcca

SEQ ID NO: 2395435 - DNA, 25 bp, Homo sapien
gaaattgcactgtcctagaaattcc

SEQ ID NO: 2395436 - DNA, 25 bp, Homo sapien
ctgtggtactagaaattgcactgtc

SEQ ID NO: 2395437 - DNA, 25 bp, Homo sapien
gaggaaatacaggtggtggttgtca

SEQ ID NO: 2395438 - DNA, 25 bp, Homo sapien
tggttgtcagagagaagattatgct

SEQ ID NO: 2395439 - DNA, 25 bp, Homo sapien
ttacaggggtatctttcacattctc

SEQ ID NO: 2395440 - DNA, 25 bp, Homo sapien
ctaactgaggcactagattacaggg

SEQ ID NO: 2395441 - DNA, 25 bp, Homo sapien
cttgaacacaagttccgctctcctt

SEQ ID NO: 2395442 - DNA, 25 bp, Homo sapien
aacacaagttccgctctccttaagc

SEQ ID NO: 2395443 - DNA, 25 bp, Homo sapien
tgaacacaagttccgctctccttaa

SEQ ID NO: 2395444 - DNA, 25 bp, Homo sapien
ttgaacacaagttccgctctcctta

SEQ ID NO: 2395445 - DNA, 25 bp, Homo sapien
cagctgttagactatacttgtggaa

SEQ ID NO: 2395446 - DNA, 25 bp, Homo sapien
ctctagtttttaggcatgcagcttc

SEQ ID NO: 2395447 - DNA, 25 bp, Homo sapien
catgttgtgaacagatttaggtaac

SEQ ID NO: 2395448 - DNA, 25 bp, Homo sapien
ggaactctacctactactctcaatg

SEQ ID NO: 2395449 - DNA, 25 bp, Homo sapien
taccagcaagagaggaatgcttatt

SEQ ID NO: 2395450 - DNA, 25 bp, Homo sapien
tatatttcggagtcccataatggca

SEQ ID NO: 2395451 - DNA, 25 bp, Homo sapien
tcccgatttcacatggtcatccaca

SEQ ID NO: 2395452 - DNA, 25 bp, Homo sapien
taatggcaggatcacgagcagtgat

SEQ ID NO: 2395453 - DNA, 25 bp, Homo sapien
gcacgtagaaggtactcgataagta

SEQ ID NO: 2395454 - DNA, 25 bp, Homo sapien
gtatttaaggctgaacgctggagca

SEQ ID NO: 2395455 - DNA, 25 bp, Homo sapien
ctggcacgtagaaggtactcgataa

SEQ ID NO: 2395456 - DNA, 25 bp, Homo sapien
gaacgctggagcagtctttctcaaa

SEQ ID NO: 2395457 - DNA, 25 bp, Homo sapien
cagcattcttagtcttatcatcatt

SEQ ID NO: 2395458 - DNA, 25 bp, Homo sapien
cattcttagtcttatcatcatttcc

SEQ ID NO: 2395459 - DNA, 25 bp, Homo sapien
ctcagcattcttagtcttatcatca

SEQ ID NO: 2395460 - DNA, 25 bp, Homo sapien
ctctcagcattcttagtcttatcat

SEQ ID NO: 2395461 - DNA, 25 bp, Homo sapien
tatttgaaatgactattaccctaat

SEQ ID NO: 2395462 - DNA, 25 bp, Homo sapien
cattcaagccagacaagaggatgtt

SEQ ID NO: 2395463 - DNA, 25 bp, Homo sapien
taaaatactgtgtatgcattcaagc

SEQ ID NO: 2395464 - DNA, 25 bp, Homo sapien
ccagacaagaggatgtttgtgattt

SEQ ID NO: 2395465 - DNA, 25 bp, Homo sapien
ccacctgttggacaacttctaattg

SEQ ID NO: 2395466 - DNA, 25 bp, Homo sapien
tctttcaatttactcctgcgctggg

SEQ ID NO: 2395467 - DNA, 25 bp, Homo sapien
acttctaattgctcttcaattcggg

SEQ ID NO: 2395468 - DNA, 25 bp, Homo sapien
tctagcataaagtaccacctgttgg

SEQ ID NO: 2395469 - DNA, 25 bp, Homo sapien
gattatctactagtaaaaccaggcc

SEQ ID NO: 2395470 - DNA, 25 bp, Homo sapien
aattatgcatggtcttcaactgggc

SEQ ID NO: 2395471 - DNA, 25 bp, Homo sapien
aaaccaggccacagagagatgtaga

SEQ ID NO: 2395472 - DNA, 25 bp, Homo sapien
gtttggagccgatgaagtttcacac

SEQ ID NO: 2395473 - DNA, 25 bp, Homo sapien
cctcataaatccttccaattgcttc

SEQ ID NO: 2395474 - DNA, 25 bp, Homo sapien
ttctacagattctctgaactgactt

SEQ ID NO: 2395475 - DNA, 25 bp, Homo sapien
gacttggctgaactttaatttcctc

SEQ ID NO: 2395476 - DNA, 25 bp, Homo sapien
cataaatccttccaattgcttctac

SEQ ID NO: 2395477 - DNA, 25 bp, Homo sapien
tatcaccgttcaattccaacagtgg

SEQ ID NO: 2395478 - DNA, 25 bp, Homo sapien
gggctagccctaggcaaaatcagaa

SEQ ID NO: 2395479 - DNA, 25 bp, Homo sapien
tctgtacgagtcatccatttccctg

SEQ ID NO: 2395480 - DNA, 25 bp, Homo sapien
tctagccagataatctacagcaggg

SEQ ID NO: 2395481 - DNA, 25 bp, Homo sapien
ccaaaaaggctcagaggactgctga

SEQ ID NO: 2395482 - DNA, 25 bp, Homo sapien
ggccaagtgggctagcatatcaagt

SEQ ID NO: 2395483 - DNA, 25 bp, Homo sapien
caaaccgtgacatatacctccaagg

SEQ ID NO: 2395484 - DNA, 25 bp, Homo sapien
tcaagttagaataggtcggagccac

SEQ ID NO: 2395485 - DNA, 25 bp, Homo sapien
caatcacatataagggttccatata

SEQ ID NO: 2395486 - DNA, 25 bp, Homo sapien
gcatcagctacaggccaatatttac

SEQ ID NO: 2395487 - DNA, 25 bp, Homo sapien
aacattatttcctaggaatacttga

SEQ ID NO: 2395488 - DNA, 25 bp, Homo sapien
aaattgattctacacttttacactg

SEQ ID NO: 2395489 - DNA, 25 bp, Homo sapien
gcaaaaggtggtaaaagcacagcat

SEQ ID NO: 2395490 - DNA, 25 bp, Homo sapien
taatccacataaagcctataatgca

SEQ ID NO: 2395491 - DNA, 25 bp, Homo sapien
taaacattactaacaatggactact

SEQ ID NO: 2395492 - DNA, 25 bp, Homo sapien
gcacagcataaaattgtcttgaact

SEQ ID NO: 2395493 - DNA, 25 bp, Homo sapien
agttttattacccattcttgatact

SEQ ID NO: 2395494 - DNA, 25 bp, Homo sapien
tttggatggcagttgattgttttaa

SEQ ID NO: 2395495 - DNA, 25 bp, Homo sapien
tggatggcagttgattgttttaatt

SEQ ID NO: 2395496 - DNA, 25 bp, Homo sapien
gatggcagttgattgttttaattca

SEQ ID NO: 2395497 - DNA, 25 bp, Homo sapien
gagcagccagtgaatttacatcttg

SEQ ID NO: 2395498 - DNA, 25 bp, Homo sapien
acatcttgatctgtcagtgattttc

SEQ ID NO: 2395499 - DNA, 25 bp, Homo sapien
gattttcccaattcctgcatgactt

SEQ ID NO: 2395500 - DNA, 25 bp, Homo sapien
caaaatgctgagcagccagtgaatt

SEQ ID NO: 2395501 - DNA, 25 bp, Homo sapien
gaaatactaaatatagcctggctca

SEQ ID NO: 2395502 - DNA, 25 bp, Homo sapien
cattacacatgttccctctagtgga

SEQ ID NO: 2395503 - DNA, 25 bp, Homo sapien
tgatgctgtgccgagaaactgtctt

SEQ ID NO: 2395504 - DNA, 25 bp, Homo sapien
tgtgtcacttctgctcatgaaatgg

SEQ ID NO: 2395505 - DNA, 25 bp, Homo sapien
gattattctcatcttgctagcctta

SEQ ID NO: 2395506 - DNA, 25 bp, Homo sapien
tcctttgggactattaaatcagtta

SEQ ID NO: 2395507 - DNA, 25 bp, Homo sapien
agccttactgtattctaatgggaag

SEQ ID NO: 2395508 - DNA, 25 bp, Homo sapien
tactcctttgggactattaaatcag

SEQ ID NO: 2395509 - DNA, 25 bp, Homo sapien
gatagggcatccaaagcagtttgca

SEQ ID NO: 2395510 - DNA, 25 bp, Homo sapien
tacaatggattatctagaaggacac

SEQ ID NO: 2395511 - DNA, 25 bp, Homo sapien
ttagagcagggcaatacagaggttc

SEQ ID NO: 2395512 - DNA, 25 bp, Homo sapien
gacagaatggtacagtggttaacag

SEQ ID NO: 2395513 - DNA, 25 bp, Homo sapien
tgttctgcaggccatctatttgaca

SEQ ID NO: 2395514 - DNA, 25 bp, Homo sapien
tttgacaacgtaacatttaattctg

SEQ ID NO: 2395515 - DNA, 25 bp, Homo sapien
ctgataatgcaagaaatttgaaata

SEQ ID NO: 2395516 - DNA, 25 bp, Homo sapien
ggccatctatttgacaacgtaacat

SEQ ID NO: 2395517 - DNA, 25 bp, Homo sapien
tactaacaaagtaattatgttccaa

SEQ ID NO: 2395518 - DNA, 25 bp, Homo sapien
cttcatcccagctgggttcttcagg

SEQ ID NO: 2395519 - DNA, 25 bp, Homo sapien
caggccttgcatgctctaacgtggt

SEQ ID NO: 2395520 - DNA, 25 bp, Homo sapien
catctctttcaccaatcagttctga

SEQ ID NO: 2395521 - DNA, 25 bp, Homo sapien
cctgcaagatagctgcaagactgca

SEQ ID NO: 2395522 - DNA, 25 bp, Homo sapien
tgtacagcatacagcataaacgctg

SEQ ID NO: 2395523 - DNA, 25 bp, Homo sapien
tttagtatcctcaccagaaactcag

SEQ ID NO: 2395524 - DNA, 25 bp, Homo sapien
gatttctcgctcaataatccccagg

SEQ ID NO: 2395525 - DNA, 25 bp, Homo sapien
gcatctctatcataatcgctgaggg

SEQ ID NO: 2395526 - DNA, 25 bp, Homo sapien
tactcgccagctgatgtaaatctac

SEQ ID NO: 2395527 - DNA, 25 bp, Homo sapien
cataatcgctgagggattcttcttc

SEQ ID NO: 2395528 - DNA, 25 bp, Homo sapien
ttcacctgatttcacagctgccagg

SEQ ID NO: 2395529 - DNA, 25 bp, Homo sapien
ctgttacagggacatcaaacaccat

SEQ ID NO: 2395530 - DNA, 25 bp, Homo sapien
cgtcagcaaaatccaggtataaata

SEQ ID NO: 2395531 - DNA, 25 bp, Homo sapien
atccaggtataaatagggaacattt

SEQ ID NO: 2395532 - DNA, 25 bp, Homo sapien
gcaaaatccaggtataaatagggaa

SEQ ID NO: 2395533 - DNA, 25 bp, Homo sapien
gtcagcaaaatccaggtataaatag

SEQ ID NO: 2395534 - DNA, 25 bp, Homo sapien
aaagcacggtaaactgtgcagcagc

SEQ ID NO: 2395535 - DNA, 25 bp, Homo sapien
acaggaaatttgagtggcactctca

SEQ ID NO: 2395536 - DNA, 25 bp, Homo sapien
atcagacgtccatgcaaatgactgg

SEQ ID NO: 2395537 - DNA, 25 bp, Homo sapien
aatgactggcattctcttgaacagg

SEQ ID NO: 2395538 - DNA, 25 bp, Homo sapien
atactttttccacaccgcggatccg

SEQ ID NO: 2395539 - DNA, 25 bp, Homo sapien
tgtcagcgcgtcctgcactgggaaa

SEQ ID NO: 2395540 - DNA, 25 bp, Homo sapien
tgggcagtccgctcactcgagctgt

SEQ ID NO: 2395541 - DNA, 25 bp, Homo sapien
gtctagttccgaagtcctgggcagt

SEQ ID NO: 2395542 - DNA, 25 bp, Homo sapien
aataacagatttgctcatcgtcact

SEQ ID NO: 2395543 - DNA, 25 bp, Homo sapien
tggaaagtgtagtgaccttgacaga

SEQ ID NO: 2395544 - DNA, 25 bp, Homo sapien
cttctggaacaacggaaatacatga

SEQ ID NO: 2395545 - DNA, 25 bp, Homo sapien
tgtaggccaaatcaagataccatat

SEQ ID NO: 2395546 - DNA, 25 bp, Homo sapien
tcctctatgggatgcgaatgacttg

SEQ ID NO: 2395547 - DNA, 25 bp, Homo sapien
aactgaagtgtttgggccttccaga

SEQ ID NO: 2395548 - DNA, 25 bp, Homo sapien
gactgacgaagattagttggacccc

SEQ ID NO: 2395549 - DNA, 25 bp, Homo sapien
gttacacagaaatgttgccagggcc

SEQ ID NO: 2395550 - DNA, 25 bp, Homo sapien
tacacactaaaatggttgcagtttt

SEQ ID NO: 2395551 - DNA, 25 bp, Homo sapien
ccgatttagatggttattctctaga

SEQ ID NO: 2395552 - DNA, 25 bp, Homo sapien
tggcatatgtctccgatttagatgg

SEQ ID NO: 2395553 - DNA, 25 bp, Homo sapien
catatgtctccgatttagatggtta

SEQ ID NO: 2395554 - DNA, 25 bp, Homo sapien
gcgcgagtacgaggcaggcgacgaa

SEQ ID NO: 2395555 - DNA, 25 bp, Homo sapien
tcaggcgcgagtacgaggcaggcga

SEQ ID NO: 2395556 - DNA, 25 bp, Homo sapien
tacgaggcaggcgacgaagcttctg

SEQ ID NO: 2395557 - DNA, 25 bp, Homo sapien
caggcgacgaagcttctggtcgacg

SEQ ID NO: 2395558 - DNA, 25 bp, Homo sapien
ctgtggtgcgcggacaagaaaatac

SEQ ID NO: 2395559 - DNA, 25 bp, Homo sapien
gatgctgtcgcatcggcgactccag

SEQ ID NO: 2395560 - DNA, 25 bp, Homo sapien
cgcggacaagaaaatacagttgtag

SEQ ID NO: 2395561 - DNA, 25 bp, Homo sapien
ccccggaatccgacgtcagtatact

SEQ ID NO: 2395562 - DNA, 25 bp, Homo sapien
cacgcctcgcgtggatgaggctctg

SEQ ID NO: 2395563 - DNA, 25 bp, Homo sapien
tctttactgcatgtcctcttggtag

SEQ ID NO: 2395564 - DNA, 25 bp, Homo sapien
acgaccacacgcctcgcgtggatga

SEQ ID NO: 2395565 - DNA, 25 bp, Homo sapien
cttggtagtcgtaagtgggtccacg

SEQ ID NO: 2395566 - DNA, 25 bp, Homo sapien
cctctgggtacagcgcaaaggcaaa

SEQ ID NO: 2395567 - DNA, 25 bp, Homo sapien
tatcattgcgaggtcctagggactc

SEQ ID NO: 2395568 - DNA, 25 bp, Homo sapien
ccagtgctgatggttgtgccccaag

SEQ ID NO: 2395569 - DNA, 25 bp, Homo sapien
gatcatgctgattggcagggccaaa

SEQ ID NO: 2395570 - DNA, 25 bp, Homo sapien
gactttgtgataaccatctatggga

SEQ ID NO: 2395571 - DNA, 25 bp, Homo sapien
cctgcctgcatcactgtttggcaga

SEQ ID NO: 2395572 - DNA, 25 bp, Homo sapien
taaaaatctaacaccactcagtttg

SEQ ID NO: 2395573 - DNA, 25 bp, Homo sapien
ccaaagcattcaggtttgacttctg

SEQ ID NO: 2395574 - DNA, 25 bp, Homo sapien
ccacacccgaccaaatccgtattct

SEQ ID NO: 2395575 - DNA, 25 bp, Homo sapien
tctcttccacgcctctctgttgcat

SEQ ID NO: 2395576 - DNA, 25 bp, Homo sapien
caaatccgtattcttaaccactctc

SEQ ID NO: 2395577 - DNA, 25 bp, Homo sapien
ctcttccacgcctctctgttgcatg

SEQ ID NO: 2395578 - DNA, 25 bp, Homo sapien
ctttggtttctgtcaaaggaatgtg

SEQ ID NO: 2395579 - DNA, 25 bp, Homo sapien
tgagcaggaattggcgggtgggggc

SEQ ID NO: 2395580 - DNA, 25 bp, Homo sapien
tttctgtcaaaggaatgtgaagtga

SEQ ID NO: 2395581 - DNA, 25 bp, Homo sapien
caaaggaatgtgaagtgagcaggaa

SEQ ID NO: 2395582 - DNA, 25 bp, Homo sapien
ttcgctgattagaggctttccttcc

SEQ ID NO: 2395583 - DNA, 25 bp, Homo sapien
gaagccactaagaacgaggaatgag

SEQ ID NO: 2395584 - DNA, 25 bp, Homo sapien
catgggagcactttcctggtgggaa

SEQ ID NO: 2395585 - DNA, 25 bp, Homo sapien
tgtgaattcgctgattagaggcttt

SEQ ID NO: 2395586 - DNA, 25 bp, Homo sapien
tcgttcacccgcatttgggcctcag

SEQ ID NO: 2395587 - DNA, 25 bp, Homo sapien
atgtgacccagtccacgtccccatc

SEQ ID NO: 2395588 - DNA, 25 bp, Homo sapien
acgtccccatcgttcacccgcattt

SEQ ID NO: 2395589 - DNA, 25 bp, Homo sapien
tgacccagtccacgtccccatcgtt

SEQ ID NO: 2395590 - DNA, 25 bp, Homo sapien
aattctcctcatttctaagacctgc

SEQ ID NO: 2395591 - DNA, 25 bp, Homo sapien
ctcatttctaagacctgctctcttt

SEQ ID NO: 2395592 - DNA, 25 bp, Homo sapien
attctcctcatttctaagacctgct

SEQ ID NO: 2395593 - DNA, 25 bp, Homo sapien
ctcctcatttctaagacctgctctc

SEQ ID NO: 2395594 - DNA, 25 bp, Homo sapien
gaatactcggtaccgaaatgaagtc

SEQ ID NO: 2395595 - DNA, 25 bp, Homo sapien
aggttgaatactcggtaccgaaatg

SEQ ID NO: 2395596 - DNA, 25 bp, Homo sapien
gttgaatactcggtaccgaaatgaa

SEQ ID NO: 2395597 - DNA, 25 bp, Homo sapien
tactcggtaccgaaatgaagtcatt

SEQ ID NO: 2395598 - DNA, 25 bp, Homo sapien
ttaatatttctactccacaccgtcc

SEQ ID NO: 2395599 - DNA, 25 bp, Homo sapien
aatatttctactccacaccgtcctt

SEQ ID NO: 2395600 - DNA, 25 bp, Homo sapien
cattaatatttctactccacaccgt

SEQ ID NO: 2395601 - DNA, 25 bp, Homo sapien
aaagctgtttgctgtgttctattac

SEQ ID NO: 2395602 - DNA, 25 bp, Homo sapien
ggttctaccgatccccagaagtgat

SEQ ID NO: 2395603 - DNA, 25 bp, Homo sapien
atcacggcggagttgtacacgggct

SEQ ID NO: 2395604 - DNA, 25 bp, Homo sapien
gcagctggcctgcatcatggaggta

SEQ ID NO: 2395605 - DNA, 25 bp, Homo sapien
tacacgtacatccaaagccggttct

SEQ ID NO: 2395606 - DNA, 25 bp, Homo sapien
tagatgtagtttcaggcgcagcagg

SEQ ID NO: 2395607 - DNA, 25 bp, Homo sapien
gatacaggcttccttgctaacaggg

SEQ ID NO: 2395608 - DNA, 25 bp, Homo sapien
caagcccacagtgatggtgaaggca

SEQ ID NO: 2395609 - DNA, 25 bp, Homo sapien
gccctgctcagaagttaaccgccaa

SEQ ID NO: 2395610 - DNA, 25 bp, Homo sapien
ctttgatgagagtggtgtgaagata

SEQ ID NO: 2395611 - DNA, 25 bp, Homo sapien
tagggctctgtgaggatatagaggg

SEQ ID NO: 2395612 - DNA, 25 bp, Homo sapien
taattttacgtccttgcttgcatgg

SEQ ID NO: 2395613 - DNA, 25 bp, Homo sapien
aatccagtggctagcacaagatgac

SEQ ID NO: 2395614 - DNA, 25 bp, Homo sapien
agaacctcgcccacactgcatcctt

SEQ ID NO: 2395615 - DNA, 25 bp, Homo sapien
tccccaccgcctcattcagctggcg

SEQ ID NO: 2395616 - DNA, 25 bp, Homo sapien
tgcagcggtgtgacattccccaccg

SEQ ID NO: 2395617 - DNA, 25 bp, Homo sapien
tcagctggcgctccttctcatagcg

SEQ ID NO: 2395618 - DNA, 25 bp, Homo sapien
ctaatatcataaaagtctccatcat

SEQ ID NO: 2395619 - DNA, 25 bp, Homo sapien
gctctgccaacgaagcatcacagga

SEQ ID NO: 2395620 - DNA, 25 bp, Homo sapien
cttgataggcattctgcaggacagc

SEQ ID NO: 2395621 - DNA, 25 bp, Homo sapien
cagaggcagctacccattgaaggac

SEQ ID NO: 2395622 - DNA, 25 bp, Homo sapien
gattgctgacaatcaccgtgggtgc

SEQ ID NO: 2395623 - DNA, 25 bp, Homo sapien
agacgccaacggtctttcacacaac

SEQ ID NO: 2395624 - DNA, 25 bp, Homo sapien
ggagaagacgccaacggtctttcac

SEQ ID NO: 2395625 - DNA, 25 bp, Homo sapien
cttcctatcttccttaactggctgt

SEQ ID NO: 2395626 - DNA, 25 bp, Homo sapien
tgttccggcaccttgggttcagggc

SEQ ID NO: 2395627 - DNA, 25 bp, Homo sapien
agggcagacacgatcaggtcctcgg

SEQ ID NO: 2395628 - DNA, 25 bp, Homo sapien
taaggcaagattcatcgggagctac

SEQ ID NO: 2395629 - DNA, 25 bp, Homo sapien
tcttggtcacctacaatgggagcag

SEQ ID NO: 2395630 - DNA, 25 bp, Homo sapien
gctacaggaggttcattggcaggaa

SEQ ID NO: 2395631 - DNA, 25 bp, Homo sapien
gaaatgtctgatgcaggcttacgct

SEQ ID NO: 2395632 - DNA, 25 bp, Homo sapien
tcaaatgctgcatgctggaaaccta

SEQ ID NO: 2395633 - DNA, 25 bp, Homo sapien
tgtgtgttgggagcttcaaatgctg

SEQ ID NO: 2395634 - DNA, 25 bp, Homo sapien
tgccaatatcttcagggtactcaaa

SEQ ID NO: 2395635 - DNA, 25 bp, Homo sapien
tcctggaacatgcagagacggtctc

SEQ ID NO: 2395636 - DNA, 25 bp, Homo sapien
gagtcgatgagatccgagaccacct

SEQ ID NO: 2395637 - DNA, 25 bp, Homo sapien
gaaggaggcttgtcatctggaccct

SEQ ID NO: 2395638 - DNA, 25 bp, Homo sapien
cctgtgacgctgtggagattcctca

SEQ ID NO: 2395639 - DNA, 25 bp, Homo sapien
tgcggagccagctgagcactctgac

SEQ ID NO: 2395640 - DNA, 25 bp, Homo sapien
ctctgacaggatccgtggaggtgtc

SEQ ID NO: 2395641 - DNA, 25 bp, Homo sapien
agcactctgacaggatccgtggagg

SEQ ID NO: 2395642 - DNA, 25 bp, Homo sapien
gcggagccagctgagcactctgaca

SEQ ID NO: 2395643 - DNA, 25 bp, Homo sapien
taaaaatagacaaggattcatctga

SEQ ID NO: 2395644 - DNA, 25 bp, Homo sapien
cagagaagtctaagtgtatacctgc

SEQ ID NO: 2395645 - DNA, 25 bp, Homo sapien
ggcttgacttcctaatctcaggaca

SEQ ID NO: 2395646 - DNA, 25 bp, Homo sapien
tgttttcctagggactgcaggtgaa

SEQ ID NO: 2395647 - DNA, 25 bp, Homo sapien
tcaggacagtaaataacagagggct

SEQ ID NO: 2395648 - DNA, 25 bp, Homo sapien
ccacgaacatttcatttacattcac

SEQ ID NO: 2395649 - DNA, 25 bp, Homo sapien
attacaatatcaggacatgcttgcc

SEQ ID NO: 2395650 - DNA, 25 bp, Homo sapien
ttacaatatcaggacatgcttgcct

SEQ ID NO: 2395651 - DNA, 25 bp, Homo sapien
gtttagctgatgtcttcatgaataa

SEQ ID NO: 2395652 - DNA, 25 bp, Homo sapien
tgtttagctgatgtcttcatgaata

SEQ ID NO: 2395653 - DNA, 25 bp, Homo sapien
cagcttttatcactttgagagttac

SEQ ID NO: 2395654 - DNA, 25 bp, Homo sapien
aaacagcttttatcactttgagagt

SEQ ID NO: 2395655 - DNA, 25 bp, Homo sapien
aaagaaacagcttttatcactttga

SEQ ID NO: 2395656 - DNA, 25 bp, Homo sapien
agaaacagcttttatcactttgaga

SEQ ID NO: 2395657 - DNA, 25 bp, Homo sapien
agactctcccagaaatactggcata

SEQ ID NO: 2395658 - DNA, 25 bp, Homo sapien
catactccattttggctttgtaacc

SEQ ID NO: 2395659 - DNA, 25 bp, Homo sapien
tgtaaccagtcaaccttttctgaca

SEQ ID NO: 2395660 - DNA, 25 bp, Homo sapien
gacatcaactttgcatactccattt

SEQ ID NO: 2395661 - DNA, 25 bp, Homo sapien
ggagaatagacatcaactttgcata

SEQ ID NO: 2395662 - DNA, 25 bp, Homo sapien
tcttacagaggataggttctgagat

SEQ ID NO: 2395663 - DNA, 25 bp, Homo sapien
ataggttctgagatatgaggaaagc

SEQ ID NO: 2395664 - DNA, 25 bp, Homo sapien
cccctcctgccatgtaatataagga

SEQ ID NO: 2395665 - DNA, 25 bp, Homo sapien
tgaggaaagctcttgattaatttat

SEQ ID NO: 2395666 - DNA, 25 bp, Homo sapien
tgcaccacctgcccattttcagata

SEQ ID NO: 2395667 - DNA, 25 bp, Homo sapien
caccacctgcccattttcagatagt

SEQ ID NO: 2395668 - DNA, 25 bp, Homo sapien
gcaccacctgcccattttcagatag

SEQ ID NO: 2395669 - DNA, 25 bp, Homo sapien
tagtgaaccacggaagactccagaa

SEQ ID NO: 2395670 - DNA, 25 bp, Homo sapien
tgaaccacggaagactccagaatat

SEQ ID NO: 2395671 - DNA, 25 bp, Homo sapien
ctggaatagtgaaccacggaagact

SEQ ID NO: 2395672 - DNA, 25 bp, Homo sapien
ctgtagtactggaatagtgaaccac

SEQ ID NO: 2395673 - DNA, 25 bp, Homo sapien
gatgttcttgctcagctcaagatct

SEQ ID NO: 2395674 - DNA, 25 bp, Homo sapien
cattttgcatgtcctgagtcagtca

SEQ ID NO: 2395675 - DNA, 25 bp, Homo sapien
caagggtccctatgagagaatgtgc

SEQ ID NO: 2395676 - DNA, 25 bp, Homo sapien
gaaaggtgagctcttctacctcggg

SEQ ID NO: 2395677 - DNA, 25 bp, Homo sapien
gcgggctcgacgcacatttatttac

SEQ ID NO: 2395678 - DNA, 25 bp, Homo sapien
tattgattgcgatactgtctgggcc

SEQ ID NO: 2395679 - DNA, 25 bp, Homo sapien
aaatatcctacggagcacaggacag

SEQ ID NO: 2395680 - DNA, 25 bp, Homo sapien
cagtagttgccaatgcggtgaggca

SEQ ID NO: 2395681 - DNA, 25 bp, Homo sapien
tggttattaggtacaggcacaggga

SEQ ID NO: 2395682 - DNA, 25 bp, Homo sapien
tgtcaacttgtgtcagctagctgcc

SEQ ID NO: 2395683 - DNA, 25 bp, Homo sapien
tgcagagcagactagttgtctagac

SEQ ID NO: 2395684 - DNA, 25 bp, Homo sapien
tatgcatcggtttggtcctataccc

SEQ ID NO: 2395685 - DNA, 25 bp, Homo sapien
tctttcttccgctaggtatgcatcg

SEQ ID NO: 2395686 - DNA, 25 bp, Homo sapien
tcacaggataggagtttggcacacc

SEQ ID NO: 2395687 - DNA, 25 bp, Homo sapien
ggaagggctctctgattgtaccaca

SEQ ID NO: 2395688 - DNA, 25 bp, Homo sapien
gacacagcgctatgaagaaacttgg

SEQ ID NO: 2395689 - DNA, 25 bp, Homo sapien
tacagcacgttaagaggcttggacc

SEQ ID NO: 2395690 - DNA, 25 bp, Homo sapien
cagatcttctatatcatcactgtgg

SEQ ID NO: 2395691 - DNA, 25 bp, Homo sapien
tatgatccccactccctgatgttac

SEQ ID NO: 2395692 - DNA, 25 bp, Homo sapien
tagacttgctacattcgtatgagcc

SEQ ID NO: 2395693 - DNA, 25 bp, Homo sapien
tggaaacaccagttaagccatgttg

SEQ ID NO: 2395694 - DNA, 25 bp, Homo sapien
ttgatgatctgttatgtggttgttg

SEQ ID NO: 2395695 - DNA, 25 bp, Homo sapien
ttttgatgatctgttatgtggttgt

SEQ ID NO: 2395696 - DNA, 25 bp, Homo sapien
tttgatgatctgttatgtggttgtt

SEQ ID NO: 2395697 - DNA, 25 bp, Homo sapien
gaagccaggcagctataatagtgtt

SEQ ID NO: 2395698 - DNA, 25 bp, Homo sapien
gttcttggccggagaacatctggcc

SEQ ID NO: 2395699 - DNA, 25 bp, Homo sapien
tcacacctgacgctgctcagggaga

SEQ ID NO: 2395700 - DNA, 25 bp, Homo sapien
gcaggcagggtgtcatctatgaagc

SEQ ID NO: 2395701 - DNA, 25 bp, Homo sapien
tccaagaatggttcagaggagagcc

SEQ ID NO: 2395702 - DNA, 25 bp, Homo sapien
caagaatggttcagaggagagccgc

SEQ ID NO: 2395703 - DNA, 25 bp, Homo sapien
gaagatgtccaagaatggttcagag

SEQ ID NO: 2395704 - DNA, 25 bp, Homo sapien
gatgtccaagaatggttcagaggag

SEQ ID NO: 2395705 - DNA, 25 bp, Homo sapien
tgttagtataagatccttcagcttc

SEQ ID NO: 2395706 - DNA, 25 bp, Homo sapien
ggctgttagtataagatccttcagc

SEQ ID NO: 2395707 - DNA, 25 bp, Homo sapien
tagtataagatccttcagcttctgc

SEQ ID NO: 2395708 - DNA, 25 bp, Homo sapien
tattttggctgttagtataagatcc

SEQ ID NO: 2395709 - DNA, 25 bp, Homo sapien
acgaaggttccttcccatgctttgc

SEQ ID NO: 2395710 - DNA, 25 bp, Homo sapien
agcccagtcaggcttaacccgaggg

SEQ ID NO: 2395711 - DNA, 25 bp, Homo sapien
gaagaattactgacctagttgacag

SEQ ID NO: 2395712 - DNA, 25 bp, Homo sapien
tatcagggtgtgtacgcttctgcag

SEQ ID NO: 2395713 - DNA, 25 bp, Homo sapien
ccttcacggaaacatgcaaggtgag

SEQ ID NO: 2395714 - DNA, 25 bp, Homo sapien
aaggacctttctgaggccctacgtg

SEQ ID NO: 2395715 - DNA, 25 bp, Homo sapien
tagtctgtaagtgagaaaactccgc

SEQ ID NO: 2395716 - DNA, 25 bp, Homo sapien
caagcatgagatgggcaagctggct

SEQ ID NO: 2395717 - DNA, 25 bp, Homo sapien
tgcccagtaaatgtagctattattt

SEQ ID NO: 2395718 - DNA, 25 bp, Homo sapien
ggctggcacatattcaatgcccagt

SEQ ID NO: 2395719 - DNA, 25 bp, Homo sapien
ttttcaatcaacactcttacatacc

SEQ ID NO: 2395720 - DNA, 25 bp, Homo sapien
aatcaacactcttacataccccttt

SEQ ID NO: 2395721 - DNA, 25 bp, Homo sapien
caattctgggagagttgcagccccg

SEQ ID NO: 2395722 - DNA, 25 bp, Homo sapien
taaatcggaagctctcaaggcatct

SEQ ID NO: 2395723 - DNA, 25 bp, Homo sapien
caagtgtgcgtctatttccatggcg

SEQ ID NO: 2395724 - DNA, 25 bp, Homo sapien
tacactgcgcaggtcaactcggtaa

SEQ ID NO: 2395725 - DNA, 25 bp, Homo sapien
tcggagaaatcccttacgctggcgg

SEQ ID NO: 2395726 - DNA, 25 bp, Homo sapien
cctgagggcaactgacaacggactt

SEQ ID NO: 2395727 - DNA, 25 bp, Homo sapien
tgatcaatatctccgggctgcgctt

SEQ ID NO: 2395728 - DNA, 25 bp, Homo sapien
aaagaatgctcacggaggtctgacc

SEQ ID NO: 2395729 - DNA, 25 bp, Homo sapien
tacagggtaacttgggtccacagtc

SEQ ID NO: 2395730 - DNA, 25 bp, Homo sapien
gtgactgccagctctaaatctcgat

SEQ ID NO: 2395731 - DNA, 25 bp, Homo sapien
tttggatccaaagcctgagaatagg

SEQ ID NO: 2395732 - DNA, 25 bp, Homo sapien
gagcaacttacgagaggacagcctt

SEQ ID NO: 2395733 - DNA, 25 bp, Homo sapien
ttccccacccagtcattgaagctgc

SEQ ID NO: 2395734 - DNA, 25 bp, Homo sapien
tcaagggagaccaggggactacatc

SEQ ID NO: 2395735 - DNA, 25 bp, Homo sapien
gagcacctcccacatcgtggcttag

SEQ ID NO: 2395736 - DNA, 25 bp, Homo sapien
ttgccgtagcaaccttccagactgt

SEQ ID NO: 2395737 - DNA, 25 bp, Homo sapien
gacaacttcttggagtggcggccaa

SEQ ID NO: 2395738 - DNA, 25 bp, Homo sapien
tgagaggctgtagctcgacctagtt

SEQ ID NO: 2395739 - DNA, 25 bp, Homo sapien
ggagttcccatctccgcagaggcag

SEQ ID NO: 2395740 - DNA, 25 bp, Homo sapien
ccacgagaggcggagaattgcaact

SEQ ID NO: 2395741 - DNA, 25 bp, Homo sapien
gatattcgtccccaaggagcgagga

SEQ ID NO: 2395742 - DNA, 25 bp, Homo sapien
ctttgcaggtgaggtaggttctact

SEQ ID NO: 2395743 - DNA, 25 bp, Homo sapien
cgaggagggacagctcgccttcttt

SEQ ID NO: 2395744 - DNA, 25 bp, Homo sapien
tcagcctgagatgcgggatattcgt

SEQ ID NO: 2395745 - DNA, 25 bp, Homo sapien
tttgactccattaacttcagtttcc

SEQ ID NO: 2395746 - DNA, 25 bp, Homo sapien
ttctgtccccttgatgctgctggcc

SEQ ID NO: 2395747 - DNA, 25 bp, Homo sapien
tttctttgactccattaacttcagt

SEQ ID NO: 2395748 - DNA, 25 bp, Homo sapien
tgtttctgtccccttgatgctgctg

SEQ ID NO: 2395749 - DNA, 25 bp, Homo sapien
ttccttaagagattgcatagggccc

SEQ ID NO: 2395750 - DNA, 25 bp, Homo sapien
gcatagggcccaaggttttatgtat

SEQ ID NO: 2395751 - DNA, 25 bp, Homo sapien
ggactacggtcttgagcttgcccag

SEQ ID NO: 2395752 - DNA, 25 bp, Homo sapien
gggaacttacactttgctggcaaaa

SEQ ID NO: 2395753 - DNA, 25 bp, Homo sapien
tcctggtcctcaccgtcagcatgca

SEQ ID NO: 2395754 - DNA, 25 bp, Homo sapien
ggctttcaaacttccactgtcctgg

SEQ ID NO: 2395755 - DNA, 25 bp, Homo sapien
gtggctttcaaacttccactgtcct

SEQ ID NO: 2395756 - DNA, 25 bp, Homo sapien
tgtcctggtcctcaccgtcagcatg

SEQ ID NO: 2395757 - DNA, 25 bp, Homo sapien
gagtggcattgtgtggctttcctga

SEQ ID NO: 2395758 - DNA, 25 bp, Homo sapien
actcccgctggctaggactgagtgg

SEQ ID NO: 2395759 - DNA, 25 bp, Homo sapien
tctgtgatgtcagactgtggagcac

SEQ ID NO: 2395760 - DNA, 25 bp, Homo sapien
ttcctgataatgactggccacccag

SEQ ID NO: 2395761 - DNA, 25 bp, Homo sapien
tcttgagttgttcagaaacggaagt

SEQ ID NO: 2395762 - DNA, 25 bp, Homo sapien
taaagttcttcacacccctcttgag

SEQ ID NO: 2395763 - DNA, 25 bp, Homo sapien
tttcagttggaccattctgtggctt

SEQ ID NO: 2395764 - DNA, 25 bp, Homo sapien
ggcactgagtaatgtgataaaacac

SEQ ID NO: 2395765 - DNA, 25 bp, Homo sapien
aaagtagaagctggcttcttccatt

SEQ ID NO: 2395766 - DNA, 25 bp, Homo sapien
ggaacatcgctaatgtagcatggaa

SEQ ID NO: 2395767 - DNA, 25 bp, Homo sapien
gggaacatcgctaatgtagcatgga

SEQ ID NO: 2395768 - DNA, 25 bp, Homo sapien
ctgggaacatcgctaatgtagcatg

SEQ ID NO: 2395769 - DNA, 25 bp, Homo sapien
tgggaacatcgctaatgtagcatgg

SEQ ID NO: 2395770 - DNA, 25 bp, Homo sapien
ctgaggagggtgcttcccctccttg

SEQ ID NO: 2395771 - DNA, 25 bp, Homo sapien
gctcccagtgactgtagacttcctg

SEQ ID NO: 2395772 - DNA, 25 bp, Homo sapien
tcccagtgactgtagacttcctgtg

SEQ ID NO: 2395773 - DNA, 25 bp, Homo sapien
ctgtatcttggagaggctcccagtg

SEQ ID NO: 2395774 - DNA, 25 bp, Homo sapien
ctcccagtgactgtagacttcctgt

SEQ ID NO: 2395775 - DNA, 25 bp, Homo sapien
gccttgcaactgagacgaagccacc

SEQ ID NO: 2395776 - DNA, 25 bp, Homo sapien
acctacctattcagcagccttgcaa

SEQ ID NO: 2395777 - DNA, 25 bp, Homo sapien
tacctattcagcagccttgcaactg

SEQ ID NO: 2395778 - DNA, 25 bp, Homo sapien
gaagccaccccctagcagacttttg

SEQ ID NO: 2395779 - DNA, 25 bp, Homo sapien
cacgggttgttggttttgtgagttg

SEQ ID NO: 2395780 - DNA, 25 bp, Homo sapien
caccacgggttgttggttttgtgag

SEQ ID NO: 2395781 - DNA, 25 bp, Homo sapien
ctgcgctagactgcagagaccgctc

SEQ ID NO: 2395782 - DNA, 25 bp, Homo sapien
catctgctgggagtgcatggataga

SEQ ID NO: 2395783 - DNA, 25 bp, Homo sapien
atctgctgggagtgcatggatagac

SEQ ID NO: 2395784 - DNA, 25 bp, Homo sapien
gcagagaccgctctccaagtgttcc

SEQ ID NO: 2395785 - DNA, 25 bp, Homo sapien
caggttgtacaagctcatagtcact

SEQ ID NO: 2395786 - DNA, 25 bp, Homo sapien
ggtggagtattaatgacagcagtat

SEQ ID NO: 2395787 - DNA, 25 bp, Homo sapien
gaaatggcttcaggttgtacaagct

SEQ ID NO: 2395788 - DNA, 25 bp, Homo sapien
ctagagggactcaggggccattaaa

SEQ ID NO: 2395789 - DNA, 25 bp, Homo sapien
gaaggccatgaacagttctcctggc

SEQ ID NO: 2395790 - DNA, 25 bp, Homo sapien
ccgcgctccctccaagtgtagaagg

SEQ ID NO: 2395791 - DNA, 25 bp, Homo sapien
tcgtgaaagtgcgtgtggctgccgc

SEQ ID NO: 2395792 - DNA, 25 bp, Homo sapien
tcatcgcgacagcaaagtgcggtga

SEQ ID NO: 2395793 - DNA, 25 bp, Homo sapien
gcctcaaaggctcccgatctcctgg

SEQ ID NO: 2395794 - DNA, 25 bp, Homo sapien
tgctcggggattccaagtagatgta

SEQ ID NO: 2395795 - DNA, 25 bp, Homo sapien
cactccgccggaggtattgggtgca

SEQ ID NO: 2395796 - DNA, 25 bp, Homo sapien
gcagaagtaaaggtggctgctcggg

SEQ ID NO: 2395797 - DNA, 25 bp, Homo sapien
ctgtgaggccacctcgcctgctggt

SEQ ID NO: 2395798 - DNA, 25 bp, Homo sapien
ggtgacagagtcctcactgctttta

SEQ ID NO: 2395799 - DNA, 25 bp, Homo sapien
tttaatttccaagtactgcttcatc

SEQ ID NO: 2395800 - DNA, 25 bp, Homo sapien
atctcttggagatgcttcagtgact

SEQ ID NO: 2395801 - DNA, 25 bp, Homo sapien
gaatgatagaaacctttcacggtag

SEQ ID NO: 2395802 - DNA, 25 bp, Homo sapien
agaaacctttcacggtagtggtatg

SEQ ID NO: 2395803 - DNA, 25 bp, Homo sapien
taggaatgatagaaacctttcacgg

SEQ ID NO: 2395804 - DNA, 25 bp, Homo sapien
tgatagaaacctttcacggtagtgg

SEQ ID NO: 2395805 - DNA, 25 bp, Homo sapien
gacggcatcggaatgggaaataccc

SEQ ID NO: 2395806 - DNA, 25 bp, Homo sapien
gaagcagcatgctcagatggctgac

SEQ ID NO: 2395807 - DNA, 25 bp, Homo sapien
gggccagtcaaacaatctcggttgg

SEQ ID NO: 2395808 - DNA, 25 bp, Homo sapien
gctgttatttcggagctcttggaag

SEQ ID NO: 2395809 - DNA, 25 bp, Homo sapien
ggccatgctatgagacaccacctgt

SEQ ID NO: 2395810 - DNA, 25 bp, Homo sapien
tcagtccccggaaaggacttgtgct

SEQ ID NO: 2395811 - DNA, 25 bp, Homo sapien
tcgatagcactaatcacttgccttg

SEQ ID NO: 2395812 - DNA, 25 bp, Homo sapien
tgccttccctctctcgtaaattgca

SEQ ID NO: 2395813 - DNA, 25 bp, Homo sapien
tgctgtcaacttcaagaggcagaac

SEQ ID NO: 2395814 - DNA, 25 bp, Homo sapien
cagtgctgtcaacttcaagaggcag

SEQ ID NO: 2395815 - DNA, 25 bp, Homo sapien
atcgagttgacttttccagcagcac

SEQ ID NO: 2395816 - DNA, 25 bp, Homo sapien
actctgccacccatcgagttgactt

SEQ ID NO: 2395817 - DNA, 25 bp, Homo sapien
tctgaaaggaatgctggcgtctgaa

SEQ ID NO: 2395818 - DNA, 25 bp, Homo sapien
aatcagcggcgactctgggctcttg

SEQ ID NO: 2395819 - DNA, 25 bp, Homo sapien
tagccacaatagagcgggaaggatg

SEQ ID NO: 2395820 - DNA, 25 bp, Homo sapien
tccagacagggactgttgcactgcc

SEQ ID NO: 2395821 - DNA, 25 bp, Homo sapien
catcgtaggttaaagagggacaggc

SEQ ID NO: 2395822 - DNA, 25 bp, Homo sapien
gccgccgcccagtaaaactacatgg

SEQ ID NO: 2395823 - DNA, 25 bp, Homo sapien
agcagtgcgatcgaagagggttact

SEQ ID NO: 2395824 - DNA, 25 bp, Homo sapien
tgcccaaagtctgcagctctgcgag

SEQ ID NO: 2395825 - DNA, 25 bp, Homo sapien
caggcgctttctcaggtttctgctg

SEQ ID NO: 2395826 - DNA, 25 bp, Homo sapien
aatcgctgctcggtattccaggcgc

SEQ ID NO: 2395827 - DNA, 25 bp, Homo sapien
gctcggtattccaggcgctttctca

SEQ ID NO: 2395828 - DNA, 25 bp, Homo sapien
ggccaatcgctgctcggtattccag

SEQ ID NO: 2395829 - DNA, 25 bp, Homo sapien
ggaaggaacattttcgccgtagctg

SEQ ID NO: 2395830 - DNA, 25 bp, Homo sapien
tccttcgggatcgaatcaagggctc

SEQ ID NO: 2395831 - DNA, 25 bp, Homo sapien
taaagcgattgtccaactgagaggg

SEQ ID NO: 2395832 - DNA, 25 bp, Homo sapien
gccgtagctgctccgtaaagcgatt

SEQ ID NO: 2395833 - DNA, 25 bp, Homo sapien
ccccgagctgaaggatgacaaggac

SEQ ID NO: 2395834 - DNA, 25 bp, Homo sapien
tccttcgagctggtggtgcgcttct

SEQ ID NO: 2395835 - DNA, 25 bp, Homo sapien
cttcatcgtggaaacgctgtgtatc

SEQ ID NO: 2395836 - DNA, 25 bp, Homo sapien
ctctgcccgagaaggagtaccagcg

SEQ ID NO: 2395837 - DNA, 25 bp, Homo sapien
tgcagtgtactttgccgaggcggaa

SEQ ID NO: 2395838 - DNA, 25 bp, Homo sapien
tgggccagaccctcaaagctagtat

SEQ ID NO: 2395839 - DNA, 25 bp, Homo sapien
ggtgtgctaacaattgccctgcccg

SEQ ID NO: 2395840 - DNA, 25 bp, Homo sapien
caattggaggcaagatcgtgggctc

SEQ ID NO: 2395841 - DNA, 25 bp, Homo sapien
tatatgtaacatgatagaccagcca

SEQ ID NO: 2395842 - DNA, 25 bp, Homo sapien
gattcagtccacgaactagtctagg

SEQ ID NO: 2395843 - DNA, 25 bp, Homo sapien
caaactgcgtagcacattgaagaca

SEQ ID NO: 2395844 - DNA, 25 bp, Homo sapien
gaaattgaaattcgcatgggactcc

SEQ ID NO: 2395845 - DNA, 25 bp, Homo sapien
tacattctcttggtccgttctcggg

SEQ ID NO: 2395846 - DNA, 25 bp, Homo sapien
gacagacatgaccacggacattggg

SEQ ID NO: 2395847 - DNA, 25 bp, Homo sapien
caaacgttgggtgaggaatacattc

SEQ ID NO: 2395848 - DNA, 25 bp, Homo sapien
aaataggctcacagtaagctgaccc

SEQ ID NO: 2395849 - DNA, 25 bp, Homo sapien
ttaagtttcagtcgcccaaactgca

SEQ ID NO: 2395850 - DNA, 25 bp, Homo sapien
tcttaagtttcagtcgcccaaactg

SEQ ID NO: 2395851 - DNA, 25 bp, Homo sapien
taagtttcagtcgcccaaactgcat

SEQ ID NO: 2395852 - DNA, 25 bp, Homo sapien
cttaagtttcagtcgcccaaactgc

SEQ ID NO: 2395853 - DNA, 25 bp, Homo sapien
atgtagtgcaagctgactaagccaa

SEQ ID NO: 2395854 - DNA, 25 bp, Homo sapien
gacatagtgatgatgtagtgcaagc

SEQ ID NO: 2395855 - DNA, 25 bp, Homo sapien
ctgactaagccaaaccttctgagcc

SEQ ID NO: 2395856 - DNA, 25 bp, Homo sapien
atagacatagtgatgatgtagtgca

SEQ ID NO: 2395857 - DNA, 25 bp, Homo sapien
gggtgtgttgtactctactctcagg

SEQ ID NO: 2395858 - DNA, 25 bp, Homo sapien
aactgaagcgtaccgtgaactgagg

SEQ ID NO: 2395859 - DNA, 25 bp, Homo sapien
tgaactgaggggtgtgttgtactct

SEQ ID NO: 2395860 - DNA, 25 bp, Homo sapien
ttaactgaagcgtaccgtgaactga

SEQ ID NO: 2395861 - DNA, 25 bp, Homo sapien
cagagttagcaactgaaactcttcc

SEQ ID NO: 2395862 - DNA, 25 bp, Homo sapien
gagttagcaactgaaactcttccat

SEQ ID NO: 2395863 - DNA, 25 bp, Homo sapien
agagttagcaactgaaactcttcca

SEQ ID NO: 2395864 - DNA, 25 bp, Homo sapien
ttttcagagaaggagcatacagata

SEQ ID NO: 2395865 - DNA, 25 bp, Homo sapien
tatactcagagatgccagttggcga

SEQ ID NO: 2395866 - DNA, 25 bp, Homo sapien
gaagggtttggaaaatatactcaga

SEQ ID NO: 2395867 - DNA, 25 bp, Homo sapien
gatctccgagaacatagggtctgtg

SEQ ID NO: 2395868 - DNA, 25 bp, Homo sapien
cccttggaaaagatcttccggatgg

SEQ ID NO: 2395869 - DNA, 25 bp, Homo sapien
caaagttctgtgactgagattattt

SEQ ID NO: 2395870 - DNA, 25 bp, Homo sapien
tccttagatctttcttgatgttcct

SEQ ID NO: 2395871 - DNA, 25 bp, Homo sapien
gactgagattatttcccttggaaaa

SEQ ID NO: 2395872 - DNA, 25 bp, Homo sapien
attttggcgtatcagggacccaacg

SEQ ID NO: 2395873 - DNA, 25 bp, Homo sapien
catctggtcgtcctttttgataggg

SEQ ID NO: 2395874 - DNA, 25 bp, Homo sapien
ttgatatcctaacatactcatttga

SEQ ID NO: 2395875 - DNA, 25 bp, Homo sapien
tccactgacatctggtcgtcctttt

SEQ ID NO: 2395876 - DNA, 25 bp, Homo sapien
ctcaaacagccttaggtaatcttgc

SEQ ID NO: 2395877 - DNA, 25 bp, Homo sapien
ctgattttgcacagggtcccacacc

SEQ ID NO: 2395878 - DNA, 25 bp, Homo sapien
tgattttgcacagggtcccacacct

SEQ ID NO: 2395879 - DNA, 25 bp, Homo sapien
cagggagcccctcaaacagccttag

SEQ ID NO: 2395880 - DNA, 25 bp, Homo sapien
aacttggttcattcaacgtattgat

SEQ ID NO: 2395881 - DNA, 25 bp, Homo sapien
tatctctgtatatgacccagggcag

SEQ ID NO: 2395882 - DNA, 25 bp, Homo sapien
caaggtcatggtgcttgagaagccc

SEQ ID NO: 2395883 - DNA, 25 bp, Homo sapien
tatgacccagggcagtaagaaaaag

SEQ ID NO: 2395884 - DNA, 25 bp, Homo sapien
acaggttgtttgcagtggcagatga

SEQ ID NO: 2395885 - DNA, 25 bp, Homo sapien
aacaggttgtttgcagtggcagatg

SEQ ID NO: 2395886 - DNA, 25 bp, Homo sapien
ctgaaggtatcttcgggtagcagat

SEQ ID NO: 2395887 - DNA, 25 bp, Homo sapien
tgtcttctctccgagctgttgttcc

SEQ ID NO: 2395888 - DNA, 25 bp, Homo sapien
tcctcttatgctgtgatgaaactgt

SEQ ID NO: 2395889 - DNA, 25 bp, Homo sapien
aagcaccgcagcttggaatatttgt

SEQ ID NO: 2395890 - DNA, 25 bp, Homo sapien
ttattgacagcaagcaccgcagctt

SEQ ID NO: 2395891 - DNA, 25 bp, Homo sapien
ttccagccgcatttattaaggccaa

SEQ ID NO: 2395892 - DNA, 25 bp, Homo sapien
cttccagccgcatttattaaggcca

SEQ ID NO: 2395893 - DNA, 25 bp, Homo sapien
tcaggagctttaacaagtggttcct

SEQ ID NO: 2395894 - DNA, 25 bp, Homo sapien
ccaccttgttgatttataccactca

SEQ ID NO: 2395895 - DNA, 25 bp, Homo sapien
cgatttgccaccttgttgatttata

SEQ ID NO: 2395896 - DNA, 25 bp, Homo sapien
tgatttataccactcatcagctcag

SEQ ID NO: 2395897 - DNA, 25 bp, Homo sapien
tgttgatttataccactcatcagct

SEQ ID NO: 2395898 - DNA, 25 bp, Homo sapien
ccaactgatggcctgacaagcattc

SEQ ID NO: 2395899 - DNA, 25 bp, Homo sapien
cacacatgcgatgtggggaaaacac

SEQ ID NO: 2395900 - DNA, 25 bp, Homo sapien
ggcctgacaagcattcactctcata

SEQ ID NO: 2395901 - DNA, 25 bp, Homo sapien
acaggtatgtacctgtgcacacatg

SEQ ID NO: 2395902 - DNA, 25 bp, Homo sapien
ctggacttcccactccgagcgagtg

SEQ ID NO: 2395903 - DNA, 25 bp, Homo sapien
gactcattcaatgaccacagcctct

SEQ ID NO: 2395904 - DNA, 25 bp, Homo sapien
aagctgctgccctcgggtggcctgg

SEQ ID NO: 2395905 - DNA, 25 bp, Homo sapien
gggagaagatccagactcattcaat

SEQ ID NO: 2395906 - DNA, 25 bp, Homo sapien
aagaggatcacagcattttcatgct

SEQ ID NO: 2395907 - DNA, 25 bp, Homo sapien
gagaaagaggatcacagcattttca

SEQ ID NO: 2395908 - DNA, 25 bp, Homo sapien
gaaagaggatcacagcattttcatg

SEQ ID NO: 2395909 - DNA, 25 bp, Homo sapien
caagagaaagaggatcacagcattt

SEQ ID NO: 2395910 - DNA, 25 bp, Homo sapien
agcacgagaagcagcaatggagaag

SEQ ID NO: 2395911 - DNA, 25 bp, Homo sapien
ggctcctagcacgagaagcagcaat

SEQ ID NO: 2395912 - DNA, 25 bp, Homo sapien
cctagcacgagaagcagcaatggag

SEQ ID NO: 2395913 - DNA, 25 bp, Homo sapien
tcctagcacgagaagcagcaatgga

SEQ ID NO: 2395914 - DNA, 25 bp, Homo sapien
cagctccctgctagggcctaggaca

SEQ ID NO: 2395915 - DNA, 25 bp, Homo sapien
gacagtgctggtgcctagccaagtc

SEQ ID NO: 2395916 - DNA, 25 bp, Homo sapien
tgcattgaattgaaatgagttaggg

SEQ ID NO: 2395917 - DNA, 25 bp, Homo sapien
tcgcagctccctgctagggcctagg

SEQ ID NO: 2395918 - DNA, 25 bp, Homo sapien
agaacacgcagagcgctgggagccc

SEQ ID NO: 2395919 - DNA, 25 bp, Homo sapien
cagaacacgcagagcgctgggagcc

SEQ ID NO: 2395920 - DNA, 25 bp, Homo sapien
cgctgggagcccttagtttgggcgt

SEQ ID NO: 2395921 - DNA, 25 bp, Homo sapien
tccaaaaggtgacgttgcctgggtc

SEQ ID NO: 2395922 - DNA, 25 bp, Homo sapien
cggggcttacacagacaacaccaca

SEQ ID NO: 2395923 - DNA, 25 bp, Homo sapien
ccctcttgtctgtgagcatcaacaa

SEQ ID NO: 2395924 - DNA, 25 bp, Homo sapien
cttcatatctcttaaccctcttgtc

SEQ ID NO: 2395925 - DNA, 25 bp, Homo sapien
gagcatcaacaatccggggcttaca

SEQ ID NO: 2395926 - DNA, 25 bp, Homo sapien
ggtcatggtcaccccgctgctggct

SEQ ID NO: 2395927 - DNA, 25 bp, Homo sapien
cagcaggctttatgacttggtcttt

SEQ ID NO: 2395928 - DNA, 25 bp, Homo sapien
tggtcaccccgctgctggctaactg

SEQ ID NO: 2395929 - DNA, 25 bp, Homo sapien
gcaggctttatgacttggtcttttc

SEQ ID NO: 2395930 - DNA, 25 bp, Homo sapien
gtgatgcgcgccgtggacggccctg

SEQ ID NO: 2395931 - DNA, 25 bp, Homo sapien
gccaggtaagtgatgcgcgccgtgg

SEQ ID NO: 2395932 - DNA, 25 bp, Homo sapien
catgccctgtgatgggtgggctgga

SEQ ID NO: 2395933 - DNA, 25 bp, Homo sapien
ccaggccctagtaaggcaggtctgc

SEQ ID NO: 2395934 - DNA, 25 bp, Homo sapien
gatgttaccgttgagcatgatctcg

SEQ ID NO: 2395935 - DNA, 25 bp, Homo sapien
tcgttgatgttaccgttgagcatga

SEQ ID NO: 2395936 - DNA, 25 bp, Homo sapien
cgttgagcatgatctcgaagtcatc

SEQ ID NO: 2395937 - DNA, 25 bp, Homo sapien
tcaacaggtcgttgatgttaccgtt

SEQ ID NO: 2395938 - DNA, 25 bp, Homo sapien
caaccgacacctttccagagagtac

SEQ ID NO: 2395939 - DNA, 25 bp, Homo sapien
caggttcaccaggaagcggccaacc

SEQ ID NO: 2395940 - DNA, 25 bp, Homo sapien
ggccaaccgacacctttccagagag

SEQ ID NO: 2395941 - DNA, 25 bp, Homo sapien
caggaagcggccaaccgacaccttt

SEQ ID NO: 2395942 - DNA, 25 bp, Homo sapien
ccaatgcgttcagtgtcacagtata

SEQ ID NO: 2395943 - DNA, 25 bp, Homo sapien
tgcgttcagtgtcacagtatacata

SEQ ID NO: 2395944 - DNA, 25 bp, Homo sapien
tgctcaaggcatcccggatgcgagc

SEQ ID NO: 2395945 - DNA, 25 bp, Homo sapien
caaggcatcccggatgcgagcggat

SEQ ID NO: 2395946 - DNA, 25 bp, Homo sapien
aagatggccacaccggcggtaccag

SEQ ID NO: 2395947 - DNA, 25 bp, Homo sapien
accggcggtaccagcaagtgctcct

SEQ ID NO: 2395948 - DNA, 25 bp, Homo sapien
ccacaagatggccacaccggcggta

SEQ ID NO: 2395949 - DNA, 25 bp, Homo sapien
gccacaccggcggtaccagcaagtg

SEQ ID NO: 2395950 - DNA, 25 bp, Homo sapien
ccagccttggagattggacaacctc

SEQ ID NO: 2395951 - DNA, 25 bp, Homo sapien
catggacctagatgcagttgctcgg

SEQ ID NO: 2395952 - DNA, 25 bp, Homo sapien
tcggtccaagattcaccaggcagga

SEQ ID NO: 2395953 - DNA, 25 bp, Homo sapien
tctgtactggaaacaggctagggca

SEQ ID NO: 2395954 - DNA, 25 bp, Homo sapien
tgatacagctggctcacgtaacgga

SEQ ID NO: 2395955 - DNA, 25 bp, Homo sapien
attcctccttttatcaaatactgga

SEQ ID NO: 2395956 - DNA, 25 bp, Homo sapien
cacgtaacggaattcatctgtattc

SEQ ID NO: 2395957 - DNA, 25 bp, Homo sapien
cagctggctcacgtaacggaattca

SEQ ID NO: 2395958 - DNA, 25 bp, Homo sapien
taagtcccagacgacaccgtgttgc

SEQ ID NO: 2395959 - DNA, 25 bp, Homo sapien
gaggtgcaagcttacgctagcccag

SEQ ID NO: 2395960 - DNA, 25 bp, Homo sapien
tctactgatgcggaaccaaaagcgg

SEQ ID NO: 2395961 - DNA, 25 bp, Homo sapien
caaaagcggcagacaggaaaatccc

SEQ ID NO: 2395962 - DNA, 25 bp, Homo sapien
ggcactaagatgagtcgttggagct

SEQ ID NO: 2395963 - DNA, 25 bp, Homo sapien
cactaagatgagtcgttggagctgg

SEQ ID NO: 2395964 - DNA, 25 bp, Homo sapien
ctaagatgagtcgttggagctggaa

SEQ ID NO: 2395965 - DNA, 25 bp, Homo sapien
gtgggcactaagatgagtcgttgga

SEQ ID NO: 2395966 - DNA, 25 bp, Homo sapien
gagagttgttccctcgttcaggtga

SEQ ID NO: 2395967 - DNA, 25 bp, Homo sapien
gcacaggagagttgttccctcgttc

SEQ ID NO: 2395968 - DNA, 25 bp, Homo sapien
tgttccctcgttcaggtgagtccct

SEQ ID NO: 2395969 - DNA, 25 bp, Homo sapien
caggagagttgttccctcgttcagg

SEQ ID NO: 2395970 - DNA, 25 bp, Homo sapien
tctgtgatgtggcctgacgtggcag

SEQ ID NO: 2395971 - DNA, 25 bp, Homo sapien
aagtggctgggcagagcacccagtc

SEQ ID NO: 2395972 - DNA, 25 bp, Homo sapien
gggctccaagcgtccccatcctgcg

SEQ ID NO: 2395973 - DNA, 25 bp, Homo sapien
gagtgagccacacagggtaactctc

SEQ ID NO: 2395974 - DNA, 25 bp, Homo sapien
ccaaacgcatgttcaaggccacgaa

SEQ ID NO: 2395975 - DNA, 25 bp, Homo sapien
tctctgcggagtgaacgtgctctga

SEQ ID NO: 2395976 - DNA, 25 bp, Homo sapien
tttcttgtctgcctctctgcggagt

SEQ ID NO: 2395977 - DNA, 25 bp, Homo sapien
caaggccacgaaacaaggaggcagg

SEQ ID NO: 2395978 - DNA, 25 bp, Homo sapien
gcagtgtctcaaagccgcgcttctg

SEQ ID NO: 2395979 - DNA, 25 bp, Homo sapien
actgacgtggtactggctgctagca

SEQ ID NO: 2395980 - DNA, 25 bp, Homo sapien
cccgtggactgacgtggtactggct

SEQ ID NO: 2395981 - DNA, 25 bp, Homo sapien
tcccagccccgtggactgacgtggt

SEQ ID NO: 2395982 - DNA, 25 bp, Homo sapien
gggttcaccgaagatacatactgtt

SEQ ID NO: 2395983 - DNA, 25 bp, Homo sapien
ccaaattttgaccaacgtctagcac

SEQ ID NO: 2395984 - DNA, 25 bp, Homo sapien
agcactgcctttgggttcaccgaag

SEQ ID NO: 2395985 - DNA, 25 bp, Homo sapien
gccccttcttagacatgctgccaaa

SEQ ID NO: 2395986 - DNA, 25 bp, Homo sapien
tggtagggtctgctctgcagattcc

SEQ ID NO: 2395987 - DNA, 25 bp, Homo sapien
gctgcgaagtgcatcggcgatgcac

SEQ ID NO: 2395988 - DNA, 25 bp, Homo sapien
tgtccactgtccactacactggtag

SEQ ID NO: 2395989 - DNA, 25 bp, Homo sapien
ctcgcagtattgctccgcacaaggg

SEQ ID NO: 2395990 - DNA, 25 bp, Homo sapien
ctgttcctaaggctggtccgatgga

SEQ ID NO: 2395991 - DNA, 25 bp, Homo sapien
ttcctaaggctggtccgatggagaa

SEQ ID NO: 2395992 - DNA, 25 bp, Homo sapien
tgttcctaaggctggtccgatggag

SEQ ID NO: 2395993 - DNA, 25 bp, Homo sapien
cctaaggctggtccgatggagaaga

SEQ ID NO: 2395994 - DNA, 25 bp, Homo sapien
tgtcctgtccatgcacgggtctgtc

SEQ ID NO: 2395995 - DNA, 25 bp, Homo sapien
tgcatttctgatgcgtgttcctggg

SEQ ID NO: 2395996 - DNA, 25 bp, Homo sapien
ccagggcaaggttcacactcatctt

SEQ ID NO: 2395997 - DNA, 25 bp, Homo sapien
ctcatctttcatgtggcggccaggg

SEQ ID NO: 2395998 - DNA, 25 bp, Homo sapien
cacaatggatttcagagctttcaag

SEQ ID NO: 2395999 - DNA, 25 bp, Homo sapien
tgccaggtgcgtgcagagagtaaaa

SEQ ID NO: 2396000 - DNA, 25 bp, Homo sapien
ttaagtagcattttcaccgggagtg

SEQ ID NO: 2396001 - DNA, 25 bp, Homo sapien
caaatatgatttgtactggaggtcc

SEQ ID NO: 2396002 - DNA, 25 bp, Homo sapien
acagcaaggacatacatgccacata

SEQ ID NO: 2396003 - DNA, 25 bp, Homo sapien
gttgagacagggttcctttatatta

SEQ ID NO: 2396004 - DNA, 25 bp, Homo sapien
tgagacagggttcctttatattaaa

SEQ ID NO: 2396005 - DNA, 25 bp, Homo sapien
catacaagatgatgggggtcccagg

SEQ ID NO: 2396006 - DNA, 25 bp, Homo sapien
tgcccttgtccggttcgcactgaca

SEQ ID NO: 2396007 - DNA, 25 bp, Homo sapien
ttgtccggttcgcactgacagcggc

SEQ ID NO: 2396008 - DNA, 25 bp, Homo sapien
cggccggcgggagggttggctctca

SEQ ID NO: 2396009 - DNA, 25 bp, Homo sapien
tcttgcccttgtccggttcgcactg

SEQ ID NO: 2396010 - DNA, 25 bp, Homo sapien
tgtgggctgaacaagcatcccggaa

SEQ ID NO: 2396011 - DNA, 25 bp, Homo sapien
gctgaacaagcatcccggaagcctg

SEQ ID NO: 2396012 - DNA, 25 bp, Homo sapien
gggatcctcgaagacagatttacca

SEQ ID NO: 2396013 - DNA, 25 bp, Homo sapien
gcttgtgggatcctcgaagacagat

SEQ ID NO: 2396014 - DNA, 25 bp, Homo sapien
tcgcaaaccgttggggtgtgatctc

SEQ ID NO: 2396015 - DNA, 25 bp, Homo sapien
ctgttggctcgcaaaccgttggggt

SEQ ID NO: 2396016 - DNA, 25 bp, Homo sapien
ggctcgcaaaccgttggggtgtgat

SEQ ID NO: 2396017 - DNA, 25 bp, Homo sapien
ttggctcgcaaaccgttggggtgtg

SEQ ID NO: 2396018 - DNA, 25 bp, Homo sapien
caaaaggactcactgtttgtagtac

SEQ ID NO: 2396019 - DNA, 25 bp, Homo sapien
caggatgcacaaaacatttgatttc

SEQ ID NO: 2396020 - DNA, 25 bp, Homo sapien
gctgacatctacaacaaacattccc

SEQ ID NO: 2396021 - DNA, 25 bp, Homo sapien
ccgttttggttttgtctgactcctg

SEQ ID NO: 2396022 - DNA, 25 bp, Homo sapien
aaatgtctagggctactccattgcc

SEQ ID NO: 2396023 - DNA, 25 bp, Homo sapien
gaacagacctcttggaatgcaactg

SEQ ID NO: 2396024 - DNA, 25 bp, Homo sapien
gcaactgcccatatctgagcatcag

SEQ ID NO: 2396025 - DNA, 25 bp, Homo sapien
gctaggaaccctgtaactgactaaa

SEQ ID NO: 2396026 - DNA, 25 bp, Homo sapien
tttgaaagtcaagggttgtacagag

SEQ ID NO: 2396027 - DNA, 25 bp, Homo sapien
caagggttgtacagaggggctgtct

SEQ ID NO: 2396028 - DNA, 25 bp, Homo sapien
ccgatgcccgagaggttcaagattt

SEQ ID NO: 2396029 - DNA, 25 bp, Homo sapien
cagggtttttgtgccccgatgcccg

SEQ ID NO: 2396030 - DNA, 25 bp, Homo sapien
tggagggcacacagctgcatctgcg

SEQ ID NO: 2396031 - DNA, 25 bp, Homo sapien
gcacacagctgcatctgcggcagag

SEQ ID NO: 2396032 - DNA, 25 bp, Homo sapien
agggcacacagctgcatctgcggca

SEQ ID NO: 2396033 - DNA, 25 bp, Homo sapien
ctggagggcacacagctgcatctgc

SEQ ID NO: 2396034 - DNA, 25 bp, Homo sapien
ttgcacctctggaaacaggacgaga

SEQ ID NO: 2396035 - DNA, 25 bp, Homo sapien
cctctggaaacaggacgagaatgat

SEQ ID NO: 2396036 - DNA, 25 bp, Homo sapien
cacctctggaaacaggacgagaatg

SEQ ID NO: 2396037 - DNA, 25 bp, Homo sapien
ctggaaacaggacgagaatgatttt

SEQ ID NO: 2396038 - DNA, 25 bp, Homo sapien
tgagaaaagttgtcacactgaaagt

SEQ ID NO: 2396039 - DNA, 25 bp, Homo sapien
gaaaagttgtcacactgaaagtacc

SEQ ID NO: 2396040 - DNA, 25 bp, Homo sapien
gagttgagaaaagttgtcacactga

SEQ ID NO: 2396041 - DNA, 25 bp, Homo sapien
agtgagttgagaaaagttgtcacac

SEQ ID NO: 2396042 - DNA, 25 bp, Homo sapien
gaagtccacgattagggagtcagca

SEQ ID NO: 2396043 - DNA, 25 bp, Homo sapien
ttaaacaatagttctggagaccgga

SEQ ID NO: 2396044 - DNA, 25 bp, Homo sapien
tcatttcccaccatgtctctgaggg

SEQ ID NO: 2396045 - DNA, 25 bp, Homo sapien
tattggctgggcatcaaaagcctca

SEQ ID NO: 2396046 - DNA, 25 bp, Homo sapien
aagacattaatcctatggggtcagg

SEQ ID NO: 2396047 - DNA, 25 bp, Homo sapien
tataaagacattaatcctatggggt

SEQ ID NO: 2396048 - DNA, 25 bp, Homo sapien
cattaatcctatggggtcaggaccc

SEQ ID NO: 2396049 - DNA, 25 bp, Homo sapien
ggagagagacaaccatctctggtgt

SEQ ID NO: 2396050 - DNA, 25 bp, Homo sapien
tgtcattaatcttctttgcccagca

SEQ ID NO: 2396051 - DNA, 25 bp, Homo sapien
tcagacaaacattccatcgtctgtg

SEQ ID NO: 2396052 - DNA, 25 bp, Homo sapien
cattccatcgtctgtggaaagccaa

SEQ ID NO: 2396053 - DNA, 25 bp, Homo sapien
caaacattccatcgtctgtggaaag

SEQ ID NO: 2396054 - DNA, 25 bp, Homo sapien
gctaggccagcaagagatgtatccg

SEQ ID NO: 2396055 - DNA, 25 bp, Homo sapien
gcttcttgcatcattaaggctactg

SEQ ID NO: 2396056 - DNA, 25 bp, Homo sapien
gatatcttctgctaggaacaccagg

SEQ ID NO: 2396057 - DNA, 25 bp, Homo sapien
tggcctcatacccactttaaagaag

SEQ ID NO: 2396058 - DNA, 25 bp, Homo sapien
tgtctccagttgtcagctccaacat

SEQ ID NO: 2396059 - DNA, 25 bp, Homo sapien
ttgtctccagttgtcagctccaaca

SEQ ID NO: 2396060 - DNA, 25 bp, Homo sapien
cttttatgatgttgtcaccaagcca

SEQ ID NO: 2396061 - DNA, 25 bp, Homo sapien
gatgttgtcaccaagccatattgtc

SEQ ID NO: 2396062 - DNA, 25 bp, Homo sapien
gttgtaggatgtgtactcagagtcc

SEQ ID NO: 2396063 - DNA, 25 bp, Homo sapien
ctgctgaagagagacctgttgtagg

SEQ ID NO: 2396064 - DNA, 25 bp, Homo sapien
gagagacctgttgtaggatgtgtac

SEQ ID NO: 2396065 - DNA, 25 bp, Homo sapien
gacctgttgtaggatgtgtactcag

SEQ ID NO: 2396066 - DNA, 25 bp, Homo sapien
tgaaggctgaacattcaggaggctg

SEQ ID NO: 2396067 - DNA, 25 bp, Homo sapien
tttggcaatgaaggctgaacattca

SEQ ID NO: 2396068 - DNA, 25 bp, Homo sapien
gtcttctttggcaatgaaggctgaa

SEQ ID NO: 2396069 - DNA, 25 bp, Homo sapien
ctttgttcccaaataatggtcttct

SEQ ID NO: 2396070 - DNA, 25 bp, Homo sapien
cggcatcctttgcattggacagaaa

SEQ ID NO: 2396071 - DNA, 25 bp, Homo sapien
gtgaccccacggcatcctttgcatt

SEQ ID NO: 2396072 - DNA, 25 bp, Homo sapien
cctttgcattggacagaaatataat

SEQ ID NO: 2396073 - DNA, 25 bp, Homo sapien
cccacggcatcctttgcattggaca

SEQ ID NO: 2396074 - DNA, 25 bp, Homo sapien
cagaagccttgttcagcaagaggag

SEQ ID NO: 2396075 - DNA, 25 bp, Homo sapien
aagccttgttcagcaagaggaggga

SEQ ID NO: 2396076 - DNA, 25 bp, Homo sapien
aggccgaaggcgctgaccactagag

SEQ ID NO: 2396077 - DNA, 25 bp, Homo sapien
aggagggaggccgaaggcgctgacc

SEQ ID NO: 2396078 - DNA, 25 bp, Homo sapien
cgtagtagctaagcagaacgttctg

SEQ ID NO: 2396079 - DNA, 25 bp, Homo sapien
tgctggttatcctttatccaccggg

SEQ ID NO: 2396080 - DNA, 25 bp, Homo sapien
tccaccgggttagagcgtagtagct

SEQ ID NO: 2396081 - DNA, 25 bp, Homo sapien
aactgcaagtaaaggcagggtgctc

SEQ ID NO: 2396082 - DNA, 25 bp, Homo sapien
catgttcagagatgtcgctagaggc

SEQ ID NO: 2396083 - DNA, 25 bp, Homo sapien
cgctctgcatagctgagtgtgagca

SEQ ID NO: 2396084 - DNA, 25 bp, Homo sapien
gttcagagatgtcgctagaggcttg

SEQ ID NO: 2396085 - DNA, 25 bp, Homo sapien
ttttcccgctctgcatagctgagtg

SEQ ID NO: 2396086 - DNA, 25 bp, Homo sapien
cagcaggggtgagttccggctggtg

SEQ ID NO: 2396087 - DNA, 25 bp, Homo sapien
agcaggggtgagttccggctggtgc

SEQ ID NO: 2396088 - DNA, 25 bp, Homo sapien
ggtgagttccggctggtgctccctg

SEQ ID NO: 2396089 - DNA, 25 bp, Homo sapien
gagttccggctggtgctccctgctc

SEQ ID NO: 2396090 - DNA, 25 bp, Homo sapien
ggcgatgcatgcctcccgtctctgg

SEQ ID NO: 2396091 - DNA, 25 bp, Homo sapien
cccgtctctggatttcggaggctcc

SEQ ID NO: 2396092 - DNA, 25 bp, Homo sapien
catgcctcccgtctctggatttcgg

SEQ ID NO: 2396093 - DNA, 25 bp, Homo sapien
cgatgcatgcctcccgtctctggat

SEQ ID NO: 2396094 - DNA, 25 bp, Homo sapien
gattgcttttgtgcgtcacagggaa

SEQ ID NO: 2396095 - DNA, 25 bp, Homo sapien
ccgtgggattgcttttgtgcgtcac

SEQ ID NO: 2396096 - DNA, 25 bp, Homo sapien
gcttttgtgcgtcacagggaaaaga

SEQ ID NO: 2396097 - DNA, 25 bp, Homo sapien
ttgtgcgtcacagggaaaagagccc

SEQ ID NO: 2396098 - DNA, 25 bp, Homo sapien
tttgggctggtttcaagctgtcgcg

SEQ ID NO: 2396099 - DNA, 25 bp, Homo sapien
ctcttctctcgcaggtttgggaatg

SEQ ID NO: 2396100 - DNA, 25 bp, Homo sapien
caagctgtcgcgtgacatggcccat

SEQ ID NO: 2396101 - DNA, 25 bp, Homo sapien
caggtttgggaatgtctccttgagg

SEQ ID NO: 2396102 - DNA, 25 bp, Homo sapien
tggggacaggcatgggctcataact

SEQ ID NO: 2396103 - DNA, 25 bp, Homo sapien
ctggactggagtgggaaggtcagaa

SEQ ID NO: 2396104 - DNA, 25 bp, Homo sapien
agactgtctgtggatctctgctcct

SEQ ID NO: 2396105 - DNA, 25 bp, Homo sapien
ggtcagaaataatctgtgaggctgg

SEQ ID NO: 2396106 - DNA, 25 bp, Homo sapien
tgtgattagcctgcccagggacatg

SEQ ID NO: 2396107 - DNA, 25 bp, Homo sapien
ctgtgattagcctgcccagggacat

SEQ ID NO: 2396108 - DNA, 25 bp, Homo sapien
attagcctgcccagggacatggccc

SEQ ID NO: 2396109 - DNA, 25 bp, Homo sapien
tgattagcctgcccagggacatggc

SEQ ID NO: 2396110 - DNA, 25 bp, Homo sapien
ggacaattgcccgagtcctcagaga

SEQ ID NO: 2396111 - DNA, 25 bp, Homo sapien
aattgcccgagtcctcagagattct

SEQ ID NO: 2396112 - DNA, 25 bp, Homo sapien
tcagcatgtggacaattgcccgagt

SEQ ID NO: 2396113 - DNA, 25 bp, Homo sapien
tggacagaaagctcagcatgtggac

SEQ ID NO: 2396114 - DNA, 25 bp, Homo sapien
gggaaaacagcttctgagtcactgg

SEQ ID NO: 2396115 - DNA, 25 bp, Homo sapien
ttctgagtcactggtctccaggcca

SEQ ID NO: 2396116 - DNA, 25 bp, Homo sapien
tggaagccacagaggggaaaacagc

SEQ ID NO: 2396117 - DNA, 25 bp, Homo sapien
gccacagaggggaaaacagcttctg

SEQ ID NO: 2396118 - DNA, 25 bp, Homo sapien
ctggagccccatgatagcgaccact

SEQ ID NO: 2396119 - DNA, 25 bp, Homo sapien
tgtatctccagagccatatatcaga

SEQ ID NO: 2396120 - DNA, 25 bp, Homo sapien
ttctcagttaaagtgtcataaaatt

SEQ ID NO: 2396121 - DNA, 25 bp, Homo sapien
tccatggttgtgctgtgtatctcca

SEQ ID NO: 2396122 - DNA, 25 bp, Homo sapien
tgtttggagtattcacaggaccgcg

SEQ ID NO: 2396123 - DNA, 25 bp, Homo sapien
gagctcagtcagcagattcttaagc

SEQ ID NO: 2396124 - DNA, 25 bp, Homo sapien
ccaaactgagaatgatggcaagtgt

SEQ ID NO: 2396125 - DNA, 25 bp, Homo sapien
ttatcatcttgttgcttgagctcag

SEQ ID NO: 2396126 - DNA, 25 bp, Homo sapien
ccaaagaagttgctgtcataattac

SEQ ID NO: 2396127 - DNA, 25 bp, Homo sapien
caggctcatgaaaagctaaatccgg

SEQ ID NO: 2396128 - DNA, 25 bp, Homo sapien
tataagctgccccatatctttgctg

SEQ ID NO: 2396129 - DNA, 25 bp, Homo sapien
ggtcttggctctccaaaagagaata

SEQ ID NO: 2396130 - DNA, 25 bp, Homo sapien
caggacagccatgagtgcggctttt

SEQ ID NO: 2396131 - DNA, 25 bp, Homo sapien
agtgcggcttttccagggctcagac

SEQ ID NO: 2396132 - DNA, 25 bp, Homo sapien
gttttccaggattccacaggacagc

SEQ ID NO: 2396133 - DNA, 25 bp, Homo sapien
ttttccaggattccacaggacagcc

SEQ ID NO: 2396134 - DNA, 25 bp, Homo sapien
gtccagacatcagaggcaagcggca

SEQ ID NO: 2396135 - DNA, 25 bp, Homo sapien
agattgaggatctgctgtttgcgtc

SEQ ID NO: 2396136 - DNA, 25 bp, Homo sapien
gggttggcactaacaccctggagca

SEQ ID NO: 2396137 - DNA, 25 bp, Homo sapien
gcactaacaccctggagcagattga

SEQ ID NO: 2396138 - DNA, 25 bp, Homo sapien
tgaagctatctcctcctcggtaata

SEQ ID NO: 2396139 - DNA, 25 bp, Homo sapien
tcctcctcggtaatatagatgctga

SEQ ID NO: 2396140 - DNA, 25 bp, Homo sapien
tgggcctggtaggttcggtctctga

SEQ ID NO: 2396141 - DNA, 25 bp, Homo sapien
tagatgctgagggtcatgcacagct

SEQ ID NO: 2396142 - DNA, 25 bp, Homo sapien
tatggagatcaagttgtttctattc

SEQ ID NO: 2396143 - DNA, 25 bp, Homo sapien
gatcaagttgtttctattcccacca

SEQ ID NO: 2396144 - DNA, 25 bp, Homo sapien
ccaacaataccgaggttttgctcct

SEQ ID NO: 2396145 - DNA, 25 bp, Homo sapien
ctcctcatatacagctcccctggac

SEQ ID NO: 2396146 - DNA, 25 bp, Homo sapien
ctgccaacagggtccgagcccctcc

SEQ ID NO: 2396147 - DNA, 25 bp, Homo sapien
aacagggtccgagcccctcctgtga

SEQ ID NO: 2396148 - DNA, 25 bp, Homo sapien
cctgcctggtgccttggtgaggtct

SEQ ID NO: 2396149 - DNA, 25 bp, Homo sapien
cctggtgccttggtgaggtctcgtt

SEQ ID NO: 2396150 - DNA, 25 bp, Homo sapien
ggatacaaggcctctgcatcgtgag

SEQ ID NO: 2396151 - DNA, 25 bp, Homo sapien
gagcacatcgaagcagaaatcctga

SEQ ID NO: 2396152 - DNA, 25 bp, Homo sapien
tgccttggtcggagtgcttctcaaa

SEQ ID NO: 2396153 - DNA, 25 bp, Homo sapien
gggtgtagagctcagtcttcctcaa

SEQ ID NO: 2396154 - DNA, 25 bp, Homo sapien
cctcagcaggatctaagcagctcag

SEQ ID NO: 2396155 - DNA, 25 bp, Homo sapien
agcaagagcagcaggttcggagcca

SEQ ID NO: 2396156 - DNA, 25 bp, Homo sapien
aagagcagcaggttcggagccatct

SEQ ID NO: 2396157 - DNA, 25 bp, Homo sapien
tggcagcctcagcaggatctaagca

SEQ ID NO: 2396158 - DNA, 25 bp, Homo sapien
cctcatggaagctgtgcggctccat

SEQ ID NO: 2396159 - DNA, 25 bp, Homo sapien
tagtctgagattctcgaatggcaga

SEQ ID NO: 2396160 - DNA, 25 bp, Homo sapien
gctgcaatgtgggtgcttgatcgat

SEQ ID NO: 2396161 - DNA, 25 bp, Homo sapien
cttgatcgatgcttgttgaaacaga

SEQ ID NO: 2396162 - DNA, 25 bp, Homo sapien
ctgtctctgaccttgggaaatttcc

SEQ ID NO: 2396163 - DNA, 25 bp, Homo sapien
catgggagtctccctaacagatacg

SEQ ID NO: 2396164 - DNA, 25 bp, Homo sapien
cctctgtgagaagggctgagaagac

SEQ ID NO: 2396165 - DNA, 25 bp, Homo sapien
atgggagtctccctaacagatacgc

SEQ ID NO: 2396166 - DNA, 25 bp, Homo sapien
tgggagtctccctaacagatacgcc

SEQ ID NO: 2396167 - DNA, 25 bp, Homo sapien
gaactcccttttatggtacagtggc

SEQ ID NO: 2396168 - DNA, 25 bp, Homo sapien
ccctcagcttgccaggacaattttg

SEQ ID NO: 2396169 - DNA, 25 bp, Homo sapien
tacagtggcctctgagcaacgcttc

SEQ ID NO: 2396170 - DNA, 25 bp, Homo sapien
gtttgaggaacccaataccagctat

SEQ ID NO: 2396171 - DNA, 25 bp, Homo sapien
tttctctgcacaatagacgagggga

SEQ ID NO: 2396172 - DNA, 25 bp, Homo sapien
gcacaatagacgaggggaatcttat

SEQ ID NO: 2396173 - DNA, 25 bp, Homo sapien
tagacgaggggaatcttattatact

SEQ ID NO: 2396174 - DNA, 25 bp, Homo sapien
tctgcacaatagacgaggggaatct

SEQ ID NO: 2396175 - DNA, 25 bp, Homo sapien
ggcaggtatattctcaggacactag

SEQ ID NO: 2396176 - DNA, 25 bp, Homo sapien
cttaggcaggtatattctcaggaca

SEQ ID NO: 2396177 - DNA, 25 bp, Homo sapien
tgaagtcctcaaggacttgggacac

SEQ ID NO: 2396178 - DNA, 25 bp, Homo sapien
gggacacgattgctgcgccttcttc

SEQ ID NO: 2396179 - DNA, 25 bp, Homo sapien
ctgtgaagtaagacacccaattctc

SEQ ID NO: 2396180 - DNA, 25 bp, Homo sapien
cttcagcaactgtgaagtaagacac

SEQ ID NO: 2396181 - DNA, 25 bp, Homo sapien
ggagaaagcacaggttacttcagca

SEQ ID NO: 2396182 - DNA, 25 bp, Homo sapien
aaagcacaggttacttcagcaactg

SEQ ID NO: 2396183 - DNA, 25 bp, Homo sapien
tccacgtaaacaatgcaagctttag

SEQ ID NO: 2396184 - DNA, 25 bp, Homo sapien
gttttatatgcagaggatcccacaa

SEQ ID NO: 2396185 - DNA, 25 bp, Homo sapien
agaaacatcttccacgtaaacaatg

SEQ ID NO: 2396186 - DNA, 25 bp, Homo sapien
ggagcgatttcagatggcatggcat

SEQ ID NO: 2396187 - DNA, 25 bp, Homo sapien
gagacttgtaaacccatctgctgca

SEQ ID NO: 2396188 - DNA, 25 bp, Homo sapien
tacggttgaaatctgattctggctc

SEQ ID NO: 2396189 - DNA, 25 bp, Homo sapien
taagtagatacaatcaggcaggagc

SEQ ID NO: 2396190 - DNA, 25 bp, Homo sapien
cttggagagtgggttaagtagatac

SEQ ID NO: 2396191 - DNA, 25 bp, Homo sapien
gaaagcccaggttatcagcttctgg

SEQ ID NO: 2396192 - DNA, 25 bp, Homo sapien
cagtggttcttccattgctccagac

SEQ ID NO: 2396193 - DNA, 25 bp, Homo sapien
tttgaaagggagagttggcacccac

SEQ ID NO: 2396194 - DNA, 25 bp, Homo sapien
aaaagaacacctgcttgcttggaag

SEQ ID NO: 2396195 - DNA, 25 bp, Homo sapien
caaatagggtaaactggaggagaag

SEQ ID NO: 2396196 - DNA, 25 bp, Homo sapien
cttgggagagtactctgacagcagc

SEQ ID NO: 2396197 - DNA, 25 bp, Homo sapien
gagtactctgacagcagcaaatagg

SEQ ID NO: 2396198 - DNA, 25 bp, Homo sapien
aagaaatagaagaagactactgcaa

SEQ ID NO: 2396199 - DNA, 25 bp, Homo sapien
ggggtctgcgctcttgactttggtt

SEQ ID NO: 2396200 - DNA, 25 bp, Homo sapien
ctgcgctcttgactttggttgtggg

SEQ ID NO: 2396201 - DNA, 25 bp, Homo sapien
ggtctgcgctcttgactttggttgt

SEQ ID NO: 2396202 - DNA, 25 bp, Homo sapien
tctgcgctcttgactttggttgtgg

SEQ ID NO: 2396203 - DNA, 25 bp, Homo sapien
gatttttgcagtggagtaactcgga

SEQ ID NO: 2396204 - DNA, 25 bp, Homo sapien
gtgacatggatctcctgactactcc

SEQ ID NO: 2396205 - DNA, 25 bp, Homo sapien
ctgagttgatacagtcctgttgcct

SEQ ID NO: 2396206 - DNA, 25 bp, Homo sapien
cagtcctgttgccttttaggaggtc

SEQ ID NO: 2396207 - DNA, 25 bp, Homo sapien
gatatagctgttttctgtcgagctg

SEQ ID NO: 2396208 - DNA, 25 bp, Homo sapien
gatgccttgcacaatgatatagctg

SEQ ID NO: 2396209 - DNA, 25 bp, Homo sapien
tagcgccttttatggctaggcttcc

SEQ ID NO: 2396210 - DNA, 25 bp, Homo sapien
gcttccatatttcaggatcaaagca

SEQ ID NO: 2396211 - DNA, 25 bp, Homo sapien
tccaagtcattcacagcacgtcggc

SEQ ID NO: 2396212 - DNA, 25 bp, Homo sapien
tgaactctgggctcttaggccagtg

SEQ ID NO: 2396213 - DNA, 25 bp, Homo sapien
tcatggagcaccttgctacttttga

SEQ ID NO: 2396214 - DNA, 25 bp, Homo sapien
ttttgaaaagtgatgctccaagtca

SEQ ID NO: 2396215 - DNA, 25 bp, Homo sapien
acaactcgagcacctttcctatcag

SEQ ID NO: 2396216 - DNA, 25 bp, Homo sapien
ggatgtattaacagcatctgtatta

SEQ ID NO: 2396217 - DNA, 25 bp, Homo sapien
ctgtattaacaactcgagcaccttt

SEQ ID NO: 2396218 - DNA, 25 bp, Homo sapien
tggcacacaggatgtattaacagca

SEQ ID NO: 2396219 - DNA, 25 bp, Homo sapien
cctactcctgtgtctatgagtctga

SEQ ID NO: 2396220 - DNA, 25 bp, Homo sapien
tacgtatacatcgtgaaatcatcac

SEQ ID NO: 2396221 - DNA, 25 bp, Homo sapien
catgcactgtacattaggtcttcag

SEQ ID NO: 2396222 - DNA, 25 bp, Homo sapien
cctctgtgttgttgcgaatggcaaa

SEQ ID NO: 2396223 - DNA, 25 bp, Homo sapien
aatggtccctgagctcgttctaagg

SEQ ID NO: 2396224 - DNA, 25 bp, Homo sapien
gagctcgttctaaggtcagaaaaag

SEQ ID NO: 2396225 - DNA, 25 bp, Homo sapien
aaagattaaaggctgctgaagagtg

SEQ ID NO: 2396226 - DNA, 25 bp, Homo sapien
tgtgcatgaaggctggaaaagacca

SEQ ID NO: 2396227 - DNA, 25 bp, Homo sapien
aagatccacaagtgccgctccaggg

SEQ ID NO: 2396228 - DNA, 25 bp, Homo sapien
ctcctgtcaaagatccacaagtgcc

SEQ ID NO: 2396229 - DNA, 25 bp, Homo sapien
tcaaagatccacaagtgccgctcca

SEQ ID NO: 2396230 - DNA, 25 bp, Homo sapien
tgtcaaagatccacaagtgccgctc

SEQ ID NO: 2396231 - DNA, 25 bp, Homo sapien
aaaagcagcattatagaactgtgcc

SEQ ID NO: 2396232 - DNA, 25 bp, Homo sapien
cctggtatactgctcaaaagcagca

SEQ ID NO: 2396233 - DNA, 25 bp, Homo sapien
tagaactgtgcctgatctgactgca

SEQ ID NO: 2396234 - DNA, 25 bp, Homo sapien
ctctctgagggtgttgtggtatgta

SEQ ID NO: 2396235 - DNA, 25 bp, Homo sapien
ttgttcccctgttcaggcctcgtgg

SEQ ID NO: 2396236 - DNA, 25 bp, Homo sapien
tcagccaagaagtgttgttcccctg

SEQ ID NO: 2396237 - DNA, 25 bp, Homo sapien
gccattgccatggacgtgtctctgc

SEQ ID NO: 2396238 - DNA, 25 bp, Homo sapien
ggcctcgtgggccattgccatggac

SEQ ID NO: 2396239 - DNA, 25 bp, Homo sapien
ctttcctgcactgtgtctggatttc

SEQ ID NO: 2396240 - DNA, 25 bp, Homo sapien
ctgcactgtgtctggatttctgcca

SEQ ID NO: 2396241 - DNA, 25 bp, Homo sapien
tgcactgtgtctggatttctgccat

SEQ ID NO: 2396242 - DNA, 25 bp, Homo sapien
cttctttcctgcactgtgtctggat

SEQ ID NO: 2396243 - DNA, 25 bp, Homo sapien
ccaactcggatatgcctggacagcc

SEQ ID NO: 2396244 - DNA, 25 bp, Homo sapien
tttgacactgaagaaggactctggt

SEQ ID NO: 2396245 - DNA, 25 bp, Homo sapien
ggtatgggataacttctgccttcaa

SEQ ID NO: 2396246 - DNA, 25 bp, Homo sapien
ccttcaataaatggcaagatgatct

SEQ ID NO: 2396247 - DNA, 25 bp, Homo sapien
cagggtcattggttgactggcctca

SEQ ID NO: 2396248 - DNA, 25 bp, Homo sapien
cattggttgactggcctcatttgaa

SEQ ID NO: 2396249 - DNA, 25 bp, Homo sapien
cattcagggtcattggttgactggc

SEQ ID NO: 2396250 - DNA, 25 bp, Homo sapien
tggttgactggcctcatttgaagtt

SEQ ID NO: 2396251 - DNA, 25 bp, Homo sapien
tagagccatgagtaaagatgtgcat

SEQ ID NO: 2396252 - DNA, 25 bp, Homo sapien
agccatgagtaaagatgtgcattca

SEQ ID NO: 2396253 - DNA, 25 bp, Homo sapien
ctagagccatgagtaaagatgtgca

SEQ ID NO: 2396254 - DNA, 25 bp, Homo sapien
catgagtaaagatgtgcattcatca

SEQ ID NO: 2396255 - DNA, 25 bp, Homo sapien
tgcagattgctagccaggaatggcc

SEQ ID NO: 2396256 - DNA, 25 bp, Homo sapien
gcaatgaccgtgcagattgctagcc

SEQ ID NO: 2396257 - DNA, 25 bp, Homo sapien
aatgaccgtgcagattgctagccag

SEQ ID NO: 2396258 - DNA, 25 bp, Homo sapien
gaccgtgcagattgctagccaggaa

SEQ ID NO: 2396259 - DNA, 25 bp, Homo sapien
ttcccaggtaacctcagcgggagcc

SEQ ID NO: 2396260 - DNA, 25 bp, Homo sapien
agtcactatcacattctgagcactt

SEQ ID NO: 2396261 - DNA, 25 bp, Homo sapien
cgggagccggggcacattttccaag

SEQ ID NO: 2396262 - DNA, 25 bp, Homo sapien
gtgaccacagccaagtcactatcac

SEQ ID NO: 2396263 - DNA, 25 bp, Homo sapien
tagtgcatactgtacctaatggtgt

SEQ ID NO: 2396264 - DNA, 25 bp, Homo sapien
aatgatatgactggtgttgcctaac

SEQ ID NO: 2396265 - DNA, 25 bp, Homo sapien
gaagaggctttataccagttgctac

SEQ ID NO: 2396266 - DNA, 25 bp, Homo sapien
gcacctgtcacttgagtagtgcata

SEQ ID NO: 2396267 - DNA, 25 bp, Homo sapien
ggctggtctcagtcattaaagtccc

SEQ ID NO: 2396268 - DNA, 25 bp, Homo sapien
tgtccagtggagcaaaccagcaata

SEQ ID NO: 2396269 - DNA, 25 bp, Homo sapien
caagtgggaaggactggctgaccca

SEQ ID NO: 2396270 - DNA, 25 bp, Homo sapien
tgacccaggttttctattgctgaac

SEQ ID NO: 2396271 - DNA, 25 bp, Homo sapien
ccacagtttaccatggagaccagaa

SEQ ID NO: 2396272 - DNA, 25 bp, Homo sapien
tattgacttggcacagtgtcaccga

SEQ ID NO: 2396273 - DNA, 25 bp, Homo sapien
catagctttaggtgggcttcctcaa

SEQ ID NO: 2396274 - DNA, 25 bp, Homo sapien
tcaccacaggtaattctgatccagg

SEQ ID NO: 2396275 - DNA, 25 bp, Homo sapien
ccctgggacattgggcaacttaatc

SEQ ID NO: 2396276 - DNA, 25 bp, Homo sapien
tgaaaccgacatgatggcagagtgg

SEQ ID NO: 2396277 - DNA, 25 bp, Homo sapien
caagaaaatgggtatcatgtccttc

SEQ ID NO: 2396278 - DNA, 25 bp, Homo sapien
gcacctgccaccaaagactttctta

SEQ ID NO: 2396279 - DNA, 25 bp, Homo sapien
tgagatacttctgccacctcaaaag

SEQ ID NO: 2396280 - DNA, 25 bp, Homo sapien
gatacttctgccacctcaaaagcca

SEQ ID NO: 2396281 - DNA, 25 bp, Homo sapien
agatacttctgccacctcaaaagcc

SEQ ID NO: 2396282 - DNA, 25 bp, Homo sapien
tctgagatacttctgccacctcaaa

SEQ ID NO: 2396283 - DNA, 25 bp, Homo sapien
tagaacatattttccggctaaggta

SEQ ID NO: 2396284 - DNA, 25 bp, Homo sapien
ttccggctaaggtagaagatgtttc

SEQ ID NO: 2396285 - DNA, 25 bp, Homo sapien
gcttgtgaagtggctcctagaacat

SEQ ID NO: 2396286 - DNA, 25 bp, Homo sapien
catattttccggctaaggtagaaga

SEQ ID NO: 2396287 - DNA, 25 bp, Homo sapien
ttggaagccacaacagcgagctggg

SEQ ID NO: 2396288 - DNA, 25 bp, Homo sapien
ttcattcagcaccttgccactccct

SEQ ID NO: 2396289 - DNA, 25 bp, Homo sapien
agggaagaaatctttaggtctgaag

SEQ ID NO: 2396290 - DNA, 25 bp, Homo sapien
gggtcagtccctagtcttagaggga

SEQ ID NO: 2396291 - DNA, 25 bp, Homo sapien
gcgccacgaacaggtttgtttgttg

SEQ ID NO: 2396292 - DNA, 25 bp, Homo sapien
cgctgtccccgcgtgcagactggtg

SEQ ID NO: 2396293 - DNA, 25 bp, Homo sapien
cgagtgattagctgcagggccccat

SEQ ID NO: 2396294 - DNA, 25 bp, Homo sapien
tttgtttgttgctcgcctttcctgc

SEQ ID NO: 2396295 - DNA, 25 bp, Homo sapien
gaccgccgacacagcgtcctgggtg

SEQ ID NO: 2396296 - DNA, 25 bp, Homo sapien
agcgattgtccttgggcgtgttcgt

SEQ ID NO: 2396297 - DNA, 25 bp, Homo sapien
agttcgccggggagcgattgtcctt

SEQ ID NO: 2396298 - DNA, 25 bp, Homo sapien
ttgaccgccgacacagcgtcctggg

SEQ ID NO: 2396299 - DNA, 25 bp, Homo sapien
cgccacgggtcccgaagtgagggcg

SEQ ID NO: 2396300 - DNA, 25 bp, Homo sapien
tcctggatctctaaaagggaactca

SEQ ID NO: 2396301 - DNA, 25 bp, Homo sapien
cctggatctctaaaagggaactcaa

SEQ ID NO: 2396302 - DNA, 25 bp, Homo sapien
ttcctggatctctaaaagggaactc

SEQ ID NO: 2396303 - DNA, 25 bp, Homo sapien
tttgaatgaccgagctcgcgtccac

SEQ ID NO: 2396304 - DNA, 25 bp, Homo sapien
cacggatgccatggttacttttgcc

SEQ ID NO: 2396305 - DNA, 25 bp, Homo sapien
gggagactttgaatgaccgagctcg

SEQ ID NO: 2396306 - DNA, 25 bp, Homo sapien
tcatgtcgacgtccctggaaacggc

SEQ ID NO: 2396307 - DNA, 25 bp, Homo sapien
cagtggactggtgcggggggcccca

SEQ ID NO: 2396308 - DNA, 25 bp, Homo sapien
tgcggggggccccagatccgcatcc

SEQ ID NO: 2396309 - DNA, 25 bp, Homo sapien
actggtgcggggggccccagatccg

SEQ ID NO: 2396310 - DNA, 25 bp, Homo sapien
tccagtggactggtgcggggggccc

SEQ ID NO: 2396311 - DNA, 25 bp, Homo sapien
gatctccttgcggtatcgtccagcc

SEQ ID NO: 2396312 - DNA, 25 bp, Homo sapien
cagatgttggagctccgtacgcagc

SEQ ID NO: 2396313 - DNA, 25 bp, Homo sapien
gcgtacctgcgttggagttccccga

SEQ ID NO: 2396314 - DNA, 25 bp, Homo sapien
ccctgggcctttgcgcagatgttgg

SEQ ID NO: 2396315 - DNA, 25 bp, Homo sapien
tctcagaagtatccctgctcgtggc

SEQ ID NO: 2396316 - DNA, 25 bp, Homo sapien
ttctcagaagtatccctgctcgtgg

SEQ ID NO: 2396317 - DNA, 25 bp, Homo sapien
cttctcagaagtatccctgctcgtg

SEQ ID NO: 2396318 - DNA, 25 bp, Homo sapien
tcagaagtatccctgctcgtggcat

SEQ ID NO: 2396319 - DNA, 25 bp, Homo sapien
tggaatgagccacgccgacctgatg

SEQ ID NO: 2396320 - DNA, 25 bp, Homo sapien
gcaggccaggtagtgagacaactat

SEQ ID NO: 2396321 - DNA, 25 bp, Homo sapien
aaccggatggtagccgaagagagca

SEQ ID NO: 2396322 - DNA, 25 bp, Homo sapien
tgtagtttagcaacataatgcttgg

SEQ ID NO: 2396323 - DNA, 25 bp, Homo sapien
ctgaactgtacatcacagagacaag

SEQ ID NO: 2396324 - DNA, 25 bp, Homo sapien
caagtactgctacctgaactgtaca

SEQ ID NO: 2396325 - DNA, 25 bp, Homo sapien
ctgcaccaagtactgctacctgaac

SEQ ID NO: 2396326 - DNA, 25 bp, Homo sapien
cggggtggagacaggcttcttctgc

SEQ ID NO: 2396327 - DNA, 25 bp, Homo sapien
tttacagtttctgagagaactatgt

SEQ ID NO: 2396328 - DNA, 25 bp, Homo sapien
caggttgtagtgcttgagatccagc

SEQ ID NO: 2396329 - DNA, 25 bp, Homo sapien
tgaggtcctccaacagtaagctact

SEQ ID NO: 2396330 - DNA, 25 bp, Homo sapien
caaaccttgccttgcgggagtaaga

SEQ ID NO: 2396331 - DNA, 25 bp, Homo sapien
gacttacccggagtatggacagggc

SEQ ID NO: 2396332 - DNA, 25 bp, Homo sapien
tgcctagactaagcttaaaaccaaa

SEQ ID NO: 2396333 - DNA, 25 bp, Homo sapien
ctaaccacggcctttaaatcagcag

SEQ ID NO: 2396334 - DNA, 25 bp, Homo sapien
agtggaaagataacagctaagcctt

SEQ ID NO: 2396335 - DNA, 25 bp, Homo sapien
tccagaagtagtgatgacgtacagc

SEQ ID NO: 2396336 - DNA, 25 bp, Homo sapien
catacaatataaccagtttttacct

SEQ ID NO: 2396337 - DNA, 25 bp, Homo sapien
atataaccagtttttacctggcatt

SEQ ID NO: 2396338 - DNA, 25 bp, Homo sapien
caatataaccagtttttacctggca

SEQ ID NO: 2396339 - DNA, 25 bp, Homo sapien
caccatacaatataaccagttttta

SEQ ID NO: 2396340 - DNA, 25 bp, Homo sapien
ttggagaactgtgtagggtagagtt

SEQ ID NO: 2396341 - DNA, 25 bp, Homo sapien
tgtagggtagagtttgagtttccca

SEQ ID NO: 2396342 - DNA, 25 bp, Homo sapien
aaggtatacatgatttggcttgtgc

SEQ ID NO: 2396343 - DNA, 25 bp, Homo sapien
ttgatccaaggtatacatgatttgg

SEQ ID NO: 2396344 - DNA, 25 bp, Homo sapien
tgagcgtaacccatgactgcctggg

SEQ ID NO: 2396345 - DNA, 25 bp, Homo sapien
tctgggaggcttatgccaagcttct

SEQ ID NO: 2396346 - DNA, 25 bp, Homo sapien
ctttgacgatggcatacatctgtct

SEQ ID NO: 2396347 - DNA, 25 bp, Homo sapien
acatctgtcttcgatcgttgtcagc

SEQ ID NO: 2396348 - DNA, 25 bp, Homo sapien
tcctcttcacacctaacttctttag

SEQ ID NO: 2396349 - DNA, 25 bp, Homo sapien
ctaacttctttagtgaaggctccat

SEQ ID NO: 2396350 - DNA, 25 bp, Homo sapien
tcacacctaacttctttagtgaagg

SEQ ID NO: 2396351 - DNA, 25 bp, Homo sapien
cacctaacttctttagtgaaggctc

SEQ ID NO: 2396352 - DNA, 25 bp, Homo sapien
catgtcctcatacacctgcctctcc

SEQ ID NO: 2396353 - DNA, 25 bp, Homo sapien
caccctcccgccatgtcctcataca

SEQ ID NO: 2396354 - DNA, 25 bp, Homo sapien
ggaactggatcctttgagttccagg

SEQ ID NO: 2396355 - DNA, 25 bp, Homo sapien
aggccagggatcctactgagctctt

SEQ ID NO: 2396356 - DNA, 25 bp, Homo sapien
cagggatcctactgagctcttccat

SEQ ID NO: 2396357 - DNA, 25 bp, Homo sapien
ctggatcctttgagttccaggccag

SEQ ID NO: 2396358 - DNA, 25 bp, Homo sapien
ggcactgtgattgtcacagtgcaca

SEQ ID NO: 2396359 - DNA, 25 bp, Homo sapien
aggtcacaatcatggggccggtgga

SEQ ID NO: 2396360 - DNA, 25 bp, Homo sapien
cactgtgattgtcacagtgcacagc

SEQ ID NO: 2396361 - DNA, 25 bp, Homo sapien
gggccggtggacagtctccagggca

SEQ ID NO: 2396362 - DNA, 25 bp, Homo sapien
gctgtaacccgagtgagccatccgt

SEQ ID NO: 2396363 - DNA, 25 bp, Homo sapien
tcgcagtctaaatgctgaggcagaa

SEQ ID NO: 2396364 - DNA, 25 bp, Homo sapien
tgattcctgaatcctgtgtcgcagt

SEQ ID NO: 2396365 - DNA, 25 bp, Homo sapien
gggcattccacttgcagtcctggct

SEQ ID NO: 2396366 - DNA, 25 bp, Homo sapien
tctctgtatgatgttccaagaggct

SEQ ID NO: 2396367 - DNA, 25 bp, Homo sapien
gcaggattctctgtatgatgttcca

SEQ ID NO: 2396368 - DNA, 25 bp, Homo sapien
cagcaggaggcaggattctctgtat

SEQ ID NO: 2396369 - DNA, 25 bp, Homo sapien
tgttccaagaggcttgaggagatag

SEQ ID NO: 2396370 - DNA, 25 bp, Homo sapien
gaaaacaccatatgtgggaaagcgt

SEQ ID NO: 2396371 - DNA, 25 bp, Homo sapien
cacgtcggtcaggatcttggaaaac

SEQ ID NO: 2396372 - DNA, 25 bp, Homo sapien
ggaaaatcgcacatgcacgtcggtc

SEQ ID NO: 2396373 - DNA, 25 bp, Homo sapien
cttgtaggaatgttgctccagggac

SEQ ID NO: 2396374 - DNA, 25 bp, Homo sapien
aatagcagtagccttagttaggaac

SEQ ID NO: 2396375 - DNA, 25 bp, Homo sapien
agttaggaacatcatgacactgcac

SEQ ID NO: 2396376 - DNA, 25 bp, Homo sapien
tagccttagttaggaacatcatgac

SEQ ID NO: 2396377 - DNA, 25 bp, Homo sapien
gcagtagccttagttaggaacatca

SEQ ID NO: 2396378 - DNA, 25 bp, Homo sapien
gacgcagtcactctgtcctgctgtc

SEQ ID NO: 2396379 - DNA, 25 bp, Homo sapien
gggtgggccctctgattcccctcca

SEQ ID NO: 2396380 - DNA, 25 bp, Homo sapien
ctgattcccctccagatgccaaaag

SEQ ID NO: 2396381 - DNA, 25 bp, Homo sapien
tgtttcactccagaggaacaagacg

SEQ ID NO: 2396382 - DNA, 25 bp, Homo sapien
ttgctgctcatgacacctccacttc

SEQ ID NO: 2396383 - DNA, 25 bp, Homo sapien
ctccacttctagggaactttcttgc

SEQ ID NO: 2396384 - DNA, 25 bp, Homo sapien
ccaagtcagttctaggacttttgac

SEQ ID NO: 2396385 - DNA, 25 bp, Homo sapien
attcattacactgtagcccaagtca

SEQ ID NO: 2396386 - DNA, 25 bp, Homo sapien
ggaggggaagtctccctggagctaa

SEQ ID NO: 2396387 - DNA, 25 bp, Homo sapien
gaagtctccctggagctaatgatgc

SEQ ID NO: 2396388 - DNA, 25 bp, Homo sapien
ggggaagtctccctggagctaatga

SEQ ID NO: 2396389 - DNA, 25 bp, Homo sapien
ggaagtctccctggagctaatgatg

SEQ ID NO: 2396390 - DNA, 25 bp, Homo sapien
tgcgggacgtgtgggcgtctgggtt

SEQ ID NO: 2396391 - DNA, 25 bp, Homo sapien
gggcgtctgcgaagggaagccagcc

SEQ ID NO: 2396392 - DNA, 25 bp, Homo sapien
cagcccaccccagtcataaatgcca

SEQ ID NO: 2396393 - DNA, 25 bp, Homo sapien
ttaaggacggctgcgggacgtgtgg

SEQ ID NO: 2396394 - DNA, 25 bp, Homo sapien
cactcagcagctatgtgaccacata

SEQ ID NO: 2396395 - DNA, 25 bp, Homo sapien
tgctgtatgaccctctaagtctcag

SEQ ID NO: 2396396 - DNA, 25 bp, Homo sapien
tttcttgttcgcatcccctggtgac

SEQ ID NO: 2396397 - DNA, 25 bp, Homo sapien
gggtggtcgtgaggatctaacaaat

SEQ ID NO: 2396398 - DNA, 25 bp, Homo sapien
tgaccttatgactggtttggccaat

SEQ ID NO: 2396399 - DNA, 25 bp, Homo sapien
ggaaactgagactggctccattgct

SEQ ID NO: 2396400 - DNA, 25 bp, Homo sapien
taagagacaggttaacccgcagact

SEQ ID NO: 2396401 - DNA, 25 bp, Homo sapien
tcaactgaagtgatacatgctgcca

SEQ ID NO: 2396402 - DNA, 25 bp, Homo sapien
aagccatatgtccatctgagggcca

SEQ ID NO: 2396403 - DNA, 25 bp, Homo sapien
agccatatgtccatctgagggccac

SEQ ID NO: 2396404 - DNA, 25 bp, Homo sapien
gccatatgtccatctgagggccacc

SEQ ID NO: 2396405 - DNA, 25 bp, Homo sapien
ggcaaataacaatagtttgatttcc

SEQ ID NO: 2396406 - DNA, 25 bp, Homo sapien
gctattggtgtatggcagtactact

SEQ ID NO: 2396407 - DNA, 25 bp, Homo sapien
ccttctatgccgattgtgctgagaa

SEQ ID NO: 2396408 - DNA, 25 bp, Homo sapien
tatcactggcaaataacaatagttt

SEQ ID NO: 2396409 - DNA, 25 bp, Homo sapien
gaatgtattagctacctgcctgtgg

SEQ ID NO: 2396410 - DNA, 25 bp, Homo sapien
gaagaaaattggtagcagactggca

SEQ ID NO: 2396411 - DNA, 25 bp, Homo sapien
gcctgtgagacagaccgaggtttca

SEQ ID NO: 2396412 - DNA, 25 bp, Homo sapien
aactggtcccagtgaattggtccct

SEQ ID NO: 2396413 - DNA, 25 bp, Homo sapien
tattcgacgtcaaagcaggacattt

SEQ ID NO: 2396414 - DNA, 25 bp, Homo sapien
cagtggcattgcgtttgaggtcttc

SEQ ID NO: 2396415 - DNA, 25 bp, Homo sapien
cttcctcaatagttgactcatctgg

SEQ ID NO: 2396416 - DNA, 25 bp, Homo sapien
aattatttagtgaatcctgggcagt

SEQ ID NO: 2396417 - DNA, 25 bp, Homo sapien
gaccttgcgtgctagagattcctgg

SEQ ID NO: 2396418 - DNA, 25 bp, Homo sapien
gatatgctgagatccgttcctgtgc

SEQ ID NO: 2396419 - DNA, 25 bp, Homo sapien
cctagaagagtgtggattaatcgcc

SEQ ID NO: 2396420 - DNA, 25 bp, Homo sapien
gatctgagaatggtaaatccagcca

SEQ ID NO: 2396421 - DNA, 25 bp, Homo sapien
acagcagaaccatagctctcatttt

SEQ ID NO: 2396422 - DNA, 25 bp, Homo sapien
tgcaacttccactcagacatttcgt

SEQ ID NO: 2396423 - DNA, 25 bp, Homo sapien
ttcgttggactctagtcccgctgac

SEQ ID NO: 2396424 - DNA, 25 bp, Homo sapien
ggtgtgctcaaacagcagaaccata

SEQ ID NO: 2396425 - DNA, 25 bp, Homo sapien
agacagacagcacgccatgtgggtg

SEQ ID NO: 2396426 - DNA, 25 bp, Homo sapien
cccagggtacatgggaatgctcgcg

SEQ ID NO: 2396427 - DNA, 25 bp, Homo sapien
aatgctcgcggtgcctgagactctg

SEQ ID NO: 2396428 - DNA, 25 bp, Homo sapien
caagcccaggtttggacctttgcac

SEQ ID NO: 2396429 - DNA, 25 bp, Homo sapien
agcctgacgacatcatgctgcccag

SEQ ID NO: 2396430 - DNA, 25 bp, Homo sapien
ccagctggctttggcctgaaggtgc

SEQ ID NO: 2396431 - DNA, 25 bp, Homo sapien
gctgcccggctcctgcttcgatccc

SEQ ID NO: 2396432 - DNA, 25 bp, Homo sapien
gcccggctcctgcttcgatccccac

SEQ ID NO: 2396433 - DNA, 25 bp, Homo sapien
cgaggacgctcaggaacatcacgag

SEQ ID NO: 2396434 - DNA, 25 bp, Homo sapien
ggacgctcaggaacatcacgaggtt

SEQ ID NO: 2396435 - DNA, 25 bp, Homo sapien
cacgaggacgctcaggaacatcacg

SEQ ID NO: 2396436 - DNA, 25 bp, Homo sapien
aatcatccagtccacgaggacgctc

SEQ ID NO: 2396437 - DNA, 25 bp, Homo sapien
cttataccggtctcagtcactgcag

SEQ ID NO: 2396438 - DNA, 25 bp, Homo sapien
gcacacagtaggctaggactacctt

SEQ ID NO: 2396439 - DNA, 25 bp, Homo sapien
ccgattgggtctaggctttggcaca

SEQ ID NO: 2396440 - DNA, 25 bp, Homo sapien
ggcatggctcaatgaatgcatctga

SEQ ID NO: 2396441 - DNA, 25 bp, Homo sapien
ccttgaaccctacatgttcctaggg

SEQ ID NO: 2396442 - DNA, 25 bp, Homo sapien
ctgagcccttgaaccctacatgttc

SEQ ID NO: 2396443 - DNA, 25 bp, Homo sapien
ggctgccagttgcacgctcacatgc

SEQ ID NO: 2396444 - DNA, 25 bp, Homo sapien
agttgcacgctcacatgccttttcc

SEQ ID NO: 2396445 - DNA, 25 bp, Homo sapien
gacagaataaaccagtactgtttcg

SEQ ID NO: 2396446 - DNA, 25 bp, Homo sapien
tatgacaaaagccagacgggcggac

SEQ ID NO: 2396447 - DNA, 25 bp, Homo sapien
catggcggctctcggtaatccttaa

SEQ ID NO: 2396448 - DNA, 25 bp, Homo sapien
aactcataagggttcggggcccatg

SEQ ID NO: 2396449 - DNA, 25 bp, Homo sapien
ttatcttttcttggttgacgacagt

SEQ ID NO: 2396450 - DNA, 25 bp, Homo sapien
ttcatcaattcttgtgtctggttcc

SEQ ID NO: 2396451 - DNA, 25 bp, Homo sapien
cagtggaaccctgaagttgttgttc

SEQ ID NO: 2396452 - DNA, 25 bp, Homo sapien
tcttggttgacgacagtggaaccct

SEQ ID NO: 2396453 - DNA, 25 bp, Homo sapien
ttgacaaagccgtgcagagtcccat

SEQ ID NO: 2396454 - DNA, 25 bp, Homo sapien
cagctggctgacgttgaaaaaggag

SEQ ID NO: 2396455 - DNA, 25 bp, Homo sapien
gactgtaggagtactggtacaccag

SEQ ID NO: 2396456 - DNA, 25 bp, Homo sapien
aactgtgagttttctggctgcgtcc

SEQ ID NO: 2396457 - DNA, 25 bp, Homo sapien
taacagagaacttgccaattccaga

SEQ ID NO: 2396458 - DNA, 25 bp, Homo sapien
ccagagagaatgtcaaaccagattc

SEQ ID NO: 2396459 - DNA, 25 bp, Homo sapien
gttgctgataacagagaacttgcca

SEQ ID NO: 2396460 - DNA, 25 bp, Homo sapien
gctgataacagagaacttgccaatt

SEQ ID NO: 2396461 - DNA, 25 bp, Homo sapien
gcacttcaatgacgttgttgaggag

SEQ ID NO: 2396462 - DNA, 25 bp, Homo sapien
gttcttacagcatccggccgtctca

SEQ ID NO: 2396463 - DNA, 25 bp, Homo sapien
acaaacttctttgcatcgagccgca

SEQ ID NO: 2396464 - DNA, 25 bp, Homo sapien
gcatccggccgtctcagctctgtaa

SEQ ID NO: 2396465 - DNA, 25 bp, Homo sapien
ggcctgttggtcaatgccatcactt

SEQ ID NO: 2396466 - DNA, 25 bp, Homo sapien
aggcctgttggtcaatgccatcact

SEQ ID NO: 2396467 - DNA, 25 bp, Homo sapien
gcctgttggtcaatgccatcacttg

SEQ ID NO: 2396468 - DNA, 25 bp, Homo sapien
ggaattatggttgcaccagataaag

SEQ ID NO: 2396469 - DNA, 25 bp, Homo sapien
gactatttcccgattgtgattcaga

SEQ ID NO: 2396470 - DNA, 25 bp, Homo sapien
aagtgacccccagaatgatctcacc

SEQ ID NO: 2396471 - DNA, 25 bp, Homo sapien
cgaatttgctccaagtaaaatggaa

SEQ ID NO: 2396472 - DNA, 25 bp, Homo sapien
tgttcgaagtccaagacatgggccc

SEQ ID NO: 2396473 - DNA, 25 bp, Homo sapien
ctattttaggagacagcttgtctga

SEQ ID NO: 2396474 - DNA, 25 bp, Homo sapien
atagagccctgagggcttagagttt

SEQ ID NO: 2396475 - DNA, 25 bp, Homo sapien
tagagccctgagggcttagagttta

SEQ ID NO: 2396476 - DNA, 25 bp, Homo sapien
gaaatgtgctagactctggaggctg

SEQ ID NO: 2396477 - DNA, 25 bp, Homo sapien
tagaatattcaggtcaacaacgtgg

SEQ ID NO: 2396478 - DNA, 25 bp, Homo sapien
taagatgccatcagcgtgtgtacca

SEQ ID NO: 2396479 - DNA, 25 bp, Homo sapien
gatgaataagccatggtccctacct

SEQ ID NO: 2396480 - DNA, 25 bp, Homo sapien
cacagaccccttgtctgaacctgcc

SEQ ID NO: 2396481 - DNA, 25 bp, Homo sapien
ccccacagaccccttgtctgaacct

SEQ ID NO: 2396482 - DNA, 25 bp, Homo sapien
cccacagaccccttgtctgaacctg

SEQ ID NO: 2396483 - DNA, 25 bp, Homo sapien
ccacagaccccttgtctgaacctgc

SEQ ID NO: 2396484 - DNA, 25 bp, Homo sapien
gtatggttccaagctgtagtctagg

SEQ ID NO: 2396485 - DNA, 25 bp, Homo sapien
cagctttcgaaatagtttctttagc

SEQ ID NO: 2396486 - DNA, 25 bp, Homo sapien
catgtactccggagtcagtcctgtg

SEQ ID NO: 2396487 - DNA, 25 bp, Homo sapien
actgctctggatgtttcgaatgggc

SEQ ID NO: 2396488 - DNA, 25 bp, Homo sapien
ccacagaccagtacccgtccttggt

SEQ ID NO: 2396489 - DNA, 25 bp, Homo sapien
catcctcattaacacctgagctctg

SEQ ID NO: 2396490 - DNA, 25 bp, Homo sapien
cagtacccgtccttggtctgttaag

SEQ ID NO: 2396491 - DNA, 25 bp, Homo sapien
atcctcattaacacctgagctctgc

SEQ ID NO: 2396492 - DNA, 25 bp, Homo sapien
ttgtattctacaaaagccttctggg

SEQ ID NO: 2396493 - DNA, 25 bp, Homo sapien
tgttgtccaaacacatgcccgagtt

SEQ ID NO: 2396494 - DNA, 25 bp, Homo sapien
ggtaagctcctagagaacaagtgtc

SEQ ID NO: 2396495 - DNA, 25 bp, Homo sapien
cttctgggtccagagagaatgggct

SEQ ID NO: 2396496 - DNA, 25 bp, Homo sapien
aactgcttccccaacatgatgatgc

SEQ ID NO: 2396497 - DNA, 25 bp, Homo sapien
actgcttccccaacatgatgatgct

SEQ ID NO: 2396498 - DNA, 25 bp, Homo sapien
ctgcagggagaagataaggaaagga

SEQ ID NO: 2396499 - DNA, 25 bp, Homo sapien
gcagggagaagataaggaaaggacc

SEQ ID NO: 2396500 - DNA, 25 bp, Homo sapien
cagggagaagataaggaaaggaccg

SEQ ID NO: 2396501 - DNA, 25 bp, Homo sapien
tgcagggagaagataaggaaaggac

SEQ ID NO: 2396502 - DNA, 25 bp, Homo sapien
gggcgcgaatgaagccatgctgtgc

SEQ ID NO: 2396503 - DNA, 25 bp, Homo sapien
gctgggttggggtgccaggcatgaa

SEQ ID NO: 2396504 - DNA, 25 bp, Homo sapien
agccatgctgtgctggagataagaa

SEQ ID NO: 2396505 - DNA, 25 bp, Homo sapien
aagcaggggcgcgaatgaagccatg

SEQ ID NO: 2396506 - DNA, 25 bp, Homo sapien
aatacatagacgtagcttccaggcc

SEQ ID NO: 2396507 - DNA, 25 bp, Homo sapien
tgcggtaaccatcgaatacatagac

SEQ ID NO: 2396508 - DNA, 25 bp, Homo sapien
ctcttccatgcggtaaccatcgaat

SEQ ID NO: 2396509 - DNA, 25 bp, Homo sapien
catcgaatacatagacgtagcttcc

SEQ ID NO: 2396510 - DNA, 25 bp, Homo sapien
gatcaggcgctcttcaaaagtctgt

SEQ ID NO: 2396511 - DNA, 25 bp, Homo sapien
aaagctttgaggatcaggcgctctt

SEQ ID NO: 2396512 - DNA, 25 bp, Homo sapien
caaacttgagcaagaaagctttgag

SEQ ID NO: 2396513 - DNA, 25 bp, Homo sapien
gtaggcattgacaaacttgagcaag

SEQ ID NO: 2396514 - DNA, 25 bp, Homo sapien
cagcctgaacgtgccacatccccat

SEQ ID NO: 2396515 - DNA, 25 bp, Homo sapien
aatcttctggaacctttgtggtgtt

SEQ ID NO: 2396516 - DNA, 25 bp, Homo sapien
cattcacatatgtgagtgcactgca

SEQ ID NO: 2396517 - DNA, 25 bp, Homo sapien
tccccagaaatactcgacctcttgt

SEQ ID NO: 2396518 - DNA, 25 bp, Homo sapien
tcctgttgctctcccaataaattta

SEQ ID NO: 2396519 - DNA, 25 bp, Homo sapien
cacagcctcctcaactatcaagaga

SEQ ID NO: 2396520 - DNA, 25 bp, Homo sapien
aaagcgtatactcacagcctcctca

SEQ ID NO: 2396521 - DNA, 25 bp, Homo sapien
gcacctggtgagcaaagcgtatact

SEQ ID NO: 2396522 - DNA, 25 bp, Homo sapien
tgagcaaagcgtatactcacagcct

SEQ ID NO: 2396523 - DNA, 25 bp, Homo sapien
cccatgtagccgctctcagttttac

SEQ ID NO: 2396524 - DNA, 25 bp, Homo sapien
ctcccatgtagccgctctcagtttt

SEQ ID NO: 2396525 - DNA, 25 bp, Homo sapien
catgtagccgctctcagttttacag

SEQ ID NO: 2396526 - DNA, 25 bp, Homo sapien
atgtagccgctctcagttttacagc

SEQ ID NO: 2396527 - DNA, 25 bp, Homo sapien
gaagatggtactgtttatggctgaa

SEQ ID NO: 2396528 - DNA, 25 bp, Homo sapien
ggccaggaagatggtactgtttatg

SEQ ID NO: 2396529 - DNA, 25 bp, Homo sapien
ccaggaagatggtactgtttatggc

SEQ ID NO: 2396530 - DNA, 25 bp, Homo sapien
atggtactgtttatggctgaatgcc

SEQ ID NO: 2396531 - DNA, 25 bp, Homo sapien
ggaagtctgatatgcctctttgaag

SEQ ID NO: 2396532 - DNA, 25 bp, Homo sapien
tctcactggcttgaagcgtgggaag

SEQ ID NO: 2396533 - DNA, 25 bp, Homo sapien
ctttgaagtctactcagtgcctggg

SEQ ID NO: 2396534 - DNA, 25 bp, Homo sapien
tattgaggccgttgcatttttctca

SEQ ID NO: 2396535 - DNA, 25 bp, Homo sapien
gccagaagtctcggtgacacagtac

SEQ ID NO: 2396536 - DNA, 25 bp, Homo sapien
agccagaagtctcggtgacacagta

SEQ ID NO: 2396537 - DNA, 25 bp, Homo sapien
ttaaagagggcctaggacagccaga

SEQ ID NO: 2396538 - DNA, 25 bp, Homo sapien
tagccttattgagagacagagcggc

SEQ ID NO: 2396539 - DNA, 25 bp, Homo sapien
tgaggatgaccacgaggttgatgat

SEQ ID NO: 2396540 - DNA, 25 bp, Homo sapien
ccggacattggagcgtgtagcctta

SEQ ID NO: 2396541 - DNA, 25 bp, Homo sapien
actatcaccccaaagacgattgaga

SEQ ID NO: 2396542 - DNA, 25 bp, Homo sapien
gcaaggcacccatcaactctgtact

SEQ ID NO: 2396543 - DNA, 25 bp, Homo sapien
cacatggcttgcacttgttaagcaa

SEQ ID NO: 2396544 - DNA, 25 bp, Homo sapien
caagcacatcgtttgactcattaaa

SEQ ID NO: 2396545 - DNA, 25 bp, Homo sapien
gacttctaaactttggcaaggcacc

SEQ ID NO: 2396546 - DNA, 25 bp, Homo sapien
gagtcagagttacaacaatttccag

SEQ ID NO: 2396547 - DNA, 25 bp, Homo sapien
tgtagttaacggtcacgatggcaaa

SEQ ID NO: 2396548 - DNA, 25 bp, Homo sapien
tctgagctgtgagtacacacactcc

SEQ ID NO: 2396549 - DNA, 25 bp, Homo sapien
tccaccctgcaactaatgtgtagcc

SEQ ID NO: 2396550 - DNA, 25 bp, Homo sapien
tccctgacgcagctgagaccgtctg

SEQ ID NO: 2396551 - DNA, 25 bp, Homo sapien
tacaggaaagcggaaggatcacact

SEQ ID NO: 2396552 - DNA, 25 bp, Homo sapien
tcaaatacgaatcacagggttttcc

SEQ ID NO: 2396553 - DNA, 25 bp, Homo sapien
caaactctaaggtaaagcgcaagga

SEQ ID NO: 2396554 - DNA, 25 bp, Homo sapien
ccaagctggctatctcctgtggctt

SEQ ID NO: 2396555 - DNA, 25 bp, Homo sapien
caatggcctcactatcagacaagat

SEQ ID NO: 2396556 - DNA, 25 bp, Homo sapien
attctagcatgggtggtcaatggcc

SEQ ID NO: 2396557 - DNA, 25 bp, Homo sapien
tacatgcatgcagtcacaggcaagt

SEQ ID NO: 2396558 - DNA, 25 bp, Homo sapien
caggcaagtggtccctcaaggaaat

SEQ ID NO: 2396559 - DNA, 25 bp, Homo sapien
aggcaaagttcatcaggtaacctgg

SEQ ID NO: 2396560 - DNA, 25 bp, Homo sapien
atcaggtaacctgggaaacgatcct

SEQ ID NO: 2396561 - DNA, 25 bp, Homo sapien
tgggaaacgatccttccaggtcagt

SEQ ID NO: 2396562 - DNA, 25 bp, Homo sapien
gcaaagttcatcaggtaacctggga

SEQ ID NO: 2396563 - DNA, 25 bp, Homo sapien
ttcccctcggactgggtccagttca

SEQ ID NO: 2396564 - DNA, 25 bp, Homo sapien
gatttggtgctagcaacagtgccat

SEQ ID NO: 2396565 - DNA, 25 bp, Homo sapien
ctgatttggtgctagcaacagtgcc

SEQ ID NO: 2396566 - DNA, 25 bp, Homo sapien
tgatttggtgctagcaacagtgcca

SEQ ID NO: 2396567 - DNA, 25 bp, Homo sapien
acctgacaagatctgttttatgccc

SEQ ID NO: 2396568 - DNA, 25 bp, Homo sapien
ccatgtccctttgtagtctatcacc

SEQ ID NO: 2396569 - DNA, 25 bp, Homo sapien
gacatagaacaataccatcacttcc

SEQ ID NO: 2396570 - DNA, 25 bp, Homo sapien
gaacctgacaagatctgttttatgc

SEQ ID NO: 2396571 - DNA, 25 bp, Homo sapien
cgggtcaggcctctaagatgtcact

SEQ ID NO: 2396572 - DNA, 25 bp, Homo sapien
gggttaagatacactgataggctgg

SEQ ID NO: 2396573 - DNA, 25 bp, Homo sapien
gcagtggccctacttgcctagacaa

SEQ ID NO: 2396574 - DNA, 25 bp, Homo sapien
gagagcagactgaatgaactccaca

SEQ ID NO: 2396575 - DNA, 25 bp, Homo sapien
tcagctccgtttcttccctgaactg

SEQ ID NO: 2396576 - DNA, 25 bp, Homo sapien
cttcagctccgtttcttccctgaac

SEQ ID NO: 2396577 - DNA, 25 bp, Homo sapien
ttcagctccgtttcttccctgaact

SEQ ID NO: 2396578 - DNA, 25 bp, Homo sapien
ttcttccacatgcccttcagctccg

SEQ ID NO: 2396579 - DNA, 25 bp, Homo sapien
tcacagacataagcagttgtgtcca

SEQ ID NO: 2396580 - DNA, 25 bp, Homo sapien
aagaaagtaactcactaagtgtctg

SEQ ID NO: 2396581 - DNA, 25 bp, Homo sapien
ctttcactctgacaatcagagaaga

SEQ ID NO: 2396582 - DNA, 25 bp, Homo sapien
cactaagtgtctgatgaattgctga

SEQ ID NO: 2396583 - DNA, 25 bp, Homo sapien
agtccagcccatggacaaagctgag

SEQ ID NO: 2396584 - DNA, 25 bp, Homo sapien
tcagtccagcccatggacaaagctg

SEQ ID NO: 2396585 - DNA, 25 bp, Homo sapien
cagtccagcccatggacaaagctga

SEQ ID NO: 2396586 - DNA, 25 bp, Homo sapien
cctatttgtccttgtaaaaccagca

SEQ ID NO: 2396587 - DNA, 25 bp, Homo sapien
tatttgtccttgtaaaaccagcatc

SEQ ID NO: 2396588 - DNA, 25 bp, Homo sapien
gtccttgtaaaaccagcatcttcca

SEQ ID NO: 2396589 - DNA, 25 bp, Homo sapien
tgtaaaaccagcatcttccaagagt

SEQ ID NO: 2396590 - DNA, 25 bp, Homo sapien
cctaaggttgggatacaggataact

SEQ ID NO: 2396591 - DNA, 25 bp, Homo sapien
gtctcagtctcagcttaaatcaggc

SEQ ID NO: 2396592 - DNA, 25 bp, Homo sapien
gggaaagggagccaattgtcacctc

SEQ ID NO: 2396593 - DNA, 25 bp, Homo sapien
tttattagacctcaaactctctggg

SEQ ID NO: 2396594 - DNA, 25 bp, Homo sapien
agctattaagctcttacatcttttc

SEQ ID NO: 2396595 - DNA, 25 bp, Homo sapien
gagtcaacaagctattaagctctta

SEQ ID NO: 2396596 - DNA, 25 bp, Homo sapien
tttttgagtcaacaagctattaagc

SEQ ID NO: 2396597 - DNA, 25 bp, Homo sapien
tccttgaaggccctacttttctctc

SEQ ID NO: 2396598 - DNA, 25 bp, Homo sapien
cctatttgacccacaaatctatatt

SEQ ID NO: 2396599 - DNA, 25 bp, Homo sapien
aaatctatatttccctttcactagg

SEQ ID NO: 2396600 - DNA, 25 bp, Homo sapien
tccctttcactaggctcccaagaaa

SEQ ID NO: 2396601 - DNA, 25 bp, Homo sapien
tatatttccctttcactaggctccc

SEQ ID NO: 2396602 - DNA, 25 bp, Homo sapien
atagagatccatgtagatcagtggc

SEQ ID NO: 2396603 - DNA, 25 bp, Homo sapien
aacagacgggtggaagggataattg

SEQ ID NO: 2396604 - DNA, 25 bp, Homo sapien
cagtggctcttgaattctttatcct

SEQ ID NO: 2396605 - DNA, 25 bp, Homo sapien
tcatggaaaaaagaggtccatttct

SEQ ID NO: 2396606 - DNA, 25 bp, Homo sapien
aatatgggaggtcagtggtgacaat

SEQ ID NO: 2396607 - DNA, 25 bp, Homo sapien
gctgttcagttccaatgtcctggga

SEQ ID NO: 2396608 - DNA, 25 bp, Homo sapien
tgtgcttatggcagtcaagggttcg

SEQ ID NO: 2396609 - DNA, 25 bp, Homo sapien
cctgggtagtaatgggtctgagata

SEQ ID NO: 2396610 - DNA, 25 bp, Homo sapien
tgtctctgaacctggccattctcag

SEQ ID NO: 2396611 - DNA, 25 bp, Homo sapien
tcatcaggctcaatgggctgtctct

SEQ ID NO: 2396612 - DNA, 25 bp, Homo sapien
ggctcaggtatgaggcacgagtcct

SEQ ID NO: 2396613 - DNA, 25 bp, Homo sapien
tgctcagccacttggagaagggctt

SEQ ID NO: 2396614 - DNA, 25 bp, Homo sapien
agggtagcaataagactcttggcat

SEQ ID NO: 2396615 - DNA, 25 bp, Homo sapien
tagcaataagactcttggcatggcc

SEQ ID NO: 2396616 - DNA, 25 bp, Homo sapien
aataagactcttggcatggccccag

SEQ ID NO: 2396617 - DNA, 25 bp, Homo sapien
gcaataagactcttggcatggcccc

SEQ ID NO: 2396618 - DNA, 25 bp, Homo sapien
tattctaaatgtgggcctggcctct

SEQ ID NO: 2396619 - DNA, 25 bp, Homo sapien
ggtaacctggtgaacgagatcctgc

SEQ ID NO: 2396620 - DNA, 25 bp, Homo sapien
tgaggttgttagcacagagacaggc

SEQ ID NO: 2396621 - DNA, 25 bp, Homo sapien
taacacacaagtaggtggacacgga

SEQ ID NO: 2396622 - DNA, 25 bp, Homo sapien
gaaatgaggcaaccaaagctcttgg

SEQ ID NO: 2396623 - DNA, 25 bp, Homo sapien
gatgaagtcactccctaatacaggc

SEQ ID NO: 2396624 - DNA, 25 bp, Homo sapien
tcagaatccagtcccaaagtcagca

SEQ ID NO: 2396625 - DNA, 25 bp, Homo sapien
gcttatgggattgaaggcggacacc

SEQ ID NO: 2396626 - DNA, 25 bp, Homo sapien
ggatcaaattcacacgtaacatatt

SEQ ID NO: 2396627 - DNA, 25 bp, Homo sapien
ttagactcccacacagtcataatgg

SEQ ID NO: 2396628 - DNA, 25 bp, Homo sapien
cataaagcaagtccttaaagaccta

SEQ ID NO: 2396629 - DNA, 25 bp, Homo sapien
tgtaaataggctaaatgctccagtt

SEQ ID NO: 2396630 - DNA, 25 bp, Homo sapien
gggagacatttaaagcagtatgtaa

SEQ ID NO: 2396631 - DNA, 25 bp, Homo sapien
accacattgtacttattccaaaatt

SEQ ID NO: 2396632 - DNA, 25 bp, Homo sapien
gacatttaaagcagtatgtaaaggg

SEQ ID NO: 2396633 - DNA, 25 bp, Homo sapien
ttctcagcaccacattgtacttatt

SEQ ID NO: 2396634 - DNA, 25 bp, Homo sapien
ggaagcttctggtattctcaaaatc

SEQ ID NO: 2396635 - DNA, 25 bp, Homo sapien
catagcttttaaatgggtgggcata

SEQ ID NO: 2396636 - DNA, 25 bp, Homo sapien
taatagcatagcttttaaatgggtg

SEQ ID NO: 2396637 - DNA, 25 bp, Homo sapien
tggtgagagcaactcgttctttact

SEQ ID NO: 2396638 - DNA, 25 bp, Homo sapien
agagcatcttaggccagaaggtctt

SEQ ID NO: 2396639 - DNA, 25 bp, Homo sapien
cagagcatcttaggccagaaggtct

SEQ ID NO: 2396640 - DNA, 25 bp, Homo sapien
gagcatcttaggccagaaggtcttg

SEQ ID NO: 2396641 - DNA, 25 bp, Homo sapien
acagagcatcttaggccagaaggtc

SEQ ID NO: 2396642 - DNA, 25 bp, Homo sapien
catgtattaagtgctcttctgtgga

SEQ ID NO: 2396643 - DNA, 25 bp, Homo sapien
taatattttccataggtcaacactg

SEQ ID NO: 2396644 - DNA, 25 bp, Homo sapien
taaagtgactatcgatgggagttca

SEQ ID NO: 2396645 - DNA, 25 bp, Homo sapien
gaaggcataccctaggttctgtggg

SEQ ID NO: 2396646 - DNA, 25 bp, Homo sapien
tgtcccattgactcccctgccaaaa

SEQ ID NO: 2396647 - DNA, 25 bp, Homo sapien
tgtggacagttccaggatttgatac

SEQ ID NO: 2396648 - DNA, 25 bp, Homo sapien
aagagctcttgatccatccattgcc

SEQ ID NO: 2396649 - DNA, 25 bp, Homo sapien
ccattcccaggatgagataaatttc

SEQ ID NO: 2396650 - DNA, 25 bp, Homo sapien
ttgatacaagtaacccacccattcc

SEQ ID NO: 2396651 - DNA, 25 bp, Homo sapien
aaggcaactgtcaatgggagagctc

SEQ ID NO: 2396652 - DNA, 25 bp, Homo sapien
gatgatgacccatctatgctccagg

SEQ ID NO: 2396653 - DNA, 25 bp, Homo sapien
ttggaccccaacatctaagatgatg

SEQ ID NO: 2396654 - DNA, 25 bp, Homo sapien
gccagaattggaccccaacatctaa

SEQ ID NO: 2396655 - DNA, 25 bp, Homo sapien
gctgcccctctatgctggtgatgtg

SEQ ID NO: 2396656 - DNA, 25 bp, Homo sapien
gtgttgagggtcatatctgtgtaat

SEQ ID NO: 2396657 - DNA, 25 bp, Homo sapien
ctggtgatgtgttgagggtcatatc

SEQ ID NO: 2396658 - DNA, 25 bp, Homo sapien
ccctctatgctggtgatgtgttgag

SEQ ID NO: 2396659 - DNA, 25 bp, Homo sapien
ggaatgcccaaattgacccagaggg

SEQ ID NO: 2396660 - DNA, 25 bp, Homo sapien
caagctggtgcgcatttgtcagaga

SEQ ID NO: 2396661 - DNA, 25 bp, Homo sapien
gcagaggttctcttctaatcgtacc

SEQ ID NO: 2396662 - DNA, 25 bp, Homo sapien
gtatggaattgcatagcagaggttc

SEQ ID NO: 2396663 - DNA, 25 bp, Homo sapien
ttgcctccagagttagcacctccac

SEQ ID NO: 2396664 - DNA, 25 bp, Homo sapien
actgaccctattttcagtgtgtatt

SEQ ID NO: 2396665 - DNA, 25 bp, Homo sapien
cagtgtgtatttcaccttgtactcc

SEQ ID NO: 2396666 - DNA, 25 bp, Homo sapien
atcctcttgcctccagagttagcac

SEQ ID NO: 2396667 - DNA, 25 bp, Homo sapien
ccaccatgcatagctatatttttta

SEQ ID NO: 2396668 - DNA, 25 bp, Homo sapien
cccatgccaccatgcatagctatat

SEQ ID NO: 2396669 - DNA, 25 bp, Homo sapien
aatcacagctaactgctgcctctaa

SEQ ID NO: 2396670 - DNA, 25 bp, Homo sapien
gacacggtcttactacgttgcccac

SEQ ID NO: 2396671 - DNA, 25 bp, Homo sapien
gtactatagaacattgacactgctg

SEQ ID NO: 2396672 - DNA, 25 bp, Homo sapien
tcaagcattgctgggcttccctaag

SEQ ID NO: 2396673 - DNA, 25 bp, Homo sapien
tattgggaaccacgatctgatgaaa

SEQ ID NO: 2396674 - DNA, 25 bp, Homo sapien
gtgtgtgcacacgtaaataaaccca

SEQ ID NO: 2396675 - DNA, 25 bp, Homo sapien
tttcaaagacaggtggcacacagag

SEQ ID NO: 2396676 - DNA, 25 bp, Homo sapien
gaaccacagcacaaattctgaagct

SEQ ID NO: 2396677 - DNA, 25 bp, Homo sapien
gccaccatgaaactgagagacatga

SEQ ID NO: 2396678 - DNA, 25 bp, Homo sapien
gcatgttaacatgaatggttccaac

SEQ ID NO: 2396679 - DNA, 25 bp, Homo sapien
cgaactttggtttcatactcaggcc

SEQ ID NO: 2396680 - DNA, 25 bp, Homo sapien
gcagactggttgctctcctttagca

SEQ ID NO: 2396681 - DNA, 25 bp, Homo sapien
tttagcattttctctcgaactttgg

SEQ ID NO: 2396682 - DNA, 25 bp, Homo sapien
cgtcgtgtttgtttccaatttctgg

SEQ ID NO: 2396683 - DNA, 25 bp, Homo sapien
ttgttatcctgatcttcatgccttc

SEQ ID NO: 2396684 - DNA, 25 bp, Homo sapien
ttatcctgatcttcatgccttccca

SEQ ID NO: 2396685 - DNA, 25 bp, Homo sapien
cttgttatcctgatcttcatgcctt

SEQ ID NO: 2396686 - DNA, 25 bp, Homo sapien
tcctgatcttcatgccttcccatgg

SEQ ID NO: 2396687 - DNA, 25 bp, Homo sapien
aaagtagcccagtcgcatctgtagc

SEQ ID NO: 2396688 - DNA, 25 bp, Homo sapien
ccaaaagtagcccagtcgcatctgt

SEQ ID NO: 2396689 - DNA, 25 bp, Homo sapien
gtagcccagtcgcatctgtagcctc

SEQ ID NO: 2396690 - DNA, 25 bp, Homo sapien
gtcccaaaagtagcccagtcgcatc

SEQ ID NO: 2396691 - DNA, 25 bp, Homo sapien
tgactccagactttcagccttccaa

SEQ ID NO: 2396692 - DNA, 25 bp, Homo sapien
cagactttcagccttccaacccatc

SEQ ID NO: 2396693 - DNA, 25 bp, Homo sapien
actccagactttcagccttccaacc

SEQ ID NO: 2396694 - DNA, 25 bp, Homo sapien
tccagactttcagccttccaaccca

SEQ ID NO: 2396695 - DNA, 25 bp, Homo sapien
tacacccaggagcttgtctcttgct

SEQ ID NO: 2396696 - DNA, 25 bp, Homo sapien
cccaagaggcctggttatatttcat

SEQ ID NO: 2396697 - DNA, 25 bp, Homo sapien
cttgttatttgagtaagttggagtg

SEQ ID NO: 2396698 - DNA, 25 bp, Homo sapien
ggagtgaatttctaatcctgcaaaa

SEQ ID NO: 2396699 - DNA, 25 bp, Homo sapien
tcttccataacatcagtccccatgg

SEQ ID NO: 2396700 - DNA, 25 bp, Homo sapien
catactcgacttgcgcacgttgtcc

SEQ ID NO: 2396701 - DNA, 25 bp, Homo sapien
agcttctaccctcatcctatcctga

SEQ ID NO: 2396702 - DNA, 25 bp, Homo sapien
tactgccctatgttcatggcaccct

SEQ ID NO: 2396703 - DNA, 25 bp, Homo sapien
tacagatgaggacaacgatgctcaa

SEQ ID NO: 2396704 - DNA, 25 bp, Homo sapien
caccatactgatggagagcagctcc

SEQ ID NO: 2396705 - DNA, 25 bp, Homo sapien
tgaccgactggtgtctccatgaagg

SEQ ID NO: 2396706 - DNA, 25 bp, Homo sapien
taacagggcaccttggtcaagagta

SEQ ID NO: 2396707 - DNA, 25 bp, Homo sapien
cacacattaggtctgcctaggtcag

SEQ ID NO: 2396708 - DNA, 25 bp, Homo sapien
aactgagacacacattaggtctgcc

SEQ ID NO: 2396709 - DNA, 25 bp, Homo sapien
tctattcggaaaagagttctgaaac

SEQ ID NO: 2396710 - DNA, 25 bp, Homo sapien
cagtgtccttaacctctattcggaa

SEQ ID NO: 2396711 - DNA, 25 bp, Homo sapien
ttgggtcctgctgactagtatcccc

SEQ ID NO: 2396712 - DNA, 25 bp, Homo sapien
agcagcccaagtctctctctatgta

SEQ ID NO: 2396713 - DNA, 25 bp, Homo sapien
cagcacagcaccactaatcataata

SEQ ID NO: 2396714 - DNA, 25 bp, Homo sapien
caggtgagccaacagacttgggtcc

SEQ ID NO: 2396715 - DNA, 25 bp, Homo sapien
ctccagctctcgatgggctgaacac

SEQ ID NO: 2396716 - DNA, 25 bp, Homo sapien
gctctcgatgggctgaacactgccc

SEQ ID NO: 2396717 - DNA, 25 bp, Homo sapien
ccagctctcgatgggctgaacactg

SEQ ID NO: 2396718 - DNA, 25 bp, Homo sapien
tctcgatgggctgaacactgcccgt

SEQ ID NO: 2396719 - DNA, 25 bp, Homo sapien
ctgcgcggtcccacaggctgagctg

SEQ ID NO: 2396720 - DNA, 25 bp, Homo sapien
aagacggtggcagggttgtcaaaca

SEQ ID NO: 2396721 - DNA, 25 bp, Homo sapien
tgagctgaggttccagtaatcacag

SEQ ID NO: 2396722 - DNA, 25 bp, Homo sapien
cacagagccatgaagatagagaaga

SEQ ID NO: 2396723 - DNA, 25 bp, Homo sapien
atcttcttcaattgttgcacatcca

SEQ ID NO: 2396724 - DNA, 25 bp, Homo sapien
aattgttgcacatccataaagaaac

SEQ ID NO: 2396725 - DNA, 25 bp, Homo sapien
gtatataatcccagccaggcaaaat

SEQ ID NO: 2396726 - DNA, 25 bp, Homo sapien
tgtatataatcccagccaggcaaaa

SEQ ID NO: 2396727 - DNA, 25 bp, Homo sapien
aacacacagatcatatatttgggca

SEQ ID NO: 2396728 - DNA, 25 bp, Homo sapien
acacacagatcatatatttgggcat

SEQ ID NO: 2396729 - DNA, 25 bp, Homo sapien
aaacacacagatcatatatttgggc

SEQ ID NO: 2396730 - DNA, 25 bp, Homo sapien
caagtgtaatctacacagaagtcct

SEQ ID NO: 2396731 - DNA, 25 bp, Homo sapien
taatctacacagaagtccttgccgt

SEQ ID NO: 2396732 - DNA, 25 bp, Homo sapien
tacacagaagtccttgccgtagtcg

SEQ ID NO: 2396733 - DNA, 25 bp, Homo sapien
gaagtccttgccgtagtcgcctaaa

SEQ ID NO: 2396734 - DNA, 25 bp, Homo sapien
tctgagaatagggaactcttccttg

SEQ ID NO: 2396735 - DNA, 25 bp, Homo sapien
attttgttctgagaatagggaactc

SEQ ID NO: 2396736 - DNA, 25 bp, Homo sapien
tctccaaatccttgatcacattact

SEQ ID NO: 2396737 - DNA, 25 bp, Homo sapien
cgactttataaagacgcctctccaa

SEQ ID NO: 2396738 - DNA, 25 bp, Homo sapien
tggcacttgggcataacccaacaat

SEQ ID NO: 2396739 - DNA, 25 bp, Homo sapien
acttgggcataacccaacaatcagc

SEQ ID NO: 2396740 - DNA, 25 bp, Homo sapien
gggcataacccaacaatcagcttca

SEQ ID NO: 2396741 - DNA, 25 bp, Homo sapien
tcaacactggcacttgggcataacc

SEQ ID NO: 2396742 - DNA, 25 bp, Homo sapien
tagaacactccatagcgcgcccatt

SEQ ID NO: 2396743 - DNA, 25 bp, Homo sapien
taggttggaacttatagaacactcc

SEQ ID NO: 2396744 - DNA, 25 bp, Homo sapien
ctgatgaggtcaataggttggaact

SEQ ID NO: 2396745 - DNA, 25 bp, Homo sapien
tccatagcgcgcccattcttgatat

SEQ ID NO: 2396746 - DNA, 25 bp, Homo sapien
cttcctgtcattcatatcgtcctct

SEQ ID NO: 2396747 - DNA, 25 bp, Homo sapien
gtcattcatatcgtcctctggacta

SEQ ID NO: 2396748 - DNA, 25 bp, Homo sapien
cgtcctctggactatcgtattcacc

SEQ ID NO: 2396749 - DNA, 25 bp, Homo sapien
tcatatcgtcctctggactatcgta

SEQ ID NO: 2396750 - DNA, 25 bp, Homo sapien
ggcagcctcatagatattgtttgcg

SEQ ID NO: 2396751 - DNA, 25 bp, Homo sapien
ttgtttgcgatcagagagttaatac

SEQ ID NO: 2396752 - DNA, 25 bp, Homo sapien
agagggtaggcagcctcatagatat

SEQ ID NO: 2396753 - DNA, 25 bp, Homo sapien
catagatattgtttgcgatcagaga

SEQ ID NO: 2396754 - DNA, 25 bp, Homo sapien
acacaatccgtcaggatctggactg

SEQ ID NO: 2396755 - DNA, 25 bp, Homo sapien
tatacttggtcccaaatgcttccaa

SEQ ID NO: 2396756 - DNA, 25 bp, Homo sapien
tgtcttccacacaatccgtcaggat

SEQ ID NO: 2396757 - DNA, 25 bp, Homo sapien
tggactgcctgccttatactgcctg

SEQ ID NO: 2396758 - DNA, 25 bp, Homo sapien
tttgttctttgctgccgaccaaggg

SEQ ID NO: 2396759 - DNA, 25 bp, Homo sapien
gttttgttctttgctgccgaccaag

SEQ ID NO: 2396760 - DNA, 25 bp, Homo sapien
gctaagcagcctctccgtggggggc

SEQ ID NO: 2396761 - DNA, 25 bp, Homo sapien
tgttctttgctgccgaccaagggag

SEQ ID NO: 2396762 - DNA, 25 bp, Homo sapien
ccatcgtgttgttggctcgggagca

SEQ ID NO: 2396763 - DNA, 25 bp, Homo sapien
tgcgggtggcattatcaaagaaggt

SEQ ID NO: 2396764 - DNA, 25 bp, Homo sapien
ggcattatcaaagaaggtgtccttt

SEQ ID NO: 2396765 - DNA, 25 bp, Homo sapien
atgcggctgcgggtggcattatcaa

SEQ ID NO: 2396766 - DNA, 25 bp, Homo sapien
ggtggcattatcaaagaaggtgtcc

SEQ ID NO: 2396767 - DNA, 25 bp, Homo sapien
ctgtgttctggaactcggggctgca

SEQ ID NO: 2396768 - DNA, 25 bp, Homo sapien
agaatgggtaggagaggtttttcat

SEQ ID NO: 2396769 - DNA, 25 bp, Homo sapien
cgcgctgaacttctttgcaatgctg

SEQ ID NO: 2396770 - DNA, 25 bp, Homo sapien
ctgcaggtgcgagctcagcttctgc

SEQ ID NO: 2396771 - DNA, 25 bp, Homo sapien
cttggcaatagatctgctagggctc

SEQ ID NO: 2396772 - DNA, 25 bp, Homo sapien
tggcaatagatctgctagggctcac

SEQ ID NO: 2396773 - DNA, 25 bp, Homo sapien
ttggcaatagatctgctagggctca

SEQ ID NO: 2396774 - DNA, 25 bp, Homo sapien
gaatattgttggctgccttcaagag

SEQ ID NO: 2396775 - DNA, 25 bp, Homo sapien
ggaatattgttggctgccttcaaga

SEQ ID NO: 2396776 - DNA, 25 bp, Homo sapien
aatattgttggctgccttcaagagt

SEQ ID NO: 2396777 - DNA, 25 bp, Homo sapien
caaaccatggacttacggagagcag

SEQ ID NO: 2396778 - DNA, 25 bp, Homo sapien
gtaccctgtggatgaatacccgcct

SEQ ID NO: 2396779 - DNA, 25 bp, Homo sapien
catacacactggtcttgaggcgagg

SEQ ID NO: 2396780 - DNA, 25 bp, Homo sapien
tggtaacatcaactgcatagccctg

SEQ ID NO: 2396781 - DNA, 25 bp, Homo sapien
tcttggtaggaactttgatcttcaa

SEQ ID NO: 2396782 - DNA, 25 bp, Homo sapien
tccggacaaagatggatccctggct

SEQ ID NO: 2396783 - DNA, 25 bp, Homo sapien
ggcgtgtatccggacaaagatggat

SEQ ID NO: 2396784 - DNA, 25 bp, Homo sapien
tgccacggggcgtgtatccggacaa

SEQ ID NO: 2396785 - DNA, 25 bp, Homo sapien
tctccatcctgttggtagccccaga

SEQ ID NO: 2396786 - DNA, 25 bp, Homo sapien
atcctgttggtagccccagatgctc

SEQ ID NO: 2396787 - DNA, 25 bp, Homo sapien
acatttgcagaccgccgttcccttt

SEQ ID NO: 2396788 - DNA, 25 bp, Homo sapien
ctaaagatcgtggagggcctctcca

SEQ ID NO: 2396789 - DNA, 25 bp, Homo sapien
gagccccacactctcagatcatcaa

SEQ ID NO: 2396790 - DNA, 25 bp, Homo sapien
cccacactctcagatcatcaagatt

SEQ ID NO: 2396791 - DNA, 25 bp, Homo sapien
tcatcaagattgaagctcacacagc

SEQ ID NO: 2396792 - DNA, 25 bp, Homo sapien
acactctcagatcatcaagattgaa

SEQ ID NO: 2396793 - DNA, 25 bp, Homo sapien
atgataacaaactgggcggctctgc

SEQ ID NO: 2396794 - DNA, 25 bp, Homo sapien
tgagaagggacctagggagtttaca

SEQ ID NO: 2396795 - DNA, 25 bp, Homo sapien
tggggaataatcagaaacatagacc

SEQ ID NO: 2396796 - DNA, 25 bp, Homo sapien
gaatgcaaggaactccaactgtggg

SEQ ID NO: 2396797 - DNA, 25 bp, Homo sapien
gggacgccagcggattgccaccgct

SEQ ID NO: 2396798 - DNA, 25 bp, Homo sapien
tgaattcaggtttgtctgctcacaa

SEQ ID NO: 2396799 - DNA, 25 bp, Homo sapien
aagcatgagtgcttaaccactaagt

SEQ ID NO: 2396800 - DNA, 25 bp, Homo sapien
taagttacattgttccgggacagac

SEQ ID NO: 2396801 - DNA, 25 bp, Homo sapien
catgcatatgtttacagcagcacaa

SEQ ID NO: 2396802 - DNA, 25 bp, Homo sapien
gcatgcatatgtttacagcagcaca

SEQ ID NO: 2396803 - DNA, 25 bp, Homo sapien
aacctggaaaaatgcggcctttgca

SEQ ID NO: 2396804 - DNA, 25 bp, Homo sapien
aacccaggcaggaagtaacaatgag

SEQ ID NO: 2396805 - DNA, 25 bp, Homo sapien
attcaacctggaaaaatgcggcctt

SEQ ID NO: 2396806 - DNA, 25 bp, Homo sapien
ccaggcaggaagtaacaatgagcag

SEQ ID NO: 2396807 - DNA, 25 bp, Homo sapien
cagcaaacccacaccagctccgagg

SEQ ID NO: 2396808 - DNA, 25 bp, Homo sapien
gcagcaaacccacaccagctccgag

SEQ ID NO: 2396809 - DNA, 25 bp, Homo sapien
agcaaacccacaccagctccgagga

SEQ ID NO: 2396810 - DNA, 25 bp, Homo sapien
gcaaacccacaccagctccgaggac

SEQ ID NO: 2396811 - DNA, 25 bp, Homo sapien
gtaatacgaacaccagcagtcaccc

SEQ ID NO: 2396812 - DNA, 25 bp, Homo sapien
cgagagtccgactgcccagggtgct

SEQ ID NO: 2396813 - DNA, 25 bp, Homo sapien
cacctgagaataatcaattcctgag

SEQ ID NO: 2396814 - DNA, 25 bp, Homo sapien
ttcctgagtggaaactcaacaaggc

SEQ ID NO: 2396815 - DNA, 25 bp, Homo sapien
tttgactcagtgctgcaattcaggt

SEQ ID NO: 2396816 - DNA, 25 bp, Homo sapien
ttgagatgccagacatccaggctct

SEQ ID NO: 2396817 - DNA, 25 bp, Homo sapien
ttcaggttgagatgccagacatcca

SEQ ID NO: 2396818 - DNA, 25 bp, Homo sapien
caagatatccccctttgactcagtg

SEQ ID NO: 2396819 - DNA, 25 bp, Homo sapien
gaaaggaaaggatgaatgacctctg

SEQ ID NO: 2396820 - DNA, 25 bp, Homo sapien
acatgccattctgcctagggacagg

SEQ ID NO: 2396821 - DNA, 25 bp, Homo sapien
cagccaacttaaatcttatcaggca

SEQ ID NO: 2396822 - DNA, 25 bp, Homo sapien
aaatggcacctcaagcctcagcatg

SEQ ID NO: 2396823 - DNA, 25 bp, Homo sapien
gcacaaagacctgaggtcaaggtga

SEQ ID NO: 2396824 - DNA, 25 bp, Homo sapien
tgggggagatggcaagggaaggtca

SEQ ID NO: 2396825 - DNA, 25 bp, Homo sapien
tgcaggaaggtagggagggtgggaa

SEQ ID NO: 2396826 - DNA, 25 bp, Homo sapien
ggtaggaatgagtttgggggagatg

SEQ ID NO: 2396827 - DNA, 25 bp, Homo sapien
gagatggcaagggaaggtcattttt

SEQ ID NO: 2396828 - DNA, 25 bp, Homo sapien
tgtggtgccattccatctccaagtc

SEQ ID NO: 2396829 - DNA, 25 bp, Homo sapien
tccacctgccagaataaagcctagg

SEQ ID NO: 2396830 - DNA, 25 bp, Homo sapien
agcctaggctctctgtcaggtggca

SEQ ID NO: 2396831 - DNA, 25 bp, Homo sapien
actgctcactaggagcccggttctg

SEQ ID NO: 2396832 - DNA, 25 bp, Homo sapien
tttccggtagtggtaggcaagtaca

SEQ ID NO: 2396833 - DNA, 25 bp, Homo sapien
caaggacacaggctcattggcatcc

SEQ ID NO: 2396834 - DNA, 25 bp, Homo sapien
aagtgcatgcggctaagacgggcct

SEQ ID NO: 2396835 - DNA, 25 bp, Homo sapien
tccccattggagacgatagccagcg

SEQ ID NO: 2396836 - DNA, 25 bp, Homo sapien
tgcagatctgcacctctgcctgcag

SEQ ID NO: 2396837 - DNA, 25 bp, Homo sapien
ccttgcagatctgcacctctgcctg

SEQ ID NO: 2396838 - DNA, 25 bp, Homo sapien
ttgcagatctgcacctctgcctgca

SEQ ID NO: 2396839 - DNA, 25 bp, Homo sapien
ctccttgcagatctgcacctctgcc

SEQ ID NO: 2396840 - DNA, 25 bp, Homo sapien
agctgctgcgggtgctctctccacc

SEQ ID NO: 2396841 - DNA, 25 bp, Homo sapien
tctctgttggaaccgccctgcagac

SEQ ID NO: 2396842 - DNA, 25 bp, Homo sapien
ggatctctgttggaaccgccctgca

SEQ ID NO: 2396843 - DNA, 25 bp, Homo sapien
ggtgctctctccaccgcagggctgg

SEQ ID NO: 2396844 - DNA, 25 bp, Homo sapien
cccggggacctggcatcttgagaca

SEQ ID NO: 2396845 - DNA, 25 bp, Homo sapien
ccggggacctggcatcttgagacac

SEQ ID NO: 2396846 - DNA, 25 bp, Homo sapien
gcccggggacctggcatcttgagac

SEQ ID NO: 2396847 - DNA, 25 bp, Homo sapien
ggcccggggacctggcatcttgaga

SEQ ID NO: 2396848 - DNA, 25 bp, Homo sapien
tgcacacatacacacacgcatacac

SEQ ID NO: 2396849 - DNA, 25 bp, Homo sapien
ggcaggaatgcaggaccacttcaga

SEQ ID NO: 2396850 - DNA, 25 bp, Homo sapien
tgcagccccttctcggcaggaatgc

SEQ ID NO: 2396851 - DNA, 25 bp, Homo sapien
agaggtctgcagccccttctcggca

SEQ ID NO: 2396852 - DNA, 25 bp, Homo sapien
gcaggaccacttcagaaaaattcca

SEQ ID NO: 2396853 - DNA, 25 bp, Homo sapien
agggaaaagtccccagtaggtgatg

SEQ ID NO: 2396854 - DNA, 25 bp, Homo sapien
agtccccagtaggtgatggaatgac

SEQ ID NO: 2396855 - DNA, 25 bp, Homo sapien
ggaaaagtccccagtaggtgatgga

SEQ ID NO: 2396856 - DNA, 25 bp, Homo sapien
ccccagtaggtgatggaatgactgc

SEQ ID NO: 2396857 - DNA, 25 bp, Homo sapien
gaagcttccccagactaagcaggag

SEQ ID NO: 2396858 - DNA, 25 bp, Homo sapien
tggaagcttccccagactaagcagg

SEQ ID NO: 2396859 - DNA, 25 bp, Homo sapien
ggaagcttccccagactaagcagga

SEQ ID NO: 2396860 - DNA, 25 bp, Homo sapien
taaagtgacaggcacttaggttgtt

SEQ ID NO: 2396861 - DNA, 25 bp, Homo sapien
tgcagatacctttaccaggtagtga

SEQ ID NO: 2396862 - DNA, 25 bp, Homo sapien
tatcttgaccactgtgaataatgtt

SEQ ID NO: 2396863 - DNA, 25 bp, Homo sapien
ctataccataaagtgacaggcactt

SEQ ID NO: 2396864 - DNA, 25 bp, Homo sapien
tgtgaagcctcactcttagccaagg

SEQ ID NO: 2396865 - DNA, 25 bp, Homo sapien
gacatgctcatgaggtcttgccact

SEQ ID NO: 2396866 - DNA, 25 bp, Homo sapien
tcaagaggctctaatctggaagggt

SEQ ID NO: 2396867 - DNA, 25 bp, Homo sapien
ttagccaaggactcacgaagggtcc

SEQ ID NO: 2396868 - DNA, 25 bp, Homo sapien
aacacaacagccgacaaagtccctg

SEQ ID NO: 2396869 - DNA, 25 bp, Homo sapien
cagaaacacaacagccgacaaagtc

SEQ ID NO: 2396870 - DNA, 25 bp, Homo sapien
gtccctgtcccaggcaaagtcagtc

SEQ ID NO: 2396871 - DNA, 25 bp, Homo sapien
caaagtccctgtcccaggcaaagtc

SEQ ID NO: 2396872 - DNA, 25 bp, Homo sapien
ccgcgcgcttctgggcaggcttatg

SEQ ID NO: 2396873 - DNA, 25 bp, Homo sapien
tccaggacacactcgggtccgtggg

SEQ ID NO: 2396874 - DNA, 25 bp, Homo sapien
gggctaattccatcgcggctcagct

SEQ ID NO: 2396875 - DNA, 25 bp, Homo sapien
tgaggggcgagacagtaaacgctcc

SEQ ID NO: 2396876 - DNA, 25 bp, Homo sapien
tcctatattgataaggtaggctggt

SEQ ID NO: 2396877 - DNA, 25 bp, Homo sapien
tattgataaggtaggctggtcatga

SEQ ID NO: 2396878 - DNA, 25 bp, Homo sapien
ggtcatgatagatcccactttatag

SEQ ID NO: 2396879 - DNA, 25 bp, Homo sapien
tggtcatgatagatcccactttata

SEQ ID NO: 2396880 - DNA, 25 bp, Homo sapien
gagctgatgcctccaataacacctt

SEQ ID NO: 2396881 - DNA, 25 bp, Homo sapien
tgatgcctccaataacaccttgtcc

SEQ ID NO: 2396882 - DNA, 25 bp, Homo sapien
agagctgatgcctccaataacacct

SEQ ID NO: 2396883 - DNA, 25 bp, Homo sapien
gctgatgcctccaataacaccttgt

SEQ ID NO: 2396884 - DNA, 25 bp, Homo sapien
gagctcagcctttattgtgggctca

SEQ ID NO: 2396885 - DNA, 25 bp, Homo sapien
caagataagagctcagcctttattg

SEQ ID NO: 2396886 - DNA, 25 bp, Homo sapien
taagagctcagcctttattgtgggc

SEQ ID NO: 2396887 - DNA, 25 bp, Homo sapien
gataagagctcagcctttattgtgg

SEQ ID NO: 2396888 - DNA, 25 bp, Homo sapien
ggcacaagagcagaacatgcagagg

SEQ ID NO: 2396889 - DNA, 25 bp, Homo sapien
cacaagagcagaacatgcagaggac

SEQ ID NO: 2396890 - DNA, 25 bp, Homo sapien
agagcagaacatgcagaggactggc

SEQ ID NO: 2396891 - DNA, 25 bp, Homo sapien
aagggcacaagagcagaacatgcag

SEQ ID NO: 2396892 - DNA, 25 bp, Homo sapien
aggcacccatgcagctgcagcagcc

SEQ ID NO: 2396893 - DNA, 25 bp, Homo sapien
cagcagcaggcacccatgcagctgc

SEQ ID NO: 2396894 - DNA, 25 bp, Homo sapien
gcagcaggcacccatgcagctgcag

SEQ ID NO: 2396895 - DNA, 25 bp, Homo sapien
agcaggcacccatgcagctgcagca

SEQ ID NO: 2396896 - DNA, 25 bp, Homo sapien
gagaacctcatggtacacaacagag

SEQ ID NO: 2396897 - DNA, 25 bp, Homo sapien
caacagagccattggtgcagtgcag

SEQ ID NO: 2396898 - DNA, 25 bp, Homo sapien
gcatttgcactccatggcattgaga

SEQ ID NO: 2396899 - DNA, 25 bp, Homo sapien
gagcactggtcctgcacatcgttga

SEQ ID NO: 2396900 - DNA, 25 bp, Homo sapien
taaaggaagatcataggtctgacat

SEQ ID NO: 2396901 - DNA, 25 bp, Homo sapien
gaagcacccaggacagctaggcaat

SEQ ID NO: 2396902 - DNA, 25 bp, Homo sapien
cacaatggtgggaagtcctggctta

SEQ ID NO: 2396903 - DNA, 25 bp, Homo sapien
caaggcaggtctgatctcacccaga

SEQ ID NO: 2396904 - DNA, 25 bp, Homo sapien
atgtcgttgcactcaggctcctcac

SEQ ID NO: 2396905 - DNA, 25 bp, Homo sapien
cagcctggcagtgatgtcgttgcac

SEQ ID NO: 2396906 - DNA, 25 bp, Homo sapien
caccttgacatactgcagcctggca

SEQ ID NO: 2396907 - DNA, 25 bp, Homo sapien
tcagacttacagcttcccaccttga

SEQ ID NO: 2396908 - DNA, 25 bp, Homo sapien
gaatgagttgaccaacaaagaccct

SEQ ID NO: 2396909 - DNA, 25 bp, Homo sapien
cagatctgaatctctacttggccca

SEQ ID NO: 2396910 - DNA, 25 bp, Homo sapien
tctcttcgggtactgctgactccag

SEQ ID NO: 2396911 - DNA, 25 bp, Homo sapien
tcattgtaaagggaaagcctgccaa

SEQ ID NO: 2396912 - DNA, 25 bp, Homo sapien
aggtgcctggaattttcataatttt

SEQ ID NO: 2396913 - DNA, 25 bp, Homo sapien
gcaggtgcctggaattttcataatt

SEQ ID NO: 2396914 - DNA, 25 bp, Homo sapien
caggtgcctggaattttcataattt

SEQ ID NO: 2396915 - DNA, 25 bp, Homo sapien
agattgagacagtaaagaggaaagc

SEQ ID NO: 2396916 - DNA, 25 bp, Homo sapien
gaatcttgttcttagagattgagac

SEQ ID NO: 2396917 - DNA, 25 bp, Homo sapien
tcttgttcttagagattgagacagt

SEQ ID NO: 2396918 - DNA, 25 bp, Homo sapien
aatcttgttcttagagattgagaca

SEQ ID NO: 2396919 - DNA, 25 bp, Homo sapien
gaccttgcagaagtgagtatcacag

SEQ ID NO: 2396920 - DNA, 25 bp, Homo sapien
ctctcctctctcattgaccttgcag

SEQ ID NO: 2396921 - DNA, 25 bp, Homo sapien
acagccatcctggagcgtctcatca

SEQ ID NO: 2396922 - DNA, 25 bp, Homo sapien
tgtgttcatcaaagggtgggcagcc

SEQ ID NO: 2396923 - DNA, 25 bp, Homo sapien
gcaagccgtaggcaaacatctccca

SEQ ID NO: 2396924 - DNA, 25 bp, Homo sapien
taggcaaacatctcccacaacattc

SEQ ID NO: 2396925 - DNA, 25 bp, Homo sapien
cttagctgaatggtgcaagccgtag

SEQ ID NO: 2396926 - DNA, 25 bp, Homo sapien
tgaatggtgcaagccgtaggcaaac

SEQ ID NO: 2396927 - DNA, 25 bp, Homo sapien
ggaaaaagcagccatagttaacctc

SEQ ID NO: 2396928 - DNA, 25 bp, Homo sapien
gagggggaaaaagcagccatagtta

SEQ ID NO: 2396929 - DNA, 25 bp, Homo sapien
ccagagggggaaaaagcagccatag

SEQ ID NO: 2396930 - DNA, 25 bp, Homo sapien
tgcatccagagggggaaaaagcagc

SEQ ID NO: 2396931 - DNA, 25 bp, Homo sapien
ctgggttcaagtgttcaagtgattc

SEQ ID NO: 2396932 - DNA, 25 bp, Homo sapien
ccccctgggttcaagtgttcaagtg

SEQ ID NO: 2396933 - DNA, 25 bp, Homo sapien
ctggtgatccacctgcctcagcctc

SEQ ID NO: 2396934 - DNA, 25 bp, Homo sapien
tggtgatccacctgcctcagcctcc

SEQ ID NO: 2396935 - DNA, 25 bp, Homo sapien
atgcagcggcaggtcgtgcacacat

SEQ ID NO: 2396936 - DNA, 25 bp, Homo sapien
cggcaggtcgtgcacacatcgatca

SEQ ID NO: 2396937 - DNA, 25 bp, Homo sapien
tgcacacatcgatcatcacagtctt

SEQ ID NO: 2396938 - DNA, 25 bp, Homo sapien
cctgcaccatgcagcggcaggtcgt

SEQ ID NO: 2396939 - DNA, 25 bp, Homo sapien
cagtgccattgagcatgcaggcctc

SEQ ID NO: 2396940 - DNA, 25 bp, Homo sapien
aatgacagtgccattgagcatgcag

SEQ ID NO: 2396941 - DNA, 25 bp, Homo sapien
gacagtgccattgagcatgcaggcc

SEQ ID NO: 2396942 - DNA, 25 bp, Homo sapien
tgacagtgccattgagcatgcaggc

SEQ ID NO: 2396943 - DNA, 25 bp, Homo sapien
acagcgacagcttgggcagcacgct

SEQ ID NO: 2396944 - DNA, 25 bp, Homo sapien
cacagcgacagcttgggcagcacgc

SEQ ID NO: 2396945 - DNA, 25 bp, Homo sapien
cagcgacagcttgggcagcacgctg

SEQ ID NO: 2396946 - DNA, 25 bp, Homo sapien
agcgacagcttgggcagcacgctga

SEQ ID NO: 2396947 - DNA, 25 bp, Homo sapien
ctttgttgtataaagacctcctcct

SEQ ID NO: 2396948 - DNA, 25 bp, Homo sapien
tcggacacactcattgatgaggcag

SEQ ID NO: 2396949 - DNA, 25 bp, Homo sapien
tccttcactcggacacactcattga

SEQ ID NO: 2396950 - DNA, 25 bp, Homo sapien
gggcaggagacgttcctttgttgta

SEQ ID NO: 2396951 - DNA, 25 bp, Homo sapien
ccttcctcagcattggtttgagctg

SEQ ID NO: 2396952 - DNA, 25 bp, Homo sapien
tttgagctgagctcagatactccgg

SEQ ID NO: 2396953 - DNA, 25 bp, Homo sapien
gagctcagatactccggccaagaag

SEQ ID NO: 2396954 - DNA, 25 bp, Homo sapien
cctcagcattggtttgagctgagct

SEQ ID NO: 2396955 - DNA, 25 bp, Homo sapien
cacgaagactgcacatgggtagcct

SEQ ID NO: 2396956 - DNA, 25 bp, Homo sapien
caggaatactgagcgcaaagggacc

SEQ ID NO: 2396957 - DNA, 25 bp, Homo sapien
tgtgtcggccagcacccagatatgt

SEQ ID NO: 2396958 - DNA, 25 bp, Homo sapien
gatatgtaactaggtgccctctgcc

SEQ ID NO: 2396959 - DNA, 25 bp, Homo sapien
agtccccccgcggtgagccagtcac

SEQ ID NO: 2396960 - DNA, 25 bp, Homo sapien
cgcggtgagccagtcaccacctcac

SEQ ID NO: 2396961 - DNA, 25 bp, Homo sapien
tcttccaggaagactgggagtcccc

SEQ ID NO: 2396962 - DNA, 25 bp, Homo sapien
caggaagactgggagtccccccgcg

SEQ ID NO: 2396963 - DNA, 25 bp, Homo sapien
cttccacagcactcgccttcatgca

SEQ ID NO: 2396964 - DNA, 25 bp, Homo sapien
cttcatgcagaacgtaagtgaagcc

SEQ ID NO: 2396965 - DNA, 25 bp, Homo sapien
agcactcgccttcatgcagaacgta

SEQ ID NO: 2396966 - DNA, 25 bp, Homo sapien
cgccttcatgcagaacgtaagtgaa

SEQ ID NO: 2396967 - DNA, 25 bp, Homo sapien
gatcccactttgagagagaccatga

SEQ ID NO: 2396968 - DNA, 25 bp, Homo sapien
agacagcccagagttcccttagcag

SEQ ID NO: 2396969 - DNA, 25 bp, Homo sapien
ttatcatggccaactctagggaccc

SEQ ID NO: 2396970 - DNA, 25 bp, Homo sapien
tccataggagcattaaagacagccc

SEQ ID NO: 2396971 - DNA, 25 bp, Homo sapien
gacgaacactcgatcccaatactgc

SEQ ID NO: 2396972 - DNA, 25 bp, Homo sapien
tgggcttccccaagaggttacttga

SEQ ID NO: 2396973 - DNA, 25 bp, Homo sapien
ccaatactgctcaccaacgtgcaga

SEQ ID NO: 2396974 - DNA, 25 bp, Homo sapien
tagcctcccatacaagacgaacact

SEQ ID NO: 2396975 - DNA, 25 bp, Homo sapien
agcactgggccacgcggaggcccat

SEQ ID NO: 2396976 - DNA, 25 bp, Homo sapien
tcggtgcaggtgcacacatcgcagc

SEQ ID NO: 2396977 - DNA, 25 bp, Homo sapien
catcacggcatcctccatgtcggtg

SEQ ID NO: 2396978 - DNA, 25 bp, Homo sapien
gtagatggtgcttcggtggacacac

SEQ ID NO: 2396979 - DNA, 25 bp, Homo sapien
aaactgcgtgcttagaatccctgag

SEQ ID NO: 2396980 - DNA, 25 bp, Homo sapien
ctccaaaactgcgtgcttagaatcc

SEQ ID NO: 2396981 - DNA, 25 bp, Homo sapien
ctagacttgttcccgcttctccaaa

SEQ ID NO: 2396982 - DNA, 25 bp, Homo sapien
cttctccaaaactgcgtgcttagaa

SEQ ID NO: 2396983 - DNA, 25 bp, Homo sapien
gacagctcactgtggagttgacaca

SEQ ID NO: 2396984 - DNA, 25 bp, Homo sapien
ggtacagccacagtcattggtggca

SEQ ID NO: 2396985 - DNA, 25 bp, Homo sapien
gcactgggtcttccgaagggtgggc

SEQ ID NO: 2396986 - DNA, 25 bp, Homo sapien
ttggtggcagttgaggccaagtacc

SEQ ID NO: 2396987 - DNA, 25 bp, Homo sapien
aagttgggtctgcactcgccagggt

SEQ ID NO: 2396988 - DNA, 25 bp, Homo sapien
ggctggaggccacgttcacagtgag

SEQ ID NO: 2396989 - DNA, 25 bp, Homo sapien
gaggccacgttcacagtgaggcact

SEQ ID NO: 2396990 - DNA, 25 bp, Homo sapien
tctgcactcgccagggttggtcagt

SEQ ID NO: 2396991 - DNA, 25 bp, Homo sapien
cctgtgcctgagaacagagacacct

SEQ ID NO: 2396992 - DNA, 25 bp, Homo sapien
tgtgcctgagaacagagacaccttt

SEQ ID NO: 2396993 - DNA, 25 bp, Homo sapien
tgagaacagagacacctttcagcac

SEQ ID NO: 2396994 - DNA, 25 bp, Homo sapien
cctgagaacagagacacctttcagc

SEQ ID NO: 2396995 - DNA, 25 bp, Homo sapien
caacgtggtgccccctggggctagg

SEQ ID NO: 2396996 - DNA, 25 bp, Homo sapien
ggccctggagacatccccctggtgg

SEQ ID NO: 2396997 - DNA, 25 bp, Homo sapien
gccctggagacatccccctggtggg

SEQ ID NO: 2396998 - DNA, 25 bp, Homo sapien
cttcaacgtggtgccccctggggct

SEQ ID NO: 2396999 - DNA, 25 bp, Homo sapien
cattctggcggaggcgggctacttc

SEQ ID NO: 2397000 - DNA, 25 bp, Homo sapien
cactcatactcggggcagcactggt

SEQ ID NO: 2397001 - DNA, 25 bp, Homo sapien
ctacttcacacaggccacacgtggg

SEQ ID NO: 2397002 - DNA, 25 bp, Homo sapien
cggaggcgggctacttcacacaggc

SEQ ID NO: 2397003 - DNA, 25 bp, Homo sapien
gggcagggctgcgttgtgcagttga

SEQ ID NO: 2397004 - DNA, 25 bp, Homo sapien
catgtgcagatctgacagggctggt

SEQ ID NO: 2397005 - DNA, 25 bp, Homo sapien
cttccgcccgctgaggcatgtgcag

SEQ ID NO: 2397006 - DNA, 25 bp, Homo sapien
gtgcagttgaccttccgcccgctga

SEQ ID NO: 2397007 - DNA, 25 bp, Homo sapien
caagtaactgttaataccctgcaaa

SEQ ID NO: 2397008 - DNA, 25 bp, Homo sapien
gagctatctgaatgcaaggccatta

SEQ ID NO: 2397009 - DNA, 25 bp, Homo sapien
tgggtttagcacaatcaaggtacat

SEQ ID NO: 2397010 - DNA, 25 bp, Homo sapien
cagataatacatgacagacgcagga

SEQ ID NO: 2397011 - DNA, 25 bp, Homo sapien
gaacatatctcccttttgacccaag

SEQ ID NO: 2397012 - DNA, 25 bp, Homo sapien
tatctcccttttgacccaagaggga

SEQ ID NO: 2397013 - DNA, 25 bp, Homo sapien
gaagcagccccatgggaagtgaaag

SEQ ID NO: 2397014 - DNA, 25 bp, Homo sapien
aagcagccccatgggaagtgaaagg

SEQ ID NO: 2397015 - DNA, 25 bp, Homo sapien
cagaaacagccttcggagggatggt

SEQ ID NO: 2397016 - DNA, 25 bp, Homo sapien
cacaggagctcacgttgccatcaca

SEQ ID NO: 2397017 - DNA, 25 bp, Homo sapien
caacatgactttatctggagggcag

SEQ ID NO: 2397018 - DNA, 25 bp, Homo sapien
ctcacgttgccatcacagtgccggg

SEQ ID NO: 2397019 - DNA, 25 bp, Homo sapien
catgaagtcattggctccgttctca

SEQ ID NO: 2397020 - DNA, 25 bp, Homo sapien
tgcacagtccattcctgaacaagtg

SEQ ID NO: 2397021 - DNA, 25 bp, Homo sapien
tgctcctggtggcaactgtcctgct

SEQ ID NO: 2397022 - DNA, 25 bp, Homo sapien
gaaatcaggtgtcctccagtcaacg

SEQ ID NO: 2397023 - DNA, 25 bp, Homo sapien
tacgtctttgaagcaaaagtcttgg

SEQ ID NO: 2397024 - DNA, 25 bp, Homo sapien
gatggcaccataaacgttgacttcc

SEQ ID NO: 2397025 - DNA, 25 bp, Homo sapien
cacgtaaggaacagagaccagtctc

SEQ ID NO: 2397026 - DNA, 25 bp, Homo sapien
ttccatgttcccacccacgtaagga

SEQ ID NO: 2397027 - DNA, 25 bp, Homo sapien
ggccatgcaccaagaacctaaaagc

SEQ ID NO: 2397028 - DNA, 25 bp, Homo sapien
tgactttacagagcttgaccagaaa

SEQ ID NO: 2397029 - DNA, 25 bp, Homo sapien
ctgttgtaatactgtacgggtggcc

SEQ ID NO: 2397030 - DNA, 25 bp, Homo sapien
aagaagagcttgactagaaaacaga

SEQ ID NO: 2397031 - DNA, 25 bp, Homo sapien
cacggatccacagaaagtacttctc

SEQ ID NO: 2397032 - DNA, 25 bp, Homo sapien
acggatccacagaaagtacttctca

SEQ ID NO: 2397033 - DNA, 25 bp, Homo sapien
cggatccacagaaagtacttctcac

SEQ ID NO: 2397034 - DNA, 25 bp, Homo sapien
agggctgcaggcaccattatggaga

SEQ ID NO: 2397035 - DNA, 25 bp, Homo sapien
tcacgatgtgccgagtggagctgcc

SEQ ID NO: 2397036 - DNA, 25 bp, Homo sapien
tctgcccatcaaaggtcacgatgtg

SEQ ID NO: 2397037 - DNA, 25 bp, Homo sapien
catgtcactgtgcagctcgacggag

SEQ ID NO: 2397038 - DNA, 25 bp, Homo sapien
ccatctggctggcaagtcacggtgt

SEQ ID NO: 2397039 - DNA, 25 bp, Homo sapien
cagttgacccgatgactcttcagca

SEQ ID NO: 2397040 - DNA, 25 bp, Homo sapien
cccggtcacagttgacccgatgact

SEQ ID NO: 2397041 - DNA, 25 bp, Homo sapien
gtctggcaaggtccagacgtccccg

SEQ ID NO: 2397042 - DNA, 25 bp, Homo sapien
ccatcctcatccatgcaaatcctaa

SEQ ID NO: 2397043 - DNA, 25 bp, Homo sapien
atcctcatccatgcaaatcctaaca

SEQ ID NO: 2397044 - DNA, 25 bp, Homo sapien
cctcatccatgcaaatcctaacaaa

SEQ ID NO: 2397045 - DNA, 25 bp, Homo sapien
tcatccatgcaaatcctaacaaatc

SEQ ID NO: 2397046 - DNA, 25 bp, Homo sapien
gaccatggtagggaggtcttcgatt

SEQ ID NO: 2397047 - DNA, 25 bp, Homo sapien
gcatcgtagcgatctccaattccaa

SEQ ID NO: 2397048 - DNA, 25 bp, Homo sapien
tgcccaaggtgaccatggtagggag

SEQ ID NO: 2397049 - DNA, 25 bp, Homo sapien
gccaagatccgtagctgggctgcat

SEQ ID NO: 2397050 - DNA, 25 bp, Homo sapien
cactcaacaaacgttaaatggtcac

SEQ ID NO: 2397051 - DNA, 25 bp, Homo sapien
gcttcaggttggaacggattttcta

SEQ ID NO: 2397052 - DNA, 25 bp, Homo sapien
tacaaaaataagcaagatcttccct

SEQ ID NO: 2397053 - DNA, 25 bp, Homo sapien
caaagaactcccagttttttgcaag

SEQ ID NO: 2397054 - DNA, 25 bp, Homo sapien
cggcctggcaccatgcatttctgaa

SEQ ID NO: 2397055 - DNA, 25 bp, Homo sapien
cctggcaccatgcatttctgaagtc

SEQ ID NO: 2397056 - DNA, 25 bp, Homo sapien
ggcctggcaccatgcatttctgaag

SEQ ID NO: 2397057 - DNA, 25 bp, Homo sapien
tgctgcatccactgaatccacagag

SEQ ID NO: 2397058 - DNA, 25 bp, Homo sapien
cacgttccatggcacgtcaatggtg

SEQ ID NO: 2397059 - DNA, 25 bp, Homo sapien
ggctcagcaaatgggctttctccgg

SEQ ID NO: 2397060 - DNA, 25 bp, Homo sapien
gctgcatgacgtccacaaggctcag

SEQ ID NO: 2397061 - DNA, 25 bp, Homo sapien
tccatggcacgtcaatggtggtgat

SEQ ID NO: 2397062 - DNA, 25 bp, Homo sapien
ctatattggcttttgaaatgaaagc

SEQ ID NO: 2397063 - DNA, 25 bp, Homo sapien
tttgaaatgaaagccttggcgaaac

SEQ ID NO: 2397064 - DNA, 25 bp, Homo sapien
cttttgaaatgaaagccttggcgaa

SEQ ID NO: 2397065 - DNA, 25 bp, Homo sapien
tggcttttgaaatgaaagccttggc

SEQ ID NO: 2397066 - DNA, 25 bp, Homo sapien
catccaggagaaggatcacgtccag

SEQ ID NO: 2397067 - DNA, 25 bp, Homo sapien
caaaataagaagctgggaaactgga

SEQ ID NO: 2397068 - DNA, 25 bp, Homo sapien
gaggagccatccaggagaaggatca

SEQ ID NO: 2397069 - DNA, 25 bp, Homo sapien
tcatcaaaataagaagctgggaaac

SEQ ID NO: 2397070 - DNA, 25 bp, Homo sapien
ggacaatggccaccaggcctacaac

SEQ ID NO: 2397071 - DNA, 25 bp, Homo sapien
gcagggacaatggccaccaggccta

SEQ ID NO: 2397072 - DNA, 25 bp, Homo sapien
ctgcaaagacaaccaggaaggtgag

SEQ ID NO: 2397073 - DNA, 25 bp, Homo sapien
tgcaaagacaaccaggaaggtgagc

SEQ ID NO: 2397074 - DNA, 25 bp, Homo sapien
cagggcgtgctgaccacgtggcacc

SEQ ID NO: 2397075 - DNA, 25 bp, Homo sapien
agggcgtgctgaccacgtggcacca

SEQ ID NO: 2397076 - DNA, 25 bp, Homo sapien
tgcagggcgtgctgaccacgtggca

SEQ ID NO: 2397077 - DNA, 25 bp, Homo sapien
ggcgtgctgaccacgtggcaccacc

SEQ ID NO: 2397078 - DNA, 25 bp, Homo sapien
caggtgcaggggagagggtggggat

SEQ ID NO: 2397079 - DNA, 25 bp, Homo sapien
gccctggacgtagcggacaaagttc

SEQ ID NO: 2397080 - DNA, 25 bp, Homo sapien
catgaactccttgctcctgttgaag

SEQ ID NO: 2397081 - DNA, 25 bp, Homo sapien
tagcctgctgcagtagaaatcgtgc

SEQ ID NO: 2397082 - DNA, 25 bp, Homo sapien
ccatgtaggagtactgcagcaccgt

SEQ ID NO: 2397083 - DNA, 25 bp, Homo sapien
ggacttctgtccacacactgcttgc

SEQ ID NO: 2397084 - DNA, 25 bp, Homo sapien
cccagtaaagctgacaaggcggcag

SEQ ID NO: 2397085 - DNA, 25 bp, Homo sapien
gcttcagcgtgcaccgtggcagctg

SEQ ID NO: 2397086 - DNA, 25 bp, Homo sapien
tgcttgcagcttcagcgtgcaccgt

SEQ ID NO: 2397087 - DNA, 25 bp, Homo sapien
ggtgagagcaacgagcaccttccct

SEQ ID NO: 2397088 - DNA, 25 bp, Homo sapien
tacttatgagcaggacttcagaggg

SEQ ID NO: 2397089 - DNA, 25 bp, Homo sapien
gacgttcatgttacctgagggccct

SEQ ID NO: 2397090 - DNA, 25 bp, Homo sapien
gctcccagaaggcttgattagtgtc

SEQ ID NO: 2397091 - DNA, 25 bp, Homo sapien
tcagtgagaaaagcaaaaacctgtt

SEQ ID NO: 2397092 - DNA, 25 bp, Homo sapien
tgagaaaagcaaaaacctgttagga

SEQ ID NO: 2397093 - DNA, 25 bp, Homo sapien
cttcagtgagaaaagcaaaaacctg

SEQ ID NO: 2397094 - DNA, 25 bp, Homo sapien
agtgagaaaagcaaaaacctgttag

SEQ ID NO: 2397095 - DNA, 25 bp, Homo sapien
gtcttcagggtcaacgcaggtctgc

SEQ ID NO: 2397096 - DNA, 25 bp, Homo sapien
agggtcaacgcaggtctgcaaaagc

SEQ ID NO: 2397097 - DNA, 25 bp, Homo sapien
cagtcttcagggtcaacgcaggtct

SEQ ID NO: 2397098 - DNA, 25 bp, Homo sapien
cactgggattcaaggtgactttctt

SEQ ID NO: 2397099 - DNA, 25 bp, Homo sapien
tgctgacacgtgacttgacaggcag

SEQ ID NO: 2397100 - DNA, 25 bp, Homo sapien
actcatacccgttctcccggagatt

SEQ ID NO: 2397101 - DNA, 25 bp, Homo sapien
tgttatagcgccactcacactcata

SEQ ID NO: 2397102 - DNA, 25 bp, Homo sapien
caggtgcacagctgttatagcgcca

SEQ ID NO: 2397103 - DNA, 25 bp, Homo sapien
cacacgtgggcataggcagcaatgg

SEQ ID NO: 2397104 - DNA, 25 bp, Homo sapien
cagcaatggtgtcgcagaagcaggc

SEQ ID NO: 2397105 - DNA, 25 bp, Homo sapien
aagcaggcgcagtccccaatggact

SEQ ID NO: 2397106 - DNA, 25 bp, Homo sapien
ggagcaggtgtcgtaaatgcagaca

SEQ ID NO: 2397107 - DNA, 25 bp, Homo sapien
tctgatggtcaatttaaggataagg

SEQ ID NO: 2397108 - DNA, 25 bp, Homo sapien
aatgttctgatggtcaatttaagga

SEQ ID NO: 2397109 - DNA, 25 bp, Homo sapien
tagtctgggtgcaaatgttctgatg

SEQ ID NO: 2397110 - DNA, 25 bp, Homo sapien
ggtgcaaatgttctgatggtcaatt

SEQ ID NO: 2397111 - DNA, 25 bp, Homo sapien
ttgttgcagtcctggaagacgtcac

SEQ ID NO: 2397112 - DNA, 25 bp, Homo sapien
aaggattctacaggaggaatccacc

SEQ ID NO: 2397113 - DNA, 25 bp, Homo sapien
cttgttgcagtcctggaagacgtca

SEQ ID NO: 2397114 - DNA, 25 bp, Homo sapien
tcactggtaaggattctacaggagg

SEQ ID NO: 2397115 - DNA, 25 bp, Homo sapien
tctggtgtcagcacactgcgagctc

SEQ ID NO: 2397116 - DNA, 25 bp, Homo sapien
tggtgtcagcacactgcgagctcac

SEQ ID NO: 2397117 - DNA, 25 bp, Homo sapien
tttctggtgtcagcacactgcgagc

SEQ ID NO: 2397118 - DNA, 25 bp, Homo sapien
ttttctggtgtcagcacactgcgag

SEQ ID NO: 2397119 - DNA, 25 bp, Homo sapien
ctggatgccatcaaaattcccacac

SEQ ID NO: 2397120 - DNA, 25 bp, Homo sapien
ggatgccatcaaaattcccacacag

SEQ ID NO: 2397121 - DNA, 25 bp, Homo sapien
tctggatgccatcaaaattcccaca

SEQ ID NO: 2397122 - DNA, 25 bp, Homo sapien
tggatgccatcaaaattcccacaca

SEQ ID NO: 2397123 - DNA, 25 bp, Homo sapien
atgatgtaccggccagactccacca

SEQ ID NO: 2397124 - DNA, 25 bp, Homo sapien
gcagaatgatgtaccggccagactc

SEQ ID NO: 2397125 - DNA, 25 bp, Homo sapien
cagaatgatgtaccggccagactcc

SEQ ID NO: 2397126 - DNA, 25 bp, Homo sapien
gcagcagaatgatgtaccggccaga

SEQ ID NO: 2397127 - DNA, 25 bp, Homo sapien
ccaccaggatggtgacccgtttctt

SEQ ID NO: 2397128 - DNA, 25 bp, Homo sapien
aaaggtcccagggttactgccgcag

SEQ ID NO: 2397129 - DNA, 25 bp, Homo sapien
ggtgacccgtttcttgcatttcact

SEQ ID NO: 2397130 - DNA, 25 bp, Homo sapien
cttattccccactaggatccgaaag

SEQ ID NO: 2397131 - DNA, 25 bp, Homo sapien
ccatgccgatcgtggagcacgtggc

SEQ ID NO: 2397132 - DNA, 25 bp, Homo sapien
ggaacaggtatttgagcccgtcgaa

SEQ ID NO: 2397133 - DNA, 25 bp, Homo sapien
tgcaccagaacgtactggcactccc

SEQ ID NO: 2397134 - DNA, 25 bp, Homo sapien
cacgtggcatcacacacatggtctg

SEQ ID NO: 2397135 - DNA, 25 bp, Homo sapien
caagttgggcaccttgggtttgagg

SEQ ID NO: 2397136 - DNA, 25 bp, Homo sapien
gacaagttgggcaccttgggtttga

SEQ ID NO: 2397137 - DNA, 25 bp, Homo sapien
acaagttgggcaccttgggtttgag

SEQ ID NO: 2397138 - DNA, 25 bp, Homo sapien
accacgccactgcaagcacactcac

SEQ ID NO: 2397139 - DNA, 25 bp, Homo sapien
tcaaaccacgccactgcaagcacac

SEQ ID NO: 2397140 - DNA, 25 bp, Homo sapien
aaaccacgccactgcaagcacactc

SEQ ID NO: 2397141 - DNA, 25 bp, Homo sapien
ctcaaaccacgccactgcaagcaca

SEQ ID NO: 2397142 - DNA, 25 bp, Homo sapien
gaagtgctcatgggcagtgtaaggc

SEQ ID NO: 2397143 - DNA, 25 bp, Homo sapien
gccacacatctgttctcatgccgga

SEQ ID NO: 2397144 - DNA, 25 bp, Homo sapien
tgttgcagccaatcttcactgtttc

SEQ ID NO: 2397145 - DNA, 25 bp, Homo sapien
gggcatactccttgccctgatggaa

SEQ ID NO: 2397146 - DNA, 25 bp, Homo sapien
agggacacctttccagggccacaca

SEQ ID NO: 2397147 - DNA, 25 bp, Homo sapien
ttttggtacactcgagcccttcagc

SEQ ID NO: 2397148 - DNA, 25 bp, Homo sapien
ccttcagcccgcaggttgtcagcgg

SEQ ID NO: 2397149 - DNA, 25 bp, Homo sapien
catagttctggcacgttttggtaca

SEQ ID NO: 2397150 - DNA, 25 bp, Homo sapien
tcatgcactccaggtcatagttctg

SEQ ID NO: 2397151 - DNA, 25 bp, Homo sapien
tagagtctgtgactaaattcaagag

SEQ ID NO: 2397152 - DNA, 25 bp, Homo sapien
gtctgtgactaaattcaagagactc

SEQ ID NO: 2397153 - DNA, 25 bp, Homo sapien
ttggtcccctagagtctgtgactaa

SEQ ID NO: 2397154 - DNA, 25 bp, Homo sapien
ccctagagtctgtgactaaattcaa

SEQ ID NO: 2397155 - DNA, 25 bp, Homo sapien
gcagctgcctgagccagggtccctg

SEQ ID NO: 2397156 - DNA, 25 bp, Homo sapien
agcagctgcctgagccagggtccct

SEQ ID NO: 2397157 - DNA, 25 bp, Homo sapien
tccctgtgtgggactgggagggcat

SEQ ID NO: 2397158 - DNA, 25 bp, Homo sapien
agggtccctgtgtgggactgggagg

SEQ ID NO: 2397159 - DNA, 25 bp, Homo sapien
gtcccatacttgtcatcacccttaa

SEQ ID NO: 2397160 - DNA, 25 bp, Homo sapien
taatgtcccatacttgtcatcaccc

SEQ ID NO: 2397161 - DNA, 25 bp, Homo sapien
atctaatgtcccatacttgtcatca

SEQ ID NO: 2397162 - DNA, 25 bp, Homo sapien
atacttgtcatcacccttaaccttg

SEQ ID NO: 2397163 - DNA, 25 bp, Homo sapien
gtgcacacgcacatctgacggtgtc

SEQ ID NO: 2397164 - DNA, 25 bp, Homo sapien
aaatgaaggcgatcctgggcgaagc

SEQ ID NO: 2397165 - DNA, 25 bp, Homo sapien
gccattccacacgtgaggaatctgg

SEQ ID NO: 2397166 - DNA, 25 bp, Homo sapien
gcacatctgacggtgtcacccagct

SEQ ID NO: 2397167 - DNA, 25 bp, Homo sapien
tccactcatggtacagtgcatgaag

SEQ ID NO: 2397168 - DNA, 25 bp, Homo sapien
ctgctgaggacagcgtcaggcagca

SEQ ID NO: 2397169 - DNA, 25 bp, Homo sapien
cagcgtcaggcagcaagcttccggg

SEQ ID NO: 2397170 - DNA, 25 bp, Homo sapien
ggtacagtgcatgaagccatcctca

SEQ ID NO: 2397171 - DNA, 25 bp, Homo sapien
tatccttaccactgaaacacagagg

SEQ ID NO: 2397172 - DNA, 25 bp, Homo sapien
taaaaaagcaagtcatgcctgccca

SEQ ID NO: 2397173 - DNA, 25 bp, Homo sapien
ggatcctcgctactctcatggctga

SEQ ID NO: 2397174 - DNA, 25 bp, Homo sapien
gagaggtcgctgatgtcaaacccta

SEQ ID NO: 2397175 - DNA, 25 bp, Homo sapien
cattgaagctgggaatggatacgtt

SEQ ID NO: 2397176 - DNA, 25 bp, Homo sapien
aataagaatggtaaagtgctgataa

SEQ ID NO: 2397177 - DNA, 25 bp, Homo sapien
attctctctactttaatgtctgtct

SEQ ID NO: 2397178 - DNA, 25 bp, Homo sapien
acacagcagaggagtcaatagacaa

SEQ ID NO: 2397179 - DNA, 25 bp, Homo sapien
gacagaacaggtgacaggtaagtgt

SEQ ID NO: 2397180 - DNA, 25 bp, Homo sapien
gacaggtaagtgtttgctcaacaaa

SEQ ID NO: 2397181 - DNA, 25 bp, Homo sapien
agcctggctcatctttagaccacca

SEQ ID NO: 2397182 - DNA, 25 bp, Homo sapien
gaccaccaattcttagccagaacta

SEQ ID NO: 2397183 - DNA, 25 bp, Homo sapien
tgcattcctcatccgggtaagagag

SEQ ID NO: 2397184 - DNA, 25 bp, Homo sapien
gggtcccgcactgcaggtacacctg

SEQ ID NO: 2397185 - DNA, 25 bp, Homo sapien
agatctcaccgtcatagtaacaggg

SEQ ID NO: 2397186 - DNA, 25 bp, Homo sapien
gtacacctggcctttcgggcagttc

SEQ ID NO: 2397187 - DNA, 25 bp, Homo sapien
gcaggtagggcagcgggctgacggc

SEQ ID NO: 2397188 - DNA, 25 bp, Homo sapien
actcgcggccgtccgagcaggagca

SEQ ID NO: 2397189 - DNA, 25 bp, Homo sapien
caggagcacacgtcgtagcggcagt

SEQ ID NO: 2397190 - DNA, 25 bp, Homo sapien
cggcacgatggcaggcctcgaatgt

SEQ ID NO: 2397191 - DNA, 25 bp, Homo sapien
caaccgtcccacgtagctcccaagt

SEQ ID NO: 2397192 - DNA, 25 bp, Homo sapien
atagaaatgggggctccctacgttg

SEQ ID NO: 2397193 - DNA, 25 bp, Homo sapien
gcaaccgtcccacgtagctcccaag

SEQ ID NO: 2397194 - DNA, 25 bp, Homo sapien
tgcaaccgtcccacgtagctcccaa

SEQ ID NO: 2397195 - DNA, 25 bp, Homo sapien
cgcagggatcgctgtgctgcttctg

SEQ ID NO: 2397196 - DNA, 25 bp, Homo sapien
ggtcctggcagtccccgtgcagctt

SEQ ID NO: 2397197 - DNA, 25 bp, Homo sapien
aggccgcaggtcttcccggcataga

SEQ ID NO: 2397198 - DNA, 25 bp, Homo sapien
gccctggttgccattgtaattccca

SEQ ID NO: 2397199 - DNA, 25 bp, Homo sapien
aggccgtcactgtatgctggatgcg

SEQ ID NO: 2397200 - DNA, 25 bp, Homo sapien
actgtatgctggatgcggaggtcac

SEQ ID NO: 2397201 - DNA, 25 bp, Homo sapien
cgcacggaggccgtcactgtatgct

SEQ ID NO: 2397202 - DNA, 25 bp, Homo sapien
ctccccgtagctgaggcgcacggag

SEQ ID NO: 2397203 - DNA, 25 bp, Homo sapien
catgcttcagtttcacaaggctgtt

SEQ ID NO: 2397204 - DNA, 25 bp, Homo sapien
gtgcacacagcgtcgcggtcatcag

SEQ ID NO: 2397205 - DNA, 25 bp, Homo sapien
agccggacggtgacggagcgggtgc

SEQ ID NO: 2397206 - DNA, 25 bp, Homo sapien
gttgtgcaggccaggcagccggacg

SEQ ID NO: 2397207 - DNA, 25 bp, Homo sapien
aatgacaatggagaaggagtggtcc

SEQ ID NO: 2397208 - DNA, 25 bp, Homo sapien
gattgacctgtgacaaggcactccc

SEQ ID NO: 2397209 - DNA, 25 bp, Homo sapien
gcaggtactggcagatcccactgaa

SEQ ID NO: 2397210 - DNA, 25 bp, Homo sapien
caaagctcttgaagtgtgattgacc

SEQ ID NO: 2397211 - DNA, 25 bp, Homo sapien
tcagactggtgccagcggaatgcct

SEQ ID NO: 2397212 - DNA, 25 bp, Homo sapien
ggaaacagtgtcacccctggagagt

SEQ ID NO: 2397213 - DNA, 25 bp, Homo sapien
cagcctcagactggtgccagcggaa

SEQ ID NO: 2397214 - DNA, 25 bp, Homo sapien
tgcccaatagcacagggttctctga

SEQ ID NO: 2397215 - DNA, 25 bp, Homo sapien
tctaaggccattgctttctgcgtcc

SEQ ID NO: 2397216 - DNA, 25 bp, Homo sapien
gggcaactctaaggccattgctttc

SEQ ID NO: 2397217 - DNA, 25 bp, Homo sapien
gctttctgcgtcctcagaggggcaa

SEQ ID NO: 2397218 - DNA, 25 bp, Homo sapien
cagcagaggggcaactctaaggcca

SEQ ID NO: 2397219 - DNA, 25 bp, Homo sapien
aatcatgaccatacaggccttacag

SEQ ID NO: 2397220 - DNA, 25 bp, Homo sapien
ctgaacgcaggtgcattctccgctt

SEQ ID NO: 2397221 - DNA, 25 bp, Homo sapien
tagtcaatcatgaccatacaggcct

SEQ ID NO: 2397222 - DNA, 25 bp, Homo sapien
ggacagacaataacatctgaacgca

SEQ ID NO: 2397223 - DNA, 25 bp, Homo sapien
ctgttgcagggctcccacctctggc

SEQ ID NO: 2397224 - DNA, 25 bp, Homo sapien
agctgttgcagggctcccacctctg

SEQ ID NO: 2397225 - DNA, 25 bp, Homo sapien
gctgttgcagggctcccacctctgg

SEQ ID NO: 2397226 - DNA, 25 bp, Homo sapien
tcagctgttgcagggctcccacctc

SEQ ID NO: 2397227 - DNA, 25 bp, Homo sapien
ctgtgaatgggttagcatagctggt

SEQ ID NO: 2397228 - DNA, 25 bp, Homo sapien
gtgaatgggttagcatagctggtac

SEQ ID NO: 2397229 - DNA, 25 bp, Homo sapien
tgtgaatgggttagcatagctggta

SEQ ID NO: 2397230 - DNA, 25 bp, Homo sapien
tcgctgccttgagttgtggccctcc

SEQ ID NO: 2397231 - DNA, 25 bp, Homo sapien
gcaacttctcgctgccttgagttgt

SEQ ID NO: 2397232 - DNA, 25 bp, Homo sapien
gggtcacgtggttgcagccaacctg

SEQ ID NO: 2397233 - DNA, 25 bp, Homo sapien
gttgcagccaacctgtgcagagagg

SEQ ID NO: 2397234 - DNA, 25 bp, Homo sapien
cattgctgcagatccactggctgtt

SEQ ID NO: 2397235 - DNA, 25 bp, Homo sapien
tcttcattgctgcagatccactggc

SEQ ID NO: 2397236 - DNA, 25 bp, Homo sapien
gatccactggctgtttcggcaaatg

SEQ ID NO: 2397237 - DNA, 25 bp, Homo sapien
tgcagatccactggctgtttcggca

SEQ ID NO: 2397238 - DNA, 25 bp, Homo sapien
gttggagggaaaaagcacaggtcat

SEQ ID NO: 2397239 - DNA, 25 bp, Homo sapien
gagggaaaaagcacaggtcattggt

SEQ ID NO: 2397240 - DNA, 25 bp, Homo sapien
tggagggaaaaagcacaggtcattg

SEQ ID NO: 2397241 - DNA, 25 bp, Homo sapien
gaaaaagcacaggtcattggtggtt

SEQ ID NO: 2397242 - DNA, 25 bp, Homo sapien
acgcagggacactcggtgctctcca

SEQ ID NO: 2397243 - DNA, 25 bp, Homo sapien
gagggtagcgctttccggaatgcac

SEQ ID NO: 2397244 - DNA, 25 bp, Homo sapien
gctttccggaatgcacgcagggaca

SEQ ID NO: 2397245 - DNA, 25 bp, Homo sapien
gaggtgccgggagggtagcgctttc

SEQ ID NO: 2397246 - DNA, 25 bp, Homo sapien
tccacgcatcgctcctgacacattt

SEQ ID NO: 2397247 - DNA, 25 bp, Homo sapien
catttcattgatgtgcaggctctgg

SEQ ID NO: 2397248 - DNA, 25 bp, Homo sapien
agctgcagccatccacgcatcgctc

SEQ ID NO: 2397249 - DNA, 25 bp, Homo sapien
ggacacacactgcctatactccata

SEQ ID NO: 2397250 - DNA, 25 bp, Homo sapien
gtccgggcgtactccaggagggcag

SEQ ID NO: 2397251 - DNA, 25 bp, Homo sapien
aaacaccgaggtgctcttcagaagc

SEQ ID NO: 2397252 - DNA, 25 bp, Homo sapien
tgcacgcgctgtggtcggtccagcc

SEQ ID NO: 2397253 - DNA, 25 bp, Homo sapien
gtcggtccagccgtacagcaccatt

SEQ ID NO: 2397254 - DNA, 25 bp, Homo sapien
gctctgcgtctcggggccaacagca

SEQ ID NO: 2397255 - DNA, 25 bp, Homo sapien
tgctctgcgtctcggggccaacagc

SEQ ID NO: 2397256 - DNA, 25 bp, Homo sapien
ctgctctgcgtctcggggccaacag

SEQ ID NO: 2397257 - DNA, 25 bp, Homo sapien
ccctctcagagccgtgaccagacag

SEQ ID NO: 2397258 - DNA, 25 bp, Homo sapien
tcccctctcagagccgtgaccagac

SEQ ID NO: 2397259 - DNA, 25 bp, Homo sapien
ctctcagagccgtgaccagacagag

SEQ ID NO: 2397260 - DNA, 25 bp, Homo sapien
tctcagagccgtgaccagacagagc

SEQ ID NO: 2397261 - DNA, 25 bp, Homo sapien
tcagacagctgtcggaggttgctgc

SEQ ID NO: 2397262 - DNA, 25 bp, Homo sapien
cagacagctgtcggaggttgctgct

SEQ ID NO: 2397263 - DNA, 25 bp, Homo sapien
cttcagacagctgtcggaggttgct

SEQ ID NO: 2397264 - DNA, 25 bp, Homo sapien
cacttcagacagctgtcggaggttg

SEQ ID NO: 2397265 - DNA, 25 bp, Homo sapien
aatagagactgatcgccttgaggag

SEQ ID NO: 2397266 - DNA, 25 bp, Homo sapien
ttgaggaggtgatcctgagcgagga

SEQ ID NO: 2397267 - DNA, 25 bp, Homo sapien
taggtagagtggtaactggtgcact

SEQ ID NO: 2397268 - DNA, 25 bp, Homo sapien
gtaactggtgcactcagtttctcaa

SEQ ID NO: 2397269 - DNA, 25 bp, Homo sapien
ccccagatggaaggatatgagactg

SEQ ID NO: 2397270 - DNA, 25 bp, Homo sapien
aatggccctgcgtaagtccattcct

SEQ ID NO: 2397271 - DNA, 25 bp, Homo sapien
gactctagccacagttagttttgga

SEQ ID NO: 2397272 - DNA, 25 bp, Homo sapien
gcttcaggctcgagatgtattagaa

SEQ ID NO: 2397273 - DNA, 25 bp, Homo sapien
agaaatcacacaccatccaggtgca

SEQ ID NO: 2397274 - DNA, 25 bp, Homo sapien
ttagatccagaaatcacacaccatc

SEQ ID NO: 2397275 - DNA, 25 bp, Homo sapien
tccaggtgcacccaggccagtccac

SEQ ID NO: 2397276 - DNA, 25 bp, Homo sapien
ccagaaatcacacaccatccaggtg

SEQ ID NO: 2397277 - DNA, 25 bp, Homo sapien
ttccccagaggagatgttgcatgag

SEQ ID NO: 2397278 - DNA, 25 bp, Homo sapien
cagaggagatgttgcatgagctgct

SEQ ID NO: 2397279 - DNA, 25 bp, Homo sapien
ctgctgggaggagatgcccgttcac

SEQ ID NO: 2397280 - DNA, 25 bp, Homo sapien
ccccagaggagatgttgcatgagct

SEQ ID NO: 2397281 - DNA, 25 bp, Homo sapien
ctcagagcccatgagttggcaaagt

SEQ ID NO: 2397282 - DNA, 25 bp, Homo sapien
gcaaagtcataagggtccgaggtca

SEQ ID NO: 2397283 - DNA, 25 bp, Homo sapien
tcataagggtccgaggtcaaggtcc

SEQ ID NO: 2397284 - DNA, 25 bp, Homo sapien
tgagttggcaaagtcataagggtcc

SEQ ID NO: 2397285 - DNA, 25 bp, Homo sapien
ggaggcccccatattgatgcatagt

SEQ ID NO: 2397286 - DNA, 25 bp, Homo sapien
caggaaactgatacatgggagaagc

SEQ ID NO: 2397287 - DNA, 25 bp, Homo sapien
gatgcttcccgagagcttctggagg

SEQ ID NO: 2397288 - DNA, 25 bp, Homo sapien
actggaatgatgtagccatgagtca

SEQ ID NO: 2397289 - DNA, 25 bp, Homo sapien
tcagtcactccatatcacacaggtt

SEQ ID NO: 2397290 - DNA, 25 bp, Homo sapien
agccataggcctcaccggacagctt

SEQ ID NO: 2397291 - DNA, 25 bp, Homo sapien
tctgtctgacagcaggacttgaaag

SEQ ID NO: 2397292 - DNA, 25 bp, Homo sapien
agttgccgctgccatcgatcctggc

SEQ ID NO: 2397293 - DNA, 25 bp, Homo sapien
taggcctcaccggacagcttgtagt

SEQ ID NO: 2397294 - DNA, 25 bp, Homo sapien
ctagatacagccctttggaggcata

SEQ ID NO: 2397295 - DNA, 25 bp, Homo sapien
tttggaggcatagggcatggagact

SEQ ID NO: 2397296 - DNA, 25 bp, Homo sapien
cagtttctagatacagccctttgga

SEQ ID NO: 2397297 - DNA, 25 bp, Homo sapien
ccagcctcagtttctagatacagcc

SEQ ID NO: 2397298 - DNA, 25 bp, Homo sapien
gtcacggtaccattgacaaacaaat

SEQ ID NO: 2397299 - DNA, 25 bp, Homo sapien
caaatggatgtcaaaaaattcccca

SEQ ID NO: 2397300 - DNA, 25 bp, Homo sapien
ccctgtgtcacggtaccattgacaa

SEQ ID NO: 2397301 - DNA, 25 bp, Homo sapien
caagatacacggagaggctcactct

SEQ ID NO: 2397302 - DNA, 25 bp, Homo sapien
cacattctgcggagctccagatcaa

SEQ ID NO: 2397303 - DNA, 25 bp, Homo sapien
taaaccacattctgcggagctccag

SEQ ID NO: 2397304 - DNA, 25 bp, Homo sapien
tctgcggagctccagatcaacacaa

SEQ ID NO: 2397305 - DNA, 25 bp, Homo sapien
tccataaaccacattctgcggagct

SEQ ID NO: 2397306 - DNA, 25 bp, Homo sapien
taggcatttgcactgggcccaagac

SEQ ID NO: 2397307 - DNA, 25 bp, Homo sapien
tggcagacaaatgagcccacgaggt

SEQ ID NO: 2397308 - DNA, 25 bp, Homo sapien
aatatgtcacctccgagccaaaggc

SEQ ID NO: 2397309 - DNA, 25 bp, Homo sapien
taagcaaggtactcgttccacagga

SEQ ID NO: 2397310 - DNA, 25 bp, Homo sapien
cagccgtagcttaggaagagcagtc

SEQ ID NO: 2397311 - DNA, 25 bp, Homo sapien
cagcaggctgttggttgttgatggc

SEQ ID NO: 2397312 - DNA, 25 bp, Homo sapien
ttggcaggtatgagagccagatcct

SEQ ID NO: 2397313 - DNA, 25 bp, Homo sapien
atgccacggaaactaaggctccccg

SEQ ID NO: 2397314 - DNA, 25 bp, Homo sapien
tggcaaacagccgtgtcgccttggc

SEQ ID NO: 2397315 - DNA, 25 bp, Homo sapien
aaacagccgtgtcgccttggcctcg

SEQ ID NO: 2397316 - DNA, 25 bp, Homo sapien
gaaccaggactcccatagtctctct

SEQ ID NO: 2397317 - DNA, 25 bp, Homo sapien
ctgtctggcaaacagccgtgtcgcc

SEQ ID NO: 2397318 - DNA, 25 bp, Homo sapien
tcccaggatatgaataaggtccaca

SEQ ID NO: 2397319 - DNA, 25 bp, Homo sapien
cgtgtgcgtacataaacacttttcc

SEQ ID NO: 2397320 - DNA, 25 bp, Homo sapien
cctcgccttggcaccaggtggccct

SEQ ID NO: 2397321 - DNA, 25 bp, Homo sapien
accaggtggcccttcgtgtgcgtac

SEQ ID NO: 2397322 - DNA, 25 bp, Homo sapien
ggtaactgcagtatcccgcaaagct

SEQ ID NO: 2397323 - DNA, 25 bp, Homo sapien
tccgaaaaggctgcatcgggccgtg

SEQ ID NO: 2397324 - DNA, 25 bp, Homo sapien
gctgtacatgctcccatcaaaggtg

SEQ ID NO: 2397325 - DNA, 25 bp, Homo sapien
tcgagaaggagcgtttctggcagcc

SEQ ID NO: 2397326 - DNA, 25 bp, Homo sapien
gctctaggagactttggagcagtca

SEQ ID NO: 2397327 - DNA, 25 bp, Homo sapien
ggtgacctccacaatcttatcgaaa

SEQ ID NO: 2397328 - DNA, 25 bp, Homo sapien
attgtaccatgggaggttcaacaag

SEQ ID NO: 2397329 - DNA, 25 bp, Homo sapien
tccaagtcttggattccttcctcct

SEQ ID NO: 2397330 - DNA, 25 bp, Homo sapien
ttatgcttcttaattccccaacagg

SEQ ID NO: 2397331 - DNA, 25 bp, Homo sapien
ccaacaggagatggcatttgcaggc

SEQ ID NO: 2397332 - DNA, 25 bp, Homo sapien
tcttaattccccaacaggagatggc

SEQ ID NO: 2397333 - DNA, 25 bp, Homo sapien
cagttctgtgccacctttatgcttc

SEQ ID NO: 2397334 - DNA, 25 bp, Homo sapien
gaactccgcagaaccttcacaggag

SEQ ID NO: 2397335 - DNA, 25 bp, Homo sapien
tacaagtcaagggtgggaactccgc

SEQ ID NO: 2397336 - DNA, 25 bp, Homo sapien
gaggcaaccaacagcctaagttagg

SEQ ID NO: 2397337 - DNA, 25 bp, Homo sapien
gcagaaccttcacaggaggcaacca

SEQ ID NO: 2397338 - DNA, 25 bp, Homo sapien
gattcccggaaaggtgtcactccag

SEQ ID NO: 2397339 - DNA, 25 bp, Homo sapien
ctgattcccggaaaggtgtcactcc

SEQ ID NO: 2397340 - DNA, 25 bp, Homo sapien
ctgctgattcccggaaaggtgtcac

SEQ ID NO: 2397341 - DNA, 25 bp, Homo sapien
tgctgattcccggaaaggtgtcact

SEQ ID NO: 2397342 - DNA, 25 bp, Homo sapien
caggaatgagaaatggaggcccttt

SEQ ID NO: 2397343 - DNA, 25 bp, Homo sapien
gcaggaatgagaaatggaggccctt

SEQ ID NO: 2397344 - DNA, 25 bp, Homo sapien
gaatgagaaatggaggcccttttgt

SEQ ID NO: 2397345 - DNA, 25 bp, Homo sapien
tgagaaatggaggcccttttgtacc

SEQ ID NO: 2397346 - DNA, 25 bp, Homo sapien
gcaccccggcaaatctggcaggaat

SEQ ID NO: 2397347 - DNA, 25 bp, Homo sapien
ctggcaaaatgagggccagagcaag

SEQ ID NO: 2397348 - DNA, 25 bp, Homo sapien
ccccggcaaatctggcaggaatcat

SEQ ID NO: 2397349 - DNA, 25 bp, Homo sapien
aatgagggccagagcaagcagcacc

SEQ ID NO: 2397350 - DNA, 25 bp, Homo sapien
tctgtggaaggaacactgagatgtc

SEQ ID NO: 2397351 - DNA, 25 bp, Homo sapien
aacaaagcccttctagtccagcgac

SEQ ID NO: 2397352 - DNA, 25 bp, Homo sapien
atactgccaggtctcggtctccaag

SEQ ID NO: 2397353 - DNA, 25 bp, Homo sapien
cagaggtgagggcaaacttcattcc

SEQ ID NO: 2397354 - DNA, 25 bp, Homo sapien
caaatgagggctgcggctatctcca

SEQ ID NO: 2397355 - DNA, 25 bp, Homo sapien
cccctgcaaatgagggctgcggcta

SEQ ID NO: 2397356 - DNA, 25 bp, Homo sapien
gctgctggacaatggtgccgcccac

SEQ ID NO: 2397357 - DNA, 25 bp, Homo sapien
tgcaaatgagggctgcggctatctc

SEQ ID NO: 2397358 - DNA, 25 bp, Homo sapien
ctgctgcaaaggctcaatcaggtct

SEQ ID NO: 2397359 - DNA, 25 bp, Homo sapien
cggactgtcttgctgttatgtagcc

SEQ ID NO: 2397360 - DNA, 25 bp, Homo sapien
gctacagctccggactgtcttgctg

SEQ ID NO: 2397361 - DNA, 25 bp, Homo sapien
gctgcaaaggctcaatcaggtctgc

SEQ ID NO: 2397362 - DNA, 25 bp, Homo sapien
ctgggggagataaagcccaagctgt

SEQ ID NO: 2397363 - DNA, 25 bp, Homo sapien
ggggagataaagcccaagctgtgac

SEQ ID NO: 2397364 - DNA, 25 bp, Homo sapien
ggagataaagcccaagctgtgacat

SEQ ID NO: 2397365 - DNA, 25 bp, Homo sapien
tgggggagataaagcccaagctgtg

SEQ ID NO: 2397366 - DNA, 25 bp, Homo sapien
gcacccggccgacaagcatgttcaa

SEQ ID NO: 2397367 - DNA, 25 bp, Homo sapien
cggccgacaagcatgttcaatgtca

SEQ ID NO: 2397368 - DNA, 25 bp, Homo sapien
cacccggccgacaagcatgttcaat

SEQ ID NO: 2397369 - DNA, 25 bp, Homo sapien
cccggccgacaagcatgttcaatgt

SEQ ID NO: 2397370 - DNA, 25 bp, Homo sapien
ccaaggaagttgttgcctgctctcc

SEQ ID NO: 2397371 - DNA, 25 bp, Homo sapien
cagaagatagcactcgtcactgtgg

SEQ ID NO: 2397372 - DNA, 25 bp, Homo sapien
gatagcactcgtcactgtggttggg

SEQ ID NO: 2397373 - DNA, 25 bp, Homo sapien
ttggggaaattgcacggtgaaagtc

SEQ ID NO: 2397374 - DNA, 25 bp, Homo sapien
cttgagctgctagattcggtcagaa

SEQ ID NO: 2397375 - DNA, 25 bp, Homo sapien
tgagctgctagattcggtcagaagc

SEQ ID NO: 2397376 - DNA, 25 bp, Homo sapien
gacttgagctgctagattcggtcag

SEQ ID NO: 2397377 - DNA, 25 bp, Homo sapien
tttgacttgagctgctagattcggt

SEQ ID NO: 2397378 - DNA, 25 bp, Homo sapien
tcagattcccaccagagcggaagaa

SEQ ID NO: 2397379 - DNA, 25 bp, Homo sapien
aggaaccaagcagaactgctatcat

SEQ ID NO: 2397380 - DNA, 25 bp, Homo sapien
ggtggcgggtagcaccgaggccggc

SEQ ID NO: 2397381 - DNA, 25 bp, Homo sapien
tggcatgcggcccaatgctgatcac

SEQ ID NO: 2397382 - DNA, 25 bp, Homo sapien
tgggtgccgggccaggacgatgatc

SEQ ID NO: 2397383 - DNA, 25 bp, Homo sapien
caggacgatgatcagggagagagga

SEQ ID NO: 2397384 - DNA, 25 bp, Homo sapien
cgggccaggacgatgatcagggaga

SEQ ID NO: 2397385 - DNA, 25 bp, Homo sapien
gtgccgggccaggacgatgatcagg

SEQ ID NO: 2397386 - DNA, 25 bp, Homo sapien
ttggctcacactctggagtagacgg

SEQ ID NO: 2397387 - DNA, 25 bp, Homo sapien
gacgggcagatgcaagcacatggct

SEQ ID NO: 2397388 - DNA, 25 bp, Homo sapien
gagttcagtgtagctgtgttgcagc

SEQ ID NO: 2397389 - DNA, 25 bp, Homo sapien
aggcctccgttctcccgcttgccag

SEQ ID NO: 2397390 - DNA, 25 bp, Homo sapien
agaggggacatgaggcccctttgat

SEQ ID NO: 2397391 - DNA, 25 bp, Homo sapien
ctcagaggggacatgaggccccttt

SEQ ID NO: 2397392 - DNA, 25 bp, Homo sapien
tgcttgataggggtaaggtccctca

SEQ ID NO: 2397393 - DNA, 25 bp, Homo sapien
ttgataggggtaaggtccctcagag

SEQ ID NO: 2397394 - DNA, 25 bp, Homo sapien
ctctgttggccggatgccctccagg

SEQ ID NO: 2397395 - DNA, 25 bp, Homo sapien
tctgttggccggatgccctccaggt

SEQ ID NO: 2397396 - DNA, 25 bp, Homo sapien
tgttggccggatgccctccaggtcc

SEQ ID NO: 2397397 - DNA, 25 bp, Homo sapien
ctgttggccggatgccctccaggtc

SEQ ID NO: 2397398 - DNA, 25 bp, Homo sapien
tcacgccatgaagatggctgcctcc

SEQ ID NO: 2397399 - DNA, 25 bp, Homo sapien
cacgccatgaagatggctgcctcct

SEQ ID NO: 2397400 - DNA, 25 bp, Homo sapien
acgccatgaagatggctgcctcctc

SEQ ID NO: 2397401 - DNA, 25 bp, Homo sapien
aggaaggcggcgtctgggatacctc

SEQ ID NO: 2397402 - DNA, 25 bp, Homo sapien
gaggaaggcggcgtctgggatacct

SEQ ID NO: 2397403 - DNA, 25 bp, Homo sapien
gaaggcggcgtctgggatacctcct

SEQ ID NO: 2397404 - DNA, 25 bp, Homo sapien
ggaaggcggcgtctgggatacctcc

SEQ ID NO: 2397405 - DNA, 25 bp, Homo sapien
gctgaggcatcgcaacctttgccag

SEQ ID NO: 2397406 - DNA, 25 bp, Homo sapien
gcatcgcaacctttgccaggaatgc

SEQ ID NO: 2397407 - DNA, 25 bp, Homo sapien
accctgctgaggcatcgcaaccttt

SEQ ID NO: 2397408 - DNA, 25 bp, Homo sapien
gaggcatcgcaacctttgccaggaa

SEQ ID NO: 2397409 - DNA, 25 bp, Homo sapien
acaatctggcttcctcggagcccat

SEQ ID NO: 2397410 - DNA, 25 bp, Homo sapien
tgggccccagtacggccatccagag

SEQ ID NO: 2397411 - DNA, 25 bp, Homo sapien
agtacggccatccagagtggccagg

SEQ ID NO: 2397412 - DNA, 25 bp, Homo sapien
agagtgcagggtaacacgggcctcc

SEQ ID NO: 2397413 - DNA, 25 bp, Homo sapien
catatactaaggaggacagaccctg

SEQ ID NO: 2397414 - DNA, 25 bp, Homo sapien
caaacagaggttaaggcgagagagc

SEQ ID NO: 2397415 - DNA, 25 bp, Homo sapien
tggtgcctcccagcaatgacgtaag

SEQ ID NO: 2397416 - DNA, 25 bp, Homo sapien
tctggcatatgagagggaacccctc

SEQ ID NO: 2397417 - DNA, 25 bp, Homo sapien
ggagcctctcggactcagattgacg

SEQ ID NO: 2397418 - DNA, 25 bp, Homo sapien
tctcccaagatagatggacgcaggc

SEQ ID NO: 2397419 - DNA, 25 bp, Homo sapien
tctgtggcaggcaggttctaaggcc

SEQ ID NO: 2397420 - DNA, 25 bp, Homo sapien
taataggaataggagcaacaggcag

SEQ ID NO: 2397421 - DNA, 25 bp, Homo sapien
tagctcgcctaggatttgagctggg

SEQ ID NO: 2397422 - DNA, 25 bp, Homo sapien
ccctctttgggccaaggccaaggag

SEQ ID NO: 2397423 - DNA, 25 bp, Homo sapien
tgagcagtatggcttgtgaccgggt

SEQ ID NO: 2397424 - DNA, 25 bp, Homo sapien
caagtccctccgagtgccagagagg

SEQ ID NO: 2397425 - DNA, 25 bp, Homo sapien
tagtcaagcgcggtagtgagaaaca

SEQ ID NO: 2397426 - DNA, 25 bp, Homo sapien
ctgacgtgagcaatccattgagata

SEQ ID NO: 2397427 - DNA, 25 bp, Homo sapien
agtcaagcgcggtagtgagaaacag

SEQ ID NO: 2397428 - DNA, 25 bp, Homo sapien
ctgtaactgacgtgagcaatccatt

SEQ ID NO: 2397429 - DNA, 25 bp, Homo sapien
tctgcattgctagataaaagctgaa

SEQ ID NO: 2397430 - DNA, 25 bp, Homo sapien
atattgacatttgtagttgagcggg

SEQ ID NO: 2397431 - DNA, 25 bp, Homo sapien
gctagactctagacaagatattgta

SEQ ID NO: 2397432 - DNA, 25 bp, Homo sapien
gcagaaatcctgcaatgaaaggtac

SEQ ID NO: 2397433 - DNA, 25 bp, Homo sapien
agtaacttcttcgaaatgctccgaa

SEQ ID NO: 2397434 - DNA, 25 bp, Homo sapien
acttcttcgaaatgctccgaaaatg

SEQ ID NO: 2397435 - DNA, 25 bp, Homo sapien
ttcttcgaaatgctccgaaaatgcc

SEQ ID NO: 2397436 - DNA, 25 bp, Homo sapien
taacttcttcgaaatgctccgaaaa

SEQ ID NO: 2397437 - DNA, 25 bp, Homo sapien
gccccatgtctacacagtgaagaca

SEQ ID NO: 2397438 - DNA, 25 bp, Homo sapien
ttcaacctacttggcaccaggcccc

SEQ ID NO: 2397439 - DNA, 25 bp, Homo sapien
atttcaacctacttggcaccaggcc

SEQ ID NO: 2397440 - DNA, 25 bp, Homo sapien
aacctacttggcaccaggccccatg

SEQ ID NO: 2397441 - DNA, 25 bp, Homo sapien
gcatctcagattacacctgggaggc

SEQ ID NO: 2397442 - DNA, 25 bp, Homo sapien
caagaatggccctctaaacttcagg

SEQ ID NO: 2397443 - DNA, 25 bp, Homo sapien
aaaaaggtgtcctgagacagccgcc

SEQ ID NO: 2397444 - DNA, 25 bp, Homo sapien
aaatgaatgattggctatgacgccc

SEQ ID NO: 2397445 - DNA, 25 bp, Homo sapien
ccccttcattgttgagacattctca

SEQ ID NO: 2397446 - DNA, 25 bp, Homo sapien
gagacattctcagtagcagtcaggg

SEQ ID NO: 2397447 - DNA, 25 bp, Homo sapien
gaccaaggagaattcaacagaagag

SEQ ID NO: 2397448 - DNA, 25 bp, Homo sapien
cagaatgtatccaaaaggggtgacc

SEQ ID NO: 2397449 - DNA, 25 bp, Homo sapien
cagggagctgcagattctagacaga

SEQ ID NO: 2397450 - DNA, 25 bp, Homo sapien
agggagctgcagattctagacagac

SEQ ID NO: 2397451 - DNA, 25 bp, Homo sapien
catttcctaattcaaaatcatagag

SEQ ID NO: 2397452 - DNA, 25 bp, Homo sapien
tgttggtatcctttaacctacaatg

SEQ ID NO: 2397453 - DNA, 25 bp, Homo sapien
aaaagagttgtttgcgtattctgga

SEQ ID NO: 2397454 - DNA, 25 bp, Homo sapien
ggatgttaggcccttatcaggtaga

SEQ ID NO: 2397455 - DNA, 25 bp, Homo sapien
tgccatgaattcttgagcaagggtg

SEQ ID NO: 2397456 - DNA, 25 bp, Homo sapien
catgaattcttgagcaagggtgaaa

SEQ ID NO: 2397457 - DNA, 25 bp, Homo sapien
caccgtgcatagccctgccatgaat

SEQ ID NO: 2397458 - DNA, 25 bp, Homo sapien
cctgccatgaattcttgagcaaggg

SEQ ID NO: 2397459 - DNA, 25 bp, Homo sapien
cagcgctttgaaattgaggcagcca

SEQ ID NO: 2397460 - DNA, 25 bp, Homo sapien
ttccactaggctggactgactggca

SEQ ID NO: 2397461 - DNA, 25 bp, Homo sapien
gccaagatataacctagtggagata

SEQ ID NO: 2397462 - DNA, 25 bp, Homo sapien
gactggcaagtgacatcattctggt

SEQ ID NO: 2397463 - DNA, 25 bp, Homo sapien
cctctgtccgcatcgtaagtgctgg

SEQ ID NO: 2397464 - DNA, 25 bp, Homo sapien
ggcatctgtgactctacctcaagga

SEQ ID NO: 2397465 - DNA, 25 bp, Homo sapien
cccgttgccactgaatgtcgcctaa

SEQ ID NO: 2397466 - DNA, 25 bp, Homo sapien
gaatgcagaggacctttggcatgca

SEQ ID NO: 2397467 - DNA, 25 bp, Homo sapien
gtgctcgcccctgccttaggacagt

SEQ ID NO: 2397468 - DNA, 25 bp, Homo sapien
tgaaggccccattgttccgtgctcg

SEQ ID NO: 2397469 - DNA, 25 bp, Homo sapien
caggagtgccaagtttctattagtg

SEQ ID NO: 2397470 - DNA, 25 bp, Homo sapien
gacagttcagcttgctatgtgcttg

SEQ ID NO: 2397471 - DNA, 25 bp, Homo sapien
tgaaaaaggctcagggacgaaccag

SEQ ID NO: 2397472 - DNA, 25 bp, Homo sapien
gtgaaaaaggctcagggacgaacca

SEQ ID NO: 2397473 - DNA, 25 bp, Homo sapien
gacgaaccaggggcccccgagcagc

SEQ ID NO: 2397474 - DNA, 25 bp, Homo sapien
tgtgaaaaaggctcagggacgaacc

SEQ ID NO: 2397475 - DNA, 25 bp, Homo sapien
tgaggcatagcgtccctcatcctcg

SEQ ID NO: 2397476 - DNA, 25 bp, Homo sapien
ggtgaggacacccaaaacgggcatg

SEQ ID NO: 2397477 - DNA, 25 bp, Homo sapien
ggacacccaaaacgggcatgaggca

SEQ ID NO: 2397478 - DNA, 25 bp, Homo sapien
acgggcatgaggcatagcgtccctc

SEQ ID NO: 2397479 - DNA, 25 bp, Homo sapien
gctcttgagcccacggcgcacctct

SEQ ID NO: 2397480 - DNA, 25 bp, Homo sapien
gcgcgcacagcgctgactgtcggcg

SEQ ID NO: 2397481 - DNA, 25 bp, Homo sapien
agcgctgactgtcggcggcgcgcag

SEQ ID NO: 2397482 - DNA, 25 bp, Homo sapien
tctctccgcgcgcacagcgctgact

SEQ ID NO: 2397483 - DNA, 25 bp, Homo sapien
gtaggcggctgctagctcctgcttg

SEQ ID NO: 2397484 - DNA, 25 bp, Homo sapien
agtaggcggctgctagctcctgctt

SEQ ID NO: 2397485 - DNA, 25 bp, Homo sapien
ggcgatctcgcaggacggtccttag

SEQ ID NO: 2397486 - DNA, 25 bp, Homo sapien
aaagtggggttggaaggcgatctcg

SEQ ID NO: 2397487 - DNA, 25 bp, Homo sapien
cgatctcgcaggacggtccttagag

SEQ ID NO: 2397488 - DNA, 25 bp, Homo sapien
ggaaggcgatctcgcaggacggtcc

SEQ ID NO: 2397489 - DNA, 25 bp, Homo sapien
agcccagcaggtccatgtcgcggag

SEQ ID NO: 2397490 - DNA, 25 bp, Homo sapien
tcatctgagaagactgggcgcgggc

SEQ ID NO: 2397491 - DNA, 25 bp, Homo sapien
ccagcaggtccatgtcgcggagcac

SEQ ID NO: 2397492 - DNA, 25 bp, Homo sapien
gggccgcaaagcgcctcctcgatgt

SEQ ID NO: 2397493 - DNA, 25 bp, Homo sapien
atctcgtggtcgctcagccctaggc

SEQ ID NO: 2397494 - DNA, 25 bp, Homo sapien
agcatgctgtattgcgcctcgcgca

SEQ ID NO: 2397495 - DNA, 25 bp, Homo sapien
taggcgccgcacgaattccttccag

SEQ ID NO: 2397496 - DNA, 25 bp, Homo sapien
agctccagccgatcgatctcgtggt

SEQ ID NO: 2397497 - DNA, 25 bp, Homo sapien
tgtggcttgtgggcgctgtcctccc

SEQ ID NO: 2397498 - DNA, 25 bp, Homo sapien
ctgtggcttgtgggcgctgtcctcc

SEQ ID NO: 2397499 - DNA, 25 bp, Homo sapien
cccctgatagggtggtgccacctct

SEQ ID NO: 2397500 - DNA, 25 bp, Homo sapien
gccccctgatagggtggtgccacct

SEQ ID NO: 2397501 - DNA, 25 bp, Homo sapien
tcagccccctgatagggtggtgcca

SEQ ID NO: 2397502 - DNA, 25 bp, Homo sapien
cagccccctgatagggtggtgccac

SEQ ID NO: 2397503 - DNA, 25 bp, Homo sapien
ccgcaaagttgggacagtcaccggg

SEQ ID NO: 2397504 - DNA, 25 bp, Homo sapien
tgaagcctggagtgggactgaagct

SEQ ID NO: 2397505 - DNA, 25 bp, Homo sapien
caggggcttagtagtagttccttca

SEQ ID NO: 2397506 - DNA, 25 bp, Homo sapien
aactgggcacgggactgaagcccag

SEQ ID NO: 2397507 - DNA, 25 bp, Homo sapien
ttttcaggtgtcgatttcccacaaa

SEQ ID NO: 2397508 - DNA, 25 bp, Homo sapien
tctttttcaggtgtcgatttcccac

SEQ ID NO: 2397509 - DNA, 25 bp, Homo sapien
ctctttttcaggtgtcgatttccca

SEQ ID NO: 2397510 - DNA, 25 bp, Homo sapien
ctttttcaggtgtcgatttcccaca

SEQ ID NO: 2397511 - DNA, 25 bp, Homo sapien
atgtccatcgcacccacccatgtcc

SEQ ID NO: 2397512 - DNA, 25 bp, Homo sapien
acacatgtccatcgcacccacccat

SEQ ID NO: 2397513 - DNA, 25 bp, Homo sapien
ccacacatgtccatcgcacccaccc

SEQ ID NO: 2397514 - DNA, 25 bp, Homo sapien
acatgtccatcgcacccacccatgt

SEQ ID NO: 2397515 - DNA, 25 bp, Homo sapien
cttggacttccaccgttggtagcga

SEQ ID NO: 2397516 - DNA, 25 bp, Homo sapien
ccgttggtagcgatacattaaacca

SEQ ID NO: 2397517 - DNA, 25 bp, Homo sapien
gatacattaaaccaatgaagaggag

SEQ ID NO: 2397518 - DNA, 25 bp, Homo sapien
aatggagtagagcttggacttccac

SEQ ID NO: 2397519 - DNA, 25 bp, Homo sapien
caacttcgtgcactccaggcttttc

SEQ ID NO: 2397520 - DNA, 25 bp, Homo sapien
tgagtcctcagtgcccttaacattc

SEQ ID NO: 2397521 - DNA, 25 bp, Homo sapien
ctgagtcctcagtgcccttaacatt

SEQ ID NO: 2397522 - DNA, 25 bp, Homo sapien
ggcacaacttcgtgcactccaggct

SEQ ID NO: 2397523 - DNA, 25 bp, Homo sapien
gaagagacggcactggtgaacagag

SEQ ID NO: 2397524 - DNA, 25 bp, Homo sapien
aagaagagacggcactggtgaacag

SEQ ID NO: 2397525 - DNA, 25 bp, Homo sapien
aaagaagagacggcactggtgaaca

SEQ ID NO: 2397526 - DNA, 25 bp, Homo sapien
agagacggcactggtgaacagaggc

SEQ ID NO: 2397527 - DNA, 25 bp, Homo sapien
tgcttgagaaggtagccagctagct

SEQ ID NO: 2397528 - DNA, 25 bp, Homo sapien
tcagggtcagggtgtaaattccagt

SEQ ID NO: 2397529 - DNA, 25 bp, Homo sapien
cagagagcaccctgtagaactagca

SEQ ID NO: 2397530 - DNA, 25 bp, Homo sapien
gctagttacagtacctgacttcggg

SEQ ID NO: 2397531 - DNA, 25 bp, Homo sapien
cctgcatggcaggtgcacacggtgt

SEQ ID NO: 2397532 - DNA, 25 bp, Homo sapien
gacacactcgttttctcttagaaag

SEQ ID NO: 2397533 - DNA, 25 bp, Homo sapien
tacaggagacacactcgttttctct

SEQ ID NO: 2397534 - DNA, 25 bp, Homo sapien
caggtgcacacggtgttctgtttct

SEQ ID NO: 2397535 - DNA, 25 bp, Homo sapien
agaggtgcacggtcccattgaggca

SEQ ID NO: 2397536 - DNA, 25 bp, Homo sapien
ggtgtcccggtccactgtgcaagaa

SEQ ID NO: 2397537 - DNA, 25 bp, Homo sapien
taatgccggtactggttcttcctgc

SEQ ID NO: 2397538 - DNA, 25 bp, Homo sapien
cagaggctgcaattgaagcactgga

SEQ ID NO: 2397539 - DNA, 25 bp, Homo sapien
gggcctggacagtcattgtacaagt

SEQ ID NO: 2397540 - DNA, 25 bp, Homo sapien
ttttctgaagcggtgaaggagccgc

SEQ ID NO: 2397541 - DNA, 25 bp, Homo sapien
aagcggtgaaggagccgctctcaca

SEQ ID NO: 2397542 - DNA, 25 bp, Homo sapien
tcacactccctgcagtccgtatcct

SEQ ID NO: 2397543 - DNA, 25 bp, Homo sapien
ctgtgaatggggccgcagagttagg

SEQ ID NO: 2397544 - DNA, 25 bp, Homo sapien
tccctgtcccctaggtgagggacca

SEQ ID NO: 2397545 - DNA, 25 bp, Homo sapien
tattttgagggtggatatattttcc

SEQ ID NO: 2397546 - DNA, 25 bp, Homo sapien
gagggaccagtccaataacccctga

SEQ ID NO: 2397547 - DNA, 25 bp, Homo sapien
ggcacttggtacagcaaatcgaatt

SEQ ID NO: 2397548 - DNA, 25 bp, Homo sapien
cagtgatgcaatcactgcaccctcc

SEQ ID NO: 2397549 - DNA, 25 bp, Homo sapien
aatgaggatctatgcacatcccagg

SEQ ID NO: 2397550 - DNA, 25 bp, Homo sapien
gttcaccgtgtgatcgctttgcgaa

SEQ ID NO: 2397551 - DNA, 25 bp, Homo sapien
gcgaacattcacagaggtaaacaat

SEQ ID NO: 2397552 - DNA, 25 bp, Homo sapien
ttccaacaagcagccctaaagattg

SEQ ID NO: 2397553 - DNA, 25 bp, Homo sapien
gggtgtcctcaatgtctgttaaaca

SEQ ID NO: 2397554 - DNA, 25 bp, Homo sapien
gataagagggtgtcctcaatgtctg

SEQ ID NO: 2397555 - DNA, 25 bp, Homo sapien
actttgtgtaaagataagagggtgt

SEQ ID NO: 2397556 - DNA, 25 bp, Homo sapien
tgtgtaaagataagagggtgtcctc

SEQ ID NO: 2397557 - DNA, 25 bp, Homo sapien
tcccagtcctgaaagtgtggttcct

SEQ ID NO: 2397558 - DNA, 25 bp, Homo sapien
tgtgcaggcccggaagttcaagcct

SEQ ID NO: 2397559 - DNA, 25 bp, Homo sapien
aagccactggagcacctaaggtcac

SEQ ID NO: 2397560 - DNA, 25 bp, Homo sapien
caactccacatttcggagcaggagg

SEQ ID NO: 2397561 - DNA, 25 bp, Homo sapien
tgaactcgaagcacgtgaactgacc

SEQ ID NO: 2397562 - DNA, 25 bp, Homo sapien
gacgaatgctgagaacttgccacgc

SEQ ID NO: 2397563 - DNA, 25 bp, Homo sapien
gaaagtgtcttatcctcccctggtg

SEQ ID NO: 2397564 - DNA, 25 bp, Homo sapien
tgtcagttcatcttgcgaggcctcc

SEQ ID NO: 2397565 - DNA, 25 bp, Homo sapien
ggcacagaatgtgccctaggagaac

SEQ ID NO: 2397566 - DNA, 25 bp, Homo sapien
cacttctaatcacagtctgggcaca

SEQ ID NO: 2397567 - DNA, 25 bp, Homo sapien
tcaccaccaggacggaatgtagtgg

SEQ ID NO: 2397568 - DNA, 25 bp, Homo sapien
gaacagcttctgaataaacgaatga

SEQ ID NO: 2397569 - DNA, 25 bp, Homo sapien
gatgattcccggaccaagacgtgga

SEQ ID NO: 2397570 - DNA, 25 bp, Homo sapien
ctatcacagtgtctagcccagagcg

SEQ ID NO: 2397571 - DNA, 25 bp, Homo sapien
tacattgaaacaaggctgaggccag

SEQ ID NO: 2397572 - DNA, 25 bp, Homo sapien
aaatctgcctgactagatgggccca

SEQ ID NO: 2397573 - DNA, 25 bp, Homo sapien
tggctgaggttaggacctgcaggcc

SEQ ID NO: 2397574 - DNA, 25 bp, Homo sapien
cctactccaaaaggcggatgaatgg

SEQ ID NO: 2397575 - DNA, 25 bp, Homo sapien
agcccctactccaaaaggcggatga

SEQ ID NO: 2397576 - DNA, 25 bp, Homo sapien
atgaatggggaaccccacactggca

SEQ ID NO: 2397577 - DNA, 25 bp, Homo sapien
cagtggcagcagcaggtcaggcacg

SEQ ID NO: 2397578 - DNA, 25 bp, Homo sapien
ggtcaggcacggtggagaggcccat

SEQ ID NO: 2397579 - DNA, 25 bp, Homo sapien
tggcagcagcaggtcaggcacggtg

SEQ ID NO: 2397580 - DNA, 25 bp, Homo sapien
agcaggtcaggcacggtggagaggc

SEQ ID NO: 2397581 - DNA, 25 bp, Homo sapien
acagttgagggttgagactcgggca

SEQ ID NO: 2397582 - DNA, 25 bp, Homo sapien
ctgtccaggacgtcccaagtgcctt

SEQ ID NO: 2397583 - DNA, 25 bp, Homo sapien
gcttcccgggactcggtctgtccag

SEQ ID NO: 2397584 - DNA, 25 bp, Homo sapien
ggcatagagatcacggcctggtccc

SEQ ID NO: 2397585 - DNA, 25 bp, Homo sapien
gaatgagaccatcatccctccaggg

SEQ ID NO: 2397586 - DNA, 25 bp, Homo sapien
caggagtaacccatagacaagtgaa

SEQ ID NO: 2397587 - DNA, 25 bp, Homo sapien
tccagatgacgtgggttctagcccc

SEQ ID NO: 2397588 - DNA, 25 bp, Homo sapien
cagactagggatgacagaatcggct

SEQ ID NO: 2397589 - DNA, 25 bp, Homo sapien
tacataaacgggcaagattcagtcc

SEQ ID NO: 2397590 - DNA, 25 bp, Homo sapien
catcaacggcagtttgggcggctct

SEQ ID NO: 2397591 - DNA, 25 bp, Homo sapien
ggaaacccgtgcatgcctgcgtgta

SEQ ID NO: 2397592 - DNA, 25 bp, Homo sapien
tgttatagtgtgctacgggagccca

SEQ ID NO: 2397593 - DNA, 25 bp, Homo sapien
gacaaggacagagacatggggtggg

SEQ ID NO: 2397594 - DNA, 25 bp, Homo sapien
ggacaaggacagagacatggggtgg

SEQ ID NO: 2397595 - DNA, 25 bp, Homo sapien
aggtggaggaactggcccctgcaga

SEQ ID NO: 2397596 - DNA, 25 bp, Homo sapien
ggtggaggaactggcccctgcagag

SEQ ID NO: 2397597 - DNA, 25 bp, Homo sapien
ggagcagcatgaggaacatgatgac

SEQ ID NO: 2397598 - DNA, 25 bp, Homo sapien
cctggagaccagtatcggcttcgga

SEQ ID NO: 2397599 - DNA, 25 bp, Homo sapien
cagcaggtcaaagacgagctcagcc

SEQ ID NO: 2397600 - DNA, 25 bp, Homo sapien
cttcggaaccttcggagcagcatga

SEQ ID NO: 2397601 - DNA, 25 bp, Homo sapien
agactcagaattggttttgtagttc

SEQ ID NO: 2397602 - DNA, 25 bp, Homo sapien
cagagggagactcagaattggtttt

SEQ ID NO: 2397603 - DNA, 25 bp, Homo sapien
gggagactcagaattggttttgtag

SEQ ID NO: 2397604 - DNA, 25 bp, Homo sapien
gagggagactcagaattggttttgt

SEQ ID NO: 2397605 - DNA, 25 bp, Homo sapien
tgtaattgttctgtcgcgatagcat

SEQ ID NO: 2397606 - DNA, 25 bp, Homo sapien
tgttgttgacggtgtaattgttctg

SEQ ID NO: 2397607 - DNA, 25 bp, Homo sapien
ctcttgttgttgacggtgtaattgt

SEQ ID NO: 2397608 - DNA, 25 bp, Homo sapien
tgacggtgtaattgttctgtcgcga

SEQ ID NO: 2397609 - DNA, 25 bp, Homo sapien
ccgagggccatcgtgagtaaccagc

SEQ ID NO: 2397610 - DNA, 25 bp, Homo sapien
gtcaccgagggccatcgtgagtaac

SEQ ID NO: 2397611 - DNA, 25 bp, Homo sapien
ggccatcgtgagtaaccagcagaga

SEQ ID NO: 2397612 - DNA, 25 bp, Homo sapien
ggatgtcaccgagggccatcgtgag

SEQ ID NO: 2397613 - DNA, 25 bp, Homo sapien
tccggcacttggtgaaacagcccag

SEQ ID NO: 2397614 - DNA, 25 bp, Homo sapien
gcttccggcacttggtgaaacagcc

SEQ ID NO: 2397615 - DNA, 25 bp, Homo sapien
tgcatggcttccggcacttggtgaa

SEQ ID NO: 2397616 - DNA, 25 bp, Homo sapien
catggcttccggcacttggtgaaac

SEQ ID NO: 2397617 - DNA, 25 bp, Homo sapien
caacctggagcttatagtagcagta

SEQ ID NO: 2397618 - DNA, 25 bp, Homo sapien
gaagtcaacctggagcttatagtag

SEQ ID NO: 2397619 - DNA, 25 bp, Homo sapien
acctggagcttatagtagcagtacc

SEQ ID NO: 2397620 - DNA, 25 bp, Homo sapien
gtcaacctggagcttatagtagcag

SEQ ID NO: 2397621 - DNA, 25 bp, Homo sapien
gatgtcacttcggaaaacagcctgg

SEQ ID NO: 2397622 - DNA, 25 bp, Homo sapien
aaacctcttatactgctgctaggga

SEQ ID NO: 2397623 - DNA, 25 bp, Homo sapien
caagggagtgttgttattcagccat

SEQ ID NO: 2397624 - DNA, 25 bp, Homo sapien
gacaataacaagaactggcaggatg

SEQ ID NO: 2397625 - DNA, 25 bp, Homo sapien
ccacgttctggggccgcggatagaa

SEQ ID NO: 2397626 - DNA, 25 bp, Homo sapien
cggatagaagatgtaggcacagcca

SEQ ID NO: 2397627 - DNA, 25 bp, Homo sapien
gccgcggatagaagatgtaggcaca

SEQ ID NO: 2397628 - DNA, 25 bp, Homo sapien
agaagatgtaggcacagccacactc

SEQ ID NO: 2397629 - DNA, 25 bp, Homo sapien
ggtaaaggttctcaacaggaacatc

SEQ ID NO: 2397630 - DNA, 25 bp, Homo sapien
ctgtgtgtactttgaagggtaaagg

SEQ ID NO: 2397631 - DNA, 25 bp, Homo sapien
ctgctgtgtgtactttgaagggtaa

SEQ ID NO: 2397632 - DNA, 25 bp, Homo sapien
tgaagggtaaaggttctcaacagga

SEQ ID NO: 2397633 - DNA, 25 bp, Homo sapien
gcagtcgccataatcgcccccaagt

SEQ ID NO: 2397634 - DNA, 25 bp, Homo sapien
gtgcagtcgccataatcgcccccaa

SEQ ID NO: 2397635 - DNA, 25 bp, Homo sapien
ccataatcgcccccaagtctgtcca

SEQ ID NO: 2397636 - DNA, 25 bp, Homo sapien
agtcgccataatcgcccccaagtct

SEQ ID NO: 2397637 - DNA, 25 bp, Homo sapien
ttcctcatgctgatggaggtctcca

SEQ ID NO: 2397638 - DNA, 25 bp, Homo sapien
caggccgcaagttaaagccaccatc

SEQ ID NO: 2397639 - DNA, 25 bp, Homo sapien
ccaggccgcaagttaaagccaccat

SEQ ID NO: 2397640 - DNA, 25 bp, Homo sapien
aggccgcaagttaaagccaccatca

SEQ ID NO: 2397641 - DNA, 25 bp, Homo sapien
gccaggccgcaagttaaagccacca

SEQ ID NO: 2397642 - DNA, 25 bp, Homo sapien
gctctgcgcgcagcatcagggacag

SEQ ID NO: 2397643 - DNA, 25 bp, Homo sapien
tctgcgcgcagcatcagggacagac

SEQ ID NO: 2397644 - DNA, 25 bp, Homo sapien
gaatgaagtcattctgctctgcgcg

SEQ ID NO: 2397645 - DNA, 25 bp, Homo sapien
tcattctgctctgcgcgcagcatca

SEQ ID NO: 2397646 - DNA, 25 bp, Homo sapien
tggcagaggcgggaatcctagaaaa

SEQ ID NO: 2397647 - DNA, 25 bp, Homo sapien
gcaagttcaggaagacccgcaaagg

SEQ ID NO: 2397648 - DNA, 25 bp, Homo sapien
aaagagttaggagatggaaatccac

SEQ ID NO: 2397649 - DNA, 25 bp, Homo sapien
tctaaagctgcaagagaagcaagtt

SEQ ID NO: 2397650 - DNA, 25 bp, Homo sapien
gtcattgaaagtatagcagtttcca

SEQ ID NO: 2397651 - DNA, 25 bp, Homo sapien
tacatcgggtggtggaagtgagagt

SEQ ID NO: 2397652 - DNA, 25 bp, Homo sapien
ttccatacatcgggtggtggaagtg

SEQ ID NO: 2397653 - DNA, 25 bp, Homo sapien
catcgggtggtggaagtgagagtaa

SEQ ID NO: 2397654 - DNA, 25 bp, Homo sapien
ctcaggcttaggtgttgctaccatc

SEQ ID NO: 2397655 - DNA, 25 bp, Homo sapien
ggtataacaacccaggcgagcaatg

SEQ ID NO: 2397656 - DNA, 25 bp, Homo sapien
tgacctaagcgcctaagtgccaaga

SEQ ID NO: 2397657 - DNA, 25 bp, Homo sapien
tttggaggcaaaagaacgcagtagg

SEQ ID NO: 2397658 - DNA, 25 bp, Homo sapien
tctggcagcctcgacaggatgttga

SEQ ID NO: 2397659 - DNA, 25 bp, Homo sapien
agtatgtctggtagaagcagtccga

SEQ ID NO: 2397660 - DNA, 25 bp, Homo sapien
gaagatgaagttgcccagcgtgtcc

SEQ ID NO: 2397661 - DNA, 25 bp, Homo sapien
tgttgatgtagtggaagcggtacca

SEQ ID NO: 2397662 - DNA, 25 bp, Homo sapien
aggctcacagcagtctccatctccc

SEQ ID NO: 2397663 - DNA, 25 bp, Homo sapien
gtgatcaaggctcacagcagtctcc

SEQ ID NO: 2397664 - DNA, 25 bp, Homo sapien
tcacagcagtctccatctcccgagt

SEQ ID NO: 2397665 - DNA, 25 bp, Homo sapien
caaggctcacagcagtctccatctc

SEQ ID NO: 2397666 - DNA, 25 bp, Homo sapien
ctggaggccacgctacgggctcgac

SEQ ID NO: 2397667 - DNA, 25 bp, Homo sapien
agcgtctgctctgtgatgcggtcca

SEQ ID NO: 2397668 - DNA, 25 bp, Homo sapien
ttgttgtcccgcaagctggaggcca

SEQ ID NO: 2397669 - DNA, 25 bp, Homo sapien
ttgtacaggtcaaagagcgtctgct

SEQ ID NO: 2397670 - DNA, 25 bp, Homo sapien
ctgatccccgcaggcgagtgtcggt

SEQ ID NO: 2397671 - DNA, 25 bp, Homo sapien
cagccgggacactgtggactgttta

SEQ ID NO: 2397672 - DNA, 25 bp, Homo sapien
ggcgtgaccgcggtacccaggtcat

SEQ ID NO: 2397673 - DNA, 25 bp, Homo sapien
gccctggagcgagtgtctggcccct

SEQ ID NO: 2397674 - DNA, 25 bp, Homo sapien
taagacttatctggaaatgcaaaca

SEQ ID NO: 2397675 - DNA, 25 bp, Homo sapien
cttggtaaggagagacaatagatca

SEQ ID NO: 2397676 - DNA, 25 bp, Homo sapien
aaactcatgcatagatggtcaactg

SEQ ID NO: 2397677 - DNA, 25 bp, Homo sapien
caaaacaatgcggttcttggtaagg

SEQ ID NO: 2397678 - DNA, 25 bp, Homo sapien
gacacacccaagcacgtaaaggtca

SEQ ID NO: 2397679 - DNA, 25 bp, Homo sapien
cacccaagcacgtaaaggtcaggca

SEQ ID NO: 2397680 - DNA, 25 bp, Homo sapien
gagcaccgatgaaacccaaaagttc

SEQ ID NO: 2397681 - DNA, 25 bp, Homo sapien
tccggtttccagacccaacattggc

SEQ ID NO: 2397682 - DNA, 25 bp, Homo sapien
aagtactctccgaaaagcaggccga

SEQ ID NO: 2397683 - DNA, 25 bp, Homo sapien
tacatcatgccaaaggtgcagagcc

SEQ ID NO: 2397684 - DNA, 25 bp, Homo sapien
tgttgcagaagaactcgaagagctc

SEQ ID NO: 2397685 - DNA, 25 bp, Homo sapien
agcggtggaactcgatcagggcctc

SEQ ID NO: 2397686 - DNA, 25 bp, Homo sapien
gctgcagaggtctagggtcctgctc

SEQ ID NO: 2397687 - DNA, 25 bp, Homo sapien
ctggtatgggctgcagaggtctagg

SEQ ID NO: 2397688 - DNA, 25 bp, Homo sapien
tgggctgcagaggtctagggtcctg

SEQ ID NO: 2397689 - DNA, 25 bp, Homo sapien
cagaggtctagggtcctgctcctcc

SEQ ID NO: 2397690 - DNA, 25 bp, Homo sapien
tgatagggccacctttcgagttttg

SEQ ID NO: 2397691 - DNA, 25 bp, Homo sapien
ccaaaagtgccggagctgggcttcc

SEQ ID NO: 2397692 - DNA, 25 bp, Homo sapien
cggctggactgggactggttccttt

SEQ ID NO: 2397693 - DNA, 25 bp, Homo sapien
gacctcgagctgtgtcctgattctg

SEQ ID NO: 2397694 - DNA, 25 bp, Homo sapien
ctggctggggagcccgcccgctggc

SEQ ID NO: 2397695 - DNA, 25 bp, Homo sapien
gcctggctggggagcccgcccgctg

SEQ ID NO: 2397696 - DNA, 25 bp, Homo sapien
gctggggagcccgcccgctggccgg

SEQ ID NO: 2397697 - DNA, 25 bp, Homo sapien
ctgacaggtgcagcggcctggctgg

SEQ ID NO: 2397698 - DNA, 25 bp, Homo sapien
acgcaggacactgtggacacagacc

SEQ ID NO: 2397699 - DNA, 25 bp, Homo sapien
acacagacccggagcccaggaagag

SEQ ID NO: 2397700 - DNA, 25 bp, Homo sapien
caggaatgtgggcaaccagaggcag

SEQ ID NO: 2397701 - DNA, 25 bp, Homo sapien
cagcgcgagggccacgcaggacact

SEQ ID NO: 2397702 - DNA, 25 bp, Homo sapien
gtctcttgcgacttcttaaagtgaa

SEQ ID NO: 2397703 - DNA, 25 bp, Homo sapien
gaaagccggtgtcaaccaggattcc

SEQ ID NO: 2397704 - DNA, 25 bp, Homo sapien
caggattccaaaccaggttcccttg

SEQ ID NO: 2397705 - DNA, 25 bp, Homo sapien
cctctcttgcggcagtctcttgcga

SEQ ID NO: 2397706 - DNA, 25 bp, Homo sapien
ttacttcctgagacagactcatggg

SEQ ID NO: 2397707 - DNA, 25 bp, Homo sapien
tgacccttcccaaggataaatcagt

SEQ ID NO: 2397708 - DNA, 25 bp, Homo sapien
gggctatctacttagcgcttttgcc

SEQ ID NO: 2397709 - DNA, 25 bp, Homo sapien
caaaataggagcagagctataaaca

SEQ ID NO: 2397710 - DNA, 25 bp, Homo sapien
gaagaggcaaaatgcccagcataga

SEQ ID NO: 2397711 - DNA, 25 bp, Homo sapien
ccaggcgtagctgacggacactgga

SEQ ID NO: 2397712 - DNA, 25 bp, Homo sapien
cagcatagaaatgcgggagtcctcc

SEQ ID NO: 2397713 - DNA, 25 bp, Homo sapien
tacccactgctacagatcacagctg

SEQ ID NO: 2397714 - DNA, 25 bp, Homo sapien
tttatttgatgtatttgactatcag

SEQ ID NO: 2397715 - DNA, 25 bp, Homo sapien
atttgatgtatttgactatcagcga

SEQ ID NO: 2397716 - DNA, 25 bp, Homo sapien
actttatttgatgtatttgactatc

SEQ ID NO: 2397717 - DNA, 25 bp, Homo sapien
tatttgatgtatttgactatcagcg

SEQ ID NO: 2397718 - DNA, 25 bp, Homo sapien
tggtagcaaatacataggtaaccaa

SEQ ID NO: 2397719 - DNA, 25 bp, Homo sapien
agtggtagcaaatacataggtaacc

SEQ ID NO: 2397720 - DNA, 25 bp, Homo sapien
tgaaagtggtagcaaatacataggt

SEQ ID NO: 2397721 - DNA, 25 bp, Homo sapien
ttttgaaagtggtagcaaatacata

SEQ ID NO: 2397722 - DNA, 25 bp, Homo sapien
ttatttgtgaatcttcatcctcatt

SEQ ID NO: 2397723 - DNA, 25 bp, Homo sapien
atttgtgaatcttcatcctcattac

SEQ ID NO: 2397724 - DNA, 25 bp, Homo sapien
cttatttgtgaatcttcatcctcat

SEQ ID NO: 2397725 - DNA, 25 bp, Homo sapien
tatttgtgaatcttcatcctcatta

SEQ ID NO: 2397726 - DNA, 25 bp, Homo sapien
ctactccacaaatgcgcttgtgaat

SEQ ID NO: 2397727 - DNA, 25 bp, Homo sapien
gcacatggattcggtgtcggacatt

SEQ ID NO: 2397728 - DNA, 25 bp, Homo sapien
tatatactcctggattatagattag

SEQ ID NO: 2397729 - DNA, 25 bp, Homo sapien
ggttatatactcctggattatagat

SEQ ID NO: 2397730 - DNA, 25 bp, Homo sapien
gcatggttatatactcctggattat

SEQ ID NO: 2397731 - DNA, 25 bp, Homo sapien
tactcctggattatagattagaagt

SEQ ID NO: 2397732 - DNA, 25 bp, Homo sapien
ggaacatttacaaccacatactagg

SEQ ID NO: 2397733 - DNA, 25 bp, Homo sapien
tgttacagctctacaggtcagaagt

SEQ ID NO: 2397734 - DNA, 25 bp, Homo sapien
taggccatagagcaaatctcaaaca

SEQ ID NO: 2397735 - DNA, 25 bp, Homo sapien
tcaccaggctacaatcagtgatggc

SEQ ID NO: 2397736 - DNA, 25 bp, Homo sapien
tgccatattaacatgcagttcaggg

SEQ ID NO: 2397737 - DNA, 25 bp, Homo sapien
tatagcaaagctgatgagatgtagc

SEQ ID NO: 2397738 - DNA, 25 bp, Homo sapien
gaataatcacccattgcaaggccaa

SEQ ID NO: 2397739 - DNA, 25 bp, Homo sapien
tgctacacagacagagtgctcgggc

SEQ ID NO: 2397740 - DNA, 25 bp, Homo sapien
tggtgtgtcaactccgtcagggcag

SEQ ID NO: 2397741 - DNA, 25 bp, Homo sapien
gagacacggaggcaagaacaagact

SEQ ID NO: 2397742 - DNA, 25 bp, Homo sapien
tactggaactcatgcaggtggacag

SEQ ID NO: 2397743 - DNA, 25 bp, Homo sapien
gacatctaggctacagtcactgggc

SEQ ID NO: 2397744 - DNA, 25 bp, Homo sapien
acagaaaagtcctcacggccacaac

SEQ ID NO: 2397745 - DNA, 25 bp, Homo sapien
ggttttgcataaacagctctctgaa

SEQ ID NO: 2397746 - DNA, 25 bp, Homo sapien
ggccacaacactctctgcggtggga

SEQ ID NO: 2397747 - DNA, 25 bp, Homo sapien
cggtgggaattcaggtgccttgcct

SEQ ID NO: 2397748 - DNA, 25 bp, Homo sapien
ctcagaaggctgaagtgagaagatc

SEQ ID NO: 2397749 - DNA, 25 bp, Homo sapien
actccagcttgggagacagagtgag

SEQ ID NO: 2397750 - DNA, 25 bp, Homo sapien
acttgagtccaggaagtggaggctg

SEQ ID NO: 2397751 - DNA, 25 bp, Homo sapien
cagtgagccgtgactgtaccactgc

SEQ ID NO: 2397752 - DNA, 25 bp, Homo sapien
tgttccaaactagcccaatccatga

SEQ ID NO: 2397753 - DNA, 25 bp, Homo sapien
tagatcccaaagtaccacagcagca

SEQ ID NO: 2397754 - DNA, 25 bp, Homo sapien
tcccttttggcggagacccttgtca

SEQ ID NO: 2397755 - DNA, 25 bp, Homo sapien
gaattttgagcccaggttatacctg

SEQ ID NO: 2397756 - DNA, 25 bp, Homo sapien
gtcacagggccataaggatgccaag

SEQ ID NO: 2397757 - DNA, 25 bp, Homo sapien
tagtagcaactcagagtcagcattc

SEQ ID NO: 2397758 - DNA, 25 bp, Homo sapien
gaaggaatttgtccctctccttgtc

SEQ ID NO: 2397759 - DNA, 25 bp, Homo sapien
gtcagcattcattagcaggtcacag

SEQ ID NO: 2397760 - DNA, 25 bp, Homo sapien
taagttccaggcaactctctgtgcc

SEQ ID NO: 2397761 - DNA, 25 bp, Homo sapien
ggtagcggtgataccccaaccagta

SEQ ID NO: 2397762 - DNA, 25 bp, Homo sapien
tctctgtgccatcacgtggggtagc

SEQ ID NO: 2397763 - DNA, 25 bp, Homo sapien
tcctacccctagataaggtcagcct

SEQ ID NO: 2397764 - DNA, 25 bp, Homo sapien
tgggcacatgcagactctggctgac

SEQ ID NO: 2397765 - DNA, 25 bp, Homo sapien
caggccttcagatgtgccctatggg

SEQ ID NO: 2397766 - DNA, 25 bp, Homo sapien
gggtcccctgctgctactcattctg

SEQ ID NO: 2397767 - DNA, 25 bp, Homo sapien
tccccaccgctagagagaatgcata

SEQ ID NO: 2397768 - DNA, 25 bp, Homo sapien
ttggccaacggtggcgggtgggata

SEQ ID NO: 2397769 - DNA, 25 bp, Homo sapien
caacggtggcgggtgggatagaata

SEQ ID NO: 2397770 - DNA, 25 bp, Homo sapien
gagaggagttggccaacggtggcgg

SEQ ID NO: 2397771 - DNA, 25 bp, Homo sapien
aggagttggccaacggtggcgggtg

SEQ ID NO: 2397772 - DNA, 25 bp, Homo sapien
cgattttattcgcatccttgtgatc

SEQ ID NO: 2397773 - DNA, 25 bp, Homo sapien
tattcgcatccttgtgatcttctct

SEQ ID NO: 2397774 - DNA, 25 bp, Homo sapien
gcagctccgattttattcgcatcct

SEQ ID NO: 2397775 - DNA, 25 bp, Homo sapien
agatccctgtgcagctccgatttta

SEQ ID NO: 2397776 - DNA, 25 bp, Homo sapien
tgttcctccatcaacgaaggaaata

SEQ ID NO: 2397777 - DNA, 25 bp, Homo sapien
ccgccgaccatccaagggagagtga

SEQ ID NO: 2397778 - DNA, 25 bp, Homo sapien
tgctggccaagactcatcggatctc

SEQ ID NO: 2397779 - DNA, 25 bp, Homo sapien
tctccccttagctggcgtgctcctg

SEQ ID NO: 2397780 - DNA, 25 bp, Homo sapien
aactgcagtcccatcctcttgtcag

SEQ ID NO: 2397781 - DNA, 25 bp, Homo sapien
tcccatcctcttgtcagggcccttt

SEQ ID NO: 2397782 - DNA, 25 bp, Homo sapien
tgcagtcccatcctcttgtcagggc

SEQ ID NO: 2397783 - DNA, 25 bp, Homo sapien
gccacaactgcagtcccatcctctt

SEQ ID NO: 2397784 - DNA, 25 bp, Homo sapien
gactagcaggtgctctccagaaagc

SEQ ID NO: 2397785 - DNA, 25 bp, Homo sapien
aacagctaggatcttggatggcaac

SEQ ID NO: 2397786 - DNA, 25 bp, Homo sapien
caagaagtatttgcctggactagca

SEQ ID NO: 2397787 - DNA, 25 bp, Homo sapien
aagggcctcccttgtgctgaagcag

SEQ ID NO: 2397788 - DNA, 25 bp, Homo sapien
catgaagaccgcacagcgcgtgtaa

SEQ ID NO: 2397789 - DNA, 25 bp, Homo sapien
tgacctaaagcgacatgagactact

SEQ ID NO: 2397790 - DNA, 25 bp, Homo sapien
tccaggcttgggacacatcgaggac

SEQ ID NO: 2397791 - DNA, 25 bp, Homo sapien
gaacaaggccaactacacctggtga

SEQ ID NO: 2397792 - DNA, 25 bp, Homo sapien
taatgacttagattgtgccacgagc

SEQ ID NO: 2397793 - DNA, 25 bp, Homo sapien
caattgccccgaagataggctgagc

SEQ ID NO: 2397794 - DNA, 25 bp, Homo sapien
tactttcgaaaagggtactgcactg

SEQ ID NO: 2397795 - DNA, 25 bp, Homo sapien
ttggtgccctcatacagaatgctgt

SEQ ID NO: 2397796 - DNA, 25 bp, Homo sapien
ggtgacgatcccatagcagcggtct

SEQ ID NO: 2397797 - DNA, 25 bp, Homo sapien
tcaggaagtcccagacggaaaagag

SEQ ID NO: 2397798 - DNA, 25 bp, Homo sapien
ttcctcagaacaggaggcgccatct

SEQ ID NO: 2397799 - DNA, 25 bp, Homo sapien
tacaccaagttaccagacattcagg

SEQ ID NO: 2397800 - DNA, 25 bp, Homo sapien
gatggcacagatggctcccagcatg

SEQ ID NO: 2397801 - DNA, 25 bp, Homo sapien
atgatggcacagatggctcccagca

SEQ ID NO: 2397802 - DNA, 25 bp, Homo sapien
tgatggcacagatggctcccagcat

SEQ ID NO: 2397803 - DNA, 25 bp, Homo sapien
atggcacagatggctcccagcatga

SEQ ID NO: 2397804 - DNA, 25 bp, Homo sapien
tcctgcctgcaaggcatcagctcgg

SEQ ID NO: 2397805 - DNA, 25 bp, Homo sapien
cgttcacacgtatgatgtccaccac

SEQ ID NO: 2397806 - DNA, 25 bp, Homo sapien
tggcagcactgctctcaaattgtga

SEQ ID NO: 2397807 - DNA, 25 bp, Homo sapien
aaggcatcagctcggtcatccagct

SEQ ID NO: 2397808 - DNA, 25 bp, Homo sapien
gcacagaaacaaagcagctaagctt

SEQ ID NO: 2397809 - DNA, 25 bp, Homo sapien
gggcacagaaacaaagcagctaagc

SEQ ID NO: 2397810 - DNA, 25 bp, Homo sapien
ggcacagaaacaaagcagctaagct

SEQ ID NO: 2397811 - DNA, 25 bp, Homo sapien
cacagaaacaaagcagctaagcttc

SEQ ID NO: 2397812 - DNA, 25 bp, Homo sapien
ctgttactggtcatgttaggaggag

SEQ ID NO: 2397813 - DNA, 25 bp, Homo sapien
cccttctgtcccttcagcaggtggc

SEQ ID NO: 2397814 - DNA, 25 bp, Homo sapien
gtcgtctgttactggtcatgttagg

SEQ ID NO: 2397815 - DNA, 25 bp, Homo sapien
tgtagtcgtctgttactggtcatgt

SEQ ID NO: 2397816 - DNA, 25 bp, Homo sapien
gggctatcctttgactcaactcaaa

SEQ ID NO: 2397817 - DNA, 25 bp, Homo sapien
tgtcctaaatggcatttccccgctg

SEQ ID NO: 2397818 - DNA, 25 bp, Homo sapien
caaaactagaatggattcttgctcc

SEQ ID NO: 2397819 - DNA, 25 bp, Homo sapien
gatggctacagggacatatggccta

SEQ ID NO: 2397820 - DNA, 25 bp, Homo sapien
accccgcggtctagctgcgctggaa

SEQ ID NO: 2397821 - DNA, 25 bp, Homo sapien
gagggtctgttcctctccggaggct

SEQ ID NO: 2397822 - DNA, 25 bp, Homo sapien
ctgaagtggacggaactgccaagct

SEQ ID NO: 2397823 - DNA, 25 bp, Homo sapien
gcgagacacccggtgagggacgctg

SEQ ID NO: 2397824 - DNA, 25 bp, Homo sapien
gcagctcctaaaagttcagaatgaa

SEQ ID NO: 2397825 - DNA, 25 bp, Homo sapien
agcagggagtatgctcgatgcagac

SEQ ID NO: 2397826 - DNA, 25 bp, Homo sapien
atgccgccgtccaggatttctgccg

SEQ ID NO: 2397827 - DNA, 25 bp, Homo sapien
catggagatgactctggagcgagca

SEQ ID NO: 2397828 - DNA, 25 bp, Homo sapien
cacgcagaaccatgagtagctggaa

SEQ ID NO: 2397829 - DNA, 25 bp, Homo sapien
gcaggcacgcagaaccatgagtagc

SEQ ID NO: 2397830 - DNA, 25 bp, Homo sapien
ggcacgcagaaccatgagtagctgg

SEQ ID NO: 2397831 - DNA, 25 bp, Homo sapien
caggcacgcagaaccatgagtagct

SEQ ID NO: 2397832 - DNA, 25 bp, Homo sapien
ctgagctcgtggtccgcccccctcc

SEQ ID NO: 2397833 - DNA, 25 bp, Homo sapien
tgagctcgtggtccgcccccctccg

SEQ ID NO: 2397834 - DNA, 25 bp, Homo sapien
tgatgaccagtcaggcttagtatcc

SEQ ID NO: 2397835 - DNA, 25 bp, Homo sapien
gactcaactcagctctactgatcaa

SEQ ID NO: 2397836 - DNA, 25 bp, Homo sapien
gaacaaaacacatagatgccctaga

SEQ ID NO: 2397837 - DNA, 25 bp, Homo sapien
tcaggcttagtatccgccatctcta

SEQ ID NO: 2397838 - DNA, 25 bp, Homo sapien
cagtgtggaaggctctttagaaaca

SEQ ID NO: 2397839 - DNA, 25 bp, Homo sapien
cctaagatctaggatgagtcaagac

SEQ ID NO: 2397840 - DNA, 25 bp, Homo sapien
taggtatagctagactgtaaaaggc

SEQ ID NO: 2397841 - DNA, 25 bp, Homo sapien
gtgtgaagcccaaacctaagatcct

SEQ ID NO: 2397842 - DNA, 25 bp, Homo sapien
cagagaaaatacaaagccgtttcct

SEQ ID NO: 2397843 - DNA, 25 bp, Homo sapien
gtgacagatgagccttttccgaagt

SEQ ID NO: 2397844 - DNA, 25 bp, Homo sapien
aaatacaaagccgtttcctcacagg

SEQ ID NO: 2397845 - DNA, 25 bp, Homo sapien
gacagatgagccttttccgaagttc

SEQ ID NO: 2397846 - DNA, 25 bp, Homo sapien
gtcatcagcgaacattctacttcca

SEQ ID NO: 2397847 - DNA, 25 bp, Homo sapien
tttccaacctcgaagccatatgggc

SEQ ID NO: 2397848 - DNA, 25 bp, Homo sapien
cctctttcggatacaacgttgcaat

SEQ ID NO: 2397849 - DNA, 25 bp, Homo sapien
ctatcgaaacttcccatgtcggtta

SEQ ID NO: 2397850 - DNA, 25 bp, Homo sapien
cagctaagctttcaacccacggttg

SEQ ID NO: 2397851 - DNA, 25 bp, Homo sapien
agagaactcatcctacaccagctaa

SEQ ID NO: 2397852 - DNA, 25 bp, Homo sapien
tacagaacaatagcacagactctgg

SEQ ID NO: 2397853 - DNA, 25 bp, Homo sapien
cattagatccaagacaagagaactc

SEQ ID NO: 2397854 - DNA, 25 bp, Homo sapien
tacactccgaacatggcccttttct

SEQ ID NO: 2397855 - DNA, 25 bp, Homo sapien
cgttccaacgatcaaccactttggg

SEQ ID NO: 2397856 - DNA, 25 bp, Homo sapien
ccaggatcccgatgttgtcatacac

SEQ ID NO: 2397857 - DNA, 25 bp, Homo sapien
cttttctcgttccaacgatcaacca

SEQ ID NO: 2397858 - DNA, 25 bp, Homo sapien
cttataccgatcaatctaggcacac

SEQ ID NO: 2397859 - DNA, 25 bp, Homo sapien
aatctgagccgcctattatactacg

SEQ ID NO: 2397860 - DNA, 25 bp, Homo sapien
attatactacgaagcagttatcggg

SEQ ID NO: 2397861 - DNA, 25 bp, Homo sapien
ttatcggggtgcctacatcagccac

SEQ ID NO: 2397862 - DNA, 25 bp, Homo sapien
gagggaattaatctgagccgcctat

SEQ ID NO: 2397863 - DNA, 25 bp, Homo sapien
agaagcttctgcacgccagaggcac

SEQ ID NO: 2397864 - DNA, 25 bp, Homo sapien
gaagcttctgcacgccagaggcacc

SEQ ID NO: 2397865 - DNA, 25 bp, Homo sapien
tgccccggataagaggttccctgcc

SEQ ID NO: 2397866 - DNA, 25 bp, Homo sapien
ctgccccggataagaggttccctgc

SEQ ID NO: 2397867 - DNA, 25 bp, Homo sapien
gccccggataagaggttccctgcca

SEQ ID NO: 2397868 - DNA, 25 bp, Homo sapien
ccccggataagaggttccctgccat

SEQ ID NO: 2397869 - DNA, 25 bp, Homo sapien
gactcgtcgctaagattccccaaaa

SEQ ID NO: 2397870 - DNA, 25 bp, Homo sapien
tcacacgagtactaaggcgaagaca

SEQ ID NO: 2397871 - DNA, 25 bp, Homo sapien
tccgcctgccggaagttttggagcg

SEQ ID NO: 2397872 - DNA, 25 bp, Homo sapien
gcgaagacagccatcttgggcctta

SEQ ID NO: 2397873 - DNA, 25 bp, Homo sapien
gacttgctggacgtcacttagcaga

SEQ ID NO: 2397874 - DNA, 25 bp, Homo sapien
tttctttggcgtccttcaaccgtga

SEQ ID NO: 2397875 - DNA, 25 bp, Homo sapien
tggaacccgcttccaatgaccaagc

SEQ ID NO: 2397876 - DNA, 25 bp, Homo sapien
tgtgcctcacaacagtcttccgctg

SEQ ID NO: 2397877 - DNA, 25 bp, Homo sapien
gatgccttctaactcccagcgtgga

SEQ ID NO: 2397878 - DNA, 25 bp, Homo sapien
tggattagaggcgatgccttctaac

SEQ ID NO: 2397879 - DNA, 25 bp, Homo sapien
gaggcgatgccttctaactcccagc

SEQ ID NO: 2397880 - DNA, 25 bp, Homo sapien
cttctaactcccagcgtggacttgc

SEQ ID NO: 2397881 - DNA, 25 bp, Homo sapien
gacgtctctggccagcagaaatacg

SEQ ID NO: 2397882 - DNA, 25 bp, Homo sapien
tctctggccagcagaaatacggcct

SEQ ID NO: 2397883 - DNA, 25 bp, Homo sapien
ggacgcgacgtctctggccagcaga

SEQ ID NO: 2397884 - DNA, 25 bp, Homo sapien
cgcgacgtctctggccagcagaaat

SEQ ID NO: 2397885 - DNA, 25 bp, Homo sapien
aagaagaagggttggttaatgcagc

SEQ ID NO: 2397886 - DNA, 25 bp, Homo sapien
gcagcagctcgacaatatggtccta

SEQ ID NO: 2397887 - DNA, 25 bp, Homo sapien
acaatatggtcctagcttgtctcct

SEQ ID NO: 2397888 - DNA, 25 bp, Homo sapien
ggttggttaatgcagcagctcgaca

SEQ ID NO: 2397889 - DNA, 25 bp, Homo sapien
ggttgtcagctaaagatacacattt

SEQ ID NO: 2397890 - DNA, 25 bp, Homo sapien
tttgacttgagcaactagaagaatg

SEQ ID NO: 2397891 - DNA, 25 bp, Homo sapien
taatactcagcgtgtagacagcact

SEQ ID NO: 2397892 - DNA, 25 bp, Homo sapien
ttatgtgagtgcagagttcaaggga

SEQ ID NO: 2397893 - DNA, 25 bp, Homo sapien
gaacagttgttggagcagtgccttt

SEQ ID NO: 2397894 - DNA, 25 bp, Homo sapien
gagatggctttatcagaacatggac

SEQ ID NO: 2397895 - DNA, 25 bp, Homo sapien
taagagagtacgtgatctggtacac

SEQ ID NO: 2397896 - DNA, 25 bp, Homo sapien
tatgggcatagatgcaactagtgca

SEQ ID NO: 2397897 - DNA, 25 bp, Homo sapien
ggtttaccttggagttcactgcacg

SEQ ID NO: 2397898 - DNA, 25 bp, Homo sapien
gaatgatccggtatggagccttctc

SEQ ID NO: 2397899 - DNA, 25 bp, Homo sapien
tgaatttgagcagaagcttcgggcc

SEQ ID NO: 2397900 - DNA, 25 bp, Homo sapien
gcttcgggcctgtcataccagaggt

SEQ ID NO: 2397901 - DNA, 25 bp, Homo sapien
cgagaaggcacacagctagggtgca

SEQ ID NO: 2397902 - DNA, 25 bp, Homo sapien
atgactttgtcacaccagagccccg

SEQ ID NO: 2397903 - DNA, 25 bp, Homo sapien
tctgtgcggtgtgggattgtctcac

SEQ ID NO: 2397904 - DNA, 25 bp, Homo sapien
ggaaggtatgatgctcccgcctgtt

SEQ ID NO: 2397905 - DNA, 25 bp, Homo sapien
cctgtagggtgacctggaattcgaa

SEQ ID NO: 2397906 - DNA, 25 bp, Homo sapien
taactgaactgcgttgagctgcttc

SEQ ID NO: 2397907 - DNA, 25 bp, Homo sapien
agaagacgagacacccaagaaaaca

SEQ ID NO: 2397908 - DNA, 25 bp, Homo sapien
cgcaggcacagatcctaggaagtct

SEQ ID NO: 2397909 - DNA, 25 bp, Homo sapien
cctttcaccattagggaccttcttg

SEQ ID NO: 2397910 - DNA, 25 bp, Homo sapien
cagacgaggacacagcctggctctg

SEQ ID NO: 2397911 - DNA, 25 bp, Homo sapien
cttgctcttgctactctgctctggg

SEQ ID NO: 2397912 - DNA, 25 bp, Homo sapien
ggtcattgtgaaaagcccgcaccaa

SEQ ID NO: 2397913 - DNA, 25 bp, Homo sapien
caggctgtaaatgtcaccgggagga

SEQ ID NO: 2397914 - DNA, 25 bp, Homo sapien
ccgcaccctggtctgaggttaaata

SEQ ID NO: 2397915 - DNA, 25 bp, Homo sapien
cgttaggaaagcctgccggtgacta

SEQ ID NO: 2397916 - DNA, 25 bp, Homo sapien
tgccaagccgggagaagctgagtca

SEQ ID NO: 2397917 - DNA, 25 bp, Homo sapien
accgtcaaggctgagaacgggaagc

SEQ ID NO: 2397918 - DNA, 25 bp, Homo sapien
acgggaagcttgtcatcaatggaaa

SEQ ID NO: 2397919 - DNA, 25 bp, Homo sapien
aattccatggcaccgtcaaggctga

SEQ ID NO: 2397920 - DNA, 25 bp, Homo sapien
ggcaaattccatggcaccgtcaagg

SEQ ID NO: 2397921 - DNA, 25 bp, Homo sapien
ctccgggaaactgtggcgtgatggc

SEQ ID NO: 2397922 - DNA, 25 bp, Homo sapien
cctccgggaaactgtggcgtgatgg

SEQ ID NO: 2397923 - DNA, 25 bp, Homo sapien
cgcaccttgtcatgtaccatcaata

SEQ ID NO: 2397924 - DNA, 25 bp, Homo sapien
ttgccatgtagaccccttgaagagg

SEQ ID NO: 2397925 - DNA, 25 bp, Homo sapien
aagagagagaccctcactgctgggg

SEQ ID NO: 2397926 - DNA, 25 bp, Homo sapien
ggagccgcaccttgtcatgtaccat

SEQ ID NO: 2397927 - DNA, 25 bp, Homo sapien
gacgtcttgagtgctacaggaagct

SEQ ID NO: 2397928 - DNA, 25 bp, Homo sapien
tttgcttcccgctcagacgtcttga

SEQ ID NO: 2397929 - DNA, 25 bp, Homo sapien
cctggtatgttctcctcagactgag

SEQ ID NO: 2397930 - DNA, 25 bp, Homo sapien
ggtagggcctccaaacagccttgct

SEQ ID NO: 2397931 - DNA, 25 bp, Homo sapien
tataccgaggcattgtgaaccgcat

SEQ ID NO: 2397932 - DNA, 25 bp, Homo sapien
cagcgtgagcacgtggaccatagca

SEQ ID NO: 2397933 - DNA, 25 bp, Homo sapien
gaatggtagggccaagcctagctcc

SEQ ID NO: 2397934 - DNA, 25 bp, Homo sapien
cacgtgtgcttacctagtggagaca

SEQ ID NO: 2397935 - DNA, 25 bp, Homo sapien
cggcggcggcgggtcgctaagcggg

SEQ ID NO: 2397936 - DNA, 25 bp, Homo sapien
tcgctaagcgggaccgcagtgaaag

SEQ ID NO: 2397937 - DNA, 25 bp, Homo sapien
acatcgcgatcggagtcctcagcct

SEQ ID NO: 2397938 - DNA, 25 bp, Homo sapien
gtcagatgagacatcgcgatcggag

SEQ ID NO: 2397939 - DNA, 25 bp, Homo sapien
ggtgccggttcatgtcgttcttggc

SEQ ID NO: 2397940 - DNA, 25 bp, Homo sapien
cggttcatgtcgttcttggccgtgg

SEQ ID NO: 2397941 - DNA, 25 bp, Homo sapien
gcaggtgccggttcatgtcgttctt

SEQ ID NO: 2397942 - DNA, 25 bp, Homo sapien
gttcatgtcgttcttggccgtggcc

SEQ ID NO: 2397943 - DNA, 25 bp, Homo sapien
ggcccaggcagccattactgaaggc

SEQ ID NO: 2397944 - DNA, 25 bp, Homo sapien
gaccaaggcagaaggcagcgaatac

SEQ ID NO: 2397945 - DNA, 25 bp, Homo sapien
gaaggcagcgaatacaccattgttt

SEQ ID NO: 2397946 - DNA, 25 bp, Homo sapien
gccattactgaaggctcagatttta

SEQ ID NO: 2397947 - DNA, 25 bp, Homo sapien
agggactccgtatctttaatcacct

SEQ ID NO: 2397948 - DNA, 25 bp, Homo sapien
cagggactccgtatctttaatcacc

SEQ ID NO: 2397949 - DNA, 25 bp, Homo sapien
ggactccgtatctttaatcaccttc

SEQ ID NO: 2397950 - DNA, 25 bp, Homo sapien
gggatgggacgcattccaaagggcc

SEQ ID NO: 2397951 - DNA, 25 bp, Homo sapien
ggatgggatgggacgcattccaaag

SEQ ID NO: 2397952 - DNA, 25 bp, Homo sapien
agacgcaggtagaggatgacagcca

SEQ ID NO: 2397953 - DNA, 25 bp, Homo sapien
gaagtctggttaaagaaactggaga

SEQ ID NO: 2397954 - DNA, 25 bp, Homo sapien
tggcatagcctgagaaatcctccca

SEQ ID NO: 2397955 - DNA, 25 bp, Homo sapien
tgtcacagtcgtcctcaaaatcata

SEQ ID NO: 2397956 - DNA, 25 bp, Homo sapien
ctgtcacagtcgtcctcaaaatcat

SEQ ID NO: 2397957 - DNA, 25 bp, Homo sapien
gacggcagccttgcgctcccgcttc

SEQ ID NO: 2397958 - DNA, 25 bp, Homo sapien
ggaggtgtcctcctcgacggcagcc

SEQ ID NO: 2397959 - DNA, 25 bp, Homo sapien
agctggttgagcatgcgctgcatct

SEQ ID NO: 2397960 - DNA, 25 bp, Homo sapien
agcatgcgctgcatctcctcgttga

SEQ ID NO: 2397961 - DNA, 25 bp, Homo sapien
ctacagagacgaggccgggtgcatg

SEQ ID NO: 2397962 - DNA, 25 bp, Homo sapien
caggaacagaaacacggacagtcac

SEQ ID NO: 2397963 - DNA, 25 bp, Homo sapien
aatgggggagaagcatgaaccagta

SEQ ID NO: 2397964 - DNA, 25 bp, Homo sapien
cacggacagtcaccaagggccagac

SEQ ID NO: 2397965 - DNA, 25 bp, Homo sapien
aaatcgagaagaagagcagtcagac

SEQ ID NO: 2397966 - DNA, 25 bp, Homo sapien
aactgggactgggacattaataagc

SEQ ID NO: 2397967 - DNA, 25 bp, Homo sapien
taagcttgcgtgagatcaaactaac

SEQ ID NO: 2397968 - DNA, 25 bp, Homo sapien
gaaatgcagtcaagagaacaagaga

SEQ ID NO: 2397969 - DNA, 25 bp, Homo sapien
aggccagccgccacggaagcatcca

SEQ ID NO: 2397970 - DNA, 25 bp, Homo sapien
tctagccccgtgagggccccagttg

SEQ ID NO: 2397971 - DNA, 25 bp, Homo sapien
agttgccaggtaaggctccccaagc

SEQ ID NO: 2397972 - DNA, 25 bp, Homo sapien
tgccaggtaaggctccccaagcagg

SEQ ID NO: 2397973 - DNA, 25 bp, Homo sapien
tggatcatgtcctcgcagttgcgct

SEQ ID NO: 2397974 - DNA, 25 bp, Homo sapien
tgagccacatcgcagagcttggcgg

SEQ ID NO: 2397975 - DNA, 25 bp, Homo sapien
ggatcttggtgtccagctccgacag

SEQ ID NO: 2397976 - DNA, 25 bp, Homo sapien
cggtgatgtcgatgcggcggcagat

SEQ ID NO: 2397977 - DNA, 25 bp, Homo sapien
agggaacagtgaggaggcgcccagt

SEQ ID NO: 2397978 - DNA, 25 bp, Homo sapien
cattgcaccggtgcctcttctgtgg

SEQ ID NO: 2397979 - DNA, 25 bp, Homo sapien
tggagtctccctgagctgactgcac

SEQ ID NO: 2397980 - DNA, 25 bp, Homo sapien
tctccagacaaggacgaattaggcc

SEQ ID NO: 2397981 - DNA, 25 bp, Homo sapien
actgctccctggccaaacggaagcc

SEQ ID NO: 2397982 - DNA, 25 bp, Homo sapien
cactgctccctggccaaacggaagc

SEQ ID NO: 2397983 - DNA, 25 bp, Homo sapien
tcacaatactcctgcagagcgcacg

SEQ ID NO: 2397984 - DNA, 25 bp, Homo sapien
tcactggaacgactagcggtcctca

SEQ ID NO: 2397985 - DNA, 25 bp, Homo sapien
gctgggcactgtcccgagtacatga

SEQ ID NO: 2397986 - DNA, 25 bp, Homo sapien
gagcgcacgcgtttatttccccacg

SEQ ID NO: 2397987 - DNA, 25 bp, Homo sapien
tgacgcaacaccgagacttttgttg

SEQ ID NO: 2397988 - DNA, 25 bp, Homo sapien
ctctgtgacgcaacaccgagacttt

SEQ ID NO: 2397989 - DNA, 25 bp, Homo sapien
gcaacaccgagacttttgttgcttg

SEQ ID NO: 2397990 - DNA, 25 bp, Homo sapien
aacaccgagacttttgttgcttgtc

SEQ ID NO: 2397991 - DNA, 25 bp, Homo sapien
gagccccttgaagaccaccagctca

SEQ ID NO: 2397992 - DNA, 25 bp, Homo sapien
ctggcaggcatcagcctcctgggct

SEQ ID NO: 2397993 - DNA, 25 bp, Homo sapien
cagctcagccttcaactgttccacc

SEQ ID NO: 2397994 - DNA, 25 bp, Homo sapien
aactgttccaccttcagtgccagct

SEQ ID NO: 2397995 - DNA, 25 bp, Homo sapien
tgcagttgggagaaaccctgatgtt

SEQ ID NO: 2397996 - DNA, 25 bp, Homo sapien
ctgcagttgggagaaaccctgatgt

SEQ ID NO: 2397997 - DNA, 25 bp, Homo sapien
gcagttgggagaaaccctgatgttg

SEQ ID NO: 2397998 - DNA, 25 bp, Homo sapien
cgaggtgggaggaagataaagatgc

SEQ ID NO: 2397999 - DNA, 25 bp, Homo sapien
agataaagatgccaaggagggacag

SEQ ID NO: 2398000 - DNA, 25 bp, Homo sapien
gcagcaagtggggcgccaccctcac

SEQ ID NO: 2398001 - DNA, 25 bp, Homo sapien
ggtacccagggaagcaccagcagca

SEQ ID NO: 2398002 - DNA, 25 bp, Homo sapien
ctcatttacacggtcttgcagctgg

SEQ ID NO: 2398003 - DNA, 25 bp, Homo sapien
ttacacggtcttgcagctggatccg

SEQ ID NO: 2398004 - DNA, 25 bp, Homo sapien
cacggtcttgcagctggatccgcac

SEQ ID NO: 2398005 - DNA, 25 bp, Homo sapien
tcatttacacggtcttgcagctgga

SEQ ID NO: 2398006 - DNA, 25 bp, Homo sapien
gctgtcacgcggctctgtgcttcct

SEQ ID NO: 2398007 - DNA, 25 bp, Homo sapien
cttcccggaacctccgggctgtgca

SEQ ID NO: 2398008 - DNA, 25 bp, Homo sapien
gggcgtcgagctcgccagctgcctt

SEQ ID NO: 2398009 - DNA, 25 bp, Homo sapien
cagccagctggtgaccaactgcagc

SEQ ID NO: 2398010 - DNA, 25 bp, Homo sapien
aagtgctgaggctccggtcctccgt

SEQ ID NO: 2398011 - DNA, 25 bp, Homo sapien
caagtgctgaggctccggtcctccg

SEQ ID NO: 2398012 - DNA, 25 bp, Homo sapien
cacaccagaccaccaggtccacccg

SEQ ID NO: 2398013 - DNA, 25 bp, Homo sapien
cagaccaccaggtccacccggccca

SEQ ID NO: 2398014 - DNA, 25 bp, Homo sapien
gcccacaccagaccaccaggtccac

SEQ ID NO: 2398015 - DNA, 25 bp, Homo sapien
tcctgcccacaccagaccaccaggt

SEQ ID NO: 2398016 - DNA, 25 bp, Homo sapien
cttcagtcgcacagatccgggctcc

SEQ ID NO: 2398017 - DNA, 25 bp, Homo sapien
ctgcccgcaccagaacagagctcgt

SEQ ID NO: 2398018 - DNA, 25 bp, Homo sapien
gaacagagctcgtcgagcccgctgc

SEQ ID NO: 2398019 - DNA, 25 bp, Homo sapien
ccgcaccagaacagagctcgtcgag

SEQ ID NO: 2398020 - DNA, 25 bp, Homo sapien
accagaacagagctcgtcgagcccg

SEQ ID NO: 2398021 - DNA, 25 bp, Homo sapien
taggtagggcatgcttcccagagcc

SEQ ID NO: 2398022 - DNA, 25 bp, Homo sapien
aatgagaactagacacagcctgttc

SEQ ID NO: 2398023 - DNA, 25 bp, Homo sapien
gagcctcctctaagggagtcacaga

SEQ ID NO: 2398024 - DNA, 25 bp, Homo sapien
gcccggtgagtacggcaaatgagaa

SEQ ID NO: 2398025 - DNA, 25 bp, Homo sapien
ttacgaaatcctgtatttgggatgc

SEQ ID NO: 2398026 - DNA, 25 bp, Homo sapien
cagtgtttacgaaatcctgtatttg

SEQ ID NO: 2398027 - DNA, 25 bp, Homo sapien
cgaaatcctgtatttgggatgcttt

SEQ ID NO: 2398028 - DNA, 25 bp, Homo sapien
tgtttacgaaatcctgtatttggga

SEQ ID NO: 2398029 - DNA, 25 bp, Homo sapien
gacccagcggtcatttcctagaaca

SEQ ID NO: 2398030 - DNA, 25 bp, Homo sapien
agtgctgaatctccgccacactggg

SEQ ID NO: 2398031 - DNA, 25 bp, Homo sapien
gctgcataggtagttcccaggcccg

SEQ ID NO: 2398032 - DNA, 25 bp, Homo sapien
ggccaatcctcacccagtgctgaat

SEQ ID NO: 2398033 - DNA, 25 bp, Homo sapien
tttcctatgaaaccacagcaggtac

SEQ ID NO: 2398034 - DNA, 25 bp, Homo sapien
tggcgctttatactgccaagattcc

SEQ ID NO: 2398035 - DNA, 25 bp, Homo sapien
ccctagtgaattcccttcactcttt

SEQ ID NO: 2398036 - DNA, 25 bp, Homo sapien
tactcaagcaatggcttgaggtccc

SEQ ID NO: 2398037 - DNA, 25 bp, Homo sapien
caaaacccgcagttaagcctggatg

SEQ ID NO: 2398038 - DNA, 25 bp, Homo sapien
tgaagtttatatccctaacctgccc

SEQ ID NO: 2398039 - DNA, 25 bp, Homo sapien
cggcccgttgtgagtggtatgacac

SEQ ID NO: 2398040 - DNA, 25 bp, Homo sapien
ctggatggcagagacaagccggaaa

SEQ ID NO: 2398041 - DNA, 25 bp, Homo sapien
tccgcttgtactcgtcccgctcccg

SEQ ID NO: 2398042 - DNA, 25 bp, Homo sapien
gtgtcgatctggacgcccaccccat

SEQ ID NO: 2398043 - DNA, 25 bp, Homo sapien
caccccatccgggtgcacccacgac

SEQ ID NO: 2398044 - DNA, 25 bp, Homo sapien
ctccgcttgtactcgtcccgctccc

SEQ ID NO: 2398045 - DNA, 25 bp, Homo sapien
tgaagcgggccgacgaggaataggt

SEQ ID NO: 2398046 - DNA, 25 bp, Homo sapien
acgaccagatggtgccgggcatgaa

SEQ ID NO: 2398047 - DNA, 25 bp, Homo sapien
cacgcgcgccgaagggctgcagaca

SEQ ID NO: 2398048 - DNA, 25 bp, Homo sapien
ggtctgcactgcctggtcgcgacga

SEQ ID NO: 2398049 - DNA, 25 bp, Homo sapien
cggcgaagtggtcgcctcccagtga

SEQ ID NO: 2398050 - DNA, 25 bp, Homo sapien
caggaagcagcggaaccggaggttc

SEQ ID NO: 2398051 - DNA, 25 bp, Homo sapien
aggttcagggtcttgagcacgttga

SEQ ID NO: 2398052 - DNA, 25 bp, Homo sapien
aggtcattgcggagggccatggcgg

SEQ ID NO: 2398053 - DNA, 25 bp, Homo sapien
gccttctgctgggagatgcagaccg

SEQ ID NO: 2398054 - DNA, 25 bp, Homo sapien
ttctgctgggagatgcagaccggtg

SEQ ID NO: 2398055 - DNA, 25 bp, Homo sapien
tgcgccttctgctgggagatgcaga

SEQ ID NO: 2398056 - DNA, 25 bp, Homo sapien
ccttctgctgggagatgcagaccgg

SEQ ID NO: 2398057 - DNA, 25 bp, Homo sapien
tattaaatttcatgggtatgcacag

SEQ ID NO: 2398058 - DNA, 25 bp, Homo sapien
tcacagaggcaagagttccaacctg

SEQ ID NO: 2398059 - DNA, 25 bp, Homo sapien
tggcagtgagccacccgtctagttt

SEQ ID NO: 2398060 - DNA, 25 bp, Homo sapien
tatgcacagtagagaaggcatcctc

SEQ ID NO: 2398061 - DNA, 25 bp, Homo sapien
tcttggatggggataacacagccgg

SEQ ID NO: 2398062 - DNA, 25 bp, Homo sapien
gatcgttgctttagcttcccagtca

SEQ ID NO: 2398063 - DNA, 25 bp, Homo sapien
ggctgatgatggtccttaggtttca

SEQ ID NO: 2398064 - DNA, 25 bp, Homo sapien
gactgtaatttaggtgatcgttgct

SEQ ID NO: 2398065 - DNA, 25 bp, Homo sapien
tgatcccttcggcttttccagctgg

SEQ ID NO: 2398066 - DNA, 25 bp, Homo sapien
cagctggctgactgctatcctggaa

SEQ ID NO: 2398067 - DNA, 25 bp, Homo sapien
caattctgagtctgcccctttggag

SEQ ID NO: 2398068 - DNA, 25 bp, Homo sapien
ctttgtgacagaaggtacagtggac

SEQ ID NO: 2398069 - DNA, 25 bp, Homo sapien
aatgaagaacccatccatattgtgg

SEQ ID NO: 2398070 - DNA, 25 bp, Homo sapien
tagaagcgtcgggtagaacgcagac

SEQ ID NO: 2398071 - DNA, 25 bp, Homo sapien
tggccaaagtctaggcccgtgggca

SEQ ID NO: 2398072 - DNA, 25 bp, Homo sapien
gggtggaagcgcctttctcgaaagc

SEQ ID NO: 2398073 - DNA, 25 bp, Homo sapien
ggagctgaagggagctctaaggggc

SEQ ID NO: 2398074 - DNA, 25 bp, Homo sapien
agacaaagaacggaggaaaaagcag

SEQ ID NO: 2398075 - DNA, 25 bp, Homo sapien
gacagagtcaatagcactcaggagc

SEQ ID NO: 2398076 - DNA, 25 bp, Homo sapien
aaaccaggtagcctcctgtcttgga

SEQ ID NO: 2398077 - DNA, 25 bp, Homo sapien
tcttggaggtcgcattgacagagtc

SEQ ID NO: 2398078 - DNA, 25 bp, Homo sapien
tgagcacagcgcaggatgtccttct

SEQ ID NO: 2398079 - DNA, 25 bp, Homo sapien
agtttccagctctacgagacccagc

SEQ ID NO: 2398080 - DNA, 25 bp, Homo sapien
cagctctacgagacccagccaaggc

SEQ ID NO: 2398081 - DNA, 25 bp, Homo sapien
tttccagctctacgagacccagcca

SEQ ID NO: 2398082 - DNA, 25 bp, Homo sapien
tccagctctacgagacccagccaag

SEQ ID NO: 2398083 - DNA, 25 bp, Homo sapien
cttgttagtcttcacggctggatcc

SEQ ID NO: 2398084 - DNA, 25 bp, Homo sapien
atccttggagatgaccccagtgcca

SEQ ID NO: 2398085 - DNA, 25 bp, Homo sapien
gcagtactcggtcaaagccccccac

SEQ ID NO: 2398086 - DNA, 25 bp, Homo sapien
agcatccagcagtactcggtcaaag

SEQ ID NO: 2398087 - DNA, 25 bp, Homo sapien
agcagtactcggtcaaagcccccca

SEQ ID NO: 2398088 - DNA, 25 bp, Homo sapien
gggagcatccagcagtactcggtca

SEQ ID NO: 2398089 - DNA, 25 bp, Homo sapien
tcttgagccgctcagcattggcgtc

SEQ ID NO: 2398090 - DNA, 25 bp, Homo sapien
gcaagttgcccacaacactcttgag

SEQ ID NO: 2398091 - DNA, 25 bp, Homo sapien
tggtgactcccagccgatgcaagtt

SEQ ID NO: 2398092 - DNA, 25 bp, Homo sapien
cattggcgtcattggcaaggatcac

SEQ ID NO: 2398093 - DNA, 25 bp, Homo sapien
taacagtgctgatcagccagttcca

SEQ ID NO: 2398094 - DNA, 25 bp, Homo sapien
gctgatcagccagttccactgtctc

SEQ ID NO: 2398095 - DNA, 25 bp, Homo sapien
ctaaagagagggcagtaacagtgct

SEQ ID NO: 2398096 - DNA, 25 bp, Homo sapien
gagggcagtaacagtgctgatcagc

SEQ ID NO: 2398097 - DNA, 25 bp, Homo sapien
tcctccaggggcacaacacatgtcc

SEQ ID NO: 2398098 - DNA, 25 bp, Homo sapien
gctccctgcagcatgtagtgcccag

SEQ ID NO: 2398099 - DNA, 25 bp, Homo sapien
ggccatgacgggcaacatgctggag

SEQ ID NO: 2398100 - DNA, 25 bp, Homo sapien
tgcagcatgtagtgcccagccaggt

SEQ ID NO: 2398101 - DNA, 25 bp, Homo sapien
cactagtccagtctttgaccacttg

SEQ ID NO: 2398102 - DNA, 25 bp, Homo sapien
ggatccaggttaaccccacgattga

SEQ ID NO: 2398103 - DNA, 25 bp, Homo sapien
ggttaaccccacgattgattagagc

SEQ ID NO: 2398104 - DNA, 25 bp, Homo sapien
cacagaagaatcatacaccactagt

SEQ ID NO: 2398105 - DNA, 25 bp, Homo sapien
acgggccgaggcacctcattagctt

SEQ ID NO: 2398106 - DNA, 25 bp, Homo sapien
tgtgcaaggtctcggcgtcgggttt

SEQ ID NO: 2398107 - DNA, 25 bp, Homo sapien
tcaaggtattggtccggagggtgac

SEQ ID NO: 2398108 - DNA, 25 bp, Homo sapien
cattagcttctaagaactccaccag

SEQ ID NO: 2398109 - DNA, 25 bp, Homo sapien
ggtattcagaacgagaccgcccttc

SEQ ID NO: 2398110 - DNA, 25 bp, Homo sapien
tggatccgcttgtgaactcgttgca

SEQ ID NO: 2398111 - DNA, 25 bp, Homo sapien
gagcttgccaagcaggaagtctcca

SEQ ID NO: 2398112 - DNA, 25 bp, Homo sapien
tcttgagccggttcaggtattcaga

SEQ ID NO: 2398113 - DNA, 25 bp, Homo sapien
tgtcatgatgtcctaaggcctggaa

SEQ ID NO: 2398114 - DNA, 25 bp, Homo sapien
ctgtgtcatgatgtcctaaggcctg

SEQ ID NO: 2398115 - DNA, 25 bp, Homo sapien
ggcctggaaatccctctcccaacca

SEQ ID NO: 2398116 - DNA, 25 bp, Homo sapien
tgtgtcatgatgtcctaaggcctgg

SEQ ID NO: 2398117 - DNA, 25 bp, Homo sapien
gcagggggcagcacaaatggttcct

SEQ ID NO: 2398118 - DNA, 25 bp, Homo sapien
agcttcccgggccttctgcttccga

SEQ ID NO: 2398119 - DNA, 25 bp, Homo sapien
tgcttccgagcagctctttcaatgg

SEQ ID NO: 2398120 - DNA, 25 bp, Homo sapien
gagcagctctttcaatgggcagcaa

SEQ ID NO: 2398121 - DNA, 25 bp, Homo sapien
gggccttctgcttccgagcagctct

SEQ ID NO: 2398122 - DNA, 25 bp, Homo sapien
tcaaacttgtagtgcactgggagga

SEQ ID NO: 2398123 - DNA, 25 bp, Homo sapien
gtgatggagcacaaaaacccctttc

SEQ ID NO: 2398124 - DNA, 25 bp, Homo sapien
tccttgccactaagaaacagtctca

SEQ ID NO: 2398125 - DNA, 25 bp, Homo sapien
tataaggcagtagggaaacagtgat

SEQ ID NO: 2398126 - DNA, 25 bp, Homo sapien
tgggcgcttcttgcctcgaggagca

SEQ ID NO: 2398127 - DNA, 25 bp, Homo sapien
tcagctccatagtcatctaccgtat

SEQ ID NO: 2398128 - DNA, 25 bp, Homo sapien
gaggtccccgtggttcaccatacca

SEQ ID NO: 2398129 - DNA, 25 bp, Homo sapien
taccgtatcagcatcgtcctcggag

SEQ ID NO: 2398130 - DNA, 25 bp, Homo sapien
ttagcgagttcttccctacccagga

SEQ ID NO: 2398131 - DNA, 25 bp, Homo sapien
agagtcctggactaatggcagccac

SEQ ID NO: 2398132 - DNA, 25 bp, Homo sapien
aagggactcctcatgtagcatccag

SEQ ID NO: 2398133 - DNA, 25 bp, Homo sapien
tctacccctcagaatgtcctttggc

SEQ ID NO: 2398134 - DNA, 25 bp, Homo sapien
tccaggcaatggtttggcctcagga

SEQ ID NO: 2398135 - DNA, 25 bp, Homo sapien
agctttccaggcaatggtttggcct

SEQ ID NO: 2398136 - DNA, 25 bp, Homo sapien
gggcttcaacagagcccaatctcct

SEQ ID NO: 2398137 - DNA, 25 bp, Homo sapien
gacttatttgtcttaggggcttcaa

SEQ ID NO: 2398138 - DNA, 25 bp, Homo sapien
ctctttcgagcacgactagacagcc

SEQ ID NO: 2398139 - DNA, 25 bp, Homo sapien
tctttcgagcacgactagacagcct

SEQ ID NO: 2398140 - DNA, 25 bp, Homo sapien
tgcaggcaagaatctgacgagttct

SEQ ID NO: 2398141 - DNA, 25 bp, Homo sapien
ttcgtagggtccaacttgcgcccca

SEQ ID NO: 2398142 - DNA, 25 bp, Homo sapien
tctgcttccgggcctttcggcctgg

SEQ ID NO: 2398143 - DNA, 25 bp, Homo sapien
gttctgtctcggcacccttctgctt

SEQ ID NO: 2398144 - DNA, 25 bp, Homo sapien
tggcaggcagaaatgggagaaggtg

SEQ ID NO: 2398145 - DNA, 25 bp, Homo sapien
gcaggcagaaatgggagaaggtggc

SEQ ID NO: 2398146 - DNA, 25 bp, Homo sapien
ggcaggcagaaatgggagaaggtgg

SEQ ID NO: 2398147 - DNA, 25 bp, Homo sapien
gtgctgccactcttcgtcccccaat

SEQ ID NO: 2398148 - DNA, 25 bp, Homo sapien
gtcagtgctgccactcttcgtcccc

SEQ ID NO: 2398149 - DNA, 25 bp, Homo sapien
ggtcagtgctgccactcttcgtccc

SEQ ID NO: 2398150 - DNA, 25 bp, Homo sapien
tgccactcttcgtcccccaatttcc

SEQ ID NO: 2398151 - DNA, 25 bp, Homo sapien
acagaatcgttccacgcaggcgcac

SEQ ID NO: 2398152 - DNA, 25 bp, Homo sapien
tccacgtgcaatccggacctagctt

SEQ ID NO: 2398153 - DNA, 25 bp, Homo sapien
taatgtccgagagtgcccttcgggc

SEQ ID NO: 2398154 - DNA, 25 bp, Homo sapien
gcctcttcctgttgcgcctagtcgg

SEQ ID NO: 2398155 - DNA, 25 bp, Homo sapien
tcgctttcaggtgggtctacaatta

SEQ ID NO: 2398156 - DNA, 25 bp, Homo sapien
ctcttcgccggaactcgctttcagg

SEQ ID NO: 2398157 - DNA, 25 bp, Homo sapien
aacaacgggttgcaaggctgacctg

SEQ ID NO: 2398158 - DNA, 25 bp, Homo sapien
tgggtctacaattagttgggaaaca

SEQ ID NO: 2398159 - DNA, 25 bp, Homo sapien
cctttacaacatggaagatgggcag

SEQ ID NO: 2398160 - DNA, 25 bp, Homo sapien
tttagccgctcagtggctagagccg

SEQ ID NO: 2398161 - DNA, 25 bp, Homo sapien
gtggaggtggtatcagtctgcatct

SEQ ID NO: 2398162 - DNA, 25 bp, Homo sapien
aacagaggtagctgtgtctcgccca

SEQ ID NO: 2398163 - DNA, 25 bp, Homo sapien
tcgggtgcccggtttgccaggcggc

SEQ ID NO: 2398164 - DNA, 25 bp, Homo sapien
gggagtcgagtcacatcagctttca

SEQ ID NO: 2398165 - DNA, 25 bp, Homo sapien
gaatgttacgctctgacatctgtaa

SEQ ID NO: 2398166 - DNA, 25 bp, Homo sapien
cagcaactgggggaattcgggcaat

SEQ ID NO: 2398167 - DNA, 25 bp, Homo sapien
cacttctcagtgaccaagtaactgt

SEQ ID NO: 2398168 - DNA, 25 bp, Homo sapien
ggtggtgagctgtggtggcccagac

SEQ ID NO: 2398169 - DNA, 25 bp, Homo sapien
ggcccagactgagctccctctaccc

SEQ ID NO: 2398170 - DNA, 25 bp, Homo sapien
gctccctctaccctagtggaccagc

SEQ ID NO: 2398171 - DNA, 25 bp, Homo sapien
tccctagcacctcctaaactcccag

SEQ ID NO: 2398172 - DNA, 25 bp, Homo sapien
tttgtgcaggactgcattggctggc

SEQ ID NO: 2398173 - DNA, 25 bp, Homo sapien
aacactccacctcagcaaagcgggt

SEQ ID NO: 2398174 - DNA, 25 bp, Homo sapien
gctgttcctcaatcaccagagcttg

SEQ ID NO: 2398175 - DNA, 25 bp, Homo sapien
tgctgatgactttccgccaaacact

SEQ ID NO: 2398176 - DNA, 25 bp, Homo sapien
gtgcatagttttttacataactgag

SEQ ID NO: 2398177 - DNA, 25 bp, Homo sapien
tagttacacagttaagcatcttcct

SEQ ID NO: 2398178 - DNA, 25 bp, Homo sapien
tttaggttctcttatacaaaagcga

SEQ ID NO: 2398179 - DNA, 25 bp, Homo sapien
gataatcccaccttctagaaataca

SEQ ID NO: 2398180 - DNA, 25 bp, Homo sapien
ctgttgtttaatgccccatgatatg

SEQ ID NO: 2398181 - DNA, 25 bp, Homo sapien
cctatgtatgtttctaagttacaga

SEQ ID NO: 2398182 - DNA, 25 bp, Homo sapien
ttaaaaggtactcttatgttgtatg

SEQ ID NO: 2398183 - DNA, 25 bp, Homo sapien
catgtttcacctatgcattctccta

SEQ ID NO: 2398184 - DNA, 25 bp, Homo sapien
catgtaccttcagcactggttctga

SEQ ID NO: 2398185 - DNA, 25 bp, Homo sapien
tcaaacatgtaccttcagcactggt

SEQ ID NO: 2398186 - DNA, 25 bp, Homo sapien
accttcagcactggttctgatccca

SEQ ID NO: 2398187 - DNA, 25 bp, Homo sapien
tgcttctcaaacatgtaccttcagc

SEQ ID NO: 2398188 - DNA, 25 bp, Homo sapien
tcatttatgtatcccctgtggctgc

SEQ ID NO: 2398189 - DNA, 25 bp, Homo sapien
tggctcaagagctaagaatgggttt

SEQ ID NO: 2398190 - DNA, 25 bp, Homo sapien
tccatagatgaaacgctgaaacaca

SEQ ID NO: 2398191 - DNA, 25 bp, Homo sapien
cagagactacatgtcccacaaaggg

SEQ ID NO: 2398192 - DNA, 25 bp, Homo sapien
cttgaaaggctcattgaggatggca

SEQ ID NO: 2398193 - DNA, 25 bp, Homo sapien
tagaaatttattcttgatctctaag

SEQ ID NO: 2398194 - DNA, 25 bp, Homo sapien
gccacggttcatttcacccttgaaa

SEQ ID NO: 2398195 - DNA, 25 bp, Homo sapien
gatctctaagaaattgccacggttc

SEQ ID NO: 2398196 - DNA, 25 bp, Homo sapien
caaaagcctcagtacagattcaggc

SEQ ID NO: 2398197 - DNA, 25 bp, Homo sapien
aaagcctcagtacagattcaggcaa

SEQ ID NO: 2398198 - DNA, 25 bp, Homo sapien
aagcctcagtacagattcaggcaaa

SEQ ID NO: 2398199 - DNA, 25 bp, Homo sapien
aaaagcctcagtacagattcaggca

SEQ ID NO: 2398200 - DNA, 25 bp, Homo sapien
cgatgccagatctcataagtcttct

SEQ ID NO: 2398201 - DNA, 25 bp, Homo sapien
ttataatgccggctagcagccagta

SEQ ID NO: 2398202 - DNA, 25 bp, Homo sapien
taatgccggctagcagccagtagtc

SEQ ID NO: 2398203 - DNA, 25 bp, Homo sapien
gccagtagtcatgccgtcgatgcca

SEQ ID NO: 2398204 - DNA, 25 bp, Homo sapien
cctggtgggcccctcatttccatac

SEQ ID NO: 2398205 - DNA, 25 bp, Homo sapien
gggtctctccattctgaagcatcac

SEQ ID NO: 2398206 - DNA, 25 bp, Homo sapien
tccttgggggtctctccattctgaa

SEQ ID NO: 2398207 - DNA, 25 bp, Homo sapien
aaccaccatctgcaatgttaaacat

SEQ ID NO: 2398208 - DNA, 25 bp, Homo sapien
ttgggggtctctccattctgaagca

SEQ ID NO: 2398209 - DNA, 25 bp, Homo sapien
cagacccagaaaatggtgccattgg

SEQ ID NO: 2398210 - DNA, 25 bp, Homo sapien
ggcagatacagtccttgcttctggt

SEQ ID NO: 2398211 - DNA, 25 bp, Homo sapien
attggcccactgacaactaaatgtg

SEQ ID NO: 2398212 - DNA, 25 bp, Homo sapien
taaaatggctagatgagtatggaca

SEQ ID NO: 2398213 - DNA, 25 bp, Homo sapien
aataggggtcagatctattgctgac

SEQ ID NO: 2398214 - DNA, 25 bp, Homo sapien
ctttgtcttctaccacaataggggt

SEQ ID NO: 2398215 - DNA, 25 bp, Homo sapien
tctaccacaataggggtcagatcta

SEQ ID NO: 2398216 - DNA, 25 bp, Homo sapien
ggtcagatctattgctgacttttcc

SEQ ID NO: 2398217 - DNA, 25 bp, Homo sapien
ttattgagactatacctaaaggaag

SEQ ID NO: 2398218 - DNA, 25 bp, Homo sapien
gaagaaatgttattgagactatacc

SEQ ID NO: 2398219 - DNA, 25 bp, Homo sapien
ctattatccaattggatagacccac

SEQ ID NO: 2398220 - DNA, 25 bp, Homo sapien
ttatccaattggatagacccacatc

SEQ ID NO: 2398221 - DNA, 25 bp, Homo sapien
tccagcctgggcaacgagtaaaact

SEQ ID NO: 2398222 - DNA, 25 bp, Homo sapien
ccagcctgggcaacgagtaaaactc

SEQ ID NO: 2398223 - DNA, 25 bp, Homo sapien
gtctccataggttcctctgttctct

SEQ ID NO: 2398224 - DNA, 25 bp, Homo sapien
tgtctccataggttcctctgttctc

SEQ ID NO: 2398225 - DNA, 25 bp, Homo sapien
tctccataggttcctctgttctctc

SEQ ID NO: 2398226 - DNA, 25 bp, Homo sapien
ctgtctccataggttcctctgttct

SEQ ID NO: 2398227 - DNA, 25 bp, Homo sapien
cttttcatcctctgaggcaggggca

SEQ ID NO: 2398228 - DNA, 25 bp, Homo sapien
aggcaggggcaggggcctgtgtaca

SEQ ID NO: 2398229 - DNA, 25 bp, Homo sapien
tctgaggcaggggcaggggcctgtg

SEQ ID NO: 2398230 - DNA, 25 bp, Homo sapien
tgaggcaggggcaggggcctgtgta

SEQ ID NO: 2398231 - DNA, 25 bp, Homo sapien
tttgtctttagtatggcattcagtc

SEQ ID NO: 2398232 - DNA, 25 bp, Homo sapien
tctttagtatggcattcagtcaccc

SEQ ID NO: 2398233 - DNA, 25 bp, Homo sapien
acatttgtctttagtatggcattca

SEQ ID NO: 2398234 - DNA, 25 bp, Homo sapien
tgtctttagtatggcattcagtcac

SEQ ID NO: 2398235 - DNA, 25 bp, Homo sapien
caggggctgtagatttaacctcctt

SEQ ID NO: 2398236 - DNA, 25 bp, Homo sapien
actgagagggaattgctgtgtgtcc

SEQ ID NO: 2398237 - DNA, 25 bp, Homo sapien
tctcgtgcctttaagagccagccct

SEQ ID NO: 2398238 - DNA, 25 bp, Homo sapien
aaattgtcctctcgtgcctttaaga

SEQ ID NO: 2398239 - DNA, 25 bp, Homo sapien
gcctttaagagccagccctattctt

SEQ ID NO: 2398240 - DNA, 25 bp, Homo sapien
cgtgtcccctggagtggagggtgta

SEQ ID NO: 2398241 - DNA, 25 bp, Homo sapien
tgcaggagtgttgggctgcgtgtcc

SEQ ID NO: 2398242 - DNA, 25 bp, Homo sapien
tcagccagttcaggcatgctccagc

SEQ ID NO: 2398243 - DNA, 25 bp, Homo sapien
gctccagcgcccattaacatgttca

SEQ ID NO: 2398244 - DNA, 25 bp, Homo sapien
tcttgcgaatcaaagacataacacc

SEQ ID NO: 2398245 - DNA, 25 bp, Homo sapien
aacaccaattctagtaaggacatgc

SEQ ID NO: 2398246 - DNA, 25 bp, Homo sapien
tcgggggacaccatcagcaaaggtc

SEQ ID NO: 2398247 - DNA, 25 bp, Homo sapien
atgctggcgagacaggccttctcgg

SEQ ID NO: 2398248 - DNA, 25 bp, Homo sapien
aggtctcttacaagccactgggtag

SEQ ID NO: 2398249 - DNA, 25 bp, Homo sapien
tcgctgacgagcattaaaaccaagt

SEQ ID NO: 2398250 - DNA, 25 bp, Homo sapien
tcctgaggtggcataccatatcgca

SEQ ID NO: 2398251 - DNA, 25 bp, Homo sapien
cactgggtagtaaaagcatcctgag

SEQ ID NO: 2398252 - DNA, 25 bp, Homo sapien
ggcttatctttatcattccgcaggc

SEQ ID NO: 2398253 - DNA, 25 bp, Homo sapien
caggcccttacgactgggcctacgg

SEQ ID NO: 2398254 - DNA, 25 bp, Homo sapien
ttcaatattcccaccaacacgggcc

SEQ ID NO: 2398255 - DNA, 25 bp, Homo sapien
aacacgggccaacagaggaggcaat

SEQ ID NO: 2398256 - DNA, 25 bp, Homo sapien
ttgtcggactggtcgtcctgccaat

SEQ ID NO: 2398257 - DNA, 25 bp, Homo sapien
taatcggactggttgtcggactggt

SEQ ID NO: 2398258 - DNA, 25 bp, Homo sapien
tctgaagccactgagtaatcggact

SEQ ID NO: 2398259 - DNA, 25 bp, Homo sapien
cttctgaacgttcatcaaagtcttc

SEQ ID NO: 2398260 - DNA, 25 bp, Homo sapien
cggggcccactgctctagtggaacg

SEQ ID NO: 2398261 - DNA, 25 bp, Homo sapien
agcggggcccactgctctagtggaa

SEQ ID NO: 2398262 - DNA, 25 bp, Homo sapien
agagggcagatgagcggggcccact

SEQ ID NO: 2398263 - DNA, 25 bp, Homo sapien
ggcccactgctctagtggaacggcc

SEQ ID NO: 2398264 - DNA, 25 bp, Homo sapien
taatggtgccgcagcaatttctccc

SEQ ID NO: 2398265 - DNA, 25 bp, Homo sapien
taatgatttcccgttctacctcctc

SEQ ID NO: 2398266 - DNA, 25 bp, Homo sapien
ggagccatcattgtagttgacctgt

SEQ ID NO: 2398267 - DNA, 25 bp, Homo sapien
ttcgggctagatcttcttgctgctg

SEQ ID NO: 2398268 - DNA, 25 bp, Homo sapien
ccgtgtctggcccttttgtgtattt

SEQ ID NO: 2398269 - DNA, 25 bp, Homo sapien
tgaactatgtaaattctatctatta

SEQ ID NO: 2398270 - DNA, 25 bp, Homo sapien
tattttgaactatgtaaattctatc

SEQ ID NO: 2398271 - DNA, 25 bp, Homo sapien
gtgtattttgaactatgtaaattct

SEQ ID NO: 2398272 - DNA, 25 bp, Homo sapien
ggacgcattaccttcgagaacaaaa

SEQ ID NO: 2398273 - DNA, 25 bp, Homo sapien
aaaatcacaggtaagcatcagggaa

SEQ ID NO: 2398274 - DNA, 25 bp, Homo sapien
cattaccttcgagaacaaaatcaca

SEQ ID NO: 2398275 - DNA, 25 bp, Homo sapien
aactgaggttggacgcattaccttc

SEQ ID NO: 2398276 - DNA, 25 bp, Homo sapien
cattcatgccctgcaattctgtgtc

SEQ ID NO: 2398277 - DNA, 25 bp, Homo sapien
actgggccactttgaatgagctcaa

SEQ ID NO: 2398278 - DNA, 25 bp, Homo sapien
tcatcctggttacggtctagcagcc

SEQ ID NO: 2398279 - DNA, 25 bp, Homo sapien
tcttcttcccgtaccacatactggg

SEQ ID NO: 2398280 - DNA, 25 bp, Homo sapien
ctataaaaaatcaagggcccacatc

SEQ ID NO: 2398281 - DNA, 25 bp, Homo sapien
taacctttagagaggccaagcccca

SEQ ID NO: 2398282 - DNA, 25 bp, Homo sapien
cacaccaaaacgtaagttcctgact

SEQ ID NO: 2398283 - DNA, 25 bp, Homo sapien
tggaaaaagcaagtcccacaagacc

SEQ ID NO: 2398284 - DNA, 25 bp, Homo sapien
ggatatcatcaagctcctgtttgga

SEQ ID NO: 2398285 - DNA, 25 bp, Homo sapien
tattttgcccaatccggtgagctct

SEQ ID NO: 2398286 - DNA, 25 bp, Homo sapien
gacatagatccagtcttggagccca

SEQ ID NO: 2398287 - DNA, 25 bp, Homo sapien
tgacgcacgggtcacaaaccggtag

SEQ ID NO: 2398288 - DNA, 25 bp, Homo sapien
cccagctcgagtggaaagcaagaag

SEQ ID NO: 2398289 - DNA, 25 bp, Homo sapien
gctcgagtggaaagcaagaagcaga

SEQ ID NO: 2398290 - DNA, 25 bp, Homo sapien
gagtcatagataataactgtgtcag

SEQ ID NO: 2398291 - DNA, 25 bp, Homo sapien
gtcagagtcatagataataactgtg

SEQ ID NO: 2398292 - DNA, 25 bp, Homo sapien
acacagaaaaggagatgcacaagaa

SEQ ID NO: 2398293 - DNA, 25 bp, Homo sapien
tcctaggaatagtccaatacattcg

SEQ ID NO: 2398294 - DNA, 25 bp, Homo sapien
caaaagctttactccatctcaaatg

SEQ ID NO: 2398295 - DNA, 25 bp, Homo sapien
gcacaagaagttacagtccaaagat

SEQ ID NO: 2398296 - DNA, 25 bp, Homo sapien
gaagcggtcaatggcctcttgccgc

SEQ ID NO: 2398297 - DNA, 25 bp, Homo sapien
agtgattccaccatcgatgcgttcg

SEQ ID NO: 2398298 - DNA, 25 bp, Homo sapien
ccaagaaatcctctagcaggtctag

SEQ ID NO: 2398299 - DNA, 25 bp, Homo sapien
tcttgccgcatgttcccagtgattc

SEQ ID NO: 2398300 - DNA, 25 bp, Homo sapien
aaaagatgagtacacgatgcccacc

SEQ ID NO: 2398301 - DNA, 25 bp, Homo sapien
gggaaaagatgagtacacgatgccc

SEQ ID NO: 2398302 - DNA, 25 bp, Homo sapien
cgatgcccaccctccttaaggttct

SEQ ID NO: 2398303 - DNA, 25 bp, Homo sapien
agatgagtacacgatgcccaccctc

SEQ ID NO: 2398304 - DNA, 25 bp, Homo sapien
catacatgccattaggcatcttagg

SEQ ID NO: 2398305 - DNA, 25 bp, Homo sapien
ctgccatcatacatgccattaggca

SEQ ID NO: 2398306 - DNA, 25 bp, Homo sapien
catcatacatgccattaggcatctt

SEQ ID NO: 2398307 - DNA, 25 bp, Homo sapien
tgccattaggcatcttaggagcttc

SEQ ID NO: 2398308 - DNA, 25 bp, Homo sapien
agggaggaacaggagatggcactac

SEQ ID NO: 2398309 - DNA, 25 bp, Homo sapien
atggagaagacccaacccagggagg

SEQ ID NO: 2398310 - DNA, 25 bp, Homo sapien
ggaggaacaggagatggcactacat

SEQ ID NO: 2398311 - DNA, 25 bp, Homo sapien
aggaacaggagatggcactacatac

SEQ ID NO: 2398312 - DNA, 25 bp, Homo sapien
gaggtatggatggttgcagcacttc

SEQ ID NO: 2398313 - DNA, 25 bp, Homo sapien
attcagcagagacacctggttgcca

SEQ ID NO: 2398314 - DNA, 25 bp, Homo sapien
gcacttcttaagatccatcaccaca

SEQ ID NO: 2398315 - DNA, 25 bp, Homo sapien
gccacagggaagaggtatggatggt

SEQ ID NO: 2398316 - DNA, 25 bp, Homo sapien
agtgcttcaaaatttcgagtgagga

SEQ ID NO: 2398317 - DNA, 25 bp, Homo sapien
tgcttcaaaatttcgagtgaggatg

SEQ ID NO: 2398318 - DNA, 25 bp, Homo sapien
gtgcttcaaaatttcgagtgaggat

SEQ ID NO: 2398319 - DNA, 25 bp, Homo sapien
catgttcttgaacacatcggctttg

SEQ ID NO: 2398320 - DNA, 25 bp, Homo sapien
tttgagccgccgcaacatgtgcggc

SEQ ID NO: 2398321 - DNA, 25 bp, Homo sapien
gctcagctccacacgcacaattagt

SEQ ID NO: 2398322 - DNA, 25 bp, Homo sapien
tgtcttggagggcatgttcttgaac

SEQ ID NO: 2398323 - DNA, 25 bp, Homo sapien
cagcttgtgctggagtgagtaacca

SEQ ID NO: 2398324 - DNA, 25 bp, Homo sapien
tgtgctggagtgagtaaccattcaa

SEQ ID NO: 2398325 - DNA, 25 bp, Homo sapien
cttgtgctggagtgagtaaccattc

SEQ ID NO: 2398326 - DNA, 25 bp, Homo sapien
acctctcgggggtgagaaagttgag

SEQ ID NO: 2398327 - DNA, 25 bp, Homo sapien
gactgattgttcttcagccgatggg

SEQ ID NO: 2398328 - DNA, 25 bp, Homo sapien
tagccatgtcaatggtgatcaattc

SEQ ID NO: 2398329 - DNA, 25 bp, Homo sapien
tgaggcaggcccaatcaatagagcc

SEQ ID NO: 2398330 - DNA, 25 bp, Homo sapien
gatcaattcataggatgtcagcagc

SEQ ID NO: 2398331 - DNA, 25 bp, Homo sapien
caccacgaatggcattgtcttcaaa

SEQ ID NO: 2398332 - DNA, 25 bp, Homo sapien
tctctcggatgatggcacggctgtc

SEQ ID NO: 2398333 - DNA, 25 bp, Homo sapien
gacatacatgtctggagcccacatt

SEQ ID NO: 2398334 - DNA, 25 bp, Homo sapien
tcacccacataggttacgacataca

SEQ ID NO: 2398335 - DNA, 25 bp, Homo sapien
ggctgtcgctcatacttcactgttg

SEQ ID NO: 2398336 - DNA, 25 bp, Homo sapien
caggagaagcgcaaccaattcaggc

SEQ ID NO: 2398337 - DNA, 25 bp, Homo sapien
caattcaggccctccatttgatagg

SEQ ID NO: 2398338 - DNA, 25 bp, Homo sapien
gactgctgtctgtacagttttccca

SEQ ID NO: 2398339 - DNA, 25 bp, Homo sapien
tcaactgttggcgtttctggaggcc

SEQ ID NO: 2398340 - DNA, 25 bp, Homo sapien
ttcttgagcttcttgcctggtcggc

SEQ ID NO: 2398341 - DNA, 25 bp, Homo sapien
ggcgtttctggaggcctctccaact

SEQ ID NO: 2398342 - DNA, 25 bp, Homo sapien
caacttccgaagcttcaccttcttg

SEQ ID NO: 2398343 - DNA, 25 bp, Homo sapien
ctcccaagaagcctgatcgtaaggt

SEQ ID NO: 2398344 - DNA, 25 bp, Homo sapien
caatagctctgcttgaacaggtcgt

SEQ ID NO: 2398345 - DNA, 25 bp, Homo sapien
taagtcccgccacttgatcaagtag

SEQ ID NO: 2398346 - DNA, 25 bp, Homo sapien
aacaggtcgtaatcctggatctcca

SEQ ID NO: 2398347 - DNA, 25 bp, Homo sapien
ttcggaacatcacctgacagtgcag

SEQ ID NO: 2398348 - DNA, 25 bp, Homo sapien
tcggtggatcatcatccactcgggt

SEQ ID NO: 2398349 - DNA, 25 bp, Homo sapien
gtccccagaaggtggctcatccata

SEQ ID NO: 2398350 - DNA, 25 bp, Homo sapien
tcccatagcgatagaagcgttcctc

SEQ ID NO: 2398351 - DNA, 25 bp, Homo sapien
cgtgttgggatcagcatctggaggc

SEQ ID NO: 2398352 - DNA, 25 bp, Homo sapien
tctggccgcccctccaagggctttg

SEQ ID NO: 2398353 - DNA, 25 bp, Homo sapien
tggctgaccccacttccagattagg

SEQ ID NO: 2398354 - DNA, 25 bp, Homo sapien
ttcacaaagaactgccgctctggcc

SEQ ID NO: 2398355 - DNA, 25 bp, Homo sapien
gaaaagctcatagttcctctcctgc

SEQ ID NO: 2398356 - DNA, 25 bp, Homo sapien
tcatctcctcttaagagagctggca

SEQ ID NO: 2398357 - DNA, 25 bp, Homo sapien
attgtaagctaccaagaccctgagg

SEQ ID NO: 2398358 - DNA, 25 bp, Homo sapien
ggcagggtgtcaacacagggacaaa

SEQ ID NO: 2398359 - DNA, 25 bp, Homo sapien
tcaccctccgaattgtcctctttag

SEQ ID NO: 2398360 - DNA, 25 bp, Homo sapien
catccttgcagacccgacagaattc

SEQ ID NO: 2398361 - DNA, 25 bp, Homo sapien
gaattccatatggtggtcatcctcc

SEQ ID NO: 2398362 - DNA, 25 bp, Homo sapien
ggtatcacagcagagcagttcccca

SEQ ID NO: 2398363 - DNA, 25 bp, Homo sapien
ggccccgaagagctttactgtccca

SEQ ID NO: 2398364 - DNA, 25 bp, Homo sapien
agagctttactgtcccacccttctt

SEQ ID NO: 2398365 - DNA, 25 bp, Homo sapien
ccgaagagctttactgtcccaccct

SEQ ID NO: 2398366 - DNA, 25 bp, Homo sapien
gaagagctttactgtcccacccttc

SEQ ID NO: 2398367 - DNA, 25 bp, Homo sapien
tggcacacctcgcaatagtcctggt

SEQ ID NO: 2398368 - DNA, 25 bp, Homo sapien
caggcagaccatgtggtaagcacgg

SEQ ID NO: 2398369 - DNA, 25 bp, Homo sapien
caggatgatctcaccgccttgctgg

SEQ ID NO: 2398370 - DNA, 25 bp, Homo sapien
gagccttctccatgtcgggatccag

SEQ ID NO: 2398371 - DNA, 25 bp, Homo sapien
tccacagcagtcacctcctcctcgc

SEQ ID NO: 2398372 - DNA, 25 bp, Homo sapien
ccatccacagcagtcacctcctcct

SEQ ID NO: 2398373 - DNA, 25 bp, Homo sapien
ctgtctcataaccatccacagcagt

SEQ ID NO: 2398374 - DNA, 25 bp, Homo sapien
tgtctcataaccatccacagcagtc

SEQ ID NO: 2398375 - DNA, 25 bp, Homo sapien
gctactacggctggtggaaccatca

SEQ ID NO: 2398376 - DNA, 25 bp, Homo sapien
cagaatagctattgatactggcatc

SEQ ID NO: 2398377 - DNA, 25 bp, Homo sapien
tactggcatcatcgaagtcagattc

SEQ ID NO: 2398378 - DNA, 25 bp, Homo sapien
tcggagtttcttgcggctgcggcta

SEQ ID NO: 2398379 - DNA, 25 bp, Homo sapien
aagcaccgttatacagggagcctag

SEQ ID NO: 2398380 - DNA, 25 bp, Homo sapien
accagaatcccagcaagcaccgtta

SEQ ID NO: 2398381 - DNA, 25 bp, Homo sapien
ataaggttagacgttcaagccaagg

SEQ ID NO: 2398382 - DNA, 25 bp, Homo sapien
agaataaggttagacgttcaagcca

SEQ ID NO: 2398383 - DNA, 25 bp, Homo sapien
cttgggcttcctccgagcattggga

SEQ ID NO: 2398384 - DNA, 25 bp, Homo sapien
cgaggatctcttacgcttggaacca

SEQ ID NO: 2398385 - DNA, 25 bp, Homo sapien
ttcttggcatcaggtacacgagggc

SEQ ID NO: 2398386 - DNA, 25 bp, Homo sapien
tcaggtacacgagggctgcccttgg

SEQ ID NO: 2398387 - DNA, 25 bp, Homo sapien
ggtggtgcaacctcagtggctgtca

SEQ ID NO: 2398388 - DNA, 25 bp, Homo sapien
tgcggataggcacctccacaggggg

SEQ ID NO: 2398389 - DNA, 25 bp, Homo sapien
ttgcggataggcacctccacagggg

SEQ ID NO: 2398390 - DNA, 25 bp, Homo sapien
cttgcggataggcacctccacaggg

SEQ ID NO: 2398391 - DNA, 25 bp, Homo sapien
ccatcatcatcttggagacagcaat

SEQ ID NO: 2398392 - DNA, 25 bp, Homo sapien
catcttggagacagcaatcttggga

SEQ ID NO: 2398393 - DNA, 25 bp, Homo sapien
ggttattggtactgaactcccgcca

SEQ ID NO: 2398394 - DNA, 25 bp, Homo sapien
cattttgcacccaaaaccatcatca

SEQ ID NO: 2398395 - DNA, 25 bp, Homo sapien
gggttcgataatcctcctctgagaa

SEQ ID NO: 2398396 - DNA, 25 bp, Homo sapien
agttggtgagggttcgataatcctc

SEQ ID NO: 2398397 - DNA, 25 bp, Homo sapien
gtcaatgtcttccatgccccagtct

SEQ ID NO: 2398398 - DNA, 25 bp, Homo sapien
ggtgagggttcgataatcctcctct

SEQ ID NO: 2398399 - DNA, 25 bp, Homo sapien
tcttgccaggagtatagtcgctgcc

SEQ ID NO: 2398400 - DNA, 25 bp, Homo sapien
ttcttcttgccaggagtatagtcgc

SEQ ID NO: 2398401 - DNA, 25 bp, Homo sapien
ggagtatagtcgctgccctcactgt

SEQ ID NO: 2398402 - DNA, 25 bp, Homo sapien
cctcactgtctgagcgcagagccac

SEQ ID NO: 2398403 - DNA, 25 bp, Homo sapien
cctcctcctccacaaactctggccc

SEQ ID NO: 2398404 - DNA, 25 bp, Homo sapien
cctcctccacaaactctggcccctc

SEQ ID NO: 2398405 - DNA, 25 bp, Homo sapien
ctccacaaactctggcccctcccca

SEQ ID NO: 2398406 - DNA, 25 bp, Homo sapien
tccacaaactctggcccctccccag

SEQ ID NO: 2398407 - DNA, 25 bp, Homo sapien
ttttggcgcttgctcttagggattt

SEQ ID NO: 2398408 - DNA, 25 bp, Homo sapien
ctttttttggcgcttgctcttaggg

SEQ ID NO: 2398409 - DNA, 25 bp, Homo sapien
ttttttggcgcttgctcttagggat

SEQ ID NO: 2398410 - DNA, 25 bp, Homo sapien
ctcctttttttggcgcttgctctta

SEQ ID NO: 2398411 - DNA, 25 bp, Homo sapien
ttccatgcacatggagccccccaaa

SEQ ID NO: 2398412 - DNA, 25 bp, Homo sapien
aacttctcaggcaaataatatgctg

SEQ ID NO: 2398413 - DNA, 25 bp, Homo sapien
gctgaaatggcaaaccgcaaactta

SEQ ID NO: 2398414 - DNA, 25 bp, Homo sapien
ggaggcaaaggggacatccttccat

SEQ ID NO: 2398415 - DNA, 25 bp, Homo sapien
ttcaaaagtgcatccatatcctcct

SEQ ID NO: 2398416 - DNA, 25 bp, Homo sapien
gacggggagcccaggcccgacgcca

SEQ ID NO: 2398417 - DNA, 25 bp, Homo sapien
gccgagcagggggacggggagccca

SEQ ID NO: 2398418 - DNA, 25 bp, Homo sapien
gagcagggggacggggagcccaggc

SEQ ID NO: 2398419 - DNA, 25 bp, Homo sapien
acggggagcccaggcccgacgccat

SEQ ID NO: 2398420 - DNA, 25 bp, Homo sapien
cccggccagggaattggcccagctg

SEQ ID NO: 2398421 - DNA, 25 bp, Homo sapien
tcccggccagggaattggcccagct

SEQ ID NO: 2398422 - DNA, 25 bp, Homo sapien
ctcccggccagggaattggcccagc

SEQ ID NO: 2398423 - DNA, 25 bp, Homo sapien
tgtcctctgggacaactcaggttct

SEQ ID NO: 2398424 - DNA, 25 bp, Homo sapien
cgctcggggacacaaggtcacttgg

SEQ ID NO: 2398425 - DNA, 25 bp, Homo sapien
ccgaaccgctcaggctgaacttagt

SEQ ID NO: 2398426 - DNA, 25 bp, Homo sapien
tgaacttagttccacactcctcggg

SEQ ID NO: 2398427 - DNA, 25 bp, Homo sapien
gggggcgtggaggctcgggcgctgc

SEQ ID NO: 2398428 - DNA, 25 bp, Homo sapien
ggcgtggaggctcgggcgctgcggg

SEQ ID NO: 2398429 - DNA, 25 bp, Homo sapien
cgtggaggctcgggcgctgcggggg

SEQ ID NO: 2398430 - DNA, 25 bp, Homo sapien
cgagggggcgtggaggctcgggcgc

SEQ ID NO: 2398431 - DNA, 25 bp, Homo sapien
gctgggtccggctcggtgtcactcc

SEQ ID NO: 2398432 - DNA, 25 bp, Homo sapien
ggagccgccgcaggtcgcgctgggt

SEQ ID NO: 2398433 - DNA, 25 bp, Homo sapien
cggctccagcgtcgcctcttaaagg

SEQ ID NO: 2398434 - DNA, 25 bp, Homo sapien
tcgtcgctcaggcaaccactggcca

SEQ ID NO: 2398435 - DNA, 25 bp, Homo sapien
tcttcactcttggacctaatgctaa

SEQ ID NO: 2398436 - DNA, 25 bp, Homo sapien
taatgctaacatcccataataattc

SEQ ID NO: 2398437 - DNA, 25 bp, Homo sapien
cttcactcttggacctaatgctaac

SEQ ID NO: 2398438 - DNA, 25 bp, Homo sapien
gacctaatgctaacatcccataata

SEQ ID NO: 2398439 - DNA, 25 bp, Homo sapien
ggattccccaaaccctgagtgagaa

SEQ ID NO: 2398440 - DNA, 25 bp, Homo sapien
ttgggattccccaaaccctgagtga

SEQ ID NO: 2398441 - DNA, 25 bp, Homo sapien
tgccaagaagtgagagagttgaaat

SEQ ID NO: 2398442 - DNA, 25 bp, Homo sapien
cattgccaagaagtgagagagttga

SEQ ID NO: 2398443 - DNA, 25 bp, Homo sapien
ttccaggactttccgtgctcctctg

SEQ ID NO: 2398444 - DNA, 25 bp, Homo sapien
tcctctggcaaggacaacatggtga

SEQ ID NO: 2398445 - DNA, 25 bp, Homo sapien
ttcctgtgtgagattaaccttccgt

SEQ ID NO: 2398446 - DNA, 25 bp, Homo sapien
tgagaattaccccaacttgtccagg

SEQ ID NO: 2398447 - DNA, 25 bp, Homo sapien
gttttaagattaatgattgtggccg

SEQ ID NO: 2398448 - DNA, 25 bp, Homo sapien
taagattaatgattgtggccgggtg

SEQ ID NO: 2398449 - DNA, 25 bp, Homo sapien
tgccctcctttgatatcccttacct

SEQ ID NO: 2398450 - DNA, 25 bp, Homo sapien
tttaagattaatgattgtggccggg

SEQ ID NO: 2398451 - DNA, 25 bp, Homo sapien
ggatggtccctgctcagtgtacaca

SEQ ID NO: 2398452 - DNA, 25 bp, Homo sapien
tgtacacaatcaggagtgctgcctt

SEQ ID NO: 2398453 - DNA, 25 bp, Homo sapien
catgtggagggaccatcctaccgag

SEQ ID NO: 2398454 - DNA, 25 bp, Homo sapien
ccatcctaccgaggagacagacttt

SEQ ID NO: 2398455 - DNA, 25 bp, Homo sapien
ggtgacattattgctcccatggcta

SEQ ID NO: 2398456 - DNA, 25 bp, Homo sapien
gcccctgtggcggtttagatccaga

SEQ ID NO: 2398457 - DNA, 25 bp, Homo sapien
aaagcactgtacataatgccctggg

SEQ ID NO: 2398458 - DNA, 25 bp, Homo sapien
tactcttctgcgttgctaagctgga

SEQ ID NO: 2398459 - DNA, 25 bp, Homo sapien
tcgggcacggacagcgcaatggcat

SEQ ID NO: 2398460 - DNA, 25 bp, Homo sapien
ttcttgtgtgtacaccctgtaagcc

SEQ ID NO: 2398461 - DNA, 25 bp, Homo sapien
cacggacagcgcaatggcatgtgtg

SEQ ID NO: 2398462 - DNA, 25 bp, Homo sapien
cctcccagaacgagaggcgttggga

SEQ ID NO: 2398463 - DNA, 25 bp, Homo sapien
cagagagtgggagtcggagggtcgg

SEQ ID NO: 2398464 - DNA, 25 bp, Homo sapien
gtgggagtcggagggtcggagcagc

SEQ ID NO: 2398465 - DNA, 25 bp, Homo sapien
gagtgggagtcggagggtcggagca

SEQ ID NO: 2398466 - DNA, 25 bp, Homo sapien
gacagagagtgggagtcggagggtc

SEQ ID NO: 2398467 - DNA, 25 bp, Homo sapien
tggcggcatccggcctggtggcgtc

SEQ ID NO: 2398468 - DNA, 25 bp, Homo sapien
ggcggcatccggcctggtggcgtcg

SEQ ID NO: 2398469 - DNA, 25 bp, Homo sapien
ccgcgcagggtgttgcggaagccct

SEQ ID NO: 2398470 - DNA, 25 bp, Homo sapien
ttcggattgcgcgagcgccgcccgc

SEQ ID NO: 2398471 - DNA, 25 bp, Homo sapien
cgtcccgttggtggccgaggtcctg

SEQ ID NO: 2398472 - DNA, 25 bp, Homo sapien
aagccctcggcgctaaagtagtaca

SEQ ID NO: 2398473 - DNA, 25 bp, Homo sapien
gctggccgccaggttacacatgtac

SEQ ID NO: 2398474 - DNA, 25 bp, Homo sapien
tgtagaccaccaagtgcaggcggtg

SEQ ID NO: 2398475 - DNA, 25 bp, Homo sapien
aagatgacgaggttagccagcagga

SEQ ID NO: 2398476 - DNA, 25 bp, Homo sapien
tgaagctctcgaagcataggcgcac

SEQ ID NO: 2398477 - DNA, 25 bp, Homo sapien
cctagaggctgtacagacatggtcc

SEQ ID NO: 2398478 - DNA, 25 bp, Homo sapien
ttgggtgcgtttggtcacagcttca

SEQ ID NO: 2398479 - DNA, 25 bp, Homo sapien
ccaaagtgggattgggagctaggct

SEQ ID NO: 2398480 - DNA, 25 bp, Homo sapien
aatgtgggctatggctgcagggaca

SEQ ID NO: 2398481 - DNA, 25 bp, Homo sapien
ggatcctggtggtcaaaaagccgcc

SEQ ID NO: 2398482 - DNA, 25 bp, Homo sapien
tcaaaaagccgcctctttctgacag

SEQ ID NO: 2398483 - DNA, 25 bp, Homo sapien
cacagaacggcccaagctgagcact

SEQ ID NO: 2398484 - DNA, 25 bp, Homo sapien
tttataaaggatcctggtggtcaaa

SEQ ID NO: 2398485 - DNA, 25 bp, Homo sapien
tatacacacacgctaagagatgtgc

SEQ ID NO: 2398486 - DNA, 25 bp, Homo sapien
gaagaacgtcggcacacactgatgt

SEQ ID NO: 2398487 - DNA, 25 bp, Homo sapien
cagtgccaggccagatggcgaagat

SEQ ID NO: 2398488 - DNA, 25 bp, Homo sapien
ttcaggagctgaatgggcacagtgc

SEQ ID NO: 2398489 - DNA, 25 bp, Homo sapien
gtccgggactgctccttctatatca

SEQ ID NO: 2398490 - DNA, 25 bp, Homo sapien
caccgctcacacaccagaatgtgtg

SEQ ID NO: 2398491 - DNA, 25 bp, Homo sapien
ggtctccgtccttcagcttcccatg

SEQ ID NO: 2398492 - DNA, 25 bp, Homo sapien
agcaaagtgaccacgacacacacag

SEQ ID NO: 2398493 - DNA, 25 bp, Homo sapien
tctgtcccatttgccctctgagctg

SEQ ID NO: 2398494 - DNA, 25 bp, Homo sapien
gcagggctattttatgccagaggca

SEQ ID NO: 2398495 - DNA, 25 bp, Homo sapien
taaaagtgagcaggaggtgcaatca

SEQ ID NO: 2398496 - DNA, 25 bp, Homo sapien
ggtgcaatcatgatcattccctcac

SEQ ID NO: 2398497 - DNA, 25 bp, Homo sapien
ctcccagctcagtgcactcacccaa

SEQ ID NO: 2398498 - DNA, 25 bp, Homo sapien
ccacacgggccaaggagagagtgaa

SEQ ID NO: 2398499 - DNA, 25 bp, Homo sapien
aagctggcttccgctgcctgctctg

SEQ ID NO: 2398500 - DNA, 25 bp, Homo sapien
acacccacctcagcagatctcagcc

SEQ ID NO: 2398501 - DNA, 25 bp, Homo sapien
ggccctctctgggactgttgctcca

SEQ ID NO: 2398502 - DNA, 25 bp, Homo sapien
gttgctccaacccaaggaaatgtga

SEQ ID NO: 2398503 - DNA, 25 bp, Homo sapien
caaaacaatagagaacgtgggcagg

SEQ ID NO: 2398504 - DNA, 25 bp, Homo sapien
catcttttaaggagggcgcagctcc

SEQ ID NO: 2398505 - DNA, 25 bp, Homo sapien
tcctggctccatcgaagcacaacgt

SEQ ID NO: 2398506 - DNA, 25 bp, Homo sapien
ttttgccagggctcagcgcactgta

SEQ ID NO: 2398507 - DNA, 25 bp, Homo sapien
tctgcagacatctcatgcgggacac

SEQ ID NO: 2398508 - DNA, 25 bp, Homo sapien
cgaactggcctagagtcaaggtgct

SEQ ID NO: 2398509 - DNA, 25 bp, Homo sapien
tttaaagccagaggagacatcaagc

SEQ ID NO: 2398510 - DNA, 25 bp, Homo sapien
tcatcccaggctacttggtgagtaa

SEQ ID NO: 2398511 - DNA, 25 bp, Homo sapien
agaggagacatcaagcagcccaacc

SEQ ID NO: 2398512 - DNA, 25 bp, Homo sapien
ccaacccctttcatgcagaaacagg

SEQ ID NO: 2398513 - DNA, 25 bp, Homo sapien
ccagctgcctaggagggccttgctt

SEQ ID NO: 2398514 - DNA, 25 bp, Homo sapien
caccagctgcctaggagggccttgc

SEQ ID NO: 2398515 - DNA, 25 bp, Homo sapien
acctcaacgtccaagtcctggccca

SEQ ID NO: 2398516 - DNA, 25 bp, Homo sapien
agctgcctaggagggccttgcttcc

SEQ ID NO: 2398517 - DNA, 25 bp, Homo sapien
cttccgattgcggtttctcatcaga

SEQ ID NO: 2398518 - DNA, 25 bp, Homo sapien
tactggatatagtctgtgtcacaaa

SEQ ID NO: 2398519 - DNA, 25 bp, Homo sapien
ccgattgcggtttctcatcagacac

SEQ ID NO: 2398520 - DNA, 25 bp, Homo sapien
tgaaggaacagtagtttgggtactg

SEQ ID NO: 2398521 - DNA, 25 bp, Homo sapien
gaactcagtctggagccacccagag

SEQ ID NO: 2398522 - DNA, 25 bp, Homo sapien
ttggtagggaaatccccatcctgga

SEQ ID NO: 2398523 - DNA, 25 bp, Homo sapien
gagactcggacatcttcacagcctt

SEQ ID NO: 2398524 - DNA, 25 bp, Homo sapien
cgtacaaatccagcccgtaaaagcg

SEQ ID NO: 2398525 - DNA, 25 bp, Homo sapien
taggggagaggtgcgtgcccctccc

SEQ ID NO: 2398526 - DNA, 25 bp, Homo sapien
aggagataggggagaggtgcgtgcc

SEQ ID NO: 2398527 - DNA, 25 bp, Homo sapien
gataggggagaggtgcgtgcccctc

SEQ ID NO: 2398528 - DNA, 25 bp, Homo sapien
gagataggggagaggtgcgtgcccc

SEQ ID NO: 2398529 - DNA, 25 bp, Homo sapien
tgtcgccgcccaaggctgtcacaga

SEQ ID NO: 2398530 - DNA, 25 bp, Homo sapien
tgtcgcattgttgccgctgcaggct

SEQ ID NO: 2398531 - DNA, 25 bp, Homo sapien
tccagcttcaaggagcagaagtcac

SEQ ID NO: 2398532 - DNA, 25 bp, Homo sapien
agggcacaggtagacatgtgtcgcc

SEQ ID NO: 2398533 - DNA, 25 bp, Homo sapien
ggttaacccatcattccagtaccat

SEQ ID NO: 2398534 - DNA, 25 bp, Homo sapien
cctaggtgatcatctatctgcaggg

SEQ ID NO: 2398535 - DNA, 25 bp, Homo sapien
ccagtaccataaatgggagttcctc

SEQ ID NO: 2398536 - DNA, 25 bp, Homo sapien
tctgggtagtctatttgtctgtcac

SEQ ID NO: 2398537 - DNA, 25 bp, Homo sapien
acgatcgaatagcacagcaccagca

SEQ ID NO: 2398538 - DNA, 25 bp, Homo sapien
atgatgcaggtattctccacgatcg

SEQ ID NO: 2398539 - DNA, 25 bp, Homo sapien
atcgaatagcacagcaccagcaagg

SEQ ID NO: 2398540 - DNA, 25 bp, Homo sapien
tattctccacgatcgaatagcacag

SEQ ID NO: 2398541 - DNA, 25 bp, Homo sapien
gattgcaatgctaaacagggcagag

SEQ ID NO: 2398542 - DNA, 25 bp, Homo sapien
tcaggattgcaatgctaaacagggc

SEQ ID NO: 2398543 - DNA, 25 bp, Homo sapien
tttctcaggattgcaatgctaaaca

SEQ ID NO: 2398544 - DNA, 25 bp, Homo sapien
gcaatgctaaacagggcagagacaa

SEQ ID NO: 2398545 - DNA, 25 bp, Homo sapien
gacaggtctgagtggatctggaggc

SEQ ID NO: 2398546 - DNA, 25 bp, Homo sapien
gcagttgctagctgtgcctgaagtc

SEQ ID NO: 2398547 - DNA, 25 bp, Homo sapien
cagtgcttaagccaacaatgggcac

SEQ ID NO: 2398548 - DNA, 25 bp, Homo sapien
gaggctgaagctaggaaaatgggct

SEQ ID NO: 2398549 - DNA, 25 bp, Homo sapien
tctccagtaggagttctcatcatat

SEQ ID NO: 2398550 - DNA, 25 bp, Homo sapien
tttcctgggctgatcgaatgagctc

SEQ ID NO: 2398551 - DNA, 25 bp, Homo sapien
agtagactctacttctcgtacccgg

SEQ ID NO: 2398552 - DNA, 25 bp, Homo sapien
gaagggttagaagatagagattcag

SEQ ID NO: 2398553 - DNA, 25 bp, Homo sapien
ctgagacacagcctcccgtccctcc

SEQ ID NO: 2398554 - DNA, 25 bp, Homo sapien
ccttagtcccctgtccttcttcctg

SEQ ID NO: 2398555 - DNA, 25 bp, Homo sapien
cctgcttgtgttcttgtgtcggctc

SEQ ID NO: 2398556 - DNA, 25 bp, Homo sapien
cacagcctcccgtccctccttagtc

SEQ ID NO: 2398557 - DNA, 25 bp, Homo sapien
ctgcttgtgctctggcgcttgctcc

SEQ ID NO: 2398558 - DNA, 25 bp, Homo sapien
ctcctgcttgtgctctggcgcttgc

SEQ ID NO: 2398559 - DNA, 25 bp, Homo sapien
cttgtgctctggcgcttgctcctgg

SEQ ID NO: 2398560 - DNA, 25 bp, Homo sapien
ttgtgctctggcgcttgctcctggc

SEQ ID NO: 2398561 - DNA, 25 bp, Homo sapien
aaggaggattgtaggagctcttcca

SEQ ID NO: 2398562 - DNA, 25 bp, Homo sapien
aggaggattgtaggagctcttccac

SEQ ID NO: 2398563 - DNA, 25 bp, Homo sapien
cagggctggaaggtctggcgttctg

SEQ ID NO: 2398564 - DNA, 25 bp, Homo sapien
ggctggaaggtctggcgttctgtca

SEQ ID NO: 2398565 - DNA, 25 bp, Homo sapien
ttgttgctgagcctctcaggccagg

SEQ ID NO: 2398566 - DNA, 25 bp, Homo sapien
ttgctgagcctctcaggccagggct

SEQ ID NO: 2398567 - DNA, 25 bp, Homo sapien
tctccttgagagtgttaggtgagag

SEQ ID NO: 2398568 - DNA, 25 bp, Homo sapien
agtgttaggtgagagaatagagact

SEQ ID NO: 2398569 - DNA, 25 bp, Homo sapien
catcgtggtgggtgagacttcagct

SEQ ID NO: 2398570 - DNA, 25 bp, Homo sapien
gaggtcatcgtggtgggtgagactt

SEQ ID NO: 2398571 - DNA, 25 bp, Homo sapien
caacggtagtgagtgaactggcaga

SEQ ID NO: 2398572 - DNA, 25 bp, Homo sapien
cagaaagactcaaaccaggaggcat

SEQ ID NO: 2398573 - DNA, 25 bp, Homo sapien
gcatagtagacgtggttggagcaac

SEQ ID NO: 2398574 - DNA, 25 bp, Homo sapien
ggcataagggaggttggagcagaca

SEQ ID NO: 2398575 - DNA, 25 bp, Homo sapien
tccagctggacgagtgtgggattcc

SEQ ID NO: 2398576 - DNA, 25 bp, Homo sapien
aagcgttcgtattcggtaggagaga

SEQ ID NO: 2398577 - DNA, 25 bp, Homo sapien
tcagcagtgcgaagaagcgttcgta

SEQ ID NO: 2398578 - DNA, 25 bp, Homo sapien
catcgggcactaagccgtggttttc

SEQ ID NO: 2398579 - DNA, 25 bp, Homo sapien
tggagtggaggcctgagtcgaatcc

SEQ ID NO: 2398580 - DNA, 25 bp, Homo sapien
gagtggaggcctgagtcgaatcctg

SEQ ID NO: 2398581 - DNA, 25 bp, Homo sapien
gtggaggcctgagtcgaatcctggg

SEQ ID NO: 2398582 - DNA, 25 bp, Homo sapien
ctggagtggaggcctgagtcgaatc

SEQ ID NO: 2398583 - DNA, 25 bp, Homo sapien
cggcaggtgccagaggcaggagcag

SEQ ID NO: 2398584 - DNA, 25 bp, Homo sapien
ctgcggcaggtgccagaggcaggag

SEQ ID NO: 2398585 - DNA, 25 bp, Homo sapien
tgcggcaggtgccagaggcaggagc

SEQ ID NO: 2398586 - DNA, 25 bp, Homo sapien
gcaggtgccagaggcaggagcagca

SEQ ID NO: 2398587 - DNA, 25 bp, Homo sapien
gaacggatgatggaaggaccgaacc

SEQ ID NO: 2398588 - DNA, 25 bp, Homo sapien
gacccagcgcgaccaccatgaggaa

SEQ ID NO: 2398589 - DNA, 25 bp, Homo sapien
catgaggaagcgatccagaaaccgt

SEQ ID NO: 2398590 - DNA, 25 bp, Homo sapien
aaaacccgctccgagaccaggacag

SEQ ID NO: 2398591 - DNA, 25 bp, Homo sapien
agggaaggaagccagcggctggctt

SEQ ID NO: 2398592 - DNA, 25 bp, Homo sapien
agtgagggaaggaagccagcggctg

SEQ ID NO: 2398593 - DNA, 25 bp, Homo sapien
ccttcaggagtgagggaaggaagcc

SEQ ID NO: 2398594 - DNA, 25 bp, Homo sapien
ggaagccagcggctggcttcctcat

SEQ ID NO: 2398595 - DNA, 25 bp, Homo sapien
aagccgcctctaacgggccaagccg

SEQ ID NO: 2398596 - DNA, 25 bp, Homo sapien
atccgcccgcgtcccgtggacacaa

SEQ ID NO: 2398597 - DNA, 25 bp, Homo sapien
acacaagccgcctctaacgggccaa

SEQ ID NO: 2398598 - DNA, 25 bp, Homo sapien
ggccggagaagatccgcccgcgtcc

SEQ ID NO: 2398599 - DNA, 25 bp, Homo sapien
ccagaggacgcaaaatgaatgctca

SEQ ID NO: 2398600 - DNA, 25 bp, Homo sapien
gaggcaccactctggtttcatgtcg

SEQ ID NO: 2398601 - DNA, 25 bp, Homo sapien
ttcatgtcgtgtcctaattctggca

SEQ ID NO: 2398602 - DNA, 25 bp, Homo sapien
cacattgcatccaacccagaggacg

SEQ ID NO: 2398603 - DNA, 25 bp, Homo sapien
caggatgaatcctcttggcacagag

SEQ ID NO: 2398604 - DNA, 25 bp, Homo sapien
tacagcaccgacctcagcatggagg

SEQ ID NO: 2398605 - DNA, 25 bp, Homo sapien
tccctaccagggtctgatgcagcct

SEQ ID NO: 2398606 - DNA, 25 bp, Homo sapien
gaaaagtgttgatcacacctagccc

SEQ ID NO: 2398607 - DNA, 25 bp, Homo sapien
tgtggaagaaactgtgttggaatcc

SEQ ID NO: 2398608 - DNA, 25 bp, Homo sapien
gaagaaactgtgttggaatccaagg

SEQ ID NO: 2398609 - DNA, 25 bp, Homo sapien
gaaactgtgttggaatccaaggccc

SEQ ID NO: 2398610 - DNA, 25 bp, Homo sapien
ggggatgtggaagaaactgtgttgg

SEQ ID NO: 2398611 - DNA, 25 bp, Homo sapien
cttcttccgttcttgggagcagcgt

SEQ ID NO: 2398612 - DNA, 25 bp, Homo sapien
cttccgttcttgggagcagcgtggg

SEQ ID NO: 2398613 - DNA, 25 bp, Homo sapien
tcttccgttcttgggagcagcgtgg

SEQ ID NO: 2398614 - DNA, 25 bp, Homo sapien
ttcttccgttcttgggagcagcgtg

SEQ ID NO: 2398615 - DNA, 25 bp, Homo sapien
ccgaggcttggttgtcagccccaca

SEQ ID NO: 2398616 - DNA, 25 bp, Homo sapien
catttcccccgaggcttggttgtca

SEQ ID NO: 2398617 - DNA, 25 bp, Homo sapien
aggcaaaatggaaccactcaatgga

SEQ ID NO: 2398618 - DNA, 25 bp, Homo sapien
tcagccccacacaggcaaaatggaa

SEQ ID NO: 2398619 - DNA, 25 bp, Homo sapien
ccaaggccaaccagttcccaccatc

SEQ ID NO: 2398620 - DNA, 25 bp, Homo sapien
ggaaggagagaaagcccctccagat

SEQ ID NO: 2398621 - DNA, 25 bp, Homo sapien
ggagaattcttggaagtcccaaggc

SEQ ID NO: 2398622 - DNA, 25 bp, Homo sapien
cagattccttaggaacatcctgtcc

SEQ ID NO: 2398623 - DNA, 25 bp, Homo sapien
ggatgacagtcgtgtgccactatgc

SEQ ID NO: 2398624 - DNA, 25 bp, Homo sapien
atgacagtcgtgtgccactatgctc

SEQ ID NO: 2398625 - DNA, 25 bp, Homo sapien
tgggatgacagtcgtgtgccactat

SEQ ID NO: 2398626 - DNA, 25 bp, Homo sapien
gcccaggttagagtgtggtggcgtg

SEQ ID NO: 2398627 - DNA, 25 bp, Homo sapien
catctttcttctattctgaagtccc

SEQ ID NO: 2398628 - DNA, 25 bp, Homo sapien
cactcccttcatgcccctcacaacc

SEQ ID NO: 2398629 - DNA, 25 bp, Homo sapien
cccactcccttcatgcccctcacaa

SEQ ID NO: 2398630 - DNA, 25 bp, Homo sapien
ccactcccttcatgcccctcacaac

SEQ ID NO: 2398631 - DNA, 25 bp, Homo sapien
acagccaatcatctctccataggag

SEQ ID NO: 2398632 - DNA, 25 bp, Homo sapien
tcacagccaatcatctctccatagg

SEQ ID NO: 2398633 - DNA, 25 bp, Homo sapien
gttgtcacagccaatcatctctcca

SEQ ID NO: 2398634 - DNA, 25 bp, Homo sapien
tgtcacagccaatcatctctccata

SEQ ID NO: 2398635 - DNA, 25 bp, Homo sapien
tcactgagggcatcccatactcagg

SEQ ID NO: 2398636 - DNA, 25 bp, Homo sapien
caataggtgggttcgttgggatcca

SEQ ID NO: 2398637 - DNA, 25 bp, Homo sapien
tggacactgccaaaggtcactgagg

SEQ ID NO: 2398638 - DNA, 25 bp, Homo sapien
cacaggcatatccaacacatcagag

SEQ ID NO: 2398639 - DNA, 25 bp, Homo sapien
tgtcatctacaggaagggaagctaa

SEQ ID NO: 2398640 - DNA, 25 bp, Homo sapien
aagaagagttcttggcgcagacata

SEQ ID NO: 2398641 - DNA, 25 bp, Homo sapien
cgcagacatatagaaagcggcaggg

SEQ ID NO: 2398642 - DNA, 25 bp, Homo sapien
atgtcatccggcaaagggctccctg

SEQ ID NO: 2398643 - DNA, 25 bp, Homo sapien
cctttggaacgagcacgagcagctt

SEQ ID NO: 2398644 - DNA, 25 bp, Homo sapien
tgcgcacgagctttaacttcttctg

SEQ ID NO: 2398645 - DNA, 25 bp, Homo sapien
aacgagcacgagcagctttcttctc

SEQ ID NO: 2398646 - DNA, 25 bp, Homo sapien
ttttccctttggaacgagcacgagc

SEQ ID NO: 2398647 - DNA, 25 bp, Homo sapien
tccaacctggtgccaaacttcccac

SEQ ID NO: 2398648 - DNA, 25 bp, Homo sapien
ttccaacctggtgccaaacttccca

SEQ ID NO: 2398649 - DNA, 25 bp, Homo sapien
agagctgtcatagtcacttgactca

SEQ ID NO: 2398650 - DNA, 25 bp, Homo sapien
aggtctgtgtccagccgccgaatgt

SEQ ID NO: 2398651 - DNA, 25 bp, Homo sapien
ccagccgccgaatgtgtttgtccac

SEQ ID NO: 2398652 - DNA, 25 bp, Homo sapien
tcagcctcaaaacgggccaggtctg

SEQ ID NO: 2398653 - DNA, 25 bp, Homo sapien
gattagatgggaagtaggtggggag

SEQ ID NO: 2398654 - DNA, 25 bp, Homo sapien
ggattagatgggaagtaggtgggga

SEQ ID NO: 2398655 - DNA, 25 bp, Homo sapien
attagatgggaagtaggtggggagc

SEQ ID NO: 2398656 - DNA, 25 bp, Homo sapien
catatactcagtggccaacttgtca

SEQ ID NO: 2398657 - DNA, 25 bp, Homo sapien
ggccaatttttcctcggagctcagg

SEQ ID NO: 2398658 - DNA, 25 bp, Homo sapien
ggctgcgggcactactcatatactc

SEQ ID NO: 2398659 - DNA, 25 bp, Homo sapien
tgcacttgccataggcttcctggat

SEQ ID NO: 2398660 - DNA, 25 bp, Homo sapien
ggaatagctccaacagacatctttg

SEQ ID NO: 2398661 - DNA, 25 bp, Homo sapien
aagaaaccaagtgaatgccccaatg

SEQ ID NO: 2398662 - DNA, 25 bp, Homo sapien
gcttcatgtatctcaaaaccagtct

SEQ ID NO: 2398663 - DNA, 25 bp, Homo sapien
ccttcagtgggtatgggaatagctc

SEQ ID NO: 2398664 - DNA, 25 bp, Homo sapien
aggctggagatggtatctaatgctt

SEQ ID NO: 2398665 - DNA, 25 bp, Homo sapien
ccaggctggagatggtatctaatgc

SEQ ID NO: 2398666 - DNA, 25 bp, Homo sapien
gttccaggctggagatggtatctaa

SEQ ID NO: 2398667 - DNA, 25 bp, Homo sapien
tgttccaggctggagatggtatcta

SEQ ID NO: 2398668 - DNA, 25 bp, Homo sapien
taagtgtgaacggtatagagatccc

SEQ ID NO: 2398669 - DNA, 25 bp, Homo sapien
taaatatatcaaacgtggagagcag

SEQ ID NO: 2398670 - DNA, 25 bp, Homo sapien
gttgcagtctaaagtcacactggga

SEQ ID NO: 2398671 - DNA, 25 bp, Homo sapien
tcctgttttaagaattccaagagcg

SEQ ID NO: 2398672 - DNA, 25 bp, Homo sapien
ctgttctttggtctaggtccctcat

SEQ ID NO: 2398673 - DNA, 25 bp, Homo sapien
tctgttctttggtctaggtccctca

SEQ ID NO: 2398674 - DNA, 25 bp, Homo sapien
tgttctttggtctaggtccctcatg

SEQ ID NO: 2398675 - DNA, 25 bp, Homo sapien
ctaggtccctcatgagctgaaagtt

SEQ ID NO: 2398676 - DNA, 25 bp, Homo sapien
gcgtgagccaccgctcccagccttt

SEQ ID NO: 2398677 - DNA, 25 bp, Homo sapien
agccaccgctcccagcctttttgtt

SEQ ID NO: 2398678 - DNA, 25 bp, Homo sapien
gcctcccaatgtgctaggattatag

SEQ ID NO: 2398679 - DNA, 25 bp, Homo sapien
tgacctaaggcgatccacccatctc

SEQ ID NO: 2398680 - DNA, 25 bp, Homo sapien
ataatgttccaaatacatccccgca

SEQ ID NO: 2398681 - DNA, 25 bp, Homo sapien
gttccaaatacatccccgcagccat

SEQ ID NO: 2398682 - DNA, 25 bp, Homo sapien
aatgttccaaatacatccccgcagc

SEQ ID NO: 2398683 - DNA, 25 bp, Homo sapien
tgtccagataatgttccaaatacat

SEQ ID NO: 2398684 - DNA, 25 bp, Homo sapien
cgaagccattttgcggctaaagcct

SEQ ID NO: 2398685 - DNA, 25 bp, Homo sapien
gcgacaggggccgaagccattttgc

SEQ ID NO: 2398686 - DNA, 25 bp, Homo sapien
gatccgccccggaagtgactgtaac

SEQ ID NO: 2398687 - DNA, 25 bp, Homo sapien
gcaaaacaaagcaacttccgatccg

SEQ ID NO: 2398688 - DNA, 25 bp, Homo sapien
cgcgaccgagacaggtatgacgtca

SEQ ID NO: 2398689 - DNA, 25 bp, Homo sapien
cgagacaggtatgacgtcactggag

SEQ ID NO: 2398690 - DNA, 25 bp, Homo sapien
gtatgacgtcactggaggtcgccat

SEQ ID NO: 2398691 - DNA, 25 bp, Homo sapien
accccaggacgcgaccgagacaggt

SEQ ID NO: 2398692 - DNA, 25 bp, Homo sapien
tctcagcaactggaagatccaactt

SEQ ID NO: 2398693 - DNA, 25 bp, Homo sapien
ttctcagcaactggaagatccaact

SEQ ID NO: 2398694 - DNA, 25 bp, Homo sapien
tctatacaatgttctaaaaacaccc

SEQ ID NO: 2398695 - DNA, 25 bp, Homo sapien
tctgactgtggcacctagggagcta

SEQ ID NO: 2398696 - DNA, 25 bp, Homo sapien
tagggagctaagtccagtccttgcg

SEQ ID NO: 2398697 - DNA, 25 bp, Homo sapien
taaggatagggtaagtggccacact

SEQ ID NO: 2398698 - DNA, 25 bp, Homo sapien
aatggttacaacaaagatggccgtg

SEQ ID NO: 2398699 - DNA, 25 bp, Homo sapien
gatgtccttatgatgctccgccgtc

SEQ ID NO: 2398700 - DNA, 25 bp, Homo sapien
ccttatgatgctccgccgtcttata

SEQ ID NO: 2398701 - DNA, 25 bp, Homo sapien
cgccgtcttatacggggtcaggtca

SEQ ID NO: 2398702 - DNA, 25 bp, Homo sapien
cagtgaggcagatgtccttatgatg

SEQ ID NO: 2398703 - DNA, 25 bp, Homo sapien
gggtggagggttgggattgctgtcc

SEQ ID NO: 2398704 - DNA, 25 bp, Homo sapien
ggtggagggttgggattgctgtccc

SEQ ID NO: 2398705 - DNA, 25 bp, Homo sapien
tggtggctgttgctgctgctgctgc

SEQ ID NO: 2398706 - DNA, 25 bp, Homo sapien
ctggaagtgtggtggtggctgttgc

SEQ ID NO: 2398707 - DNA, 25 bp, Homo sapien
tgctgctgtgatgcctgggaggcct

SEQ ID NO: 2398708 - DNA, 25 bp, Homo sapien
ctgctgtgatgcctgggaggcctgg

SEQ ID NO: 2398709 - DNA, 25 bp, Homo sapien
ctgctgctgtgatgcctgggaggcc

SEQ ID NO: 2398710 - DNA, 25 bp, Homo sapien
tgctgctgctgtgatgcctgggagg

SEQ ID NO: 2398711 - DNA, 25 bp, Homo sapien
ctgggcttgagcttgagcctgggcc

SEQ ID NO: 2398712 - DNA, 25 bp, Homo sapien
ctgggcctgggccactgctgccgct

SEQ ID NO: 2398713 - DNA, 25 bp, Homo sapien
agcctgggcctgggccactgctgcc

SEQ ID NO: 2398714 - DNA, 25 bp, Homo sapien
ctgctgctgctgcctgcacctgttg

SEQ ID NO: 2398715 - DNA, 25 bp, Homo sapien
ttgtgtttgcgcatatgtttcataa

SEQ ID NO: 2398716 - DNA, 25 bp, Homo sapien
tcaggcgggttgtgtttgcgcatat

SEQ ID NO: 2398717 - DNA, 25 bp, Homo sapien
cgggttgtgtttgcgcatatgtttc

SEQ ID NO: 2398718 - DNA, 25 bp, Homo sapien
aagatcaggcgggttgtgtttgcgc

SEQ ID NO: 2398719 - DNA, 25 bp, Homo sapien
tcaaagacccctgaatgaaacaact

SEQ ID NO: 2398720 - DNA, 25 bp, Homo sapien
aggctctgattctgctgtaagcaga

SEQ ID NO: 2398721 - DNA, 25 bp, Homo sapien
agactgagcaaaactcaagtagcac

SEQ ID NO: 2398722 - DNA, 25 bp, Homo sapien
gattacttgtaactagcaccccagg

SEQ ID NO: 2398723 - DNA, 25 bp, Homo sapien
tagtgaggctgcatccgtgtacgcc

SEQ ID NO: 2398724 - DNA, 25 bp, Homo sapien
cgtgtacgcccgatgacagttgtgg

SEQ ID NO: 2398725 - DNA, 25 bp, Homo sapien
tagacaggtgcacctctagtgaggc

SEQ ID NO: 2398726 - DNA, 25 bp, Homo sapien
tgtgtatgcccgactgcagatagtg

SEQ ID NO: 2398727 - DNA, 25 bp, Homo sapien
aaatggccccatgtctcagactcaa

SEQ ID NO: 2398728 - DNA, 25 bp, Homo sapien
ataatgtttgagtgtaaaggagtcc

SEQ ID NO: 2398729 - DNA, 25 bp, Homo sapien
tctttgggtccctcaataatgtttg

SEQ ID NO: 2398730 - DNA, 25 bp, Homo sapien
catttgagaaccacgatactattca

SEQ ID NO: 2398731 - DNA, 25 bp, Homo sapien
cacagcctgggtgtgcacatttgta

SEQ ID NO: 2398732 - DNA, 25 bp, Homo sapien
tcacagcctgggtgtgcacatttgt

SEQ ID NO: 2398733 - DNA, 25 bp, Homo sapien
gcagattggagagttgtgtgaaggc

SEQ ID NO: 2398734 - DNA, 25 bp, Homo sapien
agcctgggtgtgcacatttgtatgg

SEQ ID NO: 2398735 - DNA, 25 bp, Homo sapien
gggaaagaatgtcagcaagaccatt

SEQ ID NO: 2398736 - DNA, 25 bp, Homo sapien
gatttgcttctggtcaatgcctgca

SEQ ID NO: 2398737 - DNA, 25 bp, Homo sapien
tcagatgggcctccaagaggcacca

SEQ ID NO: 2398738 - DNA, 25 bp, Homo sapien
tcctaaggaggcacatcagatgggc

SEQ ID NO: 2398739 - DNA, 25 bp, Homo sapien
agtaccaatgtgacctctctcccca

SEQ ID NO: 2398740 - DNA, 25 bp, Homo sapien
aactaagtgctttttgcagcccagc

SEQ ID NO: 2398741 - DNA, 25 bp, Homo sapien
ccctctgctaagatgagccaaggac

SEQ ID NO: 2398742 - DNA, 25 bp, Homo sapien
tagtagtgatattaatggaaactca

SEQ ID NO: 2398743 - DNA, 25 bp, Homo sapien
catccacaagaagccgggtgagacg

SEQ ID NO: 2398744 - DNA, 25 bp, Homo sapien
cctagtcactccagattcacgggat

SEQ ID NO: 2398745 - DNA, 25 bp, Homo sapien
aagatcatcacttctagttggcagg

SEQ ID NO: 2398746 - DNA, 25 bp, Homo sapien
tcctgttcataattggtgccctaag

SEQ ID NO: 2398747 - DNA, 25 bp, Homo sapien
tatcatatagtcactgcagctcccc

SEQ ID NO: 2398748 - DNA, 25 bp, Homo sapien
gggcaaatcttccaagatgggtaca

SEQ ID NO: 2398749 - DNA, 25 bp, Homo sapien
tagctcttgccccagagaagctctg

SEQ ID NO: 2398750 - DNA, 25 bp, Homo sapien
gtacgtgtctgtctcccatggatca

SEQ ID NO: 2398751 - DNA, 25 bp, Homo sapien
tagggcttggcccccgagtggatac

SEQ ID NO: 2398752 - DNA, 25 bp, Homo sapien
cgagtggatacggaggtgctgggcc

SEQ ID NO: 2398753 - DNA, 25 bp, Homo sapien
ttgatggtctccgtgtgcatcttgg

SEQ ID NO: 2398754 - DNA, 25 bp, Homo sapien
ctccgtgtgcatcttggagtggatc

SEQ ID NO: 2398755 - DNA, 25 bp, Homo sapien
tctctgctgggtgaaatgacgttgc

SEQ ID NO: 2398756 - DNA, 25 bp, Homo sapien
gttgcttgacggatgagagcacccc

SEQ ID NO: 2398757 - DNA, 25 bp, Homo sapien
tgttgctgatcgtaagtcggtggct

SEQ ID NO: 2398758 - DNA, 25 bp, Homo sapien
tgatgaagagctgcaacccatggct

SEQ ID NO: 2398759 - DNA, 25 bp, Homo sapien
agttgaatgcacaccttggctctga

SEQ ID NO: 2398760 - DNA, 25 bp, Homo sapien
ggctctgaactgaagcatatagtaa

SEQ ID NO: 2398761 - DNA, 25 bp, Homo sapien
tctgaacaaagaccaataccgcctg

SEQ ID NO: 2398762 - DNA, 25 bp, Homo sapien
cgcctgttccccatggacctgaagt

SEQ ID NO: 2398763 - DNA, 25 bp, Homo sapien
aatttccacagacagtaataggagg

SEQ ID NO: 2398764 - DNA, 25 bp, Homo sapien
cagactttggaattggagaccacaa

SEQ ID NO: 2398765 - DNA, 25 bp, Homo sapien
catggtcttagggttcacggccagg

SEQ ID NO: 2398766 - DNA, 25 bp, Homo sapien
gaggttgaggctaccaatgggcaaa

SEQ ID NO: 2398767 - DNA, 25 bp, Homo sapien
aaggatttctcacagaagttacaac

SEQ ID NO: 2398768 - DNA, 25 bp, Homo sapien
agggcttagcccctgagtgtatacg

SEQ ID NO: 2398769 - DNA, 25 bp, Homo sapien
tttctcacagaagttacaactgtag

SEQ ID NO: 2398770 - DNA, 25 bp, Homo sapien
ttagcccctgagtgtatacggatgt

SEQ ID NO: 2398771 - DNA, 25 bp, Homo sapien
agaatgtcagtgagcacatccggca

SEQ ID NO: 2398772 - DNA, 25 bp, Homo sapien
tagaatgtcagtgagcacatccggc

SEQ ID NO: 2398773 - DNA, 25 bp, Homo sapien
gaatgtcagtgagcacatccggcac

SEQ ID NO: 2398774 - DNA, 25 bp, Homo sapien
agccaagtgagggcaatggttagaa

SEQ ID NO: 2398775 - DNA, 25 bp, Homo sapien
ctgagccaagtgagggcaatggtta

SEQ ID NO: 2398776 - DNA, 25 bp, Homo sapien
ccaagtgagggcaatggttagaacc

SEQ ID NO: 2398777 - DNA, 25 bp, Homo sapien
tgagccaagtgagggcaatggttag

SEQ ID NO: 2398778 - DNA, 25 bp, Homo sapien
actccaacttgagagtagagctcta

SEQ ID NO: 2398779 - DNA, 25 bp, Homo sapien
caagagaagcccacctatctgaggt

SEQ ID NO: 2398780 - DNA, 25 bp, Homo sapien
catctttatggcctaagcttctaac

SEQ ID NO: 2398781 - DNA, 25 bp, Homo sapien
agcttctaacatggtgcccagcaca

SEQ ID NO: 2398782 - DNA, 25 bp, Homo sapien
gcaatgaccaacgtagctgctaggg

SEQ ID NO: 2398783 - DNA, 25 bp, Homo sapien
tctgggttgacatcagtagcacctg

SEQ ID NO: 2398784 - DNA, 25 bp, Homo sapien
ccccagaagggcgagcaaatgccta

SEQ ID NO: 2398785 - DNA, 25 bp, Homo sapien
gaagccaggcaattagcacaagtcc

SEQ ID NO: 2398786 - DNA, 25 bp, Homo sapien
ccaggaacacttttattgtataaag

SEQ ID NO: 2398787 - DNA, 25 bp, Homo sapien
tgatatgatggaaacattttccagg

SEQ ID NO: 2398788 - DNA, 25 bp, Homo sapien
cattttccaggaacacttttattgt

SEQ ID NO: 2398789 - DNA, 25 bp, Homo sapien
ctttataatatgatatgatggaaac

SEQ ID NO: 2398790 - DNA, 25 bp, Homo sapien
atttcctgtgccgcagttcccttcg

SEQ ID NO: 2398791 - DNA, 25 bp, Homo sapien
tgtccatttcctgtgccgcagttcc

SEQ ID NO: 2398792 - DNA, 25 bp, Homo sapien
gggaactgaatccatgagcccaagg

SEQ ID NO: 2398793 - DNA, 25 bp, Homo sapien
cacacagcaaattcgtggtggagcc

SEQ ID NO: 2398794 - DNA, 25 bp, Homo sapien
ccttcctcggttagggtcgatgcta

SEQ ID NO: 2398795 - DNA, 25 bp, Homo sapien
tctcgggcagccctgattccagcat

SEQ ID NO: 2398796 - DNA, 25 bp, Homo sapien
ggagaggacataagggtcattcatc

SEQ ID NO: 2398797 - DNA, 25 bp, Homo sapien
cttgccgtctttctgatggtcatca

SEQ ID NO: 2398798 - DNA, 25 bp, Homo sapien
agacaatcatgggagccgaaatggg

SEQ ID NO: 2398799 - DNA, 25 bp, Homo sapien
gaagagctgagacaatcatgggagc

SEQ ID NO: 2398800 - DNA, 25 bp, Homo sapien
gctgagacaatcatgggagccgaaa

SEQ ID NO: 2398801 - DNA, 25 bp, Homo sapien
gagctgagacaatcatgggagccga

SEQ ID NO: 2398802 - DNA, 25 bp, Homo sapien
tcagtcctgatcctaatcctatttc

SEQ ID NO: 2398803 - DNA, 25 bp, Homo sapien
tcatgttgttcagtcctgatcctaa

SEQ ID NO: 2398804 - DNA, 25 bp, Homo sapien
gaaaaaggagatggcgtcatgttgt

SEQ ID NO: 2398805 - DNA, 25 bp, Homo sapien
agaaaaaggagatggcgtcatgttg

SEQ ID NO: 2398806 - DNA, 25 bp, Homo sapien
cccaacccagagtacacaggaaatc

SEQ ID NO: 2398807 - DNA, 25 bp, Homo sapien
cacccccctggtaacagtgagattt

SEQ ID NO: 2398808 - DNA, 25 bp, Homo sapien
cgacccaacccagagtacacaggaa

SEQ ID NO: 2398809 - DNA, 25 bp, Homo sapien
acccagagtacacaggaaatcccaa

SEQ ID NO: 2398810 - DNA, 25 bp, Homo sapien
tctcttctccacctctgagaacagg

SEQ ID NO: 2398811 - DNA, 25 bp, Homo sapien
ccttgattgactcccttctcttctc

SEQ ID NO: 2398812 - DNA, 25 bp, Homo sapien
tcttctccacctctgagaacaggag

SEQ ID NO: 2398813 - DNA, 25 bp, Homo sapien
ctccacctctgagaacaggagactc

SEQ ID NO: 2398814 - DNA, 25 bp, Homo sapien
tgcctagcacattgctaggcacaca

SEQ ID NO: 2398815 - DNA, 25 bp, Homo sapien
aggcagggaccgcatcttctacttc

SEQ ID NO: 2398816 - DNA, 25 bp, Homo sapien
aataatcaaacacatatcccactcc

SEQ ID NO: 2398817 - DNA, 25 bp, Homo sapien
gatcatggaagatcaacacctcaga

SEQ ID NO: 2398818 - DNA, 25 bp, Homo sapien
tcagtcctgtagacggcacagggac

SEQ ID NO: 2398819 - DNA, 25 bp, Homo sapien
tgttgatgaacattgtgttctcgat

SEQ ID NO: 2398820 - DNA, 25 bp, Homo sapien
cagggaccaccgtgatattctgggt

SEQ ID NO: 2398821 - DNA, 25 bp, Homo sapien
ggactctgtgtccatactgatgcct

SEQ ID NO: 2398822 - DNA, 25 bp, Homo sapien
aagtacgggttagaattgaagtgag

SEQ ID NO: 2398823 - DNA, 25 bp, Homo sapien
ctgacctgagactgtggggatagaa

SEQ ID NO: 2398824 - DNA, 25 bp, Homo sapien
aggccagaagtacgggttagaattg

SEQ ID NO: 2398825 - DNA, 25 bp, Homo sapien
tgtggggatagaaggccagaagtac

SEQ ID NO: 2398826 - DNA, 25 bp, Homo sapien
taagcaatatatttgagaccgtgtc

SEQ ID NO: 2398827 - DNA, 25 bp, Homo sapien
tttgagaccaggctaagcaatatat

SEQ ID NO: 2398828 - DNA, 25 bp, Homo sapien
aagcaatatatttgagaccgtgtct

SEQ ID NO: 2398829 - DNA, 25 bp, Homo sapien
gagaccaggctaagcaatatatttg

SEQ ID NO: 2398830 - DNA, 25 bp, Homo sapien
tcctgccgtcttattccttctcctt

SEQ ID NO: 2398831 - DNA, 25 bp, Homo sapien
cctcctgccgtcttattccttctcc

SEQ ID NO: 2398832 - DNA, 25 bp, Homo sapien
ctcctgccgtcttattccttctcct

SEQ ID NO: 2398833 - DNA, 25 bp, Homo sapien
ttcactcctaggctcagagactggt

SEQ ID NO: 2398834 - DNA, 25 bp, Homo sapien
ccagccagcaatccaaagacgggtg

SEQ ID NO: 2398835 - DNA, 25 bp, Homo sapien
gacgaattctatcaccagcgtttgg

SEQ ID NO: 2398836 - DNA, 25 bp, Homo sapien
tagtgctaccctctacgtggataca

SEQ ID NO: 2398837 - DNA, 25 bp, Homo sapien
ttcgctcccctgagacagttcctgg

SEQ ID NO: 2398838 - DNA, 25 bp, Homo sapien
tcagcctgcaccgtggtctatctac

SEQ ID NO: 2398839 - DNA, 25 bp, Homo sapien
ttgtgccaagaagtacctccctcag

SEQ ID NO: 2398840 - DNA, 25 bp, Homo sapien
ggtctatctactggagaccccagct

SEQ ID NO: 2398841 - DNA, 25 bp, Homo sapien
ccagagcctgagccagggcgcggga

SEQ ID NO: 2398842 - DNA, 25 bp, Homo sapien
ggcgacggctgcggcggcgccagag

SEQ ID NO: 2398843 - DNA, 25 bp, Homo sapien
gagcctgagccagggcgcgggaggg

SEQ ID NO: 2398844 - DNA, 25 bp, Homo sapien
ggctgcggcggcgccagagcctgag

SEQ ID NO: 2398845 - DNA, 25 bp, Homo sapien
cgggcacgcacttctggagcgagac

SEQ ID NO: 2398846 - DNA, 25 bp, Homo sapien
cgcacttctggagcgagacagaccc

SEQ ID NO: 2398847 - DNA, 25 bp, Homo sapien
tcacacgcacggaacgcgcgcgaga

SEQ ID NO: 2398848 - DNA, 25 bp, Homo sapien
cagcgcgcgggcacgcacttctgga

SEQ ID NO: 2398849 - DNA, 25 bp, Homo sapien
gctcgtgctcccgcgaaccccagtt

SEQ ID NO: 2398850 - DNA, 25 bp, Homo sapien
ctcgtgctcccgcgaaccccagttc

SEQ ID NO: 2398851 - DNA, 25 bp, Homo sapien
agctcgtgctcccgcgaaccccagt

SEQ ID NO: 2398852 - DNA, 25 bp, Homo sapien
tagcaatgtagggggggcgctaatg

SEQ ID NO: 2398853 - DNA, 25 bp, Homo sapien
caatgtagggggggcgctaatggag

SEQ ID NO: 2398854 - DNA, 25 bp, Homo sapien
ggagggagggaaatagcaatgtagg

SEQ ID NO: 2398855 - DNA, 25 bp, Homo sapien
gagggagggaaatagcaatgtaggg

SEQ ID NO: 2398856 - DNA, 25 bp, Homo sapien
gatggccttgaaccagctgactccg

SEQ ID NO: 2398857 - DNA, 25 bp, Homo sapien
acttggaggcagagctcccgatggc

SEQ ID NO: 2398858 - DNA, 25 bp, Homo sapien
gaagtccagagaatggcacacacac

SEQ ID NO: 2398859 - DNA, 25 bp, Homo sapien
cagacaagacaaaagggactgtagg

SEQ ID NO: 2398860 - DNA, 25 bp, Homo sapien
atgggacgagaccatgaccgatgag

SEQ ID NO: 2398861 - DNA, 25 bp, Homo sapien
caaatggtgtggaatgggacgagac

SEQ ID NO: 2398862 - DNA, 25 bp, Homo sapien
accatgaccgatgagggcccaagga

SEQ ID NO: 2398863 - DNA, 25 bp, Homo sapien
gacgagaccatgaccgatgagggcc

SEQ ID NO: 2398864 - DNA, 25 bp, Homo sapien
ctgcggaaacgaggtgggtgggtgt

SEQ ID NO: 2398865 - DNA, 25 bp, Homo sapien
caggaaacgctgaccactgagtgag

SEQ ID NO: 2398866 - DNA, 25 bp, Homo sapien
ccgggaaacgcacatgagaggtaaa

SEQ ID NO: 2398867 - DNA, 25 bp, Homo sapien
caccacaacatcaggccgggaaacg

SEQ ID NO: 2398868 - DNA, 25 bp, Homo sapien
tgcttggctgcaccccaacattggg

SEQ ID NO: 2398869 - DNA, 25 bp, Homo sapien
gagtgcaaatgtgagacgagagaac

SEQ ID NO: 2398870 - DNA, 25 bp, Homo sapien
gtgagtgtgcaaggctttcatgtga

SEQ ID NO: 2398871 - DNA, 25 bp, Homo sapien
cagggacccgaagtcacagatatgt

SEQ ID NO: 2398872 - DNA, 25 bp, Homo sapien
gaatcaaggttaagagggcagagtt

SEQ ID NO: 2398873 - DNA, 25 bp, Homo sapien
cttagacaaggtggcatgagaaaaa

SEQ ID NO: 2398874 - DNA, 25 bp, Homo sapien
tctgaagacctaagttgccttccct

SEQ ID NO: 2398875 - DNA, 25 bp, Homo sapien
agcagagaataggacacagatcctg

SEQ ID NO: 2398876 - DNA, 25 bp, Homo sapien
ccctgagggtctgcgtcgcttctgg

SEQ ID NO: 2398877 - DNA, 25 bp, Homo sapien
tgcgtcgcttctggctgcggtccca

SEQ ID NO: 2398878 - DNA, 25 bp, Homo sapien
tccagccggggacaggtctgtcagt

SEQ ID NO: 2398879 - DNA, 25 bp, Homo sapien
ccctcggggctcctcatggtcaggg

SEQ ID NO: 2398880 - DNA, 25 bp, Homo sapien
taagaagggctctgcagactgggtc

SEQ ID NO: 2398881 - DNA, 25 bp, Homo sapien
aaagaggttctcttgcacactcaag

SEQ ID NO: 2398882 - DNA, 25 bp, Homo sapien
gttctctctactaaatcccctggga

SEQ ID NO: 2398883 - DNA, 25 bp, Homo sapien
tcttcagcagacaactggcaggttt

SEQ ID NO: 2398884 - DNA, 25 bp, Homo sapien
gatgccagtggccacgagaacaatg

SEQ ID NO: 2398885 - DNA, 25 bp, Homo sapien
cagtggccacgagaacaatgatgat

SEQ ID NO: 2398886 - DNA, 25 bp, Homo sapien
gaagatgatgccagtggccacgaga

SEQ ID NO: 2398887 - DNA, 25 bp, Homo sapien
gatggtaattgtgacatagagctgg

SEQ ID NO: 2398888 - DNA, 25 bp, Homo sapien
ccccgaacaggaatggccgcagggt

SEQ ID NO: 2398889 - DNA, 25 bp, Homo sapien
aaaccatagtccagaaatccgggat

SEQ ID NO: 2398890 - DNA, 25 bp, Homo sapien
tccatcctctcgagacacggtggga

SEQ ID NO: 2398891 - DNA, 25 bp, Homo sapien
tcacctcgcatggagtctgagttgg

SEQ ID NO: 2398892 - DNA, 25 bp, Homo sapien
ttggtggaggtgctcgctcccacac

SEQ ID NO: 2398893 - DNA, 25 bp, Homo sapien
cagtgccaggcaggacttgccgacg

SEQ ID NO: 2398894 - DNA, 25 bp, Homo sapien
gctcccacacgcacacatgacgtgg

SEQ ID NO: 2398895 - DNA, 25 bp, Homo sapien
acgtgatcttgggacccgaggagat

SEQ ID NO: 2398896 - DNA, 25 bp, Homo sapien
ggttcgaggggaggatgaagagccc

SEQ ID NO: 2398897 - DNA, 25 bp, Homo sapien
gaggggaggatgaagagccctgagc

SEQ ID NO: 2398898 - DNA, 25 bp, Homo sapien
gggaggatgaagagccctgagcagg

SEQ ID NO: 2398899 - DNA, 25 bp, Homo sapien
tcgaggggaggatgaagagccctga

SEQ ID NO: 2398900 - DNA, 25 bp, Homo sapien
ggaggtgggacagcagcagcgcagg

SEQ ID NO: 2398901 - DNA, 25 bp, Homo sapien
gggcagcaacagcagtggccagaga

SEQ ID NO: 2398902 - DNA, 25 bp, Homo sapien
agcaacagcagtggccagagaggga

SEQ ID NO: 2398903 - DNA, 25 bp, Homo sapien
ggaggaggtgggacagcagcagcgc

SEQ ID NO: 2398904 - DNA, 25 bp, Homo sapien
ttcctcagctgtgacccagattttc

SEQ ID NO: 2398905 - DNA, 25 bp, Homo sapien
cctcagctgtgacccagattttcag

SEQ ID NO: 2398906 - DNA, 25 bp, Homo sapien
gtctgaggtcttcctcagctgtgac

SEQ ID NO: 2398907 - DNA, 25 bp, Homo sapien
cagctgtgacccagattttcagcct

SEQ ID NO: 2398908 - DNA, 25 bp, Homo sapien
caccccagggtctactctggcttct

SEQ ID NO: 2398909 - DNA, 25 bp, Homo sapien
tttagagccaagaaccttgtgattc

SEQ ID NO: 2398910 - DNA, 25 bp, Homo sapien
gtgattccttgagcacctaccgcta

SEQ ID NO: 2398911 - DNA, 25 bp, Homo sapien
ttttcttggatcttaatttagagcc

SEQ ID NO: 2398912 - DNA, 25 bp, Homo sapien
tgtcttatgattagccccaggagtc

SEQ ID NO: 2398913 - DNA, 25 bp, Homo sapien
tttgtcttatgattagccccaggag

SEQ ID NO: 2398914 - DNA, 25 bp, Homo sapien
ttgtcttatgattagccccaggagt

SEQ ID NO: 2398915 - DNA, 25 bp, Homo sapien
ggggcaggagcctcggggtgcggga

SEQ ID NO: 2398916 - DNA, 25 bp, Homo sapien
tgttgtgcgcaggagacgagctggg

SEQ ID NO: 2398917 - DNA, 25 bp, Homo sapien
ctgttgtgcgcaggagacgagctgg

SEQ ID NO: 2398918 - DNA, 25 bp, Homo sapien
aggagcctcggggtgcgggagccgg

SEQ ID NO: 2398919 - DNA, 25 bp, Homo sapien
cccgcaggcccgcactccccgcaca

SEQ ID NO: 2398920 - DNA, 25 bp, Homo sapien
gcaggcccgcactccccgcacaggg

SEQ ID NO: 2398921 - DNA, 25 bp, Homo sapien
ccacccatcccgcaggcccgcactc

SEQ ID NO: 2398922 - DNA, 25 bp, Homo sapien
atcccgcaggcccgcactccccgca

SEQ ID NO: 2398923 - DNA, 25 bp, Homo sapien
cagggagtgccgagagcggactggg

SEQ ID NO: 2398924 - DNA, 25 bp, Homo sapien
gagacgaggaaaaggaggtcggcga

SEQ ID NO: 2398925 - DNA, 25 bp, Homo sapien
gagagcggcgagagtggggggagac

SEQ ID NO: 2398926 - DNA, 25 bp, Homo sapien
cgaagcaggagactgcgcggagccg

SEQ ID NO: 2398927 - DNA, 25 bp, Homo sapien
gctggggggtcgcaggagcgggcgg

SEQ ID NO: 2398928 - DNA, 25 bp, Homo sapien
gaggtttggcccgcggcagggcgct

SEQ ID NO: 2398929 - DNA, 25 bp, Homo sapien
ctgcatgcttggcgcggcggcgcga

SEQ ID NO: 2398930 - DNA, 25 bp, Homo sapien
ggcgcgacgactgcgggcgctcggg

SEQ ID NO: 2398931 - DNA, 25 bp, Homo sapien
gtatcagatgaattaagtaatgctc

SEQ ID NO: 2398932 - DNA, 25 bp, Homo sapien
caattactagatcgttgtatcagat

SEQ ID NO: 2398933 - DNA, 25 bp, Homo sapien
catggcttaacacaaaggccaagat

SEQ ID NO: 2398934 - DNA, 25 bp, Homo sapien
ttttcctgagttcagtttttccatc

SEQ ID NO: 2398935 - DNA, 25 bp, Homo sapien
gatgtctgaccaatagtaagcactc

SEQ ID NO: 2398936 - DNA, 25 bp, Homo sapien
tgtactgaaagcatcattctacaag

SEQ ID NO: 2398937 - DNA, 25 bp, Homo sapien
cccaagaaattaagagtccatgtac

SEQ ID NO: 2398938 - DNA, 25 bp, Homo sapien
taatcatggtagagggtgtcctgaa

SEQ ID NO: 2398939 - DNA, 25 bp, Homo sapien
tccagcggcttagaacagacacaga

SEQ ID NO: 2398940 - DNA, 25 bp, Homo sapien
cacctaggtgatctctgctgctaaa

SEQ ID NO: 2398941 - DNA, 25 bp, Homo sapien
tcgaagagtagaatgcctgcgtccc

SEQ ID NO: 2398942 - DNA, 25 bp, Homo sapien
cagggacccaccagagacgtctgta

SEQ ID NO: 2398943 - DNA, 25 bp, Homo sapien
tccttagagcggaagtacggccgga

SEQ ID NO: 2398944 - DNA, 25 bp, Homo sapien
gcatgtcctgccgaaatttgcgtcc

SEQ ID NO: 2398945 - DNA, 25 bp, Homo sapien
gtcctgccgaaatttgcgtccttag

SEQ ID NO: 2398946 - DNA, 25 bp, Homo sapien
gaaatttgcgtccttagagcggaag

SEQ ID NO: 2398947 - DNA, 25 bp, Homo sapien
acggatttttgccatatcgctcagg

SEQ ID NO: 2398948 - DNA, 25 bp, Homo sapien
tgtgagtctgtgatcgcagcccttg

SEQ ID NO: 2398949 - DNA, 25 bp, Homo sapien
ctggtgagggttcccaactcagact

SEQ ID NO: 2398950 - DNA, 25 bp, Homo sapien
tcccactgctaggagtgttatcaca

SEQ ID NO: 2398951 - DNA, 25 bp, Homo sapien
tgtttccttaagagctcagcatctg

SEQ ID NO: 2398952 - DNA, 25 bp, Homo sapien
aattctgggagccagtctgccatgc

SEQ ID NO: 2398953 - DNA, 25 bp, Homo sapien
tgtctggagcataacccacaggcgt

SEQ ID NO: 2398954 - DNA, 25 bp, Homo sapien
tctcgggaagcttgatggcaatcct

SEQ ID NO: 2398955 - DNA, 25 bp, Homo sapien
ggatgagatccagatcgtgtctgga

SEQ ID NO: 2398956 - DNA, 25 bp, Homo sapien
gatgagatccagatcgtgtctggaa

SEQ ID NO: 2398957 - DNA, 25 bp, Homo sapien
gatccagatcgtgtctggaagtatt

SEQ ID NO: 2398958 - DNA, 25 bp, Homo sapien
gagatccagatcgtgtctggaagta

SEQ ID NO: 2398959 - DNA, 25 bp, Homo sapien
tgacccttcaatgcatggcaggagt

SEQ ID NO: 2398960 - DNA, 25 bp, Homo sapien
cagagctcaccccaaaatgcattga

SEQ ID NO: 2398961 - DNA, 25 bp, Homo sapien
tagatagggctacggcccctcagtg

SEQ ID NO: 2398962 - DNA, 25 bp, Homo sapien
gctccttccacagccctagataggg

SEQ ID NO: 2398963 - DNA, 25 bp, Homo sapien
gatgcagaggcgaagtcatcaatgg

SEQ ID NO: 2398964 - DNA, 25 bp, Homo sapien
gaggcgaagtcatcaatggtaaacc

SEQ ID NO: 2398965 - DNA, 25 bp, Homo sapien
tcagtagatgcagaggcgaagtcat

SEQ ID NO: 2398966 - DNA, 25 bp, Homo sapien
atcaagtcagtagatgcagaggcga

SEQ ID NO: 2398967 - DNA, 25 bp, Homo sapien
ggtgccgtgaaaggttctccctgag

SEQ ID NO: 2398968 - DNA, 25 bp, Homo sapien
tattcaggggatgatttctcagcct

SEQ ID NO: 2398969 - DNA, 25 bp, Homo sapien
ggccggcttgcctgttaatttaata

SEQ ID NO: 2398970 - DNA, 25 bp, Homo sapien
gaggaaaaagttattcaggggatga

SEQ ID NO: 2398971 - DNA, 25 bp, Homo sapien
tactaccaaaggcagctcctgcggg

SEQ ID NO: 2398972 - DNA, 25 bp, Homo sapien
agccgaggaccgtccgcaggtgcac

SEQ ID NO: 2398973 - DNA, 25 bp, Homo sapien
agcctgccttgcagccgaggaccgt

SEQ ID NO: 2398974 - DNA, 25 bp, Homo sapien
gggtttaatcccctatgtcagtgag

SEQ ID NO: 2398975 - DNA, 25 bp, Homo sapien
ctgctgccggaatcgggaggtctcc

SEQ ID NO: 2398976 - DNA, 25 bp, Homo sapien
gccactcgtcatcaaacgctgcggc

SEQ ID NO: 2398977 - DNA, 25 bp, Homo sapien
tcatagcggcgggactgtcgggaag

SEQ ID NO: 2398978 - DNA, 25 bp, Homo sapien
ctgaggactcaagccgccgaaactc

SEQ ID NO: 2398979 - DNA, 25 bp, Homo sapien
gatgcccaatggacatctgctccag

SEQ ID NO: 2398980 - DNA, 25 bp, Homo sapien
gtctgaatcccgaacagtcctccgt

SEQ ID NO: 2398981 - DNA, 25 bp, Homo sapien
cccgtgcgatggtttcgggagcgct

SEQ ID NO: 2398982 - DNA, 25 bp, Homo sapien
agccctgtcccggatgtgatgccca

SEQ ID NO: 2398983 - DNA, 25 bp, Homo sapien
gggacaggagggctccccaactcac

SEQ ID NO: 2398984 - DNA, 25 bp, Homo sapien
tctctgggacaggagggctccccaa

SEQ ID NO: 2398985 - DNA, 25 bp, Homo sapien
tctgggacaggagggctccccaact

SEQ ID NO: 2398986 - DNA, 25 bp, Homo sapien
cttctctgggacaggagggctcccc

SEQ ID NO: 2398987 - DNA, 25 bp, Homo sapien
atgtctcttggtagaccttgggggc

SEQ ID NO: 2398988 - DNA, 25 bp, Homo sapien
agaaggtctggcaattgcctccagc

SEQ ID NO: 2398989 - DNA, 25 bp, Homo sapien
tcacccgtattggagtaggagatga

SEQ ID NO: 2398990 - DNA, 25 bp, Homo sapien
gcaccatcacccgtattggagtagg

SEQ ID NO: 2398991 - DNA, 25 bp, Homo sapien
tctgagtccaaccacgagcaagaag

SEQ ID NO: 2398992 - DNA, 25 bp, Homo sapien
tatgctacgtaagagagctgctgcc

SEQ ID NO: 2398993 - DNA, 25 bp, Homo sapien
atgacagcaggtacagggtcccaag

SEQ ID NO: 2398994 - DNA, 25 bp, Homo sapien
tagaggatgcaaggtgttgtcagcc

SEQ ID NO: 2398995 - DNA, 25 bp, Homo sapien
tccaatcatgtcattcatcatccca

SEQ ID NO: 2398996 - DNA, 25 bp, Homo sapien
cattcccagcatcccaaagggggag

SEQ ID NO: 2398997 - DNA, 25 bp, Homo sapien
tcccaaagggggagacagctccagc

SEQ ID NO: 2398998 - DNA, 25 bp, Homo sapien
catcccaaagggggagacagctcca

SEQ ID NO: 2398999 - DNA, 25 bp, Homo sapien
agcatcccaaagggggagacagctc

SEQ ID NO: 2399000 - DNA, 25 bp, Homo sapien
ctgacggtgaatagcaaagggatcc

SEQ ID NO: 2399001 - DNA, 25 bp, Homo sapien
tacggctcatatgctgacggtgaat

SEQ ID NO: 2399002 - DNA, 25 bp, Homo sapien
caaagccacctgacaacatacggct

SEQ ID NO: 2399003 - DNA, 25 bp, Homo sapien
ggaaggggctatatccaaagccacc

SEQ ID NO: 2399004 - DNA, 25 bp, Homo sapien
caggctccacgtccctcatgaagcg

SEQ ID NO: 2399005 - DNA, 25 bp, Homo sapien
ccacgtccctcatgaagcggaacat

SEQ ID NO: 2399006 - DNA, 25 bp, Homo sapien
gctccacgtccctcatgaagcggaa

SEQ ID NO: 2399007 - DNA, 25 bp, Homo sapien
tccacgtccctcatgaagcggaaca

SEQ ID NO: 2399008 - DNA, 25 bp, Homo sapien
tgatctcagctccagggggctccac

SEQ ID NO: 2399009 - DNA, 25 bp, Homo sapien
gatctcagctccagggggctccaca

SEQ ID NO: 2399010 - DNA, 25 bp, Homo sapien
cctgatctcagctccagggggctcc

SEQ ID NO: 2399011 - DNA, 25 bp, Homo sapien
ctgatctcagctccagggggctcca

SEQ ID NO: 2399012 - DNA, 25 bp, Homo sapien
tcccgtccggggctgccagctctgc

SEQ ID NO: 2399013 - DNA, 25 bp, Homo sapien
ctcccagaccctgcagccccgtggg

SEQ ID NO: 2399014 - DNA, 25 bp, Homo sapien
ctgcagccccgtgggcccgctcccg

SEQ ID NO: 2399015 - DNA, 25 bp, Homo sapien
ccgcatcccgggctcccagaccctg

SEQ ID NO: 2399016 - DNA, 25 bp, Homo sapien
tcagcggcccatccggccggtttcg

SEQ ID NO: 2399017 - DNA, 25 bp, Homo sapien
agcggcccatccggccggtttcgct

SEQ ID NO: 2399018 - DNA, 25 bp, Homo sapien
cagtgcccgattcgggctcagcggc

SEQ ID NO: 2399019 - DNA, 25 bp, Homo sapien
ggctcagcggcccatccggccggtt

SEQ ID NO: 2399020 - DNA, 25 bp, Homo sapien
gtggggattggtccgggcttgagct

SEQ ID NO: 2399021 - DNA, 25 bp, Homo sapien
acgtggggattggtccgggcttgag

SEQ ID NO: 2399022 - DNA, 25 bp, Homo sapien
cgtggggattggtccgggcttgagc

SEQ ID NO: 2399023 - DNA, 25 bp, Homo sapien
gaagtgacgtcacgatagacccgcc

SEQ ID NO: 2399024 - DNA, 25 bp, Homo sapien
aagtgacgtcacgatagacccgccc

SEQ ID NO: 2399025 - DNA, 25 bp, Homo sapien
gtgacgtcacgatagacccgcccac

SEQ ID NO: 2399026 - DNA, 25 bp, Homo sapien
ggaagtgacgtcacgatagacccgc

SEQ ID NO: 2399027 - DNA, 25 bp, Homo sapien
ctgtggactggaagaggctcccata

SEQ ID NO: 2399028 - DNA, 25 bp, Homo sapien
gggcgcagtgcagcacgttctctct

SEQ ID NO: 2399029 - DNA, 25 bp, Homo sapien
gaggaatccattcttcgggagggac

SEQ ID NO: 2399030 - DNA, 25 bp, Homo sapien
ggagctcattagtaacctcgatttg

SEQ ID NO: 2399031 - DNA, 25 bp, Homo sapien
caaagataccgagattgagggcgag

SEQ ID NO: 2399032 - DNA, 25 bp, Homo sapien
gacagacaaatatgggagtgcacgc

SEQ ID NO: 2399033 - DNA, 25 bp, Homo sapien
gagtgcacgcacaccaaaggtcttt

SEQ ID NO: 2399034 - DNA, 25 bp, Homo sapien
ggccaggtgcctgactcagataaga

SEQ ID NO: 2399035 - DNA, 25 bp, Homo sapien
catggcattgcgtcgagctgtcctc

SEQ ID NO: 2399036 - DNA, 25 bp, Homo sapien
aacctgcggagtgtcgctttgggaa

SEQ ID NO: 2399037 - DNA, 25 bp, Homo sapien
aggactagccttcgaaaaagccgag

SEQ ID NO: 2399038 - DNA, 25 bp, Homo sapien
caagtgtaaacaggactctccctgg

SEQ ID NO: 2399039 - DNA, 25 bp, Homo sapien
ggctggggttgggaggcctctctgg

SEQ ID NO: 2399040 - DNA, 25 bp, Homo sapien
agcccctgccaacaggctggggttg

SEQ ID NO: 2399041 - DNA, 25 bp, Homo sapien
ctggggttgggaggcctctctgggc

SEQ ID NO: 2399042 - DNA, 25 bp, Homo sapien
caggctggggttgggaggcctctct

SEQ ID NO: 2399043 - DNA, 25 bp, Homo sapien
tctgccattgttccacctcctgacc

SEQ ID NO: 2399044 - DNA, 25 bp, Homo sapien
tcactctgccattgttccacctcct

SEQ ID NO: 2399045 - DNA, 25 bp, Homo sapien
actctgccattgttccacctcctga

SEQ ID NO: 2399046 - DNA, 25 bp, Homo sapien
cctcactctgccattgttccacctc

SEQ ID NO: 2399047 - DNA, 25 bp, Homo sapien
cccggaggcctgcgcagcgggaggc

SEQ ID NO: 2399048 - DNA, 25 bp, Homo sapien
tcccggaggcctgcgcagcgggagg

SEQ ID NO: 2399049 - DNA, 25 bp, Homo sapien
cacgctgaagctgaactcagtgcag

SEQ ID NO: 2399050 - DNA, 25 bp, Homo sapien
aattgtgacccattgtgtgtccggc

SEQ ID NO: 2399051 - DNA, 25 bp, Homo sapien
ccactgctgattagcatgggtagca

SEQ ID NO: 2399052 - DNA, 25 bp, Homo sapien
tatttacaggcccgatcccactgct

SEQ ID NO: 2399053 - DNA, 25 bp, Homo sapien
ccctgggctgcaggcgtgctcggca

SEQ ID NO: 2399054 - DNA, 25 bp, Homo sapien
cccacagatcaaagcttgtccaggg

SEQ ID NO: 2399055 - DNA, 25 bp, Homo sapien
gctgcaggcgtgctcggcaggctcc

SEQ ID NO: 2399056 - DNA, 25 bp, Homo sapien
ccagggtctgcattgctgccaaagg

SEQ ID NO: 2399057 - DNA, 25 bp, Homo sapien
tcctgcctcaatctttggagtagct

SEQ ID NO: 2399058 - DNA, 25 bp, Homo sapien
ttctcctgcctcaatctttggagta

SEQ ID NO: 2399059 - DNA, 25 bp, Homo sapien
acaggcccgtaccactgtgcccggc

SEQ ID NO: 2399060 - DNA, 25 bp, Homo sapien
gattacaggcccgtaccactgtgcc

SEQ ID NO: 2399061 - DNA, 25 bp, Homo sapien
ccctaggagatctgtggaccatgac

SEQ ID NO: 2399062 - DNA, 25 bp, Homo sapien
tgcctgcgacgtggaaatgatgcct

SEQ ID NO: 2399063 - DNA, 25 bp, Homo sapien
gagctgatctgcttctcccacgaga

SEQ ID NO: 2399064 - DNA, 25 bp, Homo sapien
tatctgacatttgctcgccgtgaga

SEQ ID NO: 2399065 - DNA, 25 bp, Homo sapien
ggttgagcccagtctaccgagtcta

SEQ ID NO: 2399066 - DNA, 25 bp, Homo sapien
cacctgtcaaggtgccctcgggttt

SEQ ID NO: 2399067 - DNA, 25 bp, Homo sapien
caaagaaataggatgaacggttgcc

SEQ ID NO: 2399068 - DNA, 25 bp, Homo sapien
cctcgggttttttcatagtacacag

SEQ ID NO: 2399069 - DNA, 25 bp, Homo sapien
agtcacagctgacgggatggctgtg

SEQ ID NO: 2399070 - DNA, 25 bp, Homo sapien
acagctgacgggatggctgtggcca

SEQ ID NO: 2399071 - DNA, 25 bp, Homo sapien
atcctctctggccacgataacaggg

SEQ ID NO: 2399072 - DNA, 25 bp, Homo sapien
tcctctctggccacgataacagggt

SEQ ID NO: 2399073 - DNA, 25 bp, Homo sapien
agacccaggtcccatttaagggcag

SEQ ID NO: 2399074 - DNA, 25 bp, Homo sapien
tgcaataaagtgtagcaccctggta

SEQ ID NO: 2399075 - DNA, 25 bp, Homo sapien
gttctcttctatattccgggtgcca

SEQ ID NO: 2399076 - DNA, 25 bp, Homo sapien
tgtgtgcagcagttcgctatggcct

SEQ ID NO: 2399077 - DNA, 25 bp, Homo sapien
aaggacagagccatagggacaccat

SEQ ID NO: 2399078 - DNA, 25 bp, Homo sapien
ctagaagtaaacacccagggagagc

SEQ ID NO: 2399079 - DNA, 25 bp, Homo sapien
cacacagaaaactcggtgcaaggtt

SEQ ID NO: 2399080 - DNA, 25 bp, Homo sapien
tatagggaagtgatagctaaagccc

SEQ ID NO: 2399081 - DNA, 25 bp, Homo sapien
ggaggagtctaagaaaacaagccat

SEQ ID NO: 2399082 - DNA, 25 bp, Homo sapien
tgagaggacacagatatcaccaggc

SEQ ID NO: 2399083 - DNA, 25 bp, Homo sapien
tgagtcccagtttggtagctgagga

SEQ ID NO: 2399084 - DNA, 25 bp, Homo sapien
gcccaataaagctgtgagtcccagt

SEQ ID NO: 2399085 - DNA, 25 bp, Homo sapien
tcccatgctcgtcctccagttttca

SEQ ID NO: 2399086 - DNA, 25 bp, Homo sapien
ttgctcccatgctcgtcctccagtt

SEQ ID NO: 2399087 - DNA, 25 bp, Homo sapien
ctccagttttcagaagtcgtccagt

SEQ ID NO: 2399088 - DNA, 25 bp, Homo sapien
tcacttaggggtgaaggccgcttac

SEQ ID NO: 2399089 - DNA, 25 bp, Homo sapien
ggtctcccaccctctacgttggata

SEQ ID NO: 2399090 - DNA, 25 bp, Homo sapien
tagtaacagcttgcactttctcttc

SEQ ID NO: 2399091 - DNA, 25 bp, Homo sapien
tggatatcctagtaacagcttgcac

SEQ ID NO: 2399092 - DNA, 25 bp, Homo sapien
caccctctacgttggatatcctagt

SEQ ID NO: 2399093 - DNA, 25 bp, Homo sapien
agttgtcatcctgcaggatggtgag

SEQ ID NO: 2399094 - DNA, 25 bp, Homo sapien
gggagttgtcatcctgcaggatggt

SEQ ID NO: 2399095 - DNA, 25 bp, Homo sapien
ccaggggagttgtcatcctgcagga

SEQ ID NO: 2399096 - DNA, 25 bp, Homo sapien
gtgccaggggagttgtcatcctgca

SEQ ID NO: 2399097 - DNA, 25 bp, Homo sapien
cccacactcacccatggaccttatc

SEQ ID NO: 2399098 - DNA, 25 bp, Homo sapien
ttatcctagtttatcttccctgcat

SEQ ID NO: 2399099 - DNA, 25 bp, Homo sapien
cacccatggaccttatcccaaaaca

SEQ ID NO: 2399100 - DNA, 25 bp, Homo sapien
tatcctagtttatcttccctgcatc

SEQ ID NO: 2399101 - DNA, 25 bp, Homo sapien
tcccttgagggcttgtcggagctct

SEQ ID NO: 2399102 - DNA, 25 bp, Homo sapien
ctcagggtcccttgagggcttgtcg

SEQ ID NO: 2399103 - DNA, 25 bp, Homo sapien
tgaagatctgggagtctcagggtcc

SEQ ID NO: 2399104 - DNA, 25 bp, Homo sapien
ggagtctcagggtcccttgagggct

SEQ ID NO: 2399105 - DNA, 25 bp, Homo sapien
ccagaggcaagtccaattcagaaga

SEQ ID NO: 2399106 - DNA, 25 bp, Homo sapien
cctcaacagataactgggtacccag

SEQ ID NO: 2399107 - DNA, 25 bp, Homo sapien
tcctcaacagataactgggtaccca

SEQ ID NO: 2399108 - DNA, 25 bp, Homo sapien
gaggcaagtccaattcagaagataa

SEQ ID NO: 2399109 - DNA, 25 bp, Homo sapien
cagctgtttcaccagtgggcttggg

SEQ ID NO: 2399110 - DNA, 25 bp, Homo sapien
tcaaatacttcactcagctgtttca

SEQ ID NO: 2399111 - DNA, 25 bp, Homo sapien
agctgtttcaccagtgggcttgggg

SEQ ID NO: 2399112 - DNA, 25 bp, Homo sapien
caaatacttcactcagctgtttcac

SEQ ID NO: 2399113 - DNA, 25 bp, Homo sapien
ttcatcagcattccctgggcccaac

SEQ ID NO: 2399114 - DNA, 25 bp, Homo sapien
gaataatagatgacagcttcatcag

SEQ ID NO: 2399115 - DNA, 25 bp, Homo sapien
gagaatggcttcatggaccctaccc

SEQ ID NO: 2399116 - DNA, 25 bp, Homo sapien
tgagatgggtccgaagcaggaggat

SEQ ID NO: 2399117 - DNA, 25 bp, Homo sapien
cctgggcatgtttaagaccctccag

SEQ ID NO: 2399118 - DNA, 25 bp, Homo sapien
tgcaataccaagagtaggagagcgg

SEQ ID NO: 2399119 - DNA, 25 bp, Homo sapien
gggcatgtttaagaccctccagttg

SEQ ID NO: 2399120 - DNA, 25 bp, Homo sapien
tggtcttcataggtgtccgtgcaat

SEQ ID NO: 2399121 - DNA, 25 bp, Homo sapien
tccaggaaggaattgccaaggccct

SEQ ID NO: 2399122 - DNA, 25 bp, Homo sapien
tagaacaagtctgggccctgactct

SEQ ID NO: 2399123 - DNA, 25 bp, Homo sapien
tgtcaagaccataggctagaacaag

SEQ ID NO: 2399124 - DNA, 25 bp, Homo sapien
gacggctctctcaaaatcaggttag

SEQ ID NO: 2399125 - DNA, 25 bp, Homo sapien
tccgccactcgagccagatgcttgt

SEQ ID NO: 2399126 - DNA, 25 bp, Homo sapien
caggatgccagcactaggtgaacgg

SEQ ID NO: 2399127 - DNA, 25 bp, Homo sapien
gactgggacgctcttggctgagccc

SEQ ID NO: 2399128 - DNA, 25 bp, Homo sapien
aggccgcgctggtgtgactgggacg

SEQ ID NO: 2399129 - DNA, 25 bp, Homo sapien
tcaaccaggagttgcagggtggggg

SEQ ID NO: 2399130 - DNA, 25 bp, Homo sapien
ccagcccgggacgaggagggaatgc

SEQ ID NO: 2399131 - DNA, 25 bp, Homo sapien
caaccaggagttgcagggtgggggc

SEQ ID NO: 2399132 - DNA, 25 bp, Homo sapien
ggcaagggccagcccgggacgagga

SEQ ID NO: 2399133 - DNA, 25 bp, Homo sapien
cagctgacaaaatggctcgttctgg

SEQ ID NO: 2399134 - DNA, 25 bp, Homo sapien
cctctgcggagttaatgactgctgc

SEQ ID NO: 2399135 - DNA, 25 bp, Homo sapien
tgaagaaacttcctggcgagggacc

SEQ ID NO: 2399136 - DNA, 25 bp, Homo sapien
gaagtgactcaggtctcagccctta

SEQ ID NO: 2399137 - DNA, 25 bp, Homo sapien
tctcattggcgtcagtcaagcgcgg

SEQ ID NO: 2399138 - DNA, 25 bp, Homo sapien
caatggactgatgctaggcttgccc

SEQ ID NO: 2399139 - DNA, 25 bp, Homo sapien
caatagaaggcacgcgaatggactc

SEQ ID NO: 2399140 - DNA, 25 bp, Homo sapien
gctgagccgacgtagttcccatagg

SEQ ID NO: 2399141 - DNA, 25 bp, Homo sapien
cttcctttagccctggcatgatcaa

SEQ ID NO: 2399142 - DNA, 25 bp, Homo sapien
cttccctcactttcctcgttgaggg

SEQ ID NO: 2399143 - DNA, 25 bp, Homo sapien
gggagatcaggtgagatcgaggtgg

SEQ ID NO: 2399144 - DNA, 25 bp, Homo sapien
ccctggcatgatcaaagactgcgga

SEQ ID NO: 2399145 - DNA, 25 bp, Homo sapien
gtctcaccaagtctgtttctcaaca

SEQ ID NO: 2399146 - DNA, 25 bp, Homo sapien
tctcaccaagtctgtttctcaacag

SEQ ID NO: 2399147 - DNA, 25 bp, Homo sapien
gagaagataagggatgtctttttcc

SEQ ID NO: 2399148 - DNA, 25 bp, Homo sapien
agaagataagggatgtctttttcca

SEQ ID NO: 2399149 - DNA, 25 bp, Homo sapien
ttcgagcagacaaaggtcatcgcag

SEQ ID NO: 2399150 - DNA, 25 bp, Homo sapien
gagggactcggagtaatcgcctgca

SEQ ID NO: 2399151 - DNA, 25 bp, Homo sapien
cagagggactcggagtaatcgcctg

SEQ ID NO: 2399152 - DNA, 25 bp, Homo sapien
gagaaggttgttttcgagcagacaa

SEQ ID NO: 2399153 - DNA, 25 bp, Homo sapien
gggcagtaggccaccgttcttcgta

SEQ ID NO: 2399154 - DNA, 25 bp, Homo sapien
ctttgagcctatccagggccacaga

SEQ ID NO: 2399155 - DNA, 25 bp, Homo sapien
ttcgtactccggagaacctggctgg

SEQ ID NO: 2399156 - DNA, 25 bp, Homo sapien
tggagagctctttcttgttcaccct

SEQ ID NO: 2399157 - DNA, 25 bp, Homo sapien
atcccagcctgcctcaataggtttg

SEQ ID NO: 2399158 - DNA, 25 bp, Homo sapien
tgcctcaataggtttggacagacac

SEQ ID NO: 2399159 - DNA, 25 bp, Homo sapien
cacatggggcaaccccttatttcaa

SEQ ID NO: 2399160 - DNA, 25 bp, Homo sapien
gcctgcctcaataggtttggacaga

SEQ ID NO: 2399161 - DNA, 25 bp, Homo sapien
ccctgtaatggttgggaccaggcca

SEQ ID NO: 2399162 - DNA, 25 bp, Homo sapien
tgtatgtgaaccacccatgtgaggg

SEQ ID NO: 2399163 - DNA, 25 bp, Homo sapien
catgtgagggaataaacctggcact

SEQ ID NO: 2399164 - DNA, 25 bp, Homo sapien
tggaactaaacgtcaccaaggtggc

SEQ ID NO: 2399165 - DNA, 25 bp, Homo sapien
aaatgttttgcgtagcagactgtca

SEQ ID NO: 2399166 - DNA, 25 bp, Homo sapien
tgttgatttccgcagagcttgggtt

SEQ ID NO: 2399167 - DNA, 25 bp, Homo sapien
ggtggtggcaagacctcagcacagt

SEQ ID NO: 2399168 - DNA, 25 bp, Homo sapien
tgtcatagccttgaacgccggctcc

SEQ ID NO: 2399169 - DNA, 25 bp, Homo sapien
cgagccgggtatcccccaggttgtg

SEQ ID NO: 2399170 - DNA, 25 bp, Homo sapien
aggtagcgcttcatggcagggggca

SEQ ID NO: 2399171 - DNA, 25 bp, Homo sapien
caggttgtggcgcacacacaggcgg

SEQ ID NO: 2399172 - DNA, 25 bp, Homo sapien
cagggcagacacctggccgagccgg

SEQ ID NO: 2399173 - DNA, 25 bp, Homo sapien
tcaggtgcagaagggagtgtggctc

SEQ ID NO: 2399174 - DNA, 25 bp, Homo sapien
aggtgcagaagggagtgtggctccg

SEQ ID NO: 2399175 - DNA, 25 bp, Homo sapien
ctcaggtgcagaagggagtgtggct

SEQ ID NO: 2399176 - DNA, 25 bp, Homo sapien
caggtgcagaagggagtgtggctcc

SEQ ID NO: 2399177 - DNA, 25 bp, Homo sapien
gctttcctgcttcgagtgtgcccac

SEQ ID NO: 2399178 - DNA, 25 bp, Homo sapien
tgagatacccggaagttctgcctcc

SEQ ID NO: 2399179 - DNA, 25 bp, Homo sapien
ttcacacatccctagtcagagctgg

SEQ ID NO: 2399180 - DNA, 25 bp, Homo sapien
tgtaagtatgggtgcagccaccagc

SEQ ID NO: 2399181 - DNA, 25 bp, Homo sapien
gacagaaagttctccccacgtctgc

SEQ ID NO: 2399182 - DNA, 25 bp, Homo sapien
ggacagaaagttctccccacgtctg

SEQ ID NO: 2399183 - DNA, 25 bp, Homo sapien
cagaagagtttccatcccaaaccac

SEQ ID NO: 2399184 - DNA, 25 bp, Homo sapien
aagagtttccatcccaaaccactgc

SEQ ID NO: 2399185 - DNA, 25 bp, Homo sapien
cgggccccttgctctgatggtacag

SEQ ID NO: 2399186 - DNA, 25 bp, Homo sapien
caagccctcgggacaggagaggtca

SEQ ID NO: 2399187 - DNA, 25 bp, Homo sapien
cagacagcgcttactgccggataga

SEQ ID NO: 2399188 - DNA, 25 bp, Homo sapien
agcgccgcgtagtggtcagtctgca

SEQ ID NO: 2399189 - DNA, 25 bp, Homo sapien
ggactccccgaaagaggcttgctgg

SEQ ID NO: 2399190 - DNA, 25 bp, Homo sapien
ctgaaagttgagctccagtttggat

SEQ ID NO: 2399191 - DNA, 25 bp, Homo sapien
gtgaggagctagaggactccccgaa

SEQ ID NO: 2399192 - DNA, 25 bp, Homo sapien
cttgctggggcgtctttctcttctg

SEQ ID NO: 2399193 - DNA, 25 bp, Homo sapien
atcctttcacccaagtttgccaacg

SEQ ID NO: 2399194 - DNA, 25 bp, Homo sapien
tctgatccaggtcgccagagactct

SEQ ID NO: 2399195 - DNA, 25 bp, Homo sapien
agagactctcgcgagttcgccccat

SEQ ID NO: 2399196 - DNA, 25 bp, Homo sapien
gggcgtgaagagcagaatcctggcg

SEQ ID NO: 2399197 - DNA, 25 bp, Homo sapien
tcgcccggagccctcgccgctgccc

SEQ ID NO: 2399198 - DNA, 25 bp, Homo sapien
ccggagccctcgccgctgcccccga

SEQ ID NO: 2399199 - DNA, 25 bp, Homo sapien
ggagccctcgccgctgcccccgaac

SEQ ID NO: 2399200 - DNA, 25 bp, Homo sapien
gcccggagccctcgccgctgccccc

SEQ ID NO: 2399201 - DNA, 25 bp, Homo sapien
cctggaggtcgccgggcctctgaag

SEQ ID NO: 2399202 - DNA, 25 bp, Homo sapien
agccgggcggaaagaagccgaggcg

SEQ ID NO: 2399203 - DNA, 25 bp, Homo sapien
cggaaagaagccgaggcgcgcaggg

SEQ ID NO: 2399204 - DNA, 25 bp, Homo sapien
tctgaaggagccgggcggaaagaag

SEQ ID NO: 2399205 - DNA, 25 bp, Homo sapien
gctctataccggcagcagccgcgga

SEQ ID NO: 2399206 - DNA, 25 bp, Homo sapien
agcagccgcggagagcatgccccgc

SEQ ID NO: 2399207 - DNA, 25 bp, Homo sapien
agttaccgctctataccggcagcag

SEQ ID NO: 2399208 - DNA, 25 bp, Homo sapien
cctcctgggcagttaccgctctata

SEQ ID NO: 2399209 - DNA, 25 bp, Homo sapien
cagaattaacgctttgatggcatca

SEQ ID NO: 2399210 - DNA, 25 bp, Homo sapien
gtcaagacctttgagccgcctgagc

SEQ ID NO: 2399211 - DNA, 25 bp, Homo sapien
gcatcaccgcgtcgggaatccctgg

SEQ ID NO: 2399212 - DNA, 25 bp, Homo sapien
gatggtgttctccaccgtcaagacc

SEQ ID NO: 2399213 - DNA, 25 bp, Homo sapien
aatgttttcccataggacaggccag

SEQ ID NO: 2399214 - DNA, 25 bp, Homo sapien
gccagataagtagacagcaagtcac

SEQ ID NO: 2399215 - DNA, 25 bp, Homo sapien
atgttttcccataggacaggccagt

SEQ ID NO: 2399216 - DNA, 25 bp, Homo sapien
agggccagataagtagacagcaagt

SEQ ID NO: 2399217 - DNA, 25 bp, Homo sapien
ggtcactggcaaccttggtgagaga

SEQ ID NO: 2399218 - DNA, 25 bp, Homo sapien
acagcacatgtggggactggtaggt

SEQ ID NO: 2399219 - DNA, 25 bp, Homo sapien
gtcactggcaaccttggtgagagac

SEQ ID NO: 2399220 - DNA, 25 bp, Homo sapien
tcactggcaaccttggtgagagaca

SEQ ID NO: 2399221 - DNA, 25 bp, Homo sapien
gctgagatgtgaagactacttgagc

SEQ ID NO: 2399222 - DNA, 25 bp, Homo sapien
gtttaaatagaaatgatgcaactag

SEQ ID NO: 2399223 - DNA, 25 bp, Homo sapien
caactagcaatatggaaggacttcc

SEQ ID NO: 2399224 - DNA, 25 bp, Homo sapien
aatgatgcaactagcaatatggaag

SEQ ID NO: 2399225 - DNA, 25 bp, Homo sapien
taaatagaaatgatgcaactagcaa

SEQ ID NO: 2399226 - DNA, 25 bp, Homo sapien
gatttgtagaatgacagccctgtag

SEQ ID NO: 2399227 - DNA, 25 bp, Homo sapien
catgagttgctttcaaaccagggcc

SEQ ID NO: 2399228 - DNA, 25 bp, Homo sapien
ttaaatgcagttgggcatctttccc

SEQ ID NO: 2399229 - DNA, 25 bp, Homo sapien
gtagaactacactgcccctgcactt

SEQ ID NO: 2399230 - DNA, 25 bp, Homo sapien
ctcatggtattctggaagatggcct

SEQ ID NO: 2399231 - DNA, 25 bp, Homo sapien
agtttaccataccaacagaatgaag

SEQ ID NO: 2399232 - DNA, 25 bp, Homo sapien
gatcaagatcaagaagtcaacccct

SEQ ID NO: 2399233 - DNA, 25 bp, Homo sapien
tgtgcagatattcatcaaagtccac

SEQ ID NO: 2399234 - DNA, 25 bp, Homo sapien
gacatagaacaatcgtagaatcact

SEQ ID NO: 2399235 - DNA, 25 bp, Homo sapien
tttgcattgaagatgtccggtccct

SEQ ID NO: 2399236 - DNA, 25 bp, Homo sapien
tgtcctcagccaattagcggcccaa

SEQ ID NO: 2399237 - DNA, 25 bp, Homo sapien
cgccctttttgcttcgaaggacgag

SEQ ID NO: 2399238 - DNA, 25 bp, Homo sapien
tgggtgacgtaatgactagccccgc

SEQ ID NO: 2399239 - DNA, 25 bp, Homo sapien
gtacgtgcgcctccgccggcagctc

SEQ ID NO: 2399240 - DNA, 25 bp, Homo sapien
cgtacgtgcgcctccgccggcagct

SEQ ID NO: 2399241 - DNA, 25 bp, Homo sapien
gctcgtacgtgcgcctccgccggca

SEQ ID NO: 2399242 - DNA, 25 bp, Homo sapien
tcgtacgtgcgcctccgccggcagc

SEQ ID NO: 2399243 - DNA, 25 bp, Homo sapien
aagccagggaatgctaagccttggg

SEQ ID NO: 2399244 - DNA, 25 bp, Homo sapien
gagatcacatgggaaagccagggaa

SEQ ID NO: 2399245 - DNA, 25 bp, Homo sapien
gattgacaaatcccagagatcacat

SEQ ID NO: 2399246 - DNA, 25 bp, Homo sapien
tcacatgggaaagccagggaatgct

SEQ ID NO: 2399247 - DNA, 25 bp, Homo sapien
gaacttccctgattgacctgctccg

SEQ ID NO: 2399248 - DNA, 25 bp, Homo sapien
tagaaagggccttgacatcagttcc

SEQ ID NO: 2399249 - DNA, 25 bp, Homo sapien
taacttccgtaatcccagtgtgctg

SEQ ID NO: 2399250 - DNA, 25 bp, Homo sapien
gaagctcgctttgccggacataact

SEQ ID NO: 2399251 - DNA, 25 bp, Homo sapien
tgtcctgggagatgttgccgcttgg

SEQ ID NO: 2399252 - DNA, 25 bp, Homo sapien
ctgggagatgttgccgcttggtgga

SEQ ID NO: 2399253 - DNA, 25 bp, Homo sapien
gagatgttgccgcttggtggagggc

SEQ ID NO: 2399254 - DNA, 25 bp, Homo sapien
tcctgggagatgttgccgcttggtg

SEQ ID NO: 2399255 - DNA, 25 bp, Homo sapien
cacggccgggagcagactgactgcc

SEQ ID NO: 2399256 - DNA, 25 bp, Homo sapien
tcacggccgggagcagactgactgc

SEQ ID NO: 2399257 - DNA, 25 bp, Homo sapien
acggccgggagcagactgactgcca

SEQ ID NO: 2399258 - DNA, 25 bp, Homo sapien
cggccgggagcagactgactgccag

SEQ ID NO: 2399259 - DNA, 25 bp, Homo sapien
cccagcccgtccgcagccccgcgcc

SEQ ID NO: 2399260 - DNA, 25 bp, Homo sapien
ccagcccgtccgcagccccgcgccg

SEQ ID NO: 2399261 - DNA, 25 bp, Homo sapien
cagcccgtccgcagccccgcgccgg

SEQ ID NO: 2399262 - DNA, 25 bp, Homo sapien
ctccccacgccatgggacagggtat

SEQ ID NO: 2399263 - DNA, 25 bp, Homo sapien
caaccactacctggtcatctgccct

SEQ ID NO: 2399264 - DNA, 25 bp, Homo sapien
gacagggtatgggtggacttcctcc

SEQ ID NO: 2399265 - DNA, 25 bp, Homo sapien
cccatgaggtttccttattcatcct

SEQ ID NO: 2399266 - DNA, 25 bp, Homo sapien
tcgccagcaggctacaaaacggcct

SEQ ID NO: 2399267 - DNA, 25 bp, Homo sapien
acggtcattgccaccgtggcttcct

SEQ ID NO: 2399268 - DNA, 25 bp, Homo sapien
ggtgcctacggtcaccacctcttcg

SEQ ID NO: 2399269 - DNA, 25 bp, Homo sapien
tcaagggtcctacccatgttcacac

SEQ ID NO: 2399270 - DNA, 25 bp, Homo sapien
ccttgcgctggtgtagtgttttaga

SEQ ID NO: 2399271 - DNA, 25 bp, Homo sapien
acaaacacctggatcgcggcttcaa

SEQ ID NO: 2399272 - DNA, 25 bp, Homo sapien
tgttttagaaaagcacgcccctctc

SEQ ID NO: 2399273 - DNA, 25 bp, Homo sapien
gcgacctgtacttcgtgccactgga

SEQ ID NO: 2399274 - DNA, 25 bp, Homo sapien
ggataacgcctgcaacgacatgggt

SEQ ID NO: 2399275 - DNA, 25 bp, Homo sapien
tactgaaagttaccacatgcgtcgt

SEQ ID NO: 2399276 - DNA, 25 bp, Homo sapien
caagcaaagggtgagaatcgtccta

SEQ ID NO: 2399277 - DNA, 25 bp, Homo sapien
gaatccaggtctccgggcttaacaa

SEQ ID NO: 2399278 - DNA, 25 bp, Homo sapien
tgggtggctccctagccctgctgat

SEQ ID NO: 2399279 - DNA, 25 bp, Homo sapien
aggcctcccctggtgcagatttcat

SEQ ID NO: 2399280 - DNA, 25 bp, Homo sapien
aaaaagtgacaacctgcttacagag

SEQ ID NO: 2399281 - DNA, 25 bp, Homo sapien
gtccctgatcccgtctgtggtcatt

SEQ ID NO: 2399282 - DNA, 25 bp, Homo sapien
taaagccctgggatcactgtgtgtc

SEQ ID NO: 2399283 - DNA, 25 bp, Homo sapien
tgacggctgacgataagacgggcac

SEQ ID NO: 2399284 - DNA, 25 bp, Homo sapien
agagtagttaacagccggaagcgca

SEQ ID NO: 2399285 - DNA, 25 bp, Homo sapien
ttaccgtggcggaaactgagggaca

SEQ ID NO: 2399286 - DNA, 25 bp, Homo sapien
gagtggagcgcgatcgttccctctg

SEQ ID NO: 2399287 - DNA, 25 bp, Homo sapien
gttccctctgcaggcctcaatcgag

SEQ ID NO: 2399288 - DNA, 25 bp, Homo sapien
tctgggtagcggtgggtaacttcac

SEQ ID NO: 2399289 - DNA, 25 bp, Homo sapien
cacactagcgacaccttgctgggac

SEQ ID NO: 2399290 - DNA, 25 bp, Homo sapien
ttagaggaggtgcccgtggctggcg

SEQ ID NO: 2399291 - DNA, 25 bp, Homo sapien
tgtctggtaaagatggctcccgggt

SEQ ID NO: 2399292 - DNA, 25 bp, Homo sapien
gaagctcctaacactgtctggtaaa

SEQ ID NO: 2399293 - DNA, 25 bp, Homo sapien
tctctcggcagtaaccttcagggag

SEQ ID NO: 2399294 - DNA, 25 bp, Homo sapien
ccagtacagtgttggatggtctaat

SEQ ID NO: 2399295 - DNA, 25 bp, Homo sapien
tcccagccttgagggagggaacaac

SEQ ID NO: 2399296 - DNA, 25 bp, Homo sapien
tgtgggggaccatcgcatgatactg

SEQ ID NO: 2399297 - DNA, 25 bp, Homo sapien
aaatcactgagaaatcacgcactgt

SEQ ID NO: 2399298 - DNA, 25 bp, Homo sapien
tcctgggttggtgtttatctcctcc

SEQ ID NO: 2399299 - DNA, 25 bp, Homo sapien
ttaggggacataaatgtgagaggca

SEQ ID NO: 2399300 - DNA, 25 bp, Homo sapien
aagatagataatgacattattaggg

SEQ ID NO: 2399301 - DNA, 25 bp, Homo sapien
aaagatagataatgacattattagg

SEQ ID NO: 2399302 - DNA, 25 bp, Homo sapien
ttattaggggacataaatgtgagag

SEQ ID NO: 2399303 - DNA, 25 bp, Homo sapien
gcaggaccccacagaagcaacaaca

SEQ ID NO: 2399304 - DNA, 25 bp, Homo sapien
ctacgaccctcctaccctgattgag

SEQ ID NO: 2399305 - DNA, 25 bp, Homo sapien
tgattgagggtttgtcttcggggag

SEQ ID NO: 2399306 - DNA, 25 bp, Homo sapien
ccctcctaccctgattgagggtttg

SEQ ID NO: 2399307 - DNA, 25 bp, Homo sapien
gatcgccagatgaacaagaaacaga

SEQ ID NO: 2399308 - DNA, 25 bp, Homo sapien
tgcacatgttaattgacagcttcag

SEQ ID NO: 2399309 - DNA, 25 bp, Homo sapien
cactcagctttgaaccctcctttgc

SEQ ID NO: 2399310 - DNA, 25 bp, Homo sapien
gtgccagatcgccagatgaacaaga

SEQ ID NO: 2399311 - DNA, 25 bp, Homo sapien
ccaggaatctcaggctcatgaaagg

SEQ ID NO: 2399312 - DNA, 25 bp, Homo sapien
gcaagatagaaactgtcaaccaccc

SEQ ID NO: 2399313 - DNA, 25 bp, Homo sapien
tatgaatagctgtagcaggctccag

SEQ ID NO: 2399314 - DNA, 25 bp, Homo sapien
gactcaggtcccacgttcttggtga

SEQ ID NO: 2399315 - DNA, 25 bp, Homo sapien
ttcatcctgtaggttcagcacaagg

SEQ ID NO: 2399316 - DNA, 25 bp, Homo sapien
gtcagctgtgagatagatacgattc

SEQ ID NO: 2399317 - DNA, 25 bp, Homo sapien
agatacgattctgtgatgtggcgat

SEQ ID NO: 2399318 - DNA, 25 bp, Homo sapien
cagcacaaggttgtcagctgtgaga

SEQ ID NO: 2399319 - DNA, 25 bp, Homo sapien
gggtgcagcaatgagtaacacatgg

SEQ ID NO: 2399320 - DNA, 25 bp, Homo sapien
caggaggagtatcggagaagccaat

SEQ ID NO: 2399321 - DNA, 25 bp, Homo sapien
gggaacccagaggaatcattcttga

SEQ ID NO: 2399322 - DNA, 25 bp, Homo sapien
catggtttctgctcgcacttaggga

SEQ ID NO: 2399323 - DNA, 25 bp, Homo sapien
aatatagctaaacgccaccacagcg

SEQ ID NO: 2399324 - DNA, 25 bp, Homo sapien
tctgagtagaaaccggaacaagcaa

SEQ ID NO: 2399325 - DNA, 25 bp, Homo sapien
caagcaaggttcgaattccctcacc

SEQ ID NO: 2399326 - DNA, 25 bp, Homo sapien
cctcaatgtgccttaactgaaagca

SEQ ID NO: 2399327 - DNA, 25 bp, Homo sapien
tggagatattctgggctgctcgaat

SEQ ID NO: 2399328 - DNA, 25 bp, Homo sapien
cgaagtttgatgtagccagggttct

SEQ ID NO: 2399329 - DNA, 25 bp, Homo sapien
tctgggctgctcgaatcttgcgaag

SEQ ID NO: 2399330 - DNA, 25 bp, Homo sapien
gaatcttgcgaagtttgatgtagcc

SEQ ID NO: 2399331 - DNA, 25 bp, Homo sapien
ttaaggtacacgcaagggcaggtct

SEQ ID NO: 2399332 - DNA, 25 bp, Homo sapien
gagggttaaggtacacgcaagggca

SEQ ID NO: 2399333 - DNA, 25 bp, Homo sapien
tacacgcaagggcaggtctcaatcc

SEQ ID NO: 2399334 - DNA, 25 bp, Homo sapien
tgaggagggttaaggtacacgcaag

SEQ ID NO: 2399335 - DNA, 25 bp, Homo sapien
cacactcccttgctccagtcctcct

SEQ ID NO: 2399336 - DNA, 25 bp, Homo sapien
cactcccttgctccagtcctcctct

SEQ ID NO: 2399337 - DNA, 25 bp, Homo sapien
tcccttgctccagtcctcctctggg

SEQ ID NO: 2399338 - DNA, 25 bp, Homo sapien
ctcccttgctccagtcctcctctgg

SEQ ID NO: 2399339 - DNA, 25 bp, Homo sapien
ctgtcagatccaaggttgcgctcag

SEQ ID NO: 2399340 - DNA, 25 bp, Homo sapien
ccaaggttgcgctcaggtggcttgt

SEQ ID NO: 2399341 - DNA, 25 bp, Homo sapien
agatccaaggttgcgctcaggtggc

SEQ ID NO: 2399342 - DNA, 25 bp, Homo sapien
tcagatccaaggttgcgctcaggtg

SEQ ID NO: 2399343 - DNA, 25 bp, Homo sapien
ctgtgggcctccctgcaggctgctg

SEQ ID NO: 2399344 - DNA, 25 bp, Homo sapien
cctccctgcaggctgctgccaggaa

SEQ ID NO: 2399345 - DNA, 25 bp, Homo sapien
tgggcctccctgcaggctgctgcca

SEQ ID NO: 2399346 - DNA, 25 bp, Homo sapien
ggcctccctgcaggctgctgccagg

SEQ ID NO: 2399347 - DNA, 25 bp, Homo sapien
ggccagagagcacggagtcgcattc

SEQ ID NO: 2399348 - DNA, 25 bp, Homo sapien
tgctattgatctggccttacagtgg

SEQ ID NO: 2399349 - DNA, 25 bp, Homo sapien
ggctcaggtactaccactaagattt

SEQ ID NO: 2399350 - DNA, 25 bp, Homo sapien
cattcgccttagtctcatcagcctg

SEQ ID NO: 2399351 - DNA, 25 bp, Homo sapien
aatggggaactcaggtgccctaggg

SEQ ID NO: 2399352 - DNA, 25 bp, Homo sapien
atggggaactcaggtgccctagggg

SEQ ID NO: 2399353 - DNA, 25 bp, Homo sapien
tttctaccaagaattgggcccgctg

SEQ ID NO: 2399354 - DNA, 25 bp, Homo sapien
ctaccaagaattgggcccgctgggc

SEQ ID NO: 2399355 - DNA, 25 bp, Homo sapien
tctaccaagaattgggcccgctggg

SEQ ID NO: 2399356 - DNA, 25 bp, Homo sapien
ttctaccaagaattgggcccgctgg

SEQ ID NO: 2399357 - DNA, 25 bp, Homo sapien
tcaccccacggctcttgcgactcac

SEQ ID NO: 2399358 - DNA, 25 bp, Homo sapien
ggtcaggagccccacccatggagtc

SEQ ID NO: 2399359 - DNA, 25 bp, Homo sapien
gggagagagtcagggagaccctgtc

SEQ ID NO: 2399360 - DNA, 25 bp, Homo sapien
aggagccccacccatggagtctttc

SEQ ID NO: 2399361 - DNA, 25 bp, Homo sapien
ccacttgtttggcttctacagcagc

SEQ ID NO: 2399362 - DNA, 25 bp, Homo sapien
ccacatcatccaggatgaggctgaa

SEQ ID NO: 2399363 - DNA, 25 bp, Homo sapien
tactctcggctaaagctcagctctg

SEQ ID NO: 2399364 - DNA, 25 bp, Homo sapien
gctcccggcggatcaacagggatac

SEQ ID NO: 2399365 - DNA, 25 bp, Homo sapien
taggcgctggtacatgctaggaagc

SEQ ID NO: 2399366 - DNA, 25 bp, Homo sapien
ctcctgagcattgggtcgagacaac

SEQ ID NO: 2399367 - DNA, 25 bp, Homo sapien
ttgagcacctcgttgacaatggacg

SEQ ID NO: 2399368 - DNA, 25 bp, Homo sapien
gcaacactcgttcctcgtagtccag

SEQ ID NO: 2399369 - DNA, 25 bp, Homo sapien
aggccaaacaccctttcccaagcat

SEQ ID NO: 2399370 - DNA, 25 bp, Homo sapien
gctggtcaaggccaaacaccctttc

SEQ ID NO: 2399371 - DNA, 25 bp, Homo sapien
taggcagtgaacaagacgagggaca

SEQ ID NO: 2399372 - DNA, 25 bp, Homo sapien
caggtgaactagtcaagcttaggga

SEQ ID NO: 2399373 - DNA, 25 bp, Homo sapien
taaaaagcacgcaaacacagtgtgt

SEQ ID NO: 2399374 - DNA, 25 bp, Homo sapien
tattgaatacacgtcagggaggaga

SEQ ID NO: 2399375 - DNA, 25 bp, Homo sapien
tagataatggggtactggaaccaag

SEQ ID NO: 2399376 - DNA, 25 bp, Homo sapien
gaggagatttttcgaggtctggccc

SEQ ID NO: 2399377 - DNA, 25 bp, Homo sapien
ctggcccgaatgtcatagataatgg

SEQ ID NO: 2399378 - DNA, 25 bp, Homo sapien
gatttttcgaggtctggcccgaatg

SEQ ID NO: 2399379 - DNA, 25 bp, Homo sapien
acagtttgtatgctgctggaggttc

SEQ ID NO: 2399380 - DNA, 25 bp, Homo sapien
tctggaaaacaacagtttgtatgct

SEQ ID NO: 2399381 - DNA, 25 bp, Homo sapien
tttgtatgctgctggaggttctcgc

SEQ ID NO: 2399382 - DNA, 25 bp, Homo sapien
tatgctgctggaggttctcgcagca

SEQ ID NO: 2399383 - DNA, 25 bp, Homo sapien
gttgcacgtccgactatagccactg

SEQ ID NO: 2399384 - DNA, 25 bp, Homo sapien
tgaatcctgttgcacgtccgactat

SEQ ID NO: 2399385 - DNA, 25 bp, Homo sapien
tgggaaaagagcagcgttgaatcct

SEQ ID NO: 2399386 - DNA, 25 bp, Homo sapien
tatagccactgctgggtcggcgtca

SEQ ID NO: 2399387 - DNA, 25 bp, Homo sapien
tgaagaagatggctctgtgcccgcc

SEQ ID NO: 2399388 - DNA, 25 bp, Homo sapien
gcactccaccgatccgattgaagaa

SEQ ID NO: 2399389 - DNA, 25 bp, Homo sapien
tgaagtgaaggccctcggccaggat

SEQ ID NO: 2399390 - DNA, 25 bp, Homo sapien
cggccaggatagtgtcctgctgcac

SEQ ID NO: 2399391 - DNA, 25 bp, Homo sapien
gggagggactggaagcgtccggcga

SEQ ID NO: 2399392 - DNA, 25 bp, Homo sapien
tcagaggaaatgctaggcccgtgga

SEQ ID NO: 2399393 - DNA, 25 bp, Homo sapien
gactggaagcgtccggcgagcaggc

SEQ ID NO: 2399394 - DNA, 25 bp, Homo sapien
gggtggtgatcaggccaggccgctg

SEQ ID NO: 2399395 - DNA, 25 bp, Homo sapien
agccgtcccgccaagtccttcaagt

SEQ ID NO: 2399396 - DNA, 25 bp, Homo sapien
tgaacacagattcgcgcacaccgta

SEQ ID NO: 2399397 - DNA, 25 bp, Homo sapien
cacaccgtaggccacggcgccggcc

SEQ ID NO: 2399398 - DNA, 25 bp, Homo sapien
aacagcttcagggccgtgcccatgc

SEQ ID NO: 2399399 - DNA, 25 bp, Homo sapien
gcggaagtgcgctccctttgaaacc

SEQ ID NO: 2399400 - DNA, 25 bp, Homo sapien
gctccggcttaggtactgcaccctt

SEQ ID NO: 2399401 - DNA, 25 bp, Homo sapien
cgtaaggctggcgaaagaaagggca

SEQ ID NO: 2399402 - DNA, 25 bp, Homo sapien
tgcacccttcacacgagggttcggg

SEQ ID NO: 2399403 - DNA, 25 bp, Homo sapien
tgaccaccctaatgctccttgggac

SEQ ID NO: 2399404 - DNA, 25 bp, Homo sapien
agagttgttaggatagtgtctgtca

SEQ ID NO: 2399405 - DNA, 25 bp, Homo sapien
gctgctacagatgtagtccacttct

SEQ ID NO: 2399406 - DNA, 25 bp, Homo sapien
cttttccagtgtacagagagttgtt

SEQ ID NO: 2399407 - DNA, 25 bp, Homo sapien
catggcaaggtaaggtctgggctca

SEQ ID NO: 2399408 - DNA, 25 bp, Homo sapien
tagtatagaattcccagagcagtag

SEQ ID NO: 2399409 - DNA, 25 bp, Homo sapien
tggtagcggcacatacacaatcata

SEQ ID NO: 2399410 - DNA, 25 bp, Homo sapien
tgaaggcaggctttagctcccagat

SEQ ID NO: 2399411 - DNA, 25 bp, Homo sapien
accattgctttgtgaatataaggca

SEQ ID NO: 2399412 - DNA, 25 bp, Homo sapien
ataaggcaatatgaatagtaggctc

SEQ ID NO: 2399413 - DNA, 25 bp, Homo sapien
caatatgaatagtaggctcaggaag

SEQ ID NO: 2399414 - DNA, 25 bp, Homo sapien
tccttggcaccattgctttgtgaat

SEQ ID NO: 2399415 - DNA, 25 bp, Homo sapien
aggcagaaggcagtcatggagtaac

SEQ ID NO: 2399416 - DNA, 25 bp, Homo sapien
agaggcagaaggcagtcatggagta

SEQ ID NO: 2399417 - DNA, 25 bp, Homo sapien
gaaggcagtcatggagtaacccatg

SEQ ID NO: 2399418 - DNA, 25 bp, Homo sapien
cagaaggcagtcatggagtaaccca

SEQ ID NO: 2399419 - DNA, 25 bp, Homo sapien
tcagcatcttgtcccttatattccc

SEQ ID NO: 2399420 - DNA, 25 bp, Homo sapien
agcatcttgtcccttatattcccct

SEQ ID NO: 2399421 - DNA, 25 bp, Homo sapien
atcagcatcttgtcccttatattcc

SEQ ID NO: 2399422 - DNA, 25 bp, Homo sapien
cagcatcttgtcccttatattcccc

SEQ ID NO: 2399423 - DNA, 25 bp, Homo sapien
tagcaacgagagaccctgagagagt

SEQ ID NO: 2399424 - DNA, 25 bp, Homo sapien
caatgaggaattccatctggaagca

SEQ ID NO: 2399425 - DNA, 25 bp, Homo sapien
tccaaggaacttgagtcgtttgaag

SEQ ID NO: 2399426 - DNA, 25 bp, Homo sapien
gaagcagaccaggtatcctgagtgc

SEQ ID NO: 2399427 - DNA, 25 bp, Homo sapien
ggacataagtccattggcagagctg

SEQ ID NO: 2399428 - DNA, 25 bp, Homo sapien
ggagtaacacccaggtcttaacgca

SEQ ID NO: 2399429 - DNA, 25 bp, Homo sapien
cctcaccctgaggattggattggag

SEQ ID NO: 2399430 - DNA, 25 bp, Homo sapien
gtgtgcgcacgagccacttggttca

SEQ ID NO: 2399431 - DNA, 25 bp, Homo sapien
gatgttgaatgaggcaatggtgcca

SEQ ID NO: 2399432 - DNA, 25 bp, Homo sapien
tgccagtgaagcgggggtttgtttc

SEQ ID NO: 2399433 - DNA, 25 bp, Homo sapien
gccacccaggcgttggtgttgatgt

SEQ ID NO: 2399434 - DNA, 25 bp, Homo sapien
tgaatgaggcaatggtgccagtgaa

SEQ ID NO: 2399435 - DNA, 25 bp, Homo sapien
aagcccaggcccgtcaaaatgcata

SEQ ID NO: 2399436 - DNA, 25 bp, Homo sapien
gcccaggcccgtcaaaatgcatact

SEQ ID NO: 2399437 - DNA, 25 bp, Homo sapien
ggcacaggcatcccactttgccttg

SEQ ID NO: 2399438 - DNA, 25 bp, Homo sapien
aggcccgtcaaaatgcatactcctt

SEQ ID NO: 2399439 - DNA, 25 bp, Homo sapien
ttgtacagcacaaacttgccccaga

SEQ ID NO: 2399440 - DNA, 25 bp, Homo sapien
acagcacaaacttgccccagatcag

SEQ ID NO: 2399441 - DNA, 25 bp, Homo sapien
tcagcatgtacatgcagcggaacca

SEQ ID NO: 2399442 - DNA, 25 bp, Homo sapien
gatcagcatgtacatgcagcggaac

SEQ ID NO: 2399443 - DNA, 25 bp, Homo sapien
cattagggatatcacatgactaggc

SEQ ID NO: 2399444 - DNA, 25 bp, Homo sapien
cacaataggcagagaggaataagca

SEQ ID NO: 2399445 - DNA, 25 bp, Homo sapien
gataaggcaagctaggagcggctcc

SEQ ID NO: 2399446 - DNA, 25 bp, Homo sapien
tgaattccctagaagtgcccaaatg

SEQ ID NO: 2399447 - DNA, 25 bp, Homo sapien
tgcccgcgaaggttgttcagtgctg

SEQ ID NO: 2399448 - DNA, 25 bp, Homo sapien
tcacagatctagagcaaaaccaaca

SEQ ID NO: 2399449 - DNA, 25 bp, Homo sapien
tctgctatctgtagggatccttgcc

SEQ ID NO: 2399450 - DNA, 25 bp, Homo sapien
aacatgtcccagcacggctggcatt

SEQ ID NO: 2399451 - DNA, 25 bp, Homo sapien
aaaggcccagactcaggcgcttgag

SEQ ID NO: 2399452 - DNA, 25 bp, Homo sapien
tgtagcccactaggtagaaaaggcc

SEQ ID NO: 2399453 - DNA, 25 bp, Homo sapien
ggctgagcagtgtgtagcccactag

SEQ ID NO: 2399454 - DNA, 25 bp, Homo sapien
cactaggtagaaaaggcccagactc

SEQ ID NO: 2399455 - DNA, 25 bp, Homo sapien
ggatgctactgatctcaaggtcttg

SEQ ID NO: 2399456 - DNA, 25 bp, Homo sapien
caaggtcttgccaggtctcacaatc

SEQ ID NO: 2399457 - DNA, 25 bp, Homo sapien
gaaagatttctatggctggctatga

SEQ ID NO: 2399458 - DNA, 25 bp, Homo sapien
gctctgctgcccaaagtgtttcctg

SEQ ID NO: 2399459 - DNA, 25 bp, Homo sapien
tctgttgctcagaggacaaggaatt

SEQ ID NO: 2399460 - DNA, 25 bp, Homo sapien
ggtatgtcaatcagctctccctgca

SEQ ID NO: 2399461 - DNA, 25 bp, Homo sapien
gaagtaggagaaaccagcaacttcc

SEQ ID NO: 2399462 - DNA, 25 bp, Homo sapien
cagggaaggaacaccacgtatggca

SEQ ID NO: 2399463 - DNA, 25 bp, Homo sapien
ctgatctttccctccgtcaaagtag

SEQ ID NO: 2399464 - DNA, 25 bp, Homo sapien
ccgtcaaagtagtcaacagccaaac

SEQ ID NO: 2399465 - DNA, 25 bp, Homo sapien
gatctttccctccgtcaaagtagtc

SEQ ID NO: 2399466 - DNA, 25 bp, Homo sapien
tgatctttccctccgtcaaagtagt

SEQ ID NO: 2399467 - DNA, 25 bp, Homo sapien
tggcattgtccacttgatatcgtag

SEQ ID NO: 2399468 - DNA, 25 bp, Homo sapien
gtaatagtatccagccagaaggtag

SEQ ID NO: 2399469 - DNA, 25 bp, Homo sapien
tcgtagttgccggtggcagtgtaat

SEQ ID NO: 2399470 - DNA, 25 bp, Homo sapien
ttcaaagtcagaacacaatgtggca

SEQ ID NO: 2399471 - DNA, 25 bp, Homo sapien
gcctaggcttaggttctttaactca

SEQ ID NO: 2399472 - DNA, 25 bp, Homo sapien
ggttaaaccaaagagcctaatggca

SEQ ID NO: 2399473 - DNA, 25 bp, Homo sapien
tatgcaaagggttagctggtggccc

SEQ ID NO: 2399474 - DNA, 25 bp, Homo sapien
ggcaaagagttaccattacaatctg

SEQ ID NO: 2399475 - DNA, 25 bp, Homo sapien
tctggaagcaaaaggtagtgaggac

SEQ ID NO: 2399476 - DNA, 25 bp, Homo sapien
gaagcaaaaggtagtgaggacggca

SEQ ID NO: 2399477 - DNA, 25 bp, Homo sapien
gcaaaaggtagtgaggacggcagtg

SEQ ID NO: 2399478 - DNA, 25 bp, Homo sapien
aagcaaaaggtagtgaggacggcag

SEQ ID NO: 2399479 - DNA, 25 bp, Homo sapien
gaagcacaatacacagcagggagtg

SEQ ID NO: 2399480 - DNA, 25 bp, Homo sapien
aggaactgaagcacaatacacagca

SEQ ID NO: 2399481 - DNA, 25 bp, Homo sapien
tgaagcacaatacacagcagggagt

SEQ ID NO: 2399482 - DNA, 25 bp, Homo sapien
aactgaagcacaatacacagcaggg

SEQ ID NO: 2399483 - DNA, 25 bp, Homo sapien
caggttcccactaattgcggtgtca

SEQ ID NO: 2399484 - DNA, 25 bp, Homo sapien
gcaagtgggagcattataacttccc

SEQ ID NO: 2399485 - DNA, 25 bp, Homo sapien
tgcttggctcggtcattcagttaca

SEQ ID NO: 2399486 - DNA, 25 bp, Homo sapien
tgaggtatggcaagggtaaccaccc

SEQ ID NO: 2399487 - DNA, 25 bp, Homo sapien
aataagcaattgagaggcctgtaaa

SEQ ID NO: 2399488 - DNA, 25 bp, Homo sapien
gaggtggatgaggtaggtctccttg

SEQ ID NO: 2399489 - DNA, 25 bp, Homo sapien
cttgtagaaaaggtaatgccgataa

SEQ ID NO: 2399490 - DNA, 25 bp, Homo sapien
aggtaatgccgataaaacaaagcaa

SEQ ID NO: 2399491 - DNA, 25 bp, Homo sapien
ataagaagagtgttatttgtgcctg

SEQ ID NO: 2399492 - DNA, 25 bp, Homo sapien
gataagaagagtgttatttgtgcct

SEQ ID NO: 2399493 - DNA, 25 bp, Homo sapien
accatccctagtcagtgtgtgtgtt

SEQ ID NO: 2399494 - DNA, 25 bp, Homo sapien
cataagccaccatccctagtcagtg

SEQ ID NO: 2399495 - DNA, 25 bp, Homo sapien
taagccaccatccctagtcagtgtg

SEQ ID NO: 2399496 - DNA, 25 bp, Homo sapien
ccaccatccctagtcagtgtgtgtg

SEQ ID NO: 2399497 - DNA, 25 bp, Homo sapien
cagcaatcctgtacaccttgggctg

SEQ ID NO: 2399498 - DNA, 25 bp, Homo sapien
agcaatcctgtacaccttgggctga

SEQ ID NO: 2399499 - DNA, 25 bp, Homo sapien
gcaatcctgtacaccttgggctgag

SEQ ID NO: 2399500 - DNA, 25 bp, Homo sapien
ccagcaatcctgtacaccttgggct

SEQ ID NO: 2399501 - DNA, 25 bp, Homo sapien
tgtacatggcactggtctcaacctg

SEQ ID NO: 2399502 - DNA, 25 bp, Homo sapien
aaattttatgtctaacacagtgtgc

SEQ ID NO: 2399503 - DNA, 25 bp, Homo sapien
taagaattacctaggatgcggccgg

SEQ ID NO: 2399504 - DNA, 25 bp, Homo sapien
tgaatacattctactatccattggt

SEQ ID NO: 2399505 - DNA, 25 bp, Homo sapien
agaattacctaggatgcttattaaa

SEQ ID NO: 2399506 - DNA, 25 bp, Homo sapien
gaattacctaggatgcttattaaaa

SEQ ID NO: 2399507 - DNA, 25 bp, Homo sapien
aaagaattacctaggatgcttatta

SEQ ID NO: 2399508 - DNA, 25 bp, Homo sapien
aaaaagaattacctaggatgcttat

SEQ ID NO: 2399509 - DNA, 25 bp, Homo sapien
actatctcactatgtattattttcg

SEQ ID NO: 2399510 - DNA, 25 bp, Homo sapien
tggccagcaaattcttaattgcctg

SEQ ID NO: 2399511 - DNA, 25 bp, Homo sapien
gccagcaaattcttaattgcctgta

SEQ ID NO: 2399512 - DNA, 25 bp, Homo sapien
ttgcctgtaaaattactatctcact

SEQ ID NO: 2399513 - DNA, 25 bp, Homo sapien
gatattagactagctttccctggca

SEQ ID NO: 2399514 - DNA, 25 bp, Homo sapien
cataagaactccaagtgggccctaa

SEQ ID NO: 2399515 - DNA, 25 bp, Homo sapien
tggcagctgcaactagggaacctaa

SEQ ID NO: 2399516 - DNA, 25 bp, Homo sapien
cagccactgctaggaaaatgtcaat

SEQ ID NO: 2399517 - DNA, 25 bp, Homo sapien
gcaaataatcttgtggaccctaact

SEQ ID NO: 2399518 - DNA, 25 bp, Homo sapien
tttaaaaggcgactgaactggacgc

SEQ ID NO: 2399519 - DNA, 25 bp, Homo sapien
gacgcctcatatgagctcccatggc

SEQ ID NO: 2399520 - DNA, 25 bp, Homo sapien
atgcccagctaatgcaaatatcatt

SEQ ID NO: 2399521 - DNA, 25 bp, Homo sapien
tagctttggacactgagaggtggct

SEQ ID NO: 2399522 - DNA, 25 bp, Homo sapien
tactgattgcatcttggtttaacca

SEQ ID NO: 2399523 - DNA, 25 bp, Homo sapien
ggccagctctagctttggacactga

SEQ ID NO: 2399524 - DNA, 25 bp, Homo sapien
gagaggtggctcatatactgattgc

SEQ ID NO: 2399525 - DNA, 25 bp, Homo sapien
agcaaggatttcctccagtatccca

SEQ ID NO: 2399526 - DNA, 25 bp, Homo sapien
agtatcccagttccctgagagagct

SEQ ID NO: 2399527 - DNA, 25 bp, Homo sapien
gagagctgggttcaagaaccaggaa

SEQ ID NO: 2399528 - DNA, 25 bp, Homo sapien
agagagctgggttcaagaaccagga

SEQ ID NO: 2399529 - DNA, 25 bp, Homo sapien
aaaatgatattccagggtaaatgac

SEQ ID NO: 2399530 - DNA, 25 bp, Homo sapien
cccaagtccagcattaaaatgatat

SEQ ID NO: 2399531 - DNA, 25 bp, Homo sapien
cagcattaaaatgatattccagggt

SEQ ID NO: 2399532 - DNA, 25 bp, Homo sapien
tccagggtaaatgacaggtaggtgg

SEQ ID NO: 2399533 - DNA, 25 bp, Homo sapien
aggaagatggagatgatcagccgca

SEQ ID NO: 2399534 - DNA, 25 bp, Homo sapien
cagggacgtcgccaacttgttaagg

SEQ ID NO: 2399535 - DNA, 25 bp, Homo sapien
agctcctggaaacccgactgcagaa

SEQ ID NO: 2399536 - DNA, 25 bp, Homo sapien
gcgcctgttctgacgcgcccaggga

SEQ ID NO: 2399537 - DNA, 25 bp, Homo sapien
gtgactcctgccgagaatgcacacg

SEQ ID NO: 2399538 - DNA, 25 bp, Homo sapien
tctgaaggtttgtaaggcaaaggtg

SEQ ID NO: 2399539 - DNA, 25 bp, Homo sapien
ttattggccgacctgcgcagagggc

SEQ ID NO: 2399540 - DNA, 25 bp, Homo sapien
gaatgcgggcaaaacgctatcgctt

SEQ ID NO: 2399541 - DNA, 25 bp, Homo sapien
acactctcggttacttctttctcaa

SEQ ID NO: 2399542 - DNA, 25 bp, Homo sapien
tctttctcaattccatccgcacagc

SEQ ID NO: 2399543 - DNA, 25 bp, Homo sapien
tcactgcacactctcggttacttct

SEQ ID NO: 2399544 - DNA, 25 bp, Homo sapien
tttctcaattccatccgcacagctt

SEQ ID NO: 2399545 - DNA, 25 bp, Homo sapien
agtatgcctggtgggaccacattcc

SEQ ID NO: 2399546 - DNA, 25 bp, Homo sapien
tgcctggtgggaccacattcccata

SEQ ID NO: 2399547 - DNA, 25 bp, Homo sapien
gagaagtatgcctggtgggaccaca

SEQ ID NO: 2399548 - DNA, 25 bp, Homo sapien
tggtggaagggggagaagtatgcct

SEQ ID NO: 2399549 - DNA, 25 bp, Homo sapien
aatcggacccttggtgagcctgctg

SEQ ID NO: 2399550 - DNA, 25 bp, Homo sapien
cacaaactgctgatacctggctgtc

SEQ ID NO: 2399551 - DNA, 25 bp, Homo sapien
tcctgcacaaaatgaggctttggag

SEQ ID NO: 2399552 - DNA, 25 bp, Homo sapien
gctgatacctggctgtcaggagcgc

SEQ ID NO: 2399553 - DNA, 25 bp, Homo sapien
aggttcaaatgattggcatgtctca

SEQ ID NO: 2399554 - DNA, 25 bp, Homo sapien
gggatgatctcgttgtgtagaatat

SEQ ID NO: 2399555 - DNA, 25 bp, Homo sapien
tttgactgttgacctctctagggag

SEQ ID NO: 2399556 - DNA, 25 bp, Homo sapien
tattagcttgatggggctccctctg

SEQ ID NO: 2399557 - DNA, 25 bp, Homo sapien
cctatgggctctacacacgggtaaa

SEQ ID NO: 2399558 - DNA, 25 bp, Homo sapien
gataatgacattgcactggtgcggc

SEQ ID NO: 2399559 - DNA, 25 bp, Homo sapien
agatcgtgctgttcgcctcaaggcg

SEQ ID NO: 2399560 - DNA, 25 bp, Homo sapien
gaccaaattctacgcagctggcctg

SEQ ID NO: 2399561 - DNA, 25 bp, Homo sapien
gaacttgattgttgagacgccttgc

SEQ ID NO: 2399562 - DNA, 25 bp, Homo sapien
tcatgactgaaagaagacacgagcg

SEQ ID NO: 2399563 - DNA, 25 bp, Homo sapien
tccccggagtacctattgtagataa

SEQ ID NO: 2399564 - DNA, 25 bp, Homo sapien
gacgccttgctagaggtagagtttg

SEQ ID NO: 2399565 - DNA, 25 bp, Homo sapien
cccaatggtatcaaagtggaagagg

SEQ ID NO: 2399566 - DNA, 25 bp, Homo sapien
caactagagattgataactatatcc

SEQ ID NO: 2399567 - DNA, 25 bp, Homo sapien
tggaaaaagttatattcaatgaccc

SEQ ID NO: 2399568 - DNA, 25 bp, Homo sapien
taactatatcctctgcaatcctcag

SEQ ID NO: 2399569 - DNA, 25 bp, Homo sapien
tacaggaaagagaatttcacacacg

SEQ ID NO: 2399570 - DNA, 25 bp, Homo sapien
acaggaaagagaatttcacacacgg

SEQ ID NO: 2399571 - DNA, 25 bp, Homo sapien
ctctggattcgaacctagtgaattc

SEQ ID NO: 2399572 - DNA, 25 bp, Homo sapien
taatagagactcttagtggttatca

SEQ ID NO: 2399573 - DNA, 25 bp, Homo sapien
gtggttatcaacaactggtcagttg

SEQ ID NO: 2399574 - DNA, 25 bp, Homo sapien
tgctctctggattcgaacctagtga

SEQ ID NO: 2399575 - DNA, 25 bp, Homo sapien
gcactttggtgtagaagccatagcc

SEQ ID NO: 2399576 - DNA, 25 bp, Homo sapien
ccgtggccacccagcgatcagtgtt

SEQ ID NO: 2399577 - DNA, 25 bp, Homo sapien
ggtgtagaagccatagcccctgctg

SEQ ID NO: 2399578 - DNA, 25 bp, Homo sapien
cagtgttcgggtcccttactgcaaa

SEQ ID NO: 2399579 - DNA, 25 bp, Homo sapien
atcctattctttccccggagccagt

SEQ ID NO: 2399580 - DNA, 25 bp, Homo sapien
ctggcaggcgtcctgctttagagat

SEQ ID NO: 2399581 - DNA, 25 bp, Homo sapien
atccatcctattctttccccggagc

SEQ ID NO: 2399582 - DNA, 25 bp, Homo sapien
caggcgtcctgctttagagatgggt

SEQ ID NO: 2399583 - DNA, 25 bp, Homo sapien
cttctcctccatgaccccgaagcca

SEQ ID NO: 2399584 - DNA, 25 bp, Homo sapien
cgggcagacggacaaacctgaggtc

SEQ ID NO: 2399585 - DNA, 25 bp, Homo sapien
attagctacgggcagacggacaaac

SEQ ID NO: 2399586 - DNA, 25 bp, Homo sapien
tgtggattagctacgggcagacgga

SEQ ID NO: 2399587 - DNA, 25 bp, Homo sapien
tagtccgggtggacgctgaccctgc

SEQ ID NO: 2399588 - DNA, 25 bp, Homo sapien
gacccagggtgacactattttccag

SEQ ID NO: 2399589 - DNA, 25 bp, Homo sapien
catcaagcccaggtcgtagaaggta

SEQ ID NO: 2399590 - DNA, 25 bp, Homo sapien
caaaattgtaggactcatcctgacg

SEQ ID NO: 2399591 - DNA, 25 bp, Homo sapien
aagaggcgttgctttgcgcttcgtg

SEQ ID NO: 2399592 - DNA, 25 bp, Homo sapien
tgctttgcgcttcgtgttccttggg

SEQ ID NO: 2399593 - DNA, 25 bp, Homo sapien
ttcgtgttccttgggatacagggtg

SEQ ID NO: 2399594 - DNA, 25 bp, Homo sapien
ccaggaacacatccaaagaggcgtt

SEQ ID NO: 2399595 - DNA, 25 bp, Homo sapien
ttttgccctccgatgatgcgctgcc

SEQ ID NO: 2399596 - DNA, 25 bp, Homo sapien
ccaggggaagttgcccatcttggct

SEQ ID NO: 2399597 - DNA, 25 bp, Homo sapien
tgcctctgttccacggggttcacgg

SEQ ID NO: 2399598 - DNA, 25 bp, Homo sapien
cgcccgtggatgttggtgaacacct

SEQ ID NO: 2399599 - DNA, 25 bp, Homo sapien
aagggcaagtcagttccaggtccca

SEQ ID NO: 2399600 - DNA, 25 bp, Homo sapien
agctccctgtttgccctctcttttt

SEQ ID NO: 2399601 - DNA, 25 bp, Homo sapien
ggaagacaagggcaagtcagttcca

SEQ ID NO: 2399602 - DNA, 25 bp, Homo sapien
acagggaagacaagggcaagtcagt

SEQ ID NO: 2399603 - DNA, 25 bp, Homo sapien
tggatgatggtgaactcgtctaggg

SEQ ID NO: 2399604 - DNA, 25 bp, Homo sapien
ggtagcaatgaagtagtcacggaac

SEQ ID NO: 2399605 - DNA, 25 bp, Homo sapien
gtagtcacggaactggtactgaggc

SEQ ID NO: 2399606 - DNA, 25 bp, Homo sapien
gagctggtagccttgcttgcaggta

SEQ ID NO: 2399607 - DNA, 25 bp, Homo sapien
cattgctgctggtgtcgaggtcggg

SEQ ID NO: 2399608 - DNA, 25 bp, Homo sapien
agcattgctgctggtgtcgaggtcg

SEQ ID NO: 2399609 - DNA, 25 bp, Homo sapien
cccccgactcatctgtgaagaacag

SEQ ID NO: 2399610 - DNA, 25 bp, Homo sapien
attgctgctggtgtcgaggtcgggg

SEQ ID NO: 2399611 - DNA, 25 bp, Homo sapien
gccaatgttcttcccgttggcatag

SEQ ID NO: 2399612 - DNA, 25 bp, Homo sapien
gaactcgccaatgttcttcccgttg

SEQ ID NO: 2399613 - DNA, 25 bp, Homo sapien
gcttcccacagaactcgccaatgtt

SEQ ID NO: 2399614 - DNA, 25 bp, Homo sapien
acagaactcgccaatgttcttcccg

SEQ ID NO: 2399615 - DNA, 25 bp, Homo sapien
cccatgacccaattctagttgtgtg

SEQ ID NO: 2399616 - DNA, 25 bp, Homo sapien
gggccaactgggtagtagcctggtg

SEQ ID NO: 2399617 - DNA, 25 bp, Homo sapien
gcttggacgtttttacacagggcca

SEQ ID NO: 2399618 - DNA, 25 bp, Homo sapien
ggaaggtgaaaagggatccccatga

SEQ ID NO: 2399619 - DNA, 25 bp, Homo sapien
ccagcccatgggtgatgttggccgt

SEQ ID NO: 2399620 - DNA, 25 bp, Homo sapien
cccatgggtgatgttggccgttcct

SEQ ID NO: 2399621 - DNA, 25 bp, Homo sapien
gtgatgttggccgttcctgccccag

SEQ ID NO: 2399622 - DNA, 25 bp, Homo sapien
atgggtgatgttggccgttcctgcc

SEQ ID NO: 2399623 - DNA, 25 bp, Homo sapien
gtctttcaggggtaggacggctgta

SEQ ID NO: 2399624 - DNA, 25 bp, Homo sapien
tctttcaggggtaggacggctgtac

SEQ ID NO: 2399625 - DNA, 25 bp, Homo sapien
gctccacccggatgctgtagttgca

SEQ ID NO: 2399626 - DNA, 25 bp, Homo sapien
tgatgcctccgtgtacagctcgctg

SEQ ID NO: 2399627 - DNA, 25 bp, Homo sapien
ttgctggtggtcatcaatatcaaaa

SEQ ID NO: 2399628 - DNA, 25 bp, Homo sapien
gtaggaccgagggtactccaggctg

SEQ ID NO: 2399629 - DNA, 25 bp, Homo sapien
ttcccctctgctacaccactctggc

SEQ ID NO: 2399630 - DNA, 25 bp, Homo sapien
gcattacgggggactccagctggcc

SEQ ID NO: 2399631 - DNA, 25 bp, Homo sapien
agagccacagggcattacgggggac

SEQ ID NO: 2399632 - DNA, 25 bp, Homo sapien
cctctgctacaccactctggctcac

SEQ ID NO: 2399633 - DNA, 25 bp, Homo sapien
agaagtagcctccaacgtagttgtg

SEQ ID NO: 2399634 - DNA, 25 bp, Homo sapien
cctgaagctcatagcctggacggca

SEQ ID NO: 2399635 - DNA, 25 bp, Homo sapien
gcctccaacgtagttgtgacacagg

SEQ ID NO: 2399636 - DNA, 25 bp, Homo sapien
ttgctccgggaagcacattcatcaa

SEQ ID NO: 2399637 - DNA, 25 bp, Homo sapien
cttctgctgggagacctgagtagtg

SEQ ID NO: 2399638 - DNA, 25 bp, Homo sapien
agggttaagcttctgctgggagacc

SEQ ID NO: 2399639 - DNA, 25 bp, Homo sapien
tgagtagtggctctgatcttaggga

SEQ ID NO: 2399640 - DNA, 25 bp, Homo sapien
tggctctgatcttagggaggtcact

SEQ ID NO: 2399641 - DNA, 25 bp, Homo sapien
gacaggcctcgttaggaaaagctct

SEQ ID NO: 2399642 - DNA, 25 bp, Homo sapien
aaaggcatctttaggccacctggac

SEQ ID NO: 2399643 - DNA, 25 bp, Homo sapien
ggacagagcccaggttgacaggcct

SEQ ID NO: 2399644 - DNA, 25 bp, Homo sapien
gaaagccaggctttcggcttctttg

SEQ ID NO: 2399645 - DNA, 25 bp, Homo sapien
tctgtgtggaaggtcagcagcatct

SEQ ID NO: 2399646 - DNA, 25 bp, Homo sapien
gcatcttgttcccttgggacataaa

SEQ ID NO: 2399647 - DNA, 25 bp, Homo sapien
cctcgttggagaagtctgtgtggaa

SEQ ID NO: 2399648 - DNA, 25 bp, Homo sapien
gcccttgtagaacatgatggtccca

SEQ ID NO: 2399649 - DNA, 25 bp, Homo sapien
ctggtggaagaaggacagtgggtag

SEQ ID NO: 2399650 - DNA, 25 bp, Homo sapien
tggaagaaggacagtgggtaggaag

SEQ ID NO: 2399651 - DNA, 25 bp, Homo sapien
gaaggacagtgggtaggaagaagat

SEQ ID NO: 2399652 - DNA, 25 bp, Homo sapien
agaaggacagtgggtaggaagaaga

SEQ ID NO: 2399653 - DNA, 25 bp, Homo sapien
ctctttgcgtgttgtcctggactgg

SEQ ID NO: 2399654 - DNA, 25 bp, Homo sapien
agctgctgcaaacttccccatgtga

SEQ ID NO: 2399655 - DNA, 25 bp, Homo sapien
gagtctcccactgattcactctttg

SEQ ID NO: 2399656 - DNA, 25 bp, Homo sapien
tgtcctggactgggtacctcaccct

SEQ ID NO: 2399657 - DNA, 25 bp, Homo sapien
tcctgggaatggtagttgttggacc

SEQ ID NO: 2399658 - DNA, 25 bp, Homo sapien
tgcacactcgccaagtcttctgagc

SEQ ID NO: 2399659 - DNA, 25 bp, Homo sapien
gagccggtaagacgtgccattgtca

SEQ ID NO: 2399660 - DNA, 25 bp, Homo sapien
tgtaattcacgcataatctccaggg

SEQ ID NO: 2399661 - DNA, 25 bp, Homo sapien
actggatagagaaagacaggcctgg

SEQ ID NO: 2399662 - DNA, 25 bp, Homo sapien
ttactggatagagaaagacaggcct

SEQ ID NO: 2399663 - DNA, 25 bp, Homo sapien
tactggatagagaaagacaggcctg

SEQ ID NO: 2399664 - DNA, 25 bp, Homo sapien
ggctattcctgtgctgccagagccc

SEQ ID NO: 2399665 - DNA, 25 bp, Homo sapien
ttctgagcacactgtccttgctgaa

SEQ ID NO: 2399666 - DNA, 25 bp, Homo sapien
ctgagcacactgtccttgctgaagg

SEQ ID NO: 2399667 - DNA, 25 bp, Homo sapien
tgaaggctattcctgtgctgccaga

SEQ ID NO: 2399668 - DNA, 25 bp, Homo sapien
gactctcagctagacagcagatggg

SEQ ID NO: 2399669 - DNA, 25 bp, Homo sapien
cctgactcagtggatgttgaatttc

SEQ ID NO: 2399670 - DNA, 25 bp, Homo sapien
agcaggcagccatgtcaatcatttc

SEQ ID NO: 2399671 - DNA, 25 bp, Homo sapien
gccatgtcaatcatttccttggaga

SEQ ID NO: 2399672 - DNA, 25 bp, Homo sapien
cgagcttcaccctgtatcccgtggg

SEQ ID NO: 2399673 - DNA, 25 bp, Homo sapien
aggtcaaactgctggaagacgagct

SEQ ID NO: 2399674 - DNA, 25 bp, Homo sapien
gactgtgatcacagtggttgtttca

SEQ ID NO: 2399675 - DNA, 25 bp, Homo sapien
cttgacataatcatagaagcagcct

SEQ ID NO: 2399676 - DNA, 25 bp, Homo sapien
gaacagaggggaagtcacctcccca

SEQ ID NO: 2399677 - DNA, 25 bp, Homo sapien
cagaggggaagtcacctccccaaat

SEQ ID NO: 2399678 - DNA, 25 bp, Homo sapien
tggggaacagaggggaagtcacctc

SEQ ID NO: 2399679 - DNA, 25 bp, Homo sapien
ctgagggatgggaatggagcctcct

SEQ ID NO: 2399680 - DNA, 25 bp, Homo sapien
tgagggatgggaatggagcctcctg

SEQ ID NO: 2399681 - DNA, 25 bp, Homo sapien
agggatgggaatggagcctcctgcc

SEQ ID NO: 2399682 - DNA, 25 bp, Homo sapien
gagggatgggaatggagcctcctgc

SEQ ID NO: 2399683 - DNA, 25 bp, Homo sapien
ggccggcaccaggaggtacaagagc

SEQ ID NO: 2399684 - DNA, 25 bp, Homo sapien
gggccggcaccaggaggtacaagag

SEQ ID NO: 2399685 - DNA, 25 bp, Homo sapien
caaaagagagtatctggagctggag

SEQ ID NO: 2399686 - DNA, 25 bp, Homo sapien
gagacggccataccactgggcattc

SEQ ID NO: 2399687 - DNA, 25 bp, Homo sapien
cagacatgttctcagcaggggtgcg

SEQ ID NO: 2399688 - DNA, 25 bp, Homo sapien
tggaggggttcagcactcttgccat

SEQ ID NO: 2399689 - DNA, 25 bp, Homo sapien
tccacccgtgggtctctgaaagggc

SEQ ID NO: 2399690 - DNA, 25 bp, Homo sapien
gactggcttgggaccagttaatgga

SEQ ID NO: 2399691 - DNA, 25 bp, Homo sapien
ccccttccaggaataggactggctt

SEQ ID NO: 2399692 - DNA, 25 bp, Homo sapien
cagcaagagcgtctgggagaaacca

SEQ ID NO: 2399693 - DNA, 25 bp, Homo sapien
ctcctctgatccctaggaggaggga

SEQ ID NO: 2399694 - DNA, 25 bp, Homo sapien
gagagaagggtgttcctgtctccct

SEQ ID NO: 2399695 - DNA, 25 bp, Homo sapien
atggcatgagcatctatgtatgaag

SEQ ID NO: 2399696 - DNA, 25 bp, Homo sapien
acagagtgtcccgtcctgggcaagg

SEQ ID NO: 2399697 - DNA, 25 bp, Homo sapien
gggctctcccgacagcgtcttcgtg

SEQ ID NO: 2399698 - DNA, 25 bp, Homo sapien
ccgtgttgaatcctgggctctcccg

SEQ ID NO: 2399699 - DNA, 25 bp, Homo sapien
tgggctctcccgacagcgtcttcgt

SEQ ID NO: 2399700 - DNA, 25 bp, Homo sapien
ttctcaaggcccgtgttgaatcctg

SEQ ID NO: 2399701 - DNA, 25 bp, Homo sapien
tgtgtgcagagggagcccgcgtcat

SEQ ID NO: 2399702 - DNA, 25 bp, Homo sapien
ctgtgtgcagagggagcccgcgtca

SEQ ID NO: 2399703 - DNA, 25 bp, Homo sapien
cattcccggaggaatgttggaggga

SEQ ID NO: 2399704 - DNA, 25 bp, Homo sapien
gaccattcccggaggaatgttggag

SEQ ID NO: 2399705 - DNA, 25 bp, Homo sapien
ggaccattcccggaggaatgttgga

SEQ ID NO: 2399706 - DNA, 25 bp, Homo sapien
accattcccggaggaatgttggagg

SEQ ID NO: 2399707 - DNA, 25 bp, Homo sapien
tcacagagctgatgcagttccccat

SEQ ID NO: 2399708 - DNA, 25 bp, Homo sapien
tgcaagatccaccaacgcttggagg

SEQ ID NO: 2399709 - DNA, 25 bp, Homo sapien
tcatcagtagttagacagcaggcac

SEQ ID NO: 2399710 - DNA, 25 bp, Homo sapien
gactgaacctaacggagggctggtc

SEQ ID NO: 2399711 - DNA, 25 bp, Homo sapien
taacctttgaccatatagcaacttg

SEQ ID NO: 2399712 - DNA, 25 bp, Homo sapien
tgactcttgatgctaacaaattacc

SEQ ID NO: 2399713 - DNA, 25 bp, Homo sapien
tataagtgtgcatcattgcacctgc

SEQ ID NO: 2399714 - DNA, 25 bp, Homo sapien
ccaatagagaatagtggaaaaccaa

SEQ ID NO: 2399715 - DNA, 25 bp, Homo sapien
ggcccatcacctccaggttttacta

SEQ ID NO: 2399716 - DNA, 25 bp, Homo sapien
tcccctgatgataggggcacaggtg

SEQ ID NO: 2399717 - DNA, 25 bp, Homo sapien
aattaaagagttggtcctctcaggt

SEQ ID NO: 2399718 - DNA, 25 bp, Homo sapien
gagcagttcccctgatgataggggc

SEQ ID NO: 2399719 - DNA, 25 bp, Homo sapien
tcctccatactctaatagcgggtga

SEQ ID NO: 2399720 - DNA, 25 bp, Homo sapien
gcggttctaaggacattcaaggcga

SEQ ID NO: 2399721 - DNA, 25 bp, Homo sapien
tgttgagatgtacaggcttcccggg

SEQ ID NO: 2399722 - DNA, 25 bp, Homo sapien
tagcgggtgagtagctgactcttcc

SEQ ID NO: 2399723 - DNA, 25 bp, Homo sapien
gagcaccttggtgtagaagtcatac

SEQ ID NO: 2399724 - DNA, 25 bp, Homo sapien
attgtcccataccacatagacgctg

SEQ ID NO: 2399725 - DNA, 25 bp, Homo sapien
ataccacatagacgctgccactgtc

SEQ ID NO: 2399726 - DNA, 25 bp, Homo sapien
ttcgccacaccctatgccccaggac

SEQ ID NO: 2399727 - DNA, 25 bp, Homo sapien
ccacccagtgatgggcatgattgtc

SEQ ID NO: 2399728 - DNA, 25 bp, Homo sapien
tcattatcgggcagacagaccggga

SEQ ID NO: 2399729 - DNA, 25 bp, Homo sapien
tacaggcagcctcgagtacttcagc

SEQ ID NO: 2399730 - DNA, 25 bp, Homo sapien
caagccgctgcggtagagggtctca

SEQ ID NO: 2399731 - DNA, 25 bp, Homo sapien
gctctggaagaaccgagggtcgtct

SEQ ID NO: 2399732 - DNA, 25 bp, Homo sapien
tggccgggatcaggactcttatact

SEQ ID NO: 2399733 - DNA, 25 bp, Homo sapien
cagactggagcgtacttgcgcgatc

SEQ ID NO: 2399734 - DNA, 25 bp, Homo sapien
tgtagaccatgtgggcagacaagga

SEQ ID NO: 2399735 - DNA, 25 bp, Homo sapien
gatgcagacccacggtgtagaccat

SEQ ID NO: 2399736 - DNA, 25 bp, Homo sapien
aaaatggtgggcttgaaccctcatg

SEQ ID NO: 2399737 - DNA, 25 bp, Homo sapien
ttgccggtgagatgtaacttggtgc

SEQ ID NO: 2399738 - DNA, 25 bp, Homo sapien
gcttgaaccctcatgtattgccggt

SEQ ID NO: 2399739 - DNA, 25 bp, Homo sapien
gcgtggatctcaaaaatggtgggct

SEQ ID NO: 2399740 - DNA, 25 bp, Homo sapien
ccaggtccctggggttgcacaggtg

SEQ ID NO: 2399741 - DNA, 25 bp, Homo sapien
caggcatacactgaagaacctcctc

SEQ ID NO: 2399742 - DNA, 25 bp, Homo sapien
ggcatacactgaagaacctcctccc

SEQ ID NO: 2399743 - DNA, 25 bp, Homo sapien
aggtccctggggttgcacaggtgag

SEQ ID NO: 2399744 - DNA, 25 bp, Homo sapien
ggcctgataatagggctcctggcag

SEQ ID NO: 2399745 - DNA, 25 bp, Homo sapien
tgctgccgcggcctgataatagggc

SEQ ID NO: 2399746 - DNA, 25 bp, Homo sapien
ccttggcagggttgtctccaggtgc

SEQ ID NO: 2399747 - DNA, 25 bp, Homo sapien
caggtgcgttgatggcctcagagcc

SEQ ID NO: 2399748 - DNA, 25 bp, Homo sapien
tacggctgtctcttaatagggttgc

SEQ ID NO: 2399749 - DNA, 25 bp, Homo sapien
gctgtcactcaagcttccacttaag

SEQ ID NO: 2399750 - DNA, 25 bp, Homo sapien
gcttgaagataccagggtcatggct

SEQ ID NO: 2399751 - DNA, 25 bp, Homo sapien
gatctgcaaacactgggcctgtaaa

SEQ ID NO: 2399752 - DNA, 25 bp, Homo sapien
cccttgtggaggtgggcagtcttgt

SEQ ID NO: 2399753 - DNA, 25 bp, Homo sapien
gaggtgggcagtcttgttctccgag

SEQ ID NO: 2399754 - DNA, 25 bp, Homo sapien
ggctgtgtgcggaaggtcagccgca

SEQ ID NO: 2399755 - DNA, 25 bp, Homo sapien
ttgttctccgaggaaggctgtgtgc

SEQ ID NO: 2399756 - DNA, 25 bp, Homo sapien
ccacagaactggcttggatccgaac

SEQ ID NO: 2399757 - DNA, 25 bp, Homo sapien
actggcttggatccgaaccgacgaa

SEQ ID NO: 2399758 - DNA, 25 bp, Homo sapien
cttggatccgaaccgacgaatgaga

SEQ ID NO: 2399759 - DNA, 25 bp, Homo sapien
cagaactggcttggatccgaaccga

SEQ ID NO: 2399760 - DNA, 25 bp, Homo sapien
gtaaacgaagctctcacaatgtatg

SEQ ID NO: 2399761 - DNA, 25 bp, Homo sapien
tgaaaacctaaggacacaggtgtcc

SEQ ID NO: 2399762 - DNA, 25 bp, Homo sapien
tcaatgcccttttgactgtctcgcc

SEQ ID NO: 2399763 - DNA, 25 bp, Homo sapien
ctctgctcaaataccttcctgtggg

SEQ ID NO: 2399764 - DNA, 25 bp, Homo sapien
gcccttttccctgaattgttagcga

SEQ ID NO: 2399765 - DNA, 25 bp, Homo sapien
tgtaggaaatggtgctcaactgctc

SEQ ID NO: 2399766 - DNA, 25 bp, Homo sapien
ctaactaggaaagtagagtggacac

SEQ ID NO: 2399767 - DNA, 25 bp, Homo sapien
ggagtttctgaagcacccaagatct

SEQ ID NO: 2399768 - DNA, 25 bp, Homo sapien
tacatcctgacagttgggaggcccc

SEQ ID NO: 2399769 - DNA, 25 bp, Homo sapien
cttccaatcagtattttagtgctcc

SEQ ID NO: 2399770 - DNA, 25 bp, Homo sapien
aagtctacctgccaaacagtgagct

SEQ ID NO: 2399771 - DNA, 25 bp, Homo sapien
tctaggtcaccttgtcgataaccct

SEQ ID NO: 2399772 - DNA, 25 bp, Homo sapien
aatctgcacaatgagtaaaaaacca

SEQ ID NO: 2399773 - DNA, 25 bp, Homo sapien
cacaatgagtaaaaaaccacgtgta

SEQ ID NO: 2399774 - DNA, 25 bp, Homo sapien
gattaaaagaggctctagattaaaa

SEQ ID NO: 2399775 - DNA, 25 bp, Homo sapien
tagcacaagaacattcctagaattg

SEQ ID NO: 2399776 - DNA, 25 bp, Homo sapien
tgtaatagctcttccaaggtaagtg

SEQ ID NO: 2399777 - DNA, 25 bp, Homo sapien
gcccgactgcccctacatggaaaat

SEQ ID NO: 2399778 - DNA, 25 bp, Homo sapien
taacaaccaatatgtgcgtccctgc

SEQ ID NO: 2399779 - DNA, 25 bp, Homo sapien
tcctgactatactgctgggactgca

SEQ ID NO: 2399780 - DNA, 25 bp, Homo sapien
gtcgaagtcctggaagacgagcctc

SEQ ID NO: 2399781 - DNA, 25 bp, Homo sapien
tttgccatacggctctgggtacccg

SEQ ID NO: 2399782 - DNA, 25 bp, Homo sapien
gccctctggagccttgatgtccgtg

SEQ ID NO: 2399783 - DNA, 25 bp, Homo sapien
gatgtccgtgctgctctcttggcct

SEQ ID NO: 2399784 - DNA, 25 bp, Homo sapien
ggggccgcgcagctatggccggaag

SEQ ID NO: 2399785 - DNA, 25 bp, Homo sapien
gtggggccgcgcagctatggccgga

SEQ ID NO: 2399786 - DNA, 25 bp, Homo sapien
tggggccgcgcagctatggccggaa

SEQ ID NO: 2399787 - DNA, 25 bp, Homo sapien
gggccgcgcagctatggccggaagc

SEQ ID NO: 2399788 - DNA, 25 bp, Homo sapien
ctgggatccgagggagcaatggtgg

SEQ ID NO: 2399789 - DNA, 25 bp, Homo sapien
gggcgagtgagggtctgccgtaaat

SEQ ID NO: 2399790 - DNA, 25 bp, Homo sapien
gagtgagggtctgccgtaaatatcc

SEQ ID NO: 2399791 - DNA, 25 bp, Homo sapien
gcgagtgagggtctgccgtaaatat

SEQ ID NO: 2399792 - DNA, 25 bp, Homo sapien
cctcctctgccggggccacactcac

SEQ ID NO: 2399793 - DNA, 25 bp, Homo sapien
ctcctcctctgccggggccacactc

SEQ ID NO: 2399794 - DNA, 25 bp, Homo sapien
tcctcctctgccggggccacactca

SEQ ID NO: 2399795 - DNA, 25 bp, Homo sapien
gagggcttctccagagatatttccc

SEQ ID NO: 2399796 - DNA, 25 bp, Homo sapien
tccagagatatttcccccacactct

SEQ ID NO: 2399797 - DNA, 25 bp, Homo sapien
ccaggatagggaacaaaaggtgaag

SEQ ID NO: 2399798 - DNA, 25 bp, Homo sapien
gtgtggaaggccttacgttgtatgc

SEQ ID NO: 2399799 - DNA, 25 bp, Homo sapien
gccttacgttgtatgcacacacaaa

SEQ ID NO: 2399800 - DNA, 25 bp, Homo sapien
ccagaaggctcttatggagatgggt

SEQ ID NO: 2399801 - DNA, 25 bp, Homo sapien
tgggtggtcccgtcctcagagaagg

SEQ ID NO: 2399802 - DNA, 25 bp, Homo sapien
aattataattgtgaccagatggtcc

SEQ ID NO: 2399803 - DNA, 25 bp, Homo sapien
ggtctttccaatcttagctgggcaa

SEQ ID NO: 2399804 - DNA, 25 bp, Homo sapien
tccttgcgtataaacttaggccagg

SEQ ID NO: 2399805 - DNA, 25 bp, Homo sapien
gggatggatcctttaatcggcatct

SEQ ID NO: 2399806 - DNA, 25 bp, Homo sapien
ctggaagtggtagcagatctgggcc

SEQ ID NO: 2399807 - DNA, 25 bp, Homo sapien
tatcatttagtaacagggcttctgg

SEQ ID NO: 2399808 - DNA, 25 bp, Homo sapien
gggcctatcatttagtaacagggct

SEQ ID NO: 2399809 - DNA, 25 bp, Homo sapien
ctggggcctatcatttagtaacagg

SEQ ID NO: 2399810 - DNA, 25 bp, Homo sapien
tatcagctggtatcctcctttttcc

SEQ ID NO: 2399811 - DNA, 25 bp, Homo sapien
aattccatcgggagacagcactagg

SEQ ID NO: 2399812 - DNA, 25 bp, Homo sapien
tagatatggcacaacctgatggctt

SEQ ID NO: 2399813 - DNA, 25 bp, Homo sapien
gatggcttctgcataaagcctcctc

SEQ ID NO: 2399814 - DNA, 25 bp, Homo sapien
gaaccctctggctctagtttcactg

SEQ ID NO: 2399815 - DNA, 25 bp, Homo sapien
ctcttttcagcaaagaaccctctgg

SEQ ID NO: 2399816 - DNA, 25 bp, Homo sapien
accctctggctctagtttcactgtg

SEQ ID NO: 2399817 - DNA, 25 bp, Homo sapien
gcaaagaaccctctggctctagttt

SEQ ID NO: 2399818 - DNA, 25 bp, Homo sapien
ggtagagaagacccagaggctcctt

SEQ ID NO: 2399819 - DNA, 25 bp, Homo sapien
ctgggagaggtagagaagacccaga

SEQ ID NO: 2399820 - DNA, 25 bp, Homo sapien
agaggtagagaagacccagaggctc

SEQ ID NO: 2399821 - DNA, 25 bp, Homo sapien
tagagaagacccagaggctccttac

SEQ ID NO: 2399822 - DNA, 25 bp, Homo sapien
tcaaactgaccatccaggtttggct

SEQ ID NO: 2399823 - DNA, 25 bp, Homo sapien
cagcttcctaccagctaagatctgg

SEQ ID NO: 2399824 - DNA, 25 bp, Homo sapien
ccctgcggcttgtcactcatgctgt

SEQ ID NO: 2399825 - DNA, 25 bp, Homo sapien
gaacaccatcttccccttattgctg

SEQ ID NO: 2399826 - DNA, 25 bp, Homo sapien
agatgctggacattccttttaacaa

SEQ ID NO: 2399827 - DNA, 25 bp, Homo sapien
ctttgaaacgagcagggtaccatct

SEQ ID NO: 2399828 - DNA, 25 bp, Homo sapien
gcgtgaggtgcattgagttgtattc

SEQ ID NO: 2399829 - DNA, 25 bp, Homo sapien
cacacaactttgaaacgagcagggt

SEQ ID NO: 2399830 - DNA, 25 bp, Homo sapien
tcaggaatccagaagcggctgagat

SEQ ID NO: 2399831 - DNA, 25 bp, Homo sapien
tctgcccacttagcgaatattgagg

SEQ ID NO: 2399832 - DNA, 25 bp, Homo sapien
cattggtcacacagacaacccgatg

SEQ ID NO: 2399833 - DNA, 25 bp, Homo sapien
ccagccttggaagtgacgtagcatc

SEQ ID NO: 2399834 - DNA, 25 bp, Homo sapien
tgtagaggcctctcgttcatcccac

SEQ ID NO: 2399835 - DNA, 25 bp, Homo sapien
ctcgttcatcccaccaagagcagga

SEQ ID NO: 2399836 - DNA, 25 bp, Homo sapien
gagatctgtagaggcctctcgttca

SEQ ID NO: 2399837 - DNA, 25 bp, Homo sapien
tctcgttcatcccaccaagagcagg

SEQ ID NO: 2399838 - DNA, 25 bp, Homo sapien
ctggacagatgaaagcatggcttac

SEQ ID NO: 2399839 - DNA, 25 bp, Homo sapien
cataggtttcaaaagaaccaagaag

SEQ ID NO: 2399840 - DNA, 25 bp, Homo sapien
aagacagcataggtttcaaaagaac

SEQ ID NO: 2399841 - DNA, 25 bp, Homo sapien
tgggaagacagcataggtttcaaaa

SEQ ID NO: 2399842 - DNA, 25 bp, Homo sapien
gacagcataggtttcaaaagaacca

SEQ ID NO: 2399843 - DNA, 25 bp, Homo sapien
tgcatcctgacactcgaagacaagg

SEQ ID NO: 2399844 - DNA, 25 bp, Homo sapien
gacaagtcccagatagaatgccctt

SEQ ID NO: 2399845 - DNA, 25 bp, Homo sapien
tctccatcagcagattgcccaacag

SEQ ID NO: 2399846 - DNA, 25 bp, Homo sapien
agaacaagttcagagcccagagatc

SEQ ID NO: 2399847 - DNA, 25 bp, Homo sapien
gggtcaaggaagatgccaccgctgt

SEQ ID NO: 2399848 - DNA, 25 bp, Homo sapien
cctgggtcaaggaagatgccaccgc

SEQ ID NO: 2399849 - DNA, 25 bp, Homo sapien
tgcctgggtcaaggaagatgccacc

SEQ ID NO: 2399850 - DNA, 25 bp, Homo sapien
ctgcctgggtcaaggaagatgccac

SEQ ID NO: 2399851 - DNA, 25 bp, Homo sapien
ggtgcccggcaccttgaatgagata

SEQ ID NO: 2399852 - DNA, 25 bp, Homo sapien
gaaggctagagtggctattgcagca

SEQ ID NO: 2399853 - DNA, 25 bp, Homo sapien
gctgtccctgcgtcatcccttttct

SEQ ID NO: 2399854 - DNA, 25 bp, Homo sapien
gaatgagatagcagtacgtactgtg

SEQ ID NO: 2399855 - DNA, 25 bp, Homo sapien
gggcactgcccacggggaacagaac

SEQ ID NO: 2399856 - DNA, 25 bp, Homo sapien
cttctgcttgggcactgcccacggg

SEQ ID NO: 2399857 - DNA, 25 bp, Homo sapien
ctgcccacggggaacagaacagagg

SEQ ID NO: 2399858 - DNA, 25 bp, Homo sapien
ttgggcactgcccacggggaacaga

SEQ ID NO: 2399859 - DNA, 25 bp, Homo sapien
tgcagactctcagggaccatctgga

SEQ ID NO: 2399860 - DNA, 25 bp, Homo sapien
gggacagggctctgaattgaccttt

SEQ ID NO: 2399861 - DNA, 25 bp, Homo sapien
gtctttgcagactctcagggaccat

SEQ ID NO: 2399862 - DNA, 25 bp, Homo sapien
gacagggctctgaattgacctttgg

SEQ ID NO: 2399863 - DNA, 25 bp, Homo sapien
tctggccaaccaagtcaactccaca

SEQ ID NO: 2399864 - DNA, 25 bp, Homo sapien
aaccaagtcaactccacaactttgt

SEQ ID NO: 2399865 - DNA, 25 bp, Homo sapien
tagagagcacagttattccatccat

SEQ ID NO: 2399866 - DNA, 25 bp, Homo sapien
aataaacattttggattcctgatca

SEQ ID NO: 2399867 - DNA, 25 bp, Homo sapien
ggtccctctggtgattatctcttcc

SEQ ID NO: 2399868 - DNA, 25 bp, Homo sapien
tggtccctctggtgattatctcttc

SEQ ID NO: 2399869 - DNA, 25 bp, Homo sapien
tccctctggtgattatctcttccct

SEQ ID NO: 2399870 - DNA, 25 bp, Homo sapien
cttggtccctctggtgattatctct

SEQ ID NO: 2399871 - DNA, 25 bp, Homo sapien
tcccctctgcaggtcgagctcccac

SEQ ID NO: 2399872 - DNA, 25 bp, Homo sapien
ctcccctctgcaggtcgagctccca

SEQ ID NO: 2399873 - DNA, 25 bp, Homo sapien
ccctcccctctgcaggtcgagctcc

SEQ ID NO: 2399874 - DNA, 25 bp, Homo sapien
tcccctcccctctgcaggtcgagct

SEQ ID NO: 2399875 - DNA, 25 bp, Homo sapien
tctgaagctgcatagtcctcccctg

SEQ ID NO: 2399876 - DNA, 25 bp, Homo sapien
cttaaaaccaccatggtaagaagtg

SEQ ID NO: 2399877 - DNA, 25 bp, Homo sapien
tttgagggattgagcccactttagc

SEQ ID NO: 2399878 - DNA, 25 bp, Homo sapien
agtggccatgttctggacgcccaca

SEQ ID NO: 2399879 - DNA, 25 bp, Homo sapien
ctgaagggcatggaggaccgtcctg

SEQ ID NO: 2399880 - DNA, 25 bp, Homo sapien
catgggggcctacaagttcctgagt

SEQ ID NO: 2399881 - DNA, 25 bp, Homo sapien
catggaggaccgtcctgtgggaaga

SEQ ID NO: 2399882 - DNA, 25 bp, Homo sapien
ggaccgtcctgtgggaagaggcttg

SEQ ID NO: 2399883 - DNA, 25 bp, Homo sapien
tcaagagcaaggacactgtgttgat

SEQ ID NO: 2399884 - DNA, 25 bp, Homo sapien
atgggacaaggtggattccagcagc

SEQ ID NO: 2399885 - DNA, 25 bp, Homo sapien
tgggacaaggtggattccagcagcc

SEQ ID NO: 2399886 - DNA, 25 bp, Homo sapien
gggacaaggtggattccagcagccc

SEQ ID NO: 2399887 - DNA, 25 bp, Homo sapien
ctcttcactctgatagttgggcccc

SEQ ID NO: 2399888 - DNA, 25 bp, Homo sapien
actctgatagttgggccccctagga

SEQ ID NO: 2399889 - DNA, 25 bp, Homo sapien
agccctcttcactctgatagttggg

SEQ ID NO: 2399890 - DNA, 25 bp, Homo sapien
tcactctgatagttgggccccctag

SEQ ID NO: 2399891 - DNA, 25 bp, Homo sapien
tgggacgccagaccttgacctggaa

SEQ ID NO: 2399892 - DNA, 25 bp, Homo sapien
taatcgccaaatgcccaaagcttag

SEQ ID NO: 2399893 - DNA, 25 bp, Homo sapien
acaagagcgtctgtgagctggtgct

SEQ ID NO: 2399894 - DNA, 25 bp, Homo sapien
gacagctgacctggcacaatctggg

SEQ ID NO: 2399895 - DNA, 25 bp, Homo sapien
ctgaagacctgctcgcacactgcat

SEQ ID NO: 2399896 - DNA, 25 bp, Homo sapien
tcctgaagacctgctcgcacactgc

SEQ ID NO: 2399897 - DNA, 25 bp, Homo sapien
tgaagacctgctcgcacactgcatc

SEQ ID NO: 2399898 - DNA, 25 bp, Homo sapien
cttcctgaagacctgctcgcacact

SEQ ID NO: 2399899 - DNA, 25 bp, Homo sapien
tttctgcacacacaccaggtgctcc

SEQ ID NO: 2399900 - DNA, 25 bp, Homo sapien
gacctcccctttctgcacacacacc

SEQ ID NO: 2399901 - DNA, 25 bp, Homo sapien
cagatacagcatctctccctccagc

SEQ ID NO: 2399902 - DNA, 25 bp, Homo sapien
agccagtgtctccagccccggttgg

SEQ ID NO: 2399903 - DNA, 25 bp, Homo sapien
gcagttgaaaacattgccctggagc

SEQ ID NO: 2399904 - DNA, 25 bp, Homo sapien
gttgaaaacattgccctggagctca

SEQ ID NO: 2399905 - DNA, 25 bp, Homo sapien
gtaggcagttgaaaacattgccctg

SEQ ID NO: 2399906 - DNA, 25 bp, Homo sapien
taggcagttgaaaacattgccctgg

SEQ ID NO: 2399907 - DNA, 25 bp, Homo sapien
tgagcgtcctcaccgtcatgtggtt

SEQ ID NO: 2399908 - DNA, 25 bp, Homo sapien
gatcttccgcacagccaagctgatg

SEQ ID NO: 2399909 - DNA, 25 bp, Homo sapien
tagtttcggaaggtgctgagcgtcc

SEQ ID NO: 2399910 - DNA, 25 bp, Homo sapien
catgtggttgccctggtgttcgatc

SEQ ID NO: 2399911 - DNA, 25 bp, Homo sapien
tggatcccaggtctggtgccagccg

SEQ ID NO: 2399912 - DNA, 25 bp, Homo sapien
ttagaaatggatcccaggtctggtg

SEQ ID NO: 2399913 - DNA, 25 bp, Homo sapien
tggttagaaatggatcccaggtctg

SEQ ID NO: 2399914 - DNA, 25 bp, Homo sapien
gaaatggatcccaggtctggtgcca

SEQ ID NO: 2399915 - DNA, 25 bp, Homo sapien
gggaccaagaagcaggaaggaagag

SEQ ID NO: 2399916 - DNA, 25 bp, Homo sapien
gggtctgggagggcgaggccattac

SEQ ID NO: 2399917 - DNA, 25 bp, Homo sapien
ggagaaagggagtgacaggggtctg

SEQ ID NO: 2399918 - DNA, 25 bp, Homo sapien
gaaagggagtgacaggggtctggga

SEQ ID NO: 2399919 - DNA, 25 bp, Homo sapien
tccatgttcttctgcgagacaaagc

SEQ ID NO: 2399920 - DNA, 25 bp, Homo sapien
gagacaaagcggtagtagccagtga

SEQ ID NO: 2399921 - DNA, 25 bp, Homo sapien
tctgcgagacaaagcggtagtagcc

SEQ ID NO: 2399922 - DNA, 25 bp, Homo sapien
tgttcttctgcgagacaaagcggta

SEQ ID NO: 2399923 - DNA, 25 bp, Homo sapien
ggtgttgtctggcaggtgaggctga

SEQ ID NO: 2399924 - DNA, 25 bp, Homo sapien
atgaaggtttcaggagaatgcagga

SEQ ID NO: 2399925 - DNA, 25 bp, Homo sapien
gctccacacacagagacaggatgtg

SEQ ID NO: 2399926 - DNA, 25 bp, Homo sapien
ctgagagattccagccagctccaca

SEQ ID NO: 2399927 - DNA, 25 bp, Homo sapien
ctgtcagtcatccaaaactcagcca

SEQ ID NO: 2399928 - DNA, 25 bp, Homo sapien
ggctgtcagtcatccaaaactcagc

SEQ ID NO: 2399929 - DNA, 25 bp, Homo sapien
gggctgtcagtcatccaaaactcag

SEQ ID NO: 2399930 - DNA, 25 bp, Homo sapien
tggggctgtcagtcatccaaaactc

SEQ ID NO: 2399931 - DNA, 25 bp, Homo sapien
ccagggggttttctctccctctgag

SEQ ID NO: 2399932 - DNA, 25 bp, Homo sapien
ctattctggagaattttattctttt

SEQ ID NO: 2399933 - DNA, 25 bp, Homo sapien
ctggagaattttattctttttggct

SEQ ID NO: 2399934 - DNA, 25 bp, Homo sapien
tctggagaattttattctttttggc

SEQ ID NO: 2399935 - DNA, 25 bp, Homo sapien
agccctaggacagcccatgctttcc

SEQ ID NO: 2399936 - DNA, 25 bp, Homo sapien
catgctttccagatgtatttctgtg

SEQ ID NO: 2399937 - DNA, 25 bp, Homo sapien
atcgatgagaccgtaacccccagtc

SEQ ID NO: 2399938 - DNA, 25 bp, Homo sapien
ggaggcgcctaaataatattgtgcc

SEQ ID NO: 2399939 - DNA, 25 bp, Homo sapien
tgccatcgtcccgggcttcagaatc

SEQ ID NO: 2399940 - DNA, 25 bp, Homo sapien
gaggggtgcacgacgtcctgcccct

SEQ ID NO: 2399941 - DNA, 25 bp, Homo sapien
ctgggcttggttcatcatggtttaa

SEQ ID NO: 2399942 - DNA, 25 bp, Homo sapien
gtcccgacaggtgcgtgcgcgaggg

SEQ ID NO: 2399943 - DNA, 25 bp, Homo sapien
acgcagcacggatctgtggatggaa

SEQ ID NO: 2399944 - DNA, 25 bp, Homo sapien
cacgcagcacggatctgtggatgga

SEQ ID NO: 2399945 - DNA, 25 bp, Homo sapien
cagactgagggttttacttcaccct

SEQ ID NO: 2399946 - DNA, 25 bp, Homo sapien
ggctcagactgagggttttacttca

SEQ ID NO: 2399947 - DNA, 25 bp, Homo sapien
tgattggccggcggccccatcaatc

SEQ ID NO: 2399948 - DNA, 25 bp, Homo sapien
ggcggccccatcaatcgttgcccgg

SEQ ID NO: 2399949 - DNA, 25 bp, Homo sapien
tggccggcggccccatcaatcgttg

SEQ ID NO: 2399950 - DNA, 25 bp, Homo sapien
ccatcaatcgttgcccggctgtgct

SEQ ID NO: 2399951 - DNA, 25 bp, Homo sapien
gctcgcgtcctgctcctgtaacaaa

SEQ ID NO: 2399952 - DNA, 25 bp, Homo sapien
tggtccatctctacccatgcgtttc

SEQ ID NO: 2399953 - DNA, 25 bp, Homo sapien
aaggaggtgtcgaggctccctggca

SEQ ID NO: 2399954 - DNA, 25 bp, Homo sapien
cctgacaggtgtctggccctcttct

SEQ ID NO: 2399955 - DNA, 25 bp, Homo sapien
ctccctttcactggcgcatgctaag

SEQ ID NO: 2399956 - DNA, 25 bp, Homo sapien
catgctaagggtgtgtggcagatcc

SEQ ID NO: 2399957 - DNA, 25 bp, Homo sapien
ccccgagccggtgataggcctctcc

SEQ ID NO: 2399958 - DNA, 25 bp, Homo sapien
cggtgataggcctctccccgcggct

SEQ ID NO: 2399959 - DNA, 25 bp, Homo sapien
gactatagggatttcgagagcctgg

SEQ ID NO: 2399960 - DNA, 25 bp, Homo sapien
cgagtgcctctatgcatgtcgggag

SEQ ID NO: 2399961 - DNA, 25 bp, Homo sapien
taggagaccctttgtcgatccacca

SEQ ID NO: 2399962 - DNA, 25 bp, Homo sapien
tgtggagaccttcaaccatgccctg

SEQ ID NO: 2399963 - DNA, 25 bp, Homo sapien
tctgtggtgaaactatcaagtattt

SEQ ID NO: 2399964 - DNA, 25 bp, Homo sapien
tatgtactagcactgtcctaagatg

SEQ ID NO: 2399965 - DNA, 25 bp, Homo sapien
caaggagagaattggtactattaca

SEQ ID NO: 2399966 - DNA, 25 bp, Homo sapien
tataggatagatcagtccctatccc

SEQ ID NO: 2399967 - DNA, 25 bp, Homo sapien
gttctgagagccgtgataggagcca

SEQ ID NO: 2399968 - DNA, 25 bp, Homo sapien
tgaagccagggaataaagtcagctc

SEQ ID NO: 2399969 - DNA, 25 bp, Homo sapien
gctatgcagttgctaccacgggcca

SEQ ID NO: 2399970 - DNA, 25 bp, Homo sapien
tcaccccttaatgttggctctggag

SEQ ID NO: 2399971 - DNA, 25 bp, Homo sapien
cagactctgaggtgtttccctgatt

SEQ ID NO: 2399972 - DNA, 25 bp, Homo sapien
gagatgagtgtgtccattaggttcc

SEQ ID NO: 2399973 - DNA, 25 bp, Homo sapien
tcggtgcagtttcctaaactcccca

SEQ ID NO: 2399974 - DNA, 25 bp, Homo sapien
ccctgatttgtccataagtgtgaaa

SEQ ID NO: 2399975 - DNA, 25 bp, Homo sapien
cccagctctgtggcccctctcccac

SEQ ID NO: 2399976 - DNA, 25 bp, Homo sapien
tccttgggtcgcagtgtggctggct

SEQ ID NO: 2399977 - DNA, 25 bp, Homo sapien
tttctccttgggtcgcagtgtggct

SEQ ID NO: 2399978 - DNA, 25 bp, Homo sapien
ttctccttgggtcgcagtgtggctg

SEQ ID NO: 2399979 - DNA, 25 bp, Homo sapien
cctttctccttgggtcgcagtgtgg

SEQ ID NO: 2399980 - DNA, 25 bp, Homo sapien
ggtgttaccagggggcaaaagcagc

SEQ ID NO: 2399981 - DNA, 25 bp, Homo sapien
tgttaccagggggcaaaagcagcat

SEQ ID NO: 2399982 - DNA, 25 bp, Homo sapien
gtgttaccagggggcaaaagcagca

SEQ ID NO: 2399983 - DNA, 25 bp, Homo sapien
ttattcctcacaattctgttggctg

SEQ ID NO: 2399984 - DNA, 25 bp, Homo sapien
tattcctcacaattctgttggctgg

SEQ ID NO: 2399985 - DNA, 25 bp, Homo sapien
gagggctctcttcctagttggtaga

SEQ ID NO: 2399986 - DNA, 25 bp, Homo sapien
tcttcctagttggtagacatctatc

SEQ ID NO: 2399987 - DNA, 25 bp, Homo sapien
catcatgtcttgcaagtattgtcat

SEQ ID NO: 2399988 - DNA, 25 bp, Homo sapien
aagaatttgttaaatagactatgtt

SEQ ID NO: 2399989 - DNA, 25 bp, Homo sapien
acatcatgtcttgcaagtattgtca

SEQ ID NO: 2399990 - DNA, 25 bp, Homo sapien
acacatcatgtcttgcaagtattgt

SEQ ID NO: 2399991 - DNA, 25 bp, Homo sapien
aggagaggttggatagccaatagtc

SEQ ID NO: 2399992 - DNA, 25 bp, Homo sapien
gggaagttgagttctgtctggagtg

SEQ ID NO: 2399993 - DNA, 25 bp, Homo sapien
gttggatagccaatagtcactaggg

SEQ ID NO: 2399994 - DNA, 25 bp, Homo sapien
caatagtcactagggaagttgagtt

SEQ ID NO: 2399995 - DNA, 25 bp, Homo sapien
tcttatagttactgagaatgtgttt

SEQ ID NO: 2399996 - DNA, 25 bp, Homo sapien
gcaggcacctacacccaagaataag

SEQ ID NO: 2399997 - DNA, 25 bp, Homo sapien
tccctaaaaatgtgagttacttcag

SEQ ID NO: 2399998 - DNA, 25 bp, Homo sapien
tacaataatgtgcagaagcaggcac

SEQ ID NO: 2399999 - DNA, 25 bp, Homo sapien
tcaggtctttttagatggtcctggc

SEQ ID NO: 2400000 - DNA, 25 bp, Homo sapien
tctctgccaatgatgactactaggg

SEQ ID NO: 2400001 - DNA, 25 bp, Homo sapien
aggtctttttagatggtcctggctt

SEQ ID NO: 2400002 - DNA, 25 bp, Homo sapien
gttgtctctgccaatgatgactact

SEQ ID NO: 2400003 - DNA, 25 bp, Homo sapien
ctagcagagcagaaggttatgtgtg

SEQ ID NO: 2400004 - DNA, 25 bp, Homo sapien
gatctgcacacaaagtgagttacgg

SEQ ID NO: 2400005 - DNA, 25 bp, Homo sapien
gagttacggctaatcagttgataaa

SEQ ID NO: 2400006 - DNA, 25 bp, Homo sapien
tggtactgggaaactctggttgcct

SEQ ID NO: 2400007 - DNA, 25 bp, Homo sapien
ttctggagggcatctcttcatcctt

SEQ ID NO: 2400008 - DNA, 25 bp, Homo sapien
aagggctgggatttgtgtgctccgg

SEQ ID NO: 2400009 - DNA, 25 bp, Homo sapien
catctcttcatccttgtgtggttta

SEQ ID NO: 2400010 - DNA, 25 bp, Homo sapien
gatttgtgtgctccggaagaaaacg

SEQ ID NO: 2400011 - DNA, 25 bp, Homo sapien
ctgaaagagggcgaaaaggcaagga

SEQ ID NO: 2400012 - DNA, 25 bp, Homo sapien
gaaatgttgcacagtcttatggtct

SEQ ID NO: 2400013 - DNA, 25 bp, Homo sapien
gcacagtcttatggtctgtcccctg

SEQ ID NO: 2400014 - DNA, 25 bp, Homo sapien
ggaaaaggagaaatgttgcacagtc

SEQ ID NO: 2400015 - DNA, 25 bp, Homo sapien
gccaggaaacaagcccggcccatgg

SEQ ID NO: 2400016 - DNA, 25 bp, Homo sapien
tgaaatctgcagaacagccaggaaa

SEQ ID NO: 2400017 - DNA, 25 bp, Homo sapien
ggcccatggcgccacctgctgcctg

SEQ ID NO: 2400018 - DNA, 25 bp, Homo sapien
ctgcagaacagccaggaaacaagcc

SEQ ID NO: 2400019 - DNA, 25 bp, Homo sapien
gcttgaggcttagtcttattccgtg

SEQ ID NO: 2400020 - DNA, 25 bp, Homo sapien
cactaggactcccttggtcttgaag

SEQ ID NO: 2400021 - DNA, 25 bp, Homo sapien
ccactatgttgacttagcggaagga

SEQ ID NO: 2400022 - DNA, 25 bp, Homo sapien
taccagctcgaggtctcaggatgcg

SEQ ID NO: 2400023 - DNA, 25 bp, Homo sapien
atgtaataattatgtgtcatacata

SEQ ID NO: 2400024 - DNA, 25 bp, Homo sapien
gtaataattatatatgtcacataat

SEQ ID NO: 2400025 - DNA, 25 bp, Homo sapien
tatatgtcacatataatgtaataat

SEQ ID NO: 2400026 - DNA, 25 bp, Homo sapien
taatgtaataattatatatgtcaca

SEQ ID NO: 2400027 - DNA, 25 bp, Homo sapien
gtaataattatatatgtcacatata

SEQ ID NO: 2400028 - DNA, 25 bp, Homo sapien
tatgtcacatataatgtaataatta

SEQ ID NO: 2400029 - DNA, 25 bp, Homo sapien
tatatgtcacatataatgtaataat

SEQ ID NO: 2400030 - DNA, 25 bp, Homo sapien
tgtcacatataatgtaataattata

SEQ ID NO: 2400031 - DNA, 25 bp, Homo sapien
tgtaataattatatatgtcacatat

SEQ ID NO: 2400032 - DNA, 25 bp, Homo sapien
ataatgtaataattatatatgtcac

SEQ ID NO: 2400033 - DNA, 25 bp, Homo sapien
gtaataattatatatgtcatataca

SEQ ID NO: 2400034 - DNA, 25 bp, Homo sapien
taaagacccaaatgcagtacccaaa

SEQ ID NO: 2400035 - DNA, 25 bp, Homo sapien
cgtatttatgacatgctggccagaa

SEQ ID NO: 2400036 - DNA, 25 bp, Homo sapien
gaaactgaaccgttacctcacacta

SEQ ID NO: 2400037 - DNA, 25 bp, Homo sapien
cgataaatggtattggagaaactgc

SEQ ID NO: 2400038 - DNA, 25 bp, Homo sapien
agggagcagcttggattcttctcag

SEQ ID NO: 2400039 - DNA, 25 bp, Homo sapien
cctgtgaatgggaattgagccaact

SEQ ID NO: 2400040 - DNA, 25 bp, Homo sapien
ggtatggtgagtgcggcaatccctc

SEQ ID NO: 2400041 - DNA, 25 bp, Homo sapien
gaaatgactgctaagcctcttgcct

SEQ ID NO: 2400042 - DNA, 25 bp, Homo sapien
tgcattgactgctagatggtccata

SEQ ID NO: 2400043 - DNA, 25 bp, Homo sapien
gttttacaagaattggtctcagtgt

SEQ ID NO: 2400044 - DNA, 25 bp, Homo sapien
ccaggtggagaggaacaatagaaca

SEQ ID NO: 2400045 - DNA, 25 bp, Homo sapien
caatagaacatagggaggtgctgcc

SEQ ID NO: 2400046 - DNA, 25 bp, Homo sapien
gaagatgctggaccacctcagatac

SEQ ID NO: 2400047 - DNA, 25 bp, Homo sapien
aatgctgtggttattgctattgagc

SEQ ID NO: 2400048 - DNA, 25 bp, Homo sapien
tgtctggtagagctgatgatgttgc

SEQ ID NO: 2400049 - DNA, 25 bp, Homo sapien
agatggctactctggttgtctggta

SEQ ID NO: 2400050 - DNA, 25 bp, Homo sapien
attttcagtactgccctgagacacc

SEQ ID NO: 2400051 - DNA, 25 bp, Homo sapien
cattcataggaaacaacagctcttt

SEQ ID NO: 2400052 - DNA, 25 bp, Homo sapien
gaagcaatatatggggtaatccaac

SEQ ID NO: 2400053 - DNA, 25 bp, Homo sapien
ggtaatccaacctacaccatctggg

SEQ ID NO: 2400054 - DNA, 25 bp, Homo sapien
gccctgaaatgcagatcattaattt

SEQ ID NO: 2400055 - DNA, 25 bp, Homo sapien
tggtctgtctgcatagaaaatactg

SEQ ID NO: 2400056 - DNA, 25 bp, Homo sapien
ggtctgtctgcatagaaaatactgc

SEQ ID NO: 2400057 - DNA, 25 bp, Homo sapien
aaatggcaatgttctaccacctggc

SEQ ID NO: 2400058 - DNA, 25 bp, Homo sapien
aatatatttcagaaggtgcgcctgc

SEQ ID NO: 2400059 - DNA, 25 bp, Homo sapien
tacaaagcttgtcctctcaataggg

SEQ ID NO: 2400060 - DNA, 25 bp, Homo sapien
ggaatgctgccctatgatgtccagg

SEQ ID NO: 2400061 - DNA, 25 bp, Homo sapien
ctaggtcacagatataaccaagcaa

SEQ ID NO: 2400062 - DNA, 25 bp, Homo sapien
taggtcacagatataaccaagcaat

SEQ ID NO: 2400063 - DNA, 25 bp, Homo sapien
aggtcacagatataaccaagcaatt

SEQ ID NO: 2400064 - DNA, 25 bp, Homo sapien
tctctctggtggaagcgagcccaga

SEQ ID NO: 2400065 - DNA, 25 bp, Homo sapien
ggctcagtggcctattcagtgcaaa

SEQ ID NO: 2400066 - DNA, 25 bp, Homo sapien
taataagcagtaatgcggctcagtg

SEQ ID NO: 2400067 - DNA, 25 bp, Homo sapien
tggccccgcaaacctagtcatttag

SEQ ID NO: 2400068 - DNA, 25 bp, Homo sapien
atttccctagttcctttgaccgctg

SEQ ID NO: 2400069 - DNA, 25 bp, Homo sapien
ttccctagttcctttgaccgctgct

SEQ ID NO: 2400070 - DNA, 25 bp, Homo sapien
tgtaggatttccctagttcctttga

SEQ ID NO: 2400071 - DNA, 25 bp, Homo sapien
ctgtaggatttccctagttcctttg

SEQ ID NO: 2400072 - DNA, 25 bp, Homo sapien
tgggtcaggagggcttaacatcacc

SEQ ID NO: 2400073 - DNA, 25 bp, Homo sapien
gggtcaggagggcttaacatcaccc

SEQ ID NO: 2400074 - DNA, 25 bp, Homo sapien
gagaggccccaatatttgaagtaca

SEQ ID NO: 2400075 - DNA, 25 bp, Homo sapien
gagaggacagacaaaagagtgacag

SEQ ID NO: 2400076 - DNA, 25 bp, Homo sapien
atgcatgtatacacaagagagagga

SEQ ID NO: 2400077 - DNA, 25 bp, Homo sapien
ggatggctctttattttagtgtagg

SEQ ID NO: 2400078 - DNA, 25 bp, Homo sapien
tatttggacaagttttccatagggc

SEQ ID NO: 2400079 - DNA, 25 bp, Homo sapien
gctgttctcctattgttcaagaaat

SEQ ID NO: 2400080 - DNA, 25 bp, Homo sapien
ttagctgttctcctattgttcaaga

SEQ ID NO: 2400081 - DNA, 25 bp, Homo sapien
ttttattatcaccagtctttatcaa

SEQ ID NO: 2400082 - DNA, 25 bp, Homo sapien
ttaacccctagttcctcaggatgtg

SEQ ID NO: 2400083 - DNA, 25 bp, Homo sapien
ctgagggcataacaagaagatgact

SEQ ID NO: 2400084 - DNA, 25 bp, Homo sapien
taataactgctgagggaaaatcttt

SEQ ID NO: 2400085 - DNA, 25 bp, Homo sapien
aagatgactgcctgcaagggaagga

SEQ ID NO: 2400086 - DNA, 25 bp, Homo sapien
caacagcgatgtgtcgctagcatct

SEQ ID NO: 2400087 - DNA, 25 bp, Homo sapien
tgtttgatcagctgggaaagtataa

SEQ ID NO: 2400088 - DNA, 25 bp, Homo sapien
gaatagtagaaaacctctctgcaga

SEQ ID NO: 2400089 - DNA, 25 bp, Homo sapien
tagtagaaaacctctctgcagaggg

SEQ ID NO: 2400090 - DNA, 25 bp, Homo sapien
gaagagctgttaagtgcagtgtttg

SEQ ID NO: 2400091 - DNA, 25 bp, Homo sapien
gtgggtcctctctcttgaggcaggt

SEQ ID NO: 2400092 - DNA, 25 bp, Homo sapien
catggaataaattctcctcgagaga

SEQ ID NO: 2400093 - DNA, 25 bp, Homo sapien
taaattctcctcgagagaacccctc

SEQ ID NO: 2400094 - DNA, 25 bp, Homo sapien
atctcatggaataaattctcctcga

SEQ ID NO: 2400095 - DNA, 25 bp, Homo sapien
ttgacacatattaatccctctgagc

SEQ ID NO: 2400096 - DNA, 25 bp, Homo sapien
tacccctgctagtgaattttttaca

SEQ ID NO: 2400097 - DNA, 25 bp, Homo sapien
gacacttaatgctaaggtttgacac

SEQ ID NO: 2400098 - DNA, 25 bp, Homo sapien
ccctctgagctaaaatccaatggct

SEQ ID NO: 2400099 - DNA, 25 bp, Homo sapien
attttatacaatcctagtggggctc

SEQ ID NO: 2400100 - DNA, 25 bp, Homo sapien
tttatacaatcctagtggggctctc

SEQ ID NO: 2400101 - DNA, 25 bp, Homo sapien
ttatacaatcctagtggggctctca

SEQ ID NO: 2400102 - DNA, 25 bp, Homo sapien
tatacaatcctagtggggctctcac

SEQ ID NO: 2400103 - DNA, 25 bp, Homo sapien
ggagaaggagcccaaagatactgga

SEQ ID NO: 2400104 - DNA, 25 bp, Homo sapien
tctgaactcggcaccacgtgagaaa

SEQ ID NO: 2400105 - DNA, 25 bp, Homo sapien
tttgtttctgaactcggcaccacgt

SEQ ID NO: 2400106 - DNA, 25 bp, Homo sapien
cggcaccacgtgagaaatagaataa

SEQ ID NO: 2400107 - DNA, 25 bp, Homo sapien
agagtcttatccttctctgcatgta

SEQ ID NO: 2400108 - DNA, 25 bp, Homo sapien
atgagagtcttatccttctctgcat

SEQ ID NO: 2400109 - DNA, 25 bp, Homo sapien
catgagagtcttatccttctctgca

SEQ ID NO: 2400110 - DNA, 25 bp, Homo sapien
agtcttatccttctctgcatgtaaa

SEQ ID NO: 2400111 - DNA, 25 bp, Homo sapien
agcactgataggcagaagactatac

SEQ ID NO: 2400112 - DNA, 25 bp, Homo sapien
cccttgaccttccatgtagccttag

SEQ ID NO: 2400113 - DNA, 25 bp, Homo sapien
tatttgtgtcagcactgataggcag

SEQ ID NO: 2400114 - DNA, 25 bp, Homo sapien
tagccttaggtatttgtgtcagcac

SEQ ID NO: 2400115 - DNA, 25 bp, Homo sapien
gcattcagtgatttcagcgactgtc

SEQ ID NO: 2400116 - DNA, 25 bp, Homo sapien
ggcattcagtgatttcagcgactgt

SEQ ID NO: 2400117 - DNA, 25 bp, Homo sapien
gggaggctcagtttaagtgcagcct

SEQ ID NO: 2400118 - DNA, 25 bp, Homo sapien
gttctctaccattagtgggaggctc

SEQ ID NO: 2400119 - DNA, 25 bp, Homo sapien
tctaccattagtgggaggctcagtt

SEQ ID NO: 2400120 - DNA, 25 bp, Homo sapien
agtttaagtgcagccttttcacact

SEQ ID NO: 2400121 - DNA, 25 bp, Homo sapien
tgactcatttcctttgcaccgcatg

SEQ ID NO: 2400122 - DNA, 25 bp, Homo sapien
ttgcaccgcatgtcatccaaccaga

SEQ ID NO: 2400123 - DNA, 25 bp, Homo sapien
tccccagggtttggcgtgacagtcc

SEQ ID NO: 2400124 - DNA, 25 bp, Homo sapien
cagttccctggccaaacgaagcgtc

SEQ ID NO: 2400125 - DNA, 25 bp, Homo sapien
ctacaaaggcacaaaacatggctgt

SEQ ID NO: 2400126 - DNA, 25 bp, Homo sapien
aaggcacaaaacatggctgtcttta

SEQ ID NO: 2400127 - DNA, 25 bp, Homo sapien
caaaggcacaaaacatggctgtctt

SEQ ID NO: 2400128 - DNA, 25 bp, Homo sapien
gcacaaaacatggctgtctttactc

SEQ ID NO: 2400129 - DNA, 25 bp, Homo sapien
ggtgaaacatctccagcgaggccaa

SEQ ID NO: 2400130 - DNA, 25 bp, Homo sapien
tttaagccggttcctgaaatactga

SEQ ID NO: 2400131 - DNA, 25 bp, Homo sapien
ggtttgtcctagtcacactcaaggg

SEQ ID NO: 2400132 - DNA, 25 bp, Homo sapien
tgtgtacaaatgcaggataagccca

SEQ ID NO: 2400133 - DNA, 25 bp, Homo sapien
gaatgtcatccacccacatgaaacc

SEQ ID NO: 2400134 - DNA, 25 bp, Homo sapien
gctggagattcttcgctcccatggg

SEQ ID NO: 2400135 - DNA, 25 bp, Homo sapien
gatatgcgttttaggacactgaatg

SEQ ID NO: 2400136 - DNA, 25 bp, Homo sapien
tgccatatggagatatgcgttttag

SEQ ID NO: 2400137 - DNA, 25 bp, Homo sapien
gacgctgccccaggtcccgttatag

SEQ ID NO: 2400138 - DNA, 25 bp, Homo sapien
gaagacttccaatctcccagcacag

SEQ ID NO: 2400139 - DNA, 25 bp, Homo sapien
caggtcccgttatagaagacttcca

SEQ ID NO: 2400140 - DNA, 25 bp, Homo sapien
gttcctcctgccgacgctgccccag

SEQ ID NO: 2400141 - DNA, 25 bp, Homo sapien
tacactttacaattgtgttgtgtgt

SEQ ID NO: 2400142 - DNA, 25 bp, Homo sapien
ctacactttacaattgtgttgtgtg

SEQ ID NO: 2400143 - DNA, 25 bp, Homo sapien
ctgtgcagttcaggtcatccagcca

SEQ ID NO: 2400144 - DNA, 25 bp, Homo sapien
tccactaggcggagccgtttgtcct

SEQ ID NO: 2400145 - DNA, 25 bp, Homo sapien
cagcttttgacacaccacgtgggca

SEQ ID NO: 2400146 - DNA, 25 bp, Homo sapien
cagaagccgtcgtgatagatctcta

SEQ ID NO: 2400147 - DNA, 25 bp, Homo sapien
tatgggtcagatacatttgcgaggc

SEQ ID NO: 2400148 - DNA, 25 bp, Homo sapien
tttgcgaggcatggaaacagtggct

SEQ ID NO: 2400149 - DNA, 25 bp, Homo sapien
gatcaaagcactgccctctggaact

SEQ ID NO: 2400150 - DNA, 25 bp, Homo sapien
gccctctggaactgcagacaaatat

SEQ ID NO: 2400151 - DNA, 25 bp, Homo sapien
aagcaatgaaacctgtgtccccaca

SEQ ID NO: 2400152 - DNA, 25 bp, Homo sapien
gatcacagagacagtatttccatgg

SEQ ID NO: 2400153 - DNA, 25 bp, Homo sapien
tcctgtggttgagagagcagtccca

SEQ ID NO: 2400154 - DNA, 25 bp, Homo sapien
catttgacagttatccagaagtgac

SEQ ID NO: 2400155 - DNA, 25 bp, Homo sapien
gtctgcatagaacacgggcatcttc

SEQ ID NO: 2400156 - DNA, 25 bp, Homo sapien
ggatttgccattcacaagtcggaca

SEQ ID NO: 2400157 - DNA, 25 bp, Homo sapien
gggtgtcacacagtgagccccagtg

SEQ ID NO: 2400158 - DNA, 25 bp, Homo sapien
aagcacgttgatctccacttgcccg

SEQ ID NO: 2400159 - DNA, 25 bp, Homo sapien
tcccacagaaagagatatggcatct

SEQ ID NO: 2400160 - DNA, 25 bp, Homo sapien
tcagaatcacagacagagcgccatg

SEQ ID NO: 2400161 - DNA, 25 bp, Homo sapien
ggatacaagtgtcttccggatgttg

SEQ ID NO: 2400162 - DNA, 25 bp, Homo sapien
acacgtccagagcagggcatatcag

SEQ ID NO: 2400163 - DNA, 25 bp, Homo sapien
cagtgcagccagaattcgacattaa

SEQ ID NO: 2400164 - DNA, 25 bp, Homo sapien
taaatgacacgcagtctgtttccac

SEQ ID NO: 2400165 - DNA, 25 bp, Homo sapien
ttagcacacagaattcccacggcac

SEQ ID NO: 2400166 - DNA, 25 bp, Homo sapien
tggagaccctgattgcagacccaca

SEQ ID NO: 2400167 - DNA, 25 bp, Homo sapien
agcctcagctccatatccgatgcat

SEQ ID NO: 2400168 - DNA, 25 bp, Homo sapien
tcaacttttccagcacacctgctgc

SEQ ID NO: 2400169 - DNA, 25 bp, Homo sapien
gctgcttccacccacaagcctcagc

SEQ ID NO: 2400170 - DNA, 25 bp, Homo sapien
ctcaacttttccagcacacctgctg

SEQ ID NO: 2400171 - DNA, 25 bp, Homo sapien
caatgatagaagatgggcagtccag

SEQ ID NO: 2400172 - DNA, 25 bp, Homo sapien
ttcctgcatgaccagagatctgact

SEQ ID NO: 2400173 - DNA, 25 bp, Homo sapien
gcagctttactgttccagccgtcat

SEQ ID NO: 2400174 - DNA, 25 bp, Homo sapien
tgtagaagcgtttcccagacccatg

SEQ ID NO: 2400175 - DNA, 25 bp, Homo sapien
acctccagtcttcccgagcagcggt

SEQ ID NO: 2400176 - DNA, 25 bp, Homo sapien
agtcttcccgagcagcggttgctgc

SEQ ID NO: 2400177 - DNA, 25 bp, Homo sapien
tccagtcttcccgagcagcggttgc

SEQ ID NO: 2400178 - DNA, 25 bp, Homo sapien
tcttcccgagcagcggttgctgccg

SEQ ID NO: 2400179 - DNA, 25 bp, Homo sapien
tacaatcacatcctctctgtgtaca

SEQ ID NO: 2400180 - DNA, 25 bp, Homo sapien
caatgcaagaaacgtcatccagcca

SEQ ID NO: 2400181 - DNA, 25 bp, Homo sapien
tccagccaaataggtcctgatgctt

SEQ ID NO: 2400182 - DNA, 25 bp, Homo sapien
gttcacagtcccagatatttgactc

SEQ ID NO: 2400183 - DNA, 25 bp, Homo sapien
acagctgcattccttgtgctccatc

SEQ ID NO: 2400184 - DNA, 25 bp, Homo sapien
tatgagccccgacaagccttaggtc

SEQ ID NO: 2400185 - DNA, 25 bp, Homo sapien
tgctccatctgtcatgacacacagt

SEQ ID NO: 2400186 - DNA, 25 bp, Homo sapien
tctccttggtatttcacctccaatc

SEQ ID NO: 2400187 - DNA, 25 bp, Homo sapien
catcatatgtgcagtcccagagagc

SEQ ID NO: 2400188 - DNA, 25 bp, Homo sapien
gactgccaaagacgctgaacggaca

SEQ ID NO: 2400189 - DNA, 25 bp, Homo sapien
tactaggtttagcacgacgactgcc

SEQ ID NO: 2400190 - DNA, 25 bp, Homo sapien
gctgcttacaaaccacaagggcttg

SEQ ID NO: 2400191 - DNA, 25 bp, Homo sapien
ctaggatgaagtcacagagaaacgt

SEQ ID NO: 2400192 - DNA, 25 bp, Homo sapien
tatgctgcataaaatgcagacatgt

SEQ ID NO: 2400193 - DNA, 25 bp, Homo sapien
aatgtaatatgctgcataaaatgca

SEQ ID NO: 2400194 - DNA, 25 bp, Homo sapien
gtaatatgctgcataaaatgcagac

SEQ ID NO: 2400195 - DNA, 25 bp, Homo sapien
gctgcataaaatgcagacatgttcc

SEQ ID NO: 2400196 - DNA, 25 bp, Homo sapien
tgactgcaaatgaggcaagccagcg

SEQ ID NO: 2400197 - DNA, 25 bp, Homo sapien
cagcgaagtgaagtgcggttccaca

SEQ ID NO: 2400198 - DNA, 25 bp, Homo sapien
ggttccggaatgtctgcagtcccaa

SEQ ID NO: 2400199 - DNA, 25 bp, Homo sapien
gaaaagattcattaccggagcagga

SEQ ID NO: 2400200 - DNA, 25 bp, Homo sapien
tgttcctttcttctacatgatgtct

SEQ ID NO: 2400201 - DNA, 25 bp, Homo sapien
gttcctttcttctacatgatgtctt

SEQ ID NO: 2400202 - DNA, 25 bp, Homo sapien
ttgttcctttcttctacatgatgtc

SEQ ID NO: 2400203 - DNA, 25 bp, Homo sapien
tgtcatccagccaaatggggcgcaa

SEQ ID NO: 2400204 - DNA, 25 bp, Homo sapien
gatttccccatccacgatgtctgca

SEQ ID NO: 2400205 - DNA, 25 bp, Homo sapien
aagttaatgtgacatcctcattgtg

SEQ ID NO: 2400206 - DNA, 25 bp, Homo sapien
gggcgcaatacagcagggctattaa

SEQ ID NO: 2400207 - DNA, 25 bp, Homo sapien
gttccacccatcatcacatatagtt

SEQ ID NO: 2400208 - DNA, 25 bp, Homo sapien
cggcagcagtattcaagttccaccc

SEQ ID NO: 2400209 - DNA, 25 bp, Homo sapien
tcaagttccacccatcatcacatat

SEQ ID NO: 2400210 - DNA, 25 bp, Homo sapien
ggcagcagtattcaagttccaccca

SEQ ID NO: 2400211 - DNA, 25 bp, Homo sapien
tttcttggaatttcacctccactct

SEQ ID NO: 2400212 - DNA, 25 bp, Homo sapien
gttgtttccatccactagcctcaaa

SEQ ID NO: 2400213 - DNA, 25 bp, Homo sapien
ctccactctccctgaacaggagttg

SEQ ID NO: 2400214 - DNA, 25 bp, Homo sapien
tagcctcaaacccagattggcttca

SEQ ID NO: 2400215 - DNA, 25 bp, Homo sapien
atatgaaaaactgattcaactttga

SEQ ID NO: 2400216 - DNA, 25 bp, Homo sapien
atgaaaaactgattcaactttgagc

SEQ ID NO: 2400217 - DNA, 25 bp, Homo sapien
tatgaaaaactgattcaactttgag

SEQ ID NO: 2400218 - DNA, 25 bp, Homo sapien
catatgaaaaactgattcaactttg

SEQ ID NO: 2400219 - DNA, 25 bp, Homo sapien
cttgccttcctactctagttagact

SEQ ID NO: 2400220 - DNA, 25 bp, Homo sapien
tccccattcccggtgttgacattcc

SEQ ID NO: 2400221 - DNA, 25 bp, Homo sapien
ccattcccggtgttgacattcccag

SEQ ID NO: 2400222 - DNA, 25 bp, Homo sapien
ttcccggtgttgacattcccagaga

SEQ ID NO: 2400223 - DNA, 25 bp, Homo sapien
gcttccccattcccggtgttgacat

SEQ ID NO: 2400224 - DNA, 25 bp, Homo sapien
caagctgtttgcacacgacagttga

SEQ ID NO: 2400225 - DNA, 25 bp, Homo sapien
gcttgtccaaaacgaaacatggcga

SEQ ID NO: 2400226 - DNA, 25 bp, Homo sapien
cagttgaggcagtagtgttccaccc

SEQ ID NO: 2400227 - DNA, 25 bp, Homo sapien
caaatttttccatgtctagtcacgg

SEQ ID NO: 2400228 - DNA, 25 bp, Homo sapien
ccagagcagggaccgtctccattga

SEQ ID NO: 2400229 - DNA, 25 bp, Homo sapien
agggaccgtctccattgaccagcct

SEQ ID NO: 2400230 - DNA, 25 bp, Homo sapien
tgaccagcctcaactccaaatctgt

SEQ ID NO: 2400231 - DNA, 25 bp, Homo sapien
agcctcaactccaaatctgttccat

SEQ ID NO: 2400232 - DNA, 25 bp, Homo sapien
ctgcaagaaagacagaaacatacat

SEQ ID NO: 2400233 - DNA, 25 bp, Homo sapien
cgcccatggtcataaacactttctc

SEQ ID NO: 2400234 - DNA, 25 bp, Homo sapien
tccttgcttgtgaaatgtcttggcc

SEQ ID NO: 2400235 - DNA, 25 bp, Homo sapien
tcatagcttgactgtttccctttcc

SEQ ID NO: 2400236 - DNA, 25 bp, Homo sapien
actcaacacgggttttctgctgcct

SEQ ID NO: 2400237 - DNA, 25 bp, Homo sapien
ggcgtttggacagatataggcataa

SEQ ID NO: 2400238 - DNA, 25 bp, Homo sapien
tggcgtttggacagatataggcata

SEQ ID NO: 2400239 - DNA, 25 bp, Homo sapien
actgtctaggggcttctcaaagcca

SEQ ID NO: 2400240 - DNA, 25 bp, Homo sapien
tctcttctctgctgtcggaatgtag

SEQ ID NO: 2400241 - DNA, 25 bp, Homo sapien
tgtctaggggcttctcaaagccatg

SEQ ID NO: 2400242 - DNA, 25 bp, Homo sapien
tcttctctgctgtcggaatgtagcc

SEQ ID NO: 2400243 - DNA, 25 bp, Homo sapien
gaatcattaagtacacttgattcag

SEQ ID NO: 2400244 - DNA, 25 bp, Homo sapien
tcattaagtacacttgattcagatt

SEQ ID NO: 2400245 - DNA, 25 bp, Homo sapien
atcattaagtacacttgattcagat

SEQ ID NO: 2400246 - DNA, 25 bp, Homo sapien
aatcattaagtacacttgattcaga

SEQ ID NO: 2400247 - DNA, 25 bp, Homo sapien
ctttggcttcagaaattcttttctt

SEQ ID NO: 2400248 - DNA, 25 bp, Homo sapien
ggatcttctcttgttttcgtcttta

SEQ ID NO: 2400249 - DNA, 25 bp, Homo sapien
ctcttgttttcgtctttaaatctct

SEQ ID NO: 2400250 - DNA, 25 bp, Homo sapien
ttagttcttctttggcttcagaaat

SEQ ID NO: 2400251 - DNA, 25 bp, Homo sapien
taaactttccaaggagctctccagg

SEQ ID NO: 2400252 - DNA, 25 bp, Homo sapien
ctttttcagatcatctgggcttttc

SEQ ID NO: 2400253 - DNA, 25 bp, Homo sapien
caggtctggtttggacttgtctttt

SEQ ID NO: 2400254 - DNA, 25 bp, Homo sapien
tggacttgtcttttagcttcccggc

SEQ ID NO: 2400255 - DNA, 25 bp, Homo sapien
tcagagttcgcctcaaatatgtcgt

SEQ ID NO: 2400256 - DNA, 25 bp, Homo sapien
gaagcacttctttacagtcctccag

SEQ ID NO: 2400257 - DNA, 25 bp, Homo sapien
catccgatgtatagcctttccagcg

SEQ ID NO: 2400258 - DNA, 25 bp, Homo sapien
gctttggctttgttctctgcaattt

SEQ ID NO: 2400259 - DNA, 25 bp, Homo sapien
acaggggctgcggtcacactcgctc

SEQ ID NO: 2400260 - DNA, 25 bp, Homo sapien
gctgcggtcacactcgctccctccg

SEQ ID NO: 2400261 - DNA, 25 bp, Homo sapien
tgacacaggggctgcggtcacactc

SEQ ID NO: 2400262 - DNA, 25 bp, Homo sapien
gggctgcggtcacactcgctccctc

SEQ ID NO: 2400263 - DNA, 25 bp, Homo sapien
tagcagctccgcaaaccgccgagga

SEQ ID NO: 2400264 - DNA, 25 bp, Homo sapien
cagctccgcaaaccgccgaggaaaa

SEQ ID NO: 2400265 - DNA, 25 bp, Homo sapien
gcagctccgcaaaccgccgaggaaa

SEQ ID NO: 2400266 - DNA, 25 bp, Homo sapien
cctagcagctccgcaaaccgccgag

SEQ ID NO: 2400267 - DNA, 25 bp, Homo sapien
caggatgcaagttaccacagcagag

SEQ ID NO: 2400268 - DNA, 25 bp, Homo sapien
caggagcaggatgcaagttaccaca

SEQ ID NO: 2400269 - DNA, 25 bp, Homo sapien
gatgcaagttaccacagcagagaaa

SEQ ID NO: 2400270 - DNA, 25 bp, Homo sapien
ggaattcaggagcaggatgcaagtt

SEQ ID NO: 2400271 - DNA, 25 bp, Homo sapien
caatatgccacgagttttgaggcag

SEQ ID NO: 2400272 - DNA, 25 bp, Homo sapien
tatgccacgagttttgaggcagcat

SEQ ID NO: 2400273 - DNA, 25 bp, Homo sapien
tgccacgagttttgaggcagcatca

SEQ ID NO: 2400274 - DNA, 25 bp, Homo sapien
gccacgagttttgaggcagcatcat

SEQ ID NO: 2400275 - DNA, 25 bp, Homo sapien
tatgggtctatctcttcctgagtcc

SEQ ID NO: 2400276 - DNA, 25 bp, Homo sapien
caaataccttaaaacctgcagggct

SEQ ID NO: 2400277 - DNA, 25 bp, Homo sapien
cctcaccttatacctattagatagc

SEQ ID NO: 2400278 - DNA, 25 bp, Homo sapien
aaaaccacagtatcacctcacctta

SEQ ID NO: 2400279 - DNA, 25 bp, Homo sapien
aaaatgggcagaacaacagatattt

SEQ ID NO: 2400280 - DNA, 25 bp, Homo sapien
caacccaatattgagaaaacaacct

SEQ ID NO: 2400281 - DNA, 25 bp, Homo sapien
tatgcaaattgaaacactgtcaaat

SEQ ID NO: 2400282 - DNA, 25 bp, Homo sapien
gagtcatgccttataaagttagcca

SEQ ID NO: 2400283 - DNA, 25 bp, Homo sapien
tataatacatctaggaaactctaca

SEQ ID NO: 2400284 - DNA, 25 bp, Homo sapien
ttaaagaatcgttgtgagtcatgcc

SEQ ID NO: 2400285 - DNA, 25 bp, Homo sapien
tatttaattcccttgaaagtctcat

SEQ ID NO: 2400286 - DNA, 25 bp, Homo sapien
tgcaactgtaatagtcagtgagaga

SEQ ID NO: 2400287 - DNA, 25 bp, Homo sapien
gtgagagaggtgaatttctgctcca

SEQ ID NO: 2400288 - DNA, 25 bp, Homo sapien
tatacaccactaagtagtcacattc

SEQ ID NO: 2400289 - DNA, 25 bp, Homo sapien
ctctccatatgcgtataagaattca

SEQ ID NO: 2400290 - DNA, 25 bp, Homo sapien
caaagcgcagcaagtcacgaactac

SEQ ID NO: 2400291 - DNA, 25 bp, Homo sapien
gaaatgccatttataggagctggca

SEQ ID NO: 2400292 - DNA, 25 bp, Homo sapien
catttccaactgagtggcgcctaga

SEQ ID NO: 2400293 - DNA, 25 bp, Homo sapien
ttgaaattctcgatgctagcactgc

SEQ ID NO: 2400294 - DNA, 25 bp, Homo sapien
actcggacaatcaagcttggtcggg

SEQ ID NO: 2400295 - DNA, 25 bp, Homo sapien
tcgatgctagcactgcagtctgaag

SEQ ID NO: 2400296 - DNA, 25 bp, Homo sapien
actgcagtctgaagtcgaactcgga

SEQ ID NO: 2400297 - DNA, 25 bp, Homo sapien
ctgaaagtgatggggagaatggaac

SEQ ID NO: 2400298 - DNA, 25 bp, Homo sapien
agttggaaaacactcttcaggatat

SEQ ID NO: 2400299 - DNA, 25 bp, Homo sapien
gaaccaagttggaaaacactcttca

SEQ ID NO: 2400300 - DNA, 25 bp, Homo sapien
tgaaagtgatggggagaatggaacc

SEQ ID NO: 2400301 - DNA, 25 bp, Homo sapien
tactgcaagtctacagttatcaaaa

SEQ ID NO: 2400302 - DNA, 25 bp, Homo sapien
ttcaaacttactgcaagtctacagt

SEQ ID NO: 2400303 - DNA, 25 bp, Homo sapien
aacttactgcaagtctacagttatc

SEQ ID NO: 2400304 - DNA, 25 bp, Homo sapien
ctgcaagtctacagttatcaaaaca

SEQ ID NO: 2400305 - DNA, 25 bp, Homo sapien
tgaaatcagctgactcatgggaatt

SEQ ID NO: 2400306 - DNA, 25 bp, Homo sapien
cacagaaattagttcagcagcactg

SEQ ID NO: 2400307 - DNA, 25 bp, Homo sapien
cactgaaatcagctgactcatggga

SEQ ID NO: 2400308 - DNA, 25 bp, Homo sapien
ttagacacagaaattagttcagcag

SEQ ID NO: 2400309 - DNA, 25 bp, Homo sapien
agcagatacgtagaatgaaccagtc

SEQ ID NO: 2400310 - DNA, 25 bp, Homo sapien
taatcacaggcctcttaagctaaag

SEQ ID NO: 2400311 - DNA, 25 bp, Homo sapien
cagtaaagtcatcctgcccagatgc

SEQ ID NO: 2400312 - DNA, 25 bp, Homo sapien
gggacccttcatggagtaaagacaa

SEQ ID NO: 2400313 - DNA, 25 bp, Homo sapien
atgcatctaagcttcctattacatt

SEQ ID NO: 2400314 - DNA, 25 bp, Homo sapien
gatctgaacccctgggcaatagacc

SEQ ID NO: 2400315 - DNA, 25 bp, Homo sapien
agccactgatctgaacccctgggca

SEQ ID NO: 2400316 - DNA, 25 bp, Homo sapien
gcatctaagcttcctattacatttt

SEQ ID NO: 2400317 - DNA, 25 bp, Homo sapien
gaatttggtggactaagttctctcc

SEQ ID NO: 2400318 - DNA, 25 bp, Homo sapien
gaattcattaggtccagatcatctg

SEQ ID NO: 2400319 - DNA, 25 bp, Homo sapien
cattcaggcaagaattcatctcccg

SEQ ID NO: 2400320 - DNA, 25 bp, Homo sapien
catctcccggtattgaatttggtgg

SEQ ID NO: 2400321 - DNA, 25 bp, Homo sapien
gacgaaaatggccaacagaacaacc

SEQ ID NO: 2400322 - DNA, 25 bp, Homo sapien
ttttagtcaagaagaataatgcgac

SEQ ID NO: 2400323 - DNA, 25 bp, Homo sapien
ctgcaagccgctgtctctgtcttcg

SEQ ID NO: 2400324 - DNA, 25 bp, Homo sapien
ccaaggatcccgactgcaataaagg

SEQ ID NO: 2400325 - DNA, 25 bp, Homo sapien
ttgtggggttttctgcactgaaata

SEQ ID NO: 2400326 - DNA, 25 bp, Homo sapien
tgtggctttttgtggggttttctgc

SEQ ID NO: 2400327 - DNA, 25 bp, Homo sapien
ttttgtggggttttctgcactgaaa

SEQ ID NO: 2400328 - DNA, 25 bp, Homo sapien
gctttttgtggggttttctgcactg

SEQ ID NO: 2400329 - DNA, 25 bp, Homo sapien
gattccaagctcaatccaggcttct

SEQ ID NO: 2400330 - DNA, 25 bp, Homo sapien
ctgccagagattccaagctcaatcc

SEQ ID NO: 2400331 - DNA, 25 bp, Homo sapien
aacccctctttgctgccagagattc

SEQ ID NO: 2400332 - DNA, 25 bp, Homo sapien
cagagattccaagctcaatccaggc

SEQ ID NO: 2400333 - DNA, 25 bp, Homo sapien
tgagcatcgtccaagtcccaagagt

SEQ ID NO: 2400334 - DNA, 25 bp, Homo sapien
tctggcaggacaatcccacaaggaa

SEQ ID NO: 2400335 - DNA, 25 bp, Homo sapien
acttcattgagccatatcggtccag

SEQ ID NO: 2400336 - DNA, 25 bp, Homo sapien
tgtgcaattcactgcagcgtcttcc

SEQ ID NO: 2400337 - DNA, 25 bp, Homo sapien
cagaagatgatagcggggctgcaga

SEQ ID NO: 2400338 - DNA, 25 bp, Homo sapien
ttcatataggtcgatggatactcac

SEQ ID NO: 2400339 - DNA, 25 bp, Homo sapien
aattttcatataggtcgatggatac

SEQ ID NO: 2400340 - DNA, 25 bp, Homo sapien
tggaattttcatataggtcgatgga

SEQ ID NO: 2400341 - DNA, 25 bp, Homo sapien
tgaacattgtccacccacatgggaa

SEQ ID NO: 2400342 - DNA, 25 bp, Homo sapien
gcttcactggtcagtctcagagaca

SEQ ID NO: 2400343 - DNA, 25 bp, Homo sapien
cactgccacagcgtgtcaggtcctt

SEQ ID NO: 2400344 - DNA, 25 bp, Homo sapien
gggaatggacatggccttgtctaaa

SEQ ID NO: 2400345 - DNA, 25 bp, Homo sapien
catttaccaggcgaagttgaccact

SEQ ID NO: 2400346 - DNA, 25 bp, Homo sapien
gagcagaaccagtggcattaatggc

SEQ ID NO: 2400347 - DNA, 25 bp, Homo sapien
tgcaaaccacgtgggcatcactcag

SEQ ID NO: 2400348 - DNA, 25 bp, Homo sapien
tgtgaatggcactgccaaatgcggg

SEQ ID NO: 2400349 - DNA, 25 bp, Homo sapien
tgaaactattaataatgagcattcc

SEQ ID NO: 2400350 - DNA, 25 bp, Homo sapien
gaaatgaaactattaataatgagca

SEQ ID NO: 2400351 - DNA, 25 bp, Homo sapien
aagagaaatgaaactattaataatg

SEQ ID NO: 2400352 - DNA, 25 bp, Homo sapien
gaaactattaataatgagcattcca

SEQ ID NO: 2400353 - DNA, 25 bp, Homo sapien
ctttcttctggaatggtaggccttg

SEQ ID NO: 2400354 - DNA, 25 bp, Homo sapien
tggtaggccttgttgggcccaaaga

SEQ ID NO: 2400355 - DNA, 25 bp, Homo sapien
cgatgaattgcacgaggacagtgtt

SEQ ID NO: 2400356 - DNA, 25 bp, Homo sapien
tgggcccaaagacgatgaattgcac

SEQ ID NO: 2400357 - DNA, 25 bp, Homo sapien
gatccccaggcaccaagcgttttga

SEQ ID NO: 2400358 - DNA, 25 bp, Homo sapien
tagagcagttacaggacaatctccc

SEQ ID NO: 2400359 - DNA, 25 bp, Homo sapien
gacataatgaagcacctagagcagt

SEQ ID NO: 2400360 - DNA, 25 bp, Homo sapien
cagtgagagttacagagggatcccc

SEQ ID NO: 2400361 - DNA, 25 bp, Homo sapien
gacagggctttagaaaaagacagct

SEQ ID NO: 2400362 - DNA, 25 bp, Homo sapien
aaccctgtccctttcacagtatgag

SEQ ID NO: 2400363 - DNA, 25 bp, Homo sapien
gacagctatgactccctaaccctgt

SEQ ID NO: 2400364 - DNA, 25 bp, Homo sapien
cagtatgagaaccaattaaagatgt

SEQ ID NO: 2400365 - DNA, 25 bp, Homo sapien
tgagcagactactccaacatccctg

SEQ ID NO: 2400366 - DNA, 25 bp, Homo sapien
agagtgaaagatgggactcatgtcc

SEQ ID NO: 2400367 - DNA, 25 bp, Homo sapien
ctgggcggggtgctactgggcagag

SEQ ID NO: 2400368 - DNA, 25 bp, Homo sapien
gcagagtgaaagatgggactcatgt

SEQ ID NO: 2400369 - DNA, 25 bp, Homo sapien
gatagagacaactgtgccacactgt

SEQ ID NO: 2400370 - DNA, 25 bp, Homo sapien
aatcacagatggagccccacgtgtc

SEQ ID NO: 2400371 - DNA, 25 bp, Homo sapien
taattccctgcatagaacgctggca

SEQ ID NO: 2400372 - DNA, 25 bp, Homo sapien
tccagagagaagtccgaatcacaga

SEQ ID NO: 2400373 - DNA, 25 bp, Homo sapien
gcccttgccaatctacatactctga

SEQ ID NO: 2400374 - DNA, 25 bp, Homo sapien
tatccattaaatctgcgcaaagcaa

SEQ ID NO: 2400375 - DNA, 25 bp, Homo sapien
tatgaccatgttctgtactacagca

SEQ ID NO: 2400376 - DNA, 25 bp, Homo sapien
gatatagatacaccatcagcccttg

SEQ ID NO: 2400377 - DNA, 25 bp, Homo sapien
gaaagcaaatgatagctatatatag

SEQ ID NO: 2400378 - DNA, 25 bp, Homo sapien
aggaaaagaattggatagtagtggg

SEQ ID NO: 2400379 - DNA, 25 bp, Homo sapien
taatgaaagcaaatgatagctatat

SEQ ID NO: 2400380 - DNA, 25 bp, Homo sapien
tttatacaacatgccaccatttgga

SEQ ID NO: 2400381 - DNA, 25 bp, Homo sapien
tctacttaactagaggtaagcacca

SEQ ID NO: 2400382 - DNA, 25 bp, Homo sapien
gaggtatctggagccatattgttgg

SEQ ID NO: 2400383 - DNA, 25 bp, Homo sapien
gaaatgcccctcactgcatgcctag

SEQ ID NO: 2400384 - DNA, 25 bp, Homo sapien
catgcagcacgtacaagtttccatt

SEQ ID NO: 2400385 - DNA, 25 bp, Homo sapien
ttgagtgcagatccacatcccagct

SEQ ID NO: 2400386 - DNA, 25 bp, Homo sapien
gtaagtccaccccattgccagttct

SEQ ID NO: 2400387 - DNA, 25 bp, Homo sapien
catagtgatcacaggtaagtccacc

SEQ ID NO: 2400388 - DNA, 25 bp, Homo sapien
gagaagtttcatttccgttacagct

SEQ ID NO: 2400389 - DNA, 25 bp, Homo sapien
tgtccctggcaagaaacgctgtcaa

SEQ ID NO: 2400390 - DNA, 25 bp, Homo sapien
tgtgacggcagttggacatcccagt

SEQ ID NO: 2400391 - DNA, 25 bp, Homo sapien
tactggcgttaactcgaccaatggc

SEQ ID NO: 2400392 - DNA, 25 bp, Homo sapien
gatgtgtccaaatcccttactggcg

SEQ ID NO: 2400393 - DNA, 25 bp, Homo sapien
tgcaaaatatcctagtaaagccctt

SEQ ID NO: 2400394 - DNA, 25 bp, Homo sapien
cattatgttcttaagagttcaggct

SEQ ID NO: 2400395 - DNA, 25 bp, Homo sapien
cctctcctggagaatagaatgagcc

SEQ ID NO: 2400396 - DNA, 25 bp, Homo sapien
taaaatgcggtgacaaaagaagcag

SEQ ID NO: 2400397 - DNA, 25 bp, Homo sapien
gcgtcagcctcatttccaaattgga

SEQ ID NO: 2400398 - DNA, 25 bp, Homo sapien
gcatcctcagcatgatcacagttat

SEQ ID NO: 2400399 - DNA, 25 bp, Homo sapien
gctgactcatttccgttgcatataa

SEQ ID NO: 2400400 - DNA, 25 bp, Homo sapien
taagatcatcaaaccagattggtcc

SEQ ID NO: 2400401 - DNA, 25 bp, Homo sapien
gcaataattatgataagagcctgct

SEQ ID NO: 2400402 - DNA, 25 bp, Homo sapien
acactgttttagctaaacagccagt

SEQ ID NO: 2400403 - DNA, 25 bp, Homo sapien
gctaaacagccagttctatacacag

SEQ ID NO: 2400404 - DNA, 25 bp, Homo sapien
cataccaaacagtgtaccagtagtt

SEQ ID NO: 2400405 - DNA, 25 bp, Homo sapien
aggtgagaggattgtataaaaatta

SEQ ID NO: 2400406 - DNA, 25 bp, Homo sapien
gtttctcttatcacatcatgatgcc

SEQ ID NO: 2400407 - DNA, 25 bp, Homo sapien
gatgcctggacagagataagtcctt

SEQ ID NO: 2400408 - DNA, 25 bp, Homo sapien
ttctagatgctactgtgtgtttctc

SEQ ID NO: 2400409 - DNA, 25 bp, Homo sapien
tggttacaaatcacagagaccgctt

SEQ ID NO: 2400410 - DNA, 25 bp, Homo sapien
cagaacctgcactggaattagccca

SEQ ID NO: 2400411 - DNA, 25 bp, Homo sapien
tgtttgcaatcccaaagagctgact

SEQ ID NO: 2400412 - DNA, 25 bp, Homo sapien
gatagcagttggacatcccagctgg

SEQ ID NO: 2400413 - DNA, 25 bp, Homo sapien
ggcactgagaagtaagaccacagta

SEQ ID NO: 2400414 - DNA, 25 bp, Homo sapien
cagtaatggtgaagggactcaagtt

SEQ ID NO: 2400415 - DNA, 25 bp, Homo sapien
gactcaagttgacaaaatgtcttct

SEQ ID NO: 2400416 - DNA, 25 bp, Homo sapien
tggtgaagggactcaagttgacaaa

SEQ ID NO: 2400417 - DNA, 25 bp, Homo sapien
ctgtatccttatcacataatacact

SEQ ID NO: 2400418 - DNA, 25 bp, Homo sapien
tcacataatacactctttaatgctg

SEQ ID NO: 2400419 - DNA, 25 bp, Homo sapien
ccttatcacataatacactctttaa

SEQ ID NO: 2400420 - DNA, 25 bp, Homo sapien
cataatacactctttaatgctgtta

SEQ ID NO: 2400421 - DNA, 25 bp, Homo sapien
gatccagagtcttcaagtagcacca

SEQ ID NO: 2400422 - DNA, 25 bp, Homo sapien
atccagagtcttcaagtagcaccat

SEQ ID NO: 2400423 - DNA, 25 bp, Homo sapien
agatccagagtcttcaagtagcacc

SEQ ID NO: 2400424 - DNA, 25 bp, Homo sapien
aaagatttataacttcaatgattcc

SEQ ID NO: 2400425 - DNA, 25 bp, Homo sapien
gatttataacttcaatgattcctaa

SEQ ID NO: 2400426 - DNA, 25 bp, Homo sapien
tattattccctagaaatgttcttct

SEQ ID NO: 2400427 - DNA, 25 bp, Homo sapien
tgtattattccctagaaatgttctt

SEQ ID NO: 2400428 - DNA, 25 bp, Homo sapien
ggtgtagctcccaacatctatggct

SEQ ID NO: 2400429 - DNA, 25 bp, Homo sapien
tactggtgtagcttcctattggtgt

SEQ ID NO: 2400430 - DNA, 25 bp, Homo sapien
ttgatgtattctgccctcttttgca

SEQ ID NO: 2400431 - DNA, 25 bp, Homo sapien
actctcttatgcttcccagttgatg

SEQ ID NO: 2400432 - DNA, 25 bp, Homo sapien
gaaaacctggccttttgtagatgtc

SEQ ID NO: 2400433 - DNA, 25 bp, Homo sapien
atactggtgtacaaactggtgtggg

SEQ ID NO: 2400434 - DNA, 25 bp, Homo sapien
gagtgtcaagagtgccaaaaaccct

SEQ ID NO: 2400435 - DNA, 25 bp, Homo sapien
gatgtctgatgattagtttttaaaa

SEQ ID NO: 2400436 - DNA, 25 bp, Homo sapien
tggcacacaaagactactctaggag

SEQ ID NO: 2400437 - DNA, 25 bp, Homo sapien
tctgggtttcattaagtaggtggca

SEQ ID NO: 2400438 - DNA, 25 bp, Homo sapien
taagtaggtggcacacaaagactac

SEQ ID NO: 2400439 - DNA, 25 bp, Homo sapien
aactcaaacttgcagatgcatagcc

SEQ ID NO: 2400440 - DNA, 25 bp, Homo sapien
cgggttaagtgacaggattggccca

SEQ ID NO: 2400441 - DNA, 25 bp, Homo sapien
aggctgccatgccaaaagcggccat

SEQ ID NO: 2400442 - DNA, 25 bp, Homo sapien
ttgaaactcgacatcttcctgcggg

SEQ ID NO: 2400443 - DNA, 25 bp, Homo sapien
cccagctggtacagaaaaggctgcc

SEQ ID NO: 2400444 - DNA, 25 bp, Homo sapien
gctgctcctttaactttgcaaattc

SEQ ID NO: 2400445 - DNA, 25 bp, Homo sapien
gaagctgctcctttaactttgcaaa

SEQ ID NO: 2400446 - DNA, 25 bp, Homo sapien
accgctgcagaattgaagctgctcc

SEQ ID NO: 2400447 - DNA, 25 bp, Homo sapien
gctcctttaactttgcaaattcagt

SEQ ID NO: 2400448 - DNA, 25 bp, Homo sapien
gaggtttaatctctgtctttagatt

SEQ ID NO: 2400449 - DNA, 25 bp, Homo sapien
atttatagactaatgctcactcagc

SEQ ID NO: 2400450 - DNA, 25 bp, Homo sapien
taatgctcactcagccatttttacc

SEQ ID NO: 2400451 - DNA, 25 bp, Homo sapien
aagaggtttaatctctgtctttaga

SEQ ID NO: 2400452 - DNA, 25 bp, Homo sapien
ggtttaagtaacctagaatgtgaga

SEQ ID NO: 2400453 - DNA, 25 bp, Homo sapien
caaagtgtactaaaaattctactga

SEQ ID NO: 2400454 - DNA, 25 bp, Homo sapien
tcgtatgcactcaaacttcaaaaac

SEQ ID NO: 2400455 - DNA, 25 bp, Homo sapien
tatttcagtgtctgaatggatccca

SEQ ID NO: 2400456 - DNA, 25 bp, Homo sapien
gcatttccctttccgaagttgagca

SEQ ID NO: 2400457 - DNA, 25 bp, Homo sapien
aaattctttcatgcccttggtagaa

SEQ ID NO: 2400458 - DNA, 25 bp, Homo sapien
gttgagcagcagctaaaattctttc

SEQ ID NO: 2400459 - DNA, 25 bp, Homo sapien
tgtggaatcctcacagagataattg

SEQ ID NO: 2400460 - DNA, 25 bp, Homo sapien
caaggatgaagcatagtgaattgta

SEQ ID NO: 2400461 - DNA, 25 bp, Homo sapien
ggcaaggatgaagcatagtgaattg

SEQ ID NO: 2400462 - DNA, 25 bp, Homo sapien
aaccctgctccctgtgagcatggct

SEQ ID NO: 2400463 - DNA, 25 bp, Homo sapien
gcaaggatgaagcatagtgaattgt

SEQ ID NO: 2400464 - DNA, 25 bp, Homo sapien
tatctggaccgaactgagggtcagg

SEQ ID NO: 2400465 - DNA, 25 bp, Homo sapien
cgagaagaatttgaactgtgatcca

SEQ ID NO: 2400466 - DNA, 25 bp, Homo sapien
ggcccagaaattttcgccagaccaa

SEQ ID NO: 2400467 - DNA, 25 bp, Homo sapien
tgaagaggattgtcgcagattggat

SEQ ID NO: 2400468 - DNA, 25 bp, Homo sapien
ctttatcccacattaattgaatgaa

SEQ ID NO: 2400469 - DNA, 25 bp, Homo sapien
aggactgtaaaactttatcccacat

SEQ ID NO: 2400470 - DNA, 25 bp, Homo sapien
taaaactttatcccacattaattga

SEQ ID NO: 2400471 - DNA, 25 bp, Homo sapien
ctgtaaaactttatcccacattaat

SEQ ID NO: 2400472 - DNA, 25 bp, Homo sapien
tcactcaattatgagcccccaaagc

SEQ ID NO: 2400473 - DNA, 25 bp, Homo sapien
aggaagaagcctctcactcaattat

SEQ ID NO: 2400474 - DNA, 25 bp, Homo sapien
gaagcctctcactcaattatgagcc

SEQ ID NO: 2400475 - DNA, 25 bp, Homo sapien
gaagaagcctctcactcaattatga

SEQ ID NO: 2400476 - DNA, 25 bp, Homo sapien
cagaattcccacacagaaccttgac

SEQ ID NO: 2400477 - DNA, 25 bp, Homo sapien
caagtgctcagggagatgacaagcc

SEQ ID NO: 2400478 - DNA, 25 bp, Homo sapien
tattctcgtcgttcatggacaggaa

SEQ ID NO: 2400479 - DNA, 25 bp, Homo sapien
caggaaagttgggttattctcgtcg

SEQ ID NO: 2400480 - DNA, 25 bp, Homo sapien
attgttggtttaagctacagagttt

SEQ ID NO: 2400481 - DNA, 25 bp, Homo sapien
tgttcttgaatcagtacacacacgg

SEQ ID NO: 2400482 - DNA, 25 bp, Homo sapien
gtgaacatttctagattctaaatgg

SEQ ID NO: 2400483 - DNA, 25 bp, Homo sapien
gcattcactctttagtgggtcatca

SEQ ID NO: 2400484 - DNA, 25 bp, Homo sapien
gcggaatcgtttggtaatggcagtt

SEQ ID NO: 2400485 - DNA, 25 bp, Homo sapien
gaaggatgtatcagccctgtagcta

SEQ ID NO: 2400486 - DNA, 25 bp, Homo sapien
ctaaaaggatgtgtggcggaatcgt

SEQ ID NO: 2400487 - DNA, 25 bp, Homo sapien
tcttgaaatctttaaacagggtgga

SEQ ID NO: 2400488 - DNA, 25 bp, Homo sapien
tagaattatgcagtgcagctccagt

SEQ ID NO: 2400489 - DNA, 25 bp, Homo sapien
cagaggtgggtattgtggccagtga

SEQ ID NO: 2400490 - DNA, 25 bp, Homo sapien
cagtgagcttcatccccaggtgggt

SEQ ID NO: 2400491 - DNA, 25 bp, Homo sapien
gctccagtgcgtacaacatcatcca

SEQ ID NO: 2400492 - DNA, 25 bp, Homo sapien
ctagttgctgctggacattagaccc

SEQ ID NO: 2400493 - DNA, 25 bp, Homo sapien
tagttgctgctggacattagacccc

SEQ ID NO: 2400494 - DNA, 25 bp, Homo sapien
tactccactgttaacaaggtccctg

SEQ ID NO: 2400495 - DNA, 25 bp, Homo sapien
cagggtgccgactcagaaactctct

SEQ ID NO: 2400496 - DNA, 25 bp, Homo sapien
tcactagagtcacaccagggtgccg

SEQ ID NO: 2400497 - DNA, 25 bp, Homo sapien
ccatgtgccaaaaaagccgagctac

SEQ ID NO: 2400498 - DNA, 25 bp, Homo sapien
ctcatggatgggtgaaaatctcttt

SEQ ID NO: 2400499 - DNA, 25 bp, Homo sapien
tgaaaatctctttctgacgtaaatt

SEQ ID NO: 2400500 - DNA, 25 bp, Homo sapien
gtgaaaatctctttctgacgtaaat

SEQ ID NO: 2400501 - DNA, 25 bp, Homo sapien
agctcatggatgggtgaaaatctct

SEQ ID NO: 2400502 - DNA, 25 bp, Homo sapien
cctgagcttcgccagatcttccggc

SEQ ID NO: 2400503 - DNA, 25 bp, Homo sapien
ttttgcctgagcttcgccagatctt

SEQ ID NO: 2400504 - DNA, 25 bp, Homo sapien
tttgcctgagcttcgccagatcttc

SEQ ID NO: 2400505 - DNA, 25 bp, Homo sapien
tgcctgagcttcgccagatcttccg

SEQ ID NO: 2400506 - DNA, 25 bp, Homo sapien
gggtcatagaagacgtcaaactccc

SEQ ID NO: 2400507 - DNA, 25 bp, Homo sapien
caaactcccagggttcgattcttct

SEQ ID NO: 2400508 - DNA, 25 bp, Homo sapien
aggcctctttacgaagttctctggg

SEQ ID NO: 2400509 - DNA, 25 bp, Homo sapien
cagacaggcctctttacgaagttct

SEQ ID NO: 2400510 - DNA, 25 bp, Homo sapien
tcagagtggggtcaccggttgaagg

SEQ ID NO: 2400511 - DNA, 25 bp, Homo sapien
cagagtggggtcaccggttgaagga

SEQ ID NO: 2400512 - DNA, 25 bp, Homo sapien
gtctctggacttcctcctctggagt

SEQ ID NO: 2400513 - DNA, 25 bp, Homo sapien
tctctggacttcctcctctggagtc

SEQ ID NO: 2400514 - DNA, 25 bp, Homo sapien
ggtgctctgtctctggacttcctcc

SEQ ID NO: 2400515 - DNA, 25 bp, Homo sapien
ctggacttcctcctctggagtcata

SEQ ID NO: 2400516 - DNA, 25 bp, Homo sapien
tgagaaagcctatgatgcaaatgac

SEQ ID NO: 2400517 - DNA, 25 bp, Homo sapien
ttcccgcatctcaggcagttatggg

SEQ ID NO: 2400518 - DNA, 25 bp, Homo sapien
gggcagaggatgactcattcccgca

SEQ ID NO: 2400519 - DNA, 25 bp, Homo sapien
catgaattttgtagggtggatcact

SEQ ID NO: 2400520 - DNA, 25 bp, Homo sapien
atcgtcccatagtttatccatgcag

SEQ ID NO: 2400521 - DNA, 25 bp, Homo sapien
ctgactcaagaggagtgtgcctttc

SEQ ID NO: 2400522 - DNA, 25 bp, Homo sapien
gagtgtgcctttcatcgtcccatag

SEQ ID NO: 2400523 - DNA, 25 bp, Homo sapien
gtcccatagtttatccatgcagcca

SEQ ID NO: 2400524 - DNA, 25 bp, Homo sapien
cgatctaagtggtcataaaccagat

SEQ ID NO: 2400525 - DNA, 25 bp, Homo sapien
tgacatttcgatctaagtggtcata

SEQ ID NO: 2400526 - DNA, 25 bp, Homo sapien
taccctaagaacactccttctattc

SEQ ID NO: 2400527 - DNA, 25 bp, Homo sapien
gtggtcataaaccagataggtagtt

SEQ ID NO: 2400528 - DNA, 25 bp, Homo sapien
cactgatcagggttgagagtcacca

SEQ ID NO: 2400529 - DNA, 25 bp, Homo sapien
taatgaatagctggtgacggtggca

SEQ ID NO: 2400530 - DNA, 25 bp, Homo sapien
tgggtcaacggcatgcatcagggct

SEQ ID NO: 2400531 - DNA, 25 bp, Homo sapien
ccttttccgagaagggtggcactga

SEQ ID NO: 2400532 - DNA, 25 bp, Homo sapien
gggttgtcattccaatccttagcta

SEQ ID NO: 2400533 - DNA, 25 bp, Homo sapien
gaaaattcacccctgagtctctatc

SEQ ID NO: 2400534 - DNA, 25 bp, Homo sapien
tttgaccagtatctccaggaataac

SEQ ID NO: 2400535 - DNA, 25 bp, Homo sapien
ccaatccttagctacatccagcagg

SEQ ID NO: 2400536 - DNA, 25 bp, Homo sapien
gctgggccaatgtcaactgttccct

SEQ ID NO: 2400537 - DNA, 25 bp, Homo sapien
ggccaatgtcaactgttccctttct

SEQ ID NO: 2400538 - DNA, 25 bp, Homo sapien
cagacaggttaaagtagaggagctt

SEQ ID NO: 2400539 - DNA, 25 bp, Homo sapien
ctctggtcccaggttatagtaagaa

SEQ ID NO: 2400540 - DNA, 25 bp, Homo sapien
ggtgaaggcgccttatctaagccca

SEQ ID NO: 2400541 - DNA, 25 bp, Homo sapien
gagaaagcgaagtacattcccgcgg

SEQ ID NO: 2400542 - DNA, 25 bp, Homo sapien
tagcataagtctcgggagaccccag

SEQ ID NO: 2400543 - DNA, 25 bp, Homo sapien
tgctgcctcgcgatcctggaaaatt

SEQ ID NO: 2400544 - DNA, 25 bp, Homo sapien
agaattaacaggaagctgaaagcca

SEQ ID NO: 2400545 - DNA, 25 bp, Homo sapien
cagaattaacaggaagctgaaagcc

SEQ ID NO: 2400546 - DNA, 25 bp, Homo sapien
gaattaacaggaagctgaaagccaa

SEQ ID NO: 2400547 - DNA, 25 bp, Homo sapien
tcagaccggggagagctccactgcc

SEQ ID NO: 2400548 - DNA, 25 bp, Homo sapien
gctgtcagaccggggagagctccac

SEQ ID NO: 2400549 - DNA, 25 bp, Homo sapien
tggagtggctgtcagaccggggaga

SEQ ID NO: 2400550 - DNA, 25 bp, Homo sapien
gaccggggagagctccactgccaga

SEQ ID NO: 2400551 - DNA, 25 bp, Homo sapien
taagataatcaagtgtgaattgctc

SEQ ID NO: 2400552 - DNA, 25 bp, Homo sapien
aatcaagtgtgaattgctctcttcc

SEQ ID NO: 2400553 - DNA, 25 bp, Homo sapien
agaggctgctaatttatctgatgta

SEQ ID NO: 2400554 - DNA, 25 bp, Homo sapien
gaggctgctaatttatctgatgtaa

SEQ ID NO: 2400555 - DNA, 25 bp, Homo sapien
aaatagattgagatacttctttctc

SEQ ID NO: 2400556 - DNA, 25 bp, Homo sapien
tagattgagatacttctttctccca

SEQ ID NO: 2400557 - DNA, 25 bp, Homo sapien
aatagattgagatacttctttctcc

SEQ ID NO: 2400558 - DNA, 25 bp, Homo sapien
caaaatagattgagatacttctttc

SEQ ID NO: 2400559 - DNA, 25 bp, Homo sapien
catggtcggccctctgtgtacgtac

SEQ ID NO: 2400560 - DNA, 25 bp, Homo sapien
tttattggacctaagcaagaacact

SEQ ID NO: 2400561 - DNA, 25 bp, Homo sapien
ggcacagactgcgttacttaaacag

SEQ ID NO: 2400562 - DNA, 25 bp, Homo sapien
tactgacatcagtactgcatgattg

SEQ ID NO: 2400563 - DNA, 25 bp, Homo sapien
cgtcagctgtcggaaaataagagca

SEQ ID NO: 2400564 - DNA, 25 bp, Homo sapien
ataacaggcacttcacccgtcagct

SEQ ID NO: 2400565 - DNA, 25 bp, Homo sapien
cagtcagattgaattaaggctccta

SEQ ID NO: 2400566 - DNA, 25 bp, Homo sapien
aaggctcctaatgtcctcgtttcaa

SEQ ID NO: 2400567 - DNA, 25 bp, Homo sapien
gagcagatgctcatgctccctctgt

SEQ ID NO: 2400568 - DNA, 25 bp, Homo sapien
taagtgtaataggtgacagcctgct

SEQ ID NO: 2400569 - DNA, 25 bp, Homo sapien
tcaatttagctttctacaacggtgg

SEQ ID NO: 2400570 - DNA, 25 bp, Homo sapien
aacggtggatgccaacccaaacaca

SEQ ID NO: 2400571 - DNA, 25 bp, Homo sapien
tattatcgcacaacgctcatcaagg

SEQ ID NO: 2400572 - DNA, 25 bp, Homo sapien
catcaaggttattgggttcacctga

SEQ ID NO: 2400573 - DNA, 25 bp, Homo sapien
tgacagtgaatgtcattccagcccc

SEQ ID NO: 2400574 - DNA, 25 bp, Homo sapien
gacttctgaggtacatgacagtgaa

SEQ ID NO: 2400575 - DNA, 25 bp, Homo sapien
tctggtcaacccattgccaatgtcg

SEQ ID NO: 2400576 - DNA, 25 bp, Homo sapien
ttttcagattctgaatgatgaaatc

SEQ ID NO: 2400577 - DNA, 25 bp, Homo sapien
gacagccccagaaaataagaagaat

SEQ ID NO: 2400578 - DNA, 25 bp, Homo sapien
cattttcattgtatggtgtctggtc

SEQ ID NO: 2400579 - DNA, 25 bp, Homo sapien
gattgcatcccagtagaaataaagt

SEQ ID NO: 2400580 - DNA, 25 bp, Homo sapien
tggtgttgatcaccaccagatcagc

SEQ ID NO: 2400581 - DNA, 25 bp, Homo sapien
gaaataaagtagcaactagactgaa

SEQ ID NO: 2400582 - DNA, 25 bp, Homo sapien
cagttcttttgactcttagtccaag

SEQ ID NO: 2400583 - DNA, 25 bp, Homo sapien
ccttcctgcaaaggattaaggccat

SEQ ID NO: 2400584 - DNA, 25 bp, Homo sapien
agtccctgatcctggacacagccga

SEQ ID NO: 2400585 - DNA, 25 bp, Homo sapien
tccggctctgcatacgacgctgtag

SEQ ID NO: 2400586 - DNA, 25 bp, Homo sapien
ttgaaataattgtttgatgcccttt

SEQ ID NO: 2400587 - DNA, 25 bp, Homo sapien
caggcttggatgatactgttgatac

SEQ ID NO: 2400588 - DNA, 25 bp, Homo sapien
ctttccttccatgacgcaggtcagg

SEQ ID NO: 2400589 - DNA, 25 bp, Homo sapien
gcctcttgacagttttgctatacat

SEQ ID NO: 2400590 - DNA, 25 bp, Homo sapien
gatactctcgtaacttggacagcct

SEQ ID NO: 2400591 - DNA, 25 bp, Homo sapien
agatggatacgactgccatggacca

SEQ ID NO: 2400592 - DNA, 25 bp, Homo sapien
cagaccttcaactggaaccaccaga

SEQ ID NO: 2400593 - DNA, 25 bp, Homo sapien
gaccttcaactggaaccaccagagt

SEQ ID NO: 2400594 - DNA, 25 bp, Homo sapien
aggagcaagatggatacgactgcca

SEQ ID NO: 2400595 - DNA, 25 bp, Homo sapien
gtcttgaggctcttcttcaggcacc

SEQ ID NO: 2400596 - DNA, 25 bp, Homo sapien
ctcggtcttgaggctcttcttcagg

SEQ ID NO: 2400597 - DNA, 25 bp, Homo sapien
cggtcttgaggctcttcttcaggca

SEQ ID NO: 2400598 - DNA, 25 bp, Homo sapien
cttgaggctcttcttcaggcaccat

SEQ ID NO: 2400599 - DNA, 25 bp, Homo sapien
tgtgcgcacaccctttggacttcct

SEQ ID NO: 2400600 - DNA, 25 bp, Homo sapien
aggtgggtgcagaagctcttgtatc

SEQ ID NO: 2400601 - DNA, 25 bp, Homo sapien
agccaagcccttagatccttcttcg

SEQ ID NO: 2400602 - DNA, 25 bp, Homo sapien
caaacaagccaagcccttagatcct

SEQ ID NO: 2400603 - DNA, 25 bp, Homo sapien
tgcaaaggaagagatgtgacttagg

SEQ ID NO: 2400604 - DNA, 25 bp, Homo sapien
caaaggaagagatgtgacttaggag

SEQ ID NO: 2400605 - DNA, 25 bp, Homo sapien
ctcttgcaaaggaagagatgtgact

SEQ ID NO: 2400606 - DNA, 25 bp, Homo sapien
cttgcaaaggaagagatgtgactta

SEQ ID NO: 2400607 - DNA, 25 bp, Homo sapien
accatgcagggtcagacagaggttg

SEQ ID NO: 2400608 - DNA, 25 bp, Homo sapien
gagggcaccgcacaccatgcagggt

SEQ ID NO: 2400609 - DNA, 25 bp, Homo sapien
accgcacaccatgcagggtcagaca

SEQ ID NO: 2400610 - DNA, 25 bp, Homo sapien
catgcagggtcagacagaggttgca

SEQ ID NO: 2400611 - DNA, 25 bp, Homo sapien
gtggccccttggctcttgagggagg

SEQ ID NO: 2400612 - DNA, 25 bp, Homo sapien
gccccttggctcttgagggaggatg

SEQ ID NO: 2400613 - DNA, 25 bp, Homo sapien
ccttggctcttgagggaggatggga

SEQ ID NO: 2400614 - DNA, 25 bp, Homo sapien
tggccccttggctcttgagggagga

SEQ ID NO: 2400615 - DNA, 25 bp, Homo sapien
aagatggcacgtctagagttactcg

SEQ ID NO: 2400616 - DNA, 25 bp, Homo sapien
gagttactcgtttctctcggcgagc

SEQ ID NO: 2400617 - DNA, 25 bp, Homo sapien
tcggcgagcttgtggtcttgctagc

SEQ ID NO: 2400618 - DNA, 25 bp, Homo sapien
gacttccgcggtatcacagctcata

SEQ ID NO: 2400619 - DNA, 25 bp, Homo sapien
ggttgttcctctccaatagaatagc

SEQ ID NO: 2400620 - DNA, 25 bp, Homo sapien
ctatggttgttcctctccaatagaa

SEQ ID NO: 2400621 - DNA, 25 bp, Homo sapien
caatagaatagctgtaaagagcttc

SEQ ID NO: 2400622 - DNA, 25 bp, Homo sapien
tcctctccaatagaatagctgtaaa

SEQ ID NO: 2400623 - DNA, 25 bp, Homo sapien
attcagactcgcaagaatgaaagcc

SEQ ID NO: 2400624 - DNA, 25 bp, Homo sapien
aattcagactcgcaagaatgaaagc

SEQ ID NO: 2400625 - DNA, 25 bp, Homo sapien
ccggattagtcacctctgggtcagg

SEQ ID NO: 2400626 - DNA, 25 bp, Homo sapien
gtcttcaccggattagtcacctctg

SEQ ID NO: 2400627 - DNA, 25 bp, Homo sapien
ggaccactgtcttcaccggattagt

SEQ ID NO: 2400628 - DNA, 25 bp, Homo sapien
aaggaccactgtcttcaccggatta

SEQ ID NO: 2400629 - DNA, 25 bp, Homo sapien
gaagtagagcaaggagtatgatctg

SEQ ID NO: 2400630 - DNA, 25 bp, Homo sapien
atcctgaacaatcaattgggataac

SEQ ID NO: 2400631 - DNA, 25 bp, Homo sapien
gtatgatctgtaactgatcctgaac

SEQ ID NO: 2400632 - DNA, 25 bp, Homo sapien
taatactactcaactgcagtagtga

SEQ ID NO: 2400633 - DNA, 25 bp, Homo sapien
tgtaaagaatcttcacctatgcctg

SEQ ID NO: 2400634 - DNA, 25 bp, Homo sapien
tgctttgaagcatccgactgtaaag

SEQ ID NO: 2400635 - DNA, 25 bp, Homo sapien
gcatccgactgtaaagaatcttcac

SEQ ID NO: 2400636 - DNA, 25 bp, Homo sapien
taaagaatcttcacctatgcctgtg

SEQ ID NO: 2400637 - DNA, 25 bp, Homo sapien
ctttcgagtggctggtattacaggg

SEQ ID NO: 2400638 - DNA, 25 bp, Homo sapien
ggtattacagggatttgccactatg

SEQ ID NO: 2400639 - DNA, 25 bp, Homo sapien
cgagtggctggtattacagggattt

SEQ ID NO: 2400640 - DNA, 25 bp, Homo sapien
ggctggtattacagggatttgccac

SEQ ID NO: 2400641 - DNA, 25 bp, Homo sapien
ttcactgtgaacaaacaattgaggt

SEQ ID NO: 2400642 - DNA, 25 bp, Homo sapien
cgatctgtaattcactgtgaacaaa

SEQ ID NO: 2400643 - DNA, 25 bp, Homo sapien
ggtaactgactaccttcagacgagg

SEQ ID NO: 2400644 - DNA, 25 bp, Homo sapien
gtaactgactaccttcagacgaggc

SEQ ID NO: 2400645 - DNA, 25 bp, Homo sapien
aaagtaatgagactactacaaggag

SEQ ID NO: 2400646 - DNA, 25 bp, Homo sapien
atttggatggctctcccactagata

SEQ ID NO: 2400647 - DNA, 25 bp, Homo sapien
gccttactgccaaactgaggagcca

SEQ ID NO: 2400648 - DNA, 25 bp, Homo sapien
gaggttacaaattccaagtttgctg

SEQ ID NO: 2400649 - DNA, 25 bp, Homo sapien
accacatcatttaccctccaataat

SEQ ID NO: 2400650 - DNA, 25 bp, Homo sapien
aggcaccacatcatttaccctccaa

SEQ ID NO: 2400651 - DNA, 25 bp, Homo sapien
gcaccacatcatttaccctccaata

SEQ ID NO: 2400652 - DNA, 25 bp, Homo sapien
ctcaggcaccacatcatttaccctc

SEQ ID NO: 2400653 - DNA, 25 bp, Homo sapien
agccattgaagatccaacaaactgc

SEQ ID NO: 2400654 - DNA, 25 bp, Homo sapien
gtaattaaaccagaggataagataa

SEQ ID NO: 2400655 - DNA, 25 bp, Homo sapien
ttgaagatccaacaaactgcagcct

SEQ ID NO: 2400656 - DNA, 25 bp, Homo sapien
cattgaagatccaacaaactgcagc

SEQ ID NO: 2400657 - DNA, 25 bp, Homo sapien
tagcaggctcgatgctgttcatccc

SEQ ID NO: 2400658 - DNA, 25 bp, Homo sapien
gcaggctcgatgctgttcatcccca

SEQ ID NO: 2400659 - DNA, 25 bp, Homo sapien
agcaggctcgatgctgttcatcccc

SEQ ID NO: 2400660 - DNA, 25 bp, Homo sapien
ttagcaggctcgatgctgttcatcc

SEQ ID NO: 2400661 - DNA, 25 bp, Homo sapien
gagttcggccacaataaaccaggga

SEQ ID NO: 2400662 - DNA, 25 bp, Homo sapien
ggtccaatttcaaaacaggccacaa

SEQ ID NO: 2400663 - DNA, 25 bp, Homo sapien
ccgactaggaagttggaggtccagt

SEQ ID NO: 2400664 - DNA, 25 bp, Homo sapien
acaaagctcatcccattatagtgat

SEQ ID NO: 2400665 - DNA, 25 bp, Homo sapien
tcatatgcagagtccttcttcctgc

SEQ ID NO: 2400666 - DNA, 25 bp, Homo sapien
agtcatgagcgtggaacaaaaagcc

SEQ ID NO: 2400667 - DNA, 25 bp, Homo sapien
ccctccaaggcctatcatatgcaga

SEQ ID NO: 2400668 - DNA, 25 bp, Homo sapien
aaagaaacagtcatgagcgtggaac

SEQ ID NO: 2400669 - DNA, 25 bp, Homo sapien
tattaaccacacccgcgctgatggt

SEQ ID NO: 2400670 - DNA, 25 bp, Homo sapien
gtattaaccacacccgcgctgatgg

SEQ ID NO: 2400671 - DNA, 25 bp, Homo sapien
attaaccacacccgcgctgatggtg

SEQ ID NO: 2400672 - DNA, 25 bp, Homo sapien
gggatacatcctgggtgccccacaa

SEQ ID NO: 2400673 - DNA, 25 bp, Homo sapien
aggatggtaaagcctaatagcaccg

SEQ ID NO: 2400674 - DNA, 25 bp, Homo sapien
aaggatggtaaagcctaatagcacc

SEQ ID NO: 2400675 - DNA, 25 bp, Homo sapien
ggatggtaaagcctaatagcaccgg

SEQ ID NO: 2400676 - DNA, 25 bp, Homo sapien
tcaactgactcagctattttacaca

SEQ ID NO: 2400677 - DNA, 25 bp, Homo sapien
caactgactcagctattttacacag

SEQ ID NO: 2400678 - DNA, 25 bp, Homo sapien
tgagagtgccaaaggcacccctcag

SEQ ID NO: 2400679 - DNA, 25 bp, Homo sapien
agtgccaaaggcacccctcagggca

SEQ ID NO: 2400680 - DNA, 25 bp, Homo sapien
tagaattcaaggtgttcttattcaa

SEQ ID NO: 2400681 - DNA, 25 bp, Homo sapien
ccaagcaagggcagtcatattcggg

SEQ ID NO: 2400682 - DNA, 25 bp, Homo sapien
cccttgattagaattcaaggtgttc

SEQ ID NO: 2400683 - DNA, 25 bp, Homo sapien
tgattagaattcaaggtgttcttat

SEQ ID NO: 2400684 - DNA, 25 bp, Homo sapien
gacggaaaaggagccgatcataccc

SEQ ID NO: 2400685 - DNA, 25 bp, Homo sapien
agagtccgacggaaaaggagccgat

SEQ ID NO: 2400686 - DNA, 25 bp, Homo sapien
tcatacccccgacggaaaatatggc

SEQ ID NO: 2400687 - DNA, 25 bp, Homo sapien
gatcatacccccgacggaaaatatg

SEQ ID NO: 2400688 - DNA, 25 bp, Homo sapien
ccttgtccgtcaaagttttattgat

SEQ ID NO: 2400689 - DNA, 25 bp, Homo sapien
cagattctaattcttgtggcctggc

SEQ ID NO: 2400690 - DNA, 25 bp, Homo sapien
aatttccctattccagattctaatt

SEQ ID NO: 2400691 - DNA, 25 bp, Homo sapien
atttccctattccagattctaattc

SEQ ID NO: 2400692 - DNA, 25 bp, Homo sapien
tctaattcttgtggcctggcactca

SEQ ID NO: 2400693 - DNA, 25 bp, Homo sapien
aaactggaaagagccgattgtagca

SEQ ID NO: 2400694 - DNA, 25 bp, Homo sapien
gaccccagtgttgtagccaaactgg

SEQ ID NO: 2400695 - DNA, 25 bp, Homo sapien
gattgtagcaactgtgatggcaaag

SEQ ID NO: 2400696 - DNA, 25 bp, Homo sapien
cgtctcaggagcattgatgacccca

SEQ ID NO: 2400697 - DNA, 25 bp, Homo sapien
gacctatgagtggtatgaaaaggac

SEQ ID NO: 2400698 - DNA, 25 bp, Homo sapien
atgtgaagttaacttggtaaaagtg

SEQ ID NO: 2400699 - DNA, 25 bp, Homo sapien
attatggagctgtattaggagaatc

SEQ ID NO: 2400700 - DNA, 25 bp, Homo sapien
ggacaaacatcaaacgagatttagg

SEQ ID NO: 2400701 - DNA, 25 bp, Homo sapien
cagatttgttgcaacgttgatgtaa

SEQ ID NO: 2400702 - DNA, 25 bp, Homo sapien
ctgaaccagtgacccagggtttccg

SEQ ID NO: 2400703 - DNA, 25 bp, Homo sapien
cagggtttccgcttccctttgctgt

SEQ ID NO: 2400704 - DNA, 25 bp, Homo sapien
ccagggtttccgcttccctttgctg

SEQ ID NO: 2400705 - DNA, 25 bp, Homo sapien
ggttttgtgtaacttggctggtatc

SEQ ID NO: 2400706 - DNA, 25 bp, Homo sapien
ggtatcagtcttcatagtttctctg

SEQ ID NO: 2400707 - DNA, 25 bp, Homo sapien
gaaaacagatgacaggttaatttac

SEQ ID NO: 2400708 - DNA, 25 bp, Homo sapien
actggatttgggctcccaatttgtg

SEQ ID NO: 2400709 - DNA, 25 bp, Homo sapien
gacacggtcagatgacaaacccaat

SEQ ID NO: 2400710 - DNA, 25 bp, Homo sapien
gcagctgcagacagaatctagctaa

SEQ ID NO: 2400711 - DNA, 25 bp, Homo sapien
gcatagagactgtttcaaggcagcg

SEQ ID NO: 2400712 - DNA, 25 bp, Homo sapien
acagcagaggaaccaaggcaacaga

SEQ ID NO: 2400713 - DNA, 25 bp, Homo sapien
tctgacgtgcacagaaaggaacctc

SEQ ID NO: 2400714 - DNA, 25 bp, Homo sapien
cctgtcatcttctgacgtgcacaga

SEQ ID NO: 2400715 - DNA, 25 bp, Homo sapien
tgcctgtcatcttctgacgtgcaca

SEQ ID NO: 2400716 - DNA, 25 bp, Homo sapien
ttctgacgtgcacagaaaggaacct

SEQ ID NO: 2400717 - DNA, 25 bp, Homo sapien
gttggttgtaaggaccactgcattt

SEQ ID NO: 2400718 - DNA, 25 bp, Homo sapien
tgtaaggaccactgcatttagacca

SEQ ID NO: 2400719 - DNA, 25 bp, Homo sapien
tcagttggttgtaaggaccactgca

SEQ ID NO: 2400720 - DNA, 25 bp, Homo sapien
ggttgtaaggaccactgcatttaga

SEQ ID NO: 2400721 - DNA, 25 bp, Homo sapien
gcagagagatgctattaccaaccaa

SEQ ID NO: 2400722 - DNA, 25 bp, Homo sapien
cgaaatgctgaacctaccctgtagt

SEQ ID NO: 2400723 - DNA, 25 bp, Homo sapien
tacaatatcctgatggcatgcactg

SEQ ID NO: 2400724 - DNA, 25 bp, Homo sapien
ttattatacatgaccagggctaggg

SEQ ID NO: 2400725 - DNA, 25 bp, Homo sapien
tagtaacatccttggtattaccaga

SEQ ID NO: 2400726 - DNA, 25 bp, Homo sapien
ccgttgctgtggtgctagtaacatc

SEQ ID NO: 2400727 - DNA, 25 bp, Homo sapien
gcttttgcaaatccgcctccagagc

SEQ ID NO: 2400728 - DNA, 25 bp, Homo sapien
ggtattaccagagctggttagcagt

SEQ ID NO: 2400729 - DNA, 25 bp, Homo sapien
cctcacacagtccttctgaggttgt

SEQ ID NO: 2400730 - DNA, 25 bp, Homo sapien
acacagtccttctgaggttgttaaa

SEQ ID NO: 2400731 - DNA, 25 bp, Homo sapien
cacacagtccttctgaggttgttaa

SEQ ID NO: 2400732 - DNA, 25 bp, Homo sapien
tcacacagtccttctgaggttgtta

SEQ ID NO: 2400733 - DNA, 25 bp, Homo sapien
cagacacatggccaccattgtgaaa

SEQ ID NO: 2400734 - DNA, 25 bp, Homo sapien
cacatggccaccattgtgaaactcc

SEQ ID NO: 2400735 - DNA, 25 bp, Homo sapien
acatggccaccattgtgaaactcca

SEQ ID NO: 2400736 - DNA, 25 bp, Homo sapien
gacacatggccaccattgtgaaact

SEQ ID NO: 2400737 - DNA, 25 bp, Homo sapien
cctaggaattgactccctctccaat

SEQ ID NO: 2400738 - DNA, 25 bp, Homo sapien
tctgctatcctaggaattgactccc

SEQ ID NO: 2400739 - DNA, 25 bp, Homo sapien
tatcctaggaattgactccctctcc

SEQ ID NO: 2400740 - DNA, 25 bp, Homo sapien
ctctctgctatcctaggaattgact

SEQ ID NO: 2400741 - DNA, 25 bp, Homo sapien
gattgaccagaaccatgatggcttc

SEQ ID NO: 2400742 - DNA, 25 bp, Homo sapien
acaagctggcttcaccgcggaagaa

SEQ ID NO: 2400743 - DNA, 25 bp, Homo sapien
tcttcgtgatgttcgaccagttcca

SEQ ID NO: 2400744 - DNA, 25 bp, Homo sapien
ccacatccaggagtttaaggaggct

SEQ ID NO: 2400745 - DNA, 25 bp, Homo sapien
ctgcttcaacgaggaatcctcaggt

SEQ ID NO: 2400746 - DNA, 25 bp, Homo sapien
tcaccaccatgggtgacagcttcac

SEQ ID NO: 2400747 - DNA, 25 bp, Homo sapien
ctcaccaccatgggtgacagcttca

SEQ ID NO: 2400748 - DNA, 25 bp, Homo sapien
gctcaccaccatgggtgacagcttc

SEQ ID NO: 2400749 - DNA, 25 bp, Homo sapien
cccatcgtgggagtgtgctcaagaa

SEQ ID NO: 2400750 - DNA, 25 bp, Homo sapien
gagcagccacccatcgtgggagtgt

SEQ ID NO: 2400751 - DNA, 25 bp, Homo sapien
gccacccatcgtgggagtgtgctca

SEQ ID NO: 2400752 - DNA, 25 bp, Homo sapien
gggagtgtgctcaagaagccatctg

SEQ ID NO: 2400753 - DNA, 25 bp, Homo sapien
cactgaatgaatccagcactgaata

SEQ ID NO: 2400754 - DNA, 25 bp, Homo sapien
gatgcacccgcacagcacttgaact

SEQ ID NO: 2400755 - DNA, 25 bp, Homo sapien
ggtaggtatctttcaaggccaaggc

SEQ ID NO: 2400756 - DNA, 25 bp, Homo sapien
tcttgcacaaatctacaaagctgat

SEQ ID NO: 2400757 - DNA, 25 bp, Homo sapien
ctcccagaccccgcgactgcggttg

SEQ ID NO: 2400758 - DNA, 25 bp, Homo sapien
gcgactgcggttgggccccgcggct

SEQ ID NO: 2400759 - DNA, 25 bp, Homo sapien
cccgcggcttcgctcaaccacgcac

SEQ ID NO: 2400760 - DNA, 25 bp, Homo sapien
tgggccccgcggcttcgctcaacca

SEQ ID NO: 2400761 - DNA, 25 bp, Homo sapien
gccccgcctgcagccgttgggaccc

SEQ ID NO: 2400762 - DNA, 25 bp, Homo sapien
ttctcacctgcgcaccgcacggtcc

SEQ ID NO: 2400763 - DNA, 25 bp, Homo sapien
tcagagcaggggtccggctcgcggt

SEQ ID NO: 2400764 - DNA, 25 bp, Homo sapien
tggcgccgccgttaggagggtgtga

SEQ ID NO: 2400765 - DNA, 25 bp, Homo sapien
tcaggcgtcttcctgcgaccgggcg

SEQ ID NO: 2400766 - DNA, 25 bp, Homo sapien
ttggagtaataaagatcatcccctg

SEQ ID NO: 2400767 - DNA, 25 bp, Homo sapien
tttcggctttggagtaataaagatc

SEQ ID NO: 2400768 - DNA, 25 bp, Homo sapien
aagactctctaggttttcggctttg

SEQ ID NO: 2400769 - DNA, 25 bp, Homo sapien
gccccgcggtcgttctctccacctc

SEQ ID NO: 2400770 - DNA, 25 bp, Homo sapien
accctgaacaatcaattgggataac

SEQ ID NO: 2400771 - DNA, 25 bp, Homo sapien
tagtggggggatggggaagagtgga

SEQ ID NO: 2400772 - DNA, 25 bp, Homo sapien
taatactagtgaagtgccgtagtgg

SEQ ID NO: 2400773 - DNA, 25 bp, Homo sapien
aactgaccctgaacaatcaattggg

SEQ ID NO: 2400774 - DNA, 25 bp, Homo sapien
gatgctcatcgtggaaaaaggagtc

SEQ ID NO: 2400775 - DNA, 25 bp, Homo sapien
tgggcccacctacgagattcttatt

SEQ ID NO: 2400776 - DNA, 25 bp, Homo sapien
tgcccagcccaataagtgatgctca

SEQ ID NO: 2400777 - DNA, 25 bp, Homo sapien
tattcagtaggtctcgtgtgatgcc

SEQ ID NO: 2400778 - DNA, 25 bp, Homo sapien
aattgctgggagtgcgtgaagtact

SEQ ID NO: 2400779 - DNA, 25 bp, Homo sapien
gaagtactgcagctagctaaaattt

SEQ ID NO: 2400780 - DNA, 25 bp, Homo sapien
attccatttgtaatctctaactaaa

SEQ ID NO: 2400781 - DNA, 25 bp, Homo sapien
gagtgcgtgaagtactgcagctagc

SEQ ID NO: 2400782 - DNA, 25 bp, Homo sapien
gcagcgccaagtcgggctggcgggc

SEQ ID NO: 2400783 - DNA, 25 bp, Homo sapien
catgcggccgccgggctattgggag

SEQ ID NO: 2400784 - DNA, 25 bp, Homo sapien
ccgccgggctattgggaggtgggtg

SEQ ID NO: 2400785 - DNA, 25 bp, Homo sapien
ccgcagcgccaagtcgggctggcgg

SEQ ID NO: 2400786 - DNA, 25 bp, Homo sapien
tcagtgctcgctgggggcagggcgg

SEQ ID NO: 2400787 - DNA, 25 bp, Homo sapien
agtgctcgctgggggcagggcggcg

SEQ ID NO: 2400788 - DNA, 25 bp, Homo sapien
cagtgctcgctgggggcagggcggc

SEQ ID NO: 2400789 - DNA, 25 bp, Homo sapien
tgctcgctgggggcagggcggcgaa

SEQ ID NO: 2400790 - DNA, 25 bp, Homo sapien
gatttgttactagatgattcatcgg

SEQ ID NO: 2400791 - DNA, 25 bp, Homo sapien
ggacgttggtgagaaccgcagtttc

SEQ ID NO: 2400792 - DNA, 25 bp, Homo sapien
aaggcccccgatcaaaaagacagat

SEQ ID NO: 2400793 - DNA, 25 bp, Homo sapien
tttcagccacgccagtgcagcgaag

SEQ ID NO: 2400794 - DNA, 25 bp, Homo sapien
tggtgcctcgactccatctgcacat

SEQ ID NO: 2400795 - DNA, 25 bp, Homo sapien
acagggatgccacactctaagcctc

SEQ ID NO: 2400796 - DNA, 25 bp, Homo sapien
tccacagggatgccacactctaagc

SEQ ID NO: 2400797 - DNA, 25 bp, Homo sapien
cacccctctggtgcctcgactccat

SEQ ID NO: 2400798 - DNA, 25 bp, Homo sapien
aggtcaccttttcaagctaaagcac

SEQ ID NO: 2400799 - DNA, 25 bp, Homo sapien
ccagagtaacaatagaaaatccata

SEQ ID NO: 2400800 - DNA, 25 bp, Homo sapien
gaaccagagtaacaatagaaaatcc

SEQ ID NO: 2400801 - DNA, 25 bp, Homo sapien
accttttcaagctaaagcacacttg

SEQ ID NO: 2400802 - DNA, 25 bp, Homo sapien
ctcgaacccctgaccgcccgcctag

SEQ ID NO: 2400803 - DNA, 25 bp, Homo sapien
cattcatcctctcaagtgtgggcta

SEQ ID NO: 2400804 - DNA, 25 bp, Homo sapien
aaccaaaatactgtcactgacaagg

SEQ ID NO: 2400805 - DNA, 25 bp, Homo sapien
gcatccggcctcagctacgtgcatt

SEQ ID NO: 2400806 - DNA, 25 bp, Homo sapien
gagggaacagtgagaactaagaacc

SEQ ID NO: 2400807 - DNA, 25 bp, Homo sapien
ttggatggctctcccacgagatagg

SEQ ID NO: 2400808 - DNA, 25 bp, Homo sapien
caaaagtaatgagactactacaaga

SEQ ID NO: 2400809 - DNA, 25 bp, Homo sapien
actactacaagaaggagttatttca

SEQ ID NO: 2400810 - DNA, 25 bp, Homo sapien
gaggttacaaattccaagtttgcta

SEQ ID NO: 2400811 - DNA, 25 bp, Homo sapien
aatcagtagctttattatataggta

SEQ ID NO: 2400812 - DNA, 25 bp, Homo sapien
aaatcagtagctttattatataggt

SEQ ID NO: 2400813 - DNA, 25 bp, Homo sapien
gaaatcagtagctttattatatagg

SEQ ID NO: 2400814 - DNA, 25 bp, Homo sapien
ggaaatcagtagctttattatatag

SEQ ID NO: 2400815 - DNA, 25 bp, Homo sapien
ttgaagatccaacaaaccgcagcct

SEQ ID NO: 2400816 - DNA, 25 bp, Homo sapien
catggagtgcgtgggatgagaaagg

SEQ ID NO: 2400817 - DNA, 25 bp, Homo sapien
agccattgaagatccaacaaaccgc

SEQ ID NO: 2400818 - DNA, 25 bp, Homo sapien
ttaagtagcagcattcagaagcgtc

SEQ ID NO: 2400819 - DNA, 25 bp, Homo sapien
tgaagataataaaaacgtaggctcc

SEQ ID NO: 2400820 - DNA, 25 bp, Homo sapien
caggtgtgtgctaccgcaatggtgt

SEQ ID NO: 2400821 - DNA, 25 bp, Homo sapien
cactgtgtctggccgcaaattaaac

SEQ ID NO: 2400822 - DNA, 25 bp, Homo sapien
ttgcttccatcgagcaggctagagt

SEQ ID NO: 2400823 - DNA, 25 bp, Homo sapien
ggagtcttgcttccatcgagcaggc

SEQ ID NO: 2400824 - DNA, 25 bp, Homo sapien
gagttcggccacaataaaccaggga

SEQ ID NO: 2400825 - DNA, 25 bp, Homo sapien
acaaagctcatcccattatagttat

SEQ ID NO: 2400826 - DNA, 25 bp, Homo sapien
ccgactaggaagttggaggtccagt

SEQ ID NO: 2400827 - DNA, 25 bp, Homo sapien
gcctggtccaatttcaaagaaggct

SEQ ID NO: 2400828 - DNA, 25 bp, Homo sapien
tagtatctaggttcccagaagcaat

SEQ ID NO: 2400829 - DNA, 25 bp, Homo sapien
ttaaagacagtgtaacctagtatct

SEQ ID NO: 2400830 - DNA, 25 bp, Homo sapien
aagacagtgtaacctagtatctagg

SEQ ID NO: 2400831 - DNA, 25 bp, Homo sapien
gtaacctagtatctaggttcccaga

SEQ ID NO: 2400832 - DNA, 25 bp, Homo sapien
cgcgcccagctgaggattgaatttt

SEQ ID NO: 2400833 - DNA, 25 bp, Homo sapien
aatggcaccatctcaacttaccaca

SEQ ID NO: 2400834 - DNA, 25 bp, Homo sapien
cgcccagctgaggattgaatttttc

SEQ ID NO: 2400835 - DNA, 25 bp, Homo sapien
ccagctgaggattgaatttttcaat

SEQ ID NO: 2400836 - DNA, 25 bp, Homo sapien
tcatatgcagagtccttcttcctgc

SEQ ID NO: 2400837 - DNA, 25 bp, Homo sapien
agtcatgagcgtggaacaaaaagcc

SEQ ID NO: 2400838 - DNA, 25 bp, Homo sapien
ccctccaaggcctatcatatgcaga

SEQ ID NO: 2400839 - DNA, 25 bp, Homo sapien
aaagaaacagtcatgagcgtggaac

SEQ ID NO: 2400840 - DNA, 25 bp, Homo sapien
tctacagctggtgagtcagaagcac

SEQ ID NO: 2400841 - DNA, 25 bp, Homo sapien
aatcatctaagcagacaggcccagc

SEQ ID NO: 2400842 - DNA, 25 bp, Homo sapien
tatctgaacccgtggaagctgacag

SEQ ID NO: 2400843 - DNA, 25 bp, Homo sapien
tacggaactgattgcacacctcacg

SEQ ID NO: 2400844 - DNA, 25 bp, Homo sapien
attaaccacacccgcgccgatggtg

SEQ ID NO: 2400845 - DNA, 25 bp, Homo sapien
tattaaccacacccgcgccgatggt

SEQ ID NO: 2400846 - DNA, 25 bp, Homo sapien
gtattaaccacacccgcgccgatgg

SEQ ID NO: 2400847 - DNA, 25 bp, Homo sapien
gatgcaattctgcacaccagttaca

SEQ ID NO: 2400848 - DNA, 25 bp, Homo sapien
taggttttcgttcaatactaatatc

SEQ ID NO: 2400849 - DNA, 25 bp, Homo sapien
tctgtatcttatctcctagtctgga

SEQ ID NO: 2400850 - DNA, 25 bp, Homo sapien
tactaatatcccttctgcaaatgaa

SEQ ID NO: 2400851 - DNA, 25 bp, Homo sapien
aaatgctagcttccgttgtgccgcc

SEQ ID NO: 2400852 - DNA, 25 bp, Homo sapien
catggaatacaagggctacctgcca

SEQ ID NO: 2400853 - DNA, 25 bp, Homo sapien
taaacaggcacagaactaacgcaag

SEQ ID NO: 2400854 - DNA, 25 bp, Homo sapien
cagctagggagttgcctcaggtgca

SEQ ID NO: 2400855 - DNA, 25 bp, Homo sapien
gtttgaccctaaagtatcacactca

SEQ ID NO: 2400856 - DNA, 25 bp, Homo sapien
tgaaatactttaagacacgtttgac

SEQ ID NO: 2400857 - DNA, 25 bp, Homo sapien
ccatgcccggcattttaagtgaaat

SEQ ID NO: 2400858 - DNA, 25 bp, Homo sapien
actacagaggcacaccgccaccatg

SEQ ID NO: 2400859 - DNA, 25 bp, Homo sapien
gggatacatcctgggtgccccacaa

SEQ ID NO: 2400860 - DNA, 25 bp, Homo sapien
tcattcttcctgtaaggcagccagg

SEQ ID NO: 2400861 - DNA, 25 bp, Homo sapien
aaagtaggtccagtacaatcatccc

SEQ ID NO: 2400862 - DNA, 25 bp, Homo sapien
gtaatcagaaccctcctcacttgga

SEQ ID NO: 2400863 - DNA, 25 bp, Homo sapien
tgaggtgatgggtagcatccattcc

SEQ ID NO: 2400864 - DNA, 25 bp, Homo sapien
tggtaaaacccagtagcagcggcca

SEQ ID NO: 2400865 - DNA, 25 bp, Homo sapien
gaaggatggtaaaacccagtagcag

SEQ ID NO: 2400866 - DNA, 25 bp, Homo sapien
gtaaaacccagtagcagcggccata

SEQ ID NO: 2400867 - DNA, 25 bp, Homo sapien
gatggtaaaacccagtagcagcggc

SEQ ID NO: 2400868 - DNA, 25 bp, Homo sapien
tcttcagtgctttacctatgttaac

SEQ ID NO: 2400869 - DNA, 25 bp, Homo sapien
catatgtaattgaacatgtgccaga

SEQ ID NO: 2400870 - DNA, 25 bp, Homo sapien
ttaatgacccatgaaactaacactc

SEQ ID NO: 2400871 - DNA, 25 bp, Homo sapien
gcttcttcagctactatctattatc

SEQ ID NO: 2400872 - DNA, 25 bp, Homo sapien
catttcaaccgacttagctacttta

SEQ ID NO: 2400873 - DNA, 25 bp, Homo sapien
agcatttcaaccgacttagctactt

SEQ ID NO: 2400874 - DNA, 25 bp, Homo sapien
tcagcatttcaaccgacttagctac

SEQ ID NO: 2400875 - DNA, 25 bp, Homo sapien
gcatttcaaccgacttagctacttt

SEQ ID NO: 2400876 - DNA, 25 bp, Homo sapien
tagaattcaaggtgttcttattcaa

SEQ ID NO: 2400877 - DNA, 25 bp, Homo sapien
cccttgattagaattcaaggtgttc

SEQ ID NO: 2400878 - DNA, 25 bp, Homo sapien
tgattagaattcaaggtgttcttat

SEQ ID NO: 2400879 - DNA, 25 bp, Homo sapien
ccaagcaagggcagtcatattcggg

SEQ ID NO: 2400880 - DNA, 25 bp, Homo sapien
agagtccgacggaaaaggagccgat

SEQ ID NO: 2400881 - DNA, 25 bp, Homo sapien
gacggaaaaggagccgatcataccc

SEQ ID NO: 2400882 - DNA, 25 bp, Homo sapien
tcatacccccgacggaaaatatggc

SEQ ID NO: 2400883 - DNA, 25 bp, Homo sapien
gatcatacccccgacggaaaatatg

SEQ ID NO: 2400884 - DNA, 25 bp, Homo sapien
ccttgtccgtcaaagttttattgat

SEQ ID NO: 2400885 - DNA, 25 bp, Homo sapien
cctaagggataatacaggatgtgca

SEQ ID NO: 2400886 - DNA, 25 bp, Homo sapien
gaatttatgttaactctcgctggaa

SEQ ID NO: 2400887 - DNA, 25 bp, Homo sapien
gagctttgtgcttcgattagatgac

SEQ ID NO: 2400888 - DNA, 25 bp, Homo sapien
catcactatgaggtgaaagagtggg

SEQ ID NO: 2400889 - DNA, 25 bp, Homo sapien
ctgtgatggcaaatatcagagctgg

SEQ ID NO: 2400890 - DNA, 25 bp, Homo sapien
agcaactgtgatggcaaatatcaga

SEQ ID NO: 2400891 - DNA, 25 bp, Homo sapien
tgaccccagtgttgtagccaaattg

SEQ ID NO: 2400892 - DNA, 25 bp, Homo sapien
attgtagcaactgtgatggcaaata

SEQ ID NO: 2400893 - DNA, 25 bp, Homo sapien
gaattccactcacgaactgggaggg

SEQ ID NO: 2400894 - DNA, 25 bp, Homo sapien
tcagccgggcgagacattttccatt

SEQ ID NO: 2400895 - DNA, 25 bp, Homo sapien
tgtctcagtcccagctaagcatcgg

SEQ ID NO: 2400896 - DNA, 25 bp, Homo sapien
tttcaggtcgggcagattaggcagc

SEQ ID NO: 2400897 - DNA, 25 bp, Homo sapien
tccgggtgactttcctatgataagg

SEQ ID NO: 2400898 - DNA, 25 bp, Homo sapien
caaagagaactgatgaagcggcagc

SEQ ID NO: 2400899 - DNA, 25 bp, Homo sapien
cctcagtggcatatggttacctaaa

SEQ ID NO: 2400900 - DNA, 25 bp, Homo sapien
gaagcaaacacaacttctccgggtg

SEQ ID NO: 2400901 - DNA, 25 bp, Homo sapien
gggtctcgctgggatcatgactatt

SEQ ID NO: 2400902 - DNA, 25 bp, Homo sapien
gatccaaagtcttaccattacagca

SEQ ID NO: 2400903 - DNA, 25 bp, Homo sapien
tataatctccgcaaagggtggagcc

SEQ ID NO: 2400904 - DNA, 25 bp, Homo sapien
tcaaaatgtccttctcagcagcaag

SEQ ID NO: 2400905 - DNA, 25 bp, Homo sapien
tctagagttcatatagaaggccaca

SEQ ID NO: 2400906 - DNA, 25 bp, Homo sapien
gttgatgctgacactcaatctagag

SEQ ID NO: 2400907 - DNA, 25 bp, Homo sapien
ggtgattcagattcctcagataaaa

SEQ ID NO: 2400908 - DNA, 25 bp, Homo sapien
gggaagtgactgcagtcttatttca

SEQ ID NO: 2400909 - DNA, 25 bp, Homo sapien
gacaacatctttatctccctcagcg

SEQ ID NO: 2400910 - DNA, 25 bp, Homo sapien
tcaaagcggatcaaatactctggtc

SEQ ID NO: 2400911 - DNA, 25 bp, Homo sapien
tcctcctatggaatttatcctcctg

SEQ ID NO: 2400912 - DNA, 25 bp, Homo sapien
ctgttgatgccaccgagcgatacga

SEQ ID NO: 2400913 - DNA, 25 bp, Homo sapien
cctagaaatggagcctgttcttgcc

SEQ ID NO: 2400914 - DNA, 25 bp, Homo sapien
ccttttacgcctagaaatggagcct

SEQ ID NO: 2400915 - DNA, 25 bp, Homo sapien
ttacgcctagaaatggagcctgttc

SEQ ID NO: 2400916 - DNA, 25 bp, Homo sapien
aaatggagcctgttcttgccccttc

SEQ ID NO: 2400917 - DNA, 25 bp, Homo sapien
tatgacagattgaatggcccacaag

SEQ ID NO: 2400918 - DNA, 25 bp, Homo sapien
caaaaagttgtaggatcattgggcc

SEQ ID NO: 2400919 - DNA, 25 bp, Homo sapien
gggccattctaaccctaagtcagag

SEQ ID NO: 2400920 - DNA, 25 bp, Homo sapien
acaatacatctgagtgggacgcaca

SEQ ID NO: 2400921 - DNA, 25 bp, Homo sapien
ctccctttcttgcactcgtctttat

SEQ ID NO: 2400922 - DNA, 25 bp, Homo sapien
ccggagagccttgcaattttcagga

SEQ ID NO: 2400923 - DNA, 25 bp, Homo sapien
caattttcaggaatcggcgtcttct

SEQ ID NO: 2400924 - DNA, 25 bp, Homo sapien
gtcccgccgactcccacatgctggg

SEQ ID NO: 2400925 - DNA, 25 bp, Homo sapien
ccgccggagagccttgcaattttca

SEQ ID NO: 2400926 - DNA, 25 bp, Homo sapien
ctgaaccagtgacccagggtttccg

SEQ ID NO: 2400927 - DNA, 25 bp, Homo sapien
acgttgatgtaaacctggccgtctt

SEQ ID NO: 2400928 - DNA, 25 bp, Homo sapien
cagggtttccgcttccctttgctgt

SEQ ID NO: 2400929 - DNA, 25 bp, Homo sapien
cagatttgttgcaacgttgatgtaa

SEQ ID NO: 2400930 - DNA, 25 bp, Homo sapien
aatgaattttgttgttcgtgacctt

SEQ ID NO: 2400931 - DNA, 25 bp, Homo sapien
tgtctatgagtactatgtggtggtg

SEQ ID NO: 2400932 - DNA, 25 bp, Homo sapien
ttttcactgagcatagtgtctatga

SEQ ID NO: 2400933 - DNA, 25 bp, Homo sapien
tgttcgtgacctttaaatggaacca

SEQ ID NO: 2400934 - DNA, 25 bp, Homo sapien
tgggattacttacctcctcaagaaa

SEQ ID NO: 2400935 - DNA, 25 bp, Homo sapien
tcactaggggtcctaaaagataaga

SEQ ID NO: 2400936 - DNA, 25 bp, Homo sapien
aagtgggattacttacctcctcaag

SEQ ID NO: 2400937 - DNA, 25 bp, Homo sapien
caaaatagctacatgtctcactagg

SEQ ID NO: 2400938 - DNA, 25 bp, Homo sapien
tacgtgctatctgcttgtacggaag

SEQ ID NO: 2400939 - DNA, 25 bp, Homo sapien
ccctcgttgtaggagaacatcttct

SEQ ID NO: 2400940 - DNA, 25 bp, Homo sapien
tcacaacagaggcaagggtacatat

SEQ ID NO: 2400941 - DNA, 25 bp, Homo sapien
cctactggtcttggaataactatga

SEQ ID NO: 2400942 - DNA, 25 bp, Homo sapien
ttcggcgaccacgaccctgatcagt

SEQ ID NO: 2400943 - DNA, 25 bp, Homo sapien
gattgtgacacgctcaaggctcagg

SEQ ID NO: 2400944 - DNA, 25 bp, Homo sapien
tgacacgctcaaggctcaggtgatt

SEQ ID NO: 2400945 - DNA, 25 bp, Homo sapien
gcaaaaagattgtgacacgctcaag

SEQ ID NO: 2400946 - DNA, 25 bp, Homo sapien
actgtatattttgccaactgaaacc

SEQ ID NO: 2400947 - DNA, 25 bp, Homo sapien
aacagcaaagcttgtagcattaagg

SEQ ID NO: 2400948 - DNA, 25 bp, Homo sapien
cttcaacagcaaagcttgtagcatt

SEQ ID NO: 2400949 - DNA, 25 bp, Homo sapien
ctagttgtgacatctaactgctcaa

SEQ ID NO: 2400950 - DNA, 25 bp, Homo sapien
tagttgtgacatctaactgctcaat

SEQ ID NO: 2400951 - DNA, 25 bp, Homo sapien
gttgtgacatctaactgctcaatga

SEQ ID NO: 2400952 - DNA, 25 bp, Homo sapien
agttgtgacatctaactgctcaatg

SEQ ID NO: 2400953 - DNA, 25 bp, Homo sapien
ggatccctccgagcgccccctcagg

SEQ ID NO: 2400954 - DNA, 25 bp, Homo sapien
ggggatccctccgagcgccccctca

SEQ ID NO: 2400955 - DNA, 25 bp, Homo sapien
cctccgagcgccccctcaggcgtct

SEQ ID NO: 2400956 - DNA, 25 bp, Homo sapien
tccgagcgccccctcaggcgtcttc

SEQ ID NO: 2400957 - DNA, 25 bp, Homo sapien
gtggtgccccggctatcgccgcggg

SEQ ID NO: 2400958 - DNA, 25 bp, Homo sapien
tatcgccgcgggctggccggctggg

SEQ ID NO: 2400959 - DNA, 25 bp, Homo sapien
ggaggtggtgccccggctatcgccg

SEQ ID NO: 2400960 - DNA, 25 bp, Homo sapien
ggctatcgccgcgggctggccggct

SEQ ID NO: 2400961 - DNA, 25 bp, Homo sapien
ctgaaaatataaaaagttctgtgct

SEQ ID NO: 2400962 - DNA, 25 bp, Homo sapien
aaaatataaaaagttctgtgctctc

SEQ ID NO: 2400963 - DNA, 25 bp, Homo sapien
tataaaaagttctgtgctctctcat

SEQ ID NO: 2400964 - DNA, 25 bp, Homo sapien
aatataaaaagttctgtgctctctc

SEQ ID NO: 2400965 - DNA, 25 bp, Homo sapien
gagcagtagcccactgcccttttct

SEQ ID NO: 2400966 - DNA, 25 bp, Homo sapien
tccataaatgccaaaggcaatgcaa

SEQ ID NO: 2400967 - DNA, 25 bp, Homo sapien
atgccaaaggcaatgcaacccagtg

SEQ ID NO: 2400968 - DNA, 25 bp, Homo sapien
ctgattgagcagtagcccactgccc

SEQ ID NO: 2400969 - DNA, 25 bp, Homo sapien
ggcttccagggatgaaagaaactca

SEQ ID NO: 2400970 - DNA, 25 bp, Homo sapien
ccctggtcttttgaggcctggtgtt

SEQ ID NO: 2400971 - DNA, 25 bp, Homo sapien
tcttttgaggcctggtgtttgtttc

SEQ ID NO: 2400972 - DNA, 25 bp, Homo sapien
tgggcttccagggatgaaagaaact

SEQ ID NO: 2400973 - DNA, 25 bp, Homo sapien
tacgacttttgctaacgatcgcggc

SEQ ID NO: 2400974 - DNA, 25 bp, Homo sapien
tgtgatagattaccaacgcagccaa

SEQ ID NO: 2400975 - DNA, 25 bp, Homo sapien
aatcaacaagcgatcttgggccggg

SEQ ID NO: 2400976 - DNA, 25 bp, Homo sapien
tgatttgaagaggtgcgtccggaac

SEQ ID NO: 2400977 - DNA, 25 bp, Homo sapien
ccccagtttcagtaggacgtgtcct

SEQ ID NO: 2400978 - DNA, 25 bp, Homo sapien
tatccctgaggtcctccagaaagga

SEQ ID NO: 2400979 - DNA, 25 bp, Homo sapien
cggcccccagtttcagtaggacgtg

SEQ ID NO: 2400980 - DNA, 25 bp, Homo sapien
taggacgtgtccttatccctgaggt

SEQ ID NO: 2400981 - DNA, 25 bp, Homo sapien
ttaacagaatgaaacgccggagttg

SEQ ID NO: 2400982 - DNA, 25 bp, Homo sapien
caaagacagtcctgagaaagctggg

SEQ ID NO: 2400983 - DNA, 25 bp, Homo sapien
tatacggtgcgcactagggactctc

SEQ ID NO: 2400984 - DNA, 25 bp, Homo sapien
cagtgagttgtcatcccgggtagac

SEQ ID NO: 2400985 - DNA, 25 bp, Homo sapien
gacaggagtccttacgttcagaagc

SEQ ID NO: 2400986 - DNA, 25 bp, Homo sapien
aaagaagaggaatcggctttcagcc

SEQ ID NO: 2400987 - DNA, 25 bp, Homo sapien
tcctcgtgcctagacagtggaacgg

SEQ ID NO: 2400988 - DNA, 25 bp, Homo sapien
gctcctatctccagcagacagaaag

SEQ ID NO: 2400989 - DNA, 25 bp, Homo sapien
cccctggagagtgggctgtcatgaa

SEQ ID NO: 2400990 - DNA, 25 bp, Homo sapien
caagggagctcctggatttgaaccc

SEQ ID NO: 2400991 - DNA, 25 bp, Homo sapien
catgctgaggaaaagggttatcgga

SEQ ID NO: 2400992 - DNA, 25 bp, Homo sapien
tgatttacacaacccaaccagtggt

SEQ ID NO: 2400993 - DNA, 25 bp, Homo sapien
ttccaagaggtttggcgttccgctc

SEQ ID NO: 2400994 - DNA, 25 bp, Homo sapien
gggtgcgagtggcttgaatctccca

SEQ ID NO: 2400995 - DNA, 25 bp, Homo sapien
tacaggatttgcaagggtaggatca

SEQ ID NO: 2400996 - DNA, 25 bp, Homo sapien
tcccatgatgttggagggcacttag

SEQ ID NO: 2400997 - DNA, 25 bp, Homo sapien
gggtatatggtctcacaagttgttg

SEQ ID NO: 2400998 - DNA, 25 bp, Homo sapien
cagaagctcactgcctataagagga

SEQ ID NO: 2400999 - DNA, 25 bp, Homo sapien
tgtgccaccacccataatgctttgc

SEQ ID NO: 2401000 - DNA, 25 bp, Homo sapien
ggtttggtgagtcctttgtgccacc

SEQ ID NO: 2401001 - DNA, 25 bp, Homo sapien
tagatgaggccacgttgtgatacaa

SEQ ID NO: 2401002 - DNA, 25 bp, Homo sapien
taaaaaatctgtagtccagaccctc

SEQ ID NO: 2401003 - DNA, 25 bp, Homo sapien
caagaagtcgttttatcatgcctcc

SEQ ID NO: 2401004 - DNA, 25 bp, Homo sapien
gccagaaatttcagacgtttgacac

SEQ ID NO: 2401005 - DNA, 25 bp, Homo sapien
tttcactcacgtaggagaacaagaa

SEQ ID NO: 2401006 - DNA, 25 bp, Homo sapien
tcaacaccacacgacaacaaagcat

SEQ ID NO: 2401007 - DNA, 25 bp, Homo sapien
caaagcattaggatatatgatcatc

SEQ ID NO: 2401008 - DNA, 25 bp, Homo sapien
taggatatatgatcatctttcactc

SEQ ID NO: 2401009 - DNA, 25 bp, Homo sapien
tgttaagtgcccttgctgggtccca

SEQ ID NO: 2401010 - DNA, 25 bp, Homo sapien
gaaccgctggattgattctttgaca

SEQ ID NO: 2401011 - DNA, 25 bp, Homo sapien
tctgtgtaccgtttgagaaccgctg

SEQ ID NO: 2401012 - DNA, 25 bp, Homo sapien
tatgtgattgcctaagagcccctgc

SEQ ID NO: 2401013 - DNA, 25 bp, Homo sapien
tctgaaatgacattgtttgagggac

SEQ ID NO: 2401014 - DNA, 25 bp, Homo sapien
cccaagagggcataaaggaagggat

SEQ ID NO: 2401015 - DNA, 25 bp, Homo sapien
tgcatacatgatcccaggacatcag

SEQ ID NO: 2401016 - DNA, 25 bp, Homo sapien
tatcatgataacagagggcagcagg

SEQ ID NO: 2401017 - DNA, 25 bp, Homo sapien
aagcggcccctttgcattcggaaga

SEQ ID NO: 2401018 - DNA, 25 bp, Homo sapien
gaaaccttgtggtagctcagactcg

SEQ ID NO: 2401019 - DNA, 25 bp, Homo sapien
gggtgttggcacttgatcgtcatct

SEQ ID NO: 2401020 - DNA, 25 bp, Homo sapien
catctgtgaattggcctaaattgta

SEQ ID NO: 2401021 - DNA, 25 bp, Homo sapien
ctagtgatcgttattgccacgaggg

SEQ ID NO: 2401022 - DNA, 25 bp, Homo sapien
ttcgtgatcttcaataggaaaccca

SEQ ID NO: 2401023 - DNA, 25 bp, Homo sapien
aaaagcatcagagttatccagtggg

SEQ ID NO: 2401024 - DNA, 25 bp, Homo sapien
tccagtgggctggtttcgtgatctt

SEQ ID NO: 2401025 - DNA, 25 bp, Homo sapien
catcagagttatccagtgggctggt

SEQ ID NO: 2401026 - DNA, 25 bp, Homo sapien
agaacccctagggagtgaatctgca

SEQ ID NO: 2401027 - DNA, 25 bp, Homo sapien
tgacttgttaacctagcagaacccc

SEQ ID NO: 2401028 - DNA, 25 bp, Homo sapien
gggactgtccaaggatgatcatttg

SEQ ID NO: 2401029 - DNA, 25 bp, Homo sapien
ttttaggtgagaccacatcagcagg

SEQ ID NO: 2401030 - DNA, 25 bp, Homo sapien
ttctagtggatctccataaaagtct

SEQ ID NO: 2401031 - DNA, 25 bp, Homo sapien
aagtctggataatctaatgagctgg

SEQ ID NO: 2401032 - DNA, 25 bp, Homo sapien
caatgttttcaagagacctgttttc

SEQ ID NO: 2401033 - DNA, 25 bp, Homo sapien
ggagagaccaaatttgtagccacat

SEQ ID NO: 2401034 - DNA, 25 bp, Homo sapien
tgaataccacaagacagcgatccag

SEQ ID NO: 2401035 - DNA, 25 bp, Homo sapien
ccaagtgagccagcgagaagggcaa

SEQ ID NO: 2401036 - DNA, 25 bp, Homo sapien
tagagcaggccatccctacattgcg

SEQ ID NO: 2401037 - DNA, 25 bp, Homo sapien
gatgagcttgcataggaacctgccg

SEQ ID NO: 2401038 - DNA, 25 bp, Homo sapien
ccattgcctggcaatcccagtaaaa

SEQ ID NO: 2401039 - DNA, 25 bp, Homo sapien
aaaaagtaaggctgagaatgaccat

SEQ ID NO: 2401040 - DNA, 25 bp, Homo sapien
tcccagtaaaaaagtaaggctgaga

SEQ ID NO: 2401041 - DNA, 25 bp, Homo sapien
gcctggcaatcccagtaaaaaagta

SEQ ID NO: 2401042 - DNA, 25 bp, Homo sapien
tgagagtaggtcagttgaattggtc

SEQ ID NO: 2401043 - DNA, 25 bp, Homo sapien
cagttgaattggtctcagcagagaa

SEQ ID NO: 2401044 - DNA, 25 bp, Homo sapien
gctgtgagagtaggtcagttgaatt

SEQ ID NO: 2401045 - DNA, 25 bp, Homo sapien
taggtcagttgaattggtctcagca

SEQ ID NO: 2401046 - DNA, 25 bp, Homo sapien
cctccgcgttgtggcatgggtcaga

SEQ ID NO: 2401047 - DNA, 25 bp, Homo sapien
tcttttttcagttagcagtctccac

SEQ ID NO: 2401048 - DNA, 25 bp, Homo sapien
tatgtaccataaggaatacccgacc

SEQ ID NO: 2401049 - DNA, 25 bp, Homo sapien
agatatctgatctaagtggaatcac

SEQ ID NO: 2401050 - DNA, 25 bp, Homo sapien
aaaactgagacagtagctgaaggct

SEQ ID NO: 2401051 - DNA, 25 bp, Homo sapien
tggtccccacacttagccacagtga

SEQ ID NO: 2401052 - DNA, 25 bp, Homo sapien
agtagctgaaggcttcagcacctgg

SEQ ID NO: 2401053 - DNA, 25 bp, Homo sapien
tggatgtctccacgagtcctgtctg

SEQ ID NO: 2401054 - DNA, 25 bp, Homo sapien
tcatggaagcaaacccacgatgatg

SEQ ID NO: 2401055 - DNA, 25 bp, Homo sapien
cacgatgatgcactgaagaggtagc

SEQ ID NO: 2401056 - DNA, 25 bp, Homo sapien
ggatgggtagaaatttgtcaggcaa

SEQ ID NO: 2401057 - DNA, 25 bp, Homo sapien
tgtcaggcaatagtactgtaaaata

SEQ ID NO: 2401058 - DNA, 25 bp, Homo sapien
tccagctgggttctgaataggatct

SEQ ID NO: 2401059 - DNA, 25 bp, Homo sapien
tctgaataggatcttccggaaggac

SEQ ID NO: 2401060 - DNA, 25 bp, Homo sapien
ctgaataggatcttccggaaggaca

SEQ ID NO: 2401061 - DNA, 25 bp, Homo sapien
tgaataggatcttccggaaggacat

SEQ ID NO: 2401062 - DNA, 25 bp, Homo sapien
cagacaaattagaggcaggtttgct

SEQ ID NO: 2401063 - DNA, 25 bp, Homo sapien
gagattagactgttcctcacgtcct

SEQ ID NO: 2401064 - DNA, 25 bp, Homo sapien
actgctaaattgaagattacgtcca

SEQ ID NO: 2401065 - DNA, 25 bp, Homo sapien
tcacgtcctcgccagggataaatgt

SEQ ID NO: 2401066 - DNA, 25 bp, Homo sapien
tgccattatccaagacggtgagccg

SEQ ID NO: 2401067 - DNA, 25 bp, Homo sapien
taacgagagtcacgcacttgcaggc

SEQ ID NO: 2401068 - DNA, 25 bp, Homo sapien
ggaggttgcctcttttctgccagga

SEQ ID NO: 2401069 - DNA, 25 bp, Homo sapien
caggtttcaatatggctccccgcgt

SEQ ID NO: 2401070 - DNA, 25 bp, Homo sapien
actgtgaacaacttgagatcttttt

SEQ ID NO: 2401071 - DNA, 25 bp, Homo sapien
tattcttatctctattccagggctc

SEQ ID NO: 2401072 - DNA, 25 bp, Homo sapien
tttttctccaggctagactgtgaac

SEQ ID NO: 2401073 - DNA, 25 bp, Homo sapien
taatggattacagtggattgtacaa

SEQ ID NO: 2401074 - DNA, 25 bp, Homo sapien
ctcagtgaacatccagtgctgggtg

SEQ ID NO: 2401075 - DNA, 25 bp, Homo sapien
tccttcaggcttattgtgctcagtg

SEQ ID NO: 2401076 - DNA, 25 bp, Homo sapien
tgacccttgtgtgcctctttgtgaa

SEQ ID NO: 2401077 - DNA, 25 bp, Homo sapien
cagggcttaaaaggccagcgtctgt

SEQ ID NO: 2401078 - DNA, 25 bp, Homo sapien
agtgaggagggagggcatccgcgca

SEQ ID NO: 2401079 - DNA, 25 bp, Homo sapien
tccgcgcaggggatggtggcttgga

SEQ ID NO: 2401080 - DNA, 25 bp, Homo sapien
cctttgccggcactctcagagtgag

SEQ ID NO: 2401081 - DNA, 25 bp, Homo sapien
tgggctggccctttgccggcactct

SEQ ID NO: 2401082 - DNA, 25 bp, Homo sapien
aatccaatactgctctattttgtag

SEQ ID NO: 2401083 - DNA, 25 bp, Homo sapien
tactgctctattttgtagttccagc

SEQ ID NO: 2401084 - DNA, 25 bp, Homo sapien
actgtgtgtccaactcatggatatt

SEQ ID NO: 2401085 - DNA, 25 bp, Homo sapien
ctgtgtgtccaactcatggatattt

SEQ ID NO: 2401086 - DNA, 25 bp, Homo sapien
ctcccatagcctggggtaccaaaat

SEQ ID NO: 2401087 - DNA, 25 bp, Homo sapien
tgagggctcccatagcctggggtac

SEQ ID NO: 2401088 - DNA, 25 bp, Homo sapien
agggctcccatagcctggggtacca

SEQ ID NO: 2401089 - DNA, 25 bp, Homo sapien
ggctcccatagcctggggtaccaaa

SEQ ID NO: 2401090 - DNA, 25 bp, Homo sapien
tgcttgatcgcttgcccttctggcg

SEQ ID NO: 2401091 - DNA, 25 bp, Homo sapien
ttgatcgcttgcccttctggcgccg

SEQ ID NO: 2401092 - DNA, 25 bp, Homo sapien
gatcgcttgcccttctggcgccggt

SEQ ID NO: 2401093 - DNA, 25 bp, Homo sapien
gcttgatcgcttgcccttctggcgc

SEQ ID NO: 2401094 - DNA, 25 bp, Homo sapien
ccaagctgctgggcgatgtggctga

SEQ ID NO: 2401095 - DNA, 25 bp, Homo sapien
cccaagctgctgggcgatgtggctg

SEQ ID NO: 2401096 - DNA, 25 bp, Homo sapien
cagtgtgggtttcgggcaccgcagg

SEQ ID NO: 2401097 - DNA, 25 bp, Homo sapien
ctgcagtgtgggtttcgggcaccgc

SEQ ID NO: 2401098 - DNA, 25 bp, Homo sapien
tcgggcaccgcaggaacaaattctc

SEQ ID NO: 2401099 - DNA, 25 bp, Homo sapien
tgggtttcgggcaccgcaggaacaa

SEQ ID NO: 2401100 - DNA, 25 bp, Homo sapien
aagggccgcagctcacacatgttct

SEQ ID NO: 2401101 - DNA, 25 bp, Homo sapien
tcgctttctctttcgggcctgcacg

SEQ ID NO: 2401102 - DNA, 25 bp, Homo sapien
ttggttctcgatactggttcgcttt

SEQ ID NO: 2401103 - DNA, 25 bp, Homo sapien
gcacgagggtttctgctttgcatat

SEQ ID NO: 2401104 - DNA, 25 bp, Homo sapien
caaagcggcagatggtcgtttggct

SEQ ID NO: 2401105 - DNA, 25 bp, Homo sapien
tcaaagcggcagatggtcgtttggc

SEQ ID NO: 2401106 - DNA, 25 bp, Homo sapien
ggcagatggtcgtttggctgaacac

SEQ ID NO: 2401107 - DNA, 25 bp, Homo sapien
agcggcagatggtcgtttggctgaa

SEQ ID NO: 2401108 - DNA, 25 bp, Homo sapien
caaatagaacccccagggtgagcca

SEQ ID NO: 2401109 - DNA, 25 bp, Homo sapien
tcctgcttcgccctcaggctgagag

SEQ ID NO: 2401110 - DNA, 25 bp, Homo sapien
gggaggccccatcggagttgctctc

SEQ ID NO: 2401111 - DNA, 25 bp, Homo sapien
gactcctccgggttttgctccagct

SEQ ID NO: 2401112 - DNA, 25 bp, Homo sapien
tgagaggtctccaagccgtcttggg

SEQ ID NO: 2401113 - DNA, 25 bp, Homo sapien
ccccgcagaactcatacggcggggg

SEQ ID NO: 2401114 - DNA, 25 bp, Homo sapien
ccccccgcagaactcatacggcggg

SEQ ID NO: 2401115 - DNA, 25 bp, Homo sapien
gcagaactcatacggcgggggacat

SEQ ID NO: 2401116 - DNA, 25 bp, Homo sapien
ccgcagaactcatacggcgggggac

SEQ ID NO: 2401117 - DNA, 25 bp, Homo sapien
tgagaaggcgaaatccgaagccagg

SEQ ID NO: 2401118 - DNA, 25 bp, Homo sapien
gagggggtgagaaggcgaaatccga

SEQ ID NO: 2401119 - DNA, 25 bp, Homo sapien
gggtgagaaggcgaaatccgaagcc

SEQ ID NO: 2401120 - DNA, 25 bp, Homo sapien
gaagcttagccaggtccgaggatca

SEQ ID NO: 2401121 - DNA, 25 bp, Homo sapien
ccggccccatttttgttgtcttgat

SEQ ID NO: 2401122 - DNA, 25 bp, Homo sapien
cggccccatttttgttgtcttgatt

SEQ ID NO: 2401123 - DNA, 25 bp, Homo sapien
gacagcctggagctgttgcccaaag

SEQ ID NO: 2401124 - DNA, 25 bp, Homo sapien
agacagcctggagctgttgcccaaa

SEQ ID NO: 2401125 - DNA, 25 bp, Homo sapien
ccggatacccactctgggctcggat

SEQ ID NO: 2401126 - DNA, 25 bp, Homo sapien
gtatccgcctgaggccggataccca

SEQ ID NO: 2401127 - DNA, 25 bp, Homo sapien
gatacccactctgggctcggatacc

SEQ ID NO: 2401128 - DNA, 25 bp, Homo sapien
ctctgggctcggatacccgcgctgg

SEQ ID NO: 2401129 - DNA, 25 bp, Homo sapien
gctgatggggcagggatccagagaa

SEQ ID NO: 2401130 - DNA, 25 bp, Homo sapien
agaaggcacgggtccacacctgcac

SEQ ID NO: 2401131 - DNA, 25 bp, Homo sapien
cagctttcaggagataagacagctg

SEQ ID NO: 2401132 - DNA, 25 bp, Homo sapien
agctttcaggagataagacagctgg

SEQ ID NO: 2401133 - DNA, 25 bp, Homo sapien
tatggctacgttgcctgcaaaggtg

SEQ ID NO: 2401134 - DNA, 25 bp, Homo sapien
cagatagacgtatccgggtcacaca

SEQ ID NO: 2401135 - DNA, 25 bp, Homo sapien
tcaaaagcctgcacatagagttgct

SEQ ID NO: 2401136 - DNA, 25 bp, Homo sapien
tcttgtgaacagatagaccctctcc

SEQ ID NO: 2401137 - DNA, 25 bp, Homo sapien
catgataagtggtgttggaattggc

SEQ ID NO: 2401138 - DNA, 25 bp, Homo sapien
gggttcttgataatctgacatgata

SEQ ID NO: 2401139 - DNA, 25 bp, Homo sapien
taaaatccaccatgctctacagcac

SEQ ID NO: 2401140 - DNA, 25 bp, Homo sapien
ttcatccttcttcggcaggcaccaa

SEQ ID NO: 2401141 - DNA, 25 bp, Homo sapien
gacaaactgagacaatgaacttccg

SEQ ID NO: 2401142 - DNA, 25 bp, Homo sapien
acaccagacaaactgagacaatgaa

SEQ ID NO: 2401143 - DNA, 25 bp, Homo sapien
ccagacaaactgagacaatgaactt

SEQ ID NO: 2401144 - DNA, 25 bp, Homo sapien
ttccgcaggacccaaagcacctctt

SEQ ID NO: 2401145 - DNA, 25 bp, Homo sapien
agtacacagcaaagagggaatataa

SEQ ID NO: 2401146 - DNA, 25 bp, Homo sapien
tttactagcatcaaaattgatgaca

SEQ ID NO: 2401147 - DNA, 25 bp, Homo sapien
tatgctgatggtaataatttactag

SEQ ID NO: 2401148 - DNA, 25 bp, Homo sapien
ttgatgacatagtcgtgatatagtg

SEQ ID NO: 2401149 - DNA, 25 bp, Homo sapien
ggttggaaggcctgctgacgacccc

SEQ ID NO: 2401150 - DNA, 25 bp, Homo sapien
tcatgattcaggttggaaggcctgc

SEQ ID NO: 2401151 - DNA, 25 bp, Homo sapien
aggttggaaggcctgctgacgaccc

SEQ ID NO: 2401152 - DNA, 25 bp, Homo sapien
attcaggttggaaggcctgctgacg

SEQ ID NO: 2401153 - DNA, 25 bp, Homo sapien
tttattcaactctgagctaggagaa

SEQ ID NO: 2401154 - DNA, 25 bp, Homo sapien
agagaaccatgcgaactacaatgtc

SEQ ID NO: 2401155 - DNA, 25 bp, Homo sapien
ggtcaccgcaggacgtttgtcttgt

SEQ ID NO: 2401156 - DNA, 25 bp, Homo sapien
tgtgtcggcttcaccacgaggagag

SEQ ID NO: 2401157 - DNA, 25 bp, Homo sapien
gattggagcctaggcccaagctgtg

SEQ ID NO: 2401158 - DNA, 25 bp, Homo sapien
gatctggaagggacccagtctcggt

SEQ ID NO: 2401159 - DNA, 25 bp, Homo sapien
gtggaccggcattggcccgcttgca

SEQ ID NO: 2401160 - DNA, 25 bp, Homo sapien
tggaccggcattggcccgcttgcaa

SEQ ID NO: 2401161 - DNA, 25 bp, Homo sapien
tggttgtgtggaccggcattggccc

SEQ ID NO: 2401162 - DNA, 25 bp, Homo sapien
tgtgtggaccggcattggcccgctt

SEQ ID NO: 2401163 - DNA, 25 bp, Homo sapien
gacgggaagctgaaaggaaatcaac

SEQ ID NO: 2401164 - DNA, 25 bp, Homo sapien
ctgaaaggaaatcaaccagggtgac

SEQ ID NO: 2401165 - DNA, 25 bp, Homo sapien
agctgaaaggaaatcaaccagggtg

SEQ ID NO: 2401166 - DNA, 25 bp, Homo sapien
cgcagacgggaagctgaaaggaaat

SEQ ID NO: 2401167 - DNA, 25 bp, Homo sapien
gtggatcctttttgatttggcagcg

SEQ ID NO: 2401168 - DNA, 25 bp, Homo sapien
tccgtggatcctttttgatttggca

SEQ ID NO: 2401169 - DNA, 25 bp, Homo sapien
tcctttttgatttggcagcggcttc

SEQ ID NO: 2401170 - DNA, 25 bp, Homo sapien
tcagaagattccgtggatccttttt

SEQ ID NO: 2401171 - DNA, 25 bp, Homo sapien
ctggaaaatatgtggaggagagcct

SEQ ID NO: 2401172 - DNA, 25 bp, Homo sapien
gagccttcctctgcgggtcttgtgg

SEQ ID NO: 2401173 - DNA, 25 bp, Homo sapien
ggagagccttcctctgcgggtcttg

SEQ ID NO: 2401174 - DNA, 25 bp, Homo sapien
ggaggagagccttcctctgcgggtc

SEQ ID NO: 2401175 - DNA, 25 bp, Homo sapien
aaaggcctcacagtttttgcacttg

SEQ ID NO: 2401176 - DNA, 25 bp, Homo sapien
caaagttcggtggaaccagggctgc

SEQ ID NO: 2401177 - DNA, 25 bp, Homo sapien
agggcccagggttcgcttcaacctg

SEQ ID NO: 2401178 - DNA, 25 bp, Homo sapien
cagggttcgcttcaacctggggctt

SEQ ID NO: 2401179 - DNA, 25 bp, Homo sapien
ccaggtttggggtcacgacgtgcca

SEQ ID NO: 2401180 - DNA, 25 bp, Homo sapien
tctctttgccccaggtttggggtca

SEQ ID NO: 2401181 - DNA, 25 bp, Homo sapien
caggtttggggtcacgacgtgccat

SEQ ID NO: 2401182 - DNA, 25 bp, Homo sapien
tctcaccagtctctttgccccaggt

SEQ ID NO: 2401183 - DNA, 25 bp, Homo sapien
ttttcaggggttgattgtcgggtca

SEQ ID NO: 2401184 - DNA, 25 bp, Homo sapien
tttcaggggttgattgtcgggtcac

SEQ ID NO: 2401185 - DNA, 25 bp, Homo sapien
gaaggggcagagagggacctctgct

SEQ ID NO: 2401186 - DNA, 25 bp, Homo sapien
gcgatgcagcatccaggaagacgga

SEQ ID NO: 2401187 - DNA, 25 bp, Homo sapien
cgatgcagcatccaggaagacggag

SEQ ID NO: 2401188 - DNA, 25 bp, Homo sapien
aagcgatgcagcatccaggaagacg

SEQ ID NO: 2401189 - DNA, 25 bp, Homo sapien
tccgtgtcatcatggagattctcct

SEQ ID NO: 2401190 - DNA, 25 bp, Homo sapien
ttccccacggtaggtctgtcagcag

SEQ ID NO: 2401191 - DNA, 25 bp, Homo sapien
tgcagtcacggccatgatccatctt

SEQ ID NO: 2401192 - DNA, 25 bp, Homo sapien
tatttactctatctcgacgtaggcc

SEQ ID NO: 2401193 - DNA, 25 bp, Homo sapien
agtccagggaggggcacgccgcctt

SEQ ID NO: 2401194 - DNA, 25 bp, Homo sapien
gagactccaggcattggagtccagg

SEQ ID NO: 2401195 - DNA, 25 bp, Homo sapien
actccaggcattggagtccagggag

SEQ ID NO: 2401196 - DNA, 25 bp, Homo sapien
tccagggaggggcacgccgccttta

SEQ ID NO: 2401197 - DNA, 25 bp, Homo sapien
catgttttcaagcccgaggccagct

SEQ ID NO: 2401198 - DNA, 25 bp, Homo sapien
ccgccatgttttcaagcccgaggcc

SEQ ID NO: 2401199 - DNA, 25 bp, Homo sapien
cccgccatgttttcaagcccgaggc

SEQ ID NO: 2401200 - DNA, 25 bp, Homo sapien
ctgacatcgagccacgctccctgat

SEQ ID NO: 2401201 - DNA, 25 bp, Homo sapien
ctggagactgacatcgagccacgct

SEQ ID NO: 2401202 - DNA, 25 bp, Homo sapien
ggagactgacatcgagccacgctcc

SEQ ID NO: 2401203 - DNA, 25 bp, Homo sapien
gacatcgagccacgctccctgatcc

SEQ ID NO: 2401204 - DNA, 25 bp, Homo sapien
cagtctctgtcagaaccatggtact

SEQ ID NO: 2401205 - DNA, 25 bp, Homo sapien
tccaggtcagaagtcatttagacag

SEQ ID NO: 2401206 - DNA, 25 bp, Homo sapien
attttcagtaaaggtccaggtcaga

SEQ ID NO: 2401207 - DNA, 25 bp, Homo sapien
atttagacagggtcccccagtctct

SEQ ID NO: 2401208 - DNA, 25 bp, Homo sapien
ggctgtagtttgtgatccttgattc

SEQ ID NO: 2401209 - DNA, 25 bp, Homo sapien
gcaggctgtagtttgtgatccttga

SEQ ID NO: 2401210 - DNA, 25 bp, Homo sapien
tgtagtttgtgatccttgattcaga

SEQ ID NO: 2401211 - DNA, 25 bp, Homo sapien
caggctgtagtttgtgatccttgat

SEQ ID NO: 2401212 - DNA, 25 bp, Homo sapien
ccacacgcttagacagctgatatct

SEQ ID NO: 2401213 - DNA, 25 bp, Homo sapien
cgcttagacagctgatatcttatta

SEQ ID NO: 2401214 - DNA, 25 bp, Homo sapien
cttacaatcccgttagagtcgtgtg

SEQ ID NO: 2401215 - DNA, 25 bp, Homo sapien
acccacacgcttagacagctgatat

SEQ ID NO: 2401216 - DNA, 25 bp, Homo sapien
ggcctccaggatgggaccagacatc

SEQ ID NO: 2401217 - DNA, 25 bp, Homo sapien
caaagcttagaaagtggcagggcac

SEQ ID NO: 2401218 - DNA, 25 bp, Homo sapien
cttatactatgtgtgctgcttggca

SEQ ID NO: 2401219 - DNA, 25 bp, Homo sapien
tagaaatggctagcagcaggcacca

SEQ ID NO: 2401220 - DNA, 25 bp, Homo sapien
gcaggtactgggtcgtctgtgtctc

SEQ ID NO: 2401221 - DNA, 25 bp, Homo sapien
cgtgggcaggtactgggtcgtctgt

SEQ ID NO: 2401222 - DNA, 25 bp, Homo sapien
tgggcaggtactgggtcgtctgtgt

SEQ ID NO: 2401223 - DNA, 25 bp, Homo sapien
acgtgggcaggtactgggtcgtctg

SEQ ID NO: 2401224 - DNA, 25 bp, Homo sapien
gggtgtagtgtggaggcactagagc

SEQ ID NO: 2401225 - DNA, 25 bp, Homo sapien
agtgtggaggcactagagccaggtg

SEQ ID NO: 2401226 - DNA, 25 bp, Homo sapien
ggaggcactagagccaggtggccgg

SEQ ID NO: 2401227 - DNA, 25 bp, Homo sapien
gtgtagtgtggaggcactagagcca

SEQ ID NO: 2401228 - DNA, 25 bp, Homo sapien
ggacatcctagcttttccccggtgc

SEQ ID NO: 2401229 - DNA, 25 bp, Homo sapien
ccctgcatggtgtaggagtgtggga

SEQ ID NO: 2401230 - DNA, 25 bp, Homo sapien
gcctgtgcccgagttccctgcatgg

SEQ ID NO: 2401231 - DNA, 25 bp, Homo sapien
tgcatggtgtaggagtgtgggacat

SEQ ID NO: 2401232 - DNA, 25 bp, Homo sapien
tctgggttgcggacggtaaaggcca

SEQ ID NO: 2401233 - DNA, 25 bp, Homo sapien
acggtaaaggccacgtagacctcag

SEQ ID NO: 2401234 - DNA, 25 bp, Homo sapien
cgtctctgggttgcggacggtaaag

SEQ ID NO: 2401235 - DNA, 25 bp, Homo sapien
ttgcggacggtaaaggccacgtaga

SEQ ID NO: 2401236 - DNA, 25 bp, Homo sapien
cgcaggaccccgaccagcgacacga

SEQ ID NO: 2401237 - DNA, 25 bp, Homo sapien
ttgtgctcctggcaggcagccagcc

SEQ ID NO: 2401238 - DNA, 25 bp, Homo sapien
accccgaccagcgacacgatggctt

SEQ ID NO: 2401239 - DNA, 25 bp, Homo sapien
cttgtgctcctggcaggcagccagc

SEQ ID NO: 2401240 - DNA, 25 bp, Homo sapien
aaaaaccagctctggttcttggcct

SEQ ID NO: 2401241 - DNA, 25 bp, Homo sapien
atgggccttgtcctcgtcccagaag

SEQ ID NO: 2401242 - DNA, 25 bp, Homo sapien
taccaccttctctcatgggccttgt

SEQ ID NO: 2401243 - DNA, 25 bp, Homo sapien
aaataccaccttctctcatgggcct

SEQ ID NO: 2401244 - DNA, 25 bp, Homo sapien
ggacagagccatgtgccgacgactg

SEQ ID NO: 2401245 - DNA, 25 bp, Homo sapien
acagagccatgtgccgacgactgta

SEQ ID NO: 2401246 - DNA, 25 bp, Homo sapien
gagccatgtgccgacgactgtaacg

SEQ ID NO: 2401247 - DNA, 25 bp, Homo sapien
catgtgccgacgactgtaacgggag

SEQ ID NO: 2401248 - DNA, 25 bp, Homo sapien
tcgaggacccggctgtgagggtcgc

SEQ ID NO: 2401249 - DNA, 25 bp, Homo sapien
gagagctgatggaccgtcgctacgt

SEQ ID NO: 2401250 - DNA, 25 bp, Homo sapien
aaagacattcccttggagctgctcg

SEQ ID NO: 2401251 - DNA, 25 bp, Homo sapien
ggccggcaccactgccaagttctag

SEQ ID NO: 2401252 - DNA, 25 bp, Homo sapien
gctgtgctctcggagattgtgaccg

SEQ ID NO: 2401253 - DNA, 25 bp, Homo sapien
tgtggtaccgtgagagatgatggct

SEQ ID NO: 2401254 - DNA, 25 bp, Homo sapien
gcagagggtggcgtcccatgtgacc

SEQ ID NO: 2401255 - DNA, 25 bp, Homo sapien
tctgcaaggcagagggtggcgtccc

SEQ ID NO: 2401256 - DNA, 25 bp, Homo sapien
ggactccttgaccatcagagtctct

SEQ ID NO: 2401257 - DNA, 25 bp, Homo sapien
ttgaccatcagagtctctgccagcc

SEQ ID NO: 2401258 - DNA, 25 bp, Homo sapien
ctgccagcccctcgtacagctcgtc

SEQ ID NO: 2401259 - DNA, 25 bp, Homo sapien
tccttgaccatcagagtctctgcca

SEQ ID NO: 2401260 - DNA, 25 bp, Homo sapien
ctgggggcatacagagtgagagctt

SEQ ID NO: 2401261 - DNA, 25 bp, Homo sapien
agtgagagcttgtttgctttcgtac

SEQ ID NO: 2401262 - DNA, 25 bp, Homo sapien
gagtgagagcttgtttgctttcgta

SEQ ID NO: 2401263 - DNA, 25 bp, Homo sapien
gagagcttgtttgctttcgtactaa

SEQ ID NO: 2401264 - DNA, 25 bp, Homo sapien
gcaccgggcatacttgactgacggc

SEQ ID NO: 2401265 - DNA, 25 bp, Homo sapien
tctgagagaaagcaccgggcatact

SEQ ID NO: 2401266 - DNA, 25 bp, Homo sapien
accgggcatacttgactgacggcgg

SEQ ID NO: 2401267 - DNA, 25 bp, Homo sapien
aaagcaccgggcatacttgactgac

SEQ ID NO: 2401268 - DNA, 25 bp, Homo sapien
cttcacacacacacaggatgcttca

SEQ ID NO: 2401269 - DNA, 25 bp, Homo sapien
tcacacacacacaggatgcttcaca

SEQ ID NO: 2401270 - DNA, 25 bp, Homo sapien
acacacacacaggatgcttcacagt

SEQ ID NO: 2401271 - DNA, 25 bp, Homo sapien
cacacacacacaggatgcttcacag

SEQ ID NO: 2401272 - DNA, 25 bp, Homo sapien
acagaacgttggttgctcgagagcc

SEQ ID NO: 2401273 - DNA, 25 bp, Homo sapien
cagaacgttggttgctcgagagccc

SEQ ID NO: 2401274 - DNA, 25 bp, Homo sapien
ccctcccaggggagccagtgtgaac

SEQ ID NO: 2401275 - DNA, 25 bp, Homo sapien
ctccctcccaggggagccagtgtga

SEQ ID NO: 2401276 - DNA, 25 bp, Homo sapien
tccctcccaggggagccagtgtgaa

SEQ ID NO: 2401277 - DNA, 25 bp, Homo sapien
gccacgggctggcacatggaacgga

SEQ ID NO: 2401278 - DNA, 25 bp, Homo sapien
gagggggcgctcagggtgactccag

SEQ ID NO: 2401279 - DNA, 25 bp, Homo sapien
gctctcttggatcatgtgtccctgg

SEQ ID NO: 2401280 - DNA, 25 bp, Homo sapien
ctggcacatggaacggagggcagag

SEQ ID NO: 2401281 - DNA, 25 bp, Homo sapien
tgccccgaaagtcttccctgctgtg

SEQ ID NO: 2401282 - DNA, 25 bp, Homo sapien
tgtattgccccgaaagtcttccctg

SEQ ID NO: 2401283 - DNA, 25 bp, Homo sapien
tattgccccgaaagtcttccctgct

SEQ ID NO: 2401284 - DNA, 25 bp, Homo sapien
ttgccccgaaagtcttccctgctgt

SEQ ID NO: 2401285 - DNA, 25 bp, Homo sapien
cttctgcaaaatatcccgcagcagc

SEQ ID NO: 2401286 - DNA, 25 bp, Homo sapien
cgcagcagctcagaatctgatgagt

SEQ ID NO: 2401287 - DNA, 25 bp, Homo sapien
tctgcaaaatatcccgcagcagctc

SEQ ID NO: 2401288 - DNA, 25 bp, Homo sapien
atctgatgagtctcttaactttgct

SEQ ID NO: 2401289 - DNA, 25 bp, Homo sapien
tggcaaagctctatgtgatccctcc

SEQ ID NO: 2401290 - DNA, 25 bp, Homo sapien
gtgttggcaaagctctatgtgatcc

SEQ ID NO: 2401291 - DNA, 25 bp, Homo sapien
ttggcaaagctctatgtgatccctc

SEQ ID NO: 2401292 - DNA, 25 bp, Homo sapien
gctcagtgtggacgggggagggaga

SEQ ID NO: 2401293 - DNA, 25 bp, Homo sapien
ccagttggaagtggaagccacagcg

SEQ ID NO: 2401294 - DNA, 25 bp, Homo sapien
gtggaagccacagcggctgaaagcc

SEQ ID NO: 2401295 - DNA, 25 bp, Homo sapien
aagtggaagccacagcggctgaaag

SEQ ID NO: 2401296 - DNA, 25 bp, Homo sapien
ggaagtggaagccacagcggctgaa

SEQ ID NO: 2401297 - DNA, 25 bp, Homo sapien
tgcagtgctcgacatacagatgaga

SEQ ID NO: 2401298 - DNA, 25 bp, Homo sapien
tctgtgcagtgctcgacatacagat

SEQ ID NO: 2401299 - DNA, 25 bp, Homo sapien
attctgtgcagtgctcgacatacag

SEQ ID NO: 2401300 - DNA, 25 bp, Homo sapien
tgtgcagtgctcgacatacagatga

SEQ ID NO: 2401301 - DNA, 25 bp, Homo sapien
taaaagtcgtgaaaaggatcgtgaa

SEQ ID NO: 2401302 - DNA, 25 bp, Homo sapien
actttttagaatgggcgagtgcagc

SEQ ID NO: 2401303 - DNA, 25 bp, Homo sapien
ctgtgtcccagtgtcccagtgacca

SEQ ID NO: 2401304 - DNA, 25 bp, Homo sapien
gaccagaacgattactgccttttaa

SEQ ID NO: 2401305 - DNA, 25 bp, Homo sapien
tagccggagcgccgggggtttcagc

SEQ ID NO: 2401306 - DNA, 25 bp, Homo sapien
ggtttcagcacggagacccatcccg

SEQ ID NO: 2401307 - DNA, 25 bp, Homo sapien
acccatcccgtctgcccctggactc

SEQ ID NO: 2401308 - DNA, 25 bp, Homo sapien
ctggactcccgcgagccccgcgggc

SEQ ID NO: 2401309 - DNA, 25 bp, Homo sapien
tgcgcgccgccaggaagcggcgatc

SEQ ID NO: 2401310 - DNA, 25 bp, Homo sapien
tgtgcgcgccgccaggaagcggcga

SEQ ID NO: 2401311 - DNA, 25 bp, Homo sapien
cgccgccaggaagcggcgatcgaaa

SEQ ID NO: 2401312 - DNA, 25 bp, Homo sapien
ccgccaggaagcggcgatcgaaacc

SEQ ID NO: 2401313 - DNA, 25 bp, Homo sapien
cggggccgcagcgttgccgggagac

SEQ ID NO: 2401314 - DNA, 25 bp, Homo sapien
agcaagagttcgatcccgcgttctc

SEQ ID NO: 2401315 - DNA, 25 bp, Homo sapien
ctgcagcaagagttcgatcccgcgt

SEQ ID NO: 2401316 - DNA, 25 bp, Homo sapien
gttctcctcgggcgccatgacgtgg

SEQ ID NO: 2401317 - DNA, 25 bp, Homo sapien
tagagaccaggttggcgggtcttgg

SEQ ID NO: 2401318 - DNA, 25 bp, Homo sapien
caggttggtggcgtcctggaggcag

SEQ ID NO: 2401319 - DNA, 25 bp, Homo sapien
gaagctgggcttcggaagcgtccag

SEQ ID NO: 2401320 - DNA, 25 bp, Homo sapien
ccaggatagggcgatcctggaagct

SEQ ID NO: 2401321 - DNA, 25 bp, Homo sapien
gaggcaggcccaggagcgagcccac

SEQ ID NO: 2401322 - DNA, 25 bp, Homo sapien
ctgcggagggtttgaggcaggccca

SEQ ID NO: 2401323 - DNA, 25 bp, Homo sapien
tgcggagggtttgaggcaggcccag

SEQ ID NO: 2401324 - DNA, 25 bp, Homo sapien
gcaggcccaggagcgagcccacggt

SEQ ID NO: 2401325 - DNA, 25 bp, Homo sapien
acagcaagtcctaaccagggatggg

SEQ ID NO: 2401326 - DNA, 25 bp, Homo sapien
cagcaagtcctaaccagggatgggt

SEQ ID NO: 2401327 - DNA, 25 bp, Homo sapien
cacagcaagtcctaaccagggatgg

SEQ ID NO: 2401328 - DNA, 25 bp, Homo sapien
ggttgaagaaaccagtccgactgtc

SEQ ID NO: 2401329 - DNA, 25 bp, Homo sapien
tgcctgtctgctccgctctggttga

SEQ ID NO: 2401330 - DNA, 25 bp, Homo sapien
catataagaaacgtgatgctctctg

SEQ ID NO: 2401331 - DNA, 25 bp, Homo sapien
taatatttgtcctggtggatacaga

SEQ ID NO: 2401332 - DNA, 25 bp, Homo sapien
caaggaaggcccactttactctgca

SEQ ID NO: 2401333 - DNA, 25 bp, Homo sapien
cctcaagcacgttggtccctgaaga

SEQ ID NO: 2401334 - DNA, 25 bp, Homo sapien
tcatgatggcctcaagcacgttggt

SEQ ID NO: 2401335 - DNA, 25 bp, Homo sapien
tcaaggaaggcccactttactctgc

SEQ ID NO: 2401336 - DNA, 25 bp, Homo sapien
gccaggtgattgtggaatttctcct

SEQ ID NO: 2401337 - DNA, 25 bp, Homo sapien
tctgggccacttgagggataaaata

SEQ ID NO: 2401338 - DNA, 25 bp, Homo sapien
caaggcctttgctacgggcgtgcga

SEQ ID NO: 2401339 - DNA, 25 bp, Homo sapien
ggcgtgcgattggtgtgcaataatc

SEQ ID NO: 2401340 - DNA, 25 bp, Homo sapien
gtaggtgtggaggcgagggtatgca

SEQ ID NO: 2401341 - DNA, 25 bp, Homo sapien
tgtaggtgtggaggcgagggtatgc

SEQ ID NO: 2401342 - DNA, 25 bp, Homo sapien
tttcctcttgccccaatttgggcag

SEQ ID NO: 2401343 - DNA, 25 bp, Homo sapien
tcagtgcctggtaaagggtttcctc

SEQ ID NO: 2401344 - DNA, 25 bp, Homo sapien
tgtagcccacaatatcaaacttgac

SEQ ID NO: 2401345 - DNA, 25 bp, Homo sapien
caggggcatcccaaagccactgtag

SEQ ID NO: 2401346 - DNA, 25 bp, Homo sapien
ttcacggtggtcatcccacggtctc

SEQ ID NO: 2401347 - DNA, 25 bp, Homo sapien
ggtggtcatcccacggtctcatgtg

SEQ ID NO: 2401348 - DNA, 25 bp, Homo sapien
ttcttcacggtggtcatcccacggt

SEQ ID NO: 2401349 - DNA, 25 bp, Homo sapien
cacggtggtcatcccacggtctcat

SEQ ID NO: 2401350 - DNA, 25 bp, Homo sapien
tggaacagtggaatgatgccgctct

SEQ ID NO: 2401351 - DNA, 25 bp, Homo sapien
ctctctgtagctcagtgtcacaaag

SEQ ID NO: 2401352 - DNA, 25 bp, Homo sapien
ctctgtagctcagtgtcacaaagtc

SEQ ID NO: 2401353 - DNA, 25 bp, Homo sapien
cagtggaatgatgccgctctgttcc

SEQ ID NO: 2401354 - DNA, 25 bp, Homo sapien
atacctttctcacaatcagcaaagc

SEQ ID NO: 2401355 - DNA, 25 bp, Homo sapien
ggttcgctctgattgcagcagtttc

SEQ ID NO: 2401356 - DNA, 25 bp, Homo sapien
tctgattgcagcagtttcccgccag

SEQ ID NO: 2401357 - DNA, 25 bp, Homo sapien
ctgtgggttcgctctgattgcagca

SEQ ID NO: 2401358 - DNA, 25 bp, Homo sapien
ccgggctgtgggttcgctctgattg

SEQ ID NO: 2401359 - DNA, 25 bp, Homo sapien
cgtcttgaaggagcaattgcagagc

SEQ ID NO: 2401360 - DNA, 25 bp, Homo sapien
tgactccgtgatgtctgacccagtg

SEQ ID NO: 2401361 - DNA, 25 bp, Homo sapien
tgagtcgtcttgaaggagcaattgc

SEQ ID NO: 2401362 - DNA, 25 bp, Homo sapien
aaggagcaattgcagagcgtctcgg

SEQ ID NO: 2401363 - DNA, 25 bp, Homo sapien
tgaggatcggcggtaaacatttcga

SEQ ID NO: 2401364 - DNA, 25 bp, Homo sapien
tgtttgtcttgaggatcggcggtaa

SEQ ID NO: 2401365 - DNA, 25 bp, Homo sapien
tgtcttgaggatcggcggtaaacat

SEQ ID NO: 2401366 - DNA, 25 bp, Homo sapien
tcggcggtaaacatttcgattgcct

SEQ ID NO: 2401367 - DNA, 25 bp, Homo sapien
tttttattccaccgggagcataggc

SEQ ID NO: 2401368 - DNA, 25 bp, Homo sapien
ttttattccaccgggagcataggca

SEQ ID NO: 2401369 - DNA, 25 bp, Homo sapien
ttattccaccgggagcataggcaga

SEQ ID NO: 2401370 - DNA, 25 bp, Homo sapien
tttattccaccgggagcataggcag

SEQ ID NO: 2401371 - DNA, 25 bp, Homo sapien
tccacagtggacacaaagaggctcc

SEQ ID NO: 2401372 - DNA, 25 bp, Homo sapien
cgacagtctgggatcctttccacag

SEQ ID NO: 2401373 - DNA, 25 bp, Homo sapien
tcctaaggcctgtagctgttgctgt

SEQ ID NO: 2401374 - DNA, 25 bp, Homo sapien
gaggctccgttccagttcttgatcc

SEQ ID NO: 2401375 - DNA, 25 bp, Homo sapien
acatcttgtacccagagtcctccag

SEQ ID NO: 2401376 - DNA, 25 bp, Homo sapien
catcttgtacccagagtcctccagg

SEQ ID NO: 2401377 - DNA, 25 bp, Homo sapien
gagctgatacgaaaaacctcccttc

SEQ ID NO: 2401378 - DNA, 25 bp, Homo sapien
ccagcttccccgttcactgaaggcc

SEQ ID NO: 2401379 - DNA, 25 bp, Homo sapien
ttattccctggcagttctacaaggc

SEQ ID NO: 2401380 - DNA, 25 bp, Homo sapien
aggcctggagctgatacgaaaaacc

SEQ ID NO: 2401381 - DNA, 25 bp, Homo sapien
gggctttgttgatctccaggccttt

SEQ ID NO: 2401382 - DNA, 25 bp, Homo sapien
tttactcagtgcacctgtgtttggg

SEQ ID NO: 2401383 - DNA, 25 bp, Homo sapien
tgatctccaggcctttttcagcagc

SEQ ID NO: 2401384 - DNA, 25 bp, Homo sapien
ggtttctttactcagtgcacctgtg

SEQ ID NO: 2401385 - DNA, 25 bp, Homo sapien
aaacctgagattgtgaagatgttca

SEQ ID NO: 2401386 - DNA, 25 bp, Homo sapien
cattaccagtgacggagcagtaagt

SEQ ID NO: 2401387 - DNA, 25 bp, Homo sapien
taaaacctgagattgtgaagatgtt

SEQ ID NO: 2401388 - DNA, 25 bp, Homo sapien
gatgttcattgtcattaccagtgac

SEQ ID NO: 2401389 - DNA, 25 bp, Homo sapien
gctgtggtcacgttcctcttgtgtg

SEQ ID NO: 2401390 - DNA, 25 bp, Homo sapien
catggagctagttgggaagaggaaa

SEQ ID NO: 2401391 - DNA, 25 bp, Homo sapien
tgaaggaagtaagtcccttcggata

SEQ ID NO: 2401392 - DNA, 25 bp, Homo sapien
tacatttgagagttaccctcccagg

SEQ ID NO: 2401393 - DNA, 25 bp, Homo sapien
gggggcaaatacttagatgagaaac

SEQ ID NO: 2401394 - DNA, 25 bp, Homo sapien
ctggggggcaaatacttagatgaga

SEQ ID NO: 2401395 - DNA, 25 bp, Homo sapien
tgagaaacgaacaccctttgtaagc

SEQ ID NO: 2401396 - DNA, 25 bp, Homo sapien
cgaacaccctttgtaagcatgtgaa

SEQ ID NO: 2401397 - DNA, 25 bp, Homo sapien
acctactggagcctaggcaatggtg

SEQ ID NO: 2401398 - DNA, 25 bp, Homo sapien
gtgcctccagttaggcaactcaggg

SEQ ID NO: 2401399 - DNA, 25 bp, Homo sapien
ttgtttacctactggagcctaggca

SEQ ID NO: 2401400 - DNA, 25 bp, Homo sapien
gggtgcctccagttaggcaactcag

SEQ ID NO: 2401401 - DNA, 25 bp, Homo sapien
ctgggatggtagtgaagtgggatgg

SEQ ID NO: 2401402 - DNA, 25 bp, Homo sapien
tagtgaagtgggatggggaggtcat

SEQ ID NO: 2401403 - DNA, 25 bp, Homo sapien
tgggatggtagtgaagtgggatggg

SEQ ID NO: 2401404 - DNA, 25 bp, Homo sapien
tggtagtgaagtgggatggggaggt

SEQ ID NO: 2401405 - DNA, 25 bp, Homo sapien
aagatgagcagcagtagtgagtgct

SEQ ID NO: 2401406 - DNA, 25 bp, Homo sapien
tgcatgggtaattggccttgatgcc

SEQ ID NO: 2401407 - DNA, 25 bp, Homo sapien
agcagtagtgagtgctcttcttccc

SEQ ID NO: 2401408 - DNA, 25 bp, Homo sapien
ggctgcatgggtaattggccttgat

SEQ ID NO: 2401409 - DNA, 25 bp, Homo sapien
ctgcacctggcttgtcttatttatg

SEQ ID NO: 2401410 - DNA, 25 bp, Homo sapien
ggtcagcacacaaaggggtccaaac

SEQ ID NO: 2401411 - DNA, 25 bp, Homo sapien
aagtgatttgcttacctcggcatcc

SEQ ID NO: 2401412 - DNA, 25 bp, Homo sapien
tatgtctacgtgaaacagcccagtg

SEQ ID NO: 2401413 - DNA, 25 bp, Homo sapien
cccatccactaataagtgaacatgg

SEQ ID NO: 2401414 - DNA, 25 bp, Homo sapien
tcctgcttgccctaaaaaagcctgg

SEQ ID NO: 2401415 - DNA, 25 bp, Homo sapien
cctggtgactatgcaagggactgag

SEQ ID NO: 2401416 - DNA, 25 bp, Homo sapien
tcccatggccatagtctaggcaaaa

SEQ ID NO: 2401417 - DNA, 25 bp, Homo sapien
gaaagccaggtaggaactacatccc

SEQ ID NO: 2401418 - DNA, 25 bp, Homo sapien
cagctcaattatatacttttgggat

SEQ ID NO: 2401419 - DNA, 25 bp, Homo sapien
tcttgcgtgtcaagtaccttgcagt

SEQ ID NO: 2401420 - DNA, 25 bp, Homo sapien
cagtcagctcaattatatacttttg

SEQ ID NO: 2401421 - DNA, 25 bp, Homo sapien
tgtggagtctcttgcgtgtcaagta

SEQ ID NO: 2401422 - DNA, 25 bp, Homo sapien
caagcaaggatcatggaacactctc

SEQ ID NO: 2401423 - DNA, 25 bp, Homo sapien
gaattcccatagcaatccatgacag

SEQ ID NO: 2401424 - DNA, 25 bp, Homo sapien
catggccccacaactcaaatgaagt

SEQ ID NO: 2401425 - DNA, 25 bp, Homo sapien
tgagttggtcaacaccaagcaagga

SEQ ID NO: 2401426 - DNA, 25 bp, Homo sapien
tggcagactgttggtcctgagcata

SEQ ID NO: 2401427 - DNA, 25 bp, Homo sapien
aaaacaagatgaaagaagtaaccat

SEQ ID NO: 2401428 - DNA, 25 bp, Homo sapien
gatttggcagactgttggtcctgag

SEQ ID NO: 2401429 - DNA, 25 bp, Homo sapien
gcagactgttggtcctgagcataag

SEQ ID NO: 2401430 - DNA, 25 bp, Homo sapien
cacttcaaacacaagacccttggga

SEQ ID NO: 2401431 - DNA, 25 bp, Homo sapien
ctcacttcaaacacaagacccttgg

SEQ ID NO: 2401432 - DNA, 25 bp, Homo sapien
gactcacttcaaacacaagaccctt

SEQ ID NO: 2401433 - DNA, 25 bp, Homo sapien
agactcacttcaaacacaagaccct

SEQ ID NO: 2401434 - DNA, 25 bp, Homo sapien
ttccttgggtcctggtgaccaagtc

SEQ ID NO: 2401435 - DNA, 25 bp, Homo sapien
atgcaatttgggttccttgggtcct

SEQ ID NO: 2401436 - DNA, 25 bp, Homo sapien
ttgggtcctggtgaccaagtctttc

SEQ ID NO: 2401437 - DNA, 25 bp, Homo sapien
gatgcaatttgggttccttgggtcc

SEQ ID NO: 2401438 - DNA, 25 bp, Homo sapien
tcacatcatacttatctttcttaga

SEQ ID NO: 2401439 - DNA, 25 bp, Homo sapien
tattggacataggaggtgctttcac

SEQ ID NO: 2401440 - DNA, 25 bp, Homo sapien
tatattggacataggaggtgctttc

SEQ ID NO: 2401441 - DNA, 25 bp, Homo sapien
cttatattggacataggaggtgctt

SEQ ID NO: 2401442 - DNA, 25 bp, Homo sapien
tcataaggcacttgttcttaacaaa

SEQ ID NO: 2401443 - DNA, 25 bp, Homo sapien
ggcacttgttcttaacaaacaccat

SEQ ID NO: 2401444 - DNA, 25 bp, Homo sapien
cataaggcacttgttcttaacaaac

SEQ ID NO: 2401445 - DNA, 25 bp, Homo sapien
taaggcacttgttcttaacaaacac

SEQ ID NO: 2401446 - DNA, 25 bp, Homo sapien
cactaaatccaattctctgggttct

SEQ ID NO: 2401447 - DNA, 25 bp, Homo sapien
ggaatcagtcacactaaatccaatt

SEQ ID NO: 2401448 - DNA, 25 bp, Homo sapien
ccaattctctgggttctcatgatta

SEQ ID NO: 2401449 - DNA, 25 bp, Homo sapien
tctgggttctcatgattaaggtgtt

SEQ ID NO: 2401450 - DNA, 25 bp, Homo sapien
atttctacccaatggcatttcataa

SEQ ID NO: 2401451 - DNA, 25 bp, Homo sapien
gagacaggagaattggatacattac

SEQ ID NO: 2401452 - DNA, 25 bp, Homo sapien
tgttggccagtacttgccacatccc

SEQ ID NO: 2401453 - DNA, 25 bp, Homo sapien
caggagaattggatacattacaaat

SEQ ID NO: 2401454 - DNA, 25 bp, Homo sapien
ctcctaaaggcgttcttccctgctt

SEQ ID NO: 2401455 - DNA, 25 bp, Homo sapien
gctcctaaaggcgttcttccctgct

SEQ ID NO: 2401456 - DNA, 25 bp, Homo sapien
tgctcctaaaggcgttcttccctgc

SEQ ID NO: 2401457 - DNA, 25 bp, Homo sapien
tcaccacgatgaatgacacggtaac

SEQ ID NO: 2401458 - DNA, 25 bp, Homo sapien
ctaaggatcaccacgatgaatgaca

SEQ ID NO: 2401459 - DNA, 25 bp, Homo sapien
gatcaccacgatgaatgacacggta

SEQ ID NO: 2401460 - DNA, 25 bp, Homo sapien
aggatcaccacgatgaatgacacgg

SEQ ID NO: 2401461 - DNA, 25 bp, Homo sapien
acctagatgattctcttgcaggtgt

SEQ ID NO: 2401462 - DNA, 25 bp, Homo sapien
gcgagcaagccacctagatgattct

SEQ ID NO: 2401463 - DNA, 25 bp, Homo sapien
gccacctagatgattctcttgcagg

SEQ ID NO: 2401464 - DNA, 25 bp, Homo sapien
gcatgcagagcgagcaagccaccta

SEQ ID NO: 2401465 - DNA, 25 bp, Homo sapien
tctgatcatacccactctgcagaag

SEQ ID NO: 2401466 - DNA, 25 bp, Homo sapien
agaagtcagaatggcccccacgtgg

SEQ ID NO: 2401467 - DNA, 25 bp, Homo sapien
ccccacgtggtgttaaatgggagtg

SEQ ID NO: 2401468 - DNA, 25 bp, Homo sapien
ccacgtggtgttaaatgggagtgaa

SEQ ID NO: 2401469 - DNA, 25 bp, Homo sapien
aagctcagctcatgagctgagatga

SEQ ID NO: 2401470 - DNA, 25 bp, Homo sapien
cttgtagaaacatggaactatggaa

SEQ ID NO: 2401471 - DNA, 25 bp, Homo sapien
tgccttgtagaaacatggaactatg

SEQ ID NO: 2401472 - DNA, 25 bp, Homo sapien
ctatgccttgtagaaacatggaact

SEQ ID NO: 2401473 - DNA, 25 bp, Homo sapien
tagaaacatggaactatggaaaacg

SEQ ID NO: 2401474 - DNA, 25 bp, Homo sapien
tccctgtgtgtaaaatccaacaaca

SEQ ID NO: 2401475 - DNA, 25 bp, Homo sapien
cttagatttccctgtgtgtaaaatc

SEQ ID NO: 2401476 - DNA, 25 bp, Homo sapien
tttccctgtgtgtaaaatccaacaa

SEQ ID NO: 2401477 - DNA, 25 bp, Homo sapien
gatttccctgtgtgtaaaatccaac

SEQ ID NO: 2401478 - DNA, 25 bp, Homo sapien
tcctagcagtcctgggagagaagca

SEQ ID NO: 2401479 - DNA, 25 bp, Homo sapien
cttgtcttcctagcagtcctgggag

SEQ ID NO: 2401480 - DNA, 25 bp, Homo sapien
tgccatctaatcttgtcttcctagc

SEQ ID NO: 2401481 - DNA, 25 bp, Homo sapien
ctaatcttgtcttcctagcagtcct

SEQ ID NO: 2401482 - DNA, 25 bp, Homo sapien
cagcctttgaattaaccctgatgac

SEQ ID NO: 2401483 - DNA, 25 bp, Homo sapien
ttccagcctttgaattaaccctgat

SEQ ID NO: 2401484 - DNA, 25 bp, Homo sapien
tttgaattaaccctgatgactgcct

SEQ ID NO: 2401485 - DNA, 25 bp, Homo sapien
cctttgaattaaccctgatgactgc

SEQ ID NO: 2401486 - DNA, 25 bp, Homo sapien
catccaagacaatcggctgcatgca

SEQ ID NO: 2401487 - DNA, 25 bp, Homo sapien
acgggcgcatccaagacaatcggct

SEQ ID NO: 2401488 - DNA, 25 bp, Homo sapien
ggcacacgggcgcatccaagacaat

SEQ ID NO: 2401489 - DNA, 25 bp, Homo sapien
gcgcatccaagacaatcggctgcat

SEQ ID NO: 2401490 - DNA, 25 bp, Homo sapien
cttccttcctagagactagcaagga

SEQ ID NO: 2401491 - DNA, 25 bp, Homo sapien
gagactagcaaggacacaagccctg

SEQ ID NO: 2401492 - DNA, 25 bp, Homo sapien
ctagagactagcaaggacacaagcc

SEQ ID NO: 2401493 - DNA, 25 bp, Homo sapien
tcaagccacagagtcttccttccta

SEQ ID NO: 2401494 - DNA, 25 bp, Homo sapien
aaatgtgataacaagacagaaagca

SEQ ID NO: 2401495 - DNA, 25 bp, Homo sapien
ggaaatgtgataacaagacagaaag

SEQ ID NO: 2401496 - DNA, 25 bp, Homo sapien
caaggaaatgtgataacaagacaga

SEQ ID NO: 2401497 - DNA, 25 bp, Homo sapien
aaggaaatgtgataacaagacagaa

SEQ ID NO: 2401498 - DNA, 25 bp, Homo sapien
atctcggctgactgcaacctctgtc

SEQ ID NO: 2401499 - DNA, 25 bp, Homo sapien
gatccaccagcctcgacctgccaaa

SEQ ID NO: 2401500 - DNA, 25 bp, Homo sapien
tttcagtagagacagttccgccatg

SEQ ID NO: 2401501 - DNA, 25 bp, Homo sapien
aggctggctgaagtgcattggtgcg

SEQ ID NO: 2401502 - DNA, 25 bp, Homo sapien
tgtccttgcctgacactgtcagccc

SEQ ID NO: 2401503 - DNA, 25 bp, Homo sapien
gccaatgagtccaacgtcaacttcc

SEQ ID NO: 2401504 - DNA, 25 bp, Homo sapien
cctgagatcagacttgaccattcac

SEQ ID NO: 2401505 - DNA, 25 bp, Homo sapien
tacctgggatgcgtcccaagcccaa

SEQ ID NO: 2401506 - DNA, 25 bp, Homo sapien
accggactccacacatcaacaccgt

SEQ ID NO: 2401507 - DNA, 25 bp, Homo sapien
ccggactccacacatcaacaccgtc

SEQ ID NO: 2401508 - DNA, 25 bp, Homo sapien
cggactccacacatcaacaccgtca

SEQ ID NO: 2401509 - DNA, 25 bp, Homo sapien
gataggtccgtcagtcctttggaac

SEQ ID NO: 2401510 - DNA, 25 bp, Homo sapien
cattccagaggccacaagaagaaaa

SEQ ID NO: 2401511 - DNA, 25 bp, Homo sapien
tccagaggccacaagaagaaaaatg

SEQ ID NO: 2401512 - DNA, 25 bp, Homo sapien
ttccagaggccacaagaagaaaaat

SEQ ID NO: 2401513 - DNA, 25 bp, Homo sapien
cagaggccacaagaagaaaaatgat

SEQ ID NO: 2401514 - DNA, 25 bp, Homo sapien
gaagacatttccctatggtccaaag

SEQ ID NO: 2401515 - DNA, 25 bp, Homo sapien
agaagacatttccctatggtccaaa

SEQ ID NO: 2401516 - DNA, 25 bp, Homo sapien
ctgcctcacaaattacaagagcgcc

SEQ ID NO: 2401517 - DNA, 25 bp, Homo sapien
cctcacaaattacaagagcgccacg

SEQ ID NO: 2401518 - DNA, 25 bp, Homo sapien
tgcattcctcaggagcctgcctcac

SEQ ID NO: 2401519 - DNA, 25 bp, Homo sapien
ctcacaaattacaagagcgccacgg

SEQ ID NO: 2401520 - DNA, 25 bp, Homo sapien
aagaaggaaaatccctgcaacgtgg

SEQ ID NO: 2401521 - DNA, 25 bp, Homo sapien
gatattggcaggaaatcaatacccc

SEQ ID NO: 2401522 - DNA, 25 bp, Homo sapien
tgagatcccgatttacctgctaaaa

SEQ ID NO: 2401523 - DNA, 25 bp, Homo sapien
catcaccgaataaagcaaccccttg

SEQ ID NO: 2401524 - DNA, 25 bp, Homo sapien
aatctcataaaagggccctctgttc

SEQ ID NO: 2401525 - DNA, 25 bp, Homo sapien
caagctaatggtctacgcagacaaa

SEQ ID NO: 2401526 - DNA, 25 bp, Homo sapien
gcagacaaaatctcataaaagggcc

SEQ ID NO: 2401527 - DNA, 25 bp, Homo sapien
aagctaatggtctacgcagacaaaa

SEQ ID NO: 2401528 - DNA, 25 bp, Homo sapien
aatcactgctgatcctcgtaccagc

SEQ ID NO: 2401529 - DNA, 25 bp, Homo sapien
gaaatcactgctgatcctcgtacca

SEQ ID NO: 2401530 - DNA, 25 bp, Homo sapien
agtgaagaaacggatctcctcctca

SEQ ID NO: 2401531 - DNA, 25 bp, Homo sapien
aagaaatcactgctgatcctcgtac

SEQ ID NO: 2401532 - DNA, 25 bp, Homo sapien
caggtcatgcgattcccatttccct

SEQ ID NO: 2401533 - DNA, 25 bp, Homo sapien
ccttcaggtcatgcgattcccattt

SEQ ID NO: 2401534 - DNA, 25 bp, Homo sapien
atccttcaggtcatgcgattcccat

SEQ ID NO: 2401535 - DNA, 25 bp, Homo sapien
tcaggtcatgcgattcccatttccc

SEQ ID NO: 2401536 - DNA, 25 bp, Homo sapien
tcctttccgtgatcggccctggaaa

SEQ ID NO: 2401537 - DNA, 25 bp, Homo sapien
actgccattgtaattgtgtccccga

SEQ ID NO: 2401538 - DNA, 25 bp, Homo sapien
ccgaccaggacctctcccttctcat

SEQ ID NO: 2401539 - DNA, 25 bp, Homo sapien
cttctcatcctttccgtgatcggcc

SEQ ID NO: 2401540 - DNA, 25 bp, Homo sapien
agggggggctctgatgcagcccacg

SEQ ID NO: 2401541 - DNA, 25 bp, Homo sapien
gagaaaattcgcctgagttcagtgt

SEQ ID NO: 2401542 - DNA, 25 bp, Homo sapien
tgatgcagcccacggcgaggagggc

SEQ ID NO: 2401543 - DNA, 25 bp, Homo sapien
tctcagagaaaattcgcctgagttc

SEQ ID NO: 2401544 - DNA, 25 bp, Homo sapien
aggagagcgatttctgggatggaag

SEQ ID NO: 2401545 - DNA, 25 bp, Homo sapien
ggagagcgatttctgggatggaagc

SEQ ID NO: 2401546 - DNA, 25 bp, Homo sapien
gggatggaaagaggagagcgatttc

SEQ ID NO: 2401547 - DNA, 25 bp, Homo sapien
tagggatggaaagaggagagcgatt

SEQ ID NO: 2401548 - DNA, 25 bp, Homo sapien
ccggtctccttcctggccgaccgcg

SEQ ID NO: 2401549 - DNA, 25 bp, Homo sapien
cggtctccttcctggccgaccgcgg

SEQ ID NO: 2401550 - DNA, 25 bp, Homo sapien
gtctccttcctggccgaccgcggcg

SEQ ID NO: 2401551 - DNA, 25 bp, Homo sapien
tccttcctggccgaccgcggcgcgt

SEQ ID NO: 2401552 - DNA, 25 bp, Homo sapien
gcaccgtggacaggtagggccctgg

SEQ ID NO: 2401553 - DNA, 25 bp, Homo sapien
agccaggttgcaccccgatggactc

SEQ ID NO: 2401554 - DNA, 25 bp, Homo sapien
cccagccaggttgcaccccgatgga

SEQ ID NO: 2401555 - DNA, 25 bp, Homo sapien
accccagccaggttgcaccccgatg

SEQ ID NO: 2401556 - DNA, 25 bp, Homo sapien
gcccgctctgaccaggccctgcacc

SEQ ID NO: 2401557 - DNA, 25 bp, Homo sapien
agggacgccccgagagggtggacat

SEQ ID NO: 2401558 - DNA, 25 bp, Homo sapien
ggagagaagagaagggacgccccga

SEQ ID NO: 2401559 - DNA, 25 bp, Homo sapien
gagagaagagaagggacgccccgag

SEQ ID NO: 2401560 - DNA, 25 bp, Homo sapien
agaagagaagggacgccccgagagg

SEQ ID NO: 2401561 - DNA, 25 bp, Homo sapien
gtcttccatgatttggaggtggtag

SEQ ID NO: 2401562 - DNA, 25 bp, Homo sapien
taggaaaaccgaggctgctcaaaac

SEQ ID NO: 2401563 - DNA, 25 bp, Homo sapien
catgatttggaggtggtaggaaaac

SEQ ID NO: 2401564 - DNA, 25 bp, Homo sapien
ttccatgatttggaggtggtaggaa

SEQ ID NO: 2401565 - DNA, 25 bp, Homo sapien
taccaagctaatggtctacgcagac

SEQ ID NO: 2401566 - DNA, 25 bp, Homo sapien
aagctaatggtctacgcagacaaaa

SEQ ID NO: 2401567 - DNA, 25 bp, Homo sapien
ccaagctaatggtctacgcagacaa

SEQ ID NO: 2401568 - DNA, 25 bp, Homo sapien
ttaccaagctaatggtctacgcaga

SEQ ID NO: 2401569 - DNA, 25 bp, Homo sapien
aatcactgctgatcctcgtaccagc

SEQ ID NO: 2401570 - DNA, 25 bp, Homo sapien
gaaatcactgctgatcctcgtacca

SEQ ID NO: 2401571 - DNA, 25 bp, Homo sapien
agtgaagaaacggatctcctcctca

SEQ ID NO: 2401572 - DNA, 25 bp, Homo sapien
aagaaatcactgctgatcctcgtac

SEQ ID NO: 2401573 - DNA, 25 bp, Homo sapien
caggtcatgcgattcccatttccct

SEQ ID NO: 2401574 - DNA, 25 bp, Homo sapien
ccttcaggtcatgcgattcccattt

SEQ ID NO: 2401575 - DNA, 25 bp, Homo sapien
atccttcaggtcatgcgattcccat

SEQ ID NO: 2401576 - DNA, 25 bp, Homo sapien
tcaggtcatgcgattcccatttccc

SEQ ID NO: 2401577 - DNA, 25 bp, Homo sapien
ccctcgttccccgcatccccgcgca

SEQ ID NO: 2401578 - DNA, 25 bp, Homo sapien
ctcgttccccgcatccccgcgcacc

SEQ ID NO: 2401579 - DNA, 25 bp, Homo sapien
cgttccccgcatccccgcgcacccg

SEQ ID NO: 2401580 - DNA, 25 bp, Homo sapien
cgcatccccgcgcacccggcacccc

SEQ ID NO: 2401581 - DNA, 25 bp, Homo sapien
ccccctccagcaagagccgcagcct

SEQ ID NO: 2401582 - DNA, 25 bp, Homo sapien
tgggtgccggtctccaccctgcccg

SEQ ID NO: 2401583 - DNA, 25 bp, Homo sapien
cccgtcctcgccgtcctggggctgt

SEQ ID NO: 2401584 - DNA, 25 bp, Homo sapien
cttcccccctccagcaagagccgca

SEQ ID NO: 2401585 - DNA, 25 bp, Homo sapien
gctcgtggtcctctggcgccctctg

SEQ ID NO: 2401586 - DNA, 25 bp, Homo sapien
gaggaagagaagggacgccccgaga

SEQ ID NO: 2401587 - DNA, 25 bp, Homo sapien
aggaagagaagggacgccccgagag

SEQ ID NO: 2401588 - DNA, 25 bp, Homo sapien
agggacgccccgagagggtggacat

SEQ ID NO: 2401589 - DNA, 25 bp, Homo sapien
agagaagggacgccccgagagggtg

SEQ ID NO: 2401590 - DNA, 25 bp, Homo sapien
accgaggctgctcaaaactcgtgga

SEQ ID NO: 2401591 - DNA, 25 bp, Homo sapien
gctcaaaactcgtggagaattccgc

SEQ ID NO: 2401592 - DNA, 25 bp, Homo sapien
tgggaaaaccgaggctgctcaaaac

SEQ ID NO: 2401593 - DNA, 25 bp, Homo sapien
tgctcaaaactcgtggagaattccg

SEQ ID NO: 2401594 - DNA, 25 bp, Homo sapien
tgcaggatgacatgaatgcaccttc

SEQ ID NO: 2401595 - DNA, 25 bp, Homo sapien
ctgcaggatgacatgaatgcacctt

SEQ ID NO: 2401596 - DNA, 25 bp, Homo sapien
ttccagacacacttatacacttggc

SEQ ID NO: 2401597 - DNA, 25 bp, Homo sapien
gacacacttatacacttggcactgg

SEQ ID NO: 2401598 - DNA, 25 bp, Homo sapien
acttatacacttggcactgggaggt

SEQ ID NO: 2401599 - DNA, 25 bp, Homo sapien
cacttatacacttggcactgggagg

SEQ ID NO: 2401600 - DNA, 25 bp, Homo sapien
gatctgctgcgccatgtccgtctca

SEQ ID NO: 2401601 - DNA, 25 bp, Homo sapien
ctgggatgaacttatcgtagttctc

SEQ ID NO: 2401602 - DNA, 25 bp, Homo sapien
ggctgggatgaacttatcgtagttc

SEQ ID NO: 2401603 - DNA, 25 bp, Homo sapien
gtctagagcccggatctgctgcgcc

SEQ ID NO: 2401604 - DNA, 25 bp, Homo sapien
acactccgggctaggcccagtgaca

SEQ ID NO: 2401605 - DNA, 25 bp, Homo sapien
aggccgttgtaaagctttagcattc

SEQ ID NO: 2401606 - DNA, 25 bp, Homo sapien
ttgtaaagctttagcattctgtgcg

SEQ ID NO: 2401607 - DNA, 25 bp, Homo sapien
caccgcctcccctttcgagaggccg

SEQ ID NO: 2401608 - DNA, 25 bp, Homo sapien
gtgatcacagcgtacatcactgacg

SEQ ID NO: 2401609 - DNA, 25 bp, Homo sapien
gatcacagcgtacatcactgacgcc

SEQ ID NO: 2401610 - DNA, 25 bp, Homo sapien
ttaccctttctcacccacacaagaa

SEQ ID NO: 2401611 - DNA, 25 bp, Homo sapien
cgcagcctccgcagggcactttgta

SEQ ID NO: 2401612 - DNA, 25 bp, Homo sapien
ccaagtgagagccacgtatggagaa

SEQ ID NO: 2401613 - DNA, 25 bp, Homo sapien
aggggtcacagacaaaatgagagaa

SEQ ID NO: 2401614 - DNA, 25 bp, Homo sapien
gagagaattccacattcttgatgat

SEQ ID NO: 2401615 - DNA, 25 bp, Homo sapien
ggtcacagacaaaatgagagaattc

SEQ ID NO: 2401616 - DNA, 25 bp, Homo sapien
attccacattcttgatgatggtgaa

SEQ ID NO: 2401617 - DNA, 25 bp, Homo sapien
tgtcaggcagcctgcgtgagagatg

SEQ ID NO: 2401618 - DNA, 25 bp, Homo sapien
ctgtgtcaggcagcctgcgtgagag

SEQ ID NO: 2401619 - DNA, 25 bp, Homo sapien
atacatctgtgtcaggcagcctgcg

SEQ ID NO: 2401620 - DNA, 25 bp, Homo sapien
tctgtgtcaggcagcctgcgtgaga

SEQ ID NO: 2401621 - DNA, 25 bp, Homo sapien
cacaggttggagaggaagaagtaca

SEQ ID NO: 2401622 - DNA, 25 bp, Homo sapien
aaaccgatgtcagcccagcacaggt

SEQ ID NO: 2401623 - DNA, 25 bp, Homo sapien
cagcacaggttggagaggaagaagt

SEQ ID NO: 2401624 - DNA, 25 bp, Homo sapien
aaccgtggccgaggtgaaaccgatg

SEQ ID NO: 2401625 - DNA, 25 bp, Homo sapien
gcccttaatgttggatgcaagcaat

SEQ ID NO: 2401626 - DNA, 25 bp, Homo sapien
aggaaagaggattgcaaaataaaag

SEQ ID NO: 2401627 - DNA, 25 bp, Homo sapien
agaaggaaagaggattgcaaaataa

SEQ ID NO: 2401628 - DNA, 25 bp, Homo sapien
aaccagcccttaatgttggatgcaa

SEQ ID NO: 2401629 - DNA, 25 bp, Homo sapien
gaatggaacagataagaagatattg

SEQ ID NO: 2401630 - DNA, 25 bp, Homo sapien
agataagaagatattgagatgagac

SEQ ID NO: 2401631 - DNA, 25 bp, Homo sapien
acagataagaagatattgagatgag

SEQ ID NO: 2401632 - DNA, 25 bp, Homo sapien
tggaacagataagaagatattgaga

SEQ ID NO: 2401633 - DNA, 25 bp, Homo sapien
tgcaccctttcttggggacgatgac

SEQ ID NO: 2401634 - DNA, 25 bp, Homo sapien
cactgcaccctttcttggggacgat

SEQ ID NO: 2401635 - DNA, 25 bp, Homo sapien
ccctttcttggggacgatgacacat

SEQ ID NO: 2401636 - DNA, 25 bp, Homo sapien
gcaccctttcttggggacgatgaca

SEQ ID NO: 2401637 - DNA, 25 bp, Homo sapien
tccaacgcctcttccataaaatcag

SEQ ID NO: 2401638 - DNA, 25 bp, Homo sapien
gaggtaccctccaacgcctcttcca

SEQ ID NO: 2401639 - DNA, 25 bp, Homo sapien
taccctccaacgcctcttccataaa

SEQ ID NO: 2401640 - DNA, 25 bp, Homo sapien
ggtaccctccaacgcctcttccata

SEQ ID NO: 2401641 - DNA, 25 bp, Homo sapien
gcagggaaatacaggttgatgttcc

SEQ ID NO: 2401642 - DNA, 25 bp, Homo sapien
cagggaaatacaggttgatgttcct

SEQ ID NO: 2401643 - DNA, 25 bp, Homo sapien
cagcagggaaatacaggttgatgtt

SEQ ID NO: 2401644 - DNA, 25 bp, Homo sapien
ggaaatacaggttgatgttcctggt

SEQ ID NO: 2401645 - DNA, 25 bp, Homo sapien
tcaggagcatgtctctcttccatgc

SEQ ID NO: 2401646 - DNA, 25 bp, Homo sapien
ctcttccatgcctccaaaaatggca

SEQ ID NO: 2401647 - DNA, 25 bp, Homo sapien
caggagcatgtctctcttccatgcc

SEQ ID NO: 2401648 - DNA, 25 bp, Homo sapien
tctctcttccatgcctccaaaaatg

SEQ ID NO: 2401649 - DNA, 25 bp, Homo sapien
gactctgctgtgagactggatctcc

SEQ ID NO: 2401650 - DNA, 25 bp, Homo sapien
tgactctgctgtgagactggatctc

SEQ ID NO: 2401651 - DNA, 25 bp, Homo sapien
tctgctgtgagactggatctccact

SEQ ID NO: 2401652 - DNA, 25 bp, Homo sapien
gctgtgagactggatctccactatc

SEQ ID NO: 2401653 - DNA, 25 bp, Homo sapien
gagtcagggctgacggccaggatga

SEQ ID NO: 2401654 - DNA, 25 bp, Homo sapien
gaaaccgatgtcaggcaaggacagg

SEQ ID NO: 2401655 - DNA, 25 bp, Homo sapien
ggtgggagtcagggctgacggccag

SEQ ID NO: 2401656 - DNA, 25 bp, Homo sapien
gacggtggtggaggtgaaaccgatg

SEQ ID NO: 2401657 - DNA, 25 bp, Homo sapien
gaacagcccagcgacgaccggctgt

SEQ ID NO: 2401658 - DNA, 25 bp, Homo sapien
gcccagcgacgaccggctgtagttc

SEQ ID NO: 2401659 - DNA, 25 bp, Homo sapien
cagcccagcgacgaccggctgtagt

SEQ ID NO: 2401660 - DNA, 25 bp, Homo sapien
aacagcccagcgacgaccggctgta

SEQ ID NO: 2401661 - DNA, 25 bp, Homo sapien
ggtctgtagcgtttggatacaaccc

SEQ ID NO: 2401662 - DNA, 25 bp, Homo sapien
gcgtttggatacaaccctcttttgc

SEQ ID NO: 2401663 - DNA, 25 bp, Homo sapien
gagacaactgttggactctgtgggt

SEQ ID NO: 2401664 - DNA, 25 bp, Homo sapien
tatagagacaactgttggactctgt

SEQ ID NO: 2401665 - DNA, 25 bp, Homo sapien
aaccaatacccagcattgtgtctgc

SEQ ID NO: 2401666 - DNA, 25 bp, Homo sapien
acaagtaaaccaatacccagcattg

SEQ ID NO: 2401667 - DNA, 25 bp, Homo sapien
aagtaaaccaatacccagcattgtg

SEQ ID NO: 2401668 - DNA, 25 bp, Homo sapien
taaaccaatacccagcattgtgtct

SEQ ID NO: 2401669 - DNA, 25 bp, Homo sapien
gccaaactctgaactgatgactcct

SEQ ID NO: 2401670 - DNA, 25 bp, Homo sapien
aactctgaactgatgactcctttga

SEQ ID NO: 2401671 - DNA, 25 bp, Homo sapien
ggaagccaaactctgaactgatgac

SEQ ID NO: 2401672 - DNA, 25 bp, Homo sapien
aagccaaactctgaactgatgactc

SEQ ID NO: 2401673 - DNA, 25 bp, Homo sapien
gcctccgcagggcacgttgtatgtc

SEQ ID NO: 2401674 - DNA, 25 bp, Homo sapien
cagcctccgcagggcacgttgtatg

SEQ ID NO: 2401675 - DNA, 25 bp, Homo sapien
ctccgcagggcacgttgtatgtccc

SEQ ID NO: 2401676 - DNA, 25 bp, Homo sapien
gcgcagcctccgcagggcacgttgt

SEQ ID NO: 2401677 - DNA, 25 bp, Homo sapien
aagccaggtacatgccaatgcctgt

SEQ ID NO: 2401678 - DNA, 25 bp, Homo sapien
ccaggtacatgccaatgcctgttcc

SEQ ID NO: 2401679 - DNA, 25 bp, Homo sapien
tgaagccaggtacatgccaatgcct

SEQ ID NO: 2401680 - DNA, 25 bp, Homo sapien
acatgccaatgcctgttccatcaaa

SEQ ID NO: 2401681 - DNA, 25 bp, Homo sapien
gagccacaggtggagaaagctttat

SEQ ID NO: 2401682 - DNA, 25 bp, Homo sapien
aactgctaggtgagagccacaggtg

SEQ ID NO: 2401683 - DNA, 25 bp, Homo sapien
gccacaggtggagaaagctttatac

SEQ ID NO: 2401684 - DNA, 25 bp, Homo sapien
ctgctaggtgagagccacaggtgga

SEQ ID NO: 2401685 - DNA, 25 bp, Homo sapien
acgactttatagtaagacaacaaga

SEQ ID NO: 2401686 - DNA, 25 bp, Homo sapien
ggacgactttatagtaagacaacaa

SEQ ID NO: 2401687 - DNA, 25 bp, Homo sapien
gacgactttatagtaagacaacaag

SEQ ID NO: 2401688 - DNA, 25 bp, Homo sapien
gactttatagtaagacaacaagatc

SEQ ID NO: 2401689 - DNA, 25 bp, Homo sapien
tgtcaggcagcctgcgtgagagatg

SEQ ID NO: 2401690 - DNA, 25 bp, Homo sapien
ctgtgtcaggcagcctgcgtgagag

SEQ ID NO: 2401691 - DNA, 25 bp, Homo sapien
atacatctgtgtcaggcagcctgcg

SEQ ID NO: 2401692 - DNA, 25 bp, Homo sapien
tctgtgtcaggcagcctgcgtgaga

SEQ ID NO: 2401693 - DNA, 25 bp, Homo sapien
ggaaccgtggctgaggtgaaaccca

SEQ ID NO: 2401694 - DNA, 25 bp, Homo sapien
aaacccatgtcagcccagcacaggt

SEQ ID NO: 2401695 - DNA, 25 bp, Homo sapien
cagcacaggttggagaggaagaagt

SEQ ID NO: 2401696 - DNA, 25 bp, Homo sapien
aaccgtggctgaggtgaaacccatg

SEQ ID NO: 2401697 - DNA, 25 bp, Homo sapien
ggacagcaaagtgaggacgggctgc

SEQ ID NO: 2401698 - DNA, 25 bp, Homo sapien
tggtggggggagtcagatctgacag

SEQ ID NO: 2401699 - DNA, 25 bp, Homo sapien
acagcaaagtgaggacgggctgcag

SEQ ID NO: 2401700 - DNA, 25 bp, Homo sapien
gtgtggtggggggagtcagatctga

SEQ ID NO: 2401701 - DNA, 25 bp, Homo sapien
gcccttaatgttggatgcaagcaat

SEQ ID NO: 2401702 - DNA, 25 bp, Homo sapien
aggaaagaggattgcaaaataaaag

SEQ ID NO: 2401703 - DNA, 25 bp, Homo sapien
cacattgagaaggaaagaggattgc

SEQ ID NO: 2401704 - DNA, 25 bp, Homo sapien
aaccagcccttaatgttggatgcaa

SEQ ID NO: 2401705 - DNA, 25 bp, Homo sapien
ttaatcaccatagactaattctcca

SEQ ID NO: 2401706 - DNA, 25 bp, Homo sapien
aatcaccatagactaattctccagc

SEQ ID NO: 2401707 - DNA, 25 bp, Homo sapien
accatagactaattctccagcttgg

SEQ ID NO: 2401708 - DNA, 25 bp, Homo sapien
tcaccatagactaattctccagctt

SEQ ID NO: 2401709 - DNA, 25 bp, Homo sapien
ttttcaagaacccaataagcaacaa

SEQ ID NO: 2401710 - DNA, 25 bp, Homo sapien
tttcaagaacccaataagcaacaaa

SEQ ID NO: 2401711 - DNA, 25 bp, Homo sapien
ttttcgttctaagagtcagatccct

SEQ ID NO: 2401712 - DNA, 25 bp, Homo sapien
agaggggcacacacccgtatgaggt

SEQ ID NO: 2401713 - DNA, 25 bp, Homo sapien
gggcacacacccgtatgaggtgtca

SEQ ID NO: 2401714 - DNA, 25 bp, Homo sapien
agttttcgttctaagagtcagatcc

SEQ ID NO: 2401715 - DNA, 25 bp, Homo sapien
ggctcccatgtctgaagtgtgggtg

SEQ ID NO: 2401716 - DNA, 25 bp, Homo sapien
ctacagcataggcatggagtagctg

SEQ ID NO: 2401717 - DNA, 25 bp, Homo sapien
tctacagcataggcatggagtagct

SEQ ID NO: 2401718 - DNA, 25 bp, Homo sapien
tcccatgtctgaagtgtgggtgtac

SEQ ID NO: 2401719 - DNA, 25 bp, Homo sapien
cagcatcctccgcaaaggactgcat

SEQ ID NO: 2401720 - DNA, 25 bp, Homo sapien
caaaggactgcattgacgtccacca

SEQ ID NO: 2401721 - DNA, 25 bp, Homo sapien
tccgcaaaggactgcattgacgtcc

SEQ ID NO: 2401722 - DNA, 25 bp, Homo sapien
tgcattgacgtccaccatgtgtctg

SEQ ID NO: 2401723 - DNA, 25 bp, Homo sapien
catatataccccatcagtagcctgg

SEQ ID NO: 2401724 - DNA, 25 bp, Homo sapien
atgaccatggatcgcagcacaacct

SEQ ID NO: 2401725 - DNA, 25 bp, Homo sapien
ggctgaagtgaagcggcatgaccat

SEQ ID NO: 2401726 - DNA, 25 bp, Homo sapien
ggatgctgtctcactacttgaagac

SEQ ID NO: 2401727 - DNA, 25 bp, Homo sapien
tcaacatgggtttcgggtagatctc

SEQ ID NO: 2401728 - DNA, 25 bp, Homo sapien
ggagcttgttagaacttgtattctg

SEQ ID NO: 2401729 - DNA, 25 bp, Homo sapien
ttgtattctgtaccctaacgtgacg

SEQ ID NO: 2401730 - DNA, 25 bp, Homo sapien
gtgggtcttgtgtttcaattctggc

SEQ ID NO: 2401731 - DNA, 25 bp, Homo sapien
gcagagggaagcttgaatgtcgttt

SEQ ID NO: 2401732 - DNA, 25 bp, Homo sapien
cagagggaagcttgaatgtcgtttt

SEQ ID NO: 2401733 - DNA, 25 bp, Homo sapien
agagggaagcttgaatgtcgtttta

SEQ ID NO: 2401734 - DNA, 25 bp, Homo sapien
gagggaagcttgaatgtcgttttac

SEQ ID NO: 2401735 - DNA, 25 bp, Homo sapien
ggagcaaggagcacgacaaagcctc

SEQ ID NO: 2401736 - DNA, 25 bp, Homo sapien
gagcaaggagcacgacaaagcctca

SEQ ID NO: 2401737 - DNA, 25 bp, Homo sapien
gattccttagggcaagcgaccagtg

SEQ ID NO: 2401738 - DNA, 25 bp, Homo sapien
ttagggcaagcgaccagtggttgac

SEQ ID NO: 2401739 - DNA, 25 bp, Homo sapien
gcacgattccttagggcaagcgacc

SEQ ID NO: 2401740 - DNA, 25 bp, Homo sapien
caagcgaccagtggttgacaccgca

SEQ ID NO: 2401741 - DNA, 25 bp, Homo sapien
tgtcctctggactcatcatcgcaat

SEQ ID NO: 2401742 - DNA, 25 bp, Homo sapien
ctctggactcatcatcgcaatgatt

SEQ ID NO: 2401743 - DNA, 25 bp, Homo sapien
gtcctctggactcatcatcgcaatg

SEQ ID NO: 2401744 - DNA, 25 bp, Homo sapien
tcctctggactcatcatcgcaatga

SEQ ID NO: 2401745 - DNA, 25 bp, Homo sapien
tctgtagatatgcatctcaatagtc

SEQ ID NO: 2401746 - DNA, 25 bp, Homo sapien
ctgtagatatgcatctcaatagtca

SEQ ID NO: 2401747 - DNA, 25 bp, Homo sapien
catctgtagatatgcatctcaatag

SEQ ID NO: 2401748 - DNA, 25 bp, Homo sapien
tcatctgtagatatgcatctcaata

SEQ ID NO: 2401749 - DNA, 25 bp, Homo sapien
ccacagatgccacaggtccttcagc

SEQ ID NO: 2401750 - DNA, 25 bp, Homo sapien
aaacaggcccacagatgccacaggt

SEQ ID NO: 2401751 - DNA, 25 bp, Homo sapien
gatgccacaggtccttcagcaccgt

SEQ ID NO: 2401752 - DNA, 25 bp, Homo sapien
aggtccttcagcaccgtctccaggg

SEQ ID NO: 2401753 - DNA, 25 bp, Homo sapien
cttctccaatgagaagagcaacagc

SEQ ID NO: 2401754 - DNA, 25 bp, Homo sapien
tctccaatgagaagagcaacagcaa

SEQ ID NO: 2401755 - DNA, 25 bp, Homo sapien
caacagcaaggaagatggccacagc

SEQ ID NO: 2401756 - DNA, 25 bp, Homo sapien
ccaatgagaagagcaacagcaagga

SEQ ID NO: 2401757 - DNA, 25 bp, Homo sapien
tgagggtctcctcatggcactttgt

SEQ ID NO: 2401758 - DNA, 25 bp, Homo sapien
agtgattacacgtggtgtccagtga

SEQ ID NO: 2401759 - DNA, 25 bp, Homo sapien
cagtgattacacgtggtgtccagtg

SEQ ID NO: 2401760 - DNA, 25 bp, Homo sapien
gaattttgagggtctcctcatggca

SEQ ID NO: 2401761 - DNA, 25 bp, Homo sapien
gaaataatggatgggcttgagacag

SEQ ID NO: 2401762 - DNA, 25 bp, Homo sapien
tgggaacatcggtagaactggagac

SEQ ID NO: 2401763 - DNA, 25 bp, Homo sapien
aaaaaacaatattaggcactgggct

SEQ ID NO: 2401764 - DNA, 25 bp, Homo sapien
taaattgactattggactcgggtcc

SEQ ID NO: 2401765 - DNA, 25 bp, Homo sapien
taaagagacgatatatgcttgggca

SEQ ID NO: 2401766 - DNA, 25 bp, Homo sapien
gaagcttcttactcattatacaggg

SEQ ID NO: 2401767 - DNA, 25 bp, Homo sapien
gccacaccggtattctgagcaggaa

SEQ ID NO: 2401768 - DNA, 25 bp, Homo sapien
cagtcaattgaaaataaggcagagc

SEQ ID NO: 2401769 - DNA, 25 bp, Homo sapien
ggagatttttggaaggcaccttcca

SEQ ID NO: 2401770 - DNA, 25 bp, Homo sapien
gacctgctacagagcccggattcag

SEQ ID NO: 2401771 - DNA, 25 bp, Homo sapien
tagactctgtcttggctccgtgtcc

SEQ ID NO: 2401772 - DNA, 25 bp, Homo sapien
gaggacctgagactaacgtagagag

SEQ ID NO: 2401773 - DNA, 25 bp, Homo sapien
atttatatcagagtaacaaatactt

SEQ ID NO: 2401774 - DNA, 25 bp, Homo sapien
ctttgaagttcagcgcacaaatttc

SEQ ID NO: 2401775 - DNA, 25 bp, Homo sapien
tcagcgcacaaatttctcgtgtggg

SEQ ID NO: 2401776 - DNA, 25 bp, Homo sapien
aaatacttatgaagtcctttgaagt

SEQ ID NO: 2401777 - DNA, 25 bp, Homo sapien
agagattttcctttgttcaaaggat

SEQ ID NO: 2401778 - DNA, 25 bp, Homo sapien
cacaaatccgaaaataattgaggaa

SEQ ID NO: 2401779 - DNA, 25 bp, Homo sapien
aataattgaggaaacaggttacatc

SEQ ID NO: 2401780 - DNA, 25 bp, Homo sapien
aattgaggaaacaggttacatcatt

SEQ ID NO: 2401781 - DNA, 25 bp, Homo sapien
aaataattgaggaaacaggttacat

SEQ ID NO: 2401782 - DNA, 25 bp, Homo sapien
cagggtagctatgttgttgggctcc

SEQ ID NO: 2401783 - DNA, 25 bp, Homo sapien
tgttgttgggctcccctacatccca

SEQ ID NO: 2401784 - DNA, 25 bp, Homo sapien
ggtttgaagagtctctcatggtggc

SEQ ID NO: 2401785 - DNA, 25 bp, Homo sapien
tgccttgggtttgaagagtctctca

SEQ ID NO: 2401786 - DNA, 25 bp, Homo sapien
actgaccctcgacaacctggtctga

SEQ ID NO: 2401787 - DNA, 25 bp, Homo sapien
gacaacctggtctgacagtccaata

SEQ ID NO: 2401788 - DNA, 25 bp, Homo sapien
tgacagtccaataaaaaactctctc

SEQ ID NO: 2401789 - DNA, 25 bp, Homo sapien
ggtctgacagtccaataaaaaactc

SEQ ID NO: 2401790 - DNA, 25 bp, Homo sapien
cctcctgtgagttgataaccaccag

SEQ ID NO: 2401791 - DNA, 25 bp, Homo sapien
tgagttgataaccaccaggtgagcc

SEQ ID NO: 2401792 - DNA, 25 bp, Homo sapien
gctcctcctgtgagttgataaccac

SEQ ID NO: 2401793 - DNA, 25 bp, Homo sapien
tgtgagttgataaccaccaggtgag

SEQ ID NO: 2401794 - DNA, 25 bp, Homo sapien
tagaaaagaagtagcagctggattg

SEQ ID NO: 2401795 - DNA, 25 bp, Homo sapien
gaagtagcagctggattgaaaatat

SEQ ID NO: 2401796 - DNA, 25 bp, Homo sapien
aaagaagtagcagctggattgaaaa

SEQ ID NO: 2401797 - DNA, 25 bp, Homo sapien
gaaaagaagtagcagctggattgaa

SEQ ID NO: 2401798 - DNA, 25 bp, Homo sapien
gacatagaagagcatagagagtata

SEQ ID NO: 2401799 - DNA, 25 bp, Homo sapien
catgctctcgtctctggacacaggg

SEQ ID NO: 2401800 - DNA, 25 bp, Homo sapien
aggtacactcctgggaataatacct

SEQ ID NO: 2401801 - DNA, 25 bp, Homo sapien
tttgctaggacttgcaacaggatga

SEQ ID NO: 2401802 - DNA, 25 bp, Homo sapien
cataattgtagcaggagagctctgt

SEQ ID NO: 2401803 - DNA, 25 bp, Homo sapien
tgatccataattgtagcaggagagc

SEQ ID NO: 2401804 - DNA, 25 bp, Homo sapien
ttctcatcacaggtttgaaagatgc

SEQ ID NO: 2401805 - DNA, 25 bp, Homo sapien
caggtttgaaagatgcgaaatgtca

SEQ ID NO: 2401806 - DNA, 25 bp, Homo sapien
caacagtccataagaacatttggga

SEQ ID NO: 2401807 - DNA, 25 bp, Homo sapien
gcaacagtccataagaacatttggg

SEQ ID NO: 2401808 - DNA, 25 bp, Homo sapien
cagcaacagtccataagaacatttg

SEQ ID NO: 2401809 - DNA, 25 bp, Homo sapien
cccagcaacagtccataagaacatt

SEQ ID NO: 2401810 - DNA, 25 bp, Homo sapien
cattgtgtttcagatgatttagatg

SEQ ID NO: 2401811 - DNA, 25 bp, Homo sapien
gtgcattgtgtttcagatgatttag

SEQ ID NO: 2401812 - DNA, 25 bp, Homo sapien
gcattgtgtttcagatgatttagat

SEQ ID NO: 2401813 - DNA, 25 bp, Homo sapien
ctgtgcattgtgtttcagatgattt

SEQ ID NO: 2401814 - DNA, 25 bp, Homo sapien
tttgttggtaagattcagggagaat

SEQ ID NO: 2401815 - DNA, 25 bp, Homo sapien
actttgtcttttaggaagttcagct

SEQ ID NO: 2401816 - DNA, 25 bp, Homo sapien
ttttgttggtaagattcagggagaa

SEQ ID NO: 2401817 - DNA, 25 bp, Homo sapien
tgtcttttaggaagttcagctccga

SEQ ID NO: 2401818 - DNA, 25 bp, Homo sapien
tctgagaaagcctcctacatagttg

SEQ ID NO: 2401819 - DNA, 25 bp, Homo sapien
tccgggaggacaaagtcattttctc

SEQ ID NO: 2401820 - DNA, 25 bp, Homo sapien
tgctatctgcctcatgatgcaaagt

SEQ ID NO: 2401821 - DNA, 25 bp, Homo sapien
gcctcctacatagttgccttgtgat

SEQ ID NO: 2401822 - DNA, 25 bp, Homo sapien
ttctaatttattcagcctcttgggc

SEQ ID NO: 2401823 - DNA, 25 bp, Homo sapien
tcataggctcagtttgtcatatcag

SEQ ID NO: 2401824 - DNA, 25 bp, Homo sapien
tgaactgccagaggtgttgatcttg

SEQ ID NO: 2401825 - DNA, 25 bp, Homo sapien
tcatatcagtgagcctgaaaggcta

SEQ ID NO: 2401826 - DNA, 25 bp, Homo sapien
catctctcctgttttaagtgtgatt

SEQ ID NO: 2401827 - DNA, 25 bp, Homo sapien
gtgatttgtcatatacatcaatagg

SEQ ID NO: 2401828 - DNA, 25 bp, Homo sapien
ttccttgaacgatgagaataaccca

SEQ ID NO: 2401829 - DNA, 25 bp, Homo sapien
ctgtttccttgaacgatgagaataa

SEQ ID NO: 2401830 - DNA, 25 bp, Homo sapien
ggcttaatttcgtatccagatctca

SEQ ID NO: 2401831 - DNA, 25 bp, Homo sapien
tgcaaacttccgtaattcacagatt

SEQ ID NO: 2401832 - DNA, 25 bp, Homo sapien
aatgtactctatctcttttggctta

SEQ ID NO: 2401833 - DNA, 25 bp, Homo sapien
ccctaagactggttcaacttcatag

SEQ ID NO: 2401834 - DNA, 25 bp, Homo sapien
tagggatcccttattggctccttac

SEQ ID NO: 2401835 - DNA, 25 bp, Homo sapien
caagggttgctaggtaataacggca

SEQ ID NO: 2401836 - DNA, 25 bp, Homo sapien
cagttgttagggacaaatagacacc

SEQ ID NO: 2401837 - DNA, 25 bp, Homo sapien
taacggcacagggatatggttattc

SEQ ID NO: 2401838 - DNA, 25 bp, Homo sapien
caccacgcccggccctctctctttc

SEQ ID NO: 2401839 - DNA, 25 bp, Homo sapien
cactttaggatgctcccaggtcctg

SEQ ID NO: 2401840 - DNA, 25 bp, Homo sapien
ctagaactatgagcgtgtgccacgg

SEQ ID NO: 2401841 - DNA, 25 bp, Homo sapien
tttctgagatgaagagacccacgag

SEQ ID NO: 2401842 - DNA, 25 bp, Homo sapien
ttaggaggtcctatagatcatggcc

SEQ ID NO: 2401843 - DNA, 25 bp, Homo sapien
tgaattttcatgcagcccttcccag

SEQ ID NO: 2401844 - DNA, 25 bp, Homo sapien
aaaggatgcgccgaagctgtctgga

SEQ ID NO: 2401845 - DNA, 25 bp, Homo sapien
tggagagacgaactgaattttcatg

SEQ ID NO: 2401846 - DNA, 25 bp, Homo sapien
cagcccttcccaggctttgaaagtt

SEQ ID NO: 2401847 - DNA, 25 bp, Homo sapien
caaaagtattccagcagtaaaaata

SEQ ID NO: 2401848 - DNA, 25 bp, Homo sapien
ctcggggccttgtctctgagccatt

SEQ ID NO: 2401849 - DNA, 25 bp, Homo sapien
gggtagaagacagttcaggttccaa

SEQ ID NO: 2401850 - DNA, 25 bp, Homo sapien
gacagttcaggttccaaatcgaggg

SEQ ID NO: 2401851 - DNA, 25 bp, Homo sapien
gaagacagttcaggttccaaatcga

SEQ ID NO: 2401852 - DNA, 25 bp, Homo sapien
gctccagaggtgaaccagaatcccc

SEQ ID NO: 2401853 - DNA, 25 bp, Homo sapien
gcaatcccgaatgcgggctgctgca

SEQ ID NO: 2401854 - DNA, 25 bp, Homo sapien
ctaactcattcattccgcatcgcaa

SEQ ID NO: 2401855 - DNA, 25 bp, Homo sapien
taatttcggctccagaggtgaacca

SEQ ID NO: 2401856 - DNA, 25 bp, Homo sapien
tctaggtcccagtccgagatgtagc

SEQ ID NO: 2401857 - DNA, 25 bp, Homo sapien
gaagagcaattccacgtggcagccg

SEQ ID NO: 2401858 - DNA, 25 bp, Homo sapien
tcatgatggctatttgcaccccggc

SEQ ID NO: 2401859 - DNA, 25 bp, Homo sapien
gccttgcggtcctcacagaagtaga

SEQ ID NO: 2401860 - DNA, 25 bp, Homo sapien
ggctagaagtgcctgttgatgtaac

SEQ ID NO: 2401861 - DNA, 25 bp, Homo sapien
gcctgttgatgtaacattgtggaaa

SEQ ID NO: 2401862 - DNA, 25 bp, Homo sapien
aaaatggctagaagtgcctgttgat

SEQ ID NO: 2401863 - DNA, 25 bp, Homo sapien
gaagtgcctgttgatgtaacattgt

SEQ ID NO: 2401864 - DNA, 25 bp, Homo sapien
gcaggacagtttatgaggaccattt

SEQ ID NO: 2401865 - DNA, 25 bp, Homo sapien
ggcaggacagtttatgaggaccatt

SEQ ID NO: 2401866 - DNA, 25 bp, Homo sapien
gaggcaggacagtttatgaggacca

SEQ ID NO: 2401867 - DNA, 25 bp, Homo sapien
gtggaggcaggacagtttatgagga

SEQ ID NO: 2401868 - DNA, 25 bp, Homo sapien
gcttgcaaagccgactttaattgat

SEQ ID NO: 2401869 - DNA, 25 bp, Homo sapien
actgcttgcaaagccgactttaatt

SEQ ID NO: 2401870 - DNA, 25 bp, Homo sapien
ttgcaaagccgactttaattgatac

SEQ ID NO: 2401871 - DNA, 25 bp, Homo sapien
tgcttgcaaagccgactttaattga

SEQ ID NO: 2401872 - DNA, 25 bp, Homo sapien
gcctcttcactacgtagcacaggta

SEQ ID NO: 2401873 - DNA, 25 bp, Homo sapien
ttgcgaagataaccaaagtccagtg

SEQ ID NO: 2401874 - DNA, 25 bp, Homo sapien
tagcccagcggacatttttgaattg

SEQ ID NO: 2401875 - DNA, 25 bp, Homo sapien
gaaaaggatgtagcactgtcacgcc

SEQ ID NO: 2401876 - DNA, 25 bp, Homo sapien
ttgcctccctgcaagtctcaggcca

SEQ ID NO: 2401877 - DNA, 25 bp, Homo sapien
gtccagagtgtcttcttgcctccct

SEQ ID NO: 2401878 - DNA, 25 bp, Homo sapien
gaaacgtagaagacgagatatttca

SEQ ID NO: 2401879 - DNA, 25 bp, Homo sapien
gatttatggttctcacattttggtg

SEQ ID NO: 2401880 - DNA, 25 bp, Homo sapien
gagtgcataaaattgcagattctac

SEQ ID NO: 2401881 - DNA, 25 bp, Homo sapien
caagttatctgcacccatagttcca

SEQ ID NO: 2401882 - DNA, 25 bp, Homo sapien
aagaaagctctaacatcatttgtaa

SEQ ID NO: 2401883 - DNA, 25 bp, Homo sapien
atcatttgtaagggattccatcttc

SEQ ID NO: 2401884 - DNA, 25 bp, Homo sapien
taagaaagctctaacatcatttgta

SEQ ID NO: 2401885 - DNA, 25 bp, Homo sapien
aataagaaagctctaacatcatttg

SEQ ID NO: 2401886 - DNA, 25 bp, Homo sapien
tatggatggacctggcttctatacc

SEQ ID NO: 2401887 - DNA, 25 bp, Homo sapien
caactgggcagcttgattagcaacg

SEQ ID NO: 2401888 - DNA, 25 bp, Homo sapien
tccgagagggcagagataatgatca

SEQ ID NO: 2401889 - DNA, 25 bp, Homo sapien
gaggaccttagtcttaagcacagag

SEQ ID NO: 2401890 - DNA, 25 bp, Homo sapien
ctgcgagaggggatcttggccacac

SEQ ID NO: 2401891 - DNA, 25 bp, Homo sapien
gaggcagtcatgtgcctgcgagagg

SEQ ID NO: 2401892 - DNA, 25 bp, Homo sapien
cctgcgagaggggatcttggccaca

SEQ ID NO: 2401893 - DNA, 25 bp, Homo sapien
tcatgtgcctgcgagaggggatctt

SEQ ID NO: 2401894 - DNA, 25 bp, Homo sapien
gtggaaggacagcaagtgcaagcaa

SEQ ID NO: 2401895 - DNA, 25 bp, Homo sapien
ccatcatctgatgagagtcatccca

SEQ ID NO: 2401896 - DNA, 25 bp, Homo sapien
tctgatgagagtcatcccatggtgg

SEQ ID NO: 2401897 - DNA, 25 bp, Homo sapien
tggaaggacagcaagtgcaagcaaa

SEQ ID NO: 2401898 - DNA, 25 bp, Homo sapien
tagaggttgtttgtgccttctcacc

SEQ ID NO: 2401899 - DNA, 25 bp, Homo sapien
ctttggccacaagtaccctgaagca

SEQ ID NO: 2401900 - DNA, 25 bp, Homo sapien
gctttattaagtaaggcctccctga

SEQ ID NO: 2401901 - DNA, 25 bp, Homo sapien
tcaggataccaggagggcattcaat

SEQ ID NO: 2401902 - DNA, 25 bp, Homo sapien
caaaagacattttattttgagaaat

SEQ ID NO: 2401903 - DNA, 25 bp, Homo sapien
cattttattttgagaaataaattgg

SEQ ID NO: 2401904 - DNA, 25 bp, Homo sapien
ttggaaactctgtgcctatgaggtt

SEQ ID NO: 2401905 - DNA, 25 bp, Homo sapien
taggagggtcaagttcgtgaagata

SEQ ID NO: 2401906 - DNA, 25 bp, Homo sapien
tacataatactggaattgaaatgct

SEQ ID NO: 2401907 - DNA, 25 bp, Homo sapien
tctgatggaaatgttgcaatgtgga

SEQ ID NO: 2401908 - DNA, 25 bp, Homo sapien
ttgtggactgctaccctcacctagg

SEQ ID NO: 2401909 - DNA, 25 bp, Homo sapien
ggaaaatggcttatccaaggctacg

SEQ ID NO: 2401910 - DNA, 25 bp, Homo sapien
tatgagtccaagttctatagctggc

SEQ ID NO: 2401911 - DNA, 25 bp, Homo sapien
caaggctacgtggttactgctagag

SEQ ID NO: 2401912 - DNA, 25 bp, Homo sapien
aatactgtctaagggttagctgtca

SEQ ID NO: 2401913 - DNA, 25 bp, Homo sapien
aggattggtttaagaaatactgtct

SEQ ID NO: 2401914 - DNA, 25 bp, Homo sapien
taagggttagctgtcaatggttgga

SEQ ID NO: 2401915 - DNA, 25 bp, Homo sapien
taggggtaaaagctggacattgcaa

SEQ ID NO: 2401916 - DNA, 25 bp, Homo sapien
tttcttctttcctctttttcaatga

SEQ ID NO: 2401917 - DNA, 25 bp, Homo sapien
cagaccagccatctgacggcaaagc

SEQ ID NO: 2401918 - DNA, 25 bp, Homo sapien
gaagtaattggagcgacggagtctc

SEQ ID NO: 2401919 - DNA, 25 bp, Homo sapien
acggagtctcctagggggcagacca

SEQ ID NO: 2401920 - DNA, 25 bp, Homo sapien
cagggaggaagtcggaagtaattgg

SEQ ID NO: 2401921 - DNA, 25 bp, Homo sapien
tttatatatccagctgccaattctt

SEQ ID NO: 2401922 - DNA, 25 bp, Homo sapien
ctagcacaggtgagcagtaaatgtt

SEQ ID NO: 2401923 - DNA, 25 bp, Homo sapien
tagtttcctttatatatccagctgc

SEQ ID NO: 2401924 - DNA, 25 bp, Homo sapien
tccagctgccaattcttctaatcat

SEQ ID NO: 2401925 - DNA, 25 bp, Homo sapien
tttcatagcttcgtgttccttacag

SEQ ID NO: 2401926 - DNA, 25 bp, Homo sapien
gtgttccttacagacaagacgagag

SEQ ID NO: 2401927 - DNA, 25 bp, Homo sapien
tgttgacgatgtacatacgtcgtaa

SEQ ID NO: 2401928 - DNA, 25 bp, Homo sapien
gacaagacgagagcagatctccttg

SEQ ID NO: 2401929 - DNA, 25 bp, Homo sapien
aaccggccgatgcacagagtagagc

SEQ ID NO: 2401930 - DNA, 25 bp, Homo sapien
ctggtgaagcataactgatgaatgc

SEQ ID NO: 2401931 - DNA, 25 bp, Homo sapien
aactgatgaatgcattgtttaaccg

SEQ ID NO: 2401932 - DNA, 25 bp, Homo sapien
gaatgcattgtttaaccggccgatg

SEQ ID NO: 2401933 - DNA, 25 bp, Homo sapien
tggcgcttccctacttggaagtaga

SEQ ID NO: 2401934 - DNA, 25 bp, Homo sapien
gactaaatgaagttttggcgcttcc

SEQ ID NO: 2401935 - DNA, 25 bp, Homo sapien
taaattgggctacatcctttccgtc

SEQ ID NO: 2401936 - DNA, 25 bp, Homo sapien
cagcaagagggaattgactaaatga

SEQ ID NO: 2401937 - DNA, 25 bp, Homo sapien
gcagtggtatttttttcactgaggg

SEQ ID NO: 2401938 - DNA, 25 bp, Homo sapien
cagtggtatttttttcactgaggga

SEQ ID NO: 2401939 - DNA, 25 bp, Homo sapien
agtggtatttttttcactgagggag

SEQ ID NO: 2401940 - DNA, 25 bp, Homo sapien
ctgcagtggtatttttttcactgag

SEQ ID NO: 2401941 - DNA, 25 bp, Homo sapien
tctttttaggatccttcagcagctg

SEQ ID NO: 2401942 - DNA, 25 bp, Homo sapien
tcctgtctttttaggatccttcagc

SEQ ID NO: 2401943 - DNA, 25 bp, Homo sapien
agcagctgcacactatccagaatgg

SEQ ID NO: 2401944 - DNA, 25 bp, Homo sapien
ctgcacactatccagaatgggctct

SEQ ID NO: 2401945 - DNA, 25 bp, Homo sapien
ctgggggtcccagatctgaactcac

SEQ ID NO: 2401946 - DNA, 25 bp, Homo sapien
aaggtgcaatatcagccaaaacagc

SEQ ID NO: 2401947 - DNA, 25 bp, Homo sapien
gcaatatcagccaaaacagccaaaa

SEQ ID NO: 2401948 - DNA, 25 bp, Homo sapien
tgcaatatcagccaaaacagccaaa

SEQ ID NO: 2401949 - DNA, 25 bp, Homo sapien
ggtgcaatatcagccaaaacagcca

SEQ ID NO: 2401950 - DNA, 25 bp, Homo sapien
tctgtagcgggatcattcaccagat

SEQ ID NO: 2401951 - DNA, 25 bp, Homo sapien
tcatctgtagcgggatcattcacca

SEQ ID NO: 2401952 - DNA, 25 bp, Homo sapien
tgtttcatctgtagcgggatcattc

SEQ ID NO: 2401953 - DNA, 25 bp, Homo sapien
gtttcatctgtagcgggatcattca

SEQ ID NO: 2401954 - DNA, 25 bp, Homo sapien
gtttctggagtcgcttgagtcacat

SEQ ID NO: 2401955 - DNA, 25 bp, Homo sapien
tcctcgttgactattgacccccagg

SEQ ID NO: 2401956 - DNA, 25 bp, Homo sapien
ctcctcgttgactattgacccccag

SEQ ID NO: 2401957 - DNA, 25 bp, Homo sapien
cctcgttgactattgacccccaggg

SEQ ID NO: 2401958 - DNA, 25 bp, Homo sapien
ctcgttgactattgacccccagggg

SEQ ID NO: 2401959 - DNA, 25 bp, Homo sapien
gactgcagctctatacctcgtaacc

SEQ ID NO: 2401960 - DNA, 25 bp, Homo sapien
tgagtgactgcagctctatacctcg

SEQ ID NO: 2401961 - DNA, 25 bp, Homo sapien
gtgactgcagctctatacctcgtaa

SEQ ID NO: 2401962 - DNA, 25 bp, Homo sapien
gtgagtgactgcagctctatacctc

SEQ ID NO: 2401963 - DNA, 25 bp, Homo sapien
tcatatgtgaccctctttgggtggt

SEQ ID NO: 2401964 - DNA, 25 bp, Homo sapien
ttagtttcataattcttgggaggcc

SEQ ID NO: 2401965 - DNA, 25 bp, Homo sapien
cacacacgtgtatagctgaggagct

SEQ ID NO: 2401966 - DNA, 25 bp, Homo sapien
tgggaggcctttcccctagtctgaa

SEQ ID NO: 2401967 - DNA, 25 bp, Homo sapien
ggtgatgatgaatgcagcaagaaac

SEQ ID NO: 2401968 - DNA, 25 bp, Homo sapien
aaacagcagcaccttgggtcccaag

SEQ ID NO: 2401969 - DNA, 25 bp, Homo sapien
gatgatgaatgcagcaagaaacagc

SEQ ID NO: 2401970 - DNA, 25 bp, Homo sapien
acagcagcaccttgggtcccaagag

SEQ ID NO: 2401971 - DNA, 25 bp, Homo sapien
aatgtgatgctcagaggcacatcag

SEQ ID NO: 2401972 - DNA, 25 bp, Homo sapien
tctgaggtccctgtctctttgtctt

SEQ ID NO: 2401973 - DNA, 25 bp, Homo sapien
caccgagtcctttggctgctgaatg

SEQ ID NO: 2401974 - DNA, 25 bp, Homo sapien
aaaggacttcagatttggcctccgc

SEQ ID NO: 2401975 - DNA, 25 bp, Homo sapien
gatgggaatttgcagttgctcacac

SEQ ID NO: 2401976 - DNA, 25 bp, Homo sapien
tgaacagagccactccctggaaagg

SEQ ID NO: 2401977 - DNA, 25 bp, Homo sapien
tctcttcagcactaacaaatttctt

SEQ ID NO: 2401978 - DNA, 25 bp, Homo sapien
ttcgtctcttcagcactaacaaatt

SEQ ID NO: 2401979 - DNA, 25 bp, Homo sapien
tctttttcaatattcgtctcttcag

SEQ ID NO: 2401980 - DNA, 25 bp, Homo sapien
tcaatattcgtctcttcagcactaa

SEQ ID NO: 2401981 - DNA, 25 bp, Homo sapien
ggatttgattaaagtctccttcact

SEQ ID NO: 2401982 - DNA, 25 bp, Homo sapien
tttccctggatttgattaaagtctc

SEQ ID NO: 2401983 - DNA, 25 bp, Homo sapien
cctggatttgattaaagtctccttc

SEQ ID NO: 2401984 - DNA, 25 bp, Homo sapien
tcacgtttccctggatttgattaaa

SEQ ID NO: 2401985 - DNA, 25 bp, Homo sapien
ggtatggtggtgatgcggaggtggg

SEQ ID NO: 2401986 - DNA, 25 bp, Homo sapien
ggtggtgatgcggaggtggggaatg

SEQ ID NO: 2401987 - DNA, 25 bp, Homo sapien
agggtatggtggtgatgcggaggtg

SEQ ID NO: 2401988 - DNA, 25 bp, Homo sapien
gagggtatggtggtgatgcggaggt

SEQ ID NO: 2401989 - DNA, 25 bp, Homo sapien
tacttttgcccactctattaggcaa

SEQ ID NO: 2401990 - DNA, 25 bp, Homo sapien
ttgcccactctattaggcaataagc

SEQ ID NO: 2401991 - DNA, 25 bp, Homo sapien
tttgcccactctattaggcaataag

SEQ ID NO: 2401992 - DNA, 25 bp, Homo sapien
cttttgcccactctattaggcaata

SEQ ID NO: 2401993 - DNA, 25 bp, Homo sapien
taaatgctactgaagcatgaaccca

SEQ ID NO: 2401994 - DNA, 25 bp, Homo sapien
cgttagtaaatgctactgaagcatg

SEQ ID NO: 2401995 - DNA, 25 bp, Homo sapien
cattatttttcacgttagtaaatgc

SEQ ID NO: 2401996 - DNA, 25 bp, Homo sapien
ctgaagcatgaacccaaacagcagg

SEQ ID NO: 2401997 - DNA, 25 bp, Homo sapien
aggtgctggagtctgcttgtcaggg

SEQ ID NO: 2401998 - DNA, 25 bp, Homo sapien
gagtctgcttgtcagggaggggggc

SEQ ID NO: 2401999 - DNA, 25 bp, Homo sapien
tgctggagtctgcttgtcagggagg

SEQ ID NO: 2402000 - DNA, 25 bp, Homo sapien
agtctgcttgtcagggaggggggca

SEQ ID NO: 2402001 - DNA, 25 bp, Homo sapien
tatgccatatgtatctgtgtacatg

SEQ ID NO: 2402002 - DNA, 25 bp, Homo sapien
ttatatgccatatgtatctgtgtac

SEQ ID NO: 2402003 - DNA, 25 bp, Homo sapien
catatgtatctgtgtacatgttagg

SEQ ID NO: 2402004 - DNA, 25 bp, Homo sapien
tctggcttcatggtaactaatgcca

SEQ ID NO: 2402005 - DNA, 25 bp, Homo sapien
tagtgggtcagtggttcagaaggaa

SEQ ID NO: 2402006 - DNA, 25 bp, Homo sapien
ctagtgggtcagtggttcagaagga

SEQ ID NO: 2402007 - DNA, 25 bp, Homo sapien
tgggtcagtggttcagaaggaataa

SEQ ID NO: 2402008 - DNA, 25 bp, Homo sapien
agtgggtcagtggttcagaaggaat

SEQ ID NO: 2402009 - DNA, 25 bp, Homo sapien
tactggaatccttttgacttgtcag

SEQ ID NO: 2402010 - DNA, 25 bp, Homo sapien
tctttatgttagcagatgggaaaaa

SEQ ID NO: 2402011 - DNA, 25 bp, Homo sapien
ttctttatgttagcagatgggaaaa

SEQ ID NO: 2402012 - DNA, 25 bp, Homo sapien
agatttactggaatccttttgactt

SEQ ID NO: 2402013 - DNA, 25 bp, Homo sapien
cccctaagaaggcaagcagctgttg

SEQ ID NO: 2402014 - DNA, 25 bp, Homo sapien
gaatccagttggagcacccctaaga

SEQ ID NO: 2402015 - DNA, 25 bp, Homo sapien
ttctggcatctcagatgtgaatcca

SEQ ID NO: 2402016 - DNA, 25 bp, Homo sapien
aagtcttcacccaacacttctggca

SEQ ID NO: 2402017 - DNA, 25 bp, Homo sapien
ggaccatcttatttcaccagcttgc

SEQ ID NO: 2402018 - DNA, 25 bp, Homo sapien
tcctgatggaggtaggcttctcatt

SEQ ID NO: 2402019 - DNA, 25 bp, Homo sapien
gctagttacaattttctctcccagg

SEQ ID NO: 2402020 - DNA, 25 bp, Homo sapien
aaaactccatgtgtagactgtgtgc

SEQ ID NO: 2402021 - DNA, 25 bp, Homo sapien
cccaggtttatgcatttctcttgcc

SEQ ID NO: 2402022 - DNA, 25 bp, Homo sapien
tagggtttcactatatgttgatcag

SEQ ID NO: 2402023 - DNA, 25 bp, Homo sapien
ctcccaggtttatgcatttctcttg

SEQ ID NO: 2402024 - DNA, 25 bp, Homo sapien
gcctcccaggtttatgcatttctct

SEQ ID NO: 2402025 - DNA, 25 bp, Homo sapien
gttttcataagtagactccactggg

SEQ ID NO: 2402026 - DNA, 25 bp, Homo sapien
ggagcatgatgggaaacagagtttt

SEQ ID NO: 2402027 - DNA, 25 bp, Homo sapien
cgaatgccagcgttatatatttgca

SEQ ID NO: 2402028 - DNA, 25 bp, Homo sapien
taaagctgaagtgatttcgaatgcc

SEQ ID NO: 2402029 - DNA, 25 bp, Homo sapien
aatagtacctctcatctgtgcagtg

SEQ ID NO: 2402030 - DNA, 25 bp, Homo sapien
ctttcgctgaatgaccatactgtgg

SEQ ID NO: 2402031 - DNA, 25 bp, Homo sapien
aaaagaacttatcttgcgcagggta

SEQ ID NO: 2402032 - DNA, 25 bp, Homo sapien
gcagtgtctcatttcacctcagaga

SEQ ID NO: 2402033 - DNA, 25 bp, Homo sapien
gggtggctgcctaactctagtgaaa

SEQ ID NO: 2402034 - DNA, 25 bp, Homo sapien
gaaatattctaactgcttgcactgt

SEQ ID NO: 2402035 - DNA, 25 bp, Homo sapien
tgaaagtttggcctttgaagatcct

SEQ ID NO: 2402036 - DNA, 25 bp, Homo sapien
tgttctttaccagccttttcaggag

SEQ ID NO: 2402037 - DNA, 25 bp, Homo sapien
tgtcagggataggactacaactcgt

SEQ ID NO: 2402038 - DNA, 25 bp, Homo sapien
tacaggtttgaacagataggaggac

SEQ ID NO: 2402039 - DNA, 25 bp, Homo sapien
ggctaagcacattaaccaaggacat

SEQ ID NO: 2402040 - DNA, 25 bp, Homo sapien
tggtgttccgaatacacagtgagct

SEQ ID NO: 2402041 - DNA, 25 bp, Homo sapien
gcctgtttgaataccactgacttgt

SEQ ID NO: 2402042 - DNA, 25 bp, Homo sapien
ggtttcagtcagacagacatccctg

SEQ ID NO: 2402043 - DNA, 25 bp, Homo sapien
tcaggagagccttgtactcagcaag

SEQ ID NO: 2402044 - DNA, 25 bp, Homo sapien
ctctaggagcatccgtgggaacggc

SEQ ID NO: 2402045 - DNA, 25 bp, Homo sapien
cccagcttagcatgaacatggatca

SEQ ID NO: 2402046 - DNA, 25 bp, Homo sapien
caactaaactggtaggtggcagcag

SEQ ID NO: 2402047 - DNA, 25 bp, Homo sapien
tgatggctactgacttaaagtctgc

SEQ ID NO: 2402048 - DNA, 25 bp, Homo sapien
gaaaatggcttcttgaggtggcagc

SEQ ID NO: 2402049 - DNA, 25 bp, Homo sapien
gtcaatgcaggagggacgcctgcat

SEQ ID NO: 2402050 - DNA, 25 bp, Homo sapien
gcaagtcccgcttttgtagaggagg

SEQ ID NO: 2402051 - DNA, 25 bp, Homo sapien
gcaagtaccccaaccttgtatctct

SEQ ID NO: 2402052 - DNA, 25 bp, Homo sapien
gattatttacacacgtttcagaggt

SEQ ID NO: 2402053 - DNA, 25 bp, Homo sapien
ggatgatcattggtcccagagagca

SEQ ID NO: 2402054 - DNA, 25 bp, Homo sapien
taggctggtttgatataggatgatc

SEQ ID NO: 2402055 - DNA, 25 bp, Homo sapien
aagctcattcttcctgttggatcca

SEQ ID NO: 2402056 - DNA, 25 bp, Homo sapien
ggatccattccagttaccaaaaaca

SEQ ID NO: 2402057 - DNA, 25 bp, Homo sapien
ttcgaatagacaatacacgcccacg

SEQ ID NO: 2402058 - DNA, 25 bp, Homo sapien
tttccactctcaatgtaggcccctg

SEQ ID NO: 2402059 - DNA, 25 bp, Homo sapien
tcctagacttaagctgtccactggc

SEQ ID NO: 2402060 - DNA, 25 bp, Homo sapien
tggacctttcttgccaggaggtaaa

SEQ ID NO: 2402061 - DNA, 25 bp, Homo sapien
gattctagacatcctcgttggtgta

SEQ ID NO: 2402062 - DNA, 25 bp, Homo sapien
atataacagtcctgattaatccaca

SEQ ID NO: 2402063 - DNA, 25 bp, Homo sapien
tatgacttgcttaagaactccttcc

SEQ ID NO: 2402064 - DNA, 25 bp, Homo sapien
tgtagcttgccttttaatggtgcct

SEQ ID NO: 2402065 - DNA, 25 bp, Homo sapien
gactagttcctagaagcctggcaga

SEQ ID NO: 2402066 - DNA, 25 bp, Homo sapien
gaatgctttacctcgttttcaccac

SEQ ID NO: 2402067 - DNA, 25 bp, Homo sapien
aaatccaggtgtgaattaaacaacg

SEQ ID NO: 2402068 - DNA, 25 bp, Homo sapien
tttcaccactagttctaccagtcag

SEQ ID NO: 2402069 - DNA, 25 bp, Homo sapien
tcataaatacaacgacaacggctcc

SEQ ID NO: 2402070 - DNA, 25 bp, Homo sapien
gaaatcgaagcacacacaaatccct

SEQ ID NO: 2402071 - DNA, 25 bp, Homo sapien
tctacatctcgttatactctggcct

SEQ ID NO: 2402072 - DNA, 25 bp, Homo sapien
gaaaatgaagtcaactcctaatggg

SEQ ID NO: 2402073 - DNA, 25 bp, Homo sapien
gcagtagtcagcttacaagttcccc

SEQ ID NO: 2402074 - DNA, 25 bp, Homo sapien
caggaggacaagtgacagatacaga

SEQ ID NO: 2402075 - DNA, 25 bp, Homo sapien
gaatgtgggcatgaacctgacacgg

SEQ ID NO: 2402076 - DNA, 25 bp, Homo sapien
ccctgtccgctttcttaggctgtga

SEQ ID NO: 2402077 - DNA, 25 bp, Homo sapien
cccatggtgactgtccagcaatacc

SEQ ID NO: 2402078 - DNA, 25 bp, Homo sapien
tctgagcctaatgattgcctgaggg

SEQ ID NO: 2402079 - DNA, 25 bp, Homo sapien
aatccagctctgagcctaatgattg

SEQ ID NO: 2402080 - DNA, 25 bp, Homo sapien
gcagaaacccatggtgactgtccag

SEQ ID NO: 2402081 - DNA, 25 bp, Homo sapien
gagaactaggactgctcagccttat

SEQ ID NO: 2402082 - DNA, 25 bp, Homo sapien
tcccagtgtagctgtggctcagagt

SEQ ID NO: 2402083 - DNA, 25 bp, Homo sapien
tcagccttatcctggagtggagcat

SEQ ID NO: 2402084 - DNA, 25 bp, Homo sapien
tacatagtatggtaaggcaaggaac

SEQ ID NO: 2402085 - DNA, 25 bp, Homo sapien
tagagacttggttggcatcttctgc

SEQ ID NO: 2402086 - DNA, 25 bp, Homo sapien
ggagtataagtacctgccttaggca

SEQ ID NO: 2402087 - DNA, 25 bp, Homo sapien
ggctgttgtcattctttctgcatcc

SEQ ID NO: 2402088 - DNA, 25 bp, Homo sapien
ggatccccagccagtatagagactt

SEQ ID NO: 2402089 - DNA, 25 bp, Homo sapien
gggagggatgcaaacaaataacaaa

SEQ ID NO: 2402090 - DNA, 25 bp, Homo sapien
gaaatgtgggcaagaagacacttcc

SEQ ID NO: 2402091 - DNA, 25 bp, Homo sapien
caggtttctgggcacatggcctaaa

SEQ ID NO: 2402092 - DNA, 25 bp, Homo sapien
ccctcttttgtgtccagtggagcca

SEQ ID NO: 2402093 - DNA, 25 bp, Homo sapien
tgaaaaaaaggtcaaaaccacatgc

SEQ ID NO: 2402094 - DNA, 25 bp, Homo sapien
ctgtggagaaagtgcgacatgttta

SEQ ID NO: 2402095 - DNA, 25 bp, Homo sapien
tactggtagggaaccaggagtaaga

SEQ ID NO: 2402096 - DNA, 25 bp, Homo sapien
gaaagtgcgacatgtttagaaatac

SEQ ID NO: 2402097 - DNA, 25 bp, Homo sapien
tagaaatactggtagggaaccagga

SEQ ID NO: 2402098 - DNA, 25 bp, Homo sapien
tcatggaggctactatagggtacag

SEQ ID NO: 2402099 - DNA, 25 bp, Homo sapien
gcaaagtagttccaagcagcaagaa

SEQ ID NO: 2402100 - DNA, 25 bp, Homo sapien
tgagcctgctacaccattttgccca

SEQ ID NO: 2402101 - DNA, 25 bp, Homo sapien
aaaacaaacggccagtgagcctgct

SEQ ID NO: 2402102 - DNA, 25 bp, Homo sapien
gcacatttcgaggtttagaacggca

SEQ ID NO: 2402103 - DNA, 25 bp, Homo sapien
tggtaataaatggtcatccctttct

SEQ ID NO: 2402104 - DNA, 25 bp, Homo sapien
cgaggtttagaacggcagacaaagt

SEQ ID NO: 2402105 - DNA, 25 bp, Homo sapien
acgatatgctgcaggcacatttcga

SEQ ID NO: 2402106 - DNA, 25 bp, Homo sapien
ttggtcacccaaccttgtttgcagg

SEQ ID NO: 2402107 - DNA, 25 bp, Homo sapien
tggtcacccaaccttgtttgcaggc

SEQ ID NO: 2402108 - DNA, 25 bp, Homo sapien
ttgtttgcaggctacaaattcaacc

SEQ ID NO: 2402109 - DNA, 25 bp, Homo sapien
ccttgtttgcaggctacaaattcaa

SEQ ID NO: 2402110 - DNA, 25 bp, Homo sapien
taccagtcgctggtataggaacccc

SEQ ID NO: 2402111 - DNA, 25 bp, Homo sapien
tgctaccaggttgccaagatcctgc

SEQ ID NO: 2402112 - DNA, 25 bp, Homo sapien
ctaccaggttgccaagatcctgcca

SEQ ID NO: 2402113 - DNA, 25 bp, Homo sapien
cattcctttggctcccactaccagt

SEQ ID NO: 2402114 - DNA, 25 bp, Homo sapien
taaaaactcagataggataacctct

SEQ ID NO: 2402115 - DNA, 25 bp, Homo sapien
catttattgtcagctgtttcctaag

SEQ ID NO: 2402116 - DNA, 25 bp, Homo sapien
gataacctctgcatttattgtcagc

SEQ ID NO: 2402117 - DNA, 25 bp, Homo sapien
gaaatagtaaaaactcagataggat

SEQ ID NO: 2402118 - DNA, 25 bp, Homo sapien
aggcatgtgccactgtgctggctaa

SEQ ID NO: 2402119 - DNA, 25 bp, Homo sapien
ggcatgtgccactgtgctggctaat

SEQ ID NO: 2402120 - DNA, 25 bp, Homo sapien
gcatgtgccactgtgctggctaatt

SEQ ID NO: 2402121 - DNA, 25 bp, Homo sapien
catgtgccactgtgctggctaattt

SEQ ID NO: 2402122 - DNA, 25 bp, Homo sapien
caatttgtgcttatgtaccaccata

SEQ ID NO: 2402123 - DNA, 25 bp, Homo sapien
aaggaaggaaggtctgttctgataa

SEQ ID NO: 2402124 - DNA, 25 bp, Homo sapien
ttctgataaaggaaggcatactcac

SEQ ID NO: 2402125 - DNA, 25 bp, Homo sapien
ccaccatatagttactgaccttaaa

SEQ ID NO: 2402126 - DNA, 25 bp, Homo sapien
taagatggaacccacactgaggtgg

SEQ ID NO: 2402127 - DNA, 25 bp, Homo sapien
gtgacaagtaagatggaacccacac

SEQ ID NO: 2402128 - DNA, 25 bp, Homo sapien
ctttgccacgctcctcagacacagg

SEQ ID NO: 2402129 - DNA, 25 bp, Homo sapien
caatcttggactttgccacgctcct

SEQ ID NO: 2402130 - DNA, 25 bp, Homo sapien
atcatcaccactgcacgacgctgct

SEQ ID NO: 2402131 - DNA, 25 bp, Homo sapien
gacgctgctccttgccacagtggtt

SEQ ID NO: 2402132 - DNA, 25 bp, Homo sapien
ggtgtgtcgattgcaggagatcatc

SEQ ID NO: 2402133 - DNA, 25 bp, Homo sapien
cagtggttgtcatattcatcacccc

SEQ ID NO: 2402134 - DNA, 25 bp, Homo sapien
aagatgtgagtctcgttgagtctcc

SEQ ID NO: 2402135 - DNA, 25 bp, Homo sapien
tacttttgttgatttgcaccaggcc

SEQ ID NO: 2402136 - DNA, 25 bp, Homo sapien
tgtggttgccagcttcccggcacac

SEQ ID NO: 2402137 - DNA, 25 bp, Homo sapien
tctcgttgagtctccctaccactgt

SEQ ID NO: 2402138 - DNA, 25 bp, Homo sapien
ggtttcagcctcttcactagagcca

SEQ ID NO: 2402139 - DNA, 25 bp, Homo sapien
aaacagtggtttcagcctcttcact

SEQ ID NO: 2402140 - DNA, 25 bp, Homo sapien
tcactagagccaactctttctctga

SEQ ID NO: 2402141 - DNA, 25 bp, Homo sapien
tagagccaactctttctctgactct

SEQ ID NO: 2402142 - DNA, 25 bp, Homo sapien
caagtcgcaagttttttcttctgtc

SEQ ID NO: 2402143 - DNA, 25 bp, Homo sapien
tttttcttctgtctgccaggattct

SEQ ID NO: 2402144 - DNA, 25 bp, Homo sapien
tttcttctgtctgccaggattctct

SEQ ID NO: 2402145 - DNA, 25 bp, Homo sapien
tcttctgtctgccaggattctctca

SEQ ID NO: 2402146 - DNA, 25 bp, Homo sapien
ggagtagtagtagcagtccagtcct

SEQ ID NO: 2402147 - DNA, 25 bp, Homo sapien
caggagtagtagtagcagtccagtc

SEQ ID NO: 2402148 - DNA, 25 bp, Homo sapien
gccaggagtagtagtagcagtccag

SEQ ID NO: 2402149 - DNA, 25 bp, Homo sapien
ccaggagtagtagtagcagtccagt

SEQ ID NO: 2402150 - DNA, 25 bp, Homo sapien
aatgatgacagcttgggtggagcca

SEQ ID NO: 2402151 - DNA, 25 bp, Homo sapien
ctttcagaacaaactacaaagttgg

SEQ ID NO: 2402152 - DNA, 25 bp, Homo sapien
aagattctctggcatatgcaacaca

SEQ ID NO: 2402153 - DNA, 25 bp, Homo sapien
tctaatgtataggtgagtctttcag

SEQ ID NO: 2402154 - DNA, 25 bp, Homo sapien
tgatgtagtcttctgaaacctcttt

SEQ ID NO: 2402155 - DNA, 25 bp, Homo sapien
ttggcctctacaggtcacaaatctc

SEQ ID NO: 2402156 - DNA, 25 bp, Homo sapien
tagacttcccataagtacagttgtc

SEQ ID NO: 2402157 - DNA, 25 bp, Homo sapien
atctcaagggtttctagacttccca

SEQ ID NO: 2402158 - DNA, 25 bp, Homo sapien
gtttccatagaataatcatagctaa

SEQ ID NO: 2402159 - DNA, 25 bp, Homo sapien
gtccaaggccctcataacacattta

SEQ ID NO: 2402160 - DNA, 25 bp, Homo sapien
acaacagactactgccttgggccag

SEQ ID NO: 2402161 - DNA, 25 bp, Homo sapien
taatcatagctaaccaagaggtcca

SEQ ID NO: 2402162 - DNA, 25 bp, Homo sapien
taggagactccttcttctagactga

SEQ ID NO: 2402163 - DNA, 25 bp, Homo sapien
aatgaaatggaagggcccagtagcc

SEQ ID NO: 2402164 - DNA, 25 bp, Homo sapien
gacgattcgtggcataaagataact

SEQ ID NO: 2402165 - DNA, 25 bp, Homo sapien
caacttgaccagctgactcactaaa

SEQ ID NO: 2402166 - DNA, 25 bp, Homo sapien
ccctgctttctaaatatcgtaaatc

SEQ ID NO: 2402167 - DNA, 25 bp, Homo sapien
ttctaaatatcgtaaatcccctctc

SEQ ID NO: 2402168 - DNA, 25 bp, Homo sapien
ctaaatatcgtaaatcccctctctg

SEQ ID NO: 2402169 - DNA, 25 bp, Homo sapien
tgctttctaaatatcgtaaatcccc

SEQ ID NO: 2402170 - DNA, 25 bp, Homo sapien
tcagccagatctttggctagaacca

SEQ ID NO: 2402171 - DNA, 25 bp, Homo sapien
cgcttaagtgtgagcgcaacccagc

SEQ ID NO: 2402172 - DNA, 25 bp, Homo sapien
gagaatgcgattccggctcctgtca

SEQ ID NO: 2402173 - DNA, 25 bp, Homo sapien
gctagaaccatggtcaagggagaat

SEQ ID NO: 2402174 - DNA, 25 bp, Homo sapien
gaaactggagtagccaaagctcaga

SEQ ID NO: 2402175 - DNA, 25 bp, Homo sapien
gtagccaaagctcagaatccccagt

SEQ ID NO: 2402176 - DNA, 25 bp, Homo sapien
tgtcgtgggaaactggagtagccaa

SEQ ID NO: 2402177 - DNA, 25 bp, Homo sapien
ctggagtagccaaagctcagaatcc

SEQ ID NO: 2402178 - DNA, 25 bp, Homo sapien
gccaagaggccgctgggcaaccgct

SEQ ID NO: 2402179 - DNA, 25 bp, Homo sapien
tctgggaaccggaaacaggaagcgc

SEQ ID NO: 2402180 - DNA, 25 bp, Homo sapien
gctgtgccccactctgggaaccgga

SEQ ID NO: 2402181 - DNA, 25 bp, Homo sapien
gcagaccccggtcccagagctagtt

SEQ ID NO: 2402182 - DNA, 25 bp, Homo sapien
tgtcgtttcgccttttctggttgcc

SEQ ID NO: 2402183 - DNA, 25 bp, Homo sapien
gctccaatcactatcgaggttgtcg

SEQ ID NO: 2402184 - DNA, 25 bp, Homo sapien
tattctgggactttagctccgccct

SEQ ID NO: 2402185 - DNA, 25 bp, Homo sapien
tgtgaccatagaaccatttcgcccc

SEQ ID NO: 2402186 - DNA, 25 bp, Homo sapien
tgttccgccgcgtggaagcttcgag

SEQ ID NO: 2402187 - DNA, 25 bp, Homo sapien
ccgttcgccgcctgagagggacgct

SEQ ID NO: 2402188 - DNA, 25 bp, Homo sapien
tcgagtctcgactccactgttgacc

SEQ ID NO: 2402189 - DNA, 25 bp, Homo sapien
cgcctgagagggacgctgttccgcc

SEQ ID NO: 2402190 - DNA, 25 bp, Homo sapien
tactgcttcgtggtattttgcttga

SEQ ID NO: 2402191 - DNA, 25 bp, Homo sapien
tgttactgttatctctgtcgttcct

SEQ ID NO: 2402192 - DNA, 25 bp, Homo sapien
tctgtcgttccttactgcttcgtgg

SEQ ID NO: 2402193 - DNA, 25 bp, Homo sapien
attattgttactgttatctctgtcg

SEQ ID NO: 2402194 - DNA, 25 bp, Homo sapien
attcttaaactctgttcagatgtta

SEQ ID NO: 2402195 - DNA, 25 bp, Homo sapien
ctcattcttaaactctgttcagatg

SEQ ID NO: 2402196 - DNA, 25 bp, Homo sapien
tcattcttaaactctgttcagatgt

SEQ ID NO: 2402197 - DNA, 25 bp, Homo sapien
tcttaaactctgttcagatgttatt

SEQ ID NO: 2402198 - DNA, 25 bp, Homo sapien
ctcttggtgactgcctagagtggca

SEQ ID NO: 2402199 - DNA, 25 bp, Homo sapien
ttggtgactgcctagagtggcattg

SEQ ID NO: 2402200 - DNA, 25 bp, Homo sapien
cctagagtggcattgggctggaggg

SEQ ID NO: 2402201 - DNA, 25 bp, Homo sapien
tgactgcctagagtggcattgggct

SEQ ID NO: 2402202 - DNA, 25 bp, Homo sapien
tcaccaggagatttaggctttcaca

SEQ ID NO: 2402203 - DNA, 25 bp, Homo sapien
tgtaccactattacagtgtcatatg

SEQ ID NO: 2402204 - DNA, 25 bp, Homo sapien
tgctagttagcatacttcacattgc

SEQ ID NO: 2402205 - DNA, 25 bp, Homo sapien
gctgtttagcatgtttcaacttgaa

SEQ ID NO: 2402206 - DNA, 25 bp, Homo sapien
tctttagcttactgagcctctttaa

SEQ ID NO: 2402207 - DNA, 25 bp, Homo sapien
cactgagttgtcaatctatgttatc

SEQ ID NO: 2402208 - DNA, 25 bp, Homo sapien
tctatgttatctttagcttactgag

SEQ ID NO: 2402209 - DNA, 25 bp, Homo sapien
tctgatatcactgagttgtcaatct

SEQ ID NO: 2402210 - DNA, 25 bp, Homo sapien
ctgataggattaatgttcttgtaag

SEQ ID NO: 2402211 - DNA, 25 bp, Homo sapien
gagaagtctgcaacccacaggggaa

SEQ ID NO: 2402212 - DNA, 25 bp, Homo sapien
agtagtgttaagtattattatggac

SEQ ID NO: 2402213 - DNA, 25 bp, Homo sapien
cacttgaggatatagtgagaagtct

SEQ ID NO: 2402214 - DNA, 25 bp, Homo sapien
cttgtgtgtcttgccatgtgttgta

SEQ ID NO: 2402215 - DNA, 25 bp, Homo sapien
attggagagtaagtctaatgccatt

SEQ ID NO: 2402216 - DNA, 25 bp, Homo sapien
tgtgtgtcttgccatgtgttgtatt

SEQ ID NO: 2402217 - DNA, 25 bp, Homo sapien
gagtaagtctaatgccattctgtca

SEQ ID NO: 2402218 - DNA, 25 bp, Homo sapien
aagatgcgatatccttccctgactt

SEQ ID NO: 2402219 - DNA, 25 bp, Homo sapien
ttaagatgcgatatccttccctgac

SEQ ID NO: 2402220 - DNA, 25 bp, Homo sapien
taagatgcgatatccttccctgact

SEQ ID NO: 2402221 - DNA, 25 bp, Homo sapien
cagttcttctgagtgtgctgctata

SEQ ID NO: 2402222 - DNA, 25 bp, Homo sapien
ttcttctgagtgtgctgctatacca

SEQ ID NO: 2402223 - DNA, 25 bp, Homo sapien
tgcagttcttctgagtgtgctgcta

SEQ ID NO: 2402224 - DNA, 25 bp, Homo sapien
tgactgcagttcttctgagtgtgct

SEQ ID NO: 2402225 - DNA, 25 bp, Homo sapien
ctaaagcagtgggggagaacatata

SEQ ID NO: 2402226 - DNA, 25 bp, Homo sapien
taaagcagtgggggagaacatatag

SEQ ID NO: 2402227 - DNA, 25 bp, Homo sapien
cagggcaaagttttggtgatagtaa

SEQ ID NO: 2402228 - DNA, 25 bp, Homo sapien
gattatgatgacttcacccctggtt

SEQ ID NO: 2402229 - DNA, 25 bp, Homo sapien
ggctcttcatgattatgatgacttc

SEQ ID NO: 2402230 - DNA, 25 bp, Homo sapien
cttgctagtaatgctctcacagggc

SEQ ID NO: 2402231 - DNA, 25 bp, Homo sapien
cagagcttctgactccaaagattct

SEQ ID NO: 2402232 - DNA, 25 bp, Homo sapien
agagcttctgactccaaagattctt

SEQ ID NO: 2402233 - DNA, 25 bp, Homo sapien
gagcttctgactccaaagattcttc

SEQ ID NO: 2402234 - DNA, 25 bp, Homo sapien
agcttctgactccaaagattcttcc

SEQ ID NO: 2402235 - DNA, 25 bp, Homo sapien
ctagatgaagcgctagctctctctt

SEQ ID NO: 2402236 - DNA, 25 bp, Homo sapien
gctagatgaagcgctagctctctct

SEQ ID NO: 2402237 - DNA, 25 bp, Homo sapien
tggctagatgaagcgctagctctct

SEQ ID NO: 2402238 - DNA, 25 bp, Homo sapien
ggctagatgaagcgctagctctctc

SEQ ID NO: 2402239 - DNA, 25 bp, Homo sapien
atatttttcacagttaagtgggcac

SEQ ID NO: 2402240 - DNA, 25 bp, Homo sapien
acatatttttcacagttaagtgggc

SEQ ID NO: 2402241 - DNA, 25 bp, Homo sapien
tcaacaaacatatttttcacagtta

SEQ ID NO: 2402242 - DNA, 25 bp, Homo sapien
aaacatatttttcacagttaagtgg

SEQ ID NO: 2402243 - DNA, 25 bp, Homo sapien
acccaaagcccctgcaaccttggtg

SEQ ID NO: 2402244 - DNA, 25 bp, Homo sapien
aaagcccctgcaaccttggtgtttg

SEQ ID NO: 2402245 - DNA, 25 bp, Homo sapien
cacaaatcttccatccacttgtgtg

SEQ ID NO: 2402246 - DNA, 25 bp, Homo sapien
tccacaaatcttccatccacttgtg

SEQ ID NO: 2402247 - DNA, 25 bp, Homo sapien
atccaattctgaggatggagattct

SEQ ID NO: 2402248 - DNA, 25 bp, Homo sapien
gagtcagagaccaatcaacaggatg

SEQ ID NO: 2402249 - DNA, 25 bp, Homo sapien
cactatgcacgaaggtggcattctc

SEQ ID NO: 2402250 - DNA, 25 bp, Homo sapien
tgccttatataagagcgtctgcagg

SEQ ID NO: 2402251 - DNA, 25 bp, Homo sapien
caagtcttgtttatagacacaagcc

SEQ ID NO: 2402252 - DNA, 25 bp, Homo sapien
gggtctggggattccagccaagtct

SEQ ID NO: 2402253 - DNA, 25 bp, Homo sapien
acctcattcagtatctgtattgcag

SEQ ID NO: 2402254 - DNA, 25 bp, Homo sapien
tgtattgcagggacaaaatatcctt

SEQ ID NO: 2402255 - DNA, 25 bp, Homo sapien
cgggcttgccaaggagtgaatttaa

SEQ ID NO: 2402256 - DNA, 25 bp, Homo sapien
gatgacttcgggcttgccaaggagt

SEQ ID NO: 2402257 - DNA, 25 bp, Homo sapien
gccaaggagtgaatttaattctaat

SEQ ID NO: 2402258 - DNA, 25 bp, Homo sapien
ggaaagcgaacaggatgacttcggg

SEQ ID NO: 2402259 - DNA, 25 bp, Homo sapien
tgcaggggacactgtattcagcaaa

SEQ ID NO: 2402260 - DNA, 25 bp, Homo sapien
gagcaaaatgaaggcttgggatatg

SEQ ID NO: 2402261 - DNA, 25 bp, Homo sapien
ctaataaaagatgtagatgattttg

SEQ ID NO: 2402262 - DNA, 25 bp, Homo sapien
agcaaactgcctatcggctgcaggg

SEQ ID NO: 2402263 - DNA, 25 bp, Homo sapien
agaattgaggtttggcctccacttc

SEQ ID NO: 2402264 - DNA, 25 bp, Homo sapien
caatgtactctaattgggtgatggc

SEQ ID NO: 2402265 - DNA, 25 bp, Homo sapien
catagagagtgggataacagatact

SEQ ID NO: 2402266 - DNA, 25 bp, Homo sapien
caggaggtcaaatacttcacattct

SEQ ID NO: 2402267 - DNA, 25 bp, Homo sapien
ttttccatcaaagacaccacactgg

SEQ ID NO: 2402268 - DNA, 25 bp, Homo sapien
gtttatctaggattctgttttgctc

SEQ ID NO: 2402269 - DNA, 25 bp, Homo sapien
ttatctaggattctgttttgctcac

SEQ ID NO: 2402270 - DNA, 25 bp, Homo sapien
ttccatcaaagacaccacactggaa

SEQ ID NO: 2402271 - DNA, 25 bp, Homo sapien
cttatagtaatcataggctttcaca

SEQ ID NO: 2402272 - DNA, 25 bp, Homo sapien
tcttatagtaatcataggctttcac

SEQ ID NO: 2402273 - DNA, 25 bp, Homo sapien
gtcttatagtaatcataggctttca

SEQ ID NO: 2402274 - DNA, 25 bp, Homo sapien
tgtcttatagtaatcataggctttc

SEQ ID NO: 2402275 - DNA, 25 bp, Homo sapien
tattcaggaaacaggcgtacatcag

SEQ ID NO: 2402276 - DNA, 25 bp, Homo sapien
gtcagtgttcaatccgtaacccaag

SEQ ID NO: 2402277 - DNA, 25 bp, Homo sapien
cctaatggctcacatagggagcagt

SEQ ID NO: 2402278 - DNA, 25 bp, Homo sapien
tacactgtgatacgactgactgtga

SEQ ID NO: 2402279 - DNA, 25 bp, Homo sapien
aaatattcatatgctcattgtaata

SEQ ID NO: 2402280 - DNA, 25 bp, Homo sapien
taaatattcatatgctcattttaat

SEQ ID NO: 2402281 - DNA, 25 bp, Homo sapien
ttcatatgctcattgtaatataaac

SEQ ID NO: 2402282 - DNA, 25 bp, Homo sapien
tgctcattgtaatataaacaaacat

SEQ ID NO: 2402283 - DNA, 25 bp, Homo sapien
tctcacgtgaacagagaggatgtgc

SEQ ID NO: 2402284 - DNA, 25 bp, Homo sapien
cccaggaagcttgcgatgaggaatg

SEQ ID NO: 2402285 - DNA, 25 bp, Homo sapien
tgatgagatcccctagaaggactgt

SEQ ID NO: 2402286 - DNA, 25 bp, Homo sapien
caaatggccttcctaatgactgctc

SEQ ID NO: 2402287 - DNA, 25 bp, Homo sapien
aatcaagatatggttgttgtgcact

SEQ ID NO: 2402288 - DNA, 25 bp, Homo sapien
acttctgtcctgctcacgtggctag

SEQ ID NO: 2402289 - DNA, 25 bp, Homo sapien
tggttgttgtgcacttctgtcctgc

SEQ ID NO: 2402290 - DNA, 25 bp, Homo sapien
tcctgctcacgtggctagatctttc

SEQ ID NO: 2402291 - DNA, 25 bp, Homo sapien
tggcagcagtggggcgtccagagct

SEQ ID NO: 2402292 - DNA, 25 bp, Homo sapien
ggggcgtccagagctgccgctgcca

SEQ ID NO: 2402293 - DNA, 25 bp, Homo sapien
atttcacaaggctgatggtggcagc

SEQ ID NO: 2402294 - DNA, 25 bp, Homo sapien
ctatttcacaaggctgatggtggca

SEQ ID NO: 2402295 - DNA, 25 bp, Homo sapien
caccatcctcgcgttgccgggtggg

SEQ ID NO: 2402296 - DNA, 25 bp, Homo sapien
cggtgttcgcacacaaagcgctggg

SEQ ID NO: 2402297 - DNA, 25 bp, Homo sapien
ccgccacgatggaccgggctgagtc

SEQ ID NO: 2402298 - DNA, 25 bp, Homo sapien
gtgggacatctgtgcctcgcgtccc

SEQ ID NO: 2402299 - DNA, 25 bp, Homo sapien
tcttcagggtcctcccggcactggg

SEQ ID NO: 2402300 - DNA, 25 bp, Homo sapien
gaggctctgagtagggccgcctggg

SEQ ID NO: 2402301 - DNA, 25 bp, Homo sapien
cgtgagccgggcgagggagagtcct

SEQ ID NO: 2402302 - DNA, 25 bp, Homo sapien
tgaccgccgagctagacgcgcctga

SEQ ID NO: 2402303 - DNA, 25 bp, Homo sapien
tactcagaccgacatcactgtatca

SEQ ID NO: 2402304 - DNA, 25 bp, Homo sapien
tcctagtacataacccaatactttc

SEQ ID NO: 2402305 - DNA, 25 bp, Homo sapien
ccacagtccttacatgaagcctact

SEQ ID NO: 2402306 - DNA, 25 bp, Homo sapien
tagggtattcccataaccaaacaca

SEQ ID NO: 2402307 - DNA, 25 bp, Homo sapien
aatcttggtattctattgggaatca

SEQ ID NO: 2402308 - DNA, 25 bp, Homo sapien
tcttggtattctattgggaatcata

SEQ ID NO: 2402309 - DNA, 25 bp, Homo sapien
cttcagcacttgattcctttaagtt

SEQ ID NO: 2402310 - DNA, 25 bp, Homo sapien
ttaatcttggtattctattgggaat

SEQ ID NO: 2402311 - DNA, 25 bp, Homo sapien
atttattgaatgaacaggaaacagg

SEQ ID NO: 2402312 - DNA, 25 bp, Homo sapien
tattgaatgaacaggaaacagggaa

SEQ ID NO: 2402313 - DNA, 25 bp, Homo sapien
tggaaatgtacaatgatatttattg

SEQ ID NO: 2402314 - DNA, 25 bp, Homo sapien
ggaaatgtacaatgatatttattga

SEQ ID NO: 2402315 - DNA, 25 bp, Homo sapien
gagctctgagaacaggactccagca

SEQ ID NO: 2402316 - DNA, 25 bp, Homo sapien
ggaaacctaatcagtacagtgggaa

SEQ ID NO: 2402317 - DNA, 25 bp, Homo sapien
tgaggtttgacagagtcagcggccc

SEQ ID NO: 2402318 - DNA, 25 bp, Homo sapien
tcagcggccctctccaataaatgtg

SEQ ID NO: 2402319 - DNA, 25 bp, Homo sapien
tacccagcgttttatgaaggagaag

SEQ ID NO: 2402320 - DNA, 25 bp, Homo sapien
tttgctgcaaggagcattgtactca

SEQ ID NO: 2402321 - DNA, 25 bp, Homo sapien
ctttgctgcaaggagcattgtactc

SEQ ID NO: 2402322 - DNA, 25 bp, Homo sapien
ctgcaaggagcattgtactcagcaa

SEQ ID NO: 2402323 - DNA, 25 bp, Homo sapien
tgctgcaaggagcattgtactcagc

SEQ ID NO: 2402324 - DNA, 25 bp, Homo sapien
agatctcttactgggacatcttgca

SEQ ID NO: 2402325 - DNA, 25 bp, Homo sapien
cgtctcgtagtaatcatagactttc

SEQ ID NO: 2402326 - DNA, 25 bp, Homo sapien
ctggtttcagatctcttactgggac

SEQ ID NO: 2402327 - DNA, 25 bp, Homo sapien
cagaaccgtgaagaacaagctcagt

SEQ ID NO: 2402328 - DNA, 25 bp, Homo sapien
tatagggtccttaattaaattgtgc

SEQ ID NO: 2402329 - DNA, 25 bp, Homo sapien
tatcctacagcacactatagggtcc

SEQ ID NO: 2402330 - DNA, 25 bp, Homo sapien
tgaattagtttaagtattcacctgt

SEQ ID NO: 2402331 - DNA, 25 bp, Homo sapien
taacataacgcatatacctctgtca

SEQ ID NO: 2402332 - DNA, 25 bp, Homo sapien
gctgacttctgtccggctcacatgg

SEQ ID NO: 2402333 - DNA, 25 bp, Homo sapien
acttctgtccggctcacatggttag

SEQ ID NO: 2402334 - DNA, 25 bp, Homo sapien
ctgctgacttctgtccggctcacat

SEQ ID NO: 2402335 - DNA, 25 bp, Homo sapien
ctgtccggctcacatggttagatct

SEQ ID NO: 2402336 - DNA, 25 bp, Homo sapien
aataccacaaatgttaataaataga

SEQ ID NO: 2402337 - DNA, 25 bp, Homo sapien
aaataccacaaatgttaataaatag

SEQ ID NO: 2402338 - DNA, 25 bp, Homo sapien
gaaataccacaaatgttaataaata

SEQ ID NO: 2402339 - DNA, 25 bp, Homo sapien
ataccacaaatgttaataaatagat

SEQ ID NO: 2402340 - DNA, 25 bp, Homo sapien
tctttgtattgccaaaataaccctg

SEQ ID NO: 2402341 - DNA, 25 bp, Homo sapien
tattgccaaaataaccctgagggta

SEQ ID NO: 2402342 - DNA, 25 bp, Homo sapien
ttactattagtataacacacgacta

SEQ ID NO: 2402343 - DNA, 25 bp, Homo sapien
atgaaaggcataaagggtttactat

SEQ ID NO: 2402344 - DNA, 25 bp, Homo sapien
tagtcatgggtcctagcacagtgct

SEQ ID NO: 2402345 - DNA, 25 bp, Homo sapien
gatattagtattgtcttatgctggg

SEQ ID NO: 2402346 - DNA, 25 bp, Homo sapien
ggctttgatagagattgactttaat

SEQ ID NO: 2402347 - DNA, 25 bp, Homo sapien
cactggttcgtgttcatatctttta

SEQ ID NO: 2402348 - DNA, 25 bp, Homo sapien
cagagaccatcttcacatcaacgat

SEQ ID NO: 2402349 - DNA, 25 bp, Homo sapien
atcaacgatcgccatgttggaggca

SEQ ID NO: 2402350 - DNA, 25 bp, Homo sapien
catcttcacatcaacgatcgccatg

SEQ ID NO: 2402351 - DNA, 25 bp, Homo sapien
ttcacatcaacgatcgccatgttgg

SEQ ID NO: 2402352 - DNA, 25 bp, Homo sapien
taagcattccacagctctaaaaggt

SEQ ID NO: 2402353 - DNA, 25 bp, Homo sapien
ccaaatatcttatcccagtggtttg

SEQ ID NO: 2402354 - DNA, 25 bp, Homo sapien
tgtgcgtagaatttttaggaagcct

SEQ ID NO: 2402355 - DNA, 25 bp, Homo sapien
tcttcttctatgtccatgttaagca

SEQ ID NO: 2402356 - DNA, 25 bp, Homo sapien
cacgcccggctgaggatctgcattt

SEQ ID NO: 2402357 - DNA, 25 bp, Homo sapien
ccaccacgcccggctgaggatctgc

SEQ ID NO: 2402358 - DNA, 25 bp, Homo sapien
cgcccggctgaggatctgcatttta

SEQ ID NO: 2402359 - DNA, 25 bp, Homo sapien
accacgcccggctgaggatctgcat

SEQ ID NO: 2402360 - DNA, 25 bp, Homo sapien
gattactttatcacttgggtactaa

SEQ ID NO: 2402361 - DNA, 25 bp, Homo sapien
gggtactaaattttgcactgaattg

SEQ ID NO: 2402362 - DNA, 25 bp, Homo sapien
tatcacttgggtactaaattttgca

SEQ ID NO: 2402363 - DNA, 25 bp, Homo sapien
tgtacagattactttatcacttggg

SEQ ID NO: 2402364 - DNA, 25 bp, Homo sapien
gggttcatcacaagtttgaggcaga

SEQ ID NO: 2402365 - DNA, 25 bp, Homo sapien
gagtctgcactcctaaagcaaaggg

SEQ ID NO: 2402366 - DNA, 25 bp, Homo sapien
ttgaggcagagtctgcactcctaaa

SEQ ID NO: 2402367 - DNA, 25 bp, Homo sapien
tttgggttcatcacaagtttgaggc

SEQ ID NO: 2402368 - DNA, 25 bp, Homo sapien
agactggatagtcacctgtgcagcc

SEQ ID NO: 2402369 - DNA, 25 bp, Homo sapien
gttgttgtccacttggaatttgctg

SEQ ID NO: 2402370 - DNA, 25 bp, Homo sapien
cagtaacaggcggttgttgttgtcc

SEQ ID NO: 2402371 - DNA, 25 bp, Homo sapien
atgtccctgaagactggatagtcac

SEQ ID NO: 2402372 - DNA, 25 bp, Homo sapien
acagagcatggagagccaccactgt

SEQ ID NO: 2402373 - DNA, 25 bp, Homo sapien
gagcatggagagccaccactgtgtc

SEQ ID NO: 2402374 - DNA, 25 bp, Homo sapien
catatttggacagagcatggagagc

SEQ ID NO: 2402375 - DNA, 25 bp, Homo sapien
atatttggacagagcatggagagcc

SEQ ID NO: 2402376 - DNA, 25 bp, Homo sapien
ggagaaaccgccctgggcattctgc

SEQ ID NO: 2402377 - DNA, 25 bp, Homo sapien
agaggtcaggtcctccgaggttggg

SEQ ID NO: 2402378 - DNA, 25 bp, Homo sapien
agaaaccgccctgggcattctgctg

SEQ ID NO: 2402379 - DNA, 25 bp, Homo sapien
tggaggagaaaccgccctgggcatt

SEQ ID NO: 2402380 - DNA, 25 bp, Homo sapien
gggcgctcccaatggacagagttgt

SEQ ID NO: 2402381 - DNA, 25 bp, Homo sapien
ccactggtgccttgggtttctgagg

SEQ ID NO: 2402382 - DNA, 25 bp, Homo sapien
gttcgtaaaaatgccccactggtgc

SEQ ID NO: 2402383 - DNA, 25 bp, Homo sapien
ttctgagggcgctcccaatggacag

SEQ ID NO: 2402384 - DNA, 25 bp, Homo sapien
caggataatgattgcctctggaggt

SEQ ID NO: 2402385 - DNA, 25 bp, Homo sapien
gcagtgaaaattaatgagctgactc

SEQ ID NO: 2402386 - DNA, 25 bp, Homo sapien
ccatgaggagaaactcgatgtgtaa

SEQ ID NO: 2402387 - DNA, 25 bp, Homo sapien
aagaagaattaatggctgtcaaagg

SEQ ID NO: 2402388 - DNA, 25 bp, Homo sapien
tataaccccatcgtaattgagaagc

SEQ ID NO: 2402389 - DNA, 25 bp, Homo sapien
gcatctgcacggcctcttgtcttct

SEQ ID NO: 2402390 - DNA, 25 bp, Homo sapien
aatgagtttgtcaggatataacccc

SEQ ID NO: 2402391 - DNA, 25 bp, Homo sapien
ttttagactttacaatgagtttgtc

SEQ ID NO: 2402392 - DNA, 25 bp, Homo sapien
tgagggatttttgccatgcagttct

SEQ ID NO: 2402393 - DNA, 25 bp, Homo sapien
gccaggagaaggatctcaggtgtgc

SEQ ID NO: 2402394 - DNA, 25 bp, Homo sapien
agtgagggatttttgccatgcagtt

SEQ ID NO: 2402395 - DNA, 25 bp, Homo sapien
tttttgccatgcagttcttgataca

SEQ ID NO: 2402396 - DNA, 25 bp, Homo sapien
ggcaaaacagggcattgcggacaac

SEQ ID NO: 2402397 - DNA, 25 bp, Homo sapien
tcctggttacctgccagggcaaaag

SEQ ID NO: 2402398 - DNA, 25 bp, Homo sapien
caaaacagggcattgcggacaacag

SEQ ID NO: 2402399 - DNA, 25 bp, Homo sapien
tcctcttgtcctggttacctgccag

SEQ ID NO: 2402400 - DNA, 25 bp, Homo sapien
tgtgaaggcagaacaagaagggaac

SEQ ID NO: 2402401 - DNA, 25 bp, Homo sapien
tgaaggcagaacaagaagggaacta

SEQ ID NO: 2402402 - DNA, 25 bp, Homo sapien
aaggcagaacaagaagggaactaag

SEQ ID NO: 2402403 - DNA, 25 bp, Homo sapien
ctgtgaaggcagaacaagaagggaa

SEQ ID NO: 2402404 - DNA, 25 bp, Homo sapien
tttgagtggtggtggtaaatagcct

SEQ ID NO: 2402405 - DNA, 25 bp, Homo sapien
aatacacggatcacagcacagaagt

SEQ ID NO: 2402406 - DNA, 25 bp, Homo sapien
gaagcactggcattgcatagaaaga

SEQ ID NO: 2402407 - DNA, 25 bp, Homo sapien
tcttaatgggctgaccaaattctct

SEQ ID NO: 2402408 - DNA, 25 bp, Homo sapien
gatataggcggagagggtcacttca

SEQ ID NO: 2402409 - DNA, 25 bp, Homo sapien
tgtgagaggaatctccagaagggcg

SEQ ID NO: 2402410 - DNA, 25 bp, Homo sapien
tgatataggcggagagggtcacttc

SEQ ID NO: 2402411 - DNA, 25 bp, Homo sapien
ctccagaagggcgatggtgatatag

SEQ ID NO: 2402412 - DNA, 25 bp, Homo sapien
ttatcacttcctatcctcatccttg

SEQ ID NO: 2402413 - DNA, 25 bp, Homo sapien
catccttgcagatatcataatggac

SEQ ID NO: 2402414 - DNA, 25 bp, Homo sapien
cctatcctcatccttgcagatatca

SEQ ID NO: 2402415 - DNA, 25 bp, Homo sapien
ttgcagatatcataatggacaaatc

SEQ ID NO: 2402416 - DNA, 25 bp, Homo sapien
taggctcgagcttgggcaaaagtct

SEQ ID NO: 2402417 - DNA, 25 bp, Homo sapien
atatgagggcttgggtaatgtgtgc

SEQ ID NO: 2402418 - DNA, 25 bp, Homo sapien
gggtaatgtgtgcttcatcgatgaa

SEQ ID NO: 2402419 - DNA, 25 bp, Homo sapien
tcgatgaagatgtaggctcgagctt

SEQ ID NO: 2402420 - DNA, 25 bp, Homo sapien
ctggttcctgccatatcgctcccca

SEQ ID NO: 2402421 - DNA, 25 bp, Homo sapien
tggttcctgccatatcgctccccaa

SEQ ID NO: 2402422 - DNA, 25 bp, Homo sapien
ccaaaggtgctgtaggagccatcat

SEQ ID NO: 2402423 - DNA, 25 bp, Homo sapien
tgcatggcagagcctaatatgtctc

SEQ ID NO: 2402424 - DNA, 25 bp, Homo sapien
tttagataatccagtacatagatgt

SEQ ID NO: 2402425 - DNA, 25 bp, Homo sapien
ctctggagtaagctgctgtgtttca

SEQ ID NO: 2402426 - DNA, 25 bp, Homo sapien
aatggccttggacttgatctctgga

SEQ ID NO: 2402427 - DNA, 25 bp, Homo sapien
tataatagaagctgttaatgcccgg

SEQ ID NO: 2402428 - DNA, 25 bp, Homo sapien
tagaagctgttaatgcccggatcca

SEQ ID NO: 2402429 - DNA, 25 bp, Homo sapien
gaagctgttaatgcccggatccact

SEQ ID NO: 2402430 - DNA, 25 bp, Homo sapien
tagtataatagaagctgttaatgcc

SEQ ID NO: 2402431 - DNA, 25 bp, Homo sapien
ttctaccacatttggtggcagtttc

SEQ ID NO: 2402432 - DNA, 25 bp, Homo sapien
tcttctaccacatttggtggcagtt

SEQ ID NO: 2402433 - DNA, 25 bp, Homo sapien
attcttctaccacatttggtggcag

SEQ ID NO: 2402434 - DNA, 25 bp, Homo sapien
tctaccacatttggtggcagtttca

SEQ ID NO: 2402435 - DNA, 25 bp, Homo sapien
gaaacaagtctaggacacctacatt

SEQ ID NO: 2402436 - DNA, 25 bp, Homo sapien
actcctttaggttagcacaatgcca

SEQ ID NO: 2402437 - DNA, 25 bp, Homo sapien
cacaatgccagatagagaggagttc

SEQ ID NO: 2402438 - DNA, 25 bp, Homo sapien
cctccacagaaagtccaactagctg

SEQ ID NO: 2402439 - DNA, 25 bp, Homo sapien
gacaaagtagggagttgaatgttgt

SEQ ID NO: 2402440 - DNA, 25 bp, Homo sapien
ctgatggacaaagtagggagttgaa

SEQ ID NO: 2402441 - DNA, 25 bp, Homo sapien
tggacaaagtagggagttgaatgtt

SEQ ID NO: 2402442 - DNA, 25 bp, Homo sapien
gatggacaaagtagggagttgaatg

SEQ ID NO: 2402443 - DNA, 25 bp, Homo sapien
acacagctcttgagactctagtgcc

SEQ ID NO: 2402444 - DNA, 25 bp, Homo sapien
aggaactgaaggcacctcagtccca

SEQ ID NO: 2402445 - DNA, 25 bp, Homo sapien
gcctctgcgctcacagtgaaattca

SEQ ID NO: 2402446 - DNA, 25 bp, Homo sapien
cttccgtgttcaggaactgaaggca

SEQ ID NO: 2402447 - DNA, 25 bp, Homo sapien
ccaggacacagtttgccgcccgttt

SEQ ID NO: 2402448 - DNA, 25 bp, Homo sapien
cagatgcagtgaggcgcttgttcct

SEQ ID NO: 2402449 - DNA, 25 bp, Homo sapien
cacagatgcagtgaggcgcttgttc

SEQ ID NO: 2402450 - DNA, 25 bp, Homo sapien
ttgccgcccgtttgcacagatgcag

SEQ ID NO: 2402451 - DNA, 25 bp, Homo sapien
ctccactgggacagctaggaaggcg

SEQ ID NO: 2402452 - DNA, 25 bp, Homo sapien
actgggacagctaggaaggcgggag

SEQ ID NO: 2402453 - DNA, 25 bp, Homo sapien
cagctaggaaggcgggagaggcttc

SEQ ID NO: 2402454 - DNA, 25 bp, Homo sapien
gggacagctaggaaggcgggagagg

SEQ ID NO: 2402455 - DNA, 25 bp, Homo sapien
tgaaaccacacataagaaagggagt

SEQ ID NO: 2402456 - DNA, 25 bp, Homo sapien
ctgaaaccacacataagaaagggag

SEQ ID NO: 2402457 - DNA, 25 bp, Homo sapien
gaaaccacacataagaaagggagta

SEQ ID NO: 2402458 - DNA, 25 bp, Homo sapien
cagtggaagagataccaagtccagc

SEQ ID NO: 2402459 - DNA, 25 bp, Homo sapien
ttgtgagctccacaaagaagggctg

SEQ ID NO: 2402460 - DNA, 25 bp, Homo sapien
tagtttaggaccgtggccttgagtg

SEQ ID NO: 2402461 - DNA, 25 bp, Homo sapien
tctccacgaatcacagagtaaggca

SEQ ID NO: 2402462 - DNA, 25 bp, Homo sapien
tacatcctttctagggagagaatcc

SEQ ID NO: 2402463 - DNA, 25 bp, Homo sapien
caggattgctaaccagtgagggatc

SEQ ID NO: 2402464 - DNA, 25 bp, Homo sapien
tgagggatctcttacaggcaatctg

SEQ ID NO: 2402465 - DNA, 25 bp, Homo sapien
ttctaactagcctgcactgggaagc

SEQ ID NO: 2402466 - DNA, 25 bp, Homo sapien
tgtctcagggaagtactttcgtacg

SEQ ID NO: 2402467 - DNA, 25 bp, Homo sapien
cagatccatgtctcagggaagtact

SEQ ID NO: 2402468 - DNA, 25 bp, Homo sapien
ccatgtctcagggaagtactttcgt

SEQ ID NO: 2402469 - DNA, 25 bp, Homo sapien
accaccaaatcccagatccatgtct

SEQ ID NO: 2402470 - DNA, 25 bp, Homo sapien
tgcaccaggcgtgcatggcctcttc

SEQ ID NO: 2402471 - DNA, 25 bp, Homo sapien
gcaccaggcgtgcatggcctcttcc

SEQ ID NO: 2402472 - DNA, 25 bp, Homo sapien
cactctattcaccttctattaaggg

SEQ ID NO: 2402473 - DNA, 25 bp, Homo sapien
tttttattctctatcgtgtcagaag

SEQ ID NO: 2402474 - DNA, 25 bp, Homo sapien
tgtcagaagattacagttagtttcc

SEQ ID NO: 2402475 - DNA, 25 bp, Homo sapien
tagtttccttcactctattcacctt

SEQ ID NO: 2402476 - DNA, 25 bp, Homo sapien
ttcaggtccatgcatttcatactgt

SEQ ID NO: 2402477 - DNA, 25 bp, Homo sapien
ccttcaggtccatgcatttcatact

SEQ ID NO: 2402478 - DNA, 25 bp, Homo sapien
gaccttcaggtccatgcatttcata

SEQ ID NO: 2402479 - DNA, 25 bp, Homo sapien
gtagaccttcaggtccatgcatttc

SEQ ID NO: 2402480 - DNA, 25 bp, Homo sapien
aatctttgagttggtgaatgccttt

SEQ ID NO: 2402481 - DNA, 25 bp, Homo sapien
gaatctttgagttggtgaatgcctt

SEQ ID NO: 2402482 - DNA, 25 bp, Homo sapien
taggaagctgtacatatccttttca

SEQ ID NO: 2402483 - DNA, 25 bp, Homo sapien
cattatgacgattgatgcagtcttc

SEQ ID NO: 2402484 - DNA, 25 bp, Homo sapien
agtgaggtccttttctggtagcagg

SEQ ID NO: 2402485 - DNA, 25 bp, Homo sapien
tgatactggagtatatgtgattcca

SEQ ID NO: 2402486 - DNA, 25 bp, Homo sapien
catgttctaaacaggcacacgaata

SEQ ID NO: 2402487 - DNA, 25 bp, Homo sapien
tctctccacaggacacgatggcatt

SEQ ID NO: 2402488 - DNA, 25 bp, Homo sapien
ttaattgaaaaatcgaggtctgctg

SEQ ID NO: 2402489 - DNA, 25 bp, Homo sapien
tttgaaggtgagaagtaagacagac

SEQ ID NO: 2402490 - DNA, 25 bp, Homo sapien
tacttatccagtcatttttccttgc

SEQ ID NO: 2402491 - DNA, 25 bp, Homo sapien
ctggcacggcccttcttgattcctg

SEQ ID NO: 2402492 - DNA, 25 bp, Homo sapien
ccttaccaatgaaagcccacaagag

SEQ ID NO: 2402493 - DNA, 25 bp, Homo sapien
taactgcagaagtgagtagttatat

SEQ ID NO: 2402494 - DNA, 25 bp, Homo sapien
ggagggcgcagacggactgaggagc

SEQ ID NO: 2402495 - DNA, 25 bp, Homo sapien
cgcaggtgggcgtgtgaggctggga

SEQ ID NO: 2402496 - DNA, 25 bp, Homo sapien
gcacggagggcgcagacggactgag

SEQ ID NO: 2402497 - DNA, 25 bp, Homo sapien
aggacgccgagagctcagcatcagg

SEQ ID NO: 2402498 - DNA, 25 bp, Homo sapien
gaagggaataacatactctgaactg

SEQ ID NO: 2402499 - DNA, 25 bp, Homo sapien
gcaaatttccaggtttacccatgca

SEQ ID NO: 2402500 - DNA, 25 bp, Homo sapien
tatctttgatacacggcaaggtgct

SEQ ID NO: 2402501 - DNA, 25 bp, Homo sapien
catgcatgggtctaggtgctcttgc

SEQ ID NO: 2402502 - DNA, 25 bp, Homo sapien
ttgttggccagacaattttcaacat

SEQ ID NO: 2402503 - DNA, 25 bp, Homo sapien
cttgttggccagacaattttcaaca

SEQ ID NO: 2402504 - DNA, 25 bp, Homo sapien
tccccggtaggtaaaacagcataga

SEQ ID NO: 2402505 - DNA, 25 bp, Homo sapien
cagcatagatgagcaaccgagcgac

SEQ ID NO: 2402506 - DNA, 25 bp, Homo sapien
gacaggagcaatgtctgacttcaca

SEQ ID NO: 2402507 - DNA, 25 bp, Homo sapien
tattttgcagaatccccaatcacgt

SEQ ID NO: 2402508 - DNA, 25 bp, Homo sapien
tctccataagaggaacaccatgctc

SEQ ID NO: 2402509 - DNA, 25 bp, Homo sapien
gcttcagtcggtagaagtacccaat

SEQ ID NO: 2402510 - DNA, 25 bp, Homo sapien
tagactaggagcaaccttcaaaggt

SEQ ID NO: 2402511 - DNA, 25 bp, Homo sapien
tcatggcaagagtccgcttcagtcg

SEQ ID NO: 2402512 - DNA, 25 bp, Homo sapien
ttcctgcttcacaagcagtccatga

SEQ ID NO: 2402513 - DNA, 25 bp, Homo sapien
tgcttcacaagcagtccatgagtcc

SEQ ID NO: 2402514 - DNA, 25 bp, Homo sapien
aagcagtccatgagtcccagttcgg

SEQ ID NO: 2402515 - DNA, 25 bp, Homo sapien
tccatgagtcccagttcggacaatg

SEQ ID NO: 2402516 - DNA, 25 bp, Homo sapien
caagataagcagtgtgatgtgcctc

SEQ ID NO: 2402517 - DNA, 25 bp, Homo sapien
gccgtaacagggactacgatccttg

SEQ ID NO: 2402518 - DNA, 25 bp, Homo sapien
tggccacagggtagttcatgagaca

SEQ ID NO: 2402519 - DNA, 25 bp, Homo sapien
tgacacccactggtagccgtaacag

SEQ ID NO: 2402520 - DNA, 25 bp, Homo sapien
gagaggtacccataacattggtggt

SEQ ID NO: 2402521 - DNA, 25 bp, Homo sapien
tgttgatagagaactgtacaaggcc

SEQ ID NO: 2402522 - DNA, 25 bp, Homo sapien
tagggacgcctttcccatctactag

SEQ ID NO: 2402523 - DNA, 25 bp, Homo sapien
gctcatccgtggtagcattggagta

SEQ ID NO: 2402524 - DNA, 25 bp, Homo sapien
ttgatgagtgaactggaaaatactc

SEQ ID NO: 2402525 - DNA, 25 bp, Homo sapien
atgagtgaactggaaaatactccac

SEQ ID NO: 2402526 - DNA, 25 bp, Homo sapien
gatgagtgaactggaaaatactcca

SEQ ID NO: 2402527 - DNA, 25 bp, Homo sapien
gggttgatgagtgaactggaaaata

SEQ ID NO: 2402528 - DNA, 25 bp, Homo sapien
tccctgtcgaaagtgtgagtccact

SEQ ID NO: 2402529 - DNA, 25 bp, Homo sapien
aagggaattccctgtcgaaagtgtg

SEQ ID NO: 2402530 - DNA, 25 bp, Homo sapien
ctttcacaaatgagagtttggttat

SEQ ID NO: 2402531 - DNA, 25 bp, Homo sapien
cacaaatgagagtttggttatggtt

SEQ ID NO: 2402532 - DNA, 25 bp, Homo sapien
cttgtgatttcactggactgccttc

SEQ ID NO: 2402533 - DNA, 25 bp, Homo sapien
tgtgatttcactggactgccttcca

SEQ ID NO: 2402534 - DNA, 25 bp, Homo sapien
tggactgccttccagtcaattccac

SEQ ID NO: 2402535 - DNA, 25 bp, Homo sapien
tcactggactgccttccagtcaatt

SEQ ID NO: 2402536 - DNA, 25 bp, Homo sapien
accttggtttttacttgctgataga

SEQ ID NO: 2402537 - DNA, 25 bp, Homo sapien
ttgctgatagaagcagccatggctg

SEQ ID NO: 2402538 - DNA, 25 bp, Homo sapien
tcttcttggatctgggcctcagtgt

SEQ ID NO: 2402539 - DNA, 25 bp, Homo sapien
gtttcatttcatactccttcctctt

SEQ ID NO: 2402540 - DNA, 25 bp, Homo sapien
cggaagcgtcactatactttctgca

SEQ ID NO: 2402541 - DNA, 25 bp, Homo sapien
tggcagtcggaagcgtcactatact

SEQ ID NO: 2402542 - DNA, 25 bp, Homo sapien
tgaatcttcaccgtggcagtcggaa

SEQ ID NO: 2402543 - DNA, 25 bp, Homo sapien
gcctgtgaatcttcaccgtggcagt

SEQ ID NO: 2402544 - DNA, 25 bp, Homo sapien
tgttacttgtacttcaaacttggga

SEQ ID NO: 2402545 - DNA, 25 bp, Homo sapien
gattatctttggcactgttacttgt

SEQ ID NO: 2402546 - DNA, 25 bp, Homo sapien
ttccaagatggtgattatctttggc

SEQ ID NO: 2402547 - DNA, 25 bp, Homo sapien
ggccacacactgatacattcatctc

SEQ ID NO: 2402548 - DNA, 25 bp, Homo sapien
cccaatgtcacccatgggaaatgga

SEQ ID NO: 2402549 - DNA, 25 bp, Homo sapien
caaatgaacttaaattccaggacct

SEQ ID NO: 2402550 - DNA, 25 bp, Homo sapien
gctacagaaaataacgaagctatgt

SEQ ID NO: 2402551 - DNA, 25 bp, Homo sapien
tccaggacctaagagtttaaatatg

SEQ ID NO: 2402552 - DNA, 25 bp, Homo sapien
aattcctccacggtgaaagggtgct

SEQ ID NO: 2402553 - DNA, 25 bp, Homo sapien
tgatttcttctgtaccaccaccttg

SEQ ID NO: 2402554 - DNA, 25 bp, Homo sapien
cggtgaaagggtgctctgtccttcc

SEQ ID NO: 2402555 - DNA, 25 bp, Homo sapien
ccaccaccttgtaggagccctggaa

SEQ ID NO: 2402556 - DNA, 25 bp, Homo sapien
accctctaactggaaactctgccat

SEQ ID NO: 2402557 - DNA, 25 bp, Homo sapien
tgtgcgatgcgatttcctttgggat

SEQ ID NO: 2402558 - DNA, 25 bp, Homo sapien
gaaactctgccattgtgcgatgcga

SEQ ID NO: 2402559 - DNA, 25 bp, Homo sapien
gccattgtgcgatgcgatttccttt

SEQ ID NO: 2402560 - DNA, 25 bp, Homo sapien
taacttacaaaagcacctggagcat

SEQ ID NO: 2402561 - DNA, 25 bp, Homo sapien
cctggagcattggagctaataaaag

SEQ ID NO: 2402562 - DNA, 25 bp, Homo sapien
tatctatggaaaccctaagttatct

SEQ ID NO: 2402563 - DNA, 25 bp, Homo sapien
tgagtagaggagatgagttatagcc

SEQ ID NO: 2402564 - DNA, 25 bp, Homo sapien
ggttcccagcctgtttatacagaca

SEQ ID NO: 2402565 - DNA, 25 bp, Homo sapien
gactttgggttgatgtctgcattac

SEQ ID NO: 2402566 - DNA, 25 bp, Homo sapien
tgtcctaattaagaaccatccgaaa

SEQ ID NO: 2402567 - DNA, 25 bp, Homo sapien
gacaactgactgagtaccagcacca

SEQ ID NO: 2402568 - DNA, 25 bp, Homo sapien
tcattcagggggtgaaagttttcat

SEQ ID NO: 2402569 - DNA, 25 bp, Homo sapien
tttcatccatggagacaacacgaaa

SEQ ID NO: 2402570 - DNA, 25 bp, Homo sapien
tccatggagacaacacgaaatttca

SEQ ID NO: 2402571 - DNA, 25 bp, Homo sapien
tcagggggtgaaagttttcatccat

SEQ ID NO: 2402572 - DNA, 25 bp, Homo sapien
caaacccaaagtaggcctgtaggct

SEQ ID NO: 2402573 - DNA, 25 bp, Homo sapien
taagacaagctattaaggaaccaag

SEQ ID NO: 2402574 - DNA, 25 bp, Homo sapien
caaagtaggcctgtaggctggtaag

SEQ ID NO: 2402575 - DNA, 25 bp, Homo sapien
taggctggtaagacaagctattaag

SEQ ID NO: 2402576 - DNA, 25 bp, Homo sapien
ttcctttttgaagttgtcctgtctg

SEQ ID NO: 2402577 - DNA, 25 bp, Homo sapien
aagttgtcctgtctgtaggcttctt

SEQ ID NO: 2402578 - DNA, 25 bp, Homo sapien
atctttcctttttgaagttgtcctg

SEQ ID NO: 2402579 - DNA, 25 bp, Homo sapien
gtcctgtctgtaggcttcttcatac

SEQ ID NO: 2402580 - DNA, 25 bp, Homo sapien
ttggacagtgaggaacattacctcc

SEQ ID NO: 2402581 - DNA, 25 bp, Homo sapien
gacaaagaccagactgtcctcgttc

SEQ ID NO: 2402582 - DNA, 25 bp, Homo sapien
ccatcactgtggtccgcttcttaaa

SEQ ID NO: 2402583 - DNA, 25 bp, Homo sapien
cctcctcattggatgaagactttgg

SEQ ID NO: 2402584 - DNA, 25 bp, Homo sapien
gacagaatactagatccctatgacc

SEQ ID NO: 2402585 - DNA, 25 bp, Homo sapien
tatattaagtcaaacagccacactc

SEQ ID NO: 2402586 - DNA, 25 bp, Homo sapien
tgcagttcttaccaacctcccaaag

SEQ ID NO: 2402587 - DNA, 25 bp, Homo sapien
cctatgaccctgactaaaagaacca

SEQ ID NO: 2402588 - DNA, 25 bp, Homo sapien
gcgaaggcgacacagtggagtacgt

SEQ ID NO: 2402589 - DNA, 25 bp, Homo sapien
aggcgacacagtggagtacgtcatt

SEQ ID NO: 2402590 - DNA, 25 bp, Homo sapien
gaaggcgacacagtggagtacgtca

SEQ ID NO: 2402591 - DNA, 25 bp, Homo sapien
cgaaggcgacacagtggagtacgtc

SEQ ID NO: 2402592 - DNA, 25 bp, Homo sapien
tttcccctgacagactccaaggaag

SEQ ID NO: 2402593 - DNA, 25 bp, Homo sapien
gtttcccctgacagactccaaggaa

SEQ ID NO: 2402594 - DNA, 25 bp, Homo sapien
agtgaagaggctcctgtttcccctg

SEQ ID NO: 2402595 - DNA, 25 bp, Homo sapien
ctccgcctccaggtcagtgaagagg

SEQ ID NO: 2402596 - DNA, 25 bp, Homo sapien
cactgtctcattcaggtagctcaga

SEQ ID NO: 2402597 - DNA, 25 bp, Homo sapien
ccaagagaagatgtactgatgagca

SEQ ID NO: 2402598 - DNA, 25 bp, Homo sapien
gccgttgaaggccatgcataagaat

SEQ ID NO: 2402599 - DNA, 25 bp, Homo sapien
gaagagaggcattgctatcaacagc

SEQ ID NO: 2402600 - DNA, 25 bp, Homo sapien
catgccatggcagtgaacattttac

SEQ ID NO: 2402601 - DNA, 25 bp, Homo sapien
gcctttcagctcatgattagacaat

SEQ ID NO: 2402602 - DNA, 25 bp, Homo sapien
tgttacctaaccatggatgtttgca

SEQ ID NO: 2402603 - DNA, 25 bp, Homo sapien
taatttttggactctgtgcactcct

SEQ ID NO: 2402604 - DNA, 25 bp, Homo sapien
gaccttggtaactcatgtgcagtac

SEQ ID NO: 2402605 - DNA, 25 bp, Homo sapien
ttgtcaagcatctatacatatacgt

SEQ ID NO: 2402606 - DNA, 25 bp, Homo sapien
catatgtgggtaggtaaatttaact

SEQ ID NO: 2402607 - DNA, 25 bp, Homo sapien
ccttctgactgagctatgttcaaaa

SEQ ID NO: 2402608 - DNA, 25 bp, Homo sapien
tcccccagtgaatttatgcatccat

SEQ ID NO: 2402609 - DNA, 25 bp, Homo sapien
ttcacgctctctgtgtggaactcac

SEQ ID NO: 2402610 - DNA, 25 bp, Homo sapien
ggactctaggttcatgcttcacgct

SEQ ID NO: 2402611 - DNA, 25 bp, Homo sapien
gacaccccttaggaaggctttgcat

SEQ ID NO: 2402612 - DNA, 25 bp, Homo sapien
taaatagcatggtctcaagtagatc

SEQ ID NO: 2402613 - DNA, 25 bp, Homo sapien
tttccagagactgaggcgtctgtgg

SEQ ID NO: 2402614 - DNA, 25 bp, Homo sapien
ttccagagactgaggcgtctgtggg

SEQ ID NO: 2402615 - DNA, 25 bp, Homo sapien
gaggagaacagactgtattgtaccc

SEQ ID NO: 2402616 - DNA, 25 bp, Homo sapien
gactgtattgtaccctactccctac

SEQ ID NO: 2402617 - DNA, 25 bp, Homo sapien
gaacagactgtattgtaccctactc

SEQ ID NO: 2402618 - DNA, 25 bp, Homo sapien
ctggaggagaacagactgtattgta

SEQ ID NO: 2402619 - DNA, 25 bp, Homo sapien
tgtgtgcaaacaggaagttccaccc

SEQ ID NO: 2402620 - DNA, 25 bp, Homo sapien
aaacacttcccaaagcaactgggct

SEQ ID NO: 2402621 - DNA, 25 bp, Homo sapien
tagtcaaggttaattcctggcgggc

SEQ ID NO: 2402622 - DNA, 25 bp, Homo sapien
ctggagggctaaaactacattccca

SEQ ID NO: 2402623 - DNA, 25 bp, Homo sapien
ccaaagcttgactaacagaggtgat

SEQ ID NO: 2402624 - DNA, 25 bp, Homo sapien
gaagaatgcctaacttacctgctgc

SEQ ID NO: 2402625 - DNA, 25 bp, Homo sapien
ttttataaaccaagcgagagtcctg

SEQ ID NO: 2402626 - DNA, 25 bp, Homo sapien
taacacaagagggaaaatacagagc

SEQ ID NO: 2402627 - DNA, 25 bp, Homo sapien
taaattctgtggcagtccatggtga

SEQ ID NO: 2402628 - DNA, 25 bp, Homo sapien
cctttggtaggacacccagtggtgg

SEQ ID NO: 2402629 - DNA, 25 bp, Homo sapien
tagaataatgccagggaacggcctt

SEQ ID NO: 2402630 - DNA, 25 bp, Homo sapien
gccgtctgggttgttctgtctagaa

SEQ ID NO: 2402631 - DNA, 25 bp, Homo sapien
gcagaacatccacgaccacttggtt

SEQ ID NO: 2402632 - DNA, 25 bp, Homo sapien
gcagcggctccgtgcactttggagt

SEQ ID NO: 2402633 - DNA, 25 bp, Homo sapien
tccgaagccgtagcctgtctgtgtc

SEQ ID NO: 2402634 - DNA, 25 bp, Homo sapien
tatggcagcggcgatgccagcgtcc

SEQ ID NO: 2402635 - DNA, 25 bp, Homo sapien
cgggctctggaggaggccgggtgag

SEQ ID NO: 2402636 - DNA, 25 bp, Homo sapien
tggacaaggtgcgggctctggagga

SEQ ID NO: 2402637 - DNA, 25 bp, Homo sapien
gtgcgggctctggaggaggccgggt

SEQ ID NO: 2402638 - DNA, 25 bp, Homo sapien
ctggacaaggtgcgggctctggagg

SEQ ID NO: 2402639 - DNA, 25 bp, Homo sapien
gaaggtgaagatctgcgactgggcc

SEQ ID NO: 2402640 - DNA, 25 bp, Homo sapien
ggggccccggcaattacagccacta

SEQ ID NO: 2402641 - DNA, 25 bp, Homo sapien
aaggtgaagatctgcgactgggccc

SEQ ID NO: 2402642 - DNA, 25 bp, Homo sapien
aattacagccactacttcaagacca

SEQ ID NO: 2402643 - DNA, 25 bp, Homo sapien
cgaaggagcttggaggcagacatca

SEQ ID NO: 2402644 - DNA, 25 bp, Homo sapien
tcacttccgaaccaagtctgagatg

SEQ ID NO: 2402645 - DNA, 25 bp, Homo sapien
agtctgagatggagcagtctctgcg

SEQ ID NO: 2402646 - DNA, 25 bp, Homo sapien
tgcgcagggcgcccgatgagctgac

SEQ ID NO: 2402647 - DNA, 25 bp, Homo sapien
tgctcgagcgccagaaagatcctta

SEQ ID NO: 2402648 - DNA, 25 bp, Homo sapien
catgaaaaccgcattggaagaccgt

SEQ ID NO: 2402649 - DNA, 25 bp, Homo sapien
cagatgcacaagtccgagtcgcgga

SEQ ID NO: 2402650 - DNA, 25 bp, Homo sapien
cacgtgaagccagtatgcggtcata

SEQ ID NO: 2402651 - DNA, 25 bp, Homo sapien
tggcttggatacttcatataggtga

SEQ ID NO: 2402652 - DNA, 25 bp, Homo sapien
tgcaaatctgaaactctataactac

SEQ ID NO: 2402653 - DNA, 25 bp, Homo sapien
tatatacacattgttgtgagacaga

SEQ ID NO: 2402654 - DNA, 25 bp, Homo sapien
gagacagattttccgagcttttata

SEQ ID NO: 2402655 - DNA, 25 bp, Homo sapien
cctgcaggaactgctgacagaacat

SEQ ID NO: 2402656 - DNA, 25 bp, Homo sapien
ccaccaccagggtaggcgagatggc

SEQ ID NO: 2402657 - DNA, 25 bp, Homo sapien
acagcaaagggctcacgaacgggca

SEQ ID NO: 2402658 - DNA, 25 bp, Homo sapien
ctccatgtccttcgtctccaagttt

SEQ ID NO: 2402659 - DNA, 25 bp, Homo sapien
aatgggtatacatttgtacagttcg

SEQ ID NO: 2402660 - DNA, 25 bp, Homo sapien
ttggtaaattatgaatgggtataca

SEQ ID NO: 2402661 - DNA, 25 bp, Homo sapien
ggtatacatttgtacagttcgtgta

SEQ ID NO: 2402662 - DNA, 25 bp, Homo sapien
attatgaatgggtatacatttgtac

SEQ ID NO: 2402663 - DNA, 25 bp, Homo sapien
tgacttaatatgtgacttatcctgg

SEQ ID NO: 2402664 - DNA, 25 bp, Homo sapien
atttaggtgttctactgttggatgc

SEQ ID NO: 2402665 - DNA, 25 bp, Homo sapien
cactcaatgacttttcaagagtctg

SEQ ID NO: 2402666 - DNA, 25 bp, Homo sapien
gaagagtatgtattcagctgctgtt

SEQ ID NO: 2402667 - DNA, 25 bp, Homo sapien
ccattccttctaagtaaatgtatag

SEQ ID NO: 2402668 - DNA, 25 bp, Homo sapien
tagagacaaataactccattccttc

SEQ ID NO: 2402669 - DNA, 25 bp, Homo sapien
ttccttctaagtaaatgtataggac

SEQ ID NO: 2402670 - DNA, 25 bp, Homo sapien
ttttatagagacaaataactccatt

SEQ ID NO: 2402671 - DNA, 25 bp, Homo sapien
tgtgctgcagggggcgatatactca

SEQ ID NO: 2402672 - DNA, 25 bp, Homo sapien
cagggggcgatatactcagcaacca

SEQ ID NO: 2402673 - DNA, 25 bp, Homo sapien
ctgcagggggcgatatactcagcaa

SEQ ID NO: 2402674 - DNA, 25 bp, Homo sapien
ggggcgatatactcagcaaccacag

SEQ ID NO: 2402675 - DNA, 25 bp, Homo sapien
aaaaacttagcgtctgatttgtcac

SEQ ID NO: 2402676 - DNA, 25 bp, Homo sapien
tgaaggaaaaacttagcgtctgatt

SEQ ID NO: 2402677 - DNA, 25 bp, Homo sapien
tggcttcaagtctcctactgggatg

SEQ ID NO: 2402678 - DNA, 25 bp, Homo sapien
tgtctcatagtaatcatagacttta

SEQ ID NO: 2402679 - DNA, 25 bp, Homo sapien
agaaagacgacccatatgtagtctc

SEQ ID NO: 2402680 - DNA, 25 bp, Homo sapien
ttagaaagacgacccatatgtagtc

SEQ ID NO: 2402681 - DNA, 25 bp, Homo sapien
gaaagacgacccatatgtagtctca

SEQ ID NO: 2402682 - DNA, 25 bp, Homo sapien
aaagacgacccatatgtagtctcag

SEQ ID NO: 2402683 - DNA, 25 bp, Homo sapien
tcacttctgtccggctcacagagct

SEQ ID NO: 2402684 - DNA, 25 bp, Homo sapien
ttgctcacttctgtccggctcacag

SEQ ID NO: 2402685 - DNA, 25 bp, Homo sapien
atgaggacatggttgttgctcactt

SEQ ID NO: 2402686 - DNA, 25 bp, Homo sapien
aatgaggacatggttgttgctcact

SEQ ID NO: 2402687 - DNA, 25 bp, Homo sapien
caccatattggaagcaggacggttt

SEQ ID NO: 2402688 - DNA, 25 bp, Homo sapien
tcaacaatcaccatattggaagcag

SEQ ID NO: 2402689 - DNA, 25 bp, Homo sapien
taaaaccagataccatctttacatc

SEQ ID NO: 2402690 - DNA, 25 bp, Homo sapien
aaccagataccatctttacatcaac

SEQ ID NO: 2402691 - DNA, 25 bp, Homo sapien
tggtgtgggctttgtgtccatcgca

SEQ ID NO: 2402692 - DNA, 25 bp, Homo sapien
gggcacagtctgcacttttaaagca

SEQ ID NO: 2402693 - DNA, 25 bp, Homo sapien
tcagtgagatctgaaagctggtgtg

SEQ ID NO: 2402694 - DNA, 25 bp, Homo sapien
gctttgtgtccatcgcaagtttggg

SEQ ID NO: 2402695 - DNA, 25 bp, Homo sapien
tggaagaatattgtatttcatggat

SEQ ID NO: 2402696 - DNA, 25 bp, Homo sapien
ctggaagaatattgtatttcatgga

SEQ ID NO: 2402697 - DNA, 25 bp, Homo sapien
ggaagaatattgtatttcatggatg

SEQ ID NO: 2402698 - DNA, 25 bp, Homo sapien
gaagaatattgtatttcatggatgt

SEQ ID NO: 2402699 - DNA, 25 bp, Homo sapien
tggcaagtttaaagttgactctcac

SEQ ID NO: 2402700 - DNA, 25 bp, Homo sapien
taacgtctccagaggtgccttttac

SEQ ID NO: 2402701 - DNA, 25 bp, Homo sapien
tccatttcaattggcaagtttaaag

SEQ ID NO: 2402702 - DNA, 25 bp, Homo sapien
tcacttcctcattacttaacgtctc

SEQ ID NO: 2402703 - DNA, 25 bp, Homo sapien
agttctggtgaaagtggctgctcca

SEQ ID NO: 2402704 - DNA, 25 bp, Homo sapien
aacggtgacctgtgcagttttctca

SEQ ID NO: 2402705 - DNA, 25 bp, Homo sapien
aggtctgtgaatcctgaacggtgac

SEQ ID NO: 2402706 - DNA, 25 bp, Homo sapien
tgctccatacctggacagggcatgg

SEQ ID NO: 2402707 - DNA, 25 bp, Homo sapien
aagagacgagtggacaaccgcccca

SEQ ID NO: 2402708 - DNA, 25 bp, Homo sapien
ctggaagagacgagtggacaaccgc

SEQ ID NO: 2402709 - DNA, 25 bp, Homo sapien
acgagtggacaaccgccccaaagag

SEQ ID NO: 2402710 - DNA, 25 bp, Homo sapien
agacgagtggacaaccgccccaaag

SEQ ID NO: 2402711 - DNA, 25 bp, Homo sapien
tacttttaagcctcccaattgccaa

SEQ ID NO: 2402712 - DNA, 25 bp, Homo sapien
agcagaagactctttgggaaccact

SEQ ID NO: 2402713 - DNA, 25 bp, Homo sapien
tttaagcctcccaattgccaagtga

SEQ ID NO: 2402714 - DNA, 25 bp, Homo sapien
ctgttctacttttaagcctcccaat

SEQ ID NO: 2402715 - DNA, 25 bp, Homo sapien
aaaccaccttgggcgttctgctgct

SEQ ID NO: 2402716 - DNA, 25 bp, Homo sapien
gagaaaccaccttgggcgttctgct

SEQ ID NO: 2402717 - DNA, 25 bp, Homo sapien
agaaaccaccttgggcgttctgctg

SEQ ID NO: 2402718 - DNA, 25 bp, Homo sapien
gaaaccaccttgggcgttctgctgc

SEQ ID NO: 2402719 - DNA, 25 bp, Homo sapien
gggcgctcccaatggacgaggttgt

SEQ ID NO: 2402720 - DNA, 25 bp, Homo sapien
gagggcgctcccaatggacgaggtt

SEQ ID NO: 2402721 - DNA, 25 bp, Homo sapien
tctgagggcgctcccaatggacgag

SEQ ID NO: 2402722 - DNA, 25 bp, Homo sapien
tgagggcgctcccaatggacgaggt

SEQ ID NO: 2402723 - DNA, 25 bp, Homo sapien
ccaatgattactctgcttccagtac

SEQ ID NO: 2402724 - DNA, 25 bp, Homo sapien
gtgaagtcagttcctgcaagtgatt

SEQ ID NO: 2402725 - DNA, 25 bp, Homo sapien
tgtgaagtcagttcctgcaagtgat

SEQ ID NO: 2402726 - DNA, 25 bp, Homo sapien
caatgtcaccctttgtcctactgac

SEQ ID NO: 2402727 - DNA, 25 bp, Homo sapien
taaatgtcagagaacatctcagcgt

SEQ ID NO: 2402728 - DNA, 25 bp, Homo sapien
atcctggtagataattatgatggta

SEQ ID NO: 2402729 - DNA, 25 bp, Homo sapien
tcagagaacatctcagcgtggctga

SEQ ID NO: 2402730 - DNA, 25 bp, Homo sapien
cagcgtggctgatgagatcctggta

SEQ ID NO: 2402731 - DNA, 25 bp, Homo sapien
ggccagcaatgccttggtgtagaca

SEQ ID NO: 2402732 - DNA, 25 bp, Homo sapien
gtagacatggctcccatgggtcccc

SEQ ID NO: 2402733 - DNA, 25 bp, Homo sapien
gcttccttatcaagtgagttcagta

SEQ ID NO: 2402734 - DNA, 25 bp, Homo sapien
tgattttgctttcccagtagggaaa

SEQ ID NO: 2402735 - DNA, 25 bp, Homo sapien
gcaatagtaacataggcggagaggg

SEQ ID NO: 2402736 - DNA, 25 bp, Homo sapien
agtaacataggcggagagggtcgct

SEQ ID NO: 2402737 - DNA, 25 bp, Homo sapien
caatagtaacataggcggagagggt

SEQ ID NO: 2402738 - DNA, 25 bp, Homo sapien
aacataggcggagagggtcgcttca

SEQ ID NO: 2402739 - DNA, 25 bp, Homo sapien
atctgggagagccacgtgagagatt

SEQ ID NO: 2402740 - DNA, 25 bp, Homo sapien
tcgagcctgggcgaaagtcttcagt

SEQ ID NO: 2402741 - DNA, 25 bp, Homo sapien
gggtaatgtgtgcttcatcaatgaa

SEQ ID NO: 2402742 - DNA, 25 bp, Homo sapien
aatgaagatgtaggatcgagcctgg

SEQ ID NO: 2402743 - DNA, 25 bp, Homo sapien
ttggtgtttgtagttcagctgtctc

SEQ ID NO: 2402744 - DNA, 25 bp, Homo sapien
cccaaaggtgctgtaggagccatct

SEQ ID NO: 2402745 - DNA, 25 bp, Homo sapien
tggttcctgccatatcgttccccaa

SEQ ID NO: 2402746 - DNA, 25 bp, Homo sapien
gcaaataggaccatgttctgttctc

SEQ ID NO: 2402747 - DNA, 25 bp, Homo sapien
gatgagatagccaacggccttggcc

SEQ ID NO: 2402748 - DNA, 25 bp, Homo sapien
tgcatagcagaacctaatatgtcac

SEQ ID NO: 2402749 - DNA, 25 bp, Homo sapien
cagctgctgggtttcattcagatag

SEQ ID NO: 2402750 - DNA, 25 bp, Homo sapien
agaaagaagctctggcagattcttt

SEQ ID NO: 2402751 - DNA, 25 bp, Homo sapien
gaaagaagctctggcagattctttg

SEQ ID NO: 2402752 - DNA, 25 bp, Homo sapien
tttgaccacatttgatgggagcttc

SEQ ID NO: 2402753 - DNA, 25 bp, Homo sapien
ctgaggcacaggtcatagaactgaa

SEQ ID NO: 2402754 - DNA, 25 bp, Homo sapien
aggtcatagaactgaaagtcttttc

SEQ ID NO: 2402755 - DNA, 25 bp, Homo sapien
agtcttttcttgctcaataccttca

SEQ ID NO: 2402756 - DNA, 25 bp, Homo sapien
tcttttcttgctcaataccttcagc

SEQ ID NO: 2402757 - DNA, 25 bp, Homo sapien
ctcatttccacagagttctaaggac

SEQ ID NO: 2402758 - DNA, 25 bp, Homo sapien
tgcattgcctctgcactcactgaga

SEQ ID NO: 2402759 - DNA, 25 bp, Homo sapien
ttcttttaatctcagggacctcaac

SEQ ID NO: 2402760 - DNA, 25 bp, Homo sapien
cagagttctaaggactgcattgcct

SEQ ID NO: 2402761 - DNA, 25 bp, Homo sapien
taagggctgcaccttaaacttatag

SEQ ID NO: 2402762 - DNA, 25 bp, Homo sapien
aaacttatagttgtccagaatagaa

SEQ ID NO: 2402763 - DNA, 25 bp, Homo sapien
tttgatagtccaatcacctttaagg

SEQ ID NO: 2402764 - DNA, 25 bp, Homo sapien
aatattgaaaacatgagtatccact

SEQ ID NO: 2402765 - DNA, 25 bp, Homo sapien
cactgtccaagacaaggtttgtctc

SEQ ID NO: 2402766 - DNA, 25 bp, Homo sapien
caagacaaggtttgtctctcatttc

SEQ ID NO: 2402767 - DNA, 25 bp, Homo sapien
ctccctttgtattttgggaagctag

SEQ ID NO: 2402768 - DNA, 25 bp, Homo sapien
ccagagttttaggagtcactgtcca

SEQ ID NO: 2402769 - DNA, 25 bp, Homo sapien
ttcctgttcaccctcattttcctta

SEQ ID NO: 2402770 - DNA, 25 bp, Homo sapien
tcctgttcaccctcattttccttac

SEQ ID NO: 2402771 - DNA, 25 bp, Homo sapien
ctttcctgttcaccctcattttcct

SEQ ID NO: 2402772 - DNA, 25 bp, Homo sapien
gaccgtggccttgagtgtgaagacc

SEQ ID NO: 2402773 - DNA, 25 bp, Homo sapien
aggaccgtggccttgagtgtgaaga

SEQ ID NO: 2402774 - DNA, 25 bp, Homo sapien
cgtggccttgagtgtgaagacctct

SEQ ID NO: 2402775 - DNA, 25 bp, Homo sapien
tggccttgagtgtgaagacctctcc

SEQ ID NO: 2402776 - DNA, 25 bp, Homo sapien
ctcctacctcagccacacctgatga

SEQ ID NO: 2402777 - DNA, 25 bp, Homo sapien
tcctacctcagccacacctgatgag

SEQ ID NO: 2402778 - DNA, 25 bp, Homo sapien
actcctacctcagccacacctgatg

SEQ ID NO: 2402779 - DNA, 25 bp, Homo sapien
gagggcaagtgaagaacagaaataa

SEQ ID NO: 2402780 - DNA, 25 bp, Homo sapien
aaataatgaatgtaagccacctttt

SEQ ID NO: 2402781 - DNA, 25 bp, Homo sapien
gggcaagtgaagaacagaaataatg

SEQ ID NO: 2402782 - DNA, 25 bp, Homo sapien
ggaggagggcaagtgaagaacagaa

SEQ ID NO: 2402783 - DNA, 25 bp, Homo sapien
agggactggccctgaactttgttca

SEQ ID NO: 2402784 - DNA, 25 bp, Homo sapien
caagtctcaggaaaatagcttcgca

SEQ ID NO: 2402785 - DNA, 25 bp, Homo sapien
gcctaattgaggaacatatggtctc

SEQ ID NO: 2402786 - DNA, 25 bp, Homo sapien
tagcttcgcaccgtttcagggactg

SEQ ID NO: 2402787 - DNA, 25 bp, Homo sapien
tgttcacgttgtttcttgtcaccag

SEQ ID NO: 2402788 - DNA, 25 bp, Homo sapien
gattttgtgccctgaagtatcggat

SEQ ID NO: 2402789 - DNA, 25 bp, Homo sapien
gctatcaccagctaagtcacctcag

SEQ ID NO: 2402790 - DNA, 25 bp, Homo sapien
gtggaaatagggctacattacctca

SEQ ID NO: 2402791 - DNA, 25 bp, Homo sapien
tgctcctgcagacacggaagggatg

SEQ ID NO: 2402792 - DNA, 25 bp, Homo sapien
catagtatccttgacctactgctcc

SEQ ID NO: 2402793 - DNA, 25 bp, Homo sapien
tcggatttttgagttagtgaacacc

SEQ ID NO: 2402794 - DNA, 25 bp, Homo sapien
ctgaacacgactttggttttcggat

SEQ ID NO: 2402795 - DNA, 25 bp, Homo sapien
gctggtccacattgtcaggaaaatt

SEQ ID NO: 2402796 - DNA, 25 bp, Homo sapien
gatccttcacagttagcagattata

SEQ ID NO: 2402797 - DNA, 25 bp, Homo sapien
tgataagggaacatagatggctcca

SEQ ID NO: 2402798 - DNA, 25 bp, Homo sapien
tatctgcttcattacttgataaggg

SEQ ID NO: 2402799 - DNA, 25 bp, Homo sapien
aaagcttattaaatgcagcaccttc

SEQ ID NO: 2402800 - DNA, 25 bp, Homo sapien
ttaggacctgaactcaactctggat

SEQ ID NO: 2402801 - DNA, 25 bp, Homo sapien
taggacctgaactcaactctggatc

SEQ ID NO: 2402802 - DNA, 25 bp, Homo sapien
actctggatcaagtggacctgattg

SEQ ID NO: 2402803 - DNA, 25 bp, Homo sapien
cctgattgatatctacagaactctc

SEQ ID NO: 2402804 - DNA, 25 bp, Homo sapien
gcagctgctacttgcaggtgggcat

SEQ ID NO: 2402805 - DNA, 25 bp, Homo sapien
actttggtccacagcacgaagggca

SEQ ID NO: 2402806 - DNA, 25 bp, Homo sapien
gcacagagggactgcggagcagctg

SEQ ID NO: 2402807 - DNA, 25 bp, Homo sapien
acagagagctcagcctcaggcttca

SEQ ID NO: 2402808 - DNA, 25 bp, Homo sapien
tctccatctggtaaaatggcaaaga

SEQ ID NO: 2402809 - DNA, 25 bp, Homo sapien
tgactccacagggaaggataaggca

SEQ ID NO: 2402810 - DNA, 25 bp, Homo sapien
gcaatgggggcaacgtctgactcca

SEQ ID NO: 2402811 - DNA, 25 bp, Homo sapien
gatgaacattcgtgcaatgggggca

SEQ ID NO: 2402812 - DNA, 25 bp, Homo sapien
tgacgatgactcccttagccatgat

SEQ ID NO: 2402813 - DNA, 25 bp, Homo sapien
gatctgacgatgactcccttagcca

SEQ ID NO: 2402814 - DNA, 25 bp, Homo sapien
tctgacgatgactcccttagccatg

SEQ ID NO: 2402815 - DNA, 25 bp, Homo sapien
ctgacgatgactcccttagccatga

SEQ ID NO: 2402816 - DNA, 25 bp, Homo sapien
ggtggtcttctgctacccatgaata

SEQ ID NO: 2402817 - DNA, 25 bp, Homo sapien
tggaaactgagctccgataactctc

SEQ ID NO: 2402818 - DNA, 25 bp, Homo sapien
tatagtgtgccgtgatagtctccgt

SEQ ID NO: 2402819 - DNA, 25 bp, Homo sapien
cacaagttgggatgcacagtgaaaa

SEQ ID NO: 2402820 - DNA, 25 bp, Homo sapien
tactggtagtattgattgaaaactg

SEQ ID NO: 2402821 - DNA, 25 bp, Homo sapien
agtttattaaccgagatactggtag

SEQ ID NO: 2402822 - DNA, 25 bp, Homo sapien
aattggcgtcattcacagagatgaa

SEQ ID NO: 2402823 - DNA, 25 bp, Homo sapien
ttgaaaactgtgcaagaccctgctc

SEQ ID NO: 2402824 - DNA, 25 bp, Homo sapien
taaagtgtgaatccactttcacgaa

SEQ ID NO: 2402825 - DNA, 25 bp, Homo sapien
ttgagtttggatacaatgtttgtga

SEQ ID NO: 2402826 - DNA, 25 bp, Homo sapien
tgcaaaaaaggggattccttgtcta

SEQ ID NO: 2402827 - DNA, 25 bp, Homo sapien
cactgatcctgtttgcagtgacttc

SEQ ID NO: 2402828 - DNA, 25 bp, Homo sapien
tgatcctggcttccactctaagctt

SEQ ID NO: 2402829 - DNA, 25 bp, Homo sapien
acttgttgggtgatgcagccattgc

SEQ ID NO: 2402830 - DNA, 25 bp, Homo sapien
agcattttggtgtgtacttgttggg

SEQ ID NO: 2402831 - DNA, 25 bp, Homo sapien
caaagcccgtatttgtaatctggag

SEQ ID NO: 2402832 - DNA, 25 bp, Homo sapien
gaacacgagataattttctacacag

SEQ ID NO: 2402833 - DNA, 25 bp, Homo sapien
tctacacaggctcacagttgcaagt

SEQ ID NO: 2402834 - DNA, 25 bp, Homo sapien
tgcttgtcacaattaagaacacgag

SEQ ID NO: 2402835 - DNA, 25 bp, Homo sapien
cctcctgcttgtcacaattaagaac

SEQ ID NO: 2402836 - DNA, 25 bp, Homo sapien
tggcacctgaactttgacctcaaac

SEQ ID NO: 2402837 - DNA, 25 bp, Homo sapien
acctgaactttgacctcaaacttgg

SEQ ID NO: 2402838 - DNA, 25 bp, Homo sapien
tgaactttgacctcaaacttgggaa

SEQ ID NO: 2402839 - DNA, 25 bp, Homo sapien
ggcacctgaactttgacctcaaact

SEQ ID NO: 2402840 - DNA, 25 bp, Homo sapien
gaaaggacaactgattgatgccagc

SEQ ID NO: 2402841 - DNA, 25 bp, Homo sapien
cctgtaggagccctgaatgggctct

SEQ ID NO: 2402842 - DNA, 25 bp, Homo sapien
caaattcctccacggtgaaggggtg

SEQ ID NO: 2402843 - DNA, 25 bp, Homo sapien
gcttctagcttgagactctgccatt

SEQ ID NO: 2402844 - DNA, 25 bp, Homo sapien
cagttcatttcgagggcgaaaattt

SEQ ID NO: 2402845 - DNA, 25 bp, Homo sapien
tccacggagacaacacggaatctta

SEQ ID NO: 2402846 - DNA, 25 bp, Homo sapien
catttcgagggcgaaaattttcatc

SEQ ID NO: 2402847 - DNA, 25 bp, Homo sapien
atccacggagacaacacggaatctt

SEQ ID NO: 2402848 - DNA, 25 bp, Homo sapien
aagtagttctccgataagattcaga

SEQ ID NO: 2402849 - DNA, 25 bp, Homo sapien
gaaaagtagttctccgataagattc

SEQ ID NO: 2402850 - DNA, 25 bp, Homo sapien
tagttctccgataagattcagacat

SEQ ID NO: 2402851 - DNA, 25 bp, Homo sapien
ctggaaaagtagttctccgataaga

SEQ ID NO: 2402852 - DNA, 25 bp, Homo sapien
gataaagcaggtaatttgggtaata

SEQ ID NO: 2402853 - DNA, 25 bp, Homo sapien
gtctgtcctggtttatacatgggtt

SEQ ID NO: 2402854 - DNA, 25 bp, Homo sapien
cctggtttatacatgggtttgtctg

SEQ ID NO: 2402855 - DNA, 25 bp, Homo sapien
ctgtcctggtttatacatgggtttg

SEQ ID NO: 2402856 - DNA, 25 bp, Homo sapien
ctgtctgtcctggtttatacatggg

SEQ ID NO: 2402857 - DNA, 25 bp, Homo sapien
tctggatgctaaggaatgccacctc

SEQ ID NO: 2402858 - DNA, 25 bp, Homo sapien
gacaaagaccagactttgggtgttc

SEQ ID NO: 2402859 - DNA, 25 bp, Homo sapien
ggtgttcagtaccagaactgtgttc

SEQ ID NO: 2402860 - DNA, 25 bp, Homo sapien
gcgtaggcccctttatctggatgct

SEQ ID NO: 2402861 - DNA, 25 bp, Homo sapien
acagtggaataagtccttctccgcc

SEQ ID NO: 2402862 - DNA, 25 bp, Homo sapien
ggagacacagtggaataagtccttc

SEQ ID NO: 2402863 - DNA, 25 bp, Homo sapien
gacacagtggaataagtccttctcc

SEQ ID NO: 2402864 - DNA, 25 bp, Homo sapien
gtcagtgaagaggctcctgttttcc

SEQ ID NO: 2402865 - DNA, 25 bp, Homo sapien
cactgtctcattcaggtggctcaga

SEQ ID NO: 2402866 - DNA, 25 bp, Homo sapien
aggacacagcccttcttaggggcct

SEQ ID NO: 2402867 - DNA, 25 bp, Homo sapien
gggaggggaccagcaccatatactg

SEQ ID NO: 2402868 - DNA, 25 bp, Homo sapien
ttcttaggggcctcagtgtggagca

SEQ ID NO: 2402869 - DNA, 25 bp, Homo sapien
gttgccaggaaattgtgcaaggaaa

SEQ ID NO: 2402870 - DNA, 25 bp, Homo sapien
ttgccaggaaattgtgcaaggaaaa

SEQ ID NO: 2402871 - DNA, 25 bp, Homo sapien
cggttgccaggaaattgtgcaagga

SEQ ID NO: 2402872 - DNA, 25 bp, Homo sapien
ggttgccaggaaattgtgcaaggaa

SEQ ID NO: 2402873 - DNA, 25 bp, Homo sapien
ccatagtatttgaggcaggatgcaa

SEQ ID NO: 2402874 - DNA, 25 bp, Homo sapien
gggaccttaaatggcctggactgca

SEQ ID NO: 2402875 - DNA, 25 bp, Homo sapien
ggcaaggtgaccctgcatcacaggc

SEQ ID NO: 2402876 - DNA, 25 bp, Homo sapien
tgtaaaggcagctgggttaaggcca

SEQ ID NO: 2402877 - DNA, 25 bp, Homo sapien
caggataagaagtagcacaagacat

SEQ ID NO: 2402878 - DNA, 25 bp, Homo sapien
caagacataaatgaagaagtctgtc

SEQ ID NO: 2402879 - DNA, 25 bp, Homo sapien
ctggcagaaagcaggataagaagta

SEQ ID NO: 2402880 - DNA, 25 bp, Homo sapien
gaagtagcacaagacataaatgaag

SEQ ID NO: 2402881 - DNA, 25 bp, Homo sapien
tgtgagggataaatctcagggttgt

SEQ ID NO: 2402882 - DNA, 25 bp, Homo sapien
tgagggataaatctcagggttgtgt

SEQ ID NO: 2402883 - DNA, 25 bp, Homo sapien
agggataaatctcagggttgtgtcc

SEQ ID NO: 2402884 - DNA, 25 bp, Homo sapien
gagggataaatctcagggttgtgtc

SEQ ID NO: 2402885 - DNA, 25 bp, Homo sapien
aaattctgataggtactgaggcatg

SEQ ID NO: 2402886 - DNA, 25 bp, Homo sapien
cattactctcagtggttgcctcatt

SEQ ID NO: 2402887 - DNA, 25 bp, Homo sapien
tccctaaaagggtcattactctcag

SEQ ID NO: 2402888 - DNA, 25 bp, Homo sapien
ctctgaatagagttcagaattgagc

SEQ ID NO: 2402889 - DNA, 25 bp, Homo sapien
aaaatccttacaagcaggtgacaaa

SEQ ID NO: 2402890 - DNA, 25 bp, Homo sapien
aaatccttacaagcaggtgacaaag

SEQ ID NO: 2402891 - DNA, 25 bp, Homo sapien
catgatagtagctcatgcattgcag

SEQ ID NO: 2402892 - DNA, 25 bp, Homo sapien
tcttttttagcagttgattgagtac

SEQ ID NO: 2402893 - DNA, 25 bp, Homo sapien
agattcatttctgggactgagtgag

SEQ ID NO: 2402894 - DNA, 25 bp, Homo sapien
ttagcagttgattgagtacatggtc

SEQ ID NO: 2402895 - DNA, 25 bp, Homo sapien
tgatggtagtacattctttcaatac

SEQ ID NO: 2402896 - DNA, 25 bp, Homo sapien
aggtaaaatgatggtagtacattct

SEQ ID NO: 2402897 - DNA, 25 bp, Homo sapien
caatttttggtgaggggagactctg

SEQ ID NO: 2402898 - DNA, 25 bp, Homo sapien
taagggtcacttaagtattatctag

SEQ ID NO: 2402899 - DNA, 25 bp, Homo sapien
agaagttcacccaatgaggtccgta

SEQ ID NO: 2402900 - DNA, 25 bp, Homo sapien
tctcactgtcctctctattgatgag

SEQ ID NO: 2402901 - DNA, 25 bp, Homo sapien
tgaggtccgtaagttgctgttttca

SEQ ID NO: 2402902 - DNA, 25 bp, Homo sapien
tgtcctctctattgatgagtctgtt

SEQ ID NO: 2402903 - DNA, 25 bp, Homo sapien
gcaaggggcattgtattcttcaaag

SEQ ID NO: 2402904 - DNA, 25 bp, Homo sapien
cactgcaaggggcattgtattcttc

SEQ ID NO: 2402905 - DNA, 25 bp, Homo sapien
caaggggcattgtattcttcaaagg

SEQ ID NO: 2402906 - DNA, 25 bp, Homo sapien
ctgcaaggggcattgtattcttcaa

SEQ ID NO: 2402907 - DNA, 25 bp, Homo sapien
gaaaaatgcagggtttgatgggtta

SEQ ID NO: 2402908 - DNA, 25 bp, Homo sapien
ataataatcataggcttttactgta

SEQ ID NO: 2402909 - DNA, 25 bp, Homo sapien
ttggatgtcttgttccacaaagaag

SEQ ID NO: 2402910 - DNA, 25 bp, Homo sapien
ataatcataggcttttactgtagct

SEQ ID NO: 2402911 - DNA, 25 bp, Homo sapien
tagttatgctatatatctgtaccag

SEQ ID NO: 2402912 - DNA, 25 bp, Homo sapien
tgtgacctgcataacatactcaatg

SEQ ID NO: 2402913 - DNA, 25 bp, Homo sapien
actagttactagttactggccactc

SEQ ID NO: 2402914 - DNA, 25 bp, Homo sapien
gaatcaagcctgttgacagtccagg

SEQ ID NO: 2402915 - DNA, 25 bp, Homo sapien
tcaaagtagattgggacatggttgg

SEQ ID NO: 2402916 - DNA, 25 bp, Homo sapien
cttttcaaagtagattgggacatgg

SEQ ID NO: 2402917 - DNA, 25 bp, Homo sapien
tttcaaagtagattgggacatggtt

SEQ ID NO: 2402918 - DNA, 25 bp, Homo sapien
ttcagtcctctgaatctgaggctgt

SEQ ID NO: 2402919 - DNA, 25 bp, Homo sapien
ctgttgaccaagaggataagccaga

SEQ ID NO: 2402920 - DNA, 25 bp, Homo sapien
gttgaccaagaggataagccagaaa

SEQ ID NO: 2402921 - DNA, 25 bp, Homo sapien
ccaagaggataagccagaaatatgg

SEQ ID NO: 2402922 - DNA, 25 bp, Homo sapien
gccagaaatatggaatgagaaaact

SEQ ID NO: 2402923 - DNA, 25 bp, Homo sapien
atttatgatataaacagcttctcag

SEQ ID NO: 2402924 - DNA, 25 bp, Homo sapien
ttatgatataaacagcttctcagga

SEQ ID NO: 2402925 - DNA, 25 bp, Homo sapien
ctcaggagcatccaaactactaatt

SEQ ID NO: 2402926 - DNA, 25 bp, Homo sapien
ggagcatccaaactactaattttga

SEQ ID NO: 2402927 - DNA, 25 bp, Homo sapien
atgctctcataggtatgaagcctga

SEQ ID NO: 2402928 - DNA, 25 bp, Homo sapien
tctcataggtatgaagcctgatacc

SEQ ID NO: 2402929 - DNA, 25 bp, Homo sapien
ctttttaactgatgctctcataggt

SEQ ID NO: 2402930 - DNA, 25 bp, Homo sapien
ggtatgaagcctgataccatcttca

SEQ ID NO: 2402931 - DNA, 25 bp, Homo sapien
aatgttgatgtgaatctggaacgtt

SEQ ID NO: 2402932 - DNA, 25 bp, Homo sapien
taatgttgatgtgaatctggaacgt

SEQ ID NO: 2402933 - DNA, 25 bp, Homo sapien
ctaatgttgatgtgaatctggaacg

SEQ ID NO: 2402934 - DNA, 25 bp, Homo sapien
cctgcagagcaaaaggtgttttccc

SEQ ID NO: 2402935 - DNA, 25 bp, Homo sapien
acctgcagagcaaaaggtgttttcc

SEQ ID NO: 2402936 - DNA, 25 bp, Homo sapien
ctgcagagcaaaaggtgttttccct

SEQ ID NO: 2402937 - DNA, 25 bp, Homo sapien
gacctcctgcagcactaggcagttg

SEQ ID NO: 2402938 - DNA, 25 bp, Homo sapien
catggttgtgctgtactcccctgga

SEQ ID NO: 2402939 - DNA, 25 bp, Homo sapien
tttggagagcgcttgaagagccacc

SEQ ID NO: 2402940 - DNA, 25 bp, Homo sapien
tggaggtacacacatcctgaccctg

SEQ ID NO: 2402941 - DNA, 25 bp, Homo sapien
aaagtaacaaactcacactggatgt

SEQ ID NO: 2402942 - DNA, 25 bp, Homo sapien
agtaacaaactcacactggatgtaa

SEQ ID NO: 2402943 - DNA, 25 bp, Homo sapien
gaaagtaacaaactcacactggatg

SEQ ID NO: 2402944 - DNA, 25 bp, Homo sapien
aggaaagtaacaaactcacactgga

SEQ ID NO: 2402945 - DNA, 25 bp, Homo sapien
aactcccagatggttgtgtcttcat

SEQ ID NO: 2402946 - DNA, 25 bp, Homo sapien
atgtttccttctagagtcttcccac

SEQ ID NO: 2402947 - DNA, 25 bp, Homo sapien
tcaactcccagatggttgtgtcttc

SEQ ID NO: 2402948 - DNA, 25 bp, Homo sapien
tttccttctagagtcttcccacaga

SEQ ID NO: 2402949 - DNA, 25 bp, Homo sapien
gattttgctgcttggtaatccactt

SEQ ID NO: 2402950 - DNA, 25 bp, Homo sapien
gataggcaaggagcacataagatgt

SEQ ID NO: 2402951 - DNA, 25 bp, Homo sapien
caggctggacagtaagataggcaag

SEQ ID NO: 2402952 - DNA, 25 bp, Homo sapien
tcacaatacgtgatgccacagacag

SEQ ID NO: 2402953 - DNA, 25 bp, Homo sapien
ccaggacgttgccagtggatcgaat

SEQ ID NO: 2402954 - DNA, 25 bp, Homo sapien
tcttagcttcgtgaagtttcccagg

SEQ ID NO: 2402955 - DNA, 25 bp, Homo sapien
ggttgagaatagagggtcttagctt

SEQ ID NO: 2402956 - DNA, 25 bp, Homo sapien
gaagtttcccaggacgttgccagtg

SEQ ID NO: 2402957 - DNA, 25 bp, Homo sapien
ctttgacatagaaaagggtagaatt

SEQ ID NO: 2402958 - DNA, 25 bp, Homo sapien
agcaactctcttcgcttgactttgt

SEQ ID NO: 2402959 - DNA, 25 bp, Homo sapien
tcaagcaactctcttcgcttgactt

SEQ ID NO: 2402960 - DNA, 25 bp, Homo sapien
aagcaactctcttcgcttgactttg

SEQ ID NO: 2402961 - DNA, 25 bp, Homo sapien
ctctcttcgcttgactttgtttcct

SEQ ID NO: 2402962 - DNA, 25 bp, Homo sapien
ggtatagacaacacttccttgggcc

SEQ ID NO: 2402963 - DNA, 25 bp, Homo sapien
agctccaggccgtttcaaggcagga

SEQ ID NO: 2402964 - DNA, 25 bp, Homo sapien
gatagggcactgcagaccactgcgt

SEQ ID NO: 2402965 - DNA, 25 bp, Homo sapien
ggcaaaggcataggccaataatgct

SEQ ID NO: 2402966 - DNA, 25 bp, Homo sapien
gcagaggcatctccagcaaagcaat

SEQ ID NO: 2402967 - DNA, 25 bp, Homo sapien
gagaatgtcacctcatcgttcaccc

SEQ ID NO: 2402968 - DNA, 25 bp, Homo sapien
gtgatgtaggcagagaatgtcacct

SEQ ID NO: 2402969 - DNA, 25 bp, Homo sapien
gcatctccagcaaagcaatggtgat

SEQ ID NO: 2402970 - DNA, 25 bp, Homo sapien
tgagggcatccctgatgtgtgagct

SEQ ID NO: 2402971 - DNA, 25 bp, Homo sapien
ctctccacaaagatgtacgattggg

SEQ ID NO: 2402972 - DNA, 25 bp, Homo sapien
gttcagcagtgatccagagccttcg

SEQ ID NO: 2402973 - DNA, 25 bp, Homo sapien
gagccttcgaaaaaaccatctgcct

SEQ ID NO: 2402974 - DNA, 25 bp, Homo sapien
caaaggtgctgtaggaaccatctct

SEQ ID NO: 2402975 - DNA, 25 bp, Homo sapien
aaggtgctgtaggaaccatctctgt

SEQ ID NO: 2402976 - DNA, 25 bp, Homo sapien
aaaggtgctgtaggaaccatctctg

SEQ ID NO: 2402977 - DNA, 25 bp, Homo sapien
tgtcagctgtcgtgtctcatttaga

SEQ ID NO: 2402978 - DNA, 25 bp, Homo sapien
catctgaagaaggttctgaaggttt

SEQ ID NO: 2402979 - DNA, 25 bp, Homo sapien
gaaggttttgcactacagagcctag

SEQ ID NO: 2402980 - DNA, 25 bp, Homo sapien
cactgatgaggtagctagtggcttt

SEQ ID NO: 2402981 - DNA, 25 bp, Homo sapien
catttgaaggaacattcagtgacac

SEQ ID NO: 2402982 - DNA, 25 bp, Homo sapien
tgacaccttttcaggtactccagta

SEQ ID NO: 2402983 - DNA, 25 bp, Homo sapien
tgttgcccttggagatccttcaacc

SEQ ID NO: 2402984 - DNA, 25 bp, Homo sapien
ggagatccttcaaccacatttgaag

SEQ ID NO: 2402985 - DNA, 25 bp, Homo sapien
ttggcctttttaaccatctcataca

SEQ ID NO: 2402986 - DNA, 25 bp, Homo sapien
tttttaaccatctcatacaaaccaa

SEQ ID NO: 2402987 - DNA, 25 bp, Homo sapien
ggcctttttaaccatctcatacaaa

SEQ ID NO: 2402988 - DNA, 25 bp, Homo sapien
tttaaccatctcatacaaaccaact

SEQ ID NO: 2402989 - DNA, 25 bp, Homo sapien
ttgcaaattctcatggtttgggttg

SEQ ID NO: 2402990 - DNA, 25 bp, Homo sapien
gttgcaaattctcatggtttgggtt

SEQ ID NO: 2402991 - DNA, 25 bp, Homo sapien
tgttgcaaattctcatggtttgggt

SEQ ID NO: 2402992 - DNA, 25 bp, Homo sapien
gcttctgggtatcgacatcgttatc

SEQ ID NO: 2402993 - DNA, 25 bp, Homo sapien
tctgggtatcgacatcgttatcctc

SEQ ID NO: 2402994 - DNA, 25 bp, Homo sapien
ctgggtatcgacatcgttatcctca

SEQ ID NO: 2402995 - DNA, 25 bp, Homo sapien
cgcttgcccgtagctgactcagctc

SEQ ID NO: 2402996 - DNA, 25 bp, Homo sapien
ttagcattcccgtgagcaggggcgt

SEQ ID NO: 2402997 - DNA, 25 bp, Homo sapien
ctacctcgttgtcagcctccggctc

SEQ ID NO: 2402998 - DNA, 25 bp, Homo sapien
attttcctcattagcattcccgtga

SEQ ID NO: 2402999 - DNA, 25 bp, Homo sapien
cgttgtcagcctccggctccccatt

SEQ ID NO: 2403000 - DNA, 25 bp, Homo sapien
ttaagtcctcggtggtgatttcgga

SEQ ID NO: 2403001 - DNA, 25 bp, Homo sapien
tggtgatttcggagctggtgtctac

SEQ ID NO: 2403002 - DNA, 25 bp, Homo sapien
ctttaagtcctcggtggtgatttcg

SEQ ID NO: 2403003 - DNA, 25 bp, Homo sapien
cggagctggtgtctacggctgcgtc

SEQ ID NO: 2403004 - DNA, 25 bp, Homo sapien
cggtgacgcgatgcaggggataaaa

SEQ ID NO: 2403005 - DNA, 25 bp, Homo sapien
atgcacagggcagcgtgttgaaagt

SEQ ID NO: 2403006 - DNA, 25 bp, Homo sapien
gcgtgttgaaagtttcctcctttgc

SEQ ID NO: 2403007 - DNA, 25 bp, Homo sapien
gggcagcgtgttgaaagtttcctcc

SEQ ID NO: 2403008 - DNA, 25 bp, Homo sapien
cacagggcagcgtgttgaaagtttc

SEQ ID NO: 2403009 - DNA, 25 bp, Homo sapien
tagtaaggccttgactacagtgtcc

SEQ ID NO: 2403010 - DNA, 25 bp, Homo sapien
caagtggtgggacgtcagtcaactc

SEQ ID NO: 2403011 - DNA, 25 bp, Homo sapien
tacagtgtccttctgcgcaagtggt

SEQ ID NO: 2403012 - DNA, 25 bp, Homo sapien
cagtcaactcattgtcacacacttc

SEQ ID NO: 2403013 - DNA, 25 bp, Homo sapien
gaacagccaggaaagcggaagagac

SEQ ID NO: 2403014 - DNA, 25 bp, Homo sapien
ccagtgacttcggagtcacaaccca

SEQ ID NO: 2403015 - DNA, 25 bp, Homo sapien
tgacttcggagtcacaacccaggac

SEQ ID NO: 2403016 - DNA, 25 bp, Homo sapien
ggttttccgcccatttctacagaca

SEQ ID NO: 2403017 - DNA, 25 bp, Homo sapien
aaccacaagtttatgaagggatgca

SEQ ID NO: 2403018 - DNA, 25 bp, Homo sapien
tttatgaagggatgcagaacagcat

SEQ ID NO: 2403019 - DNA, 25 bp, Homo sapien
ccacaagtttatgaagggatgcaga

SEQ ID NO: 2403020 - DNA, 25 bp, Homo sapien
caagtttatgaagggatgcagaaca

SEQ ID NO: 2403021 - DNA, 25 bp, Homo sapien
cagaataaggaagggtgagttctag

SEQ ID NO: 2403022 - DNA, 25 bp, Homo sapien
gaatgcaggtggacaagcagttaaa

SEQ ID NO: 2403023 - DNA, 25 bp, Homo sapien
gcaggtggacaagcagttaaacaca

SEQ ID NO: 2403024 - DNA, 25 bp, Homo sapien
gtgaaggcttctcctcgcaccacag

SEQ ID NO: 2403025 - DNA, 25 bp, Homo sapien
cttgaagagacacgataggagagag

SEQ ID NO: 2403026 - DNA, 25 bp, Homo sapien
gaagagacacgataggagagaggcc

SEQ ID NO: 2403027 - DNA, 25 bp, Homo sapien
ttgaagagacacgataggagagagg

SEQ ID NO: 2403028 - DNA, 25 bp, Homo sapien
tgaagagacacgataggagagaggc

SEQ ID NO: 2403029 - DNA, 25 bp, Homo sapien
tgtggttccagacaagcagaatgcg

SEQ ID NO: 2403030 - DNA, 25 bp, Homo sapien
tggttccagacaagcagaatgcgct

SEQ ID NO: 2403031 - DNA, 25 bp, Homo sapien
cctgtggttccagacaagcagaatg

SEQ ID NO: 2403032 - DNA, 25 bp, Homo sapien
ttccagacaagcagaatgcgctggc

SEQ ID NO: 2403033 - DNA, 25 bp, Homo sapien
ggtcaccagctcacttatacctaat

SEQ ID NO: 2403034 - DNA, 25 bp, Homo sapien
gtcaccagctcacttatacctaatg

SEQ ID NO: 2403035 - DNA, 25 bp, Homo sapien
caccagctcacttatacctaatgag

SEQ ID NO: 2403036 - DNA, 25 bp, Homo sapien
tcaccagctcacttatacctaatga

SEQ ID NO: 2403037 - DNA, 25 bp, Homo sapien
tatttaagagggctggtagcatcct

SEQ ID NO: 2403038 - DNA, 25 bp, Homo sapien
taacctagtgtggtaaatgctaaac

SEQ ID NO: 2403039 - DNA, 25 bp, Homo sapien
tcagtcatacagcaggattcaaacc

SEQ ID NO: 2403040 - DNA, 25 bp, Homo sapien
aacttgatctaagggttggtgctcc

SEQ ID NO: 2403041 - DNA, 25 bp, Homo sapien
caggtctcagggaagtacttccgga

SEQ ID NO: 2403042 - DNA, 25 bp, Homo sapien
ccaggtctcagggaagtacttccgg

SEQ ID NO: 2403043 - DNA, 25 bp, Homo sapien
ctgggggtacacctcgcagacctgg

SEQ ID NO: 2403044 - DNA, 25 bp, Homo sapien
gtacattatttctacggctcctggg

SEQ ID NO: 2403045 - DNA, 25 bp, Homo sapien
cttgcaatatctgaggttcttcttc

SEQ ID NO: 2403046 - DNA, 25 bp, Homo sapien
gaggttcttcttcgatcattgggta

SEQ ID NO: 2403047 - DNA, 25 bp, Homo sapien
ctttgtttccattgatctgttttct

SEQ ID NO: 2403048 - DNA, 25 bp, Homo sapien
ggtagacacaaagttggcttatgga

SEQ ID NO: 2403049 - DNA, 25 bp, Homo sapien
tcctcgtggtagacacaaagttggc

SEQ ID NO: 2403050 - DNA, 25 bp, Homo sapien
gctgatacgcaatcctcgtggtaga

SEQ ID NO: 2403051 - DNA, 25 bp, Homo sapien
ctcctattatgctgatacgcaatcc

SEQ ID NO: 2403052 - DNA, 25 bp, Homo sapien
taaatggactctttactggtagcaa

SEQ ID NO: 2403053 - DNA, 25 bp, Homo sapien
caggacctccagctctaaaggtaaa

SEQ ID NO: 2403054 - DNA, 25 bp, Homo sapien
aagtgattccgctgtgagttgtgtc

SEQ ID NO: 2403055 - DNA, 25 bp, Homo sapien
cctccaggacttgcttcggtgtgga

SEQ ID NO: 2403056 - DNA, 25 bp, Homo sapien
caccttcaggcgggtgtttgaggct

SEQ ID NO: 2403057 - DNA, 25 bp, Homo sapien
ctctcaccttcaggcgggtgtttga

SEQ ID NO: 2403058 - DNA, 25 bp, Homo sapien
ttcaggcgggtgtttgaggctggca

SEQ ID NO: 2403059 - DNA, 25 bp, Homo sapien
actctggtctacagcacggagggca

SEQ ID NO: 2403060 - DNA, 25 bp, Homo sapien
tctccattaggtaaaacagtgtaaa

SEQ ID NO: 2403061 - DNA, 25 bp, Homo sapien
aatttctccattaggtaaaacagtg

SEQ ID NO: 2403062 - DNA, 25 bp, Homo sapien
tctcaagcttgtcagtgtctgcaac

SEQ ID NO: 2403063 - DNA, 25 bp, Homo sapien
ttcaatctcaagcttgtcagtgtct

SEQ ID NO: 2403064 - DNA, 25 bp, Homo sapien
gttcaatggataacacatggattcc

SEQ ID NO: 2403065 - DNA, 25 bp, Homo sapien
tggataacacatggattcctgattg

SEQ ID NO: 2403066 - DNA, 25 bp, Homo sapien
ccttgttcaatggataacacatgga

SEQ ID NO: 2403067 - DNA, 25 bp, Homo sapien
tgtttccttgttcaatggataacac

SEQ ID NO: 2403068 - DNA, 25 bp, Homo sapien
tctttttcatccctgagaatctgtt

SEQ ID NO: 2403069 - DNA, 25 bp, Homo sapien
cagaatgtagtgtgcttgaatctcc

SEQ ID NO: 2403070 - DNA, 25 bp, Homo sapien
aattcatcaagccaccagttatcag

SEQ ID NO: 2403071 - DNA, 25 bp, Homo sapien
tatgagatgtttgcgtatgaaattc

SEQ ID NO: 2403072 - DNA, 25 bp, Homo sapien
tggctgatggttttcattgactaga

SEQ ID NO: 2403073 - DNA, 25 bp, Homo sapien
tgtccatggaaatgttcaccaaacc

SEQ ID NO: 2403074 - DNA, 25 bp, Homo sapien
cagtagttgcactgaaatagtatct

SEQ ID NO: 2403075 - DNA, 25 bp, Homo sapien
gtattcacatgaacatctacagttt

SEQ ID NO: 2403076 - DNA, 25 bp, Homo sapien
cagtatccttaaggtatctgtgatt

SEQ ID NO: 2403077 - DNA, 25 bp, Homo sapien
atttcatatgatccatgcccagtta

SEQ ID NO: 2403078 - DNA, 25 bp, Homo sapien
ttcatatgatccatgcccagttaat

SEQ ID NO: 2403079 - DNA, 25 bp, Homo sapien
aatctcagtatccttaaggtatctg

SEQ ID NO: 2403080 - DNA, 25 bp, Homo sapien
tcacatgaaacattattggtatcca

SEQ ID NO: 2403081 - DNA, 25 bp, Homo sapien
ttcacatgaaacattattggtatcc

SEQ ID NO: 2403082 - DNA, 25 bp, Homo sapien
cttcacatgaaacattattggtatc

SEQ ID NO: 2403083 - DNA, 25 bp, Homo sapien
cacatgaaacattattggtatccat

SEQ ID NO: 2403084 - DNA, 25 bp, Homo sapien
tttgacatgtatcgtcatgtcatac

SEQ ID NO: 2403085 - DNA, 25 bp, Homo sapien
cttcgctttgacatgtatcgtcatg

SEQ ID NO: 2403086 - DNA, 25 bp, Homo sapien
cgctttgacatgtatcgtcatgtca

SEQ ID NO: 2403087 - DNA, 25 bp, Homo sapien
tgacatgtatcgtcatgtcatactc

SEQ ID NO: 2403088 - DNA, 25 bp, Homo sapien
taagtgtcaccagaccagggacagg

SEQ ID NO: 2403089 - DNA, 25 bp, Homo sapien
gaatatcttctgcatacactaagtg

SEQ ID NO: 2403090 - DNA, 25 bp, Homo sapien
cagtcggaacggcatagtgaatatc

SEQ ID NO: 2403091 - DNA, 25 bp, Homo sapien
gaatgtgtgttgtggcagtcggaac

SEQ ID NO: 2403092 - DNA, 25 bp, Homo sapien
tctagaaaaccaataaccttgggca

SEQ ID NO: 2403093 - DNA, 25 bp, Homo sapien
ggcacaggttgttatcacaaattct

SEQ ID NO: 2403094 - DNA, 25 bp, Homo sapien
tttacttggacctcaaatttaggca

SEQ ID NO: 2403095 - DNA, 25 bp, Homo sapien
caggttgttatcacaaattcttcat

SEQ ID NO: 2403096 - DNA, 25 bp, Homo sapien
cccagaatgggctccactgatagcg

SEQ ID NO: 2403097 - DNA, 25 bp, Homo sapien
gctccactgatagcgggaaagagag

SEQ ID NO: 2403098 - DNA, 25 bp, Homo sapien
gaatgggctccactgatagcgggaa

SEQ ID NO: 2403099 - DNA, 25 bp, Homo sapien
tgggctccactgatagcgggaaaga

SEQ ID NO: 2403100 - DNA, 25 bp, Homo sapien
caatttgagactttgcctttggaaa

SEQ ID NO: 2403101 - DNA, 25 bp, Homo sapien
ttgcaatttgagactttgcctttgg

SEQ ID NO: 2403102 - DNA, 25 bp, Homo sapien
gcaatttgagactttgcctttggaa

SEQ ID NO: 2403103 - DNA, 25 bp, Homo sapien
tgcaatttgagactttgcctttgga

SEQ ID NO: 2403104 - DNA, 25 bp, Homo sapien
gaagggcagctttgcgggtaagaac

SEQ ID NO: 2403105 - DNA, 25 bp, Homo sapien
gcagctttgcgggtaagaacgacat

SEQ ID NO: 2403106 - DNA, 25 bp, Homo sapien
ctttgcgggtaagaacgacataggc

SEQ ID NO: 2403107 - DNA, 25 bp, Homo sapien
ttgcgggtaagaacgacataggcag

SEQ ID NO: 2403108 - DNA, 25 bp, Homo sapien
catttcatccaaagggtggaaattg

SEQ ID NO: 2403109 - DNA, 25 bp, Homo sapien
atccaaagggtggaaattgacatcc

SEQ ID NO: 2403110 - DNA, 25 bp, Homo sapien
ttcatccaaagggtggaaattgaca

SEQ ID NO: 2403111 - DNA, 25 bp, Homo sapien
catccaaagggtggaaattgacatc

SEQ ID NO: 2403112 - DNA, 25 bp, Homo sapien
tggagcctggggtagtaatagcatg

SEQ ID NO: 2403113 - DNA, 25 bp, Homo sapien
cctgtgaaatcaccccgtggagcct

SEQ ID NO: 2403114 - DNA, 25 bp, Homo sapien
tttcctgtgaaatcaccccgtggag

SEQ ID NO: 2403115 - DNA, 25 bp, Homo sapien
attttcctgtgaaatcaccccgtgg

SEQ ID NO: 2403116 - DNA, 25 bp, Homo sapien
agtaataaagaagctcctcccctct

SEQ ID NO: 2403117 - DNA, 25 bp, Homo sapien
gtaataaagaagctcctcccctctc

SEQ ID NO: 2403118 - DNA, 25 bp, Homo sapien
ctgaattcccaggattgcagaataa

SEQ ID NO: 2403119 - DNA, 25 bp, Homo sapien
cccaggattgcagaataaagtaata

SEQ ID NO: 2403120 - DNA, 25 bp, Homo sapien
tggtttgtatatgggtttgtctgtc

SEQ ID NO: 2403121 - DNA, 25 bp, Homo sapien
ttgtcctggtttgtatatgggtttg

SEQ ID NO: 2403122 - DNA, 25 bp, Homo sapien
gggtttgtctgtctggacaaagact

SEQ ID NO: 2403123 - DNA, 25 bp, Homo sapien
ctgtttgtcctggtttgtatatggg

SEQ ID NO: 2403124 - DNA, 25 bp, Homo sapien
gatttgctctttgtgaaatgcagag

SEQ ID NO: 2403125 - DNA, 25 bp, Homo sapien
gaaatgcagagttgccccctctacc

SEQ ID NO: 2403126 - DNA, 25 bp, Homo sapien
tatattgatttgctctttgtgaaat

SEQ ID NO: 2403127 - DNA, 25 bp, Homo sapien
ttgctctttgtgaaatgcagagttg

SEQ ID NO: 2403128 - DNA, 25 bp, Homo sapien
gaaatagttcctcttcgtcaccagg

SEQ ID NO: 2403129 - DNA, 25 bp, Homo sapien
gaactgcagtagaaatagttcctct

SEQ ID NO: 2403130 - DNA, 25 bp, Homo sapien
gaaggaactgcagtagaaatagttc

SEQ ID NO: 2403131 - DNA, 25 bp, Homo sapien
tgcagtagaaatagttcctcttcgt

SEQ ID NO: 2403132 - DNA, 25 bp, Homo sapien
tttgtacatcagagttactttcagt

SEQ ID NO: 2403133 - DNA, 25 bp, Homo sapien
tacatcagagttactttcagtgcca

SEQ ID NO: 2403134 - DNA, 25 bp, Homo sapien
catcagagttactttcagtgccacc

SEQ ID NO: 2403135 - DNA, 25 bp, Homo sapien
tcagagttactttcagtgccaccat

SEQ ID NO: 2403136 - DNA, 25 bp, Homo sapien
ggatgacacaggtcttttcaggaac

SEQ ID NO: 2403137 - DNA, 25 bp, Homo sapien
gtgtgatgggaccagcactaggtac

SEQ ID NO: 2403138 - DNA, 25 bp, Homo sapien
gacacaggtcttttcaggaactcca

SEQ ID NO: 2403139 - DNA, 25 bp, Homo sapien
tgatgggaccagcactaggtactac

SEQ ID NO: 2403140 - DNA, 25 bp, Homo sapien
ctggcgggggcagttgatttcccat

SEQ ID NO: 2403141 - DNA, 25 bp, Homo sapien
aggaaaagcaggatcaagactggcg

SEQ ID NO: 2403142 - DNA, 25 bp, Homo sapien
gggcagttgatttcccatcacggta

SEQ ID NO: 2403143 - DNA, 25 bp, Homo sapien
gatttcccatcacggtacagaaagg

SEQ ID NO: 2403144 - DNA, 25 bp, Homo sapien
tctcttcttgtgcaaatccataaac

SEQ ID NO: 2403145 - DNA, 25 bp, Homo sapien
taatgctagttctgtgagttctctc

SEQ ID NO: 2403146 - DNA, 25 bp, Homo sapien
gtctaacaaaacagccaaatatacc

SEQ ID NO: 2403147 - DNA, 25 bp, Homo sapien
taaagacagagggtaaaataatgct

SEQ ID NO: 2403148 - DNA, 25 bp, Homo sapien
agcctgaacatgtgtgctacattaa

SEQ ID NO: 2403149 - DNA, 25 bp, Homo sapien
gcctggcccatattggtgtttctaa

SEQ ID NO: 2403150 - DNA, 25 bp, Homo sapien
taacatacttatctgctctatccta

SEQ ID NO: 2403151 - DNA, 25 bp, Homo sapien
tgaattcagttgatccgccagcctt

SEQ ID NO: 2403152 - DNA, 25 bp, Homo sapien
aagagatcccacatcagttccctgc

SEQ ID NO: 2403153 - DNA, 25 bp, Homo sapien
tgaagagatcccacatcagttccct

SEQ ID NO: 2403154 - DNA, 25 bp, Homo sapien
ttgttgaagagatcccacatcagtt

SEQ ID NO: 2403155 - DNA, 25 bp, Homo sapien
tccctgccttggcttacggctctca

SEQ ID NO: 2403156 - DNA, 25 bp, Homo sapien
cctatgttgtctgactatagaactt

SEQ ID NO: 2403157 - DNA, 25 bp, Homo sapien
tgctatctactggatacaaatgcag

SEQ ID NO: 2403158 - DNA, 25 bp, Homo sapien
ggcttaggatactatcacccgagcg

SEQ ID NO: 2403159 - DNA, 25 bp, Homo sapien
catattccccacttgttacaagagg

SEQ ID NO: 2403160 - DNA, 25 bp, Homo sapien
tgcggacataacttgccacaggacc

SEQ ID NO: 2403161 - DNA, 25 bp, Homo sapien
gagctccccggacaagcggctggat

SEQ ID NO: 2403162 - DNA, 25 bp, Homo sapien
ttgggatgagctccccggacaagcg

SEQ ID NO: 2403163 - DNA, 25 bp, Homo sapien
tgggttgggatgagctccccggaca

SEQ ID NO: 2403164 - DNA, 25 bp, Homo sapien
gaactgggttgggatgagctccccg

SEQ ID NO: 2403165 - DNA, 25 bp, Homo sapien
catttgcagtgaattacagccagct

SEQ ID NO: 2403166 - DNA, 25 bp, Homo sapien
tcttgaaacggctccttagaagctg

SEQ ID NO: 2403167 - DNA, 25 bp, Homo sapien
ttggcgttcacctgggcacaagctg

SEQ ID NO: 2403168 - DNA, 25 bp, Homo sapien
tgattaaagtttccccgagagcttg

SEQ ID NO: 2403169 - DNA, 25 bp, Homo sapien
tagtaccgtggccaagatctctgag

SEQ ID NO: 2403170 - DNA, 25 bp, Homo sapien
gaatctagatgctacgatgccagag

SEQ ID NO: 2403171 - DNA, 25 bp, Homo sapien
tctgagataggaagtggtgataccc

SEQ ID NO: 2403172 - DNA, 25 bp, Homo sapien
tttatcggttcaagccaagaggccc

SEQ ID NO: 2403173 - DNA, 25 bp, Homo sapien
gatgacagatcccaggaccaactct

SEQ ID NO: 2403174 - DNA, 25 bp, Homo sapien
gagagactgacggaactctggatct

SEQ ID NO: 2403175 - DNA, 25 bp, Homo sapien
tggagacatcgaaagcaaggcacgc

SEQ ID NO: 2403176 - DNA, 25 bp, Homo sapien
gggagtcagatcctcactggagaca

SEQ ID NO: 2403177 - DNA, 25 bp, Homo sapien
tggatcaaagctgccgcagcatctg

SEQ ID NO: 2403178 - DNA, 25 bp, Homo sapien
ctggatcaaagctgccgcagcatct

SEQ ID NO: 2403179 - DNA, 25 bp, Homo sapien
cctggatcaaagctgccgcagcatc

SEQ ID NO: 2403180 - DNA, 25 bp, Homo sapien
gacatcatagcatctgctgcaacct

SEQ ID NO: 2403181 - DNA, 25 bp, Homo sapien
cagatgtcttagctagtctgggcta

SEQ ID NO: 2403182 - DNA, 25 bp, Homo sapien
gtctgggctactaaagcagcatacc

SEQ ID NO: 2403183 - DNA, 25 bp, Homo sapien
gatcttaccaccttttggcatcaag

SEQ ID NO: 2403184 - DNA, 25 bp, Homo sapien
tatgccacttgatatgtcagatgtc

SEQ ID NO: 2403185 - DNA, 25 bp, Homo sapien
gccacgggaggccaaatcttgatct

SEQ ID NO: 2403186 - DNA, 25 bp, Homo sapien
caatgtgtccaaacagatgcctgac

SEQ ID NO: 2403187 - DNA, 25 bp, Homo sapien
tcgagttttattggtgacccacagc

SEQ ID NO: 2403188 - DNA, 25 bp, Homo sapien
tgcaaaggacttgggcttagccagc

SEQ ID NO: 2403189 - DNA, 25 bp, Homo sapien
tcgtgcaagcaacaccaaatgccac

SEQ ID NO: 2403190 - DNA, 25 bp, Homo sapien
ccaaggatgttcggatgaatctggg

SEQ ID NO: 2403191 - DNA, 25 bp, Homo sapien
atcagggaggcacggactgactgca

SEQ ID NO: 2403192 - DNA, 25 bp, Homo sapien
caatcagggaggcacggactgactg

SEQ ID NO: 2403193 - DNA, 25 bp, Homo sapien
catagtccctggatcacaatgagca

SEQ ID NO: 2403194 - DNA, 25 bp, Homo sapien
taacaggtgtataggcagagtgcac

SEQ ID NO: 2403195 - DNA, 25 bp, Homo sapien
aattgtatggtggtatcggctgccc

SEQ ID NO: 2403196 - DNA, 25 bp, Homo sapien
taacaaggtaggtgaccctgagcaa

SEQ ID NO: 2403197 - DNA, 25 bp, Homo sapien
ccaatgagattttgaggacagagca

SEQ ID NO: 2403198 - DNA, 25 bp, Homo sapien
tcaggcactactgcaaaaaagggcc

SEQ ID NO: 2403199 - DNA, 25 bp, Homo sapien
ggatcaaggccctttcagacctggc

SEQ ID NO: 2403200 - DNA, 25 bp, Homo sapien
gctttgaaaagtcaccagcagccga

SEQ ID NO: 2403201 - DNA, 25 bp, Homo sapien
aatgcaagtggacgagtgccaaccc

SEQ ID NO: 2403202 - DNA, 25 bp, Homo sapien
ccaatgatttgcgagtggagacctc

SEQ ID NO: 2403203 - DNA, 25 bp, Homo sapien
gagaatgtcccagctagaaatgcaa

SEQ ID NO: 2403204 - DNA, 25 bp, Homo sapien
caataagagtcagaaccgttgccct

SEQ ID NO: 2403205 - DNA, 25 bp, Homo sapien
gaaagacatacgtaagagggtggct

SEQ ID NO: 2403206 - DNA, 25 bp, Homo sapien
gaagtcaggaaccagcataatgcca

SEQ ID NO: 2403207 - DNA, 25 bp, Homo sapien
tgcaggctttatgtccagcataaaa

SEQ ID NO: 2403208 - DNA, 25 bp, Homo sapien
taaaacctacagaagtcaggaacca

SEQ ID NO: 2403209 - DNA, 25 bp, Homo sapien
taatctcttagatctctcctggcag

SEQ ID NO: 2403210 - DNA, 25 bp, Homo sapien
cagctttccctgtatgtccatctgg

SEQ ID NO: 2403211 - DNA, 25 bp, Homo sapien
catgtggcaccagtctacatgatgg

SEQ ID NO: 2403212 - DNA, 25 bp, Homo sapien
tcatgtagcttaaggtgcttcccag

SEQ ID NO: 2403213 - DNA, 25 bp, Homo sapien
tagttacaacaacacgacaacaggt

SEQ ID NO: 2403214 - DNA, 25 bp, Homo sapien
gaaaaactcagtgattacccaatga

SEQ ID NO: 2403215 - DNA, 25 bp, Homo sapien
cctgcgcccatggacgtgggaatag

SEQ ID NO: 2403216 - DNA, 25 bp, Homo sapien
caggtgacattgagaaggaagatct

SEQ ID NO: 2403217 - DNA, 25 bp, Homo sapien
atggagggctgtcctgcatgcccat

SEQ ID NO: 2403218 - DNA, 25 bp, Homo sapien
gggtttcattaggagaacaaccaga

SEQ ID NO: 2403219 - DNA, 25 bp, Homo sapien
ggcctggaaggatccgataagcccc

SEQ ID NO: 2403220 - DNA, 25 bp, Homo sapien
ggagggctgtcctgcatgcccatgc

SEQ ID NO: 2403221 - DNA, 25 bp, Homo sapien
aggtggagggagcgagggcagttgt

SEQ ID NO: 2403222 - DNA, 25 bp, Homo sapien
taggtggagggagcgagggcagttg

SEQ ID NO: 2403223 - DNA, 25 bp, Homo sapien
ctaggtggagggagcgagggcagtt

SEQ ID NO: 2403224 - DNA, 25 bp, Homo sapien
ggctcctgtctcgtgtgctctatca

SEQ ID NO: 2403225 - DNA, 25 bp, Homo sapien
tctcacattcagctcccggttcttg

SEQ ID NO: 2403226 - DNA, 25 bp, Homo sapien
tctaggctttgcaggagtgagttct

SEQ ID NO: 2403227 - DNA, 25 bp, Homo sapien
cactcgtttctatgtgcctcgtagg

SEQ ID NO: 2403228 - DNA, 25 bp, Homo sapien
tatcttacagaacagcaggacacca

SEQ ID NO: 2403229 - DNA, 25 bp, Homo sapien
gagtcccttggatgctttacccggc

SEQ ID NO: 2403230 - DNA, 25 bp, Homo sapien
ccagggcatgggcattgtctgacta

SEQ ID NO: 2403231 - DNA, 25 bp, Homo sapien
tgtagtatcctgtaaccacttgcac

SEQ ID NO: 2403232 - DNA, 25 bp, Homo sapien
gggactgtcttctgagagatgtctc

SEQ ID NO: 2403233 - DNA, 25 bp, Homo sapien
agagatgtctcccccaggatccttc

SEQ ID NO: 2403234 - DNA, 25 bp, Homo sapien
caggatccttccaggtggaaggatg

SEQ ID NO: 2403235 - DNA, 25 bp, Homo sapien
cttccaggtggaaggatgccctttg

SEQ ID NO: 2403236 - DNA, 25 bp, Homo sapien
tcgggggtgacgacgaccgcctaca

SEQ ID NO: 2403237 - DNA, 25 bp, Homo sapien
gggtgacgacgaccgcctacatctg

SEQ ID NO: 2403238 - DNA, 25 bp, Homo sapien
cagtatccctcgggggtgacgacga

SEQ ID NO: 2403239 - DNA, 25 bp, Homo sapien
gacgacgaccgcctacatctggagc

SEQ ID NO: 2403240 - DNA, 25 bp, Homo sapien
agcaatgcctttgctccaacgggat

SEQ ID NO: 2403241 - DNA, 25 bp, Homo sapien
ataggacgtcctggccgatcctctg

SEQ ID NO: 2403242 - DNA, 25 bp, Homo sapien
ctggtgagtaaggatgcaagcatag

SEQ ID NO: 2403243 - DNA, 25 bp, Homo sapien
caacgggatgggcaacgttggatta

SEQ ID NO: 2403244 - DNA, 25 bp, Homo sapien
gttcacgatgtcagatggttcatga

SEQ ID NO: 2403245 - DNA, 25 bp, Homo sapien
actgttcacgatgtcagatggttca

SEQ ID NO: 2403246 - DNA, 25 bp, Homo sapien
ttcacgatgtcagatggttcatgat

SEQ ID NO: 2403247 - DNA, 25 bp, Homo sapien
tgttcacgatgtcagatggttcatg

SEQ ID NO: 2403248 - DNA, 25 bp, Homo sapien
tacacaagtctaatgaagtaccaga

SEQ ID NO: 2403249 - DNA, 25 bp, Homo sapien
catgcatatataggcacatagacat

SEQ ID NO: 2403250 - DNA, 25 bp, Homo sapien
tcagattactcatgcagtacacagc

SEQ ID NO: 2403251 - DNA, 25 bp, Homo sapien
gcctaaatttttactgacctgtcaa

SEQ ID NO: 2403252 - DNA, 25 bp, Homo sapien
tgttgtaaaaagctagggcatattc

SEQ ID NO: 2403253 - DNA, 25 bp, Homo sapien
aactactgtcgatgttgtaaaaagc

SEQ ID NO: 2403254 - DNA, 25 bp, Homo sapien
tagtaattgctttgtctcactcgga

SEQ ID NO: 2403255 - DNA, 25 bp, Homo sapien
tcactcggaaactgaactactgtcg

SEQ ID NO: 2403256 - DNA, 25 bp, Homo sapien
tgtcaggttatattgcaaggattct

SEQ ID NO: 2403257 - DNA, 25 bp, Homo sapien
aaaagacctggaagcttagtgtggc

SEQ ID NO: 2403258 - DNA, 25 bp, Homo sapien
tttcaagttcaagtggagccctgtc

SEQ ID NO: 2403259 - DNA, 25 bp, Homo sapien
atagtaccaaccttccagggaacag

SEQ ID NO: 2403260 - DNA, 25 bp, Homo sapien
catagtaatcgtagaccatggctgg

SEQ ID NO: 2403261 - DNA, 25 bp, Homo sapien
atagtaatcgtagaccatggctggg

SEQ ID NO: 2403262 - DNA, 25 bp, Homo sapien
ttttcatagtaatcgtagaccatgg

SEQ ID NO: 2403263 - DNA, 25 bp, Homo sapien
ttcatagtaatcgtagaccatggct

SEQ ID NO: 2403264 - DNA, 25 bp, Homo sapien
ggaaactgtctgctcgaccaaaacc

SEQ ID NO: 2403265 - DNA, 25 bp, Homo sapien
agggaaactgtctgctcgaccaaaa

SEQ ID NO: 2403266 - DNA, 25 bp, Homo sapien
aaagggaaactgtctgctcgaccaa

SEQ ID NO: 2403267 - DNA, 25 bp, Homo sapien
aaaagggaaactgtctgctcgacca

SEQ ID NO: 2403268 - DNA, 25 bp, Homo sapien
gaacatggtcattcttgacttcagt

SEQ ID NO: 2403269 - DNA, 25 bp, Homo sapien
gtagaaaagaacatggtcattcttg

SEQ ID NO: 2403270 - DNA, 25 bp, Homo sapien
gaaaagaacatggtcattcttgact

SEQ ID NO: 2403271 - DNA, 25 bp, Homo sapien
tttccaagtagaaaagaacatggtc

SEQ ID NO: 2403272 - DNA, 25 bp, Homo sapien
ttcatcacttggcccttgttttcaa

SEQ ID NO: 2403273 - DNA, 25 bp, Homo sapien
tcatcacttggcccttgttttcaag

SEQ ID NO: 2403274 - DNA, 25 bp, Homo sapien
cttcatcacttggcccttgttttca

SEQ ID NO: 2403275 - DNA, 25 bp, Homo sapien
tgtccactcttttctacgtcacgtt

SEQ ID NO: 2403276 - DNA, 25 bp, Homo sapien
tggaacattccttggtgccgtgatg

SEQ ID NO: 2403277 - DNA, 25 bp, Homo sapien
gccactgcagaactcaatgtccact

SEQ ID NO: 2403278 - DNA, 25 bp, Homo sapien
ttttagaacaaatgacagcgccact

SEQ ID NO: 2403279 - DNA, 25 bp, Homo sapien
tgttgaagaagaactctatagtttt

SEQ ID NO: 2403280 - DNA, 25 bp, Homo sapien
gactgctaattggtacaaattaagt

SEQ ID NO: 2403281 - DNA, 25 bp, Homo sapien
accagctctccagtgttagcgcaaa

SEQ ID NO: 2403282 - DNA, 25 bp, Homo sapien
tttgctaaactatggctgaacaagt

SEQ ID NO: 2403283 - DNA, 25 bp, Homo sapien
actggatttattgcgaattccagtg

SEQ ID NO: 2403284 - DNA, 25 bp, Homo sapien
catggttggagtaaatcctgatagc

SEQ ID NO: 2403285 - DNA, 25 bp, Homo sapien
gttggagtaaatcctgatagcattt

SEQ ID NO: 2403286 - DNA, 25 bp, Homo sapien
ggatttattgcgaattccagtgtat

SEQ ID NO: 2403287 - DNA, 25 bp, Homo sapien
aaatcctgctcacatagactgcatg

SEQ ID NO: 2403288 - DNA, 25 bp, Homo sapien
gcttgctactatatgaccatgcatg

SEQ ID NO: 2403289 - DNA, 25 bp, Homo sapien
gtactaaattgtggtgtccggacag

SEQ ID NO: 2403290 - DNA, 25 bp, Homo sapien
ccggacagagggctaaaaagtgact

SEQ ID NO: 2403291 - DNA, 25 bp, Homo sapien
ttaggtaggagaacattgtacttaa

SEQ ID NO: 2403292 - DNA, 25 bp, Homo sapien
ggagaacattgtacttaagggtggc

SEQ ID NO: 2403293 - DNA, 25 bp, Homo sapien
cagatgccttcttaggtaggagaac

SEQ ID NO: 2403294 - DNA, 25 bp, Homo sapien
tgttacttctgaacgttggaccagt

SEQ ID NO: 2403295 - DNA, 25 bp, Homo sapien
cttctgaacgttggaccagtaggcg

SEQ ID NO: 2403296 - DNA, 25 bp, Homo sapien
tacttctgaacgttggaccagtagg

SEQ ID NO: 2403297 - DNA, 25 bp, Homo sapien
tgtgttacttctgaacgttggacca

SEQ ID NO: 2403298 - DNA, 25 bp, Homo sapien
gctcttcggaccgccgtcgcagtgt

SEQ ID NO: 2403299 - DNA, 25 bp, Homo sapien
aggctcttcggaccgccgtcgcagt

SEQ ID NO: 2403300 - DNA, 25 bp, Homo sapien
cttcggaccgccgtcgcagtgtggg

SEQ ID NO: 2403301 - DNA, 25 bp, Homo sapien
tcttcggaccgccgtcgcagtgtgg

SEQ ID NO: 2403302 - DNA, 25 bp, Homo sapien
ttccagcagaaggtaccttacttgg

SEQ ID NO: 2403303 - DNA, 25 bp, Homo sapien
aaagctcagatcttccagcagaagg

SEQ ID NO: 2403304 - DNA, 25 bp, Homo sapien
gatcttccagcagaaggtaccttac

SEQ ID NO: 2403305 - DNA, 25 bp, Homo sapien
agctcagatcttccagcagaaggta

SEQ ID NO: 2403306 - DNA, 25 bp, Homo sapien
cttaggagccccattgctggtgagg

SEQ ID NO: 2403307 - DNA, 25 bp, Homo sapien
aaagctcagatctgccgacggcagg

SEQ ID NO: 2403308 - DNA, 25 bp, Homo sapien
tacgacaggggtccgaacgcagccc

SEQ ID NO: 2403309 - DNA, 25 bp, Homo sapien
cttacttgggattttctatacgaca

SEQ ID NO: 2403310 - DNA, 25 bp, Homo sapien
acttgggattttctatacgacaggg

SEQ ID NO: 2403311 - DNA, 25 bp, Homo sapien
aaggcaggttagagaattcttagga

SEQ ID NO: 2403312 - DNA, 25 bp, Homo sapien
ctaagggcagaaggcaggttagaga

SEQ ID NO: 2403313 - DNA, 25 bp, Homo sapien
ggcagaaggcaggttagagaattct

SEQ ID NO: 2403314 - DNA, 25 bp, Homo sapien
cagaaggcaggttagagaattctta

SEQ ID NO: 2403315 - DNA, 25 bp, Homo sapien
ctggtgagatgagacaatggtcgga

SEQ ID NO: 2403316 - DNA, 25 bp, Homo sapien
tggtgagatgagacaatggtcggat

SEQ ID NO: 2403317 - DNA, 25 bp, Homo sapien
aggctcctgcgtgtcccggatttcc

SEQ ID NO: 2403318 - DNA, 25 bp, Homo sapien
tgaggctcctgcgtgtcccggattt

SEQ ID NO: 2403319 - DNA, 25 bp, Homo sapien
actgaggctcctgcgtgtcccggat

SEQ ID NO: 2403320 - DNA, 25 bp, Homo sapien
cactgaggctcctgcgtgtcccgga

SEQ ID NO: 2403321 - DNA, 25 bp, Homo sapien
ggtgggcgaaggagtcagaagcttc

SEQ ID NO: 2403322 - DNA, 25 bp, Homo sapien
aagaagtcagaagggtgggcgaagg

SEQ ID NO: 2403323 - DNA, 25 bp, Homo sapien
ctgcttccatgggagaagcaagaag

SEQ ID NO: 2403324 - DNA, 25 bp, Homo sapien
cagaagcttctattattggttcggg

SEQ ID NO: 2403325 - DNA, 25 bp, Homo sapien
gcccacagtgaggtctgtaactcgg

SEQ ID NO: 2403326 - DNA, 25 bp, Homo sapien
acaccgcttaaacctctgcgctggt

SEQ ID NO: 2403327 - DNA, 25 bp, Homo sapien
gcttaaacctctgcgctggttcccg

SEQ ID NO: 2403328 - DNA, 25 bp, Homo sapien
gggcccacagtgaggtctgtaactc

SEQ ID NO: 2403329 - DNA, 25 bp, Homo sapien
cttggttatgtgacaggacagagga

SEQ ID NO: 2403330 - DNA, 25 bp, Homo sapien
ccttggttatgtgacaggacagagg

SEQ ID NO: 2403331 - DNA, 25 bp, Homo sapien
gccttggttatgtgacaggacagag

SEQ ID NO: 2403332 - DNA, 25 bp, Homo sapien
ttggttatgtgacaggacagaggag

SEQ ID NO: 2403333 - DNA, 25 bp, Homo sapien
gaataaccgtgtatcagagtgcagt

SEQ ID NO: 2403334 - DNA, 25 bp, Homo sapien
ggagagaaccatcagggtagaagaa

SEQ ID NO: 2403335 - DNA, 25 bp, Homo sapien
tgcagtgcattatgtgtgatacaca

SEQ ID NO: 2403336 - DNA, 25 bp, Homo sapien
catggtgaagaggtgcagtgcatta

SEQ ID NO: 2403337 - DNA, 25 bp, Homo sapien
cagccagggatcctttcttgtgttt

SEQ ID NO: 2403338 - DNA, 25 bp, Homo sapien
agccagggatcctttcttgtgtttc

SEQ ID NO: 2403339 - DNA, 25 bp, Homo sapien
tgtactgggaagtcctctctccagt

SEQ ID NO: 2403340 - DNA, 25 bp, Homo sapien
tccttgtccaactggtgtatacact

SEQ ID NO: 2403341 - DNA, 25 bp, Homo sapien
tccaactggtgtatacactctggca

SEQ ID NO: 2403342 - DNA, 25 bp, Homo sapien
tgatgaataaggcagcgtccttgtc

SEQ ID NO: 2403343 - DNA, 25 bp, Homo sapien
taaggcagcgtccttgtccaactgg

SEQ ID NO: 2403344 - DNA, 25 bp, Homo sapien
tcttgtatcggcagtgctgaccccg

SEQ ID NO: 2403345 - DNA, 25 bp, Homo sapien
ctcgagtgagcgaatggcgtttgct

SEQ ID NO: 2403346 - DNA, 25 bp, Homo sapien
cgcaggccgttgagggagccgagct

SEQ ID NO: 2403347 - DNA, 25 bp, Homo sapien
tcactcagtgtttatctaactcgag

SEQ ID NO: 2403348 - DNA, 25 bp, Homo sapien
ggttgttgccagacctggagtccct

SEQ ID NO: 2403349 - DNA, 25 bp, Homo sapien
catccctggttgttgccagacctgg

SEQ ID NO: 2403350 - DNA, 25 bp, Homo sapien
atgtgactgcctgactcaggcccct

SEQ ID NO: 2403351 - DNA, 25 bp, Homo sapien
ggccccatccctggttgttgccaga

SEQ ID NO: 2403352 - DNA, 25 bp, Homo sapien
tgcagtcaggggatttgcaggcaca

SEQ ID NO: 2403353 - DNA, 25 bp, Homo sapien
cagattaggaacaagaacgaaggaa

SEQ ID NO: 2403354 - DNA, 25 bp, Homo sapien
gtgacagattaggaacaagaacgaa

SEQ ID NO: 2403355 - DNA, 25 bp, Homo sapien
gacagattaggaacaagaacgaagg

SEQ ID NO: 2403356 - DNA, 25 bp, Homo sapien
tgcagcaatggacaagcatgtgggc

SEQ ID NO: 2403357 - DNA, 25 bp, Homo sapien
cagcaatggacaagcatgtgggctt

SEQ ID NO: 2403358 - DNA, 25 bp, Homo sapien
caatggacaagcatgtgggcttttc

SEQ ID NO: 2403359 - DNA, 25 bp, Homo sapien
tttcagtggggatgtgacgtgctcc

SEQ ID NO: 2403360 - DNA, 25 bp, Homo sapien
gacaggtggacagaccttcctcctt

SEQ ID NO: 2403361 - DNA, 25 bp, Homo sapien
aattctcacctctacggtagaggga

SEQ ID NO: 2403362 - DNA, 25 bp, Homo sapien
ttttcaaactgtagcgccctggaat

SEQ ID NO: 2403363 - DNA, 25 bp, Homo sapien
tcacctctacggtagagggagcctg

SEQ ID NO: 2403364 - DNA, 25 bp, Homo sapien
tttcaaactgtagcgccctggaatt

SEQ ID NO: 2403365 - DNA, 25 bp, Homo sapien
caaggatacaaatccaggcagggct

SEQ ID NO: 2403366 - DNA, 25 bp, Homo sapien
ctctatagtcatgttgagagcctaa

SEQ ID NO: 2403367 - DNA, 25 bp, Homo sapien
cagggccttctactgaaggagtgac

SEQ ID NO: 2403368 - DNA, 25 bp, Homo sapien
gcagtccagggcagctataaccttg

SEQ ID NO: 2403369 - DNA, 25 bp, Homo sapien
aggtgggcaggacggagatgccaca

SEQ ID NO: 2403370 - DNA, 25 bp, Homo sapien
aaggtgggcaggacggagatgccac

SEQ ID NO: 2403371 - DNA, 25 bp, Homo sapien
ggaacgccccaaggacagccaggac

SEQ ID NO: 2403372 - DNA, 25 bp, Homo sapien
ctggaacgccccaaggacagccagg

SEQ ID NO: 2403373 - DNA, 25 bp, Homo sapien
aagattctattccaggaggggagct

SEQ ID NO: 2403374 - DNA, 25 bp, Homo sapien
agattctattccaggaggggagctg

SEQ ID NO: 2403375 - DNA, 25 bp, Homo sapien
cattttctcctacgggagctaacgc

SEQ ID NO: 2403376 - DNA, 25 bp, Homo sapien
tctcctacgggagctaacgcctgtg

SEQ ID NO: 2403377 - DNA, 25 bp, Homo sapien
agaccacgcccacgacaaacactgt

SEQ ID NO: 2403378 - DNA, 25 bp, Homo sapien
acgcccacgacaaacactgtctcca

SEQ ID NO: 2403379 - DNA, 25 bp, Homo sapien
tcggatccaggccggcagcttggcc

SEQ ID NO: 2403380 - DNA, 25 bp, Homo sapien
ggccgggcgtatcgctggtccagga

SEQ ID NO: 2403381 - DNA, 25 bp, Homo sapien
tagctttgacctccacgcgggctcg

SEQ ID NO: 2403382 - DNA, 25 bp, Homo sapien
aaaatccttctggtgcctgatggcc

SEQ ID NO: 2403383 - DNA, 25 bp, Homo sapien
tcctcagacttatataggaaacagg

SEQ ID NO: 2403384 - DNA, 25 bp, Homo sapien
agacttatataggaaacagggcagg

SEQ ID NO: 2403385 - DNA, 25 bp, Homo sapien
ctcagacttatataggaaacagggc

SEQ ID NO: 2403386 - DNA, 25 bp, Homo sapien
cttcctcagacttatataggaaaca

SEQ ID NO: 2403387 - DNA, 25 bp, Homo sapien
tggttgacggccttcatgcacaggt

SEQ ID NO: 2403388 - DNA, 25 bp, Homo sapien
tggactggttgacggccttcatgca

SEQ ID NO: 2403389 - DNA, 25 bp, Homo sapien
ctatggactggttgacggccttcat

SEQ ID NO: 2403390 - DNA, 25 bp, Homo sapien
tgacggccttcatgcacaggttctc

SEQ ID NO: 2403391 - DNA, 25 bp, Homo sapien
ggatgacccatcaggactgttccct

SEQ ID NO: 2403392 - DNA, 25 bp, Homo sapien
aaggggatgacccatcaggactgtt

SEQ ID NO: 2403393 - DNA, 25 bp, Homo sapien
tgaaggggatgacccatcaggactg

SEQ ID NO: 2403394 - DNA, 25 bp, Homo sapien
agtgaaggggatgacccatcaggac

SEQ ID NO: 2403395 - DNA, 25 bp, Homo sapien
cccctctgtgacactggggtcactc

SEQ ID NO: 2403396 - DNA, 25 bp, Homo sapien
cctctgtgacactggggtcactcac

SEQ ID NO: 2403397 - DNA, 25 bp, Homo sapien
ccctctgtgacactggggtcactca

SEQ ID NO: 2403398 - DNA, 25 bp, Homo sapien
gagggtttgatccaagtaggccatc

SEQ ID NO: 2403399 - DNA, 25 bp, Homo sapien
agggtttgatccaagtaggccatct

SEQ ID NO: 2403400 - DNA, 25 bp, Homo sapien
ggctgagagatcccgtctaggccaa

SEQ ID NO: 2403401 - DNA, 25 bp, Homo sapien
ctgagagatcccgtctaggccaatt

SEQ ID NO: 2403402 - DNA, 25 bp, Homo sapien
gagagatcccgtctaggccaattga

SEQ ID NO: 2403403 - DNA, 25 bp, Homo sapien
tgagagatcccgtctaggccaattg

SEQ ID NO: 2403404 - DNA, 25 bp, Homo sapien
tttcctccaaccacagagaggagca

SEQ ID NO: 2403405 - DNA, 25 bp, Homo sapien
tcatctttcctccaaccacagagag

SEQ ID NO: 2403406 - DNA, 25 bp, Homo sapien
gtcagagaagttgatcccttcactc

SEQ ID NO: 2403407 - DNA, 25 bp, Homo sapien
tcagagaagttgatcccttcactca

SEQ ID NO: 2403408 - DNA, 25 bp, Homo sapien
taggagaaacccagacgctgagttg

SEQ ID NO: 2403409 - DNA, 25 bp, Homo sapien
gtaggagaaacccagacgctgagtt

SEQ ID NO: 2403410 - DNA, 25 bp, Homo sapien
ctgccacccccacatggtctcatac

SEQ ID NO: 2403411 - DNA, 25 bp, Homo sapien
ctgctccacctggtgtgcgctctta

SEQ ID NO: 2403412 - DNA, 25 bp, Homo sapien
tggtgtgcgctcttaggttcctgga

SEQ ID NO: 2403413 - DNA, 25 bp, Homo sapien
tccacctggtgtgcgctcttaggtt

SEQ ID NO: 2403414 - DNA, 25 bp, Homo sapien
gctccacctggtgtgcgctcttagg

SEQ ID NO: 2403415 - DNA, 25 bp, Homo sapien
tctgctcgtggccttgtgttttctg

SEQ ID NO: 2403416 - DNA, 25 bp, Homo sapien
gacaggttcagggtgccaggtctcg

SEQ ID NO: 2403417 - DNA, 25 bp, Homo sapien
aatcctctgtagtcagggactggga

SEQ ID NO: 2403418 - DNA, 25 bp, Homo sapien
gccaggggactggagaacctcacag

SEQ ID NO: 2403419 - DNA, 25 bp, Homo sapien
aagagctcccaggaggactcagtgg

SEQ ID NO: 2403420 - DNA, 25 bp, Homo sapien
gctcccaggaggactcagtggcact

SEQ ID NO: 2403421 - DNA, 25 bp, Homo sapien
actgtcctcacaagtgggaaggctg

SEQ ID NO: 2403422 - DNA, 25 bp, Homo sapien
gggaaggctgccgacaggccactca

SEQ ID NO: 2403423 - DNA, 25 bp, Homo sapien
agtgggcatggacctggcgcaggta

SEQ ID NO: 2403424 - DNA, 25 bp, Homo sapien
tcccagtgggcatggacctggcgca

SEQ ID NO: 2403425 - DNA, 25 bp, Homo sapien
cagtgggcatggacctggcgcaggt

SEQ ID NO: 2403426 - DNA, 25 bp, Homo sapien
ttctcccagtgggcatggacctggc

SEQ ID NO: 2403427 - DNA, 25 bp, Homo sapien
caccgcacaggttacagaggatgcg

SEQ ID NO: 2403428 - DNA, 25 bp, Homo sapien
gaaaccacaccgcacaggttacaga

SEQ ID NO: 2403429 - DNA, 25 bp, Homo sapien
gttacagaggatgcgacccacctcg

SEQ ID NO: 2403430 - DNA, 25 bp, Homo sapien
gaagaaacagaccacccctccagaa

SEQ ID NO: 2403431 - DNA, 25 bp, Homo sapien
cgcaaaccgcgtcttcaccttgaga

SEQ ID NO: 2403432 - DNA, 25 bp, Homo sapien
cagccaaagaagaggacttggctcc

SEQ ID NO: 2403433 - DNA, 25 bp, Homo sapien
gagactcaaaactgaggagagaccc

SEQ ID NO: 2403434 - DNA, 25 bp, Homo sapien
agagaccctcggcaggactacagcc

SEQ ID NO: 2403435 - DNA, 25 bp, Homo sapien
ggggcctccctattgccctggcact

SEQ ID NO: 2403436 - DNA, 25 bp, Homo sapien
ggcctccctattgccctggcactga

SEQ ID NO: 2403437 - DNA, 25 bp, Homo sapien
gggggcctccctattgccctggcac

SEQ ID NO: 2403438 - DNA, 25 bp, Homo sapien
gacacatgtcacagcactagcgtcc

SEQ ID NO: 2403439 - DNA, 25 bp, Homo sapien
tgaatacatatttcgcagcctaagg

SEQ ID NO: 2403440 - DNA, 25 bp, Homo sapien
tatgaatacatatttcgcagcctaa

SEQ ID NO: 2403441 - DNA, 25 bp, Homo sapien
tgcctggaggttttatgaatacata

SEQ ID NO: 2403442 - DNA, 25 bp, Homo sapien
gatgcctggaggttttatgaataca

SEQ ID NO: 2403443 - DNA, 25 bp, Homo sapien
gtgcaatttccccaacacctgaaaa

SEQ ID NO: 2403444 - DNA, 25 bp, Homo sapien
acacctgaaaacactcagggtgggc

SEQ ID NO: 2403445 - DNA, 25 bp, Homo sapien
ggctctaagtgggtgtccctgtgca

SEQ ID NO: 2403446 - DNA, 25 bp, Homo sapien
cagaaaaccctttgctgccggaggc

SEQ ID NO: 2403447 - DNA, 25 bp, Homo sapien
tctctcttctggaacgtgaattcta

SEQ ID NO: 2403448 - DNA, 25 bp, Homo sapien
catctgaggcaggtctctcttctgg

SEQ ID NO: 2403449 - DNA, 25 bp, Homo sapien
aattctagcggctggttggagaccc

SEQ ID NO: 2403450 - DNA, 25 bp, Homo sapien
cttctggaacgtgaattctagcggc

SEQ ID NO: 2403451 - DNA, 25 bp, Homo sapien
gatgttgtctggagggatcacgtga

SEQ ID NO: 2403452 - DNA, 25 bp, Homo sapien
atgttgtctggagggatcacgtgac

SEQ ID NO: 2403453 - DNA, 25 bp, Homo sapien
ggaggggccgaaaactgaagatgca

SEQ ID NO: 2403454 - DNA, 25 bp, Homo sapien
cagggaggggccgaaaactgaagat

SEQ ID NO: 2403455 - DNA, 25 bp, Homo sapien
tggtaagagccagggaggggccgaa

SEQ ID NO: 2403456 - DNA, 25 bp, Homo sapien
gagccagggaggggccgaaaactga

SEQ ID NO: 2403457 - DNA, 25 bp, Homo sapien
aggaacagcgactgacagcgctcac

SEQ ID NO: 2403458 - DNA, 25 bp, Homo sapien
caggaacagcgactgacagcgctca

SEQ ID NO: 2403459 - DNA, 25 bp, Homo sapien
acccaccatcgccagtcacactggg

SEQ ID NO: 2403460 - DNA, 25 bp, Homo sapien
tgagcgcacgaagggtgagtctccc

SEQ ID NO: 2403461 - DNA, 25 bp, Homo sapien
cgaagggtgagtctcccatcccggg

SEQ ID NO: 2403462 - DNA, 25 bp, Homo sapien
ggtcgcagtatgagttattacccac

SEQ ID NO: 2403463 - DNA, 25 bp, Homo sapien
ctctgtgcctggtcgcagtatgagt

SEQ ID NO: 2403464 - DNA, 25 bp, Homo sapien
gcagctgctgccggaagttagacac

SEQ ID NO: 2403465 - DNA, 25 bp, Homo sapien
ttccaccccggcacaggccagcagc

SEQ ID NO: 2403466 - DNA, 25 bp, Homo sapien
ccagcagctgctgccggaagttaga

SEQ ID NO: 2403467 - DNA, 25 bp, Homo sapien
acaggaaaactccaccacgcgctca

SEQ ID NO: 2403468 - DNA, 25 bp, Homo sapien
ctgataacgcatctctcccaagctc

SEQ ID NO: 2403469 - DNA, 25 bp, Homo sapien
cagctggattcaggagcaaaaactt

SEQ ID NO: 2403470 - DNA, 25 bp, Homo sapien
tcaggagcaaaaacttcagggtgct

SEQ ID NO: 2403471 - DNA, 25 bp, Homo sapien
tgcccggcattccttcaccacttgg

SEQ ID NO: 2403472 - DNA, 25 bp, Homo sapien
gcaatgaccactgcccggcattcct

SEQ ID NO: 2403473 - DNA, 25 bp, Homo sapien
gggagatgagtgcaagcccaacaga

SEQ ID NO: 2403474 - DNA, 25 bp, Homo sapien
tggggagatgagtgcaagcccaaca

SEQ ID NO: 2403475 - DNA, 25 bp, Homo sapien
agatgagtgcaagcccaacagacac

SEQ ID NO: 2403476 - DNA, 25 bp, Homo sapien
gaaaaacagattggtggggagatga

SEQ ID NO: 2403477 - DNA, 25 bp, Homo sapien
catttaatctctaggacaaccagcc

SEQ ID NO: 2403478 - DNA, 25 bp, Homo sapien
ctaggacaaccagcccacagaggtg

SEQ ID NO: 2403479 - DNA, 25 bp, Homo sapien
aggcacaagtgctagtgctttctct

SEQ ID NO: 2403480 - DNA, 25 bp, Homo sapien
taaacaccatttaatctctaggaca

SEQ ID NO: 2403481 - DNA, 25 bp, Homo sapien
ggagttcccaggatggaaggaaaga

SEQ ID NO: 2403482 - DNA, 25 bp, Homo sapien
cctgggaactgaacctggccaagaa

SEQ ID NO: 2403483 - DNA, 25 bp, Homo sapien
aagaatcctttcatgctgcggctcc

SEQ ID NO: 2403484 - DNA, 25 bp, Homo sapien
tgcttcctcctaacccagggagttc

SEQ ID NO: 2403485 - DNA, 25 bp, Homo sapien
ccctgccgtcctggttggccgtagt

SEQ ID NO: 2403486 - DNA, 25 bp, Homo sapien
accctgccgtcctggttggccgtag

SEQ ID NO: 2403487 - DNA, 25 bp, Homo sapien
ctgccgtcctggttggccgtagtga

SEQ ID NO: 2403488 - DNA, 25 bp, Homo sapien
tgaccctgccgtcctggttggccgt

SEQ ID NO: 2403489 - DNA, 25 bp, Homo sapien
gcacagagcagaatggggaggaggc

SEQ ID NO: 2403490 - DNA, 25 bp, Homo sapien
ctgcacagagcagaatggggaggag

SEQ ID NO: 2403491 - DNA, 25 bp, Homo sapien
tgcacagagcagaatggggaggagg

SEQ ID NO: 2403492 - DNA, 25 bp, Homo sapien
ctcttgtcaggtccacacatgagga

SEQ ID NO: 2403493 - DNA, 25 bp, Homo sapien
tccctcttgtcaggtccacacatga

SEQ ID NO: 2403494 - DNA, 25 bp, Homo sapien
cacatgaggaacagaagtccttgcc

SEQ ID NO: 2403495 - DNA, 25 bp, Homo sapien
tccttgcccatgcgtgcagccggct

SEQ ID NO: 2403496 - DNA, 25 bp, Homo sapien
ttgctgaaacccagccagtttgggc

SEQ ID NO: 2403497 - DNA, 25 bp, Homo sapien
attgctgaaacccagccagtttggg

SEQ ID NO: 2403498 - DNA, 25 bp, Homo sapien
tgaaacccagccagtttgggctgct

SEQ ID NO: 2403499 - DNA, 25 bp, Homo sapien
ggctctgcaggaattgctgaaaccc

SEQ ID NO: 2403500 - DNA, 25 bp, Homo sapien
gctccgtaccgttcagtgaagccaa

SEQ ID NO: 2403501 - DNA, 25 bp, Homo sapien
ctgctccgtaccgttcagtgaagcc

SEQ ID NO: 2403502 - DNA, 25 bp, Homo sapien
cgtaccgttcagtgaagccaaagag

SEQ ID NO: 2403503 - DNA, 25 bp, Homo sapien
tccgtaccgttcagtgaagccaaag

SEQ ID NO: 2403504 - DNA, 25 bp, Homo sapien
tgggtggatcggaggctctgccagg

SEQ ID NO: 2403505 - DNA, 25 bp, Homo sapien
gagaggaacgaggaacagccatgag

SEQ ID NO: 2403506 - DNA, 25 bp, Homo sapien
caccacctcagcaaggcccactgca

SEQ ID NO: 2403507 - DNA, 25 bp, Homo sapien
gagaggctgggtggatcggaggctc

SEQ ID NO: 2403508 - DNA, 25 bp, Homo sapien
gctgatcatgctcttctcacagtat

SEQ ID NO: 2403509 - DNA, 25 bp, Homo sapien
tttctgctgatcatgctcttctcac

SEQ ID NO: 2403510 - DNA, 25 bp, Homo sapien
ctgctgatcatgctcttctcacagt

SEQ ID NO: 2403511 - DNA, 25 bp, Homo sapien
gatcatgctcttctcacagtatcgc

SEQ ID NO: 2403512 - DNA, 25 bp, Homo sapien
aggtggtgacaggaaggaaattgga

SEQ ID NO: 2403513 - DNA, 25 bp, Homo sapien
tggtgacaggaaggaaattggatgt

SEQ ID NO: 2403514 - DNA, 25 bp, Homo sapien
gaatgtggaaaggtggaaacctcta

SEQ ID NO: 2403515 - DNA, 25 bp, Homo sapien
gaaattggatgtggaatgtggaaag

SEQ ID NO: 2403516 - DNA, 25 bp, Homo sapien
tgatgttgtcgatctggctctggaa

SEQ ID NO: 2403517 - DNA, 25 bp, Homo sapien
tgttgtcgatctggctctggaagag

SEQ ID NO: 2403518 - DNA, 25 bp, Homo sapien
cttgaacaggttgatgttgtcgatc

SEQ ID NO: 2403519 - DNA, 25 bp, Homo sapien
ggctctggaagagaaagtcgttgat

SEQ ID NO: 2403520 - DNA, 25 bp, Homo sapien
tgacagactctgtgtattgggattt

SEQ ID NO: 2403521 - DNA, 25 bp, Homo sapien
gactctgtgtattgggattttgctt

SEQ ID NO: 2403522 - DNA, 25 bp, Homo sapien
gtattgggattttgcttaatgttcc

SEQ ID NO: 2403523 - DNA, 25 bp, Homo sapien
ctgtgacagactctgtgtattggga

SEQ ID NO: 2403524 - DNA, 25 bp, Homo sapien
gtgcttgcacgtggaacccaaagcc

SEQ ID NO: 2403525 - DNA, 25 bp, Homo sapien
ttctccaggaggccgggacacagca

SEQ ID NO: 2403526 - DNA, 25 bp, Homo sapien
ccaaggtatgcagggcaccggagca

SEQ ID NO: 2403527 - DNA, 25 bp, Homo sapien
gcagccagaccaaggtatgcagggc

SEQ ID NO: 2403528 - DNA, 25 bp, Homo sapien
aaaagcagcccggcgggttttgcag

SEQ ID NO: 2403529 - DNA, 25 bp, Homo sapien
cctgatgggcatccaaggaaaaagc

SEQ ID NO: 2403530 - DNA, 25 bp, Homo sapien
gtcagccggggggacgaggctctca

SEQ ID NO: 2403531 - DNA, 25 bp, Homo sapien
agaactgaggcgtcctgatgggcat

SEQ ID NO: 2403532 - DNA, 25 bp, Homo sapien
cctagcacagccacgaatttctcca

SEQ ID NO: 2403533 - DNA, 25 bp, Homo sapien
agccacgaatttctccagcaaatac

SEQ ID NO: 2403534 - DNA, 25 bp, Homo sapien
aatttctccagcaaatacaggatct

SEQ ID NO: 2403535 - DNA, 25 bp, Homo sapien
cacgaatttctccagcaaatacagg

SEQ ID NO: 2403536 - DNA, 25 bp, Homo sapien
agaagaagccaacggacattaagtg

SEQ ID NO: 2403537 - DNA, 25 bp, Homo sapien
gaagccaacggacattaagtggtgg

SEQ ID NO: 2403538 - DNA, 25 bp, Homo sapien
ccaacggacattaagtggtggtgcc

SEQ ID NO: 2403539 - DNA, 25 bp, Homo sapien
tgagaagaagccaacggacattaag

SEQ ID NO: 2403540 - DNA, 25 bp, Homo sapien
ctgatggcgactcgccccgcccacc

SEQ ID NO: 2403541 - DNA, 25 bp, Homo sapien
tccatgtactgcagcagctgggaat

SEQ ID NO: 2403542 - DNA, 25 bp, Homo sapien
atcgctccatgtactgcagcagctg

SEQ ID NO: 2403543 - DNA, 25 bp, Homo sapien
ccgtatcgctccatgtactgcagca

SEQ ID NO: 2403544 - DNA, 25 bp, Homo sapien
gtatcgctccatgtactgcagcagc

SEQ ID NO: 2403545 - DNA, 25 bp, Homo sapien
aagaacacaaaccaggctctgagca

SEQ ID NO: 2403546 - DNA, 25 bp, Homo sapien
gagcaagcagccgagggctaaggta

SEQ ID NO: 2403547 - DNA, 25 bp, Homo sapien
aaaccaggctctgagcaagcagccg

SEQ ID NO: 2403548 - DNA, 25 bp, Homo sapien
gctctgagcaagcagccgagggcta

SEQ ID NO: 2403549 - DNA, 25 bp, Homo sapien
tcacggcaggccctggcccggggag

SEQ ID NO: 2403550 - DNA, 25 bp, Homo sapien
ctcacggcaggccctggcccgggga

SEQ ID NO: 2403551 - DNA, 25 bp, Homo sapien
cacggcaggccctggcccggggagg

SEQ ID NO: 2403552 - DNA, 25 bp, Homo sapien
gcatctgatagggcagcaccaccag

SEQ ID NO: 2403553 - DNA, 25 bp, Homo sapien
cgatcaggttgtgcgcctcgtcgat

SEQ ID NO: 2403554 - DNA, 25 bp, Homo sapien
tgggagccgctgacctccacgctgt

SEQ ID NO: 2403555 - DNA, 25 bp, Homo sapien
cctgccgagtggccgcatgcagcag

SEQ ID NO: 2403556 - DNA, 25 bp, Homo sapien
taggcatggaagttgggagcatcac

SEQ ID NO: 2403557 - DNA, 25 bp, Homo sapien
tggtttcactaggaatgcaccggct

SEQ ID NO: 2403558 - DNA, 25 bp, Homo sapien
ggagcatcacttggaaagccatttg

SEQ ID NO: 2403559 - DNA, 25 bp, Homo sapien
taaggtgccatcaacctgaccacgg

SEQ ID NO: 2403560 - DNA, 25 bp, Homo sapien
tcatcccggagaaggcccatctgct

SEQ ID NO: 2403561 - DNA, 25 bp, Homo sapien
tgccagggcctcatcccggagaagg

SEQ ID NO: 2403562 - DNA, 25 bp, Homo sapien
ccatctgctcgtggttgtagaaggg

SEQ ID NO: 2403563 - DNA, 25 bp, Homo sapien
gaaggcccatctgctcgtggttgta

SEQ ID NO: 2403564 - DNA, 25 bp, Homo sapien
tcctgcctcctcctctttggcttct

SEQ ID NO: 2403565 - DNA, 25 bp, Homo sapien
ctctttggcttctcctcctcagctc

SEQ ID NO: 2403566 - DNA, 25 bp, Homo sapien
ctgcctcctcctctttggcttctcc

SEQ ID NO: 2403567 - DNA, 25 bp, Homo sapien
ctcctctttggcttctcctcctcag

SEQ ID NO: 2403568 - DNA, 25 bp, Homo sapien
atggtcttcagtcactgccacccct

SEQ ID NO: 2403569 - DNA, 25 bp, Homo sapien
tggtcttcagtcactgccacccctg

SEQ ID NO: 2403570 - DNA, 25 bp, Homo sapien
ggctacaccatggtcctggtggcta

SEQ ID NO: 2403571 - DNA, 25 bp, Homo sapien
gcggctacaccatggtcctggtggc

SEQ ID NO: 2403572 - DNA, 25 bp, Homo sapien
ctgcggctacaccatggtcctggtg

SEQ ID NO: 2403573 - DNA, 25 bp, Homo sapien
gctacaccatggtcctggtggctac

SEQ ID NO: 2403574 - DNA, 25 bp, Homo sapien
tgataagctgcacagaacctaggct

SEQ ID NO: 2403575 - DNA, 25 bp, Homo sapien
ttgataagctgcacagaacctaggc

SEQ ID NO: 2403576 - DNA, 25 bp, Homo sapien
gataagctgcacagaacctaggctt

SEQ ID NO: 2403577 - DNA, 25 bp, Homo sapien
tcttcttcacctcatgcacaaactg

SEQ ID NO: 2403578 - DNA, 25 bp, Homo sapien
ttcacctcatgcacaaactgggcca

SEQ ID NO: 2403579 - DNA, 25 bp, Homo sapien
gggagaccagccgaacatccttgcc

SEQ ID NO: 2403580 - DNA, 25 bp, Homo sapien
ccagccgaacatccttgccaaaggg

SEQ ID NO: 2403581 - DNA, 25 bp, Homo sapien
caggtcatcctcatcctcatccact

SEQ ID NO: 2403582 - DNA, 25 bp, Homo sapien
cttagttatgtgttcttcctccagg

SEQ ID NO: 2403583 - DNA, 25 bp, Homo sapien
ttcctccaggtcatcctcatcctca

SEQ ID NO: 2403584 - DNA, 25 bp, Homo sapien
ctccaggtcatcctcatcctcatcc

SEQ ID NO: 2403585 - DNA, 25 bp, Homo sapien
agagagaacagaaaacagtcttccc

SEQ ID NO: 2403586 - DNA, 25 bp, Homo sapien
tcttccctcagcaaactcagcaaaa

SEQ ID NO: 2403587 - DNA, 25 bp, Homo sapien
ttccctcagcaaactcagcaaaacg

SEQ ID NO: 2403588 - DNA, 25 bp, Homo sapien
gagaacagaaaacagtcttccctca

SEQ ID NO: 2403589 - DNA, 25 bp, Homo sapien
attcccagcaatgggttccaccaag

SEQ ID NO: 2403590 - DNA, 25 bp, Homo sapien
gggttccaccaaggtagcaggtgct

SEQ ID NO: 2403591 - DNA, 25 bp, Homo sapien
ggttccaccaaggtagcaggtgctg

SEQ ID NO: 2403592 - DNA, 25 bp, Homo sapien
tgggttccaccaaggtagcaggtgc

SEQ ID NO: 2403593 - DNA, 25 bp, Homo sapien
cccaagtcttgagttggaagcctcg

SEQ ID NO: 2403594 - DNA, 25 bp, Homo sapien
caagtcttgagttggaagcctcggg

SEQ ID NO: 2403595 - DNA, 25 bp, Homo sapien
agtcttgagttggaagcctcgggac

SEQ ID NO: 2403596 - DNA, 25 bp, Homo sapien
acccaagtcttgagttggaagcctc

SEQ ID NO: 2403597 - DNA, 25 bp, Homo sapien
agcacacccctatgccaaacactgg

SEQ ID NO: 2403598 - DNA, 25 bp, Homo sapien
cgaagccaccaagacgacacctgag

SEQ ID NO: 2403599 - DNA, 25 bp, Homo sapien
catcaaactgtaaagacgtggttcc

SEQ ID NO: 2403600 - DNA, 25 bp, Homo sapien
actgggtcagctctgggaacatcaa

SEQ ID NO: 2403601 - DNA, 25 bp, Homo sapien
cgctcgccacctttttctcctcatc

SEQ ID NO: 2403602 - DNA, 25 bp, Homo sapien
ctcgccacctttttctcctcatcac

SEQ ID NO: 2403603 - DNA, 25 bp, Homo sapien
ccgctcgccacctttttctcctcat

SEQ ID NO: 2403604 - DNA, 25 bp, Homo sapien
gctcgccacctttttctcctcatca

SEQ ID NO: 2403605 - DNA, 25 bp, Homo sapien
tctcgtattcggcgaggaccagctc

SEQ ID NO: 2403606 - DNA, 25 bp, Homo sapien
tattcggcgaggaccagctcctcct

SEQ ID NO: 2403607 - DNA, 25 bp, Homo sapien
cgtattcggcgaggaccagctcctc

SEQ ID NO: 2403608 - DNA, 25 bp, Homo sapien
tcgtattcggcgaggaccagctcct

SEQ ID NO: 2403609 - DNA, 25 bp, Homo sapien
gaggcggaggagattctctctttct

SEQ ID NO: 2403610 - DNA, 25 bp, Homo sapien
gctgaggcggaggagattctctctt

SEQ ID NO: 2403611 - DNA, 25 bp, Homo sapien
ctgctgaggcggaggagattctctc

SEQ ID NO: 2403612 - DNA, 25 bp, Homo sapien
tgaggcggaggagattctctctttc

SEQ ID NO: 2403613 - DNA, 25 bp, Homo sapien
tgctgcaggcgttcttctcgctgct

SEQ ID NO: 2403614 - DNA, 25 bp, Homo sapien
gcagctgctgcaggcgttcttctcg

SEQ ID NO: 2403615 - DNA, 25 bp, Homo sapien
caggcgcttggctgcatacttgagc

SEQ ID NO: 2403616 - DNA, 25 bp, Homo sapien
gctgctgcaggcgttcttctcgctg

SEQ ID NO: 2403617 - DNA, 25 bp, Homo sapien
atgcactgcctgagtctcggaatcg

SEQ ID NO: 2403618 - DNA, 25 bp, Homo sapien
gcactgcctgagtctcggaatcgcc

SEQ ID NO: 2403619 - DNA, 25 bp, Homo sapien
gggagcatgcactgcctgagtctcg

SEQ ID NO: 2403620 - DNA, 25 bp, Homo sapien
agcatgcactgcctgagtctcggaa

SEQ ID NO: 2403621 - DNA, 25 bp, Homo sapien
cacttccggataccccaggtctcac

SEQ ID NO: 2403622 - DNA, 25 bp, Homo sapien
aacaatcgctgaagccctgtttcct

SEQ ID NO: 2403623 - DNA, 25 bp, Homo sapien
ccacttccggataccccaggtctca

SEQ ID NO: 2403624 - DNA, 25 bp, Homo sapien
aggtccctctcttctttcttctgca

SEQ ID NO: 2403625 - DNA, 25 bp, Homo sapien
cctctcttctttcttctgcacaaac

SEQ ID NO: 2403626 - DNA, 25 bp, Homo sapien
ttcagtcggttcaccaggtccctct

SEQ ID NO: 2403627 - DNA, 25 bp, Homo sapien
cttcagtcggttcaccaggtccctc

SEQ ID NO: 2403628 - DNA, 25 bp, Homo sapien
agtaacccaggccggttctccagca

SEQ ID NO: 2403629 - DNA, 25 bp, Homo sapien
tgagtaacccaggccggttctccag

SEQ ID NO: 2403630 - DNA, 25 bp, Homo sapien
taacccaggccggttctccagcagg

SEQ ID NO: 2403631 - DNA, 25 bp, Homo sapien
aacccaggccggttctccagcaggc

SEQ ID NO: 2403632 - DNA, 25 bp, Homo sapien
cctgcagccccttcgcaggaggaag

SEQ ID NO: 2403633 - DNA, 25 bp, Homo sapien
tgcctgcagccccttcgcaggagga

SEQ ID NO: 2403634 - DNA, 25 bp, Homo sapien
gggtgcctgcagccccttcgcagga

SEQ ID NO: 2403635 - DNA, 25 bp, Homo sapien
ggtgcctgcagccccttcgcaggag

SEQ ID NO: 2403636 - DNA, 25 bp, Homo sapien
agacacagggattcatctttctcat

SEQ ID NO: 2403637 - DNA, 25 bp, Homo sapien
ctcatcatgtaaggggccagttcca

SEQ ID NO: 2403638 - DNA, 25 bp, Homo sapien
ctttctcatcatgtaaggggccagt

SEQ ID NO: 2403639 - DNA, 25 bp, Homo sapien
gacacagggattcatctttctcatc

SEQ ID NO: 2403640 - DNA, 25 bp, Homo sapien
ttcttcacgcttcttctgttcaaag

SEQ ID NO: 2403641 - DNA, 25 bp, Homo sapien
cttcacgcttcttctgttcaaagtc

SEQ ID NO: 2403642 - DNA, 25 bp, Homo sapien
tcttcacgcttcttctgttcaaagt

SEQ ID NO: 2403643 - DNA, 25 bp, Homo sapien
agcaaactaatcactctggaacacc

SEQ ID NO: 2403644 - DNA, 25 bp, Homo sapien
aaagcaaactaatcactctggaaca

SEQ ID NO: 2403645 - DNA, 25 bp, Homo sapien
gcaaactaatcactctggaacacca

SEQ ID NO: 2403646 - DNA, 25 bp, Homo sapien
taaagcaaactaatcactctggaac

SEQ ID NO: 2403647 - DNA, 25 bp, Homo sapien
ccaaaatcttgaaaggccctgggat

SEQ ID NO: 2403648 - DNA, 25 bp, Homo sapien
tgcaagcaggacattaacacacaca

SEQ ID NO: 2403649 - DNA, 25 bp, Homo sapien
ccctgggataggatagaatgacatt

SEQ ID NO: 2403650 - DNA, 25 bp, Homo sapien
tacctggcaaataacaagtgagcgg

SEQ ID NO: 2403651 - DNA, 25 bp, Homo sapien
agccagtgccctccatttgaaagtg

SEQ ID NO: 2403652 - DNA, 25 bp, Homo sapien
ccagtgccctccatttgaaagtgag

SEQ ID NO: 2403653 - DNA, 25 bp, Homo sapien
ggagacacaatggttagaaagccag

SEQ ID NO: 2403654 - DNA, 25 bp, Homo sapien
agacacaatggttagaaagccagtg

SEQ ID NO: 2403655 - DNA, 25 bp, Homo sapien
agggtatggtcaaagttatctttca

SEQ ID NO: 2403656 - DNA, 25 bp, Homo sapien
aacaaccgtggtatactccggcaca

SEQ ID NO: 2403657 - DNA, 25 bp, Homo sapien
tatactccggcacaacagcaaaaga

SEQ ID NO: 2403658 - DNA, 25 bp, Homo sapien
tcctaagggtatggtcaaagttatc

SEQ ID NO: 2403659 - DNA, 25 bp, Homo sapien
gaagatgaagctatagaaccagaaa

SEQ ID NO: 2403660 - DNA, 25 bp, Homo sapien
aacatcgacaattaaaggctgagca

SEQ ID NO: 2403661 - DNA, 25 bp, Homo sapien
gctatagaaccagaaacatcgacaa

SEQ ID NO: 2403662 - DNA, 25 bp, Homo sapien
gaaccagaaacatcgacaattaaag

SEQ ID NO: 2403663 - DNA, 25 bp, Homo sapien
ccaaaacccggtacagctctgccat

SEQ ID NO: 2403664 - DNA, 25 bp, Homo sapien
gttggactctcaaatatcccaatct

SEQ ID NO: 2403665 - DNA, 25 bp, Homo sapien
ccagcctccaaaacccggtacagct

SEQ ID NO: 2403666 - DNA, 25 bp, Homo sapien
tgccagttggactctcaaatatccc

SEQ ID NO: 2403667 - DNA, 25 bp, Homo sapien
ggatggcaccaaccttctgtgtttc

SEQ ID NO: 2403668 - DNA, 25 bp, Homo sapien
ctggatggaatagggtgtgaaggga

SEQ ID NO: 2403669 - DNA, 25 bp, Homo sapien
gcaccaaccttctgtgtttcattag

SEQ ID NO: 2403670 - DNA, 25 bp, Homo sapien
caaccttctgtgtttcattagccat

SEQ ID NO: 2403671 - DNA, 25 bp, Homo sapien
cagacaggagagctctcttcacagc

SEQ ID NO: 2403672 - DNA, 25 bp, Homo sapien
tgctaggctaaggtctaagaaaaac

SEQ ID NO: 2403673 - DNA, 25 bp, Homo sapien
aggagagctctcttcacagccacgg

SEQ ID NO: 2403674 - DNA, 25 bp, Homo sapien
caagtatctttagtttgcttcttag

SEQ ID NO: 2403675 - DNA, 25 bp, Homo sapien
tctttacagaggtgtatttggctgt

SEQ ID NO: 2403676 - DNA, 25 bp, Homo sapien
tttaccctctgtctttacagaggtg

SEQ ID NO: 2403677 - DNA, 25 bp, Homo sapien
tgtatttggctgttttgttagacat

SEQ ID NO: 2403678 - DNA, 25 bp, Homo sapien
agaactagcattattttaccctctg

SEQ ID NO: 2403679 - DNA, 25 bp, Homo sapien
tatgacacttccgtcaacaatctgg

SEQ ID NO: 2403680 - DNA, 25 bp, Homo sapien
tggaggatggcctggcccataatac

SEQ ID NO: 2403681 - DNA, 25 bp, Homo sapien
gcactgctgttaagccagggccaca

SEQ ID NO: 2403682 - DNA, 25 bp, Homo sapien
aagcttttccgcactgctgttaagc

SEQ ID NO: 2403683 - DNA, 25 bp, Homo sapien
gggttcccgcttgtcaatcacgctg

SEQ ID NO: 2403684 - DNA, 25 bp, Homo sapien
ggggttcccgcttgtcaatcacgct

SEQ ID NO: 2403685 - DNA, 25 bp, Homo sapien
aggggttcccgcttgtcaatcacgc

SEQ ID NO: 2403686 - DNA, 25 bp, Homo sapien
ggttcccgcttgtcaatcacgctgg

SEQ ID NO: 2403687 - DNA, 25 bp, Homo sapien
ggaacagacgcccagtttgcgattt

SEQ ID NO: 2403688 - DNA, 25 bp, Homo sapien
gaacagacgcccagtttgcgatttc

SEQ ID NO: 2403689 - DNA, 25 bp, Homo sapien
acagacgcccagtttgcgatttcac

SEQ ID NO: 2403690 - DNA, 25 bp, Homo sapien
gccggaacagacgcccagtttgcga

SEQ ID NO: 2403691 - DNA, 25 bp, Homo sapien
tcccgctgctcctcgtcctaaggac

SEQ ID NO: 2403692 - DNA, 25 bp, Homo sapien
agtctgcccttcctcgtcccgctgc

SEQ ID NO: 2403693 - DNA, 25 bp, Homo sapien
ctcctcgtcctaaggacctctgctg

SEQ ID NO: 2403694 - DNA, 25 bp, Homo sapien
cgctgctcctcgtcctaaggacctc

SEQ ID NO: 2403695 - DNA, 25 bp, Homo sapien
cttcttcgccggcagaattgctacg

SEQ ID NO: 2403696 - DNA, 25 bp, Homo sapien
tcagtgaaaggctgccggaacaacc

SEQ ID NO: 2403697 - DNA, 25 bp, Homo sapien
cctcagtgaaaggctgccggaacaa

SEQ ID NO: 2403698 - DNA, 25 bp, Homo sapien
cagtgaaaggctgccggaacaaccc

SEQ ID NO: 2403699 - DNA, 25 bp, Homo sapien
ctcagtgaaaggctgccggaacaac

SEQ ID NO: 2403700 - DNA, 25 bp, Homo sapien
attatctggataatcctctggtgga

SEQ ID NO: 2403701 - DNA, 25 bp, Homo sapien
atctggataatcctctggtggaggg

SEQ ID NO: 2403702 - DNA, 25 bp, Homo sapien
gcaactcagggtactgtgctggtac

SEQ ID NO: 2403703 - DNA, 25 bp, Homo sapien
cagggtactgtgctggtactgcagc

SEQ ID NO: 2403704 - DNA, 25 bp, Homo sapien
ctgcaatgggacaggcacctgcaaa

SEQ ID NO: 2403705 - DNA, 25 bp, Homo sapien
aatgggacaggcacctgcaaagcct

SEQ ID NO: 2403706 - DNA, 25 bp, Homo sapien
caatgggacaggcacctgcaaagcc

SEQ ID NO: 2403707 - DNA, 25 bp, Homo sapien
cctgcaaagcctcagcatcatttgc

SEQ ID NO: 2403708 - DNA, 25 bp, Homo sapien
tcagccaatatgaaccacagcgggc

SEQ ID NO: 2403709 - DNA, 25 bp, Homo sapien
gtcagccaatatgaaccacagcggg

SEQ ID NO: 2403710 - DNA, 25 bp, Homo sapien
cagccaatatgaaccacagcgggct

SEQ ID NO: 2403711 - DNA, 25 bp, Homo sapien
cagtcagccaatatgaaccacagcg

SEQ ID NO: 2403712 - DNA, 25 bp, Homo sapien
cctagtatagatactgacagccaac

SEQ ID NO: 2403713 - DNA, 25 bp, Homo sapien
ccctagtatagatactgacagccaa

SEQ ID NO: 2403714 - DNA, 25 bp, Homo sapien
agctcaggccctggcattgcttgtc

SEQ ID NO: 2403715 - DNA, 25 bp, Homo sapien
attccagttctcgggcctcgtcttg

SEQ ID NO: 2403716 - DNA, 25 bp, Homo sapien
cgtcttgaagggtaagggcagctca

SEQ ID NO: 2403717 - DNA, 25 bp, Homo sapien
tctcgggcctcgtcttgaagggtaa

SEQ ID NO: 2403718 - DNA, 25 bp, Homo sapien
gggctccggggactcattcttcact

SEQ ID NO: 2403719 - DNA, 25 bp, Homo sapien
tgagccctcagtatgtcatccatga

SEQ ID NO: 2403720 - DNA, 25 bp, Homo sapien
tgtgcctgtggcacaagaggctttc

SEQ ID NO: 2403721 - DNA, 25 bp, Homo sapien
cttaggtgactcagcctggaagctg

SEQ ID NO: 2403722 - DNA, 25 bp, Homo sapien
tgactgtgaatcctaaagattcatc

SEQ ID NO: 2403723 - DNA, 25 bp, Homo sapien
tgcagtcacgggtgttgctttcaca

SEQ ID NO: 2403724 - DNA, 25 bp, Homo sapien
tggatgttcacccatttgactgtga

SEQ ID NO: 2403725 - DNA, 25 bp, Homo sapien
tggatctggtggatgttcacccatt

SEQ ID NO: 2403726 - DNA, 25 bp, Homo sapien
ctacagatgaaaggaaacattcaag

SEQ ID NO: 2403727 - DNA, 25 bp, Homo sapien
attcaagaaacaaaacacccagcat

SEQ ID NO: 2403728 - DNA, 25 bp, Homo sapien
acagatgaaaggaaacattcaagaa

SEQ ID NO: 2403729 - DNA, 25 bp, Homo sapien
aacattcaagaaacaaaacacccag

SEQ ID NO: 2403730 - DNA, 25 bp, Homo sapien
ctagtttcttctgcccaaatcctac

SEQ ID NO: 2403731 - DNA, 25 bp, Homo sapien
tttcttctgcccaaatcctacatcg

SEQ ID NO: 2403732 - DNA, 25 bp, Homo sapien
aatcctacatcggtcttttctttca

SEQ ID NO: 2403733 - DNA, 25 bp, Homo sapien
tgcccaaatcctacatcggtctttt

SEQ ID NO: 2403734 - DNA, 25 bp, Homo sapien
ctgtacttgaggcacgacatcttct

SEQ ID NO: 2403735 - DNA, 25 bp, Homo sapien
tgaggcacgacatcttctaggcgtt

SEQ ID NO: 2403736 - DNA, 25 bp, Homo sapien
ttcaggagtctgtacttgaggcacg

SEQ ID NO: 2403737 - DNA, 25 bp, Homo sapien
acgacatcttctaggcgtttggcac

SEQ ID NO: 2403738 - DNA, 25 bp, Homo sapien
catgatagccagtatgaaagaactt

SEQ ID NO: 2403739 - DNA, 25 bp, Homo sapien
tagccagtatgaaagaacttcatct

SEQ ID NO: 2403740 - DNA, 25 bp, Homo sapien
ccatgatagccagtatgaaagaact

SEQ ID NO: 2403741 - DNA, 25 bp, Homo sapien
tgatagccagtatgaaagaacttca

SEQ ID NO: 2403742 - DNA, 25 bp, Homo sapien
ctgtagcaatgacattttttttttg

SEQ ID NO: 2403743 - DNA, 25 bp, Homo sapien
ttttgttttggaatttgcacactta

SEQ ID NO: 2403744 - DNA, 25 bp, Homo sapien
tgttttggaatttgcacacttaata

SEQ ID NO: 2403745 - DNA, 25 bp, Homo sapien
gttttggaatttgcacacttaataa

SEQ ID NO: 2403746 - DNA, 25 bp, Homo sapien
cacagtgggacagcttctgaacata

SEQ ID NO: 2403747 - DNA, 25 bp, Homo sapien
cagcttctgaacataaagaatgata

SEQ ID NO: 2403748 - DNA, 25 bp, Homo sapien
aatgataatcatctccactaagctg

SEQ ID NO: 2403749 - DNA, 25 bp, Homo sapien
aagaatgataatcatctccactaag

SEQ ID NO: 2403750 - DNA, 25 bp, Homo sapien
ggattgcagtgctctgcgatgtcat

SEQ ID NO: 2403751 - DNA, 25 bp, Homo sapien
ttggattgcagtgctctgcgatgtc

SEQ ID NO: 2403752 - DNA, 25 bp, Homo sapien
gaagttggattgcagtgctctgcga

SEQ ID NO: 2403753 - DNA, 25 bp, Homo sapien
atgaagttggattgcagtgctctgc

SEQ ID NO: 2403754 - DNA, 25 bp, Homo sapien
ttcaagttttgctctcagtgtccct

SEQ ID NO: 2403755 - DNA, 25 bp, Homo sapien
agttttgctctcagtgtccctccca

SEQ ID NO: 2403756 - DNA, 25 bp, Homo sapien
caagttttgctctcagtgtccctcc

SEQ ID NO: 2403757 - DNA, 25 bp, Homo sapien
gttttgctctcagtgtccctcccag

SEQ ID NO: 2403758 - DNA, 25 bp, Homo sapien
tctgtatctggttcagtaccaatag

SEQ ID NO: 2403759 - DNA, 25 bp, Homo sapien
ctgtatctggttcagtaccaatagc

SEQ ID NO: 2403760 - DNA, 25 bp, Homo sapien
atctgtatctggttcagtaccaata

SEQ ID NO: 2403761 - DNA, 25 bp, Homo sapien
tagtaaaccaacatctggcaagcag

SEQ ID NO: 2403762 - DNA, 25 bp, Homo sapien
ttagcatagtaaaccaacatctggc

SEQ ID NO: 2403763 - DNA, 25 bp, Homo sapien
cttagcatagtaaaccaacatctgg

SEQ ID NO: 2403764 - DNA, 25 bp, Homo sapien
aaaccaacatctggcaagcagttac

SEQ ID NO: 2403765 - DNA, 25 bp, Homo sapien
catcattcatattctccacatcctg

SEQ ID NO: 2403766 - DNA, 25 bp, Homo sapien
cttaataagaggctcgataaccagg

SEQ ID NO: 2403767 - DNA, 25 bp, Homo sapien
taagaggctcgataaccagggaaag

SEQ ID NO: 2403768 - DNA, 25 bp, Homo sapien
tgaagcagtcttaataagaggctcg

SEQ ID NO: 2403769 - DNA, 25 bp, Homo sapien
taataagaggctcgataaccaggga

SEQ ID NO: 2403770 - DNA, 25 bp, Homo sapien
atatggctaatgcacgcaataattt

SEQ ID NO: 2403771 - DNA, 25 bp, Homo sapien
agaagctgcatgtgattgcacacgc

SEQ ID NO: 2403772 - DNA, 25 bp, Homo sapien
tgattgcacacgctgattaccttga

SEQ ID NO: 2403773 - DNA, 25 bp, Homo sapien
ttgcacacgctgattaccttgattt

SEQ ID NO: 2403774 - DNA, 25 bp, Homo sapien
gcatgtgattgcacacgctgattac

SEQ ID NO: 2403775 - DNA, 25 bp, Homo sapien
tgacaagttcgccagcacccctgtg

SEQ ID NO: 2403776 - DNA, 25 bp, Homo sapien
agcacccctgtggacgtggtcaccg

SEQ ID NO: 2403777 - DNA, 25 bp, Homo sapien
cagaagctgataaaactctttgctt

SEQ ID NO: 2403778 - DNA, 25 bp, Homo sapien
tcgccagcacccctgtggacgtggt

SEQ ID NO: 2403779 - DNA, 25 bp, Homo sapien
agttcatggaatgttcgggtatcag

SEQ ID NO: 2403780 - DNA, 25 bp, Homo sapien
gaccaacagtttcctgctctacgaa

SEQ ID NO: 2403781 - DNA, 25 bp, Homo sapien
gacagtggtgtcactaatggctata

SEQ ID NO: 2403782 - DNA, 25 bp, Homo sapien
ccttgaagcggcattggacagtggt

SEQ ID NO: 2403783 - DNA, 25 bp, Homo sapien
cacacatacacgtcaggattagaat

SEQ ID NO: 2403784 - DNA, 25 bp, Homo sapien
gaagggatcaatgaagtccacacat

SEQ ID NO: 2403785 - DNA, 25 bp, Homo sapien
gatgagccattacatggaagggatc

SEQ ID NO: 2403786 - DNA, 25 bp, Homo sapien
ggagatgagccattacatggaaggg

SEQ ID NO: 2403787 - DNA, 25 bp, Homo sapien
tgcccttgtatgactcggatagccc

SEQ ID NO: 2403788 - DNA, 25 bp, Homo sapien
catgtacatgaggaactcgcaagag

SEQ ID NO: 2403789 - DNA, 25 bp, Homo sapien
catagaagtggcctaagcaagatgc

SEQ ID NO: 2403790 - DNA, 25 bp, Homo sapien
cagaggaatcttcacggcttgccgc

SEQ ID NO: 2403791 - DNA, 25 bp, Homo sapien
atttctcacaggtgttagttctttt

SEQ ID NO: 2403792 - DNA, 25 bp, Homo sapien
taatccaatccaaaacagaattgct

SEQ ID NO: 2403793 - DNA, 25 bp, Homo sapien
cagaattgctttgtcacgtatcagg

SEQ ID NO: 2403794 - DNA, 25 bp, Homo sapien
aaaagagccgtttatccacttccag

SEQ ID NO: 2403795 - DNA, 25 bp, Homo sapien
ttgtcacgtatcaggttctgtgtgt

SEQ ID NO: 2403796 - DNA, 25 bp, Homo sapien
tatattgggcagtttaagagacccg

SEQ ID NO: 2403797 - DNA, 25 bp, Homo sapien
ttatctcgaataagcagcaggctgg

SEQ ID NO: 2403798 - DNA, 25 bp, Homo sapien
taacaagcatttctctcggagttgc

SEQ ID NO: 2403799 - DNA, 25 bp, Homo sapien
tattccaagggttgacagtgtgaga

SEQ ID NO: 2403800 - DNA, 25 bp, Homo sapien
gctctgttgaatgtccacactgcat

SEQ ID NO: 2403801 - DNA, 25 bp, Homo sapien
tgttttattcctgctctgttgaatg

SEQ ID NO: 2403802 - DNA, 25 bp, Homo sapien
ctctgttgaatgtccacactgcatt

SEQ ID NO: 2403803 - DNA, 25 bp, Homo sapien
tgctctgttgaatgtccacactgca

SEQ ID NO: 2403804 - DNA, 25 bp, Homo sapien
tgccaaggtgaaccctgacagacat

SEQ ID NO: 2403805 - DNA, 25 bp, Homo sapien
gaataatcccagcacagctaagttt

SEQ ID NO: 2403806 - DNA, 25 bp, Homo sapien
aacactcaacccagtaacaaccaag

SEQ ID NO: 2403807 - DNA, 25 bp, Homo sapien
taagtttcagggcaaattgatgcca

SEQ ID NO: 2403808 - DNA, 25 bp, Homo sapien
taagtttaactcagcatatattgct

SEQ ID NO: 2403809 - DNA, 25 bp, Homo sapien
ggtaagtttaactcagcatatattg

SEQ ID NO: 2403810 - DNA, 25 bp, Homo sapien
gtttaactcagcatatattgcttgt

SEQ ID NO: 2403811 - DNA, 25 bp, Homo sapien
tgtgggtaagtttaactcagcatat

SEQ ID NO: 2403812 - DNA, 25 bp, Homo sapien
gaggaaggtggcattaaacttgtgt

SEQ ID NO: 2403813 - DNA, 25 bp, Homo sapien
cagaggaaggtggcattaaacttgt

SEQ ID NO: 2403814 - DNA, 25 bp, Homo sapien
agaggaaggtggcattaaacttgtg

SEQ ID NO: 2403815 - DNA, 25 bp, Homo sapien
acttgtgtgtaagaacaaactctca

SEQ ID NO: 2403816 - DNA, 25 bp, Homo sapien
ccttgctcaagggccgcacaagtct

SEQ ID NO: 2403817 - DNA, 25 bp, Homo sapien
gttccgactttagtttatgtactgc

SEQ ID NO: 2403818 - DNA, 25 bp, Homo sapien
ctctgtcttgttccgactttagttt

SEQ ID NO: 2403819 - DNA, 25 bp, Homo sapien
ctcaagggccgcacaagtcttctct

SEQ ID NO: 2403820 - DNA, 25 bp, Homo sapien
ggaaatgggacctccagatatcatc

SEQ ID NO: 2403821 - DNA, 25 bp, Homo sapien
tctctgggatcgctgccaccttcca

SEQ ID NO: 2403822 - DNA, 25 bp, Homo sapien
ggcagtcattgaagactttaagagg

SEQ ID NO: 2403823 - DNA, 25 bp, Homo sapien
agagccagctcctgatggacccatg

SEQ ID NO: 2403824 - DNA, 25 bp, Homo sapien
gggatgataacggaaagccttggac

SEQ ID NO: 2403825 - DNA, 25 bp, Homo sapien
gatgataacggaaagccttggacgt

SEQ ID NO: 2403826 - DNA, 25 bp, Homo sapien
tgctgcctagcgtccccaaggcaga

SEQ ID NO: 2403827 - DNA, 25 bp, Homo sapien
agccttggacgtgctgcctagcgtc

SEQ ID NO: 2403828 - DNA, 25 bp, Homo sapien
cccttggtgagaacagcgaagtctt

SEQ ID NO: 2403829 - DNA, 25 bp, Homo sapien
ggcatctgcagaactagcccttggt

SEQ ID NO: 2403830 - DNA, 25 bp, Homo sapien
cagcgaagtcttgaaaagtggccgg

SEQ ID NO: 2403831 - DNA, 25 bp, Homo sapien
ggctgaattttgcaaggcatctgca

SEQ ID NO: 2403832 - DNA, 25 bp, Homo sapien
gagccttaaggattggagccagctt

SEQ ID NO: 2403833 - DNA, 25 bp, Homo sapien
ggagccttaaggattggagccagct

SEQ ID NO: 2403834 - DNA, 25 bp, Homo sapien
agccttaaggattggagccagcttt

SEQ ID NO: 2403835 - DNA, 25 bp, Homo sapien
tggagccttaaggattggagccagc

SEQ ID NO: 2403836 - DNA, 25 bp, Homo sapien
ggccctgcaatcagatccttttatg

SEQ ID NO: 2403837 - DNA, 25 bp, Homo sapien
ggactattaaggcactacttctgaa

SEQ ID NO: 2403838 - DNA, 25 bp, Homo sapien
cctagtcaaatttaaggccctgcaa

SEQ ID NO: 2403839 - DNA, 25 bp, Homo sapien
tttaaaccaccgtgatgcactgaaa

SEQ ID NO: 2403840 - DNA, 25 bp, Homo sapien
ggatcctgagaagattgccaagttg

SEQ ID NO: 2403841 - DNA, 25 bp, Homo sapien
gccaagttgtagttaagaatgtcag

SEQ ID NO: 2403842 - DNA, 25 bp, Homo sapien
gaccacacaggccaactcttagtct

SEQ ID NO: 2403843 - DNA, 25 bp, Homo sapien
tgtcctgcttatctggtagggaaag

SEQ ID NO: 2403844 - DNA, 25 bp, Homo sapien
ctgctcgggtcacaagcgccagaag

SEQ ID NO: 2403845 - DNA, 25 bp, Homo sapien
cggacaagcgctcctagctggagga

SEQ ID NO: 2403846 - DNA, 25 bp, Homo sapien
ctagctggaggagggtcgcgttcct

SEQ ID NO: 2403847 - DNA, 25 bp, Homo sapien
atgtggaaaggaagtccaggaatcc

SEQ ID NO: 2403848 - DNA, 25 bp, Homo sapien
taagaagtattctctcggctctaac

SEQ ID NO: 2403849 - DNA, 25 bp, Homo sapien
cattttagcatccatgggatctgta

SEQ ID NO: 2403850 - DNA, 25 bp, Homo sapien
caagtgattgatcctctgtgtggac

SEQ ID NO: 2403851 - DNA, 25 bp, Homo sapien
cagtgagtccatcttgacatggtgc

SEQ ID NO: 2403852 - DNA, 25 bp, Homo sapien
agatcaaataatccagccttttggg

SEQ ID NO: 2403853 - DNA, 25 bp, Homo sapien
caaataatccagccttttgggcctc

SEQ ID NO: 2403854 - DNA, 25 bp, Homo sapien
tcaaataatccagccttttgggcct

SEQ ID NO: 2403855 - DNA, 25 bp, Homo sapien
tttttgtagcgacagagtctttgct

SEQ ID NO: 2403856 - DNA, 25 bp, Homo sapien
ttctgttcattaggctagagtgtgg

SEQ ID NO: 2403857 - DNA, 25 bp, Homo sapien
aatataggtggattaaatatctacc

SEQ ID NO: 2403858 - DNA, 25 bp, Homo sapien
cctacctgagccctgagtacctggt

SEQ ID NO: 2403859 - DNA, 25 bp, Homo sapien
ttaagtttgtatgaagttagcaaca

SEQ ID NO: 2403860 - DNA, 25 bp, Homo sapien
tttgacttgtgagccagaattgtgc

SEQ ID NO: 2403861 - DNA, 25 bp, Homo sapien
taatattcgtggcaggaacaggccc

SEQ ID NO: 2403862 - DNA, 25 bp, Homo sapien
taaggattagaaaagtattggtaga

SEQ ID NO: 2403863 - DNA, 25 bp, Homo sapien
taccccattattgcagggatccatg

SEQ ID NO: 2403864 - DNA, 25 bp, Homo sapien
tcgagtctagttaaacactggaagc

SEQ ID NO: 2403865 - DNA, 25 bp, Homo sapien
cagccagggtgaacaataagcacct

SEQ ID NO: 2403866 - DNA, 25 bp, Homo sapien
catagaggttggtagactaaaaagc

SEQ ID NO: 2403867 - DNA, 25 bp, Homo sapien
tattagataactggctgacagcaga

SEQ ID NO: 2403868 - DNA, 25 bp, Homo sapien
catcagctgaagtggcttcccaagg

SEQ ID NO: 2403869 - DNA, 25 bp, Homo sapien
tcaatgaccatgcacaacagagaat

SEQ ID NO: 2403870 - DNA, 25 bp, Homo sapien
tctgagccacaacaaccaagatttg

SEQ ID NO: 2403871 - DNA, 25 bp, Homo sapien
tataacatctcctgctaagcaaagc

SEQ ID NO: 2403872 - DNA, 25 bp, Homo sapien
taattagtcaccactacacaaggaa

SEQ ID NO: 2403873 - DNA, 25 bp, Homo sapien
cagctaaggctttggatgtacttga

SEQ ID NO: 2403874 - DNA, 25 bp, Homo sapien
ttggaaactgctcatcacttaaaga

SEQ ID NO: 2403875 - DNA, 25 bp, Homo sapien
attcaagatctctggcagtggagga

SEQ ID NO: 2403876 - DNA, 25 bp, Homo sapien
agtgcagagtgagaactttccctac

SEQ ID NO: 2403877 - DNA, 25 bp, Homo sapien
gtaacagttgatatctggctgtcct

SEQ ID NO: 2403878 - DNA, 25 bp, Homo sapien
tggctgtcctttttatagtgcagag

SEQ ID NO: 2403879 - DNA, 25 bp, Homo sapien
ataaagcaattgtctccacctggcc

SEQ ID NO: 2403880 - DNA, 25 bp, Homo sapien
acagttggtgggaacacagtttggt

SEQ ID NO: 2403881 - DNA, 25 bp, Homo sapien
tagaaaacgtcatggaggttcctaa

SEQ ID NO: 2403882 - DNA, 25 bp, Homo sapien
catatcagatggctatatcaaaaag

SEQ ID NO: 2403883 - DNA, 25 bp, Homo sapien
ctcataaagatatctgctttcctgt

SEQ ID NO: 2403884 - DNA, 25 bp, Homo sapien
gaaatcaccacctcataaagatatc

SEQ ID NO: 2403885 - DNA, 25 bp, Homo sapien
tgaaatcaccacctcataaagatat

SEQ ID NO: 2403886 - DNA, 25 bp, Homo sapien
atcaccacctcataaagatatctgc

SEQ ID NO: 2403887 - DNA, 25 bp, Homo sapien
gcctgttgcaccataatactgttct

SEQ ID NO: 2403888 - DNA, 25 bp, Homo sapien
tcactcagtaaaacgtgaaggtttc

SEQ ID NO: 2403889 - DNA, 25 bp, Homo sapien
caggtggtacatgatagggactgca

SEQ ID NO: 2403890 - DNA, 25 bp, Homo sapien
tactgttctgctttagccaagcatg

SEQ ID NO: 2403891 - DNA, 25 bp, Homo sapien
ttgcctaagacaactaagctgcctt

SEQ ID NO: 2403892 - DNA, 25 bp, Homo sapien
ctaattctcgggctacttatggcca

SEQ ID NO: 2403893 - DNA, 25 bp, Homo sapien
caggatgagtgaatccttttccttc

SEQ ID NO: 2403894 - DNA, 25 bp, Homo sapien
gatctcttattacagtttttctaca

SEQ ID NO: 2403895 - DNA, 25 bp, Homo sapien
gacactccagaggtccagttgccat

SEQ ID NO: 2403896 - DNA, 25 bp, Homo sapien
ctgaaggcagccctctgtgtgggaa

SEQ ID NO: 2403897 - DNA, 25 bp, Homo sapien
cacacaggtctagctctcattcaca

SEQ ID NO: 2403898 - DNA, 25 bp, Homo sapien
cattggttccgatattggctctgac

SEQ ID NO: 2403899 - DNA, 25 bp, Homo sapien
gctccttttactcacatcattggcc

SEQ ID NO: 2403900 - DNA, 25 bp, Homo sapien
tcataacgtcacactgggtccggtt

SEQ ID NO: 2403901 - DNA, 25 bp, Homo sapien
ggtccggttcctgcagtgctccttt

SEQ ID NO: 2403902 - DNA, 25 bp, Homo sapien
catcacaggcccctctcacattggc

SEQ ID NO: 2403903 - DNA, 25 bp, Homo sapien
tggtggctgccacgaacttgtccca

SEQ ID NO: 2403904 - DNA, 25 bp, Homo sapien
gtattgtcttctcgccaaacttggt

SEQ ID NO: 2403905 - DNA, 25 bp, Homo sapien
tgcaacttgatgaacactgtcccag

SEQ ID NO: 2403906 - DNA, 25 bp, Homo sapien
aacactaactcggactcaaacaggg

SEQ ID NO: 2403907 - DNA, 25 bp, Homo sapien
tgggatatcaaacaagagctttgtt

SEQ ID NO: 2403908 - DNA, 25 bp, Homo sapien
catatggatgcctgtagcctctgtc

SEQ ID NO: 2403909 - DNA, 25 bp, Homo sapien
ggcctcttcctaagaagaccccaga

SEQ ID NO: 2403910 - DNA, 25 bp, Homo sapien
gtctaggaacttctatatgcatatg

SEQ ID NO: 2403911 - DNA, 25 bp, Homo sapien
gagacacaacctttaaagatgtaat

SEQ ID NO: 2403912 - DNA, 25 bp, Homo sapien
gacacaacctttaaagatgtaatta

SEQ ID NO: 2403913 - DNA, 25 bp, Homo sapien
agacacaacctttaaagatgtaatt

SEQ ID NO: 2403914 - DNA, 25 bp, Homo sapien
tttggatacacagagacatcagaga

SEQ ID NO: 2403915 - DNA, 25 bp, Homo sapien
aaatgccatttgaaggtacagcaaa

SEQ ID NO: 2403916 - DNA, 25 bp, Homo sapien
catcagagatgtacacacattgaag

SEQ ID NO: 2403917 - DNA, 25 bp, Homo sapien
agtgaggccattgcggtgggcccta

SEQ ID NO: 2403918 - DNA, 25 bp, Homo sapien
atatttgtatagttaataacacatg

SEQ ID NO: 2403919 - DNA, 25 bp, Homo sapien
attcactgccagtgtgggggatgct

SEQ ID NO: 2403920 - DNA, 25 bp, Homo sapien
ttcacagacttttgccaagtttgta

SEQ ID NO: 2403921 - DNA, 25 bp, Homo sapien
gaagttgaaacttcttttcacagac

SEQ ID NO: 2403922 - DNA, 25 bp, Homo sapien
catagcagtaatgtcttgaatcacc

SEQ ID NO: 2403923 - DNA, 25 bp, Homo sapien
cttagtttcagcaatccagtaacat

SEQ ID NO: 2403924 - DNA, 25 bp, Homo sapien
gacatgatttatggacagtagaaaa

SEQ ID NO: 2403925 - DNA, 25 bp, Homo sapien
gagatatgaattgtttatggcacag

SEQ ID NO: 2403926 - DNA, 25 bp, Homo sapien
gactagtgctgccttcggtatccac

SEQ ID NO: 2403927 - DNA, 25 bp, Homo sapien
cacacagttacttgagagcagagct

SEQ ID NO: 2403928 - DNA, 25 bp, Homo sapien
gcagagctgatatctaacctcaggt

SEQ ID NO: 2403929 - DNA, 25 bp, Homo sapien
gagattattttaacgcaatacccac

SEQ ID NO: 2403930 - DNA, 25 bp, Homo sapien
gacgaactgaaattatggatcccta

SEQ ID NO: 2403931 - DNA, 25 bp, Homo sapien
tacacatgttactaatatgacgaac

SEQ ID NO: 2403932 - DNA, 25 bp, Homo sapien
tatggatccctaagtttagtagaat

SEQ ID NO: 2403933 - DNA, 25 bp, Homo sapien
gtgtcaccatgctcgtttttaaaat

SEQ ID NO: 2403934 - DNA, 25 bp, Homo sapien
cgaagtgacgcatgagaacaaaagt

SEQ ID NO: 2403935 - DNA, 25 bp, Homo sapien
tgtaggactctgtatgtaagacaac

SEQ ID NO: 2403936 - DNA, 25 bp, Homo sapien
taacaccacacgtatacagcacaag

SEQ ID NO: 2403937 - DNA, 25 bp, Homo sapien
aggccaatagccagagcaaaatcag

SEQ ID NO: 2403938 - DNA, 25 bp, Homo sapien
cggggaagtccgaacagttttgatg

SEQ ID NO: 2403939 - DNA, 25 bp, Homo sapien
tcagcgtagactacatctccagcca

SEQ ID NO: 2403940 - DNA, 25 bp, Homo sapien
agttttgatgtcagcgtagactaca

SEQ ID NO: 2403941 - DNA, 25 bp, Homo sapien
tctctgaagtggaaacgcgagttct

SEQ ID NO: 2403942 - DNA, 25 bp, Homo sapien
tgcacagatcaaaaagagagagaag

SEQ ID NO: 2403943 - DNA, 25 bp, Homo sapien
agagagaagaccacaaatgatgtcc

SEQ ID NO: 2403944 - DNA, 25 bp, Homo sapien
agagaagaccacaaatgatgtccca

SEQ ID NO: 2403945 - DNA, 25 bp, Homo sapien
aaaagagagagaagaccacaaatga

SEQ ID NO: 2403946 - DNA, 25 bp, Homo sapien
cgaatacttgtatgacatggaagaa

SEQ ID NO: 2403947 - DNA, 25 bp, Homo sapien
ggacttcctccatgaataaatgaca

SEQ ID NO: 2403948 - DNA, 25 bp, Homo sapien
tcaaggtagcagatttctcgaatac

SEQ ID NO: 2403949 - DNA, 25 bp, Homo sapien
gaagggacaatcatatttctgcaaa

SEQ ID NO: 2403950 - DNA, 25 bp, Homo sapien
catcttatgtgtacttgttttgatc

SEQ ID NO: 2403951 - DNA, 25 bp, Homo sapien
tacgatcaattctaatttgaacttc

SEQ ID NO: 2403952 - DNA, 25 bp, Homo sapien
gaacttcatcttatgtgtacttgtt

SEQ ID NO: 2403953 - DNA, 25 bp, Homo sapien
ccccacacctgagattatgaattat

SEQ ID NO: 2403954 - DNA, 25 bp, Homo sapien
gaaaaggacctgtctacagctgagg

SEQ ID NO: 2403955 - DNA, 25 bp, Homo sapien
caataaatagtaagtccacgcctag

SEQ ID NO: 2403956 - DNA, 25 bp, Homo sapien
tgcaaatgcatgaagggctctcact

SEQ ID NO: 2403957 - DNA, 25 bp, Homo sapien
tatggaagacttcggaccacagagc

SEQ ID NO: 2403958 - DNA, 25 bp, Homo sapien
ttctcacattccatgctgctgacct

SEQ ID NO: 2403959 - DNA, 25 bp, Homo sapien
cttgtcagaccctgtaacgttgaac

SEQ ID NO: 2403960 - DNA, 25 bp, Homo sapien
acacttgtcagaccctgtaacgttg

SEQ ID NO: 2403961 - DNA, 25 bp, Homo sapien
aacacacttgtcagaccctgtaacg

SEQ ID NO: 2403962 - DNA, 25 bp, Homo sapien
taatcatagactaatctgtagagac

SEQ ID NO: 2403963 - DNA, 25 bp, Homo sapien
aactcggagatggtgacctctgctt

SEQ ID NO: 2403964 - DNA, 25 bp, Homo sapien
aattcttagtgggatacacaagtca

SEQ ID NO: 2403965 - DNA, 25 bp, Homo sapien
cattcatttggttggcatggcacca

SEQ ID NO: 2403966 - DNA, 25 bp, Homo sapien
catttgaccacttccatgggtgacc

SEQ ID NO: 2403967 - DNA, 25 bp, Homo sapien
gaccacttccatgggtgaccaggtt

SEQ ID NO: 2403968 - DNA, 25 bp, Homo sapien
cacttccatgggtgaccaggttcct

SEQ ID NO: 2403969 - DNA, 25 bp, Homo sapien
tttgccatttgaccacttccatggg

SEQ ID NO: 2403970 - DNA, 25 bp, Homo sapien
gcaacttgaggcatgacagcttatc

SEQ ID NO: 2403971 - DNA, 25 bp, Homo sapien
cctcaggctgatcatatggttctct

SEQ ID NO: 2403972 - DNA, 25 bp, Homo sapien
tctggtctttgaagctaagcaatca

SEQ ID NO: 2403973 - DNA, 25 bp, Homo sapien
gaaggaaagcactgattagccatat

SEQ ID NO: 2403974 - DNA, 25 bp, Homo sapien
caagagtagcaccatgttcagaaca

SEQ ID NO: 2403975 - DNA, 25 bp, Homo sapien
cagaatcaatgacagcaagagtagc

SEQ ID NO: 2403976 - DNA, 25 bp, Homo sapien
gaaacatggctgtctgatggcattg

SEQ ID NO: 2403977 - DNA, 25 bp, Homo sapien
taaagtagcatttcctctggtagcc

SEQ ID NO: 2403978 - DNA, 25 bp, Homo sapien
gatcttccattgtgcctaatcatca

SEQ ID NO: 2403979 - DNA, 25 bp, Homo sapien
gaaagttctcaggaccatatctgat

SEQ ID NO: 2403980 - DNA, 25 bp, Homo sapien
gatgtacttttggtcataatgtcag

SEQ ID NO: 2403981 - DNA, 25 bp, Homo sapien
gccttaggatgctatgttgtgctag

SEQ ID NO: 2403982 - DNA, 25 bp, Homo sapien
ccttcatgacgtgttgagaaatggg

SEQ ID NO: 2403983 - DNA, 25 bp, Homo sapien
ctgataaggcaatgagagctatgat

SEQ ID NO: 2403984 - DNA, 25 bp, Homo sapien
acattcattacagcacacaggacag

SEQ ID NO: 2403985 - DNA, 25 bp, Homo sapien
aaggacccttcatgacgtgttgaga

SEQ ID NO: 2403986 - DNA, 25 bp, Homo sapien
ggagtcttaaaatgcggccccacaa

SEQ ID NO: 2403987 - DNA, 25 bp, Homo sapien
caagttcggagctctgtctggtttc

SEQ ID NO: 2403988 - DNA, 25 bp, Homo sapien
gaatcatcattggaagccgcctttg

SEQ ID NO: 2403989 - DNA, 25 bp, Homo sapien
tcggctcaacgagggagtaagcttt

SEQ ID NO: 2403990 - DNA, 25 bp, Homo sapien
cctgtgccgtaagtaatggctcgcc

SEQ ID NO: 2403991 - DNA, 25 bp, Homo sapien
taatagatcgctcttgctgacaagt

SEQ ID NO: 2403992 - DNA, 25 bp, Homo sapien
gataacgtccaaggatgactagggc

SEQ ID NO: 2403993 - DNA, 25 bp, Homo sapien
agcttgacttatctcctaggtgaca

SEQ ID NO: 2403994 - DNA, 25 bp, Homo sapien
gagagacaacacttcctggagaatg

SEQ ID NO: 2403995 - DNA, 25 bp, Homo sapien
gcccatttccagcaactagaggatg

SEQ ID NO: 2403996 - DNA, 25 bp, Homo sapien
taaggtacactgaaagcagacactg

SEQ ID NO: 2403997 - DNA, 25 bp, Homo sapien
catgagaacacaggataaggtacac

SEQ ID NO: 2403998 - DNA, 25 bp, Homo sapien
ccactctccggatgcaaagagctgt

SEQ ID NO: 2403999 - DNA, 25 bp, Homo sapien
gagctgttctctgctacgaaacaat

SEQ ID NO: 2404000 - DNA, 25 bp, Homo sapien
gatgcaaagagctgttctctgctac

SEQ ID NO: 2404001 - DNA, 25 bp, Homo sapien
gttctctgctacgaaacaattttca

SEQ ID NO: 2404002 - DNA, 25 bp, Homo sapien
tagttaatctcaggtcaagtcaagc

SEQ ID NO: 2404003 - DNA, 25 bp, Homo sapien
tctcaggtcaagtcaagctacagtg

SEQ ID NO: 2404004 - DNA, 25 bp, Homo sapien
gattccctagttaatctcaggtcaa

SEQ ID NO: 2404005 - DNA, 25 bp, Homo sapien
tcaagctacagtgaaagtctttgct

SEQ ID NO: 2404006 - DNA, 25 bp, Homo sapien
gaattagcttggaaggacactgagg

SEQ ID NO: 2404007 - DNA, 25 bp, Homo sapien
gatgattccctaccagtcttgacaa

SEQ ID NO: 2404008 - DNA, 25 bp, Homo sapien
caggcaaccttgatgtgatgattcc

SEQ ID NO: 2404009 - DNA, 25 bp, Homo sapien
tagatgtggaattcctctggcaggc

SEQ ID NO: 2404010 - DNA, 25 bp, Homo sapien
gatcacctggtggttcactaagatt

SEQ ID NO: 2404011 - DNA, 25 bp, Homo sapien
tcaccaagatcatgctcaaccagca

SEQ ID NO: 2404012 - DNA, 25 bp, Homo sapien
cagacagcagcctcatccagctctt

SEQ ID NO: 2404013 - DNA, 25 bp, Homo sapien
gaaacctcaagtttagtctcaggat

SEQ ID NO: 2404014 - DNA, 25 bp, Homo sapien
gaaaagaagagtcagcgaaggggag

SEQ ID NO: 2404015 - DNA, 25 bp, Homo sapien
cgaaggggagataggggtgaggccg

SEQ ID NO: 2404016 - DNA, 25 bp, Homo sapien
aaagaagagtcagcgaaggggagat

SEQ ID NO: 2404017 - DNA, 25 bp, Homo sapien
ccgaaaagaagagtcagcgaagggg

SEQ ID NO: 2404018 - DNA, 25 bp, Homo sapien
tagcaactaggtttgtagagaatta

SEQ ID NO: 2404019 - DNA, 25 bp, Homo sapien
ggcctgtctaccctgttttagttgc

SEQ ID NO: 2404020 - DNA, 25 bp, Homo sapien
ttctgattggtgtgtgacagtggtg

SEQ ID NO: 2404021 - DNA, 25 bp, Homo sapien
caggtagttttagcaactaggtttg

SEQ ID NO: 2404022 - DNA, 25 bp, Homo sapien
ttgggtaaagccagttagcaaacac

SEQ ID NO: 2404023 - DNA, 25 bp, Homo sapien
tcctgtctaagtgctatgtctgtcc

SEQ ID NO: 2404024 - DNA, 25 bp, Homo sapien
tccatattgggtcatgaaagtcctg

SEQ ID NO: 2404025 - DNA, 25 bp, Homo sapien
tatgtgtagcctgacacgtaagcag

SEQ ID NO: 2404026 - DNA, 25 bp, Homo sapien
tttgctggttttacacttaataatg

SEQ ID NO: 2404027 - DNA, 25 bp, Homo sapien
ttgctggttttacacttaataatgt

SEQ ID NO: 2404028 - DNA, 25 bp, Homo sapien
catcatcgctgaggtaggcacatcc

SEQ ID NO: 2404029 - DNA, 25 bp, Homo sapien
gctgttgctgcaccatcatcgctga

SEQ ID NO: 2404030 - DNA, 25 bp, Homo sapien
ttcggtgtaacatctagctgttgct

SEQ ID NO: 2404031 - DNA, 25 bp, Homo sapien
tttctttcggtgtaacatctagctg

SEQ ID NO: 2404032 - DNA, 25 bp, Homo sapien
tgagatacctataccaatttggatc

SEQ ID NO: 2404033 - DNA, 25 bp, Homo sapien
caaggtgtactatggcacagttctc

SEQ ID NO: 2404034 - DNA, 25 bp, Homo sapien
cagttctctcttgctagtgttgaga

SEQ ID NO: 2404035 - DNA, 25 bp, Homo sapien
ttgtctaaagtgctgcaaggtgtac

SEQ ID NO: 2404036 - DNA, 25 bp, Homo sapien
taatgctaaagatatgaagtccagg

SEQ ID NO: 2404037 - DNA, 25 bp, Homo sapien
tgactgagagtcaccatttgggatg

SEQ ID NO: 2404038 - DNA, 25 bp, Homo sapien
tcttgggctctagagaaatttagct

SEQ ID NO: 2404039 - DNA, 25 bp, Homo sapien
ttcaaaatagccaactaggagatct

SEQ ID NO: 2404040 - DNA, 25 bp, Homo sapien
catcttcagtccaatccagtgatca

SEQ ID NO: 2404041 - DNA, 25 bp, Homo sapien
tccatctacccattgtcctgttcga

SEQ ID NO: 2404042 - DNA, 25 bp, Homo sapien
ttgccatcttcagtccaatccagtg

SEQ ID NO: 2404043 - DNA, 25 bp, Homo sapien
cctgttcgattttttgccatcttca

SEQ ID NO: 2404044 - DNA, 25 bp, Homo sapien
ctcctggcctcactagaaaatagct

SEQ ID NO: 2404045 - DNA, 25 bp, Homo sapien
tgcaaggcaacaattgttcaactcc

SEQ ID NO: 2404046 - DNA, 25 bp, Homo sapien
caagtttgaaattgagctctcgcac

SEQ ID NO: 2404047 - DNA, 25 bp, Homo sapien
tactgtgtacctcttgtttcgtagg

SEQ ID NO: 2404048 - DNA, 25 bp, Homo sapien
gagaaatataaaggaggtaggccag

SEQ ID NO: 2404049 - DNA, 25 bp, Homo sapien
tcaaatcctatctaccccaacagtg

SEQ ID NO: 2404050 - DNA, 25 bp, Homo sapien
ggtaggccagatcacaccactatgg

SEQ ID NO: 2404051 - DNA, 25 bp, Homo sapien
aagtccttgaggctactctgctact

SEQ ID NO: 2404052 - DNA, 25 bp, Homo sapien
aaggaacagtcagagtgtttctcag

SEQ ID NO: 2404053 - DNA, 25 bp, Homo sapien
tcagcagtgacgttattgactacag

SEQ ID NO: 2404054 - DNA, 25 bp, Homo sapien
caaacagtacaagcattcttccctg

SEQ ID NO: 2404055 - DNA, 25 bp, Homo sapien
ttttccatctcactgctagtttagc

SEQ ID NO: 2404056 - DNA, 25 bp, Homo sapien
tgaaaacttacactccggtctagga

SEQ ID NO: 2404057 - DNA, 25 bp, Homo sapien
gaagacatggtatctgctcactgaa

SEQ ID NO: 2404058 - DNA, 25 bp, Homo sapien
ttctaatggaagctgccacgggacc

SEQ ID NO: 2404059 - DNA, 25 bp, Homo sapien
tcaggaagtagaatgcagaatcccc

SEQ ID NO: 2404060 - DNA, 25 bp, Homo sapien
gcataaactctgagaatctcgagtt

SEQ ID NO: 2404061 - DNA, 25 bp, Homo sapien
aattatagttaggtcggcatgttga

SEQ ID NO: 2404062 - DNA, 25 bp, Homo sapien
tttggaaaccaatccaatcataggg

SEQ ID NO: 2404063 - DNA, 25 bp, Homo sapien
gagtggaacagttgtatttacttga

SEQ ID NO: 2404064 - DNA, 25 bp, Homo sapien
tcagaaaaacgtcaattaaagccca

SEQ ID NO: 2404065 - DNA, 25 bp, Homo sapien
gacatgacacagagggtaaacttca

SEQ ID NO: 2404066 - DNA, 25 bp, Homo sapien
catggcatggagcaattggaattct

SEQ ID NO: 2404067 - DNA, 25 bp, Homo sapien
tcgggtaacaacatgcactcactgg

SEQ ID NO: 2404068 - DNA, 25 bp, Homo sapien
ctatcagagtaataatattagttgt

SEQ ID NO: 2404069 - DNA, 25 bp, Homo sapien
tcagagtaataatattagttgttat

SEQ ID NO: 2404070 - DNA, 25 bp, Homo sapien
tatcagagtaataatattagttgtt

SEQ ID NO: 2404071 - DNA, 25 bp, Homo sapien
tgttattaaaacaccaacaattata

SEQ ID NO: 2404072 - DNA, 25 bp, Homo sapien
tatttgaaggaggtagtcagaccat

SEQ ID NO: 2404073 - DNA, 25 bp, Homo sapien
cctaagctgcttaaatcaatggcct

SEQ ID NO: 2404074 - DNA, 25 bp, Homo sapien
cagatacagcggaaaataggagccc

SEQ ID NO: 2404075 - DNA, 25 bp, Homo sapien
gaaataacttcgagctaacaggtag

SEQ ID NO: 2404076 - DNA, 25 bp, Homo sapien
tgtgtcatgtcttgcagaaactctc

SEQ ID NO: 2404077 - DNA, 25 bp, Homo sapien
cagctttgtgtcatgtcttgcagaa

SEQ ID NO: 2404078 - DNA, 25 bp, Homo sapien
actctcttcaaagttgtaactttat

SEQ ID NO: 2404079 - DNA, 25 bp, Homo sapien
tctgctagcagctttgtgtcatgtc

SEQ ID NO: 2404080 - DNA, 25 bp, Homo sapien
tacagcacagctccaaactagaggt

SEQ ID NO: 2404081 - DNA, 25 bp, Homo sapien
caaatgcgtgcaaagtcacacgtgt

SEQ ID NO: 2404082 - DNA, 25 bp, Homo sapien
tgcaaactggaagtaaccatgtgac

SEQ ID NO: 2404083 - DNA, 25 bp, Homo sapien
ccagaactgtaggagaggctgatac

SEQ ID NO: 2404084 - DNA, 25 bp, Homo sapien
tctaaaggtaggaatactgctcccc

SEQ ID NO: 2404085 - DNA, 25 bp, Homo sapien
gaatgaagatgggtatatgacgctg

SEQ ID NO: 2404086 - DNA, 25 bp, Homo sapien
tgtgccaaagagacatatccaaggt

SEQ ID NO: 2404087 - DNA, 25 bp, Homo sapien
caagaatcgttgtaaatcgaagcag

SEQ ID NO: 2404088 - DNA, 25 bp, Homo sapien
ccgcatttaaaatttcattattctt

SEQ ID NO: 2404089 - DNA, 25 bp, Homo sapien
caccgcatttaaaatttcattattc

SEQ ID NO: 2404090 - DNA, 25 bp, Homo sapien
accgcatttaaaatttcattattct

SEQ ID NO: 2404091 - DNA, 25 bp, Homo sapien
gacgattttcaattaagtagaagtc

SEQ ID NO: 2404092 - DNA, 25 bp, Homo sapien
catatttgcttgaacagcagaaata

SEQ ID NO: 2404093 - DNA, 25 bp, Homo sapien
ccatatttgcttgaacagcagaaat

SEQ ID NO: 2404094 - DNA, 25 bp, Homo sapien
ttttgacgattttcaattaagtaga

SEQ ID NO: 2404095 - DNA, 25 bp, Homo sapien
aaagaggaggatgaattgctctgaa

SEQ ID NO: 2404096 - DNA, 25 bp, Homo sapien
aaatttatagcctattaactgtgaa

SEQ ID NO: 2404097 - DNA, 25 bp, Homo sapien
ggatgaattgctctgaattgataaa

SEQ ID NO: 2404098 - DNA, 25 bp, Homo sapien
gccgttatattaaggataaggatga

SEQ ID NO: 2404099 - DNA, 25 bp, Homo sapien
aagaagccattgtcggaggctccag

SEQ ID NO: 2404100 - DNA, 25 bp, Homo sapien
caaagtgttcagcaatggtccgtca

SEQ ID NO: 2404101 - DNA, 25 bp, Homo sapien
cacttggcaatggatcagggcagac

SEQ ID NO: 2404102 - DNA, 25 bp, Homo sapien
aaattcatctgggactcctctcggg

SEQ ID NO: 2404103 - DNA, 25 bp, Homo sapien
aacgggatgatttaggcctctggcc

SEQ ID NO: 2404104 - DNA, 25 bp, Homo sapien
actccatcagcactcaagaaagcaa

SEQ ID NO: 2404105 - DNA, 25 bp, Homo sapien
ctccatcagcactcaagaaagcaaa

SEQ ID NO: 2404106 - DNA, 25 bp, Homo sapien
tctggaactatggactccatcagca

SEQ ID NO: 2404107 - DNA, 25 bp, Homo sapien
tggaactatggactccatcagcact

SEQ ID NO: 2404108 - DNA, 25 bp, Homo sapien
tccaatccagtgcatatcagttcct

SEQ ID NO: 2404109 - DNA, 25 bp, Homo sapien
tccttgtttcctgcttagtccaatc

SEQ ID NO: 2404110 - DNA, 25 bp, Homo sapien
catatcagttcctgcgtacctcttc

SEQ ID NO: 2404111 - DNA, 25 bp, Homo sapien
ttcctgcgtacctcttcaaaaattc

SEQ ID NO: 2404112 - DNA, 25 bp, Homo sapien
gaaacacttatctctcactccaagc

SEQ ID NO: 2404113 - DNA, 25 bp, Homo sapien
tactggctgtccaatttctggtatc

SEQ ID NO: 2404114 - DNA, 25 bp, Homo sapien
tgtgtatcaatctgagcaagttctg

SEQ ID NO: 2404115 - DNA, 25 bp, Homo sapien
tgtccaatttctggtatcatcagaa

SEQ ID NO: 2404116 - DNA, 25 bp, Homo sapien
acaggtttagcatgcttggaccatg

SEQ ID NO: 2404117 - DNA, 25 bp, Homo sapien
ggtttagcatgcttggaccatgtgg

SEQ ID NO: 2404118 - DNA, 25 bp, Homo sapien
cacaggtttagcatgcttggaccat

SEQ ID NO: 2404119 - DNA, 25 bp, Homo sapien
caggtttagcatgcttggaccatgt

SEQ ID NO: 2404120 - DNA, 25 bp, Homo sapien
tcaggaagcacataaggccaatctt

SEQ ID NO: 2404121 - DNA, 25 bp, Homo sapien
cttccagttttgtatcaacttggga

SEQ ID NO: 2404122 - DNA, 25 bp, Homo sapien
gcacataaggccaatcttccagttt

SEQ ID NO: 2404123 - DNA, 25 bp, Homo sapien
taataataatactcaggaagcacat

SEQ ID NO: 2404124 - DNA, 25 bp, Homo sapien
tatccgatgtatgaagccatcagct

SEQ ID NO: 2404125 - DNA, 25 bp, Homo sapien
agctctgccatcccgcagctctgga

SEQ ID NO: 2404126 - DNA, 25 bp, Homo sapien
cagctctgccatcccgcagctctgg

SEQ ID NO: 2404127 - DNA, 25 bp, Homo sapien
ctatccgatgtatgaagccatcagc

SEQ ID NO: 2404128 - DNA, 25 bp, Homo sapien
gtttgtgggaatccggagaactctc

SEQ ID NO: 2404129 - DNA, 25 bp, Homo sapien
tctgagacccgtgtaagtattagct

SEQ ID NO: 2404130 - DNA, 25 bp, Homo sapien
tagctggaatctaaaccccataggt

SEQ ID NO: 2404131 - DNA, 25 bp, Homo sapien
tgatttcttcaagtcaccagggctt

SEQ ID NO: 2404132 - DNA, 25 bp, Homo sapien
tactggacctcctgagaaataactg

SEQ ID NO: 2404133 - DNA, 25 bp, Homo sapien
tagcccggtttctaaaacacgtgca

SEQ ID NO: 2404134 - DNA, 25 bp, Homo sapien
gcacagcctcgaaaatagaacgtaa

SEQ ID NO: 2404135 - DNA, 25 bp, Homo sapien
gcaggaagaaaaggacactatgtga

SEQ ID NO: 2404136 - DNA, 25 bp, Homo sapien
catctgcccacatccacgttttgtt

SEQ ID NO: 2404137 - DNA, 25 bp, Homo sapien
aaccaatataaagacggccccagat

SEQ ID NO: 2404138 - DNA, 25 bp, Homo sapien
agacggccccagataatgcatcaaa

SEQ ID NO: 2404139 - DNA, 25 bp, Homo sapien
gtttgcattgtgcttgctcagttca

SEQ ID NO: 2404140 - DNA, 25 bp, Homo sapien
tcagccattgatccacgttgtttca

SEQ ID NO: 2404141 - DNA, 25 bp, Homo sapien
gcctggccagagatccataacttct

SEQ ID NO: 2404142 - DNA, 25 bp, Homo sapien
tcattctgagagttgagcctggcca

SEQ ID NO: 2404143 - DNA, 25 bp, Homo sapien
ccagccttgtggacacatagtcaaa

SEQ ID NO: 2404144 - DNA, 25 bp, Homo sapien
tcaactggcaatatggttctatata

SEQ ID NO: 2404145 - DNA, 25 bp, Homo sapien
ctggcaatatggttctatatagttg

SEQ ID NO: 2404146 - DNA, 25 bp, Homo sapien
caactggcaatatggttctatatag

SEQ ID NO: 2404147 - DNA, 25 bp, Homo sapien
caatatggttctatatagttgagac

SEQ ID NO: 2404148 - DNA, 25 bp, Homo sapien
gcagcactgtgcctaaagcttgata

SEQ ID NO: 2404149 - DNA, 25 bp, Homo sapien
ttccaggagtctaggcagagtgtag

SEQ ID NO: 2404150 - DNA, 25 bp, Homo sapien
gatctttgataaacgcctacttgag

SEQ ID NO: 2404151 - DNA, 25 bp, Homo sapien
tgttatatcatcagcaggcagcact

SEQ ID NO: 2404152 - DNA, 25 bp, Homo sapien
aagcaatgcctccacatataaaaat

SEQ ID NO: 2404153 - DNA, 25 bp, Homo sapien
aaagcaatgcctccacatataaaaa

SEQ ID NO: 2404154 - DNA, 25 bp, Homo sapien
cacaacctccgtcccatccttactc

SEQ ID NO: 2404155 - DNA, 25 bp, Homo sapien
ccacaacctccgtcccatccttact

SEQ ID NO: 2404156 - DNA, 25 bp, Homo sapien
acaacctccgtcccatccttactct

SEQ ID NO: 2404157 - DNA, 25 bp, Homo sapien
cagaggctggaataatcctgcgggt

SEQ ID NO: 2404158 - DNA, 25 bp, Homo sapien
cagtaggagaaacagcacagcaacc

SEQ ID NO: 2404159 - DNA, 25 bp, Homo sapien
tcctgcgggtgaattgcaaattgct

SEQ ID NO: 2404160 - DNA, 25 bp, Homo sapien
gagtgcaaaccgcaggaaactgacg

SEQ ID NO: 2404161 - DNA, 25 bp, Homo sapien
tgccccggcagcgatgactctacag

SEQ ID NO: 2404162 - DNA, 25 bp, Homo sapien
agccgggcatgcaccaacggtgcct

SEQ ID NO: 2404163 - DNA, 25 bp, Homo sapien
tctctgacgtttgtacgaggcaggg

SEQ ID NO: 2404164 - DNA, 25 bp, Homo sapien
gactctacagcccatgatttccgca

SEQ ID NO: 2404165 - DNA, 25 bp, Homo sapien
tgctatgcggaataagccagtcgca

SEQ ID NO: 2404166 - DNA, 25 bp, Homo sapien
gggattgactccagcctacccagat

SEQ ID NO: 2404167 - DNA, 25 bp, Homo sapien
tcaatactgtgctagactggaccta

SEQ ID NO: 2404168 - DNA, 25 bp, Homo sapien
taaagcaaccctggtgtccatcgat

SEQ ID NO: 2404169 - DNA, 25 bp, Homo sapien
ttgaactagcccaacaaacagggag

SEQ ID NO: 2404170 - DNA, 25 bp, Homo sapien
gataccgacagtgggaatggctcct

SEQ ID NO: 2404171 - DNA, 25 bp, Homo sapien
gagaatttccgcaaccctaagcagc

SEQ ID NO: 2404172 - DNA, 25 bp, Homo sapien
tctgtgcaatgagtaacgggaccta

SEQ ID NO: 2404173 - DNA, 25 bp, Homo sapien
tgaggagtgtctccgcctggccacc

SEQ ID NO: 2404174 - DNA, 25 bp, Homo sapien
gtgtctccgcctggccacccatcgt

SEQ ID NO: 2404175 - DNA, 25 bp, Homo sapien
ggagtgtctccgcctggccacccat

SEQ ID NO: 2404176 - DNA, 25 bp, Homo sapien
agtgaggagtgtctccgcctggcca

SEQ ID NO: 2404177 - DNA, 25 bp, Homo sapien
gcgtctccgcccagcagccaccccg

SEQ ID NO: 2404178 - DNA, 25 bp, Homo sapien
ctctccgcccggcagccaccccatc

SEQ ID NO: 2404179 - DNA, 25 bp, Homo sapien
tgcctggcaaccaccccgtctgaga

SEQ ID NO: 2404180 - DNA, 25 bp, Homo sapien
tctgcctggcaaccaccccgtctga

SEQ ID NO: 2404181 - DNA, 25 bp, Homo sapien
cccccgcctggccagccatgccgtc

SEQ ID NO: 2404182 - DNA, 25 bp, Homo sapien
ccaccccgtctgggacggagatggg

SEQ ID NO: 2404183 - DNA, 25 bp, Homo sapien
cgtctgggacggagatggggggtca

SEQ ID NO: 2404184 - DNA, 25 bp, Homo sapien
cctggccagccatgccgtccgggag

SEQ ID NO: 2404185 - DNA, 25 bp, Homo sapien
tatcaaaacaccaattgacaagcca

SEQ ID NO: 2404186 - DNA, 25 bp, Homo sapien
gaataaagccaatcctagtcatagc

SEQ ID NO: 2404187 - DNA, 25 bp, Homo sapien
catagcattgcaacttgtatcagat

SEQ ID NO: 2404188 - DNA, 25 bp, Homo sapien
ggtttaccgcttatattctgtgtga

SEQ ID NO: 2404189 - DNA, 25 bp, Homo sapien
tgcatactcatcacattgggccata

SEQ ID NO: 2404190 - DNA, 25 bp, Homo sapien
tcaactgtgttgaggtgccaccaca

SEQ ID NO: 2404191 - DNA, 25 bp, Homo sapien
gagtttaggcactcagatccctgca

SEQ ID NO: 2404192 - DNA, 25 bp, Homo sapien
gtatatacttttagcaggagacagc

SEQ ID NO: 2404193 - DNA, 25 bp, Homo sapien
aattttgtcccacagcgttgctagg

SEQ ID NO: 2404194 - DNA, 25 bp, Homo sapien
caattgattgttctaggccaggtaa

SEQ ID NO: 2404195 - DNA, 25 bp, Homo sapien
gggtccatcctatacttccatggga

SEQ ID NO: 2404196 - DNA, 25 bp, Homo sapien
tggctgaaggccttatgagtcaaag

SEQ ID NO: 2404197 - DNA, 25 bp, Homo sapien
tgggatgccaaaatgacggagagcc

SEQ ID NO: 2404198 - DNA, 25 bp, Homo sapien
gacacataatcgtttagaaagcaac

SEQ ID NO: 2404199 - DNA, 25 bp, Homo sapien
ggagagccacatctctgatcttcaa

SEQ ID NO: 2404200 - DNA, 25 bp, Homo sapien
ctcagtgaaatacagatcccggccc

SEQ ID NO: 2404201 - DNA, 25 bp, Homo sapien
ccaaagccagatagagagtaagttc

SEQ ID NO: 2404202 - DNA, 25 bp, Homo sapien
tcaagtgtctttcagtgttagcgca

SEQ ID NO: 2404203 - DNA, 25 bp, Homo sapien
tgtgtcgtgatgctggtaaaaaccc

SEQ ID NO: 2404204 - DNA, 25 bp, Homo sapien
aatgaggtggtctgatctgtgctac

SEQ ID NO: 2404205 - DNA, 25 bp, Homo sapien
gtgttatcctgtccacctctttgca

SEQ ID NO: 2404206 - DNA, 25 bp, Homo sapien
tatctgtgttatcctgtccacctct

SEQ ID NO: 2404207 - DNA, 25 bp, Homo sapien
aaagcccttatctgtgttatcctgt

SEQ ID NO: 2404208 - DNA, 25 bp, Homo sapien
gcccttatctgtgttatcctgtcca

SEQ ID NO: 2404209 - DNA, 25 bp, Homo sapien
tttcccattatgaaaataagcacaa

SEQ ID NO: 2404210 - DNA, 25 bp, Homo sapien
acagaaggtagggtgcattttccca

SEQ ID NO: 2404211 - DNA, 25 bp, Homo sapien
cagccttcctctcacacattaaata

SEQ ID NO: 2404212 - DNA, 25 bp, Homo sapien
taaggtagttggtccaccttggtca

SEQ ID NO: 2404213 - DNA, 25 bp, Homo sapien
aactgagcaaacaatcagtaatcag

SEQ ID NO: 2404214 - DNA, 25 bp, Homo sapien
tgatgcaccaaatagagactgagga

SEQ ID NO: 2404215 - DNA, 25 bp, Homo sapien
tcagactctgcgtatagtagtttga

SEQ ID NO: 2404216 - DNA, 25 bp, Homo sapien
gcaaacaatcagtaatcagactctg

SEQ ID NO: 2404217 - DNA, 25 bp, Homo sapien
tttagcataaaattaggagcaaggg

SEQ ID NO: 2404218 - DNA, 25 bp, Homo sapien
cctgcttggcagtacaagatatgca

SEQ ID NO: 2404219 - DNA, 25 bp, Homo sapien
taaaaagcccaatatcaatttcatt

SEQ ID NO: 2404220 - DNA, 25 bp, Homo sapien
caagggaacagtaggtacaatagga

SEQ ID NO: 2404221 - DNA, 25 bp, Homo sapien
atggagatggctccaaaataatggg

SEQ ID NO: 2404222 - DNA, 25 bp, Homo sapien
tgatggagatggctccaaaataatg

SEQ ID NO: 2404223 - DNA, 25 bp, Homo sapien
agaagtgatggagatggctccaaaa

SEQ ID NO: 2404224 - DNA, 25 bp, Homo sapien
gaagaagtgatggagatggctccaa

SEQ ID NO: 2404225 - DNA, 25 bp, Homo sapien
caacgaattaaatgagtcctggctt

SEQ ID NO: 2404226 - DNA, 25 bp, Homo sapien
tattttctgagataaccgagccatc

SEQ ID NO: 2404227 - DNA, 25 bp, Homo sapien
gcgagataatccgacccaacgaatt

SEQ ID NO: 2404228 - DNA, 25 bp, Homo sapien
tcattcgacttctggcgagataatc

SEQ ID NO: 2404229 - DNA, 25 bp, Homo sapien
ctgcttactctcttcccatgttaag

SEQ ID NO: 2404230 - DNA, 25 bp, Homo sapien
tatctccataatatctccagtttgt

SEQ ID NO: 2404231 - DNA, 25 bp, Homo sapien
aatatctccagtttgtgtcacaggg

SEQ ID NO: 2404232 - DNA, 25 bp, Homo sapien
catgttaagttgtgcctgaagaacc

SEQ ID NO: 2404233 - DNA, 25 bp, Homo sapien
gattgttttaccacatattgacaga

SEQ ID NO: 2404234 - DNA, 25 bp, Homo sapien
gaagcgctttgctaattgttgcaga

SEQ ID NO: 2404235 - DNA, 25 bp, Homo sapien
tgaaagtgccctttagttctgattg

SEQ ID NO: 2404236 - DNA, 25 bp, Homo sapien
cagagttcctgtgcgattttcattc

SEQ ID NO: 2404237 - DNA, 25 bp, Homo sapien
aatcaaagccatcacacgccaccag

SEQ ID NO: 2404238 - DNA, 25 bp, Homo sapien
tcaaagccatcacacgccaccagga

SEQ ID NO: 2404239 - DNA, 25 bp, Homo sapien
agaatcaaagccatcacacgccacc

SEQ ID NO: 2404240 - DNA, 25 bp, Homo sapien
aaagccatcacacgccaccaggagg

SEQ ID NO: 2404241 - DNA, 25 bp, Homo sapien
gatgagagctggtttccgagtttta

SEQ ID NO: 2404242 - DNA, 25 bp, Homo sapien
tgagagctggtttccgagttttaat

SEQ ID NO: 2404243 - DNA, 25 bp, Homo sapien
tttaaggtgatgtatccatcttcat

SEQ ID NO: 2404244 - DNA, 25 bp, Homo sapien
agagctggtttccgagttttaatat

SEQ ID NO: 2404245 - DNA, 25 bp, Homo sapien
gatcttcctgtctttagtagggtag

SEQ ID NO: 2404246 - DNA, 25 bp, Homo sapien
ggtagaaccatgtgagatgggacac

SEQ ID NO: 2404247 - DNA, 25 bp, Homo sapien
ggcttcccgagtactgcaactgagc

SEQ ID NO: 2404248 - DNA, 25 bp, Homo sapien
gagctcagagttcaatgactttgca

SEQ ID NO: 2404249 - DNA, 25 bp, Homo sapien
ttctgctggagcaaggaataaccga

SEQ ID NO: 2404250 - DNA, 25 bp, Homo sapien
gagcaaggaataaccgagatggaaa

SEQ ID NO: 2404251 - DNA, 25 bp, Homo sapien
gattctgctggagcaaggaataacc

SEQ ID NO: 2404252 - DNA, 25 bp, Homo sapien
caaggaataaccgagatggaaataa

SEQ ID NO: 2404253 - DNA, 25 bp, Homo sapien
tgtggcgctcacgtaaaactttttc

SEQ ID NO: 2404254 - DNA, 25 bp, Homo sapien
ggctgggattatcatgggactcctc

SEQ ID NO: 2404255 - DNA, 25 bp, Homo sapien
cctaagatgtggcaatggtaccaaa

SEQ ID NO: 2404256 - DNA, 25 bp, Homo sapien
taactctgcaaactggaatgtggcg

SEQ ID NO: 2404257 - DNA, 25 bp, Homo sapien
gacaatattccatgacaccaccacg

SEQ ID NO: 2404258 - DNA, 25 bp, Homo sapien
taagccaaatcgtccatgatgctgc

SEQ ID NO: 2404259 - DNA, 25 bp, Homo sapien
gatatgccatgtgataaccccagcc

SEQ ID NO: 2404260 - DNA, 25 bp, Homo sapien
catgatgaaatgtaaccgaaattga

SEQ ID NO: 2404261 - DNA, 25 bp, Homo sapien
actgtcaagtttaccgggccgcgag

SEQ ID NO: 2404262 - DNA, 25 bp, Homo sapien
agtttaccgggccgcgagggtgcag

SEQ ID NO: 2404263 - DNA, 25 bp, Homo sapien
ctgtcaagtttaccgggccgcgagg

SEQ ID NO: 2404264 - DNA, 25 bp, Homo sapien
agaggagttacttgttccagcctcc

SEQ ID NO: 2404265 - DNA, 25 bp, Homo sapien
catctgctacattttggaaaccgga

SEQ ID NO: 2404266 - DNA, 25 bp, Homo sapien
tcctataccaaatgcaagtgcgttc

SEQ ID NO: 2404267 - DNA, 25 bp, Homo sapien
cactttctgaatgaaggtgcatcta

SEQ ID NO: 2404268 - DNA, 25 bp, Homo sapien
tggaactgagttcaaatatgcatgt

SEQ ID NO: 2404269 - DNA, 25 bp, Homo sapien
tttgcatgtctatgtactgatatgg

SEQ ID NO: 2404270 - DNA, 25 bp, Homo sapien
gggagagagcgagttttatattcat

SEQ ID NO: 2404271 - DNA, 25 bp, Homo sapien
gagacattttgttccacgtcttttg

SEQ ID NO: 2404272 - DNA, 25 bp, Homo sapien
tgtccaaacaattggattcagaaca

SEQ ID NO: 2404273 - DNA, 25 bp, Homo sapien
gttccacgctgctacaaatagagag

SEQ ID NO: 2404274 - DNA, 25 bp, Homo sapien
aaatttggagcatttggcacaccag

SEQ ID NO: 2404275 - DNA, 25 bp, Homo sapien
ggcacaccagtcaagagaattgttt

SEQ ID NO: 2404276 - DNA, 25 bp, Homo sapien
gaatcaggtgccttcatattttgaa

SEQ ID NO: 2404277 - DNA, 25 bp, Homo sapien
cacattaagcttttcagatggcagt

SEQ ID NO: 2404278 - DNA, 25 bp, Homo sapien
tacaggcggctaattgggattaaag

SEQ ID NO: 2404279 - DNA, 25 bp, Homo sapien
gcagcatgataatgttacaggcggc

SEQ ID NO: 2404280 - DNA, 25 bp, Homo sapien
aaaaacctaattctctgagtcactg

SEQ ID NO: 2404281 - DNA, 25 bp, Homo sapien
tgtgtaaggatgagaagagcatgtt

SEQ ID NO: 2404282 - DNA, 25 bp, Homo sapien
taaatatcctcttacctaaatgtcc

SEQ ID NO: 2404283 - DNA, 25 bp, Homo sapien
tcttcctaagcataaaggcatcact

SEQ ID NO: 2404284 - DNA, 25 bp, Homo sapien
tagaatttatctacagcgcagctga

SEQ ID NO: 2404285 - DNA, 25 bp, Homo sapien
tattgtgtaccggagatctcagctc

SEQ ID NO: 2404286 - DNA, 25 bp, Homo sapien
cccaaatattaaagctggcccagag

SEQ ID NO: 2404287 - DNA, 25 bp, Homo sapien
gcagcgatgctactttccacacaga

SEQ ID NO: 2404288 - DNA, 25 bp, Homo sapien
aagtgacactatcccttagtcccag

SEQ ID NO: 2404289 - DNA, 25 bp, Homo sapien
cataacaattgcttaactgcaggct

SEQ ID NO: 2404290 - DNA, 25 bp, Homo sapien
tgagctagactgcagccacatagga

SEQ ID NO: 2404291 - DNA, 25 bp, Homo sapien
cacataggatgctaggagtcaaaac

SEQ ID NO: 2404292 - DNA, 25 bp, Homo sapien
caaccatgtgttgatgccataagct

SEQ ID NO: 2404293 - DNA, 25 bp, Homo sapien
gacctgactggaaatcatgtgcact

SEQ ID NO: 2404294 - DNA, 25 bp, Homo sapien
tcaagaaagaagtgcctcacaaagg

SEQ ID NO: 2404295 - DNA, 25 bp, Homo sapien
aacagaacttgctcgaccctgaaga

SEQ ID NO: 2404296 - DNA, 25 bp, Homo sapien
ggaactgaaactattacaggtgcag

SEQ ID NO: 2404297 - DNA, 25 bp, Homo sapien
ttattattattaaatcttcagtacc

SEQ ID NO: 2404298 - DNA, 25 bp, Homo sapien
tataaatatgggtcaatggaagaaa

SEQ ID NO: 2404299 - DNA, 25 bp, Homo sapien
gaaactattacaggtgcagatgaag

SEQ ID NO: 2404300 - DNA, 25 bp, Homo sapien
tagttctgatatgaaacggagatgg

SEQ ID NO: 2404301 - DNA, 25 bp, Homo sapien
tcggggacggtagttctgatatgaa

SEQ ID NO: 2404302 - DNA, 25 bp, Homo sapien
ctctctgaagggaatatcggggacg

SEQ ID NO: 2404303 - DNA, 25 bp, Homo sapien
cggtagttctgatatgaaacggaga

SEQ ID NO: 2404304 - DNA, 25 bp, Homo sapien
tccaccaagtgtaaggaagacatga

SEQ ID NO: 2404305 - DNA, 25 bp, Homo sapien
taaatacgtgcataaacccaagctc

SEQ ID NO: 2404306 - DNA, 25 bp, Homo sapien
gaagtgactgccaatttctgatgga

SEQ ID NO: 2404307 - DNA, 25 bp, Homo sapien
caggaaacacgagaacccattttgt

SEQ ID NO: 2404308 - DNA, 25 bp, Homo sapien
ttctctcacagacacaacgcttcaa

SEQ ID NO: 2404309 - DNA, 25 bp, Homo sapien
tcgcctaatgtttcaggggggacat

SEQ ID NO: 2404310 - DNA, 25 bp, Homo sapien
agtcctttgagaagatcatcccatt

SEQ ID NO: 2404311 - DNA, 25 bp, Homo sapien
catcccattaaggatggccacacag

SEQ ID NO: 2404312 - DNA, 25 bp, Homo sapien
ttgccactgtcagggcgcaaaagcc

SEQ ID NO: 2404313 - DNA, 25 bp, Homo sapien
gccaggccttgccactgtcagggcg

SEQ ID NO: 2404314 - DNA, 25 bp, Homo sapien
gaaaggggttccatccatccacagc

SEQ ID NO: 2404315 - DNA, 25 bp, Homo sapien
agtgaaaggggttccatccatccac

SEQ ID NO: 2404316 - DNA, 25 bp, Homo sapien
gagtagaaaaactcagagtagctct

SEQ ID NO: 2404317 - DNA, 25 bp, Homo sapien
tcagagtagctctgagacgcggcaa

SEQ ID NO: 2404318 - DNA, 25 bp, Homo sapien
agtagctctgagacgcggcaaattc

SEQ ID NO: 2404319 - DNA, 25 bp, Homo sapien
taagagtagaaaaactcagagtagc

SEQ ID NO: 2404320 - DNA, 25 bp, Homo sapien
gctgtctttatagaactggtagcaa

SEQ ID NO: 2404321 - DNA, 25 bp, Homo sapien
agcatggtagagttttcactaaggc

SEQ ID NO: 2404322 - DNA, 25 bp, Homo sapien
actggtagcaattgtctccatgcca

SEQ ID NO: 2404323 - DNA, 25 bp, Homo sapien
cattgttctgtacaagggctgcacc

SEQ ID NO: 2404324 - DNA, 25 bp, Homo sapien
gcaactcttgggacgtatttcctaa

SEQ ID NO: 2404325 - DNA, 25 bp, Homo sapien
tcacgacagagtttttcagccacat

SEQ ID NO: 2404326 - DNA, 25 bp, Homo sapien
tgtcttgaccagtattggagagctg

SEQ ID NO: 2404327 - DNA, 25 bp, Homo sapien
gctttgttatacagctcacgacaga

SEQ ID NO: 2404328 - DNA, 25 bp, Homo sapien
aagtcagactggacagcttatttct

SEQ ID NO: 2404329 - DNA, 25 bp, Homo sapien
caagtcagactggacagcttatttc

SEQ ID NO: 2404330 - DNA, 25 bp, Homo sapien
ccaagtcagactggacagcttattt

SEQ ID NO: 2404331 - DNA, 25 bp, Homo sapien
agtcagactggacagcttatttcta

SEQ ID NO: 2404332 - DNA, 25 bp, Homo sapien
tcctcccccaggtcagagcgcagac

SEQ ID NO: 2404333 - DNA, 25 bp, Homo sapien
cttggaaccaggatcctcccccagg

SEQ ID NO: 2404334 - DNA, 25 bp, Homo sapien
gatcctcccccaggtcagagcgcag

SEQ ID NO: 2404335 - DNA, 25 bp, Homo sapien
ggaaccaggatcctcccccaggtca

SEQ ID NO: 2404336 - DNA, 25 bp, Homo sapien
ccacgttgaagagggagccctgtgc

SEQ ID NO: 2404337 - DNA, 25 bp, Homo sapien
cagggtcagggccactggtcgccac

SEQ ID NO: 2404338 - DNA, 25 bp, Homo sapien
cactggtcgccacgttgaagaggga

SEQ ID NO: 2404339 - DNA, 25 bp, Homo sapien
agggccactggtcgccacgttgaag

SEQ ID NO: 2404340 - DNA, 25 bp, Homo sapien
tgagtcgtgatcgtgccactctact

SEQ ID NO: 2404341 - DNA, 25 bp, Homo sapien
tgcagtgagtcgtgatcgtgccact

SEQ ID NO: 2404342 - DNA, 25 bp, Homo sapien
cagtgagtcgtgatcgtgccactct

SEQ ID NO: 2404343 - DNA, 25 bp, Homo sapien
agtgagtcgtgatcgtgccactcta

SEQ ID NO: 2404344 - DNA, 25 bp, Homo sapien
ccctcctccaactctacacctacgc

SEQ ID NO: 2404345 - DNA, 25 bp, Homo sapien
ctcctccaactctacacctacgcca

SEQ ID NO: 2404346 - DNA, 25 bp, Homo sapien
cctcctccaactctacacctacgcc

SEQ ID NO: 2404347 - DNA, 25 bp, Homo sapien
tcgtgctgctgtacttggcctgcat

SEQ ID NO: 2404348 - DNA, 25 bp, Homo sapien
ttgtggcagagccttgagaatgcag

SEQ ID NO: 2404349 - DNA, 25 bp, Homo sapien
atgccgagttgtggcagagccttga

SEQ ID NO: 2404350 - DNA, 25 bp, Homo sapien
gcaggctcatggtggtgtccccatc

SEQ ID NO: 2404351 - DNA, 25 bp, Homo sapien
ctacagcggtgagagtgaaatgtgg

SEQ ID NO: 2404352 - DNA, 25 bp, Homo sapien
aaatgtggtcggattgccctgggcc

SEQ ID NO: 2404353 - DNA, 25 bp, Homo sapien
gagtgaaatgtggtcggattgccct

SEQ ID NO: 2404354 - DNA, 25 bp, Homo sapien
ttgccctgggccgccgggctactgt

SEQ ID NO: 2404355 - DNA, 25 bp, Homo sapien
actaaaaggcattcctaatgttctt

SEQ ID NO: 2404356 - DNA, 25 bp, Homo sapien
aaggcactaaaaggcattcctaatg

SEQ ID NO: 2404357 - DNA, 25 bp, Homo sapien
ggcactaaaaggcattcctaatgtt

SEQ ID NO: 2404358 - DNA, 25 bp, Homo sapien
gcactaaaaggcattcctaatgttc

SEQ ID NO: 2404359 - DNA, 25 bp, Homo sapien
cagagtctgcagaataataataact

SEQ ID NO: 2404360 - DNA, 25 bp, Homo sapien
agagtctgcagaataataataactt

SEQ ID NO: 2404361 - DNA, 25 bp, Homo sapien
tcagagtctgcagaataataataac

SEQ ID NO: 2404362 - DNA, 25 bp, Homo sapien
tacttgttccaatgaggttggttac

SEQ ID NO: 2404363 - DNA, 25 bp, Homo sapien
tcctatgagagcagtttccctacaa

SEQ ID NO: 2404364 - DNA, 25 bp, Homo sapien
tcagcacatgaggaaatatagtttc

SEQ ID NO: 2404365 - DNA, 25 bp, Homo sapien
aatgcctccctagtaatacagaaat

SEQ ID NO: 2404366 - DNA, 25 bp, Homo sapien
agattcgcttatggcttacccaagg

SEQ ID NO: 2404367 - DNA, 25 bp, Homo sapien
ggcaacacaccgtgcacttcaatgg

SEQ ID NO: 2404368 - DNA, 25 bp, Homo sapien
tcgggactaccctgaccgacatgga

SEQ ID NO: 2404369 - DNA, 25 bp, Homo sapien
cccaaggtaaatgccaagtcaatgg

SEQ ID NO: 2404370 - DNA, 25 bp, Homo sapien
tacagttggccaagctctctaaaca

SEQ ID NO: 2404371 - DNA, 25 bp, Homo sapien
ccatgtctagggatctactaactag

SEQ ID NO: 2404372 - DNA, 25 bp, Homo sapien
gcctacctgtaggtcgacaaataca

SEQ ID NO: 2404373 - DNA, 25 bp, Homo sapien
catttatcttgacctcagctgttac

SEQ ID NO: 2404374 - DNA, 25 bp, Homo sapien
actatatgagggcacactacacagt

SEQ ID NO: 2404375 - DNA, 25 bp, Homo sapien
acaaatactatatgagggcacacta

SEQ ID NO: 2404376 - DNA, 25 bp, Homo sapien
ttacattgaaaacttcttctcacaa

SEQ ID NO: 2404377 - DNA, 25 bp, Homo sapien
tatatgagggcacactacacagttg

SEQ ID NO: 2404378 - DNA, 25 bp, Homo sapien
gactgacacgtgaatccatacacaa

SEQ ID NO: 2404379 - DNA, 25 bp, Homo sapien
aatgactgacacgtgaatccataca

SEQ ID NO: 2404380 - DNA, 25 bp, Homo sapien
taaatgactgacacgtgaatccata

SEQ ID NO: 2404381 - DNA, 25 bp, Homo sapien
tcataaatgactgacacgtgaatcc

SEQ ID NO: 2404382 - DNA, 25 bp, Homo sapien
ggttatgtatctctccctcttgacc

SEQ ID NO: 2404383 - DNA, 25 bp, Homo sapien
tatgacttggcactctttgtcctgg

SEQ ID NO: 2404384 - DNA, 25 bp, Homo sapien
cactgaccgtcagtgcaaaagctat

SEQ ID NO: 2404385 - DNA, 25 bp, Homo sapien
tcaaagagcatcactgaccgtcagt

SEQ ID NO: 2404386 - DNA, 25 bp, Homo sapien
cagtgtcacacaatcagtgagtggg

SEQ ID NO: 2404387 - DNA, 25 bp, Homo sapien
cctggccaagagcacctttctattc

SEQ ID NO: 2404388 - DNA, 25 bp, Homo sapien
ggccaagagcacctttctattcttg

SEQ ID NO: 2404389 - DNA, 25 bp, Homo sapien
cccagtgtcacacaatcagtgagtg

SEQ ID NO: 2404390 - DNA, 25 bp, Homo sapien
cagagccatggtacctcagtctggg

SEQ ID NO: 2404391 - DNA, 25 bp, Homo sapien
cccagagccatggtacctcagtctg

SEQ ID NO: 2404392 - DNA, 25 bp, Homo sapien
gagccatggtacctcagtctggggc

SEQ ID NO: 2404393 - DNA, 25 bp, Homo sapien
ccagagccatggtacctcagtctgg

SEQ ID NO: 2404394 - DNA, 25 bp, Homo sapien
cgagaaaggcctatccaaaatgaat

SEQ ID NO: 2404395 - DNA, 25 bp, Homo sapien
gagaaaggcctatccaaaatgaatt

SEQ ID NO: 2404396 - DNA, 25 bp, Homo sapien
tcctgattattgtagtcatgcatac

SEQ ID NO: 2404397 - DNA, 25 bp, Homo sapien
gtgcttaaggcatgctatgattata

SEQ ID NO: 2404398 - DNA, 25 bp, Homo sapien
cctgtgatagcagggttatgtttta

SEQ ID NO: 2404399 - DNA, 25 bp, Homo sapien
caaaaatgggtagtgtcctgattat

SEQ ID NO: 2404400 - DNA, 25 bp, Homo sapien
tgtcgcggcttcactgcactctagc

SEQ ID NO: 2404401 - DNA, 25 bp, Homo sapien
agcctgggatgtcgcggcttcactg

SEQ ID NO: 2404402 - DNA, 25 bp, Homo sapien
tgagcctgggatgtcgcggcttcac

SEQ ID NO: 2404403 - DNA, 25 bp, Homo sapien
gggatgtcgcggcttcactgcactc

SEQ ID NO: 2404404 - DNA, 25 bp, Homo sapien
aaattgtcattacctggaatctccc

SEQ ID NO: 2404405 - DNA, 25 bp, Homo sapien
aggaaaaattgtcattacctggaat

SEQ ID NO: 2404406 - DNA, 25 bp, Homo sapien
ttacctggaatctccctctatcttc

SEQ ID NO: 2404407 - DNA, 25 bp, Homo sapien
tgtcattacctggaatctccctcta

SEQ ID NO: 2404408 - DNA, 25 bp, Homo sapien
ggatacacaccacagataatcataa

SEQ ID NO: 2404409 - DNA, 25 bp, Homo sapien
cagataatcataacagaagtctaca

SEQ ID NO: 2404410 - DNA, 25 bp, Homo sapien
aatcataacagaagtctacacttac

SEQ ID NO: 2404411 - DNA, 25 bp, Homo sapien
tcaggatacacaccacagataatca

SEQ ID NO: 2404412 - DNA, 25 bp, Homo sapien
catgctgaatagataacagctcttc

SEQ ID NO: 2404413 - DNA, 25 bp, Homo sapien
taatccaattaggaggacaagggct

SEQ ID NO: 2404414 - DNA, 25 bp, Homo sapien
tcatttgagctgtctatctttagga

SEQ ID NO: 2404415 - DNA, 25 bp, Homo sapien
taggagattagagcccagttgccag

SEQ ID NO: 2404416 - DNA, 25 bp, Homo sapien
tgacagggatacattacactaaggt

SEQ ID NO: 2404417 - DNA, 25 bp, Homo sapien
tcctgtagatctaagcacatagcca

SEQ ID NO: 2404418 - DNA, 25 bp, Homo sapien
ccagccaactgcatagggtacttat

SEQ ID NO: 2404419 - DNA, 25 bp, Homo sapien
ctaactgtatcgcatttaaaatgtc

SEQ ID NO: 2404420 - DNA, 25 bp, Homo sapien
agattccgtcctttaactatgccct

SEQ ID NO: 2404421 - DNA, 25 bp, Homo sapien
tcttgagtcaagattccgtccttta

SEQ ID NO: 2404422 - DNA, 25 bp, Homo sapien
tcagcaccaagaattaaccctcttg

SEQ ID NO: 2404423 - DNA, 25 bp, Homo sapien
taaccctcttgagtcaagattccgt

SEQ ID NO: 2404424 - DNA, 25 bp, Homo sapien
ttgacagctttggtaggagtcacac

SEQ ID NO: 2404425 - DNA, 25 bp, Homo sapien
gacagctttggtaggagtcacactg

SEQ ID NO: 2404426 - DNA, 25 bp, Homo sapien
cagctttggtaggagtcacactgtc

SEQ ID NO: 2404427 - DNA, 25 bp, Homo sapien
agctttggtaggagtcacactgtct

SEQ ID NO: 2404428 - DNA, 25 bp, Homo sapien
gccattctccaatgtgttgcttcct

SEQ ID NO: 2404429 - DNA, 25 bp, Homo sapien
tcttgatagaaagtagccattctcc

SEQ ID NO: 2404430 - DNA, 25 bp, Homo sapien
tgcttcctgaattggatctccaaat

SEQ ID NO: 2404431 - DNA, 25 bp, Homo sapien
ttcttgatagaaagtagccattctc

SEQ ID NO: 2404432 - DNA, 25 bp, Homo sapien
acataccaacaataataatagtgac

SEQ ID NO: 2404433 - DNA, 25 bp, Homo sapien
cttcacataccaacaataataatag

SEQ ID NO: 2404434 - DNA, 25 bp, Homo sapien
accaacaataataatagtgacagaa

SEQ ID NO: 2404435 - DNA, 25 bp, Homo sapien
ccaacaataataatagtgacagaaa

SEQ ID NO: 2404436 - DNA, 25 bp, Homo sapien
atgttattggaataaaagaatacat

SEQ ID NO: 2404437 - DNA, 25 bp, Homo sapien
aatgttattggaataaaagaataca

SEQ ID NO: 2404438 - DNA, 25 bp, Homo sapien
aatgagagatccttgagaaactgcc

SEQ ID NO: 2404439 - DNA, 25 bp, Homo sapien
atgagagatccttgagaaactgccc

SEQ ID NO: 2404440 - DNA, 25 bp, Homo sapien
aagacagcaccatattgtactttct

SEQ ID NO: 2404441 - DNA, 25 bp, Homo sapien
gacagcaccatattgtactttcttc

SEQ ID NO: 2404442 - DNA, 25 bp, Homo sapien
acagcaccatattgtactttcttct

SEQ ID NO: 2404443 - DNA, 25 bp, Homo sapien
agacagcaccatattgtactttctt

SEQ ID NO: 2404444 - DNA, 25 bp, Homo sapien
cctttgaattccacagctttgaaac

SEQ ID NO: 2404445 - DNA, 25 bp, Homo sapien
agcaatgaggcgccaaggaggagat

SEQ ID NO: 2404446 - DNA, 25 bp, Homo sapien
ttacagcaatgaggcgccaaggagg

SEQ ID NO: 2404447 - DNA, 25 bp, Homo sapien
atgaggcgccaaggaggagatgcag

SEQ ID NO: 2404448 - DNA, 25 bp, Homo sapien
caatgaggcgccaaggaggagatgc

SEQ ID NO: 2404449 - DNA, 25 bp, Homo sapien
ctgtgcttctccaccagtaaggata

SEQ ID NO: 2404450 - DNA, 25 bp, Homo sapien
tgtgcttctccaccagtaaggatac

SEQ ID NO: 2404451 - DNA, 25 bp, Homo sapien
gaattgtaatttcggcacattggct

SEQ ID NO: 2404452 - DNA, 25 bp, Homo sapien
cagttccacattgacatctacaggt

SEQ ID NO: 2404453 - DNA, 25 bp, Homo sapien
caggtcttgacattagtaggatccc

SEQ ID NO: 2404454 - DNA, 25 bp, Homo sapien
cattggcttgataactgtatgctcc

SEQ ID NO: 2404455 - DNA, 25 bp, Homo sapien
cgaagtgtaattgagtatatccatc

SEQ ID NO: 2404456 - DNA, 25 bp, Homo sapien
gagtatatccatcttcatccaaatt

SEQ ID NO: 2404457 - DNA, 25 bp, Homo sapien
tcctggtattgctttgagagtcgaa

SEQ ID NO: 2404458 - DNA, 25 bp, Homo sapien
tctctgaaacaacagctatcctggt

SEQ ID NO: 2404459 - DNA, 25 bp, Homo sapien
ctgaatagatatagcatttgggagc

SEQ ID NO: 2404460 - DNA, 25 bp, Homo sapien
tagatatagcatttgggagctcttt

SEQ ID NO: 2404461 - DNA, 25 bp, Homo sapien
gatatagcatttgggagctcttttc

SEQ ID NO: 2404462 - DNA, 25 bp, Homo sapien
gaatagatatagcatttgggagctc

SEQ ID NO: 2404463 - DNA, 25 bp, Homo sapien
tctctgagtcaaatcatgtgggcta

SEQ ID NO: 2404464 - DNA, 25 bp, Homo sapien
gtcaaatcatgtgggctaggtactt

SEQ ID NO: 2404465 - DNA, 25 bp, Homo sapien
gaatctctgagtcaaatcatgtggg

SEQ ID NO: 2404466 - DNA, 25 bp, Homo sapien
gagtcaaatcatgtgggctaggtac

SEQ ID NO: 2404467 - DNA, 25 bp, Homo sapien
taacaaattaagcttaagtagttca

SEQ ID NO: 2404468 - DNA, 25 bp, Homo sapien
ggatccccagctcccaattgccaag

SEQ ID NO: 2404469 - DNA, 25 bp, Homo sapien
atccccagctcccaattgccaagcc

SEQ ID NO: 2404470 - DNA, 25 bp, Homo sapien
cccagctcccaattgccaagcccat

SEQ ID NO: 2404471 - DNA, 25 bp, Homo sapien
cttccctgccagggatccccagctc

SEQ ID NO: 2404472 - DNA, 25 bp, Homo sapien
ccagggcacagagcatctgctcttc

SEQ ID NO: 2404473 - DNA, 25 bp, Homo sapien
ctccagaggcctttgttcttccctt

SEQ ID NO: 2404474 - DNA, 25 bp, Homo sapien
agcacccccctccagaggcctttgt

SEQ ID NO: 2404475 - DNA, 25 bp, Homo sapien
tgccagggcacagagcatctgctct

SEQ ID NO: 2404476 - DNA, 25 bp, Homo sapien
tgtgggtcatccctctttattttac

SEQ ID NO: 2404477 - DNA, 25 bp, Homo sapien
ctgtgggtcatccctctttatttta

SEQ ID NO: 2404478 - DNA, 25 bp, Homo sapien
ttcacttttgttactttattggaca

SEQ ID NO: 2404479 - DNA, 25 bp, Homo sapien
tcacttttgttactttattggacat

SEQ ID NO: 2404480 - DNA, 25 bp, Homo sapien
cattcacttttgttactttattgga

SEQ ID NO: 2404481 - DNA, 25 bp, Homo sapien
tgcattcacttttgttactttattg

SEQ ID NO: 2404482 - DNA, 25 bp, Homo sapien
tctgggcatatcactccctcggttt

SEQ ID NO: 2404483 - DNA, 25 bp, Homo sapien
tcggttttctgagactcgggactcc

SEQ ID NO: 2404484 - DNA, 25 bp, Homo sapien
atgaatctgggtcccgcactgcggc

SEQ ID NO: 2404485 - DNA, 25 bp, Homo sapien
tcctttgctaggctgtccgggctgg

SEQ ID NO: 2404486 - DNA, 25 bp, Homo sapien
gagtttagaaataatcccatgaata

SEQ ID NO: 2404487 - DNA, 25 bp, Homo sapien
atcatagacctcagtataaaacctg

SEQ ID NO: 2404488 - DNA, 25 bp, Homo sapien
aaacctgaagctataaaatgtctag

SEQ ID NO: 2404489 - DNA, 25 bp, Homo sapien
aatgagttcttacaaaccacagcag

SEQ ID NO: 2404490 - DNA, 25 bp, Homo sapien
gtatgcatgttctccacaaggtgtg

SEQ ID NO: 2404491 - DNA, 25 bp, Homo sapien
gaatgaattcatacgagcatcaaga

SEQ ID NO: 2404492 - DNA, 25 bp, Homo sapien
gatatgttcactctcttaattgtag

SEQ ID NO: 2404493 - DNA, 25 bp, Homo sapien
caggaggagcattgtgacactttga

SEQ ID NO: 2404494 - DNA, 25 bp, Homo sapien
aaatgttgacataaaggtgccaggc

SEQ ID NO: 2404495 - DNA, 25 bp, Homo sapien
tgcagccagctaaatgacagttttc

SEQ ID NO: 2404496 - DNA, 25 bp, Homo sapien
tattcagcgatatttgcatacctgg

SEQ ID NO: 2404497 - DNA, 25 bp, Homo sapien
tcttgatttcggaatggcctctgtc

SEQ ID NO: 2404498 - DNA, 25 bp, Homo sapien
tatgcacaggtacctgaagggtatg

SEQ ID NO: 2404499 - DNA, 25 bp, Homo sapien
ggagacagcgcctcggactctaaat

SEQ ID NO: 2404500 - DNA, 25 bp, Homo sapien
tcttctgacatatactgaaggcagc

SEQ ID NO: 2404501 - DNA, 25 bp, Homo sapien
cagctcctcgttgtatatatgcaca

SEQ ID NO: 2404502 - DNA, 25 bp, Homo sapien
aagtggggcatcaaaggagaaccgt

SEQ ID NO: 2404503 - DNA, 25 bp, Homo sapien
catcaaaggagaaccgtcctcccag

SEQ ID NO: 2404504 - DNA, 25 bp, Homo sapien
caaaggagaaccgtcctcccagagc

SEQ ID NO: 2404505 - DNA, 25 bp, Homo sapien
gggcatcaaaggagaaccgtcctcc

SEQ ID NO: 2404506 - DNA, 25 bp, Homo sapien
ggaataggaaattgcttgctggatg

SEQ ID NO: 2404507 - DNA, 25 bp, Homo sapien
tggaataggaaattgcttgctggat

SEQ ID NO: 2404508 - DNA, 25 bp, Homo sapien
tgaaagtcagttagtgttggatcca

SEQ ID NO: 2404509 - DNA, 25 bp, Homo sapien
tgagtttgtggaatccacatggtgg

SEQ ID NO: 2404510 - DNA, 25 bp, Homo sapien
tccacatggtggttttagaatctga

SEQ ID NO: 2404511 - DNA, 25 bp, Homo sapien
gaatctgaaagtcagttagtgttgg

SEQ ID NO: 2404512 - DNA, 25 bp, Homo sapien
gacaagcacttctcttggctctttt

SEQ ID NO: 2404513 - DNA, 25 bp, Homo sapien
aacttggcatccaaagacaagcact

SEQ ID NO: 2404514 - DNA, 25 bp, Homo sapien
tcttttcccagttaaatgagcccga

SEQ ID NO: 2404515 - DNA, 25 bp, Homo sapien
ccagatccagtcttgcggacaagga

SEQ ID NO: 2404516 - DNA, 25 bp, Homo sapien
cctgcccacactacttcttaagtaa

SEQ ID NO: 2404517 - DNA, 25 bp, Homo sapien
tgggagaacagatatttaatagcca

SEQ ID NO: 2404518 - DNA, 25 bp, Homo sapien
gtgggactatagtcgtgagacaccg

SEQ ID NO: 2404519 - DNA, 25 bp, Homo sapien
tcacttcccctgatgaaaagcaagt

SEQ ID NO: 2404520 - DNA, 25 bp, Homo sapien
ccgagcaagggtttctatcatttcc

SEQ ID NO: 2404521 - DNA, 25 bp, Homo sapien
tgttgccgggctgagatctgtccct

SEQ ID NO: 2404522 - DNA, 25 bp, Homo sapien
tctcattcagcttccgagcaagggt

SEQ ID NO: 2404523 - DNA, 25 bp, Homo sapien
ttccttgagttcgttttctgactcc

SEQ ID NO: 2404524 - DNA, 25 bp, Homo sapien
cttgtgttaggaggtcagacacctg

SEQ ID NO: 2404525 - DNA, 25 bp, Homo sapien
cagttcaggtgaacgttgggcacca

SEQ ID NO: 2404526 - DNA, 25 bp, Homo sapien
cagaccgcttggtttgaaggcagct

SEQ ID NO: 2404527 - DNA, 25 bp, Homo sapien
taataacctggatcctgggtagcct

SEQ ID NO: 2404528 - DNA, 25 bp, Homo sapien
tgggtagcctaaacaactcagttct

SEQ ID NO: 2404529 - DNA, 25 bp, Homo sapien
tggtcactactaatcccaggcaaag

SEQ ID NO: 2404530 - DNA, 25 bp, Homo sapien
attgcatgcccagcaccataatggt

SEQ ID NO: 2404531 - DNA, 25 bp, Homo sapien
ccaggcaaaggacccctagagtcgc

SEQ ID NO: 2404532 - DNA, 25 bp, Homo sapien
aaaggacccctagagtcgcagcagc

SEQ ID NO: 2404533 - DNA, 25 bp, Homo sapien
ggaccctgtgaaggaaggtatgtgt

SEQ ID NO: 2404534 - DNA, 25 bp, Homo sapien
accctgtgaaggaaggtatgtgttc

SEQ ID NO: 2404535 - DNA, 25 bp, Homo sapien
accaccacagcaggttaaattttgt

SEQ ID NO: 2404536 - DNA, 25 bp, Homo sapien
acaggaccctgtgaaggaaggtatg

SEQ ID NO: 2404537 - DNA, 25 bp, Homo sapien
cagataaatttggttcccgagccct

SEQ ID NO: 2404538 - DNA, 25 bp, Homo sapien
gatgcccagttagctctctgtaaaa

SEQ ID NO: 2404539 - DNA, 25 bp, Homo sapien
gagccctccgatgtatagaattctg

SEQ ID NO: 2404540 - DNA, 25 bp, Homo sapien
tgttgttagtcctcctgatgcccag

SEQ ID NO: 2404541 - DNA, 25 bp, Homo sapien
ctggatctttaggtcatcaaaagtc

SEQ ID NO: 2404542 - DNA, 25 bp, Homo sapien
tggatctttaggtcatcaaaagtca

SEQ ID NO: 2404543 - DNA, 25 bp, Homo sapien
ggatctttaggtcatcaaaagtcat

SEQ ID NO: 2404544 - DNA, 25 bp, Homo sapien
catattgggaagttcgctgacgcaa

SEQ ID NO: 2404545 - DNA, 25 bp, Homo sapien
ggagaggctttgcttcatattggga

SEQ ID NO: 2404546 - DNA, 25 bp, Homo sapien
gactcaatcattggtaggaggaagg

SEQ ID NO: 2404547 - DNA, 25 bp, Homo sapien
ctaagaatgagagagtgaagcagtc

SEQ ID NO: 2404548 - DNA, 25 bp, Homo sapien
gtgaagaaagtgaaagaaagtacca

SEQ ID NO: 2404549 - DNA, 25 bp, Homo sapien
tgaagaaagtgaaagaaagtaccat

SEQ ID NO: 2404550 - DNA, 25 bp, Homo sapien
tagtgaagaaagtgaaagaaagtac

SEQ ID NO: 2404551 - DNA, 25 bp, Homo sapien
ctttagtgaagaaagtgaaagaaag

SEQ ID NO: 2404552 - DNA, 25 bp, Homo sapien
ggaccatccctttgagtatcggaaa

SEQ ID NO: 2404553 - DNA, 25 bp, Homo sapien
tgagcacaccttgacgtcggctgag

SEQ ID NO: 2404554 - DNA, 25 bp, Homo sapien
gttccagtacaaggaggaccatccc

SEQ ID NO: 2404555 - DNA, 25 bp, Homo sapien
gaagccctgcggtgcatcatgaagt

SEQ ID NO: 2404556 - DNA, 25 bp, Homo sapien
cgtggttttatagctaccagaagcc

SEQ ID NO: 2404557 - DNA, 25 bp, Homo sapien
cgtgtcacataatggtaaaataatt

SEQ ID NO: 2404558 - DNA, 25 bp, Homo sapien
ctctaatccttacctaacgttcgtg

SEQ ID NO: 2404559 - DNA, 25 bp, Homo sapien
ttcaggtaggaacattagtattacg

SEQ ID NO: 2404560 - DNA, 25 bp, Homo sapien
ccttacacgattacccgttctacag

SEQ ID NO: 2404561 - DNA, 25 bp, Homo sapien
tccttacacgattacccgttctaca

SEQ ID NO: 2404562 - DNA, 25 bp, Homo sapien
cacaaagaaatgcagtaacttccta

SEQ ID NO: 2404563 - DNA, 25 bp, Homo sapien
cagtaacttcctaaaggtttcacat

SEQ ID NO: 2404564 - DNA, 25 bp, Homo sapien
gacaagaggaagtacctagtgccct

SEQ ID NO: 2404565 - DNA, 25 bp, Homo sapien
tacctagtgccctctgaccttactg

SEQ ID NO: 2404566 - DNA, 25 bp, Homo sapien
cctgatctggacaagaggaagtacc

SEQ ID NO: 2404567 - DNA, 25 bp, Homo sapien
caaaagccagggtgcctgatctgga

SEQ ID NO: 2404568 - DNA, 25 bp, Homo sapien
tgaggtaatggttctggttgcacaa

SEQ ID NO: 2404569 - DNA, 25 bp, Homo sapien
cagaaggtgttatttatccggatcc

SEQ ID NO: 2404570 - DNA, 25 bp, Homo sapien
cttaatccggaagagaatccacctg

SEQ ID NO: 2404571 - DNA, 25 bp, Homo sapien
ccggatcctcttacatatggcagtg

SEQ ID NO: 2404572 - DNA, 25 bp, Homo sapien
aattgatgcattgtggcccctgatc

SEQ ID NO: 2404573 - DNA, 25 bp, Homo sapien
ggaatgctacatgatggccagctgc

SEQ ID NO: 2404574 - DNA, 25 bp, Homo sapien
tataatgaagtcaatgccatcaggc

SEQ ID NO: 2404575 - DNA, 25 bp, Homo sapien
ggttatcatccactgcagctgctag

SEQ ID NO: 2404576 - DNA, 25 bp, Homo sapien
agaaactgttgtttagtggtttcag

SEQ ID NO: 2404577 - DNA, 25 bp, Homo sapien
agtggtgagcagttcgtgggcttcc

SEQ ID NO: 2404578 - DNA, 25 bp, Homo sapien
cagttcgtgggcttccggtttctct

SEQ ID NO: 2404579 - DNA, 25 bp, Homo sapien
tgttgtttagtggtttcagtggtga

SEQ ID NO: 2404580 - DNA, 25 bp, Homo sapien
gatgggactggagctcaatgcttca

SEQ ID NO: 2404581 - DNA, 25 bp, Homo sapien
tctgggatcagcaaagcataatgac

SEQ ID NO: 2404582 - DNA, 25 bp, Homo sapien
tagttgccacttgtgaccagattcc

SEQ ID NO: 2404583 - DNA, 25 bp, Homo sapien
catgcagggtagaaaaacgtaaatc

SEQ ID NO: 2404584 - DNA, 25 bp, Homo sapien
tttgtgatattatgttgcaatgtgc

SEQ ID NO: 2404585 - DNA, 25 bp, Homo sapien
ctcaatggttgccttattcaggatc

SEQ ID NO: 2404586 - DNA, 25 bp, Homo sapien
tgcaatgtgcagtctcaatggttgc

SEQ ID NO: 2404587 - DNA, 25 bp, Homo sapien
tgcagtctcaatggttgccttattc

SEQ ID NO: 2404588 - DNA, 25 bp, Homo sapien
tagctgcaactattaccagagcgat

SEQ ID NO: 2404589 - DNA, 25 bp, Homo sapien
caaatatcacagcaacaatgcacca

SEQ ID NO: 2404590 - DNA, 25 bp, Homo sapien
tcttagctaccatagctgcaactat

SEQ ID NO: 2404591 - DNA, 25 bp, Homo sapien
tattaccagagcgattaaataaagg

SEQ ID NO: 2404592 - DNA, 25 bp, Homo sapien
atcgccgcctggttgaccattctca

SEQ ID NO: 2404593 - DNA, 25 bp, Homo sapien
ttctaagtcatcgtggccatcgccg

SEQ ID NO: 2404594 - DNA, 25 bp, Homo sapien
catgatcttggtacaccattctaag

SEQ ID NO: 2404595 - DNA, 25 bp, Homo sapien
ggtacaccattctaagtcatcgtgg

SEQ ID NO: 2404596 - DNA, 25 bp, Homo sapien
catgagagagcctggacagtgctga

SEQ ID NO: 2404597 - DNA, 25 bp, Homo sapien
cactggcgaaggttgaagatcatga

SEQ ID NO: 2404598 - DNA, 25 bp, Homo sapien
catgaaatgccactggcgaaggttg

SEQ ID NO: 2404599 - DNA, 25 bp, Homo sapien
ttgaagatcatgagagagcctggac

SEQ ID NO: 2404600 - DNA, 25 bp, Homo sapien
catacggtgtgatgtgtcagccaca

SEQ ID NO: 2404601 - DNA, 25 bp, Homo sapien
agcagcaactctgtggttggaaaca

SEQ ID NO: 2404602 - DNA, 25 bp, Homo sapien
gtgttaactgttattttaggcagca

SEQ ID NO: 2404603 - DNA, 25 bp, Homo sapien
tgcggccacaccaagaccagtgtag

SEQ ID NO: 2404604 - DNA, 25 bp, Homo sapien
tttatgcccaagttccatcggcaga

SEQ ID NO: 2404605 - DNA, 25 bp, Homo sapien
cccaagttccatcggcagatactga

SEQ ID NO: 2404606 - DNA, 25 bp, Homo sapien
tccatcggcagatactgaccataga

SEQ ID NO: 2404607 - DNA, 25 bp, Homo sapien
tttctttatgcccaagttccatcgg

SEQ ID NO: 2404608 - DNA, 25 bp, Homo sapien
ctgtgctcacgcaagttgtaaactt

SEQ ID NO: 2404609 - DNA, 25 bp, Homo sapien
cttgtgctcatttgtatcctggtgt

SEQ ID NO: 2404610 - DNA, 25 bp, Homo sapien
tgtgctcacgcaagttgtaaacttg

SEQ ID NO: 2404611 - DNA, 25 bp, Homo sapien
aacttgtgctcatttgtatcctggt

SEQ ID NO: 2404612 - DNA, 25 bp, Homo sapien
gatattcctattaacaaggttactc

SEQ ID NO: 2404613 - DNA, 25 bp, Homo sapien
cctttcaagattcttattatagcca

SEQ ID NO: 2404614 - DNA, 25 bp, Homo sapien
cacattggaaatttgacctgttcca

SEQ ID NO: 2404615 - DNA, 25 bp, Homo sapien
tccacatttgatattcctattaaca

SEQ ID NO: 2404616 - DNA, 25 bp, Homo sapien
gacattagccccttattagagtaca

SEQ ID NO: 2404617 - DNA, 25 bp, Homo sapien
tagtaaccattgtaccaagtgtgag

SEQ ID NO: 2404618 - DNA, 25 bp, Homo sapien
gccgaactgcaggatcatagggtaa

SEQ ID NO: 2404619 - DNA, 25 bp, Homo sapien
gatatatatccagatgccgaactgc

SEQ ID NO: 2404620 - DNA, 25 bp, Homo sapien
accgagcagtatagactgcatccta

SEQ ID NO: 2404621 - DNA, 25 bp, Homo sapien
tcctactaatgcgtgagaacatatg

SEQ ID NO: 2404622 - DNA, 25 bp, Homo sapien
cactcatcaccgagcagtatagact

SEQ ID NO: 2404623 - DNA, 25 bp, Homo sapien
cctactaatgcgtgagaacatatga

SEQ ID NO: 2404624 - DNA, 25 bp, Homo sapien
caagctccgatttttgcgtgacaac

SEQ ID NO: 2404625 - DNA, 25 bp, Homo sapien
taaggatttggtgagctggcaagct

SEQ ID NO: 2404626 - DNA, 25 bp, Homo sapien
gagttgcagtaagctacttcagaag

SEQ ID NO: 2404627 - DNA, 25 bp, Homo sapien
ttcagggcatacacgtggtcttcgg

SEQ ID NO: 2404628 - DNA, 25 bp, Homo sapien
gggcataaccatgaggcctcaagcc

SEQ ID NO: 2404629 - DNA, 25 bp, Homo sapien
tggctttcttaaggcctaaaggcaa

SEQ ID NO: 2404630 - DNA, 25 bp, Homo sapien
ggtaagtcacaaggaccctcatccc

SEQ ID NO: 2404631 - DNA, 25 bp, Homo sapien
ggtgaaggccataagaaggccaaac

SEQ ID NO: 2404632 - DNA, 25 bp, Homo sapien
cagtcatgggactcaagcaagtaca

SEQ ID NO: 2404633 - DNA, 25 bp, Homo sapien
cccattaaaagtggcagcatgaccc

SEQ ID NO: 2404634 - DNA, 25 bp, Homo sapien
tcagttggcagtgttaccgctggtg

SEQ ID NO: 2404635 - DNA, 25 bp, Homo sapien
tgatcccctgggtgttggtcctacc

SEQ ID NO: 2404636 - DNA, 25 bp, Homo sapien
agttgaacagttttctatatagcct

SEQ ID NO: 2404637 - DNA, 25 bp, Homo sapien
catagagtgcacagtctcccttctg

SEQ ID NO: 2404638 - DNA, 25 bp, Homo sapien
ttacacagtcctttgcatgcagatg

SEQ ID NO: 2404639 - DNA, 25 bp, Homo sapien
tatatagcctttaaagctcgaggca

SEQ ID NO: 2404640 - DNA, 25 bp, Homo sapien
tgtactagtcccatccaatgatatg

SEQ ID NO: 2404641 - DNA, 25 bp, Homo sapien
catccaatgatatgacttcaccagt

SEQ ID NO: 2404642 - DNA, 25 bp, Homo sapien
atttgttggaatgtgtactagtccc

SEQ ID NO: 2404643 - DNA, 25 bp, Homo sapien
aatgatatgacttcaccagtttaag

SEQ ID NO: 2404644 - DNA, 25 bp, Homo sapien
cattttgagacatacaagaagcctg

SEQ ID NO: 2404645 - DNA, 25 bp, Homo sapien
gagacatacaagaagcctggctctc

SEQ ID NO: 2404646 - DNA, 25 bp, Homo sapien
tttgagacatacaagaagcctggct

SEQ ID NO: 2404647 - DNA, 25 bp, Homo sapien
tggcattttgagacatacaagaagc

SEQ ID NO: 2404648 - DNA, 25 bp, Homo sapien
attggtagcagttatttttgtaaca

SEQ ID NO: 2404649 - DNA, 25 bp, Homo sapien
atcaaaaaattggtagcagttattt

SEQ ID NO: 2404650 - DNA, 25 bp, Homo sapien
ccagtttttaggacatgggccacag

SEQ ID NO: 2404651 - DNA, 25 bp, Homo sapien
ttgtaacatatccagtttttaggac

SEQ ID NO: 2404652 - DNA, 25 bp, Homo sapien
tacacatctgaaccattatagcaga

SEQ ID NO: 2404653 - DNA, 25 bp, Homo sapien
gatgatgtcaaacctaagtagcctc

SEQ ID NO: 2404654 - DNA, 25 bp, Homo sapien
cagaagccatagtgtattacagact

SEQ ID NO: 2404655 - DNA, 25 bp, Homo sapien
catggaatacatgtctacacaataa

SEQ ID NO: 2404656 - DNA, 25 bp, Homo sapien
caagggaatttgaacttcttggttg

SEQ ID NO: 2404657 - DNA, 25 bp, Homo sapien
atttgaacttcttggttgaataatg

SEQ ID NO: 2404658 - DNA, 25 bp, Homo sapien
ggaatttgaacttcttggttgaata

SEQ ID NO: 2404659 - DNA, 25 bp, Homo sapien
cggtcaagggaatttgaacttcttg

SEQ ID NO: 2404660 - DNA, 25 bp, Homo sapien
gtctgtgtttatgaatactaacaaa

SEQ ID NO: 2404661 - DNA, 25 bp, Homo sapien
tacaaatttctggactaatagcaaa

SEQ ID NO: 2404662 - DNA, 25 bp, Homo sapien
ccataagtattaaaagtttgtattg

SEQ ID NO: 2404663 - DNA, 25 bp, Homo sapien
tacattagcattgttaaattgacaa

SEQ ID NO: 2404664 - DNA, 25 bp, Homo sapien
gaatacagcactccatattgttacc

SEQ ID NO: 2404665 - DNA, 25 bp, Homo sapien
taccataataatgaaacggattccc

SEQ ID NO: 2404666 - DNA, 25 bp, Homo sapien
cagcactccatattgttaccataat

SEQ ID NO: 2404667 - DNA, 25 bp, Homo sapien
catggctacagcgatgaagcagcag

SEQ ID NO: 2404668 - DNA, 25 bp, Homo sapien
gaggtgaatccactgcttaggcagg

SEQ ID NO: 2404669 - DNA, 25 bp, Homo sapien
ggaagaaccttagtctcagcccact

SEQ ID NO: 2404670 - DNA, 25 bp, Homo sapien
gggagcattttgacccaccgtgggc

SEQ ID NO: 2404671 - DNA, 25 bp, Homo sapien
tgtgtcggaacttagacctggcccc

SEQ ID NO: 2404672 - DNA, 25 bp, Homo sapien
gcttttgactactggacatctttgc

SEQ ID NO: 2404673 - DNA, 25 bp, Homo sapien
acatttgcttttgactactggacat

SEQ ID NO: 2404674 - DNA, 25 bp, Homo sapien
ttttgccatcgtgttgaaaaatcac

SEQ ID NO: 2404675 - DNA, 25 bp, Homo sapien
tttgcttttgccatcgtgttgaaaa

SEQ ID NO: 2404676 - DNA, 25 bp, Homo sapien
gtgtcgagacctccgaccacgaatc

SEQ ID NO: 2404677 - DNA, 25 bp, Homo sapien
cccagctgtgtcgagacctccgacc

SEQ ID NO: 2404678 - DNA, 25 bp, Homo sapien
gacctccgaccacgaatccacccca

SEQ ID NO: 2404679 - DNA, 25 bp, Homo sapien
acctccgaccacgaatccaccccat

SEQ ID NO: 2404680 - DNA, 25 bp, Homo sapien
cacgtctaccgcagagaggaatcta

SEQ ID NO: 2404681 - DNA, 25 bp, Homo sapien
taagtgcacgtctaccgcagagagg

SEQ ID NO: 2404682 - DNA, 25 bp, Homo sapien
acttataagtgcacgtctaccgcag

SEQ ID NO: 2404683 - DNA, 25 bp, Homo sapien
caaatacttataagtgcacgtctac

SEQ ID NO: 2404684 - DNA, 25 bp, Homo sapien
gttctctttcccgtggtgagataaa

SEQ ID NO: 2404685 - DNA, 25 bp, Homo sapien
ctttcccgtggtgagataaaatatt

SEQ ID NO: 2404686 - DNA, 25 bp, Homo sapien
ctctttcccgtggtgagataaaata

SEQ ID NO: 2404687 - DNA, 25 bp, Homo sapien
tttgttctctttcccgtggtgagat

SEQ ID NO: 2404688 - DNA, 25 bp, Homo sapien
agggaagatcttgattcttgtggat

SEQ ID NO: 2404689 - DNA, 25 bp, Homo sapien
gataaaagccttctataaaactaga

SEQ ID NO: 2404690 - DNA, 25 bp, Homo sapien
tagaaaatttagatatgtcctcagt

SEQ ID NO: 2404691 - DNA, 25 bp, Homo sapien
tttagatatgtcctcagttcctgat

SEQ ID NO: 2404692 - DNA, 25 bp, Homo sapien
tagttcaaatggcaacttacagcca

SEQ ID NO: 2404693 - DNA, 25 bp, Homo sapien
ttcgtttagttcaaatggcaactta

SEQ ID NO: 2404694 - DNA, 25 bp, Homo sapien
tatttcgtttagttcaaatggcaac

SEQ ID NO: 2404695 - DNA, 25 bp, Homo sapien
ttcaaatggcaacttacagccaact

SEQ ID NO: 2404696 - DNA, 25 bp, Homo sapien
tagcaggtgctcaaattttagttga

SEQ ID NO: 2404697 - DNA, 25 bp, Homo sapien
agcaggtgctcaaattttagttgac

SEQ ID NO: 2404698 - DNA, 25 bp, Homo sapien
ccaaagttggccagtggacagttaa

SEQ ID NO: 2404699 - DNA, 25 bp, Homo sapien
aactgtatactaattcggaatacta

SEQ ID NO: 2404700 - DNA, 25 bp, Homo sapien
tgctataagtacagtagcattagcc

SEQ ID NO: 2404701 - DNA, 25 bp, Homo sapien
taaacataagtttattagtcacact

SEQ ID NO: 2404702 - DNA, 25 bp, Homo sapien
ctttcatctgcacagtggatatgtt

SEQ ID NO: 2404703 - DNA, 25 bp, Homo sapien
catctgcacagtggatatgttctaa

SEQ ID NO: 2404704 - DNA, 25 bp, Homo sapien
agacaactcacttttgacaaaggtg

SEQ ID NO: 2404705 - DNA, 25 bp, Homo sapien
caaatccatttgtttacagacaact

SEQ ID NO: 2404706 - DNA, 25 bp, Homo sapien
taaacatcaatacaaaggtttggag

SEQ ID NO: 2404707 - DNA, 25 bp, Homo sapien
aacttctatttcatgatctgccctg

SEQ ID NO: 2404708 - DNA, 25 bp, Homo sapien
taaattctggaacaggcaaagctta

SEQ ID NO: 2404709 - DNA, 25 bp, Homo sapien
tgtgatcaatatgcatgaccatgac

SEQ ID NO: 2404710 - DNA, 25 bp, Homo sapien
ggatgatttctacaaatatgatatt

SEQ ID NO: 2404711 - DNA, 25 bp, Homo sapien
aacatatggatgatttctacaaata

SEQ ID NO: 2404712 - DNA, 25 bp, Homo sapien
ataaacatatggatgatttctacaa

SEQ ID NO: 2404713 - DNA, 25 bp, Homo sapien
aaatgtgcattaacagtatatgaat

SEQ ID NO: 2404714 - DNA, 25 bp, Homo sapien
agcagatcagagttcttcgaagcac

SEQ ID NO: 2404715 - DNA, 25 bp, Homo sapien
gatcagagttcttcgaagcacaggc

SEQ ID NO: 2404716 - DNA, 25 bp, Homo sapien
aaagcagatcagagttcttcgaagc

SEQ ID NO: 2404717 - DNA, 25 bp, Homo sapien
cagatcagagttcttcgaagcacag

SEQ ID NO: 2404718 - DNA, 25 bp, Homo sapien
tcagggaaaaattgttctgctccag

SEQ ID NO: 2404719 - DNA, 25 bp, Homo sapien
tctgcattcttctattcagggaaaa

SEQ ID NO: 2404720 - DNA, 25 bp, Homo sapien
aaaaattgttctgctccagtactcc

SEQ ID NO: 2404721 - DNA, 25 bp, Homo sapien
ctttctgcattcttctattcaggga

SEQ ID NO: 2404722 - DNA, 25 bp, Homo sapien
ttataatctttcaagaatatgctta

SEQ ID NO: 2404723 - DNA, 25 bp, Homo sapien
tataatctttcaagaatatgcttac

SEQ ID NO: 2404724 - DNA, 25 bp, Homo sapien
tgcaaatgattcctaggacctcagc

SEQ ID NO: 2404725 - DNA, 25 bp, Homo sapien
tgatgatccgaagaagcattttgaa

SEQ ID NO: 2404726 - DNA, 25 bp, Homo sapien
gatgatccgaagaagcattttgaag

SEQ ID NO: 2404727 - DNA, 25 bp, Homo sapien
ccagactcacttctgagtaggttcc

SEQ ID NO: 2404728 - DNA, 25 bp, Homo sapien
ctgggccagactcacttctgagtag

SEQ ID NO: 2404729 - DNA, 25 bp, Homo sapien
atccctggtataggcaaactgcatg

SEQ ID NO: 2404730 - DNA, 25 bp, Homo sapien
tgacaggatccctggtataggcaaa

SEQ ID NO: 2404731 - DNA, 25 bp, Homo sapien
tataggcaaactgcatgtgttggag

SEQ ID NO: 2404732 - DNA, 25 bp, Homo sapien
cctggtataggcaaactgcatgtgt

SEQ ID NO: 2404733 - DNA, 25 bp, Homo sapien
cgtttactaaaagggcatgaggtct

SEQ ID NO: 2404734 - DNA, 25 bp, Homo sapien
taaaagggcatgaggtcttggcaaa

SEQ ID NO: 2404735 - DNA, 25 bp, Homo sapien
attcgtttactaaaagggcatgagg

SEQ ID NO: 2404736 - DNA, 25 bp, Homo sapien
tactaaaagggcatgaggtcttggc

SEQ ID NO: 2404737 - DNA, 25 bp, Homo sapien
gagaaacaggagactagcaacacat

SEQ ID NO: 2404738 - DNA, 25 bp, Homo sapien
gtcacacgccccttagtggagaggt

SEQ ID NO: 2404739 - DNA, 25 bp, Homo sapien
gacatctgtgatccggtgaaacccc

SEQ ID NO: 2404740 - DNA, 25 bp, Homo sapien
ggtcaggttacctcttaacgacaca

SEQ ID NO: 2404741 - DNA, 25 bp, Homo sapien
tattttccaatcataacggtctgca

SEQ ID NO: 2404742 - DNA, 25 bp, Homo sapien
gggcggtggcttgtgtcagtaatcc

SEQ ID NO: 2404743 - DNA, 25 bp, Homo sapien
caagctaaatggtacatgagcactc

SEQ ID NO: 2404744 - DNA, 25 bp, Homo sapien
aaatcaaactatatagagagggaaa

SEQ ID NO: 2404745 - DNA, 25 bp, Homo sapien
tgctcattaccaaaatatagtacct

SEQ ID NO: 2404746 - DNA, 25 bp, Homo sapien
ggcaataccattatggtctttacag

SEQ ID NO: 2404747 - DNA, 25 bp, Homo sapien
gcaaactcagatggcataactagtg

SEQ ID NO: 2404748 - DNA, 25 bp, Homo sapien
tagaaatctgagtaaaccctacatg

SEQ ID NO: 2404749 - DNA, 25 bp, Homo sapien
cagtactcttaacaaatgcttccag

SEQ ID NO: 2404750 - DNA, 25 bp, Homo sapien
aagcagtactcttaacaaatgcttc

SEQ ID NO: 2404751 - DNA, 25 bp, Homo sapien
ttttatggctaaagcagtactctta

SEQ ID NO: 2404752 - DNA, 25 bp, Homo sapien
tttttatggctaaagcagtactctt

SEQ ID NO: 2404753 - DNA, 25 bp, Homo sapien
ctgcaagctcaagcgctttaattct

SEQ ID NO: 2404754 - DNA, 25 bp, Homo sapien
tgatgcactgcaagctcaagcgctt

SEQ ID NO: 2404755 - DNA, 25 bp, Homo sapien
tgcactgcaagctcaagcgctttaa

SEQ ID NO: 2404756 - DNA, 25 bp, Homo sapien
cactgcaagctcaagcgctttaatt

SEQ ID NO: 2404757 - DNA, 25 bp, Homo sapien
cattgcacagttacgttcagcatga

SEQ ID NO: 2404758 - DNA, 25 bp, Homo sapien
tccacgtacatgtagcattgcacag

SEQ ID NO: 2404759 - DNA, 25 bp, Homo sapien
tgattcttgaagatccacactggtc

SEQ ID NO: 2404760 - DNA, 25 bp, Homo sapien
ggtctgatataagtccacgtacatg

SEQ ID NO: 2404761 - DNA, 25 bp, Homo sapien
aaccatttattgtcacccatggatg

SEQ ID NO: 2404762 - DNA, 25 bp, Homo sapien
tgatgactgctgttacgaaacacac

SEQ ID NO: 2404763 - DNA, 25 bp, Homo sapien
atgatgactgctgttacgaaacaca

SEQ ID NO: 2404764 - DNA, 25 bp, Homo sapien
agccaaaccatttattgtcacccat

SEQ ID NO: 2404765 - DNA, 25 bp, Homo sapien
aaggtaaaatgctggccagaaattt

SEQ ID NO: 2404766 - DNA, 25 bp, Homo sapien
gaaggtaaaatgctggccagaaatt

SEQ ID NO: 2404767 - DNA, 25 bp, Homo sapien
ggaaggtaaaatgctggccagaaat

SEQ ID NO: 2404768 - DNA, 25 bp, Homo sapien
aggaaggtaaaatgctggccagaaa

SEQ ID NO: 2404769 - DNA, 25 bp, Homo sapien
ctatacaaagcagactagaagagtt

SEQ ID NO: 2404770 - DNA, 25 bp, Homo sapien
gactagaagagttctttgaagcaca

SEQ ID NO: 2404771 - DNA, 25 bp, Homo sapien
tgaagcacaggcctgcaaactctct

SEQ ID NO: 2404772 - DNA, 25 bp, Homo sapien
aagcagactagaagagttctttgaa

SEQ ID NO: 2404773 - DNA, 25 bp, Homo sapien
taataacaactgttggaatatgtaa

SEQ ID NO: 2404774 - DNA, 25 bp, Homo sapien
accaatgtaataacaactgttggaa

SEQ ID NO: 2404775 - DNA, 25 bp, Homo sapien
actcctcaggacaatggccacaatg

SEQ ID NO: 2404776 - DNA, 25 bp, Homo sapien
ggttcttgcattcggggaagaattg

SEQ ID NO: 2404777 - DNA, 25 bp, Homo sapien
cattcggggaagaattgttctgctc

SEQ ID NO: 2404778 - DNA, 25 bp, Homo sapien
cttgcattcggggaagaattgttct

SEQ ID NO: 2404779 - DNA, 25 bp, Homo sapien
tgggttcttgcattcggggaagaat

SEQ ID NO: 2404780 - DNA, 25 bp, Homo sapien
tatttggggaagaattgttctgctc

SEQ ID NO: 2404781 - DNA, 25 bp, Homo sapien
tctgggttcttgtatttggggaaga

SEQ ID NO: 2404782 - DNA, 25 bp, Homo sapien
tggggaagaattgttctgctccagg

SEQ ID NO: 2404783 - DNA, 25 bp, Homo sapien
tttggggaagaattgttctgctcca

SEQ ID NO: 2404784 - DNA, 25 bp, Homo sapien
gccatcaggacaatgcaaatgattc

SEQ ID NO: 2404785 - DNA, 25 bp, Homo sapien
ttcctaggacctcggcagtgagctt

SEQ ID NO: 2404786 - DNA, 25 bp, Homo sapien
tgcaaatgattcctaggacctcggc

SEQ ID NO: 2404787 - DNA, 25 bp, Homo sapien
catcaggacaatgcaaatgattcct

SEQ ID NO: 2404788 - DNA, 25 bp, Homo sapien
ttctgcattcaactgcacatcccag

SEQ ID NO: 2404789 - DNA, 25 bp, Homo sapien
ccttctgcattcaactgcacatccc

SEQ ID NO: 2404790 - DNA, 25 bp, Homo sapien
cttctgcattcaactgcacatccca

SEQ ID NO: 2404791 - DNA, 25 bp, Homo sapien
tcaatcccttgatgattcagagaag

SEQ ID NO: 2404792 - DNA, 25 bp, Homo sapien
ttatcaatcccttgatgattcagag

SEQ ID NO: 2404793 - DNA, 25 bp, Homo sapien
tatcaatcccttgatgattcagaga

SEQ ID NO: 2404794 - DNA, 25 bp, Homo sapien
atcaatcccttgatgattcagagaa

SEQ ID NO: 2404795 - DNA, 25 bp, Homo sapien
atggtgtatattttgacaggatccc

SEQ ID NO: 2404796 - DNA, 25 bp, Homo sapien
tgacaggatccctggtataggcaat

SEQ ID NO: 2404797 - DNA, 25 bp, Homo sapien
gtgctctatgataactgcacttaag

SEQ ID NO: 2404798 - DNA, 25 bp, Homo sapien
ctgtgtgatgtgagggactgtgctc

SEQ ID NO: 2404799 - DNA, 25 bp, Homo sapien
cttttattccactggcagcaaggta

SEQ ID NO: 2404800 - DNA, 25 bp, Homo sapien
cactaagtcataggaaatttccagc

SEQ ID NO: 2404801 - DNA, 25 bp, Homo sapien
tagcctaagcctacgcagtgtcagc

SEQ ID NO: 2404802 - DNA, 25 bp, Homo sapien
gaaactattgctatgacgtcactaa

SEQ ID NO: 2404803 - DNA, 25 bp, Homo sapien
gtgccagcaggtgtgttgtaaattg

SEQ ID NO: 2404804 - DNA, 25 bp, Homo sapien
gcacaccttcccaatgaaaacttgg

SEQ ID NO: 2404805 - DNA, 25 bp, Homo sapien
tcttcaatagattaagcacaccttc

SEQ ID NO: 2404806 - DNA, 25 bp, Homo sapien
cgtaaaggaattatgtggatatacc

SEQ ID NO: 2404807 - DNA, 25 bp, Homo sapien
cactgcaaacgcaaatgctttactt

SEQ ID NO: 2404808 - DNA, 25 bp, Homo sapien
aaacgttctatcaattagtggtcat

SEQ ID NO: 2404809 - DNA, 25 bp, Homo sapien
gaaagttttcatcacgacacaaaga

SEQ ID NO: 2404810 - DNA, 25 bp, Homo sapien
tctggatagctttattgaagtgtca

SEQ ID NO: 2404811 - DNA, 25 bp, Homo sapien
gggctgatttaagtcgatttacttg

SEQ ID NO: 2404812 - DNA, 25 bp, Homo sapien
taagttcagcattatctgagtcttt

SEQ ID NO: 2404813 - DNA, 25 bp, Homo sapien
ttgtagcactgcacagttaagttca

SEQ ID NO: 2404814 - DNA, 25 bp, Homo sapien
agtcgatttacttgtagcactgcac

SEQ ID NO: 2404815 - DNA, 25 bp, Homo sapien
agcaaatgattcatgagacgaaagc

SEQ ID NO: 2404816 - DNA, 25 bp, Homo sapien
tgattcatgagacgaaagcattttc

SEQ ID NO: 2404817 - DNA, 25 bp, Homo sapien
caaatgattcatgagacgaaagcat

SEQ ID NO: 2404818 - DNA, 25 bp, Homo sapien
aatgattcatgagacgaaagcattt

SEQ ID NO: 2404819 - DNA, 25 bp, Homo sapien
tgcagttccctgatagtccagctcg

SEQ ID NO: 2404820 - DNA, 25 bp, Homo sapien
tgcagaacctatagagagattatgt

SEQ ID NO: 2404821 - DNA, 25 bp, Homo sapien
tgaaatggcagatagtgcagaacct

SEQ ID NO: 2404822 - DNA, 25 bp, Homo sapien
tatgccaacagcactattattgtgc

SEQ ID NO: 2404823 - DNA, 25 bp, Homo sapien
gccaaaccatttattgtcacccatg

SEQ ID NO: 2404824 - DNA, 25 bp, Homo sapien
tgatgactgctgttacgaaacacac

SEQ ID NO: 2404825 - DNA, 25 bp, Homo sapien
ggaaggtaaaatgctggccagaaat

SEQ ID NO: 2404826 - DNA, 25 bp, Homo sapien
tacgaaacacaccaatccatgagga

SEQ ID NO: 2404827 - DNA, 25 bp, Homo sapien
gaagtacaggccagcaaactctctt

SEQ ID NO: 2404828 - DNA, 25 bp, Homo sapien
aagcagactggagttcttcgaagta

SEQ ID NO: 2404829 - DNA, 25 bp, Homo sapien
actcctcaggacaatggccacaatg

SEQ ID NO: 2404830 - DNA, 25 bp, Homo sapien
ttccttaccaatgtaataacaactg

SEQ ID NO: 2404831 - DNA, 25 bp, Homo sapien
cggggaaaaattgttctgctccagg

SEQ ID NO: 2404832 - DNA, 25 bp, Homo sapien
tcggggaaaaattgttctgctccag

SEQ ID NO: 2404833 - DNA, 25 bp, Homo sapien
tctgcgttcttgtattcggggaaaa

SEQ ID NO: 2404834 - DNA, 25 bp, Homo sapien
ctttctgcgttcttgtattcgggga

SEQ ID NO: 2404835 - DNA, 25 bp, Homo sapien
ttcctaggacctcggcagtgagctt

SEQ ID NO: 2404836 - DNA, 25 bp, Homo sapien
tgcaaatgattcctaggacctcggc

SEQ ID NO: 2404837 - DNA, 25 bp, Homo sapien
gccatcaggacaatgcaaatgattc

SEQ ID NO: 2404838 - DNA, 25 bp, Homo sapien
catcaggacaatgcaaatgattcct

SEQ ID NO: 2404839 - DNA, 25 bp, Homo sapien
ttatcaatcccttgatgattcaggg

SEQ ID NO: 2404840 - DNA, 25 bp, Homo sapien
atcaatcccttgatgattcagggaa

SEQ ID NO: 2404841 - DNA, 25 bp, Homo sapien
tatcaatcccttgatgattcaggga

SEQ ID NO: 2404842 - DNA, 25 bp, Homo sapien
tcaatcccttgatgattcagggaag

SEQ ID NO: 2404843 - DNA, 25 bp, Homo sapien
aatggtgtatattttgacaggatcc

SEQ ID NO: 2404844 - DNA, 25 bp, Homo sapien
gaagctataaatggtgtatattttg

SEQ ID NO: 2404845 - DNA, 25 bp, Homo sapien
gtgctctatgataactgcacttaag

SEQ ID NO: 2404846 - DNA, 25 bp, Homo sapien
ctgtgtgatgtgagggactgtgctc

SEQ ID NO: 2404847 - DNA, 25 bp, Homo sapien
atcagaaagccacacgcccttcagt

SEQ ID NO: 2404848 - DNA, 25 bp, Homo sapien
cagaaagccacacgcccttcagtgg

SEQ ID NO: 2404849 - DNA, 25 bp, Homo sapien
gccacacgcccttcagtggagaggt

SEQ ID NO: 2404850 - DNA, 25 bp, Homo sapien
aagccacacgcccttcagtggagag

SEQ ID NO: 2404851 - DNA, 25 bp, Homo sapien
caaagtgccagcaggtgtgttgtaa

SEQ ID NO: 2404852 - DNA, 25 bp, Homo sapien
aaagtgccagcaggtgtgttgtaaa

SEQ ID NO: 2404853 - DNA, 25 bp, Homo sapien
aagtgccagcaggtgtgttgtaaat

SEQ ID NO: 2404854 - DNA, 25 bp, Homo sapien
aaagtaacgttctatcagttagagg

SEQ ID NO: 2404855 - DNA, 25 bp, Homo sapien
tagctttattgaagtgtcgtgtaca

SEQ ID NO: 2404856 - DNA, 25 bp, Homo sapien
tctggatagctttattgaagtgtcg

SEQ ID NO: 2404857 - DNA, 25 bp, Homo sapien
gaaagttttcatcacgacacaaagt

SEQ ID NO: 2404858 - DNA, 25 bp, Homo sapien
gggctgatttaagtcgatttacttg

SEQ ID NO: 2404859 - DNA, 25 bp, Homo sapien
taagttcagcattatctgagtcttt

SEQ ID NO: 2404860 - DNA, 25 bp, Homo sapien
agtcgatttacttgtagcactgcac

SEQ ID NO: 2404861 - DNA, 25 bp, Homo sapien
ttgtagcactgcacagttaagttca

SEQ ID NO: 2404862 - DNA, 25 bp, Homo sapien
tgatgactgctgttacgaaacacac

SEQ ID NO: 2404863 - DNA, 25 bp, Homo sapien
atgatgactgctgttacgaaacaca

SEQ ID NO: 2404864 - DNA, 25 bp, Homo sapien
caatccatgaggatggtgaaatgat

SEQ ID NO: 2404865 - DNA, 25 bp, Homo sapien
tgaggatggtgaaatgatggacaga

SEQ ID NO: 2404866 - DNA, 25 bp, Homo sapien
gatggtgaaatgatggacagaaatt

SEQ ID NO: 2404867 - DNA, 25 bp, Homo sapien
atccatgaggatggtgaaatgatgg

SEQ ID NO: 2404868 - DNA, 25 bp, Homo sapien
tcttctttccttaccaatgtagtaa

SEQ ID NO: 2404869 - DNA, 25 bp, Homo sapien
agttcttctttccttaccaatgtag

SEQ ID NO: 2404870 - DNA, 25 bp, Homo sapien
tctttccttaccaatgtagtaacaa

SEQ ID NO: 2404871 - DNA, 25 bp, Homo sapien
ttctttccttaccaatgtagtaaca

SEQ ID NO: 2404872 - DNA, 25 bp, Homo sapien
ttcagggaagaattgttgtgcctct

SEQ ID NO: 2404873 - DNA, 25 bp, Homo sapien
ttctgagttcttgtattcagggaag

SEQ ID NO: 2404874 - DNA, 25 bp, Homo sapien
tcagggaagaattgttgtgcctctg

SEQ ID NO: 2404875 - DNA, 25 bp, Homo sapien
cagtaaggtttttcagactcctaga

SEQ ID NO: 2404876 - DNA, 25 bp, Homo sapien
cccttgtaatcttcgaaaatagact

SEQ ID NO: 2404877 - DNA, 25 bp, Homo sapien
tacgattgcatcagaagcgaatact

SEQ ID NO: 2404878 - DNA, 25 bp, Homo sapien
gaggcacattcaatcattaacgtga

SEQ ID NO: 2404879 - DNA, 25 bp, Homo sapien
cccaggatcccaacaatgagcttct

SEQ ID NO: 2404880 - DNA, 25 bp, Homo sapien
gggaataacaactatcgttaccaca

SEQ ID NO: 2404881 - DNA, 25 bp, Homo sapien
cagaggccattaagataagacagat

SEQ ID NO: 2404882 - DNA, 25 bp, Homo sapien
caactatcgttaccacagaggccat

SEQ ID NO: 2404883 - DNA, 25 bp, Homo sapien
caggtctgagtagattactccttgg

SEQ ID NO: 2404884 - DNA, 25 bp, Homo sapien
ttaattccgcataggttatttcctg

SEQ ID NO: 2404885 - DNA, 25 bp, Homo sapien
tgaaggtttaattccgcataggtta

SEQ ID NO: 2404886 - DNA, 25 bp, Homo sapien
tgcctctttgggtttgggggcagat

SEQ ID NO: 2404887 - DNA, 25 bp, Homo sapien
agtgtgtgatgtcagggactgtact

SEQ ID NO: 2404888 - DNA, 25 bp, Homo sapien
tctgcagtgtgtgatgtcagggact

SEQ ID NO: 2404889 - DNA, 25 bp, Homo sapien
ctctgcagtgtgtgatgtcagggac

SEQ ID NO: 2404890 - DNA, 25 bp, Homo sapien
tgcagtgtgtgatgtcagggactgt

SEQ ID NO: 2404891 - DNA, 25 bp, Homo sapien
aaagtcacacatcctttagtggaga

SEQ ID NO: 2404892 - DNA, 25 bp, Homo sapien
agtctcataaaaaggcctgctatag

SEQ ID NO: 2404893 - DNA, 25 bp, Homo sapien
gccaggttagtctcataaaaaggcc

SEQ ID NO: 2404894 - DNA, 25 bp, Homo sapien
cacatcctttagtggagaggccagg

SEQ ID NO: 2404895 - DNA, 25 bp, Homo sapien
tcgcagactgccctgtgaaggctca

SEQ ID NO: 2404896 - DNA, 25 bp, Homo sapien
caatgcctgcaatcttcgcagactg

SEQ ID NO: 2404897 - DNA, 25 bp, Homo sapien
gatttctcatcaacgtgttactaag

SEQ ID NO: 2404898 - DNA, 25 bp, Homo sapien
tgagtcaagagtggaaaaagtagat

SEQ ID NO: 2404899 - DNA, 25 bp, Homo sapien
catttaggccttggtcatgctgcca

SEQ ID NO: 2404900 - DNA, 25 bp, Homo sapien
taactagtgtcagccacaacttgag

SEQ ID NO: 2404901 - DNA, 25 bp, Homo sapien
cacactagtgtctcaggaggtaggc

SEQ ID NO: 2404902 - DNA, 25 bp, Homo sapien
catctccagacctgaaaagggaccc

SEQ ID NO: 2404903 - DNA, 25 bp, Homo sapien
caatcttaatgagactagaacccag

SEQ ID NO: 2404904 - DNA, 25 bp, Homo sapien
ccatagcaggacaattttccttgac

SEQ ID NO: 2404905 - DNA, 25 bp, Homo sapien
caggacaattttccttgacaggagg

SEQ ID NO: 2404906 - DNA, 25 bp, Homo sapien
acttttctccatagcaggacaattt

SEQ ID NO: 2404907 - DNA, 25 bp, Homo sapien
ttatatcagtccaagttcttgaaat

SEQ ID NO: 2404908 - DNA, 25 bp, Homo sapien
tatcagtccaagttcttgaaatgat

SEQ ID NO: 2404909 - DNA, 25 bp, Homo sapien
cagtccaagttcttgaaatgatgct

SEQ ID NO: 2404910 - DNA, 25 bp, Homo sapien
gttcttgaaatgatgctgctttcat

SEQ ID NO: 2404911 - DNA, 25 bp, Homo sapien
tcctcttctcataatcttccaaaag

SEQ ID NO: 2404912 - DNA, 25 bp, Homo sapien
tttcctcttctcataatcttccaaa

SEQ ID NO: 2404913 - DNA, 25 bp, Homo sapien
cttctcataatcttccaaaagtaaa

SEQ ID NO: 2404914 - DNA, 25 bp, Homo sapien
tctcataatcttccaaaagtaaact

SEQ ID NO: 2404915 - DNA, 25 bp, Homo sapien
gctgccagtgaagcgcgtcctggcg

SEQ ID NO: 2404916 - DNA, 25 bp, Homo sapien
ctggcggcacagcggataccatttg

SEQ ID NO: 2404917 - DNA, 25 bp, Homo sapien
aatcttcacaaaggcacccatgctg

SEQ ID NO: 2404918 - DNA, 25 bp, Homo sapien
gctccaggacaccactgcggcacag

SEQ ID NO: 2404919 - DNA, 25 bp, Homo sapien
cttggcttgctttaaatttggctgc

SEQ ID NO: 2404920 - DNA, 25 bp, Homo sapien
taaatttggctgcttgagtatggat

SEQ ID NO: 2404921 - DNA, 25 bp, Homo sapien
aaatccttggcttgctttaaatttg

SEQ ID NO: 2404922 - DNA, 25 bp, Homo sapien
aatttggctgcttgagtatggattc

SEQ ID NO: 2404923 - DNA, 25 bp, Homo sapien
agtctctgcctcaagttgcttaatg

SEQ ID NO: 2404924 - DNA, 25 bp, Homo sapien
gcccggcatcaaaacatgctatgca

SEQ ID NO: 2404925 - DNA, 25 bp, Homo sapien
tctgcctcaagttgcttaatgggtg

SEQ ID NO: 2404926 - DNA, 25 bp, Homo sapien
catgctatgcacgtgctgcagtctc

SEQ ID NO: 2404927 - DNA, 25 bp, Homo sapien
cctcagaagtcattagggatgttat

SEQ ID NO: 2404928 - DNA, 25 bp, Homo sapien
gagagtcttacattgcaaacataca

SEQ ID NO: 2404929 - DNA, 25 bp, Homo sapien
taattcacagatccaggaagagatg

SEQ ID NO: 2404930 - DNA, 25 bp, Homo sapien
gatgacgaagtattgctctgagctc

SEQ ID NO: 2404931 - DNA, 25 bp, Homo sapien
agaaatagaattgagagtcgctcac

SEQ ID NO: 2404932 - DNA, 25 bp, Homo sapien
cagaaatagaattgagagtcgctca

SEQ ID NO: 2404933 - DNA, 25 bp, Homo sapien
tcagaaatagaattgagagtcgctc

SEQ ID NO: 2404934 - DNA, 25 bp, Homo sapien
ctggtcagaattctcatagatgttt

SEQ ID NO: 2404935 - DNA, 25 bp, Homo sapien
atgttgtcagcagcacaataggaga

SEQ ID NO: 2404936 - DNA, 25 bp, Homo sapien
acaataggagatcctgacatttcag

SEQ ID NO: 2404937 - DNA, 25 bp, Homo sapien
agcacaataggagatcctgacattt

SEQ ID NO: 2404938 - DNA, 25 bp, Homo sapien
cagaatgctgagactgaatagagaa

SEQ ID NO: 2404939 - DNA, 25 bp, Homo sapien
catttgatttcaagggctactatga

SEQ ID NO: 2404940 - DNA, 25 bp, Homo sapien
gtgcaaccatctcctgagctaaaat

SEQ ID NO: 2404941 - DNA, 25 bp, Homo sapien
cacaggtaggtcaattaattttcta

SEQ ID NO: 2404942 - DNA, 25 bp, Homo sapien
gaagttccttgtactatgcttgcaa

SEQ ID NO: 2404943 - DNA, 25 bp, Homo sapien
gaaggaacaaccactctcaaaagag

SEQ ID NO: 2404944 - DNA, 25 bp, Homo sapien
tcttggcgcacaccgaatcagagaa

SEQ ID NO: 2404945 - DNA, 25 bp, Homo sapien
catgctgcgtaaaaataagccagat

SEQ ID NO: 2404946 - DNA, 25 bp, Homo sapien
tatcaatccatttccacttactttc

SEQ ID NO: 2404947 - DNA, 25 bp, Homo sapien
attccaggagatgtgccattatcaa

SEQ ID NO: 2404948 - DNA, 25 bp, Homo sapien
actttccctttcatcatatgataat

SEQ ID NO: 2404949 - DNA, 25 bp, Homo sapien
attattttcataaatctgagattga

SEQ ID NO: 2404950 - DNA, 25 bp, Homo sapien
aatatcttaggtccaacattgagaa

SEQ ID NO: 2404951 - DNA, 25 bp, Homo sapien
tcaatatcttaggtccaacattgag

SEQ ID NO: 2404952 - DNA, 25 bp, Homo sapien
caatatcttaggtccaacattgaga

SEQ ID NO: 2404953 - DNA, 25 bp, Homo sapien
aatgttgacaagtctgtttacatcc

SEQ ID NO: 2404954 - DNA, 25 bp, Homo sapien
ctttgtcatctatcttcaaaaggga

SEQ ID NO: 2404955 - DNA, 25 bp, Homo sapien
ataataacagtttactccacaacag

SEQ ID NO: 2404956 - DNA, 25 bp, Homo sapien
aaagggatgatctacaatgttgaca

SEQ ID NO: 2404957 - DNA, 25 bp, Homo sapien
cttagaatttcctgccgttgatgtt

SEQ ID NO: 2404958 - DNA, 25 bp, Homo sapien
tgatgtacttttcactacagtttct

SEQ ID NO: 2404959 - DNA, 25 bp, Homo sapien
tgtataaggcgtgaatccagttcct

SEQ ID NO: 2404960 - DNA, 25 bp, Homo sapien
tagttgtcattttgcatgatgtact

SEQ ID NO: 2404961 - DNA, 25 bp, Homo sapien
acactgtgactatcatcagaagaag

SEQ ID NO: 2404962 - DNA, 25 bp, Homo sapien
gaagtaaacagaggatcccaagagt

SEQ ID NO: 2404963 - DNA, 25 bp, Homo sapien
ccaagagtcactgcaatgaggtgcc

SEQ ID NO: 2404964 - DNA, 25 bp, Homo sapien
cactgcaatgaggtgccagggcact

SEQ ID NO: 2404965 - DNA, 25 bp, Homo sapien
tattctgtgactctgaaggagactg

SEQ ID NO: 2404966 - DNA, 25 bp, Homo sapien
tgcaaaaatctcagggttgaataaa

SEQ ID NO: 2404967 - DNA, 25 bp, Homo sapien
tcccaggcctttgagtatcatcagg

SEQ ID NO: 2404968 - DNA, 25 bp, Homo sapien
tatcatcaggccttaatctattctg

SEQ ID NO: 2404969 - DNA, 25 bp, Homo sapien
ttcaaatcctgaaataggatggttt

SEQ ID NO: 2404970 - DNA, 25 bp, Homo sapien
tagagtaagaaggtaagttttgcat

SEQ ID NO: 2404971 - DNA, 25 bp, Homo sapien
cattcaaatcctgaaataggatggt

SEQ ID NO: 2404972 - DNA, 25 bp, Homo sapien
tttgcattcaaatcctgaaatagga

SEQ ID NO: 2404973 - DNA, 25 bp, Homo sapien
tgttaatactggactacaatttcct

SEQ ID NO: 2404974 - DNA, 25 bp, Homo sapien
caaattgcacatgtaaccatattct

SEQ ID NO: 2404975 - DNA, 25 bp, Homo sapien
acaatcagtagcgaatgctttccta

SEQ ID NO: 2404976 - DNA, 25 bp, Homo sapien
aaatcacagcatattgagaaagaga

SEQ ID NO: 2404977 - DNA, 25 bp, Homo sapien
gaagctggcctttcgggtcctggat

SEQ ID NO: 2404978 - DNA, 25 bp, Homo sapien
ctgtatctgtgctatgcagtggtgc

SEQ ID NO: 2404979 - DNA, 25 bp, Homo sapien
tctcttcgaatgatactgtaactca

SEQ ID NO: 2404980 - DNA, 25 bp, Homo sapien
tgccccacctcttgaccaaagtgat

SEQ ID NO: 2404981 - DNA, 25 bp, Homo sapien
tcatgcatggagtttggacgcttca

SEQ ID NO: 2404982 - DNA, 25 bp, Homo sapien
caggcgaaattgctgatacagggac

SEQ ID NO: 2404983 - DNA, 25 bp, Homo sapien
tttttgtcactccaccatgaggcag

SEQ ID NO: 2404984 - DNA, 25 bp, Homo sapien
tgccctccagaagagatgttccctt

SEQ ID NO: 2404985 - DNA, 25 bp, Homo sapien
gaattcagaaggacccgggcttcca

SEQ ID NO: 2404986 - DNA, 25 bp, Homo sapien
agtatcacacgcttcataggctagg

SEQ ID NO: 2404987 - DNA, 25 bp, Homo sapien
ctgaagacagagcacaatggaccgt

SEQ ID NO: 2404988 - DNA, 25 bp, Homo sapien
cacaaagcatgaatcctggaaccag

SEQ ID NO: 2404989 - DNA, 25 bp, Homo sapien
tattggactgcacatagaacgtttc

SEQ ID NO: 2404990 - DNA, 25 bp, Homo sapien
tatactgtccaaacggtagccgcta

SEQ ID NO: 2404991 - DNA, 25 bp, Homo sapien
aagttattggactgcccgactctag

SEQ ID NO: 2404992 - DNA, 25 bp, Homo sapien
tgaattagagacatagcctcctgga

SEQ ID NO: 2404993 - DNA, 25 bp, Homo sapien
gcttcacattcataaaaaccccaat

SEQ ID NO: 2404994 - DNA, 25 bp, Homo sapien
taaggataaccattaagcttgctaa

SEQ ID NO: 2404995 - DNA, 25 bp, Homo sapien
aaccccaatactgtaaatgacaaat

SEQ ID NO: 2404996 - DNA, 25 bp, Homo sapien
caacccatatggactcaagtaagga

SEQ ID NO: 2404997 - DNA, 25 bp, Homo sapien
taaaatactcgaaggccttcaggat

SEQ ID NO: 2404998 - DNA, 25 bp, Homo sapien
atagtaaaatactcgaaggccttca

SEQ ID NO: 2404999 - DNA, 25 bp, Homo sapien
tccaataagactgaaaactaaacat

SEQ ID NO: 2405000 - DNA, 25 bp, Homo sapien
tttcaagtcttgtaccaaatagtaa

SEQ ID NO: 2405001 - DNA, 25 bp, Homo sapien
aattctctccttgttagacactggg

SEQ ID NO: 2405002 - DNA, 25 bp, Homo sapien
aataatactgtaatgctaccatttc

SEQ ID NO: 2405003 - DNA, 25 bp, Homo sapien
gattttgctgacaactaaaatgaac

SEQ ID NO: 2405004 - DNA, 25 bp, Homo sapien
tccttatgattgtaataaccacatc

SEQ ID NO: 2405005 - DNA, 25 bp, Homo sapien
ggatacagcaaggttctcaaggagc

SEQ ID NO: 2405006 - DNA, 25 bp, Homo sapien
cagggcactatgctaactctgtgga

SEQ ID NO: 2405007 - DNA, 25 bp, Homo sapien
gatcttgggaagacatcgatagcta

SEQ ID NO: 2405008 - DNA, 25 bp, Homo sapien
ttcccaagtattgagcccaagaagg

SEQ ID NO: 2405009 - DNA, 25 bp, Homo sapien
gtgctcatctccaattacaatttca

SEQ ID NO: 2405010 - DNA, 25 bp, Homo sapien
gactgatttacatcaataagagaac

SEQ ID NO: 2405011 - DNA, 25 bp, Homo sapien
tttgactgatttacatcaataagag

SEQ ID NO: 2405012 - DNA, 25 bp, Homo sapien
tgctcatctccaattacaatttcaa

SEQ ID NO: 2405013 - DNA, 25 bp, Homo sapien
caagttttctagcagccaacagagg

SEQ ID NO: 2405014 - DNA, 25 bp, Homo sapien
tatgtcaggccctagtggtagggac

SEQ ID NO: 2405015 - DNA, 25 bp, Homo sapien
ttaaaataaagactgctcacgcgca

SEQ ID NO: 2405016 - DNA, 25 bp, Homo sapien
gtatctgcataaaacaaactgaggc

SEQ ID NO: 2405017 - DNA, 25 bp, Homo sapien
caatcctcagggatatacaaaagtg

SEQ ID NO: 2405018 - DNA, 25 bp, Homo sapien
gaaattaggccttcagagttcttca

SEQ ID NO: 2405019 - DNA, 25 bp, Homo sapien
taagttactcctacagagtgtcagc

SEQ ID NO: 2405020 - DNA, 25 bp, Homo sapien
gcttctttaagcagaagacttaagt

SEQ ID NO: 2405021 - DNA, 25 bp, Homo sapien
aaatttagagctatgcactgactcc

SEQ ID NO: 2405022 - DNA, 25 bp, Homo sapien
tgaaaacatcctaacgttggctggg

SEQ ID NO: 2405023 - DNA, 25 bp, Homo sapien
ccttcactactaggaggtagcacag

SEQ ID NO: 2405024 - DNA, 25 bp, Homo sapien
gagaatttaccaggtgcctattaaa

SEQ ID NO: 2405025 - DNA, 25 bp, Homo sapien
gtcatcaataattctcttcagttct

SEQ ID NO: 2405026 - DNA, 25 bp, Homo sapien
ttccattacactcttgtgcacataa

SEQ ID NO: 2405027 - DNA, 25 bp, Homo sapien
gggaggccacaaagcatcatcttct

SEQ ID NO: 2405028 - DNA, 25 bp, Homo sapien
tgtcggccaaccctatcagggggag

SEQ ID NO: 2405029 - DNA, 25 bp, Homo sapien
ttcttctttacaatatagccttaga

SEQ ID NO: 2405030 - DNA, 25 bp, Homo sapien
tctttacaatatagccttagatgta

SEQ ID NO: 2405031 - DNA, 25 bp, Homo sapien
tacaatatagccttagatgtacttt

SEQ ID NO: 2405032 - DNA, 25 bp, Homo sapien
cttctttacaatatagccttagatg

SEQ ID NO: 2405033 - DNA, 25 bp, Homo sapien
gtaattgctgttgttggcatatcta

SEQ ID NO: 2405034 - DNA, 25 bp, Homo sapien
attgctgttgttggcatatctaagc

SEQ ID NO: 2405035 - DNA, 25 bp, Homo sapien
catcatttttgtaattgctgttgtt

SEQ ID NO: 2405036 - DNA, 25 bp, Homo sapien
ctgttgttggcatatctaagctttc

SEQ ID NO: 2405037 - DNA, 25 bp, Homo sapien
tccttgtgtaagatcattgctagac

SEQ ID NO: 2405038 - DNA, 25 bp, Homo sapien
agtttgctgaagttgaagctagcca

SEQ ID NO: 2405039 - DNA, 25 bp, Homo sapien
taaccagggtcacacaagattcaga

SEQ ID NO: 2405040 - DNA, 25 bp, Homo sapien
tgtctgtatcggtgctaagtgcctc

SEQ ID NO: 2405041 - DNA, 25 bp, Homo sapien
cattctctaaggatagcgctgtcag

SEQ ID NO: 2405042 - DNA, 25 bp, Homo sapien
tgaactttcttgttgcaggtaggca

SEQ ID NO: 2405043 - DNA, 25 bp, Homo sapien
cactgttgcacactacttgggtagc

SEQ ID NO: 2405044 - DNA, 25 bp, Homo sapien
gatcttcctgactccctcctgtgga

SEQ ID NO: 2405045 - DNA, 25 bp, Homo sapien
ttttattcatccactggaccacccg

SEQ ID NO: 2405046 - DNA, 25 bp, Homo sapien
taagctcctatttccttcgagggaa

SEQ ID NO: 2405047 - DNA, 25 bp, Homo sapien
aaagtgctagcattttcaatcaggg

SEQ ID NO: 2405048 - DNA, 25 bp, Homo sapien
caatcagggcgacgatctagagtcc

SEQ ID NO: 2405049 - DNA, 25 bp, Homo sapien
gccgaaattcgaactccagaaactc

SEQ ID NO: 2405050 - DNA, 25 bp, Homo sapien
cgtccggccgaaattcgaactccag

SEQ ID NO: 2405051 - DNA, 25 bp, Homo sapien
ttcgaactccagaaactcgtgccca

SEQ ID NO: 2405052 - DNA, 25 bp, Homo sapien
aactccagaaactcgtgcccaaact

SEQ ID NO: 2405053 - DNA, 25 bp, Homo sapien
gtgccctacgtagtagcgcaggtag

SEQ ID NO: 2405054 - DNA, 25 bp, Homo sapien
ccctacgtagtagcgcaggtagaaa

SEQ ID NO: 2405055 - DNA, 25 bp, Homo sapien
tacgtagtagcgcaggtagaaatcg

SEQ ID NO: 2405056 - DNA, 25 bp, Homo sapien
tagtagcgcaggtagaaatcgctag

SEQ ID NO: 2405057 - DNA, 25 bp, Homo sapien
gtcccccggcgccttgcagtgacgt

SEQ ID NO: 2405058 - DNA, 25 bp, Homo sapien
ggaagcccgccgaaaacgcagccaa

SEQ ID NO: 2405059 - DNA, 25 bp, Homo sapien
gccgaaaacgcagccaacgtgtccc

SEQ ID NO: 2405060 - DNA, 25 bp, Homo sapien
ccccggcgccttgcagtgacgtcat

SEQ ID NO: 2405061 - DNA, 25 bp, Homo sapien
gacttccctgtggacgttagcctta

SEQ ID NO: 2405062 - DNA, 25 bp, Homo sapien
catatatggcgagaacttggagcta

SEQ ID NO: 2405063 - DNA, 25 bp, Homo sapien
ccaaaacgggtaaacacagtatgct

SEQ ID NO: 2405064 - DNA, 25 bp, Homo sapien
gatgtcagggctatctcattcagtt

SEQ ID NO: 2405065 - DNA, 25 bp, Homo sapien
caaaacgtatcaatcctcagaacaa

SEQ ID NO: 2405066 - DNA, 25 bp, Homo sapien
attgagcgcatatgtgccagatagt

SEQ ID NO: 2405067 - DNA, 25 bp, Homo sapien
ttatttacttttatcctccctatga

SEQ ID NO: 2405068 - DNA, 25 bp, Homo sapien
gtgtacaaatacatactcaaaacgt

SEQ ID NO: 2405069 - DNA, 25 bp, Homo sapien
catgaatgtttcttgcccgagactc

SEQ ID NO: 2405070 - DNA, 25 bp, Homo sapien
tctaatcggaactaggaagctagct

SEQ ID NO: 2405071 - DNA, 25 bp, Homo sapien
gatgagcttatttgtgccatgcccc

SEQ ID NO: 2405072 - DNA, 25 bp, Homo sapien
tgtgtagagtcccatccagcatcat

SEQ ID NO: 2405073 - DNA, 25 bp, Homo sapien
tgcatacagttcaggtaccaccaac

SEQ ID NO: 2405074 - DNA, 25 bp, Homo sapien
tgtaacacagcctcgtcatctgcag

SEQ ID NO: 2405075 - DNA, 25 bp, Homo sapien
gcgccagcaggacttcatgatactg

SEQ ID NO: 2405076 - DNA, 25 bp, Homo sapien
gctatagttgtagaagaggctctcc

SEQ ID NO: 2405077 - DNA, 25 bp, Homo sapien
taggatgctggtaggagggacttca

SEQ ID NO: 2405078 - DNA, 25 bp, Homo sapien
gggacttcaggatacggtggtgctc

SEQ ID NO: 2405079 - DNA, 25 bp, Homo sapien
ccttctttggagatgctctaggatg

SEQ ID NO: 2405080 - DNA, 25 bp, Homo sapien
tatgtgtgcagctactgggtctctt

SEQ ID NO: 2405081 - DNA, 25 bp, Homo sapien
catctcatagagcaggatcccaaaa

SEQ ID NO: 2405082 - DNA, 25 bp, Homo sapien
ccatctcatagagcaggatcccaaa

SEQ ID NO: 2405083 - DNA, 25 bp, Homo sapien
gacaacacccaagtcatgaagaaag

SEQ ID NO: 2405084 - DNA, 25 bp, Homo sapien
caaatcatattcagggacaacaccc

SEQ ID NO: 2405085 - DNA, 25 bp, Homo sapien
ttcagggacaacacccaagtcatga

SEQ ID NO: 2405086 - DNA, 25 bp, Homo sapien
tcatattcagggacaacacccaagt

SEQ ID NO: 2405087 - DNA, 25 bp, Homo sapien
tggcccctcgggtgtaaacttcata

SEQ ID NO: 2405088 - DNA, 25 bp, Homo sapien
cataagccaggcctaatccacagag

SEQ ID NO: 2405089 - DNA, 25 bp, Homo sapien
tcactttgcatcagaatattcctgg

SEQ ID NO: 2405090 - DNA, 25 bp, Homo sapien
tctgatgctagcaggtctcaggaga

SEQ ID NO: 2405091 - DNA, 25 bp, Homo sapien
atcatagagaagaccatccatagtc

SEQ ID NO: 2405092 - DNA, 25 bp, Homo sapien
gaagaccatccatagtcatcacatc

SEQ ID NO: 2405093 - DNA, 25 bp, Homo sapien
cctgctttccgatgtgatatacttg

SEQ ID NO: 2405094 - DNA, 25 bp, Homo sapien
tgtgatatacttgtttttctgtgag

SEQ ID NO: 2405095 - DNA, 25 bp, Homo sapien
ttggattcgccctaagaaatcttgt

SEQ ID NO: 2405096 - DNA, 25 bp, Homo sapien
tcctccaacaccatatagagtggca

SEQ ID NO: 2405097 - DNA, 25 bp, Homo sapien
gaaatcttgtacctcatggagccca

SEQ ID NO: 2405098 - DNA, 25 bp, Homo sapien
caggtattgatggaattggattcgc

SEQ ID NO: 2405099 - DNA, 25 bp, Homo sapien
gaaacaacctcagaatcctagtaca

SEQ ID NO: 2405100 - DNA, 25 bp, Homo sapien
atctgttttaacagcctcaataggc

SEQ ID NO: 2405101 - DNA, 25 bp, Homo sapien
ggcaaagatgagctagggaacctag

SEQ ID NO: 2405102 - DNA, 25 bp, Homo sapien
aattctgtgacataccgcattaaca

SEQ ID NO: 2405103 - DNA, 25 bp, Homo sapien
tattggctcgaaagatgggcccaca

SEQ ID NO: 2405104 - DNA, 25 bp, Homo sapien
ttcagagagttgctcccgcggcacc

SEQ ID NO: 2405105 - DNA, 25 bp, Homo sapien
tttaaagccttgagaataacactct

SEQ ID NO: 2405106 - DNA, 25 bp, Homo sapien
cttgggcttagaagggtccccagtg

SEQ ID NO: 2405107 - DNA, 25 bp, Homo sapien
cttaagtggcaaagccacatttcct

SEQ ID NO: 2405108 - DNA, 25 bp, Homo sapien
tccatgtcctgcttcccagcttagg

SEQ ID NO: 2405109 - DNA, 25 bp, Homo sapien
catgtcctgcttcccagcttaggtc

SEQ ID NO: 2405110 - DNA, 25 bp, Homo sapien
tggcaaagccacatttcctccatgt

SEQ ID NO: 2405111 - DNA, 25 bp, Homo sapien
ctaggtggaggaacaggggcaatgc

SEQ ID NO: 2405112 - DNA, 25 bp, Homo sapien
tcctaatctccatcttctttaagcc

SEQ ID NO: 2405113 - DNA, 25 bp, Homo sapien
catcttctttaagcccctgcccagc

SEQ ID NO: 2405114 - DNA, 25 bp, Homo sapien
aatctccatcttctttaagcccctg

SEQ ID NO: 2405115 - DNA, 25 bp, Homo sapien
tgcccagccccaaagtttgagcttt

SEQ ID NO: 2405116 - DNA, 25 bp, Homo sapien
ccccaagaaggatgaggaagatagt

SEQ ID NO: 2405117 - DNA, 25 bp, Homo sapien
ggtccagaacgctgctgttgagttc

SEQ ID NO: 2405118 - DNA, 25 bp, Homo sapien
aatcacttcatactgcttctcctgg

SEQ ID NO: 2405119 - DNA, 25 bp, Homo sapien
caacaaagttgggacgataatcact

SEQ ID NO: 2405120 - DNA, 25 bp, Homo sapien
tgcattccaggagcatccgtgtcat

SEQ ID NO: 2405121 - DNA, 25 bp, Homo sapien
gactgcattccaggagcatccgtgt

SEQ ID NO: 2405122 - DNA, 25 bp, Homo sapien
gtcactgagactgcattccaggagc

SEQ ID NO: 2405123 - DNA, 25 bp, Homo sapien
cacacaacttgtcactgagactgca

SEQ ID NO: 2405124 - DNA, 25 bp, Homo sapien
cttccctgctaggcccacagagaat

SEQ ID NO: 2405125 - DNA, 25 bp, Homo sapien
tgctaggcccacagagaatgcacac

SEQ ID NO: 2405126 - DNA, 25 bp, Homo sapien
tgtccccttccctgctaggcccaca

SEQ ID NO: 2405127 - DNA, 25 bp, Homo sapien
ccctgctaggcccacagagaatgca

SEQ ID NO: 2405128 - DNA, 25 bp, Homo sapien
tccacaattcatgaggccacatgga

SEQ ID NO: 2405129 - DNA, 25 bp, Homo sapien
aaaacagaccttaagagagtggcac

SEQ ID NO: 2405130 - DNA, 25 bp, Homo sapien
gaaaaataaaacgttggatcagcac

SEQ ID NO: 2405131 - DNA, 25 bp, Homo sapien
cacatggaaggactagcactagtga

SEQ ID NO: 2405132 - DNA, 25 bp, Homo sapien
cttattgatatcttgcagcccagtg

SEQ ID NO: 2405133 - DNA, 25 bp, Homo sapien
tactgcatttcctgagccaggttct

SEQ ID NO: 2405134 - DNA, 25 bp, Homo sapien
ataagtagtttaaagaggcaaggct

SEQ ID NO: 2405135 - DNA, 25 bp, Homo sapien
ctttggatgcaatatggcctgctac

SEQ ID NO: 2405136 - DNA, 25 bp, Homo sapien
cacacaagtcgatggggccgtgttg

SEQ ID NO: 2405137 - DNA, 25 bp, Homo sapien
tgaatgccacacaagtcgatggggc

SEQ ID NO: 2405138 - DNA, 25 bp, Homo sapien
cgatggggccgtgttgtcctctctt

SEQ ID NO: 2405139 - DNA, 25 bp, Homo sapien
gtcgatggggccgtgttgtcctctc

SEQ ID NO: 2405140 - DNA, 25 bp, Homo sapien
gttatattcttgatccgtgtcatct

SEQ ID NO: 2405141 - DNA, 25 bp, Homo sapien
ttatattcttgatccgtgtcatctc

SEQ ID NO: 2405142 - DNA, 25 bp, Homo sapien
gtccagccaataaaccaagtgaagc

SEQ ID NO: 2405143 - DNA, 25 bp, Homo sapien
tctgctattccttaactgatatttg

SEQ ID NO: 2405144 - DNA, 25 bp, Homo sapien
agtgaagcaatctgctttggaatcc

SEQ ID NO: 2405145 - DNA, 25 bp, Homo sapien
ctgcatggagcacagtccagccaat

SEQ ID NO: 2405146 - DNA, 25 bp, Homo sapien
tcctggcagatcttcggagcacatg

SEQ ID NO: 2405147 - DNA, 25 bp, Homo sapien
gcagaatcacataactcctggcaga

SEQ ID NO: 2405148 - DNA, 25 bp, Homo sapien
catgcaatgctcaactaacttgtgc

SEQ ID NO: 2405149 - DNA, 25 bp, Homo sapien
ctggaatagatgcaggcttcataac

SEQ ID NO: 2405150 - DNA, 25 bp, Homo sapien
caacgattccatggtctgaaaggct

SEQ ID NO: 2405151 - DNA, 25 bp, Homo sapien
ggaagccgaagctgaaagcaacgat

SEQ ID NO: 2405152 - DNA, 25 bp, Homo sapien
aaaggctatgcagtcctctgacaag

SEQ ID NO: 2405153 - DNA, 25 bp, Homo sapien
aagtaattcctgtaacctcattctt

SEQ ID NO: 2405154 - DNA, 25 bp, Homo sapien
ggaaacctctgctgcaactgtaaag

SEQ ID NO: 2405155 - DNA, 25 bp, Homo sapien
tggtcactccggtttccgatggcac

SEQ ID NO: 2405156 - DNA, 25 bp, Homo sapien
ggtgtgccagcctcaaggaaatgct

SEQ ID NO: 2405157 - DNA, 25 bp, Homo sapien
taaaggctggacttgttgctgatct

SEQ ID NO: 2405158 - DNA, 25 bp, Homo sapien
agatgtcaggtatcacggtgactcc

SEQ ID NO: 2405159 - DNA, 25 bp, Homo sapien
ctagtgattgctagatgtcaggtat

SEQ ID NO: 2405160 - DNA, 25 bp, Homo sapien
gattgctagatgtcaggtatcacgg

SEQ ID NO: 2405161 - DNA, 25 bp, Homo sapien
tgctagatgtcaggtatcacggtga

SEQ ID NO: 2405162 - DNA, 25 bp, Homo sapien
gtcaacaatgctttggccccagtgt

SEQ ID NO: 2405163 - DNA, 25 bp, Homo sapien
gccccagtgtttctaccagatcgtt

SEQ ID NO: 2405164 - DNA, 25 bp, Homo sapien
gaatgcccattatctctctgtccag

SEQ ID NO: 2405165 - DNA, 25 bp, Homo sapien
tactgaacggtagtgggaagtcaca

SEQ ID NO: 2405166 - DNA, 25 bp, Homo sapien
aaggcttgcactggcacagaggatc

SEQ ID NO: 2405167 - DNA, 25 bp, Homo sapien
tggcatgtaaatggagttcccaggc

SEQ ID NO: 2405168 - DNA, 25 bp, Homo sapien
caaagtcagcagtagagtcactgct

SEQ ID NO: 2405169 - DNA, 25 bp, Homo sapien
gagaacaatagacatcaccagaaga

SEQ ID NO: 2405170 - DNA, 25 bp, Homo sapien
tattaggccaagaatgctccctcca

SEQ ID NO: 2405171 - DNA, 25 bp, Homo sapien
tgtttaatgccccttcaccttagga

SEQ ID NO: 2405172 - DNA, 25 bp, Homo sapien
catatcccctatgattatgccagtc

SEQ ID NO: 2405173 - DNA, 25 bp, Homo sapien
tatgtacctggtcattgaaacaatg

SEQ ID NO: 2405174 - DNA, 25 bp, Homo sapien
agcacaaacctacactggatatgta

SEQ ID NO: 2405175 - DNA, 25 bp, Homo sapien
agaataatgtttagcacaaacctac

SEQ ID NO: 2405176 - DNA, 25 bp, Homo sapien
tagaataatgtttagcacaaaccta

SEQ ID NO: 2405177 - DNA, 25 bp, Homo sapien
caaacctacactggatatgtactgc

SEQ ID NO: 2405178 - DNA, 25 bp, Homo sapien
tgcgatagtttttctcaacttaggg

SEQ ID NO: 2405179 - DNA, 25 bp, Homo sapien
agctgcgatagtttttctcaactta

SEQ ID NO: 2405180 - DNA, 25 bp, Homo sapien
agttgtaaagagctcccttgtatac

SEQ ID NO: 2405181 - DNA, 25 bp, Homo sapien
ggagaaatgtagttgtaaagagctc

SEQ ID NO: 2405182 - DNA, 25 bp, Homo sapien
acacagcagttactggtaaaaacct

SEQ ID NO: 2405183 - DNA, 25 bp, Homo sapien
ttgaaggatgttagaactattaact

SEQ ID NO: 2405184 - DNA, 25 bp, Homo sapien
ctacaacacagcagttactggtaaa

SEQ ID NO: 2405185 - DNA, 25 bp, Homo sapien
aagttgaaggatgttagaactatta

SEQ ID NO: 2405186 - DNA, 25 bp, Homo sapien
tttttgaggaatttcttactgcaca

SEQ ID NO: 2405187 - DNA, 25 bp, Homo sapien
tcaaagagagtcacataagaaagca

SEQ ID NO: 2405188 - DNA, 25 bp, Homo sapien
aagcaaaaatgttatcctcccctca

SEQ ID NO: 2405189 - DNA, 25 bp, Homo sapien
gaatttcttactgcacattttcaaa

SEQ ID NO: 2405190 - DNA, 25 bp, Homo sapien
ggttctccccatgtggtattaatat

SEQ ID NO: 2405191 - DNA, 25 bp, Homo sapien
gacacttggaggtttagcaccagca

SEQ ID NO: 2405192 - DNA, 25 bp, Homo sapien
gaaacctagcggttgctgaaactgg

SEQ ID NO: 2405193 - DNA, 25 bp, Homo sapien
cttgtcttccgtgcaggaattccca

SEQ ID NO: 2405194 - DNA, 25 bp, Homo sapien
ataacaagctatccttttacgagag

SEQ ID NO: 2405195 - DNA, 25 bp, Homo sapien
ccagaaaagtcagtacataagagca

SEQ ID NO: 2405196 - DNA, 25 bp, Homo sapien
tatttctgtgacaaactgtccatgc

SEQ ID NO: 2405197 - DNA, 25 bp, Homo sapien
tgttacgccataaaagggtatggcc

SEQ ID NO: 2405198 - DNA, 25 bp, Homo sapien
cagcaaatgagaggtacagtagagc

SEQ ID NO: 2405199 - DNA, 25 bp, Homo sapien
tccacagagtcccaatagagacaag

SEQ ID NO: 2405200 - DNA, 25 bp, Homo sapien
ggctcttatacactatgctgcaccg

SEQ ID NO: 2405201 - DNA, 25 bp, Homo sapien
agagcctgcaatgggtagataaacc

SEQ ID NO: 2405202 - DNA, 25 bp, Homo sapien
gtgaaggtgcctgaggagcctggtg

SEQ ID NO: 2405203 - DNA, 25 bp, Homo sapien
ctgccgatggtgaaggtgcctgagg

SEQ ID NO: 2405204 - DNA, 25 bp, Homo sapien
gatggtgaaggtgcctgaggagcct

SEQ ID NO: 2405205 - DNA, 25 bp, Homo sapien
tggtgaaggtgcctgaggagcctgg

SEQ ID NO: 2405206 - DNA, 25 bp, Homo sapien
gttctcagttggtgcttcacctgcc

SEQ ID NO: 2405207 - DNA, 25 bp, Homo sapien
gagcagggttctcagttggtgcttc

SEQ ID NO: 2405208 - DNA, 25 bp, Homo sapien
gggttctcagttggtgcttcacctg

SEQ ID NO: 2405209 - DNA, 25 bp, Homo sapien
cagggttctcagttggtgcttcacc

SEQ ID NO: 2405210 - DNA, 25 bp, Homo sapien
aattagtaccatattcagtccctgg

SEQ ID NO: 2405211 - DNA, 25 bp, Homo sapien
cagcttacaaaacggcaactaaata

SEQ ID NO: 2405212 - DNA, 25 bp, Homo sapien
caactcatgcttagaggcagcttcc

SEQ ID NO: 2405213 - DNA, 25 bp, Homo sapien
taagtatgagtcacaaattagtacc

SEQ ID NO: 2405214 - DNA, 25 bp, Homo sapien
gcgacgccggtaattgtagggacgc

SEQ ID NO: 2405215 - DNA, 25 bp, Homo sapien
tagggacgccggtatccacggcgaa

SEQ ID NO: 2405216 - DNA, 25 bp, Homo sapien
gtaattgtagggacgccggtatcca

SEQ ID NO: 2405217 - DNA, 25 bp, Homo sapien
ggacgccggtatccacggcgaacag

SEQ ID NO: 2405218 - DNA, 25 bp, Homo sapien
caggtgccaacaggacagggcttct

SEQ ID NO: 2405219 - DNA, 25 bp, Homo sapien
aagaaaatagaacaggtgccaacag

SEQ ID NO: 2405220 - DNA, 25 bp, Homo sapien
acaggtgccaacaggacagggcttc

SEQ ID NO: 2405221 - DNA, 25 bp, Homo sapien
cagaagaaaatagaacaggtgccaa

SEQ ID NO: 2405222 - DNA, 25 bp, Homo sapien
gagcctgtgctagtcggttttaaaa

SEQ ID NO: 2405223 - DNA, 25 bp, Homo sapien
tgcagcaacccgagattggcacact

SEQ ID NO: 2405224 - DNA, 25 bp, Homo sapien
catgataaagtatacggctgagcta

SEQ ID NO: 2405225 - DNA, 25 bp, Homo sapien
tccagggactgacaaagctgagcct

SEQ ID NO: 2405226 - DNA, 25 bp, Homo sapien
cattgtgcacacaagtcctttaact

SEQ ID NO: 2405227 - DNA, 25 bp, Homo sapien
aagtcctttaactggccattagtgg

SEQ ID NO: 2405228 - DNA, 25 bp, Homo sapien
ctttaactggccattagtggaaaat

SEQ ID NO: 2405229 - DNA, 25 bp, Homo sapien
tgcacacaagtcctttaactggcca

SEQ ID NO: 2405230 - DNA, 25 bp, Homo sapien
gatttcgatgaaccggtccctgaag

SEQ ID NO: 2405231 - DNA, 25 bp, Homo sapien
ggtccctgaagttgtgctccctctg

SEQ ID NO: 2405232 - DNA, 25 bp, Homo sapien
ggcggtaagttggatttcgatgaac

SEQ ID NO: 2405233 - DNA, 25 bp, Homo sapien
gaaccggtccctgaagttgtgctcc

SEQ ID NO: 2405234 - DNA, 25 bp, Homo sapien
ttcgtgaacgactgaaaaggaagac

SEQ ID NO: 2405235 - DNA, 25 bp, Homo sapien
gaatactcatttgcttagtcccaga

SEQ ID NO: 2405236 - DNA, 25 bp, Homo sapien
tagtcccagagcacctaactttatt

SEQ ID NO: 2405237 - DNA, 25 bp, Homo sapien
caaaattaggcactctcagttgcaa

SEQ ID NO: 2405238 - DNA, 25 bp, Homo sapien
gcaattcttgaccatacagccataa

SEQ ID NO: 2405239 - DNA, 25 bp, Homo sapien
attagcaaatctacccagctccctg

SEQ ID NO: 2405240 - DNA, 25 bp, Homo sapien
caaacttactttaagccagtggaat

SEQ ID NO: 2405241 - DNA, 25 bp, Homo sapien
gacaatttccacgttctcattagca

SEQ ID NO: 2405242 - DNA, 25 bp, Homo sapien
tactgataatgttcactttgataag

SEQ ID NO: 2405243 - DNA, 25 bp, Homo sapien
gagccaccacgttggttttcatgac

SEQ ID NO: 2405244 - DNA, 25 bp, Homo sapien
tagtttcaatttgtgccattactga

SEQ ID NO: 2405245 - DNA, 25 bp, Homo sapien
caacttgggttattggtgttcacta

SEQ ID NO: 2405246 - DNA, 25 bp, Homo sapien
atggctttagaagttgttggtgagg

SEQ ID NO: 2405247 - DNA, 25 bp, Homo sapien
ttaatggctttagaagttgttggtg

SEQ ID NO: 2405248 - DNA, 25 bp, Homo sapien
aatggctttagaagttgttggtgag

SEQ ID NO: 2405249 - DNA, 25 bp, Homo sapien
taatggctttagaagttgttggtga

SEQ ID NO: 2405250 - DNA, 25 bp, Homo sapien
tccaaacccaatctttcttcagtat

SEQ ID NO: 2405251 - DNA, 25 bp, Homo sapien
tcttcagtattcccgtatttgttta

SEQ ID NO: 2405252 - DNA, 25 bp, Homo sapien
cacttgtacgtgaatttaatatgag

SEQ ID NO: 2405253 - DNA, 25 bp, Homo sapien
tctgcctacttaacacctccacttg

SEQ ID NO: 2405254 - DNA, 25 bp, Homo sapien
ccgctgccggtactgagggcgatac

SEQ ID NO: 2405255 - DNA, 25 bp, Homo sapien
gccgctgccggtactgagggcgata

SEQ ID NO: 2405256 - DNA, 25 bp, Homo sapien
cgctgccggtactgagggcgatact

SEQ ID NO: 2405257 - DNA, 25 bp, Homo sapien
gattgcctgggataaactacattaa

SEQ ID NO: 2405258 - DNA, 25 bp, Homo sapien
gacaaaatgcatttaacccagatta

SEQ ID NO: 2405259 - DNA, 25 bp, Homo sapien
caaagaacaccatttaggatgaata

SEQ ID NO: 2405260 - DNA, 25 bp, Homo sapien
cagaagaagttttagcaaggaaaga

SEQ ID NO: 2405261 - DNA, 25 bp, Homo sapien
gggtcagcgaggtcaaactattgcc

SEQ ID NO: 2405262 - DNA, 25 bp, Homo sapien
gggtctcccaaaggctacaatgaca

SEQ ID NO: 2405263 - DNA, 25 bp, Homo sapien
cagcatttaccatccactgaggcaa

SEQ ID NO: 2405264 - DNA, 25 bp, Homo sapien
gctccatcaaatgcgtgtctcccag

SEQ ID NO: 2405265 - DNA, 25 bp, Homo sapien
aaactgttattttcatgaacatata

SEQ ID NO: 2405266 - DNA, 25 bp, Homo sapien
gttattttcatgaacatatagttat

SEQ ID NO: 2405267 - DNA, 25 bp, Homo sapien
ccataaaaactgttattttcatgaa

SEQ ID NO: 2405268 - DNA, 25 bp, Homo sapien
tattttcatgaacatatagttattt

SEQ ID NO: 2405269 - DNA, 25 bp, Homo sapien
cctctaccaaagatgagattcacaa

SEQ ID NO: 2405270 - DNA, 25 bp, Homo sapien
tgcttttgaattaacctgggagtca

SEQ ID NO: 2405271 - DNA, 25 bp, Homo sapien
gagatactgaacaagttgttgggac

SEQ ID NO: 2405272 - DNA, 25 bp, Homo sapien
tcaaaataatcacagttagcgctct

SEQ ID NO: 2405273 - DNA, 25 bp, Homo sapien
tgtctaatgagaccagcggctctgg

SEQ ID NO: 2405274 - DNA, 25 bp, Homo sapien
aatgtctgtgactaggttctggcca

SEQ ID NO: 2405275 - DNA, 25 bp, Homo sapien
tttcttagaggtcaacagtgtcggc

SEQ ID NO: 2405276 - DNA, 25 bp, Homo sapien
cagtgtcggcaccaaagaatgaaca

SEQ ID NO: 2405277 - DNA, 25 bp, Homo sapien
ggcgccgatctgcagcgtaacgact

SEQ ID NO: 2405278 - DNA, 25 bp, Homo sapien
gatctgcagcgtaacgactcccttc

SEQ ID NO: 2405279 - DNA, 25 bp, Homo sapien
tgtaacggcgccgatctgcagcgta

SEQ ID NO: 2405280 - DNA, 25 bp, Homo sapien
tccatccgggccagtcacattggca

SEQ ID NO: 2405281 - DNA, 25 bp, Homo sapien
acaggagtgcgaccacactcagata

SEQ ID NO: 2405282 - DNA, 25 bp, Homo sapien
tacaggagtgcgaccacactcagat

SEQ ID NO: 2405283 - DNA, 25 bp, Homo sapien
caggagtgcgaccacactcagatat

SEQ ID NO: 2405284 - DNA, 25 bp, Homo sapien
ttacaggagtgcgaccacactcaga

SEQ ID NO: 2405285 - DNA, 25 bp, Homo sapien
atctcctacactgcgcagatatttc

SEQ ID NO: 2405286 - DNA, 25 bp, Homo sapien
tgtgctattcatcttgacaggtgga

SEQ ID NO: 2405287 - DNA, 25 bp, Homo sapien
gactacacactactgttacaggctg

SEQ ID NO: 2405288 - DNA, 25 bp, Homo sapien
tcaaaccattaagcttcagagattc

SEQ ID NO: 2405289 - DNA, 25 bp, Homo sapien
tgctttcaagtacaccagagtgaac

SEQ ID NO: 2405290 - DNA, 25 bp, Homo sapien
gcccgtcccctaactctgagtagga

SEQ ID NO: 2405291 - DNA, 25 bp, Homo sapien
gggcttgcgtttctatggaactagg

SEQ ID NO: 2405292 - DNA, 25 bp, Homo sapien
gagacctcacccatagaggaaaaaa

SEQ ID NO: 2405293 - DNA, 25 bp, Homo sapien
ttatctgaagtcacaaccgtaacag

SEQ ID NO: 2405294 - DNA, 25 bp, Homo sapien
tttaacaagagtgagggctaccctg

SEQ ID NO: 2405295 - DNA, 25 bp, Homo sapien
tggacacgtcctaacatgcctcatt

SEQ ID NO: 2405296 - DNA, 25 bp, Homo sapien
ggaatttgcagcttttgacctggac

SEQ ID NO: 2405297 - DNA, 25 bp, Homo sapien
tgaggcacctatagcagagaagctc

SEQ ID NO: 2405298 - DNA, 25 bp, Homo sapien
tatctgcttctctgcgctatttact

SEQ ID NO: 2405299 - DNA, 25 bp, Homo sapien
ctgacagaggagctttaaccaatac

SEQ ID NO: 2405300 - DNA, 25 bp, Homo sapien
ctatttacttcaattgagagctgct

SEQ ID NO: 2405301 - DNA, 25 bp, Homo sapien
atttacttcaattgagagctgctct

SEQ ID NO: 2405302 - DNA, 25 bp, Homo sapien
ggaggaaccacatcaggagaacagg

SEQ ID NO: 2405303 - DNA, 25 bp, Homo sapien
aggcaaacactaaggaggaaccaca

SEQ ID NO: 2405304 - DNA, 25 bp, Homo sapien
aaatgtggaactgaactcctgttgc

SEQ ID NO: 2405305 - DNA, 25 bp, Homo sapien
aagggctgacagaagattacacacc

SEQ ID NO: 2405306 - DNA, 25 bp, Homo sapien
gaaagtggtctaaccaaatatcact

SEQ ID NO: 2405307 - DNA, 25 bp, Homo sapien
taatccataggacttacttttggga

SEQ ID NO: 2405308 - DNA, 25 bp, Homo sapien
ctgatgtacaaatacatcttctttg

SEQ ID NO: 2405309 - DNA, 25 bp, Homo sapien
acaaatacatcttctttggtgtcat

SEQ ID NO: 2405310 - DNA, 25 bp, Homo sapien
aaatacatcttctttggtgtcattt

SEQ ID NO: 2405311 - DNA, 25 bp, Homo sapien
gtacaaatacatcttctttggtgtc

SEQ ID NO: 2405312 - DNA, 25 bp, Homo sapien
aaagctcacaattaaaggtagtacg

SEQ ID NO: 2405313 - DNA, 25 bp, Homo sapien
taaacatttctaactccacaggcca

SEQ ID NO: 2405314 - DNA, 25 bp, Homo sapien
tcaattcagacacctaaaatccttg

SEQ ID NO: 2405315 - DNA, 25 bp, Homo sapien
tatgaatttaactcccaagtcctca

SEQ ID NO: 2405316 - DNA, 25 bp, Homo sapien
gcttagatccaagctcacagactca

SEQ ID NO: 2405317 - DNA, 25 bp, Homo sapien
gccacagtgcttagatccaagctca

SEQ ID NO: 2405318 - DNA, 25 bp, Homo sapien
acattgccacagtgcttagatccaa

SEQ ID NO: 2405319 - DNA, 25 bp, Homo sapien
aagctcacagactcaacatacagaa

SEQ ID NO: 2405320 - DNA, 25 bp, Homo sapien
gaactaggctctccttacactgaaa

SEQ ID NO: 2405321 - DNA, 25 bp, Homo sapien
cacatggtgtgtaatcagagcctca

SEQ ID NO: 2405322 - DNA, 25 bp, Homo sapien
tatgttctcattcctgtacggttaa

SEQ ID NO: 2405323 - DNA, 25 bp, Homo sapien
tgtgaaaacctcataatactcccag

SEQ ID NO: 2405324 - DNA, 25 bp, Homo sapien
taatgaaggctaagggatttataac

SEQ ID NO: 2405325 - DNA, 25 bp, Homo sapien
ggtgccacaatgtaagtataaactt

SEQ ID NO: 2405326 - DNA, 25 bp, Homo sapien
tataactcctggtgccacaatgtaa

SEQ ID NO: 2405327 - DNA, 25 bp, Homo sapien
gctaagggatttataactcctggtg

SEQ ID NO: 2405328 - DNA, 25 bp, Homo sapien
tataaatccatatccatttctgacg

SEQ ID NO: 2405329 - DNA, 25 bp, Homo sapien
tatccatttctgacgttgaaccatt

SEQ ID NO: 2405330 - DNA, 25 bp, Homo sapien
aaatccatatccatttctgacgttg

SEQ ID NO: 2405331 - DNA, 25 bp, Homo sapien
tccatatccatttctgacgttgaac

SEQ ID NO: 2405332 - DNA, 25 bp, Homo sapien
gcaagccaagatctcataaggaaat

SEQ ID NO: 2405333 - DNA, 25 bp, Homo sapien
aattagtatctgacctacagagaga

SEQ ID NO: 2405334 - DNA, 25 bp, Homo sapien
gatcttgataacattagacaaagcc

SEQ ID NO: 2405335 - DNA, 25 bp, Homo sapien
gagagatatagctcatatcactaag

SEQ ID NO: 2405336 - DNA, 25 bp, Homo sapien
tgtccagtcgccaagtgggagctca

SEQ ID NO: 2405337 - DNA, 25 bp, Homo sapien
ctttaatgagaaacaaggtggctcc

SEQ ID NO: 2405338 - DNA, 25 bp, Homo sapien
tctgtacttaccactctgagacgtg

SEQ ID NO: 2405339 - DNA, 25 bp, Homo sapien
caaagacgtaaagcaacttgtccag

SEQ ID NO: 2405340 - DNA, 25 bp, Homo sapien
caagaaaatagtcctctcaaggtgg

SEQ ID NO: 2405341 - DNA, 25 bp, Homo sapien
agagcgaacgatatggacacacacc

SEQ ID NO: 2405342 - DNA, 25 bp, Homo sapien
gagagatgagacaaacatgccccac

SEQ ID NO: 2405343 - DNA, 25 bp, Homo sapien
tagtgaagaggtctccgaagcatcc

SEQ ID NO: 2405344 - DNA, 25 bp, Homo sapien
cacgtgcgttcccacagtccgggaa

SEQ ID NO: 2405345 - DNA, 25 bp, Homo sapien
ccatgcccatgtgggaagggcgtca

SEQ ID NO: 2405346 - DNA, 25 bp, Homo sapien
aagtttcccggagacgattgcaaca

SEQ ID NO: 2405347 - DNA, 25 bp, Homo sapien
aatggctgtttgcagccgtgggcac

SEQ ID NO: 2405348 - DNA, 25 bp, Homo sapien
aacgcaggcattttccaccacgcga

SEQ ID NO: 2405349 - DNA, 25 bp, Homo sapien
gcaggcattttccaccacgcgaatc

SEQ ID NO: 2405350 - DNA, 25 bp, Homo sapien
cacgcgaatccgcaacagtgcccgt

SEQ ID NO: 2405351 - DNA, 25 bp, Homo sapien
aggcattttccaccacgcgaatccg

SEQ ID NO: 2405352 - DNA, 25 bp, Homo sapien
tgggagcgccggcaagggaggcggc

SEQ ID NO: 2405353 - DNA, 25 bp, Homo sapien
cggccgcggtgcccgtggctgcggg

SEQ ID NO: 2405354 - DNA, 25 bp, Homo sapien
ccgcggtgcccgtggctgcgggggc

SEQ ID NO: 2405355 - DNA, 25 bp, Homo sapien
aacttttttctccgcgtcttcgctg

SEQ ID NO: 2405356 - DNA, 25 bp, Homo sapien
gcggccgcggtgcccgtggctgcgg

SEQ ID NO: 2405357 - DNA, 25 bp, Homo sapien
ctcttgggctcctcgctcgatctta

SEQ ID NO: 2405358 - DNA, 25 bp, Homo sapien
gaggcggctcgagcttcgtgctgcg

SEQ ID NO: 2405359 - DNA, 25 bp, Homo sapien
tcgctcgatcttactgccccaaaaa

SEQ ID NO: 2405360 - DNA, 25 bp, Homo sapien
tcgtgctgcgcgctctctcttgggc

SEQ ID NO: 2405361 - DNA, 25 bp, Homo sapien
gggaccaacgcctgttgagagtaaa

SEQ ID NO: 2405362 - DNA, 25 bp, Homo sapien
gtttgagttagaagtctgtcgagaa

SEQ ID NO: 2405363 - DNA, 25 bp, Homo sapien
tctgtcgagaaaaagctggattggg

SEQ ID NO: 2405364 - DNA, 25 bp, Homo sapien
gagagtaaatttggtaatcagagga

SEQ ID NO: 2405365 - DNA, 25 bp, Homo sapien
tcagatttgtttatgttgttggaat

SEQ ID NO: 2405366 - DNA, 25 bp, Homo sapien
gaatagacattactttccaaatcac

SEQ ID NO: 2405367 - DNA, 25 bp, Homo sapien
cagatttgtttatgttgttggaatt

SEQ ID NO: 2405368 - DNA, 25 bp, Homo sapien
agaatagacattactttccaaatca

SEQ ID NO: 2405369 - DNA, 25 bp, Homo sapien
ctttcagggctctcacatgggcttc

SEQ ID NO: 2405370 - DNA, 25 bp, Homo sapien
gacccagtccatgcagtttaccaat

SEQ ID NO: 2405371 - DNA, 25 bp, Homo sapien
caaattctcagtggctggaaggcta

SEQ ID NO: 2405372 - DNA, 25 bp, Homo sapien
gcactgagctgcattcgcctgatat

SEQ ID NO: 2405373 - DNA, 25 bp, Homo sapien
taaagtagtctgcactttatctgcc

SEQ ID NO: 2405374 - DNA, 25 bp, Homo sapien
aagtagtctgcactttatctgccat

SEQ ID NO: 2405375 - DNA, 25 bp, Homo sapien
ctctccaactgctaagaacaataaa

SEQ ID NO: 2405376 - DNA, 25 bp, Homo sapien
tgctaagaacaataaagtagtctgc

SEQ ID NO: 2405377 - DNA, 25 bp, Homo sapien
ttgtcataagatagctaaaggtcat

SEQ ID NO: 2405378 - DNA, 25 bp, Homo sapien
ctactgccggtagcatagagtttta

SEQ ID NO: 2405379 - DNA, 25 bp, Homo sapien
tagttttaatggctctcacatgaac

SEQ ID NO: 2405380 - DNA, 25 bp, Homo sapien
tgggacaattgcaaacaggttaaag

SEQ ID NO: 2405381 - DNA, 25 bp, Homo sapien
tctggcgataactaaattggtaagg

SEQ ID NO: 2405382 - DNA, 25 bp, Homo sapien
ccagttgactagtgcaatgtatcca

SEQ ID NO: 2405383 - DNA, 25 bp, Homo sapien
gctgctataaggctgaccaacaagg

SEQ ID NO: 2405384 - DNA, 25 bp, Homo sapien
ggaaatggcaaagcatcccagcagg

SEQ ID NO: 2405385 - DNA, 25 bp, Homo sapien
tgctgttatttcgacgttgttattc

SEQ ID NO: 2405386 - DNA, 25 bp, Homo sapien
atctgctgttatttcgacgttgtta

SEQ ID NO: 2405387 - DNA, 25 bp, Homo sapien
cgacgttgttattcttccggaagtg

SEQ ID NO: 2405388 - DNA, 25 bp, Homo sapien
tgttatttcgacgttgttattcttc

SEQ ID NO: 2405389 - DNA, 25 bp, Homo sapien
gaaagactgggtagtacacgatgag

SEQ ID NO: 2405390 - DNA, 25 bp, Homo sapien
tgaggaatcagagcgctagaggtca

SEQ ID NO: 2405391 - DNA, 25 bp, Homo sapien
cctgtagcatgcagtcgaatctgct

SEQ ID NO: 2405392 - DNA, 25 bp, Homo sapien
cactgcctttatggccctcatgtgg

SEQ ID NO: 2405393 - DNA, 25 bp, Homo sapien
tgagccagtcaatgcagttaactag

SEQ ID NO: 2405394 - DNA, 25 bp, Homo sapien
taatgatattacacacagcagacag

SEQ ID NO: 2405395 - DNA, 25 bp, Homo sapien
gaccccagaagaatcgcaagcatga

SEQ ID NO: 2405396 - DNA, 25 bp, Homo sapien
gcacgctattgccatatgtacctgg

SEQ ID NO: 2405397 - DNA, 25 bp, Homo sapien
gatttttgaatatcactgatgatga

SEQ ID NO: 2405398 - DNA, 25 bp, Homo sapien
tttttgaatatcactgatgatgaat

SEQ ID NO: 2405399 - DNA, 25 bp, Homo sapien
atttttgaatatcactgatgatgaa

SEQ ID NO: 2405400 - DNA, 25 bp, Homo sapien
cctggccagattattctccgtctaa

SEQ ID NO: 2405401 - DNA, 25 bp, Homo sapien
gagcaatataaagacccctgttgag

SEQ ID NO: 2405402 - DNA, 25 bp, Homo sapien
ccttgtcacaatcataagccagtct

SEQ ID NO: 2405403 - DNA, 25 bp, Homo sapien
taattcctcacaagacatacagcag

SEQ ID NO: 2405404 - DNA, 25 bp, Homo sapien
agatgctagccagatcaggagctga

SEQ ID NO: 2405405 - DNA, 25 bp, Homo sapien
tggaagatagcagaagaagcaaggc

SEQ ID NO: 2405406 - DNA, 25 bp, Homo sapien
ttcacagaagatgctagccagatca

SEQ ID NO: 2405407 - DNA, 25 bp, Homo sapien
tccatggaagatagcagaagaagca

SEQ ID NO: 2405408 - DNA, 25 bp, Homo sapien
tctggtgcgaggagaaggctgatga

SEQ ID NO: 2405409 - DNA, 25 bp, Homo sapien
agaaggctgatgatatggaagggtg

SEQ ID NO: 2405410 - DNA, 25 bp, Homo sapien
ctggtgagtaaggtctggtgcgagg

SEQ ID NO: 2405411 - DNA, 25 bp, Homo sapien
tggaagggtgctccagtcctgcttc

SEQ ID NO: 2405412 - DNA, 25 bp, Homo sapien
atggacaggctgctccttgagaaca

SEQ ID NO: 2405413 - DNA, 25 bp, Homo sapien
gctgctccttgagaacatccagtct

SEQ ID NO: 2405414 - DNA, 25 bp, Homo sapien
caggctgctccttgagaacatccag

SEQ ID NO: 2405415 - DNA, 25 bp, Homo sapien
gacaggctgctccttgagaacatcc

SEQ ID NO: 2405416 - DNA, 25 bp, Homo sapien
tgggtgctctcaaggtgactgaatg

SEQ ID NO: 2405417 - DNA, 25 bp, Homo sapien
cattgtagtagaacccactgggaga

SEQ ID NO: 2405418 - DNA, 25 bp, Homo sapien
tgcccactgcaatgtaagatgtaaa

SEQ ID NO: 2405419 - DNA, 25 bp, Homo sapien
ggtggatacctaacccaagtggagc

SEQ ID NO: 2405420 - DNA, 25 bp, Homo sapien
tgcaaccaaaaacctttaatgacat

SEQ ID NO: 2405421 - DNA, 25 bp, Homo sapien
tcatttctgttgcaaccaaaaacct

SEQ ID NO: 2405422 - DNA, 25 bp, Homo sapien
tgttgcaaccaaaaacctttaatga

SEQ ID NO: 2405423 - DNA, 25 bp, Homo sapien
attcatttctgttgcaaccaaaaac

SEQ ID NO: 2405424 - DNA, 25 bp, Homo sapien
taggagcttctctaggagtcataat

SEQ ID NO: 2405425 - DNA, 25 bp, Homo sapien
gagcttctctaggagtcataatcac

SEQ ID NO: 2405426 - DNA, 25 bp, Homo sapien
cttaggagcttctctaggagtcata

SEQ ID NO: 2405427 - DNA, 25 bp, Homo sapien
ggagcttctctaggagtcataatca

SEQ ID NO: 2405428 - DNA, 25 bp, Homo sapien
ggctgcatccagatctgccccaatg

SEQ ID NO: 2405429 - DNA, 25 bp, Homo sapien
ttgggctgcatccagatctgcccca

SEQ ID NO: 2405430 - DNA, 25 bp, Homo sapien
ctgcatccagatctgccccaatgcc

SEQ ID NO: 2405431 - DNA, 25 bp, Homo sapien
tgggctgcatccagatctgccccaa

SEQ ID NO: 2405432 - DNA, 25 bp, Homo sapien
agaagcaggaaagagtggcatcatg

SEQ ID NO: 2405433 - DNA, 25 bp, Homo sapien
ggaaagagtggcatcatggaattcc

SEQ ID NO: 2405434 - DNA, 25 bp, Homo sapien
agcaggaaagagtggcatcatggaa

SEQ ID NO: 2405435 - DNA, 25 bp, Homo sapien
gcaggaaagagtggcatcatggaat

SEQ ID NO: 2405436 - DNA, 25 bp, Homo sapien
taacaatggttagttgagtactgca

SEQ ID NO: 2405437 - DNA, 25 bp, Homo sapien
aaagaacctagacatccagtttatg

SEQ ID NO: 2405438 - DNA, 25 bp, Homo sapien
caacgtatgtagaaacatgttaaca

SEQ ID NO: 2405439 - DNA, 25 bp, Homo sapien
ataatcccaatatctacaggtaaag

SEQ ID NO: 2405440 - DNA, 25 bp, Homo sapien
cacactggacctttagtttctggac

SEQ ID NO: 2405441 - DNA, 25 bp, Homo sapien
tttgagactgcaacaggacggatat

SEQ ID NO: 2405442 - DNA, 25 bp, Homo sapien
ggtcaggtcagcatcctatagtttt

SEQ ID NO: 2405443 - DNA, 25 bp, Homo sapien
caaggccttgacatgatggtttccc

SEQ ID NO: 2405444 - DNA, 25 bp, Homo sapien
caggctgatggtcttcctctaggaa

SEQ ID NO: 2405445 - DNA, 25 bp, Homo sapien
gcatgtgagattaaaatctcctcaa

SEQ ID NO: 2405446 - DNA, 25 bp, Homo sapien
tcaccgttataatctttacagcgaa

SEQ ID NO: 2405447 - DNA, 25 bp, Homo sapien
gtcaggtaaagcacaacaagaagtt

SEQ ID NO: 2405448 - DNA, 25 bp, Homo sapien
tattcaattaggttaccggaggcat

SEQ ID NO: 2405449 - DNA, 25 bp, Homo sapien
tgaggctggtggcaaaccacatact

SEQ ID NO: 2405450 - DNA, 25 bp, Homo sapien
tagctaagccggtgagaataaagcc

SEQ ID NO: 2405451 - DNA, 25 bp, Homo sapien
gaatactatcatgaagggaagaacc

SEQ ID NO: 2405452 - DNA, 25 bp, Homo sapien
aagatgccttccactacacgtagca

SEQ ID NO: 2405453 - DNA, 25 bp, Homo sapien
gaagatgccttccactacacgtagc

SEQ ID NO: 2405454 - DNA, 25 bp, Homo sapien
agatgccttccactacacgtagcat

SEQ ID NO: 2405455 - DNA, 25 bp, Homo sapien
tgaagatgccttccactacacgtag

SEQ ID NO: 2405456 - DNA, 25 bp, Homo sapien
tagggagttatcaagcccaaggtgc

SEQ ID NO: 2405457 - DNA, 25 bp, Homo sapien
gatataactttgacccctgtgaagg

SEQ ID NO: 2405458 - DNA, 25 bp, Homo sapien
aaggaaggtcttaggcagcagtgca

SEQ ID NO: 2405459 - DNA, 25 bp, Homo sapien
gatctcctgagaagcaaggcagtca

SEQ ID NO: 2405460 - DNA, 25 bp, Homo sapien
tttgagtatatctctgtgtgcagac

SEQ ID NO: 2405461 - DNA, 25 bp, Homo sapien
gatgtacggaaaccttattccttga

SEQ ID NO: 2405462 - DNA, 25 bp, Homo sapien
gaggtttatctgtggtatttttgag

SEQ ID NO: 2405463 - DNA, 25 bp, Homo sapien
tcttagtggatgctgtaggttttac

SEQ ID NO: 2405464 - DNA, 25 bp, Homo sapien
agaaagagttatgaccacattattt

SEQ ID NO: 2405465 - DNA, 25 bp, Homo sapien
tgactgcaacttgaacctgtagtag

SEQ ID NO: 2405466 - DNA, 25 bp, Homo sapien
catggtacagtcacacaagagaata

SEQ ID NO: 2405467 - DNA, 25 bp, Homo sapien
aagaagatctataggtctccgtgaa

SEQ ID NO: 2405468 - DNA, 25 bp, Homo sapien
tgggtaagtaggataaggcgtcact

SEQ ID NO: 2405469 - DNA, 25 bp, Homo sapien
cctctggcggaaacctgagagaaac

SEQ ID NO: 2405470 - DNA, 25 bp, Homo sapien
ggcaggactgagcaaagagtcctct

SEQ ID NO: 2405471 - DNA, 25 bp, Homo sapien
cactggacctgagaggctagtgtga

SEQ ID NO: 2405472 - DNA, 25 bp, Homo sapien
caagtatcatttagcagggacactg

SEQ ID NO: 2405473 - DNA, 25 bp, Homo sapien
ttgcaaccttatccaagaatatctg

SEQ ID NO: 2405474 - DNA, 25 bp, Homo sapien
cacgataaagtttgggaatggtagc

SEQ ID NO: 2405475 - DNA, 25 bp, Homo sapien
accaaagggagagcacaccccactt

SEQ ID NO: 2405476 - DNA, 25 bp, Homo sapien
tccaattgatttgtgaacacgataa

SEQ ID NO: 2405477 - DNA, 25 bp, Homo sapien
ttgctcctggggatgtcttgctggt

SEQ ID NO: 2405478 - DNA, 25 bp, Homo sapien
ctggtctgtccctctggaagaatga

SEQ ID NO: 2405479 - DNA, 25 bp, Homo sapien
ggatgtcttgctggtctgtccctct

SEQ ID NO: 2405480 - DNA, 25 bp, Homo sapien
gtcttgctggtctgtccctctggaa

SEQ ID NO: 2405481 - DNA, 25 bp, Homo sapien
tagagagagttgacggtgtcctcgt

SEQ ID NO: 2405482 - DNA, 25 bp, Homo sapien
agagagagttgacggtgtcctcgtc

SEQ ID NO: 2405483 - DNA, 25 bp, Homo sapien
gaaatcggggtagagagagttgacg

SEQ ID NO: 2405484 - DNA, 25 bp, Homo sapien
gggtagagagagttgacggtgtcct

SEQ ID NO: 2405485 - DNA, 25 bp, Homo sapien
gaggatggcggtgatggcctcctgg

SEQ ID NO: 2405486 - DNA, 25 bp, Homo sapien
taggagtccttcaggaggaggtctc

SEQ ID NO: 2405487 - DNA, 25 bp, Homo sapien
ctggggtccctgatctggtctctga

SEQ ID NO: 2405488 - DNA, 25 bp, Homo sapien
cttggttaccactatcaccaggggg

SEQ ID NO: 2405489 - DNA, 25 bp, Homo sapien
ggtctctgacttgagtcctctacat

SEQ ID NO: 2405490 - DNA, 25 bp, Homo sapien
tgtgagtaattaatggacaagaatg

SEQ ID NO: 2405491 - DNA, 25 bp, Homo sapien
tgagtaattaatggacaagaatgca

SEQ ID NO: 2405492 - DNA, 25 bp, Homo sapien
gagtaattaatggacaagaatgcat

SEQ ID NO: 2405493 - DNA, 25 bp, Homo sapien
tacttctctcaccttaccacacagc

SEQ ID NO: 2405494 - DNA, 25 bp, Homo sapien
tttatgcagctctcaacttaatcca

SEQ ID NO: 2405495 - DNA, 25 bp, Homo sapien
ttgccagaggatgtctccaaggaca

SEQ ID NO: 2405496 - DNA, 25 bp, Homo sapien
tttgctcctgtgacaagtatgtttc

SEQ ID NO: 2405497 - DNA, 25 bp, Homo sapien
gggttcttgcatatcttagagttgc

SEQ ID NO: 2405498 - DNA, 25 bp, Homo sapien
tctgtattcaagttggtggcctggc

SEQ ID NO: 2405499 - DNA, 25 bp, Homo sapien
gacacagctgagtgggtcaacacag

SEQ ID NO: 2405500 - DNA, 25 bp, Homo sapien
tccctgaagccacataaccgtgcgg

SEQ ID NO: 2405501 - DNA, 25 bp, Homo sapien
gaaactagagctgatttcccaggct

SEQ ID NO: 2405502 - DNA, 25 bp, Homo sapien
tatggtgaaagtaaagtcttcatag

SEQ ID NO: 2405503 - DNA, 25 bp, Homo sapien
tgaaagtaaagtcttcatagttcac

SEQ ID NO: 2405504 - DNA, 25 bp, Homo sapien
aaagtaaagtcttcatagttcacat

SEQ ID NO: 2405505 - DNA, 25 bp, Homo sapien
ctggtatggtgaaagtaaagtcttc

SEQ ID NO: 2405506 - DNA, 25 bp, Homo sapien
ataaatctttcagggctcatagtgg

SEQ ID NO: 2405507 - DNA, 25 bp, Homo sapien
ctcatagtggtctatagggaaaggg

SEQ ID NO: 2405508 - DNA, 25 bp, Homo sapien
acaccctgtgcatcccctaagttac

SEQ ID NO: 2405509 - DNA, 25 bp, Homo sapien
caggatgaagtgaacattacctcat

SEQ ID NO: 2405510 - DNA, 25 bp, Homo sapien
tataatcttacacatgctgcctgca

SEQ ID NO: 2405511 - DNA, 25 bp, Homo sapien
ttgcccaagaggagcaaccaggagt

SEQ ID NO: 2405512 - DNA, 25 bp, Homo sapien
ggattgttactatcgctgagcatca

SEQ ID NO: 2405513 - DNA, 25 bp, Homo sapien
ttctgcatcccctgtacagcaagga

SEQ ID NO: 2405514 - DNA, 25 bp, Homo sapien
tagggtgaacccctgaggccctaga

SEQ ID NO: 2405515 - DNA, 25 bp, Homo sapien
tgctcttccgctgcagtggtgtagg

SEQ ID NO: 2405516 - DNA, 25 bp, Homo sapien
tcatccttggaatgagagctccaaa

SEQ ID NO: 2405517 - DNA, 25 bp, Homo sapien
aatgagggcacaacagatgtcatcc

SEQ ID NO: 2405518 - DNA, 25 bp, Homo sapien
cagagccagaaggaccactgagagc

SEQ ID NO: 2405519 - DNA, 25 bp, Homo sapien
tcagagccagaaggaccactgagag

SEQ ID NO: 2405520 - DNA, 25 bp, Homo sapien
gctcagagccagaaggaccactgag

SEQ ID NO: 2405521 - DNA, 25 bp, Homo sapien
gagccagaaggaccactgagagcag

SEQ ID NO: 2405522 - DNA, 25 bp, Homo sapien
actctgcgttgagagaaacatggca

SEQ ID NO: 2405523 - DNA, 25 bp, Homo sapien
tataaacatgagcagaacaatggca

SEQ ID NO: 2405524 - DNA, 25 bp, Homo sapien
tgctcccaactctgcgttgagagaa

SEQ ID NO: 2405525 - DNA, 25 bp, Homo sapien
aaggaggctctggagttgctcccaa

SEQ ID NO: 2405526 - DNA, 25 bp, Homo sapien
cacttgggcacacgtggatgacaga

SEQ ID NO: 2405527 - DNA, 25 bp, Homo sapien
gatggctgactagagttccctggca

SEQ ID NO: 2405528 - DNA, 25 bp, Homo sapien
tatctgtagacgtgcatccctggta

SEQ ID NO: 2405529 - DNA, 25 bp, Homo sapien
ggctcagggtcatcagtaactccat

SEQ ID NO: 2405530 - DNA, 25 bp, Homo sapien
atctgcagcaccatgaccctagctt

SEQ ID NO: 2405531 - DNA, 25 bp, Homo sapien
cagagcctagccagataaactaatc

SEQ ID NO: 2405532 - DNA, 25 bp, Homo sapien
taaactaatcaagaccccggcatcc

SEQ ID NO: 2405533 - DNA, 25 bp, Homo sapien
ccggcatccgaacccatgtggtgca

SEQ ID NO: 2405534 - DNA, 25 bp, Homo sapien
tagactggctgagtgaatttttaaa

SEQ ID NO: 2405535 - DNA, 25 bp, Homo sapien
tacagcagacaaatgaagacttgaa

SEQ ID NO: 2405536 - DNA, 25 bp, Homo sapien
gacttcacctaataagacacatata

SEQ ID NO: 2405537 - DNA, 25 bp, Homo sapien
caagtcgaaataggtatattaacat

SEQ ID NO: 2405538 - DNA, 25 bp, Homo sapien
aattgagagtgtacacattgacctc

SEQ ID NO: 2405539 - DNA, 25 bp, Homo sapien
cagtttctattaatccagcctcaag

SEQ ID NO: 2405540 - DNA, 25 bp, Homo sapien
tgactacagtgttgcttgcatggat

SEQ ID NO: 2405541 - DNA, 25 bp, Homo sapien
ctgtaggtttatgcccattgcaagt

SEQ ID NO: 2405542 - DNA, 25 bp, Homo sapien
taatgtcagaaatgagtgagagaga

SEQ ID NO: 2405543 - DNA, 25 bp, Homo sapien
agagagatttgtgtttcaggcaaga

SEQ ID NO: 2405544 - DNA, 25 bp, Homo sapien
cctctctaatgtcagaaatgagtga

SEQ ID NO: 2405545 - DNA, 25 bp, Homo sapien
tctaatgtcagaaatgagtgagaga

SEQ ID NO: 2405546 - DNA, 25 bp, Homo sapien
aacttaaattcgagctatagaagac

SEQ ID NO: 2405547 - DNA, 25 bp, Homo sapien
attgtacaacttaaattcgagctat

SEQ ID NO: 2405548 - DNA, 25 bp, Homo sapien
tgtacaacttaaattcgagctatag

SEQ ID NO: 2405549 - DNA, 25 bp, Homo sapien
acaacttaaattcgagctatagaag

SEQ ID NO: 2405550 - DNA, 25 bp, Homo sapien
aagttagagcatgatgccatgtttc

SEQ ID NO: 2405551 - DNA, 25 bp, Homo sapien
gatgccatgtttcacggcatttgaa

SEQ ID NO: 2405552 - DNA, 25 bp, Homo sapien
agagcatgatgccatgtttcacggc

SEQ ID NO: 2405553 - DNA, 25 bp, Homo sapien
gcatgatgccatgtttcacggcatt

SEQ ID NO: 2405554 - DNA, 25 bp, Homo sapien
tactgcagtgatggagatgcaagcc

SEQ ID NO: 2405555 - DNA, 25 bp, Homo sapien
tacagacaacacttgacatggcagg

SEQ ID NO: 2405556 - DNA, 25 bp, Homo sapien
cagccttaatatccagtgacaggga

SEQ ID NO: 2405557 - DNA, 25 bp, Homo sapien
taatagtgagaatgtgaatccagcc

SEQ ID NO: 2405558 - DNA, 25 bp, Homo sapien
gaggtgggggaggaccttgctgatg

SEQ ID NO: 2405559 - DNA, 25 bp, Homo sapien
ggtgggggaggaccttgctgatggc

SEQ ID NO: 2405560 - DNA, 25 bp, Homo sapien
agactgcccctgtggaggtccttgt

SEQ ID NO: 2405561 - DNA, 25 bp, Homo sapien
tgaggagactgcccctgtggaggtc

SEQ ID NO: 2405562 - DNA, 25 bp, Homo sapien
tgctgctggcctccttgttggggtg

SEQ ID NO: 2405563 - DNA, 25 bp, Homo sapien
cttgttgctgctggcctccttgttg

SEQ ID NO: 2405564 - DNA, 25 bp, Homo sapien
tccttgttggggtggtccttgtggc

SEQ ID NO: 2405565 - DNA, 25 bp, Homo sapien
ctggcctccttgttggggtggtcct

SEQ ID NO: 2405566 - DNA, 25 bp, Homo sapien
cagagggttgagattgctgtcctcc

SEQ ID NO: 2405567 - DNA, 25 bp, Homo sapien
tctaggaactgctcagagtctcctc

SEQ ID NO: 2405568 - DNA, 25 bp, Homo sapien
cctgacgctcctcatctaggaactg

SEQ ID NO: 2405569 - DNA, 25 bp, Homo sapien
aaaggtggtccctgacgctcctcat

SEQ ID NO: 2405570 - DNA, 25 bp, Homo sapien
gaatttctttactcatggtccccag

SEQ ID NO: 2405571 - DNA, 25 bp, Homo sapien
caaggcttcctaattagaactcctc

SEQ ID NO: 2405572 - DNA, 25 bp, Homo sapien
gaactcctcttaatccacataaggg

SEQ ID NO: 2405573 - DNA, 25 bp, Homo sapien
tggtccccagaatcaaggttgggag

SEQ ID NO: 2405574 - DNA, 25 bp, Homo sapien
aggggaacatcttcctggctgacat

SEQ ID NO: 2405575 - DNA, 25 bp, Homo sapien
ctgatattacgaggggaacatcttc

SEQ ID NO: 2405576 - DNA, 25 bp, Homo sapien
cgaggggaacatcttcctggctgac

SEQ ID NO: 2405577 - DNA, 25 bp, Homo sapien
tacgaggggaacatcttcctggctg

SEQ ID NO: 2405578 - DNA, 25 bp, Homo sapien
gtacaggatgatgggaaaagttact

SEQ ID NO: 2405579 - DNA, 25 bp, Homo sapien
tagtgttctacgaggataaaggacc

SEQ ID NO: 2405580 - DNA, 25 bp, Homo sapien
gaggataaaggacctctgatcacac

SEQ ID NO: 2405581 - DNA, 25 bp, Homo sapien
tgaatcattcaaggctcatagtgtt

SEQ ID NO: 2405582 - DNA, 25 bp, Homo sapien
tttaaatcctgagctgagctgaagg

SEQ ID NO: 2405583 - DNA, 25 bp, Homo sapien
cagggccactgacagcagaatcaga

SEQ ID NO: 2405584 - DNA, 25 bp, Homo sapien
atcctgagctgagctgaaggccagc

SEQ ID NO: 2405585 - DNA, 25 bp, Homo sapien
tcatttaaatcctgagctgagctga

SEQ ID NO: 2405586 - DNA, 25 bp, Homo sapien
gctctggtgtcactcccaactttgt

SEQ ID NO: 2405587 - DNA, 25 bp, Homo sapien
actttgtgctgggagaaacgtgtca

SEQ ID NO: 2405588 - DNA, 25 bp, Homo sapien
ggtgtcactcccaactttgtgctgg

SEQ ID NO: 2405589 - DNA, 25 bp, Homo sapien
gtgctgggagaaacgtgtcagctcc

SEQ ID NO: 2405590 - DNA, 25 bp, Homo sapien
tctgtgatacctagaaattccctgc

SEQ ID NO: 2405591 - DNA, 25 bp, Homo sapien
gggtcctggtttggtagctctctcc

SEQ ID NO: 2405592 - DNA, 25 bp, Homo sapien
cctcagctgctgattgctccaaaaa

SEQ ID NO: 2405593 - DNA, 25 bp, Homo sapien
ccctagacaggtgtgcatgagtgga

SEQ ID NO: 2405594 - DNA, 25 bp, Homo sapien
ggtgacttcaggtcaaccatcatgt

SEQ ID NO: 2405595 - DNA, 25 bp, Homo sapien
tgcaggcctggtgcaagacaggttt

SEQ ID NO: 2405596 - DNA, 25 bp, Homo sapien
caggtcaaccatcatgtcaaaaagg

SEQ ID NO: 2405597 - DNA, 25 bp, Homo sapien
ggagtgccaggcagatattgcctga

SEQ ID NO: 2405598 - DNA, 25 bp, Homo sapien
aactataaagaacgactgtaggcct

SEQ ID NO: 2405599 - DNA, 25 bp, Homo sapien
gcctgtaatatcagtacttggagag

SEQ ID NO: 2405600 - DNA, 25 bp, Homo sapien
agaacgactgtaggcctccccggtg

SEQ ID NO: 2405601 - DNA, 25 bp, Homo sapien
gcctgttgtcctagtcatttgggtg

SEQ ID NO: 2405602 - DNA, 25 bp, Homo sapien
agtccctactctccttgaagctttg

SEQ ID NO: 2405603 - DNA, 25 bp, Homo sapien
tgtgcacatatatccaacagggcta

SEQ ID NO: 2405604 - DNA, 25 bp, Homo sapien
cagcccgaatccctaaagcaattga

SEQ ID NO: 2405605 - DNA, 25 bp, Homo sapien
ccccagaaccaagtagaatggtgat

SEQ ID NO: 2405606 - DNA, 25 bp, Homo sapien
catgtgcaagtagtggtgtctatca

SEQ ID NO: 2405607 - DNA, 25 bp, Homo sapien
cagtagtcagaggaatatcatcgta

SEQ ID NO: 2405608 - DNA, 25 bp, Homo sapien
cacttgttgtacttgcagaaggcaa

SEQ ID NO: 2405609 - DNA, 25 bp, Homo sapien
tgtgagtaacctgtccatcttgcct

SEQ ID NO: 2405610 - DNA, 25 bp, Homo sapien
tttgctgtcccgtaaaattagaaga

SEQ ID NO: 2405611 - DNA, 25 bp, Homo sapien
tagaagaggacaggccaatgttagt

SEQ ID NO: 2405612 - DNA, 25 bp, Homo sapien
ttgccgcaacgaagtctagaagagg

SEQ ID NO: 2405613 - DNA, 25 bp, Homo sapien
aataccatgtagcttcatctgcctg

SEQ ID NO: 2405614 - DNA, 25 bp, Homo sapien
tctcatagcctatattgaaagaggt

SEQ ID NO: 2405615 - DNA, 25 bp, Homo sapien
taccttgaggaaatagaagacactg

SEQ ID NO: 2405616 - DNA, 25 bp, Homo sapien
ggacaggcagaaatagctggatcct

SEQ ID NO: 2405617 - DNA, 25 bp, Homo sapien
gattggagaagttggctaccttgag

SEQ ID NO: 2405618 - DNA, 25 bp, Homo sapien
gtgtactctgtccttaaatctagaa

SEQ ID NO: 2405619 - DNA, 25 bp, Homo sapien
atcttaggagtctgtgtactctgtc

SEQ ID NO: 2405620 - DNA, 25 bp, Homo sapien
gtactctgtccttaaatctagaatg

SEQ ID NO: 2405621 - DNA, 25 bp, Homo sapien
atatcttaggagtctgtgtactctg

SEQ ID NO: 2405622 - DNA, 25 bp, Homo sapien
tctgaatggcttatgaaattgtgag

SEQ ID NO: 2405623 - DNA, 25 bp, Homo sapien
tgtctgcaatattcaataatctgtg

SEQ ID NO: 2405624 - DNA, 25 bp, Homo sapien
gtctgaatggcttatgaaattgtga

SEQ ID NO: 2405625 - DNA, 25 bp, Homo sapien
ggtctgaatggcttatgaaattgtg

SEQ ID NO: 2405626 - DNA, 25 bp, Homo sapien
gaaaagcagggctagagaaactcgc

SEQ ID NO: 2405627 - DNA, 25 bp, Homo sapien
tccaatcgtctcacaaagcatgtag

SEQ ID NO: 2405628 - DNA, 25 bp, Homo sapien
gtttctttcatatcggtccagccag

SEQ ID NO: 2405629 - DNA, 25 bp, Homo sapien
caaggttcctagcagtatcatcaga

SEQ ID NO: 2405630 - DNA, 25 bp, Homo sapien
gatcagcccaattctggagattgcc

SEQ ID NO: 2405631 - DNA, 25 bp, Homo sapien
aagatactcggcagggcactttcca

SEQ ID NO: 2405632 - DNA, 25 bp, Homo sapien
gaggagtttatcgactgaggacagc

SEQ ID NO: 2405633 - DNA, 25 bp, Homo sapien
tgacccagtcaatgcagttgatcag

SEQ ID NO: 2405634 - DNA, 25 bp, Homo sapien
aagttcaatgtctaatgtcactgct

SEQ ID NO: 2405635 - DNA, 25 bp, Homo sapien
cagagaaagttcaatgtctaatgtc

SEQ ID NO: 2405636 - DNA, 25 bp, Homo sapien
gaaagttcaatgtctaatgtcactg

SEQ ID NO: 2405637 - DNA, 25 bp, Homo sapien
gagaaagttcaatgtctaatgtcac

SEQ ID NO: 2405638 - DNA, 25 bp, Homo sapien
gaaatagatacactagttcccctta

SEQ ID NO: 2405639 - DNA, 25 bp, Homo sapien
aggaccgctcgagcccaaaagtttg

SEQ ID NO: 2405640 - DNA, 25 bp, Homo sapien
tatccatgaggcctatgtcccaaga

SEQ ID NO: 2405641 - DNA, 25 bp, Homo sapien
aattctgaaaacgtggagactcaag

SEQ ID NO: 2405642 - DNA, 25 bp, Homo sapien
tatttgttggacacctaacttagga

SEQ ID NO: 2405643 - DNA, 25 bp, Homo sapien
tcaaatctaaagtgatagtacatct

SEQ ID NO: 2405644 - DNA, 25 bp, Homo sapien
gacatgtgcttcctcaaattaaagg

SEQ ID NO: 2405645 - DNA, 25 bp, Homo sapien
gatgttattctatgccactctttaa

SEQ ID NO: 2405646 - DNA, 25 bp, Homo sapien
gtggctcaattaaggctcacttcag

SEQ ID NO: 2405647 - DNA, 25 bp, Homo sapien
agtgggtcttgaatgccttaactca

SEQ ID NO: 2405648 - DNA, 25 bp, Homo sapien
ttgctcaagtgggtcttgaatgcct

SEQ ID NO: 2405649 - DNA, 25 bp, Homo sapien
gctcaattaaggctcacttcagcct

SEQ ID NO: 2405650 - DNA, 25 bp, Homo sapien
tactgtgctcattagttagtggtag

SEQ ID NO: 2405651 - DNA, 25 bp, Homo sapien
catttctgataacattgaacttgct

SEQ ID NO: 2405652 - DNA, 25 bp, Homo sapien
aagcagaacatagtcgtgttttgtt

SEQ ID NO: 2405653 - DNA, 25 bp, Homo sapien
taaaattttgctagttatcactctc

SEQ ID NO: 2405654 - DNA, 25 bp, Homo sapien
cataaaggatctacattgactgggt

SEQ ID NO: 2405655 - DNA, 25 bp, Homo sapien
gaaaacaggtgaatggaagcctacg

SEQ ID NO: 2405656 - DNA, 25 bp, Homo sapien
aataatatcaatgacccggacctgt

SEQ ID NO: 2405657 - DNA, 25 bp, Homo sapien
taaactctgagtactgactgccttc

SEQ ID NO: 2405658 - DNA, 25 bp, Homo sapien
gaatgttaccaggaccaggtcgagg

SEQ ID NO: 2405659 - DNA, 25 bp, Homo sapien
tccaggcaaactagagcaaggtgaa

SEQ ID NO: 2405660 - DNA, 25 bp, Homo sapien
tgtgggccgaacaacaagcttctag

SEQ ID NO: 2405661 - DNA, 25 bp, Homo sapien
tagtaaagatcatgcaagtggacac

SEQ ID NO: 2405662 - DNA, 25 bp, Homo sapien
taaagttgggagtgacaccagagcc

SEQ ID NO: 2405663 - DNA, 25 bp, Homo sapien
ggtagggagctcaaatgcgccattg

SEQ ID NO: 2405664 - DNA, 25 bp, Homo sapien
tataaagggagctgacacgtttctc

SEQ ID NO: 2405665 - DNA, 25 bp, Homo sapien
tgtcatctatgtgtacccagcagtg

SEQ ID NO: 2405666 - DNA, 25 bp, Homo sapien
aggccatcagcaaggtcctccccca

SEQ ID NO: 2405667 - DNA, 25 bp, Homo sapien
ggggccgcccacaaggacctccaca

SEQ ID NO: 2405668 - DNA, 25 bp, Homo sapien
gccgcccacaaggacctccacaggg

SEQ ID NO: 2405669 - DNA, 25 bp, Homo sapien
ggcagtctcctcagtaatctaggat

SEQ ID NO: 2405670 - DNA, 25 bp, Homo sapien
aaatgccttgaaacataatgtgatc

SEQ ID NO: 2405671 - DNA, 25 bp, Homo sapien
tgatcatgctctaacttcaatatac

SEQ ID NO: 2405672 - DNA, 25 bp, Homo sapien
caggaagtgaataagaagatgacag

SEQ ID NO: 2405673 - DNA, 25 bp, Homo sapien
aagaagatgacagtgtttcaaatgc

SEQ ID NO: 2405674 - DNA, 25 bp, Homo sapien
taaaatggtgtacctcaaagtagct

SEQ ID NO: 2405675 - DNA, 25 bp, Homo sapien
gatgactttataatgcaaccaggag

SEQ ID NO: 2405676 - DNA, 25 bp, Homo sapien
tgagttaaatgaccaagcagacttg

SEQ ID NO: 2405677 - DNA, 25 bp, Homo sapien
gctaaccttatgtgtatctgcaaca

SEQ ID NO: 2405678 - DNA, 25 bp, Homo sapien
tacatatattcaaatggaaggagta

SEQ ID NO: 2405679 - DNA, 25 bp, Homo sapien
taaacaagcacataacagagataca

SEQ ID NO: 2405680 - DNA, 25 bp, Homo sapien
gaaaataacaagagattctactcag

SEQ ID NO: 2405681 - DNA, 25 bp, Homo sapien
ccaccacatgcagatctgtttttct

SEQ ID NO: 2405682 - DNA, 25 bp, Homo sapien
taaaagaatttatctcaaagctaga

SEQ ID NO: 2405683 - DNA, 25 bp, Homo sapien
aagaatttatctcaaagctagagtc

SEQ ID NO: 2405684 - DNA, 25 bp, Homo sapien
tttatctcaaagctagagtcagtat

SEQ ID NO: 2405685 - DNA, 25 bp, Homo sapien
gaatttatctcaaagctagagtcag

SEQ ID NO: 2405686 - DNA, 25 bp, Homo sapien
tttgcatacacgctaatcaggtact

SEQ ID NO: 2405687 - DNA, 25 bp, Homo sapien
gtagtttagtaaggcagctggcttc

SEQ ID NO: 2405688 - DNA, 25 bp, Homo sapien
gctggcttctaattcaacaaacgaa

SEQ ID NO: 2405689 - DNA, 25 bp, Homo sapien
tgcaaagacagcagttacgatcagg

SEQ ID NO: 2405690 - DNA, 25 bp, Homo sapien
gcgtctccggatattttgacagtgt

SEQ ID NO: 2405691 - DNA, 25 bp, Homo sapien
aaaatggcatagagtaggaagaaag

SEQ ID NO: 2405692 - DNA, 25 bp, Homo sapien
ggtgctggcgtctccggatattttg

SEQ ID NO: 2405693 - DNA, 25 bp, Homo sapien
gaggtccaaactgatatgaaaaaag

SEQ ID NO: 2405694 - DNA, 25 bp, Homo sapien
gacacacaccagcttccgaatatta

SEQ ID NO: 2405695 - DNA, 25 bp, Homo sapien
tgaggatccgatcaaccgaagagat

SEQ ID NO: 2405696 - DNA, 25 bp, Homo sapien
taccgaggcctgtagctaaccagac

SEQ ID NO: 2405697 - DNA, 25 bp, Homo sapien
aaaccaggctaattcgagagattgc

SEQ ID NO: 2405698 - DNA, 25 bp, Homo sapien
gtaagagcatgccccaatgtctaat

SEQ ID NO: 2405699 - DNA, 25 bp, Homo sapien
aagagcatgccccaatgtctaatat

SEQ ID NO: 2405700 - DNA, 25 bp, Homo sapien
tgtaagagcatgccccaatgtctaa

SEQ ID NO: 2405701 - DNA, 25 bp, Homo sapien
ctgtaagagcatgccccaatgtcta

SEQ ID NO: 2405702 - DNA, 25 bp, Homo sapien
ttacagaacctcagttagacaagag

SEQ ID NO: 2405703 - DNA, 25 bp, Homo sapien
actttttacaagtacatgcccagca

SEQ ID NO: 2405704 - DNA, 25 bp, Homo sapien
tattcatagttatccaaagctcctc

SEQ ID NO: 2405705 - DNA, 25 bp, Homo sapien
catacttccgtgtttgggtggagaa

SEQ ID NO: 2405706 - DNA, 25 bp, Homo sapien
cccctgcccagtagggcatattgct

SEQ ID NO: 2405707 - DNA, 25 bp, Homo sapien
tgacatactgtctagccaagacggg

SEQ ID NO: 2405708 - DNA, 25 bp, Homo sapien
ggaccaatgtagataaaggatgaca

SEQ ID NO: 2405709 - DNA, 25 bp, Homo sapien
gggaaatcagcagcatgatacagtc

SEQ ID NO: 2405710 - DNA, 25 bp, Homo sapien
tcactacagggaccaatgtagataa

SEQ ID NO: 2405711 - DNA, 25 bp, Homo sapien
gcaacagctaccaaacaaagtagaa

SEQ ID NO: 2405712 - DNA, 25 bp, Homo sapien
tgaaacaaattcagcaacagctacc

SEQ ID NO: 2405713 - DNA, 25 bp, Homo sapien
ggtgttccactatgaagaactgatc

SEQ ID NO: 2405714 - DNA, 25 bp, Homo sapien
tatgcctcataaacgtcaaagatgg

SEQ ID NO: 2405715 - DNA, 25 bp, Homo sapien
tatatggtacagggaagaatttcag

SEQ ID NO: 2405716 - DNA, 25 bp, Homo sapien
ttatatggtacagggaagaatttca

SEQ ID NO: 2405717 - DNA, 25 bp, Homo sapien
gtgcagggaacaaatttcttcctgg

SEQ ID NO: 2405718 - DNA, 25 bp, Homo sapien
tgggagtatcgggtgaaattcaccc

SEQ ID NO: 2405719 - DNA, 25 bp, Homo sapien
tgcagggaacaaatttcttcctggt

SEQ ID NO: 2405720 - DNA, 25 bp, Homo sapien
cagtcttgggagtatcgggtgaaat

SEQ ID NO: 2405721 - DNA, 25 bp, Homo sapien
agaggtgtttacagtggttctgatg

SEQ ID NO: 2405722 - DNA, 25 bp, Homo sapien
gcacagaggtgtttacagtggttct

SEQ ID NO: 2405723 - DNA, 25 bp, Homo sapien
tccatttctgtagggtaagtaataa

SEQ ID NO: 2405724 - DNA, 25 bp, Homo sapien
tctgtagggtaagtaataacattcc

SEQ ID NO: 2405725 - DNA, 25 bp, Homo sapien
taatactggttatttcatccttcag

SEQ ID NO: 2405726 - DNA, 25 bp, Homo sapien
gaaatatgatattctggccatttga

SEQ ID NO: 2405727 - DNA, 25 bp, Homo sapien
tagccagttcaaccttgttaagaac

SEQ ID NO: 2405728 - DNA, 25 bp, Homo sapien
cagctctgtcagacccattaaattc

SEQ ID NO: 2405729 - DNA, 25 bp, Homo sapien
gccctggtggaatctcagtgtttat

SEQ ID NO: 2405730 - DNA, 25 bp, Homo sapien
cctttcccagtttagaggtagcact

SEQ ID NO: 2405731 - DNA, 25 bp, Homo sapien
cagtgttctgaagatgtaggttcct

SEQ ID NO: 2405732 - DNA, 25 bp, Homo sapien
ttgtggccaagagtcaacctctggg

SEQ ID NO: 2405733 - DNA, 25 bp, Homo sapien
agttcctgttaggcatccaaatgaa

SEQ ID NO: 2405734 - DNA, 25 bp, Homo sapien
ctgaagtggtcattagcagaagagg

SEQ ID NO: 2405735 - DNA, 25 bp, Homo sapien
aagagcagtattttgatttggacat

SEQ ID NO: 2405736 - DNA, 25 bp, Homo sapien
ctgaaagtctgaagtggtcattagc

SEQ ID NO: 2405737 - DNA, 25 bp, Homo sapien
tacgtatggtacaaataacagtgga

SEQ ID NO: 2405738 - DNA, 25 bp, Homo sapien
tcacgtttaagcacactatggtaca

SEQ ID NO: 2405739 - DNA, 25 bp, Homo sapien
gatttagattagaatgcgcatacca

SEQ ID NO: 2405740 - DNA, 25 bp, Homo sapien
gcataccatccaaaaaactagacgt

SEQ ID NO: 2405741 - DNA, 25 bp, Homo sapien
ttggtgttggaatctggagatcctt

SEQ ID NO: 2405742 - DNA, 25 bp, Homo sapien
ggtgttggaatctggagatcctttg

SEQ ID NO: 2405743 - DNA, 25 bp, Homo sapien
ttccaaatcgatgtgattagggaca

SEQ ID NO: 2405744 - DNA, 25 bp, Homo sapien
ctaaaattccaaatcgatgtgatta

SEQ ID NO: 2405745 - DNA, 25 bp, Homo sapien
tcactcaatttgatctcccaactca

SEQ ID NO: 2405746 - DNA, 25 bp, Homo sapien
cagggacagagtaaagggtattaag

SEQ ID NO: 2405747 - DNA, 25 bp, Homo sapien
cagtcatatctgaaaggtgcgtcgg

SEQ ID NO: 2405748 - DNA, 25 bp, Homo sapien
tattaagtttgcaagcgtggttaca

SEQ ID NO: 2405749 - DNA, 25 bp, Homo sapien
gtttccttcatattcttttgtccac

SEQ ID NO: 2405750 - DNA, 25 bp, Homo sapien
tattcttttgtccacatactctcat

SEQ ID NO: 2405751 - DNA, 25 bp, Homo sapien
ttcatattcttttgtccacatactc

SEQ ID NO: 2405752 - DNA, 25 bp, Homo sapien
catattcttttgtccacatactctc

SEQ ID NO: 2405753 - DNA, 25 bp, Homo sapien
cactggctgtgatcctttaatatcc

SEQ ID NO: 2405754 - DNA, 25 bp, Homo sapien
caaagaccccaatagtatcactgga

SEQ ID NO: 2405755 - DNA, 25 bp, Homo sapien
taaatgaaggcctaacagcactggc

SEQ ID NO: 2405756 - DNA, 25 bp, Homo sapien
tacagcccaggcattaatagtagta

SEQ ID NO: 2405757 - DNA, 25 bp, Homo sapien
cttgggaaccatgggaatgccaata

SEQ ID NO: 2405758 - DNA, 25 bp, Homo sapien
tgttagagacttgttagatactgaa

SEQ ID NO: 2405759 - DNA, 25 bp, Homo sapien
tataactaggatcatcaccatgacc

SEQ ID NO: 2405760 - DNA, 25 bp, Homo sapien
caaagtcatcgaaaattttcttggg

SEQ ID NO: 2405761 - DNA, 25 bp, Homo sapien
ccatatatgccttctgttgatccca

SEQ ID NO: 2405762 - DNA, 25 bp, Homo sapien
tgtttttcactatggatagatcctc

SEQ ID NO: 2405763 - DNA, 25 bp, Homo sapien
tactccccgtgtttaccacatcttg

SEQ ID NO: 2405764 - DNA, 25 bp, Homo sapien
tattgtggaacatagcatacagaca

SEQ ID NO: 2405765 - DNA, 25 bp, Homo sapien
cagataatgccatactaagccaaag

SEQ ID NO: 2405766 - DNA, 25 bp, Homo sapien
cacagtgatattcatgtgtgtgtat

SEQ ID NO: 2405767 - DNA, 25 bp, Homo sapien
tgtactgagtcttaagatgtgctcc

SEQ ID NO: 2405768 - DNA, 25 bp, Homo sapien
agaaacttctcaactttagctatga

SEQ ID NO: 2405769 - DNA, 25 bp, Homo sapien
gccaggacagaaacccagatactct

SEQ ID NO: 2405770 - DNA, 25 bp, Homo sapien
aatgatcttcaagtctgatggccag

SEQ ID NO: 2405771 - DNA, 25 bp, Homo sapien
tctgatacaggcagaaaccaagtgt

SEQ ID NO: 2405772 - DNA, 25 bp, Homo sapien
taccctccttgagtaggctttatga

SEQ ID NO: 2405773 - DNA, 25 bp, Homo sapien
cactcttgagtagatacagcaggtt

SEQ ID NO: 2405774 - DNA, 25 bp, Homo sapien
gtgaaaacttccactcttgagtaga

SEQ ID NO: 2405775 - DNA, 25 bp, Homo sapien
ccagcaggcaaaatattcttctgca

SEQ ID NO: 2405776 - DNA, 25 bp, Homo sapien
gcaggttccagcaggcaaaatattc

SEQ ID NO: 2405777 - DNA, 25 bp, Homo sapien
taaagccagccatgattggagggca

SEQ ID NO: 2405778 - DNA, 25 bp, Homo sapien
cagatggtacatagagctttggccc

SEQ ID NO: 2405779 - DNA, 25 bp, Homo sapien
cacaaggagtggacagtattgccca

SEQ ID NO: 2405780 - DNA, 25 bp, Homo sapien
gaaacagaattggtcgctgccacaa

SEQ ID NO: 2405781 - DNA, 25 bp, Homo sapien
tgtgttgtcttttaggccctgggag

SEQ ID NO: 2405782 - DNA, 25 bp, Homo sapien
cagatgtagagatgatttgtcccaa

SEQ ID NO: 2405783 - DNA, 25 bp, Homo sapien
taagcaagatctatatgatctctgc

SEQ ID NO: 2405784 - DNA, 25 bp, Homo sapien
ggtgcttacattgtaccaggaaaga

SEQ ID NO: 2405785 - DNA, 25 bp, Homo sapien
gccttgctaaccatgacaaccgggt

SEQ ID NO: 2405786 - DNA, 25 bp, Homo sapien
gctccatagggtagttacagtcaaa

SEQ ID NO: 2405787 - DNA, 25 bp, Homo sapien
acagagtaaagggtatgaagctcca

SEQ ID NO: 2405788 - DNA, 25 bp, Homo sapien
gatcttgcgatccttctccatggag

SEQ ID NO: 2405789 - DNA, 25 bp, Homo sapien
aaaataagaattcatcatgaatgtc

SEQ ID NO: 2405790 - DNA, 25 bp, Homo sapien
gttatctaacaataattgtatttgc

SEQ ID NO: 2405791 - DNA, 25 bp, Homo sapien
tgttatctaacaataattgtatttg

SEQ ID NO: 2405792 - DNA, 25 bp, Homo sapien
cctactttggtataactgaacagtt

SEQ ID NO: 2405793 - DNA, 25 bp, Homo sapien
tacacatgggttcataattctgaga

SEQ ID NO: 2405794 - DNA, 25 bp, Homo sapien
cactatggtacatatacgtgataca

SEQ ID NO: 2405795 - DNA, 25 bp, Homo sapien
catagactacggaaaaacttgtggg

SEQ ID NO: 2405796 - DNA, 25 bp, Homo sapien
tctggagaaattgacgatcttgagc

SEQ ID NO: 2405797 - DNA, 25 bp, Homo sapien
tcagggtcagagtgaatggtatcaa

SEQ ID NO: 2405798 - DNA, 25 bp, Homo sapien
tgtctcttgacccaggcaatgaaat

SEQ ID NO: 2405799 - DNA, 25 bp, Homo sapien
gctagcatggctacagtcaagttgg

SEQ ID NO: 2405800 - DNA, 25 bp, Homo sapien
tcactttagatgtgccagcaacctg

SEQ ID NO: 2405801 - DNA, 25 bp, Homo sapien
tccccacagggaaattcaatgagct

SEQ ID NO: 2405802 - DNA, 25 bp, Homo sapien
gcagaagtggagctctgtaccttca

SEQ ID NO: 2405803 - DNA, 25 bp, Homo sapien
aaagcttggtctacacatccttccg

SEQ ID NO: 2405804 - DNA, 25 bp, Homo sapien
gataatattatctttgggtagtctt

SEQ ID NO: 2405805 - DNA, 25 bp, Homo sapien
tgttagtattagtctccaatcttgt

SEQ ID NO: 2405806 - DNA, 25 bp, Homo sapien
tctgcttcatataccgacgattctg

SEQ ID NO: 2405807 - DNA, 25 bp, Homo sapien
tctttgtgaggagttagtatagcat

SEQ ID NO: 2405808 - DNA, 25 bp, Homo sapien
gcacaatcatacctcgccgtagtct

SEQ ID NO: 2405809 - DNA, 25 bp, Homo sapien
gagacaaatttccaagaacgaatgc

SEQ ID NO: 2405810 - DNA, 25 bp, Homo sapien
tgcaggcctaataacacagattgtg

SEQ ID NO: 2405811 - DNA, 25 bp, Homo sapien
tgtctgttcttgctatacgctgaaa

SEQ ID NO: 2405812 - DNA, 25 bp, Homo sapien
gactaccttgaccttggaatctgag

SEQ ID NO: 2405813 - DNA, 25 bp, Homo sapien
tctaacttcaagatgcagaacatgg

SEQ ID NO: 2405814 - DNA, 25 bp, Homo sapien
tatacgtctttgagatggcttccac

SEQ ID NO: 2405815 - DNA, 25 bp, Homo sapien
ctgccataggcagggtgactacctt

SEQ ID NO: 2405816 - DNA, 25 bp, Homo sapien
taaccttgggaacatagactctctg

SEQ ID NO: 2405817 - DNA, 25 bp, Homo sapien
caagattctctgtaaggtcctgacc

SEQ ID NO: 2405818 - DNA, 25 bp, Homo sapien
taaggcaggcgtattatcactggac

SEQ ID NO: 2405819 - DNA, 25 bp, Homo sapien
tacatgagatcaccaacacaacagg

SEQ ID NO: 2405820 - DNA, 25 bp, Homo sapien
gacagtcaatttgcagaccaaagca

SEQ ID NO: 2405821 - DNA, 25 bp, Homo sapien
tgcagggcacgttcttctaactatg

SEQ ID NO: 2405822 - DNA, 25 bp, Homo sapien
cctgggtttgtaacagagtgcccca

SEQ ID NO: 2405823 - DNA, 25 bp, Homo sapien
cagtctcaatccttcacttaggagg

SEQ ID NO: 2405824 - DNA, 25 bp, Homo sapien
tcagtttgccgttattgcctcttct

SEQ ID NO: 2405825 - DNA, 25 bp, Homo sapien
ggaattgatcactaccatgacaaaa

SEQ ID NO: 2405826 - DNA, 25 bp, Homo sapien
tagcccaaggtggtctgcaactctg

SEQ ID NO: 2405827 - DNA, 25 bp, Homo sapien
tgaatgtgtaatggacacacatggc

SEQ ID NO: 2405828 - DNA, 25 bp, Homo sapien
tgtgtgcatcattaactaacaacaa

SEQ ID NO: 2405829 - DNA, 25 bp, Homo sapien
tgatttcttcataaaagctgtacgt

SEQ ID NO: 2405830 - DNA, 25 bp, Homo sapien
tatttgctttctactaagcataaaa

SEQ ID NO: 2405831 - DNA, 25 bp, Homo sapien
aaattgaatgtctttaccatccaaa

SEQ ID NO: 2405832 - DNA, 25 bp, Homo sapien
ctagagtagttacagtcaagcttga

SEQ ID NO: 2405833 - DNA, 25 bp, Homo sapien
tccaagttgatgtgattatacacag

SEQ ID NO: 2405834 - DNA, 25 bp, Homo sapien
cagcccaggcattagaagcaacaat

SEQ ID NO: 2405835 - DNA, 25 bp, Homo sapien
agcgtgtcatctgccacaaaactga

SEQ ID NO: 2405836 - DNA, 25 bp, Homo sapien
tgtaaccatcatgtagggcaagaca

SEQ ID NO: 2405837 - DNA, 25 bp, Homo sapien
gacatggaacattgctaagagccta

SEQ ID NO: 2405838 - DNA, 25 bp, Homo sapien
cagaaatctgtggttggcaggtaac

SEQ ID NO: 2405839 - DNA, 25 bp, Homo sapien
gctagactgcacacttagaaatgaa

SEQ ID NO: 2405840 - DNA, 25 bp, Homo sapien
gtatccaactggttaactctgtcta

SEQ ID NO: 2405841 - DNA, 25 bp, Homo sapien
tagcatcaatgtgttaccctctagc

SEQ ID NO: 2405842 - DNA, 25 bp, Homo sapien
tactcgatactgttttacttgatgt

SEQ ID NO: 2405843 - DNA, 25 bp, Homo sapien
gataccggtgagaacttatacttgt

SEQ ID NO: 2405844 - DNA, 25 bp, Homo sapien
tttaggaggccgacacgggaagatc

SEQ ID NO: 2405845 - DNA, 25 bp, Homo sapien
taataatattacagaccaggccctg

SEQ ID NO: 2405846 - DNA, 25 bp, Homo sapien
gaatgaatgcagactaccagaaact

SEQ ID NO: 2405847 - DNA, 25 bp, Homo sapien
tgtgaaatcctagccctacagaaaa

SEQ ID NO: 2405848 - DNA, 25 bp, Homo sapien
catgactggagggtatgagcacgcc

SEQ ID NO: 2405849 - DNA, 25 bp, Homo sapien
caaggagtggcggtactggacacaa

SEQ ID NO: 2405850 - DNA, 25 bp, Homo sapien
ccaagggactggatgatgtaagaca

SEQ ID NO: 2405851 - DNA, 25 bp, Homo sapien
gtagcccttctggaaaagtgctgga

SEQ ID NO: 2405852 - DNA, 25 bp, Homo sapien
aaaaacatagcagggtcagagtgaa

SEQ ID NO: 2405853 - DNA, 25 bp, Homo sapien
agtgaagggcactaagtttcctagc

SEQ ID NO: 2405854 - DNA, 25 bp, Homo sapien
caataacaaatagaaccactaccac

SEQ ID NO: 2405855 - DNA, 25 bp, Homo sapien
cctagcgtggttacagtcgcatctg

SEQ ID NO: 2405856 - DNA, 25 bp, Homo sapien
aaaatgatgggtataaaagttgtca

SEQ ID NO: 2405857 - DNA, 25 bp, Homo sapien
aaatgatgggtataaaagttgtcat

SEQ ID NO: 2405858 - DNA, 25 bp, Homo sapien
ctggaaaaaatgatgggtataaaag

SEQ ID NO: 2405859 - DNA, 25 bp, Homo sapien
gtgtattttagagcgattggtgcat

SEQ ID NO: 2405860 - DNA, 25 bp, Homo sapien
gcttggtgtattttagagcgattgg

SEQ ID NO: 2405861 - DNA, 25 bp, Homo sapien
tggtgtattttagagcgattggtgc

SEQ ID NO: 2405862 - DNA, 25 bp, Homo sapien
cttggtgtattttagagcgattggt

SEQ ID NO: 2405863 - DNA, 25 bp, Homo sapien
ggagttccagactgcagtaagccat

SEQ ID NO: 2405864 - DNA, 25 bp, Homo sapien
aggagttccagactgcagtaagcca

SEQ ID NO: 2405865 - DNA, 25 bp, Homo sapien
cagtaagccatgatcctaccactga

SEQ ID NO: 2405866 - DNA, 25 bp, Homo sapien
taagccatgatcctaccactgaact

SEQ ID NO: 2405867 - DNA, 25 bp, Homo sapien
ataagtagactttaagtcccatgga

SEQ ID NO: 2405868 - DNA, 25 bp, Homo sapien
gtagactttaagtcccatggaaaca

SEQ ID NO: 2405869 - DNA, 25 bp, Homo sapien
taagtagactttaagtcccatggaa

SEQ ID NO: 2405870 - DNA, 25 bp, Homo sapien
aaatgttctgtcacagaactgacac

SEQ ID NO: 2405871 - DNA, 25 bp, Homo sapien
tccacatccaaactagccttcatga

SEQ ID NO: 2405872 - DNA, 25 bp, Homo sapien
caatgtttaaaaagctggcgccttc

SEQ ID NO: 2405873 - DNA, 25 bp, Homo sapien
gatagatggagtctattcccctcca

SEQ ID NO: 2405874 - DNA, 25 bp, Homo sapien
aagatattagtgtcagagtgcaggg

SEQ ID NO: 2405875 - DNA, 25 bp, Homo sapien
gattccaagttgatgtgattagaca

SEQ ID NO: 2405876 - DNA, 25 bp, Homo sapien
tacatggagaatagattaacagcag

SEQ ID NO: 2405877 - DNA, 25 bp, Homo sapien
tgtgacgtttgctggcatggttaca

SEQ ID NO: 2405878 - DNA, 25 bp, Homo sapien
agctttgtgttagaatttaccttca

SEQ ID NO: 2405879 - DNA, 25 bp, Homo sapien
ggaactcaaagagcagcactggatt

SEQ ID NO: 2405880 - DNA, 25 bp, Homo sapien
tacatcattgtattccatgacataa

SEQ ID NO: 2405881 - DNA, 25 bp, Homo sapien
gcttatgttgttgaaaaggtgctct

SEQ ID NO: 2405882 - DNA, 25 bp, Homo sapien
tcaaagcactagagttaagggtggt

SEQ ID NO: 2405883 - DNA, 25 bp, Homo sapien
tattcagcctgacatgaactttgct

SEQ ID NO: 2405884 - DNA, 25 bp, Homo sapien
ggtggtgggagaacactattattca

SEQ ID NO: 2405885 - DNA, 25 bp, Homo sapien
tgatgtcacctgaaagggagaatgt

SEQ ID NO: 2405886 - DNA, 25 bp, Homo sapien
acagtatgatggtttctaagagggg

SEQ ID NO: 2405887 - DNA, 25 bp, Homo sapien
ccctgcttggtatagctatgatctg

SEQ ID NO: 2405888 - DNA, 25 bp, Homo sapien
ttctctgtgtatgaatagtcagttg

SEQ ID NO: 2405889 - DNA, 25 bp, Homo sapien
gacaggaaaccagattccctgcttg

SEQ ID NO: 2405890 - DNA, 25 bp, Homo sapien
ggctgcagcaaaagaatcatttgaa

SEQ ID NO: 2405891 - DNA, 25 bp, Homo sapien
aaaagcagatgataataaatctgtc

SEQ ID NO: 2405892 - DNA, 25 bp, Homo sapien
cattttacctttttgctataggcag

SEQ ID NO: 2405893 - DNA, 25 bp, Homo sapien
tggctagttttcttatgagttaaca

SEQ ID NO: 2405894 - DNA, 25 bp, Homo sapien
cctgaacgtgtaattgaactggata

SEQ ID NO: 2405895 - DNA, 25 bp, Homo sapien
aactggatacgtatggcagctggca

SEQ ID NO: 2405896 - DNA, 25 bp, Homo sapien
cacatccagcctgcagggggaggtt

SEQ ID NO: 2405897 - DNA, 25 bp, Homo sapien
tggcaggactttcacattcttcgtg

SEQ ID NO: 2405898 - DNA, 25 bp, Homo sapien
cacgtctctgacaagcctgtgggag

SEQ ID NO: 2405899 - DNA, 25 bp, Homo sapien
tataggctactggtctcaaatggag

SEQ ID NO: 2405900 - DNA, 25 bp, Homo sapien
tgttagaggcatacatagtgggcat

SEQ ID NO: 2405901 - DNA, 25 bp, Homo sapien
tatggccactgagccaaatgatcca

SEQ ID NO: 2405902 - DNA, 25 bp, Homo sapien
aggattctgcttggataagcctgta

SEQ ID NO: 2405903 - DNA, 25 bp, Homo sapien
gcttggataagcctgtaaccttaac

SEQ ID NO: 2405904 - DNA, 25 bp, Homo sapien
tcctctgcggaaggattctgcttgg

SEQ ID NO: 2405905 - DNA, 25 bp, Homo sapien
tctgcttggataagcctgtaacctt

SEQ ID NO: 2405906 - DNA, 25 bp, Homo sapien
tctctcctttcacccagtacctcac

SEQ ID NO: 2405907 - DNA, 25 bp, Homo sapien
tatgaagatgaaggcttctctcctt

SEQ ID NO: 2405908 - DNA, 25 bp, Homo sapien
gcttctctcctttcacccagtacct

SEQ ID NO: 2405909 - DNA, 25 bp, Homo sapien
ctatgaagatgaaggcttctctcct

SEQ ID NO: 2405910 - DNA, 25 bp, Homo sapien
gatagctgaatgcaatagcttcgca

SEQ ID NO: 2405911 - DNA, 25 bp, Homo sapien
actcagttgcataccaatttaatac

SEQ ID NO: 2405912 - DNA, 25 bp, Homo sapien
tagctgaatgcaatagcttcgcaga

SEQ ID NO: 2405913 - DNA, 25 bp, Homo sapien
tgaagggaactaagtttgctaggat

SEQ ID NO: 2405914 - DNA, 25 bp, Homo sapien
accatttaatccctatccgtgagta

SEQ ID NO: 2405915 - DNA, 25 bp, Homo sapien
tacctcttggtctctttatgcttca

SEQ ID NO: 2405916 - DNA, 25 bp, Homo sapien
tattagcagaaatcaagacttcttc

SEQ ID NO: 2405917 - DNA, 25 bp, Homo sapien
tatggtctacgcattctcctgcaac

SEQ ID NO: 2405918 - DNA, 25 bp, Homo sapien
cctgaacatgtaattgaaatggaca

SEQ ID NO: 2405919 - DNA, 25 bp, Homo sapien
tggcctcaatagatattcccaactg

SEQ ID NO: 2405920 - DNA, 25 bp, Homo sapien
gattgcaagcaagagccatcatacc

SEQ ID NO: 2405921 - DNA, 25 bp, Homo sapien
caagcctgcactgggagtttttgaa

SEQ ID NO: 2405922 - DNA, 25 bp, Homo sapien
tgttttatgtcagggcgatgtcact

SEQ ID NO: 2405923 - DNA, 25 bp, Homo sapien
taggatgtggtatcttccctgagca

SEQ ID NO: 2405924 - DNA, 25 bp, Homo sapien
tcctggtctacatgtcgaaaaatcc

SEQ ID NO: 2405925 - DNA, 25 bp, Homo sapien
tgcatgtggctctcgattaagtgaa

SEQ ID NO: 2405926 - DNA, 25 bp, Homo sapien
tgcgtgcaactacacaaggcatctg

SEQ ID NO: 2405927 - DNA, 25 bp, Homo sapien
ggaggagtatctgctgtctgaaaaa

SEQ ID NO: 2405928 - DNA, 25 bp, Homo sapien
ccatcaagcccgtaggagaggagaa

SEQ ID NO: 2405929 - DNA, 25 bp, Homo sapien
aaaaagcccctcaagcacaagactg

SEQ ID NO: 2405930 - DNA, 25 bp, Homo sapien
ggagcttggtcataactaggatcac

SEQ ID NO: 2405931 - DNA, 25 bp, Homo sapien
gatattagaagcaacagctcctact

SEQ ID NO: 2405932 - DNA, 25 bp, Homo sapien
gaattactcgtattccactcagggt

SEQ ID NO: 2405933 - DNA, 25 bp, Homo sapien
gaagacacacgatgcaccccttgtg

SEQ ID NO: 2405934 - DNA, 25 bp, Homo sapien
ctcacattattcgtgaactgtggag

SEQ ID NO: 2405935 - DNA, 25 bp, Homo sapien
aagtgtaactgaaatggatatgcat

SEQ ID NO: 2405936 - DNA, 25 bp, Homo sapien
gcagctggcaggacactcacattat

SEQ ID NO: 2405937 - DNA, 25 bp, Homo sapien
catccagcctgcattgagagtttct

SEQ ID NO: 2405938 - DNA, 25 bp, Homo sapien
ctccaaactgatatcattatggaca

SEQ ID NO: 2405939 - DNA, 25 bp, Homo sapien
ccaaactgatatcattatggacaga

SEQ ID NO: 2405940 - DNA, 25 bp, Homo sapien
tccaaactgatatcattatggacag

SEQ ID NO: 2405941 - DNA, 25 bp, Homo sapien
actccaaactgatatcattatggac

SEQ ID NO: 2405942 - DNA, 25 bp, Homo sapien
gaaaagtacattgcactcttcaatt

SEQ ID NO: 2405943 - DNA, 25 bp, Homo sapien
aaattcttttgtccgcacaatctca

SEQ ID NO: 2405944 - DNA, 25 bp, Homo sapien
acagcataaaagatagtagggtcag

SEQ ID NO: 2405945 - DNA, 25 bp, Homo sapien
accatggttacagtcatatttgaaa

SEQ ID NO: 2405946 - DNA, 25 bp, Homo sapien
ctggaaaaaatgatgggtagaaaag

SEQ ID NO: 2405947 - DNA, 25 bp, Homo sapien
aaatgatgggtagaaaagttatcat

SEQ ID NO: 2405948 - DNA, 25 bp, Homo sapien
aaaatgatgggtagaaaagttatca

SEQ ID NO: 2405949 - DNA, 25 bp, Homo sapien
ataagtagactttaagtcccatgga

SEQ ID NO: 2405950 - DNA, 25 bp, Homo sapien
gtagactttaagtcccatggaaaca

SEQ ID NO: 2405951 - DNA, 25 bp, Homo sapien
taagtagactttaagtcccatggaa

SEQ ID NO: 2405952 - DNA, 25 bp, Homo sapien
tgtgaccagtgtcaagccagaaatc

SEQ ID NO: 2405953 - DNA, 25 bp, Homo sapien
tcaccatggcgtgttaactaatgag

SEQ ID NO: 2405954 - DNA, 25 bp, Homo sapien
gcacctaatttgtaaatctgctggg

SEQ ID NO: 2405955 - DNA, 25 bp, Homo sapien
cctctcaatgtaatatcactggttg

SEQ ID NO: 2405956 - DNA, 25 bp, Homo sapien
caagagtgtgggaaatatgtacaac

SEQ ID NO: 2405957 - DNA, 25 bp, Homo sapien
cctgtgaggtggataattaaggcta

SEQ ID NO: 2405958 - DNA, 25 bp, Homo sapien
tttggagagatctgcgcttggcaga

SEQ ID NO: 2405959 - DNA, 25 bp, Homo sapien
tgaggagccgaaagaaaaagtagat

SEQ ID NO: 2405960 - DNA, 25 bp, Homo sapien
caaacggattacttcagtcagaaag

SEQ ID NO: 2405961 - DNA, 25 bp, Homo sapien
cacttgaagctataaaacgtacggg

SEQ ID NO: 2405962 - DNA, 25 bp, Homo sapien
ccagatctgtcctagaaaaatttca

SEQ ID NO: 2405963 - DNA, 25 bp, Homo sapien
taatcaatttccctaagctcaagga

SEQ ID NO: 2405964 - DNA, 25 bp, Homo sapien
gagatcatacatttttatcaggatg

SEQ ID NO: 2405965 - DNA, 25 bp, Homo sapien
cagagaacggctcatgatggaatgg

SEQ ID NO: 2405966 - DNA, 25 bp, Homo sapien
gaaaacatatccaagtgcttcgaca

SEQ ID NO: 2405967 - DNA, 25 bp, Homo sapien
acagcttagtccacagattctgaat

SEQ ID NO: 2405968 - DNA, 25 bp, Homo sapien
ttccaaggtttataaagctggcacc

SEQ ID NO: 2405969 - DNA, 25 bp, Homo sapien
tgtgttttagtaaactgtatgtctc

SEQ ID NO: 2405970 - DNA, 25 bp, Homo sapien
agaagttccaaggtttataaagctg

SEQ ID NO: 2405971 - DNA, 25 bp, Homo sapien
caaggtttataaagctggcaccttc

SEQ ID NO: 2405972 - DNA, 25 bp, Homo sapien
tccactttcctatgaacttacacaa

SEQ ID NO: 2405973 - DNA, 25 bp, Homo sapien
ttctcagcatcaggcctagacaaat

SEQ ID NO: 2405974 - DNA, 25 bp, Homo sapien
taccctcacataatatttcgtcaag

SEQ ID NO: 2405975 - DNA, 25 bp, Homo sapien
gaataatacaaaaccgacacatttc

SEQ ID NO: 2405976 - DNA, 25 bp, Homo sapien
aatgtttcatacaccaccagtttgt

SEQ ID NO: 2405977 - DNA, 25 bp, Homo sapien
aaatgtttcatacaccaccagtttg

SEQ ID NO: 2405978 - DNA, 25 bp, Homo sapien
gcatgttattgtcaatgttcttcag

SEQ ID NO: 2405979 - DNA, 25 bp, Homo sapien
ttaaaatgctggtgtaatatcactg

SEQ ID NO: 2405980 - DNA, 25 bp, Homo sapien
aaaatgctggtgtaatatcactggt

SEQ ID NO: 2405981 - DNA, 25 bp, Homo sapien
tttaaaatgctggtgtaatatcact

SEQ ID NO: 2405982 - DNA, 25 bp, Homo sapien
taaaatgctggtgtaatatcactgg

SEQ ID NO: 2405983 - DNA, 25 bp, Homo sapien
catttgtctttagcgacttcagttg

SEQ ID NO: 2405984 - DNA, 25 bp, Homo sapien
cccgatatgtagatcgtatagtaaa

SEQ ID NO: 2405985 - DNA, 25 bp, Homo sapien
taaagggagcttgatcataactaag

SEQ ID NO: 2405986 - DNA, 25 bp, Homo sapien
actaagatcatcaccaatacggact

SEQ ID NO: 2405987 - DNA, 25 bp, Homo sapien
tgagcaatatgtaatcacctaaagc

SEQ ID NO: 2405988 - DNA, 25 bp, Homo sapien
ggtgtgtaaacctcgctaaagtaca

SEQ ID NO: 2405989 - DNA, 25 bp, Homo sapien
gatggtgttaaggtgtagagtcttc

SEQ ID NO: 2405990 - DNA, 25 bp, Homo sapien
gttcccgcaacctttgaagatatag

SEQ ID NO: 2405991 - DNA, 25 bp, Homo sapien
tcctgatggagtactatggtgccag

SEQ ID NO: 2405992 - DNA, 25 bp, Homo sapien
cttaactcagctcaaggtaaagcca

SEQ ID NO: 2405993 - DNA, 25 bp, Homo sapien
cagagggcaaaatgggcttgaaaac

SEQ ID NO: 2405994 - DNA, 25 bp, Homo sapien
caggaggcttcttgaccagttcaaa

SEQ ID NO: 2405995 - DNA, 25 bp, Homo sapien
caatgagaatgtcatctaagaacat

SEQ ID NO: 2405996 - DNA, 25 bp, Homo sapien
gaattgatgtcatcacaacaatgag

SEQ ID NO: 2405997 - DNA, 25 bp, Homo sapien
atgtatacctgaatttggcaagaat

SEQ ID NO: 2405998 - DNA, 25 bp, Homo sapien
caacaatgagaatgtcatctaagaa

SEQ ID NO: 2405999 - DNA, 25 bp, Homo sapien
tttcctccttatgaaaagtccatta

SEQ ID NO: 2406000 - DNA, 25 bp, Homo sapien
ctaatgataatcttattataagaca

SEQ ID NO: 2406001 - DNA, 25 bp, Homo sapien
agtccattatccaaacaatttactg

SEQ ID NO: 2406002 - DNA, 25 bp, Homo sapien
caaacaatttactgcaaaaaacaca

SEQ ID NO: 2406003 - DNA, 25 bp, Homo sapien
gtttatgaaatgtctgctactcctt

SEQ ID NO: 2406004 - DNA, 25 bp, Homo sapien
tcaatagtccttttagttacgcaca

SEQ ID NO: 2406005 - DNA, 25 bp, Homo sapien
tatgcattgaatttgatactcagac

SEQ ID NO: 2406006 - DNA, 25 bp, Homo sapien
gctactcctttgaaacgcactgaaa

SEQ ID NO: 2406007 - DNA, 25 bp, Homo sapien
gagagaaccctacctgataaatgtg

SEQ ID NO: 2406008 - DNA, 25 bp, Homo sapien
cctgaatggaagagttcattttgtc

SEQ ID NO: 2406009 - DNA, 25 bp, Homo sapien
tagtcaaagtagcactacacatcca

SEQ ID NO: 2406010 - DNA, 25 bp, Homo sapien
gataaatgtgatagatgtgacctca

SEQ ID NO: 2406011 - DNA, 25 bp, Homo sapien
aactgattaattaatgcccaaagaa

SEQ ID NO: 2406012 - DNA, 25 bp, Homo sapien
ttaattaatgcccaaagaatagtaa

SEQ ID NO: 2406013 - DNA, 25 bp, Homo sapien
tgattaattaatgcccaaagaatag

SEQ ID NO: 2406014 - DNA, 25 bp, Homo sapien
taactgattaattaatgcccaaaga

SEQ ID NO: 2406015 - DNA, 25 bp, Homo sapien
gaagtcgagtatgtaaacatgcaaa

SEQ ID NO: 2406016 - DNA, 25 bp, Homo sapien
tgaatagaaattgttagaaataaca

SEQ ID NO: 2406017 - DNA, 25 bp, Homo sapien
gactaaagaagcgaagtcgagtatg

SEQ ID NO: 2406018 - DNA, 25 bp, Homo sapien
aagaagcgaagtcgagtatgtaaac

SEQ ID NO: 2406019 - DNA, 25 bp, Homo sapien
gaaggtttgtcactgctatggccaa

SEQ ID NO: 2406020 - DNA, 25 bp, Homo sapien
tgaaatacgtaccttctccaggaag

SEQ ID NO: 2406021 - DNA, 25 bp, Homo sapien
gccaggatcctcagaaaatgatgga

SEQ ID NO: 2406022 - DNA, 25 bp, Homo sapien
cctgtaaatccagggcaggcgactc

SEQ ID NO: 2406023 - DNA, 25 bp, Homo sapien
tacctttgcctcagacgtgggactt

SEQ ID NO: 2406024 - DNA, 25 bp, Homo sapien
caatgtcttgtatcagtggagggtc

SEQ ID NO: 2406025 - DNA, 25 bp, Homo sapien
gagtccacacatgcactatagagaa

SEQ ID NO: 2406026 - DNA, 25 bp, Homo sapien
gtagcaacagatggctttcacccag

SEQ ID NO: 2406027 - DNA, 25 bp, Homo sapien
taatcttccacagcattatcagtga

SEQ ID NO: 2406028 - DNA, 25 bp, Homo sapien
cttgctcttcccaagaatcagaatc

SEQ ID NO: 2406029 - DNA, 25 bp, Homo sapien
tcagtgaggtctgactcagcttgct

SEQ ID NO: 2406030 - DNA, 25 bp, Homo sapien
tccacagcattatcagtgaggtctg

SEQ ID NO: 2406031 - DNA, 25 bp, Homo sapien
aagtgaatcaaatctgctataaaag

SEQ ID NO: 2406032 - DNA, 25 bp, Homo sapien
ggtcccagccgtcgctaggaggtcc

SEQ ID NO: 2406033 - DNA, 25 bp, Homo sapien
tgccggtcccagccgtcgctaggag

SEQ ID NO: 2406034 - DNA, 25 bp, Homo sapien
gccctgcggcaaccctcgctacaga

SEQ ID NO: 2406035 - DNA, 25 bp, Homo sapien
gtcgctaggaggtccgcgggccctg

SEQ ID NO: 2406036 - DNA, 25 bp, Homo sapien
gggcggcgacacctggctcatggcc

SEQ ID NO: 2406037 - DNA, 25 bp, Homo sapien
cccgcggcggctccgtcctccttgg

SEQ ID NO: 2406038 - DNA, 25 bp, Homo sapien
gggcgggcggcgacacctggctcat

SEQ ID NO: 2406039 - DNA, 25 bp, Homo sapien
tccttggccgtcagggcctcaagcc

SEQ ID NO: 2406040 - DNA, 25 bp, Homo sapien
tgaacttcccgtacttctacgtcgc

SEQ ID NO: 2406041 - DNA, 25 bp, Homo sapien
ggtacatatttagagccatgactaa

SEQ ID NO: 2406042 - DNA, 25 bp, Homo sapien
gtacttctacgtcgcgggctcggtg

SEQ ID NO: 2406043 - DNA, 25 bp, Homo sapien
ggtgatcctcaacatccgattgcag

SEQ ID NO: 2406044 - DNA, 25 bp, Homo sapien
cgggagactgagataggagagttgt

SEQ ID NO: 2406045 - DNA, 25 bp, Homo sapien
gagactgagataggagagttgtttg

SEQ ID NO: 2406046 - DNA, 25 bp, Homo sapien
actgagataggagagttgtttgaac

SEQ ID NO: 2406047 - DNA, 25 bp, Homo sapien
gagataggagagttgtttgaaccca

SEQ ID NO: 2406048 - DNA, 25 bp, Homo sapien
tcacagctgtctgtcgcagcttgct

SEQ ID NO: 2406049 - DNA, 25 bp, Homo sapien
gtatagttcctaagatgccacagta

SEQ ID NO: 2406050 - DNA, 25 bp, Homo sapien
agtggcacgagggaaaggcatttaa

SEQ ID NO: 2406051 - DNA, 25 bp, Homo sapien
aactttatgtacttgttgttccaca

SEQ ID NO: 2406052 - DNA, 25 bp, Homo sapien
tgtgctggagtctctagagcccaag

SEQ ID NO: 2406053 - DNA, 25 bp, Homo sapien
aaatttctagtatgtctcaccaagg

SEQ ID NO: 2406054 - DNA, 25 bp, Homo sapien
gcttcaaatttctagtatgtctcac

SEQ ID NO: 2406055 - DNA, 25 bp, Homo sapien
attttcatggccctcctatgggcct

SEQ ID NO: 2406056 - DNA, 25 bp, Homo sapien
caagtgattagtcatgtgccaaagc

SEQ ID NO: 2406057 - DNA, 25 bp, Homo sapien
gcaagtcccactagaaatgaatcaa

SEQ ID NO: 2406058 - DNA, 25 bp, Homo sapien
tccaattgtggagatagccaagcag

SEQ ID NO: 2406059 - DNA, 25 bp, Homo sapien
gaacacattccccagcatgctgatg

SEQ ID NO: 2406060 - DNA, 25 bp, Homo sapien
tttacaatcaaaccattgcagaaga

SEQ ID NO: 2406061 - DNA, 25 bp, Homo sapien
caatcaaaccattgcagaagagcat

SEQ ID NO: 2406062 - DNA, 25 bp, Homo sapien
tccaagtttttaatactttgtatca

SEQ ID NO: 2406063 - DNA, 25 bp, Homo sapien
tacaatcaaaccattgcagaagagc

SEQ ID NO: 2406064 - DNA, 25 bp, Homo sapien
tccttcactattatgcaaacacaga

SEQ ID NO: 2406065 - DNA, 25 bp, Homo sapien
gatgggtaacaagagagtttctcct

SEQ ID NO: 2406066 - DNA, 25 bp, Homo sapien
gaccgatattgttactctttttgca

SEQ ID NO: 2406067 - DNA, 25 bp, Homo sapien
ggtgatgggtaacaagagagtttct

SEQ ID NO: 2406068 - DNA, 25 bp, Homo sapien
aatgttcatggctctcacataggcc

SEQ ID NO: 2406069 - DNA, 25 bp, Homo sapien
ttgcatagaaagtagctgacggatg

SEQ ID NO: 2406070 - DNA, 25 bp, Homo sapien
tctctggagccagtcgcctatcact

SEQ ID NO: 2406071 - DNA, 25 bp, Homo sapien
gctgacggatgaaagggaagttccc

SEQ ID NO: 2406072 - DNA, 25 bp, Homo sapien
agtgttgcaatgatttccaaacatc

SEQ ID NO: 2406073 - DNA, 25 bp, Homo sapien
ccaagtgttgcaatgatttccaaac

SEQ ID NO: 2406074 - DNA, 25 bp, Homo sapien
ctccaagtgttgcaatgatttccaa

SEQ ID NO: 2406075 - DNA, 25 bp, Homo sapien
tgttgcaatgatttccaaacatcca

SEQ ID NO: 2406076 - DNA, 25 bp, Homo sapien
gaacaggcgccctctgtgtcctaaa

SEQ ID NO: 2406077 - DNA, 25 bp, Homo sapien
tgaactggatttctactctgtgcct

SEQ ID NO: 2406078 - DNA, 25 bp, Homo sapien
tagaccaatccctgcacaatcaggc

SEQ ID NO: 2406079 - DNA, 25 bp, Homo sapien
cctaaatgccacattcccattgtgc

SEQ ID NO: 2406080 - DNA, 25 bp, Homo sapien
ggcaaacaggatttctcttcttgcc

SEQ ID NO: 2406081 - DNA, 25 bp, Homo sapien
gatttctcttcttgcctgagaatac

SEQ ID NO: 2406082 - DNA, 25 bp, Homo sapien
aggcaaacaggatttctcttcttgc

SEQ ID NO: 2406083 - DNA, 25 bp, Homo sapien
caggatttctcttcttgcctgagaa

SEQ ID NO: 2406084 - DNA, 25 bp, Homo sapien
atcttgccaaagataatacgtctcc

SEQ ID NO: 2406085 - DNA, 25 bp, Homo sapien
caaatcttgccaaagataatacgtc

SEQ ID NO: 2406086 - DNA, 25 bp, Homo sapien
aatcttgccaaagataatacgtctc

SEQ ID NO: 2406087 - DNA, 25 bp, Homo sapien
aaatcttgccaaagataatacgtct

SEQ ID NO: 2406088 - DNA, 25 bp, Homo sapien
ttattcggaactgctaaggactttc

SEQ ID NO: 2406089 - DNA, 25 bp, Homo sapien
tattcggaactgctaaggactttct

SEQ ID NO: 2406090 - DNA, 25 bp, Homo sapien
cttccaatgtcatggcatttgaatc

SEQ ID NO: 2406091 - DNA, 25 bp, Homo sapien
tatgaccaccttcttccaatgtcat

SEQ ID NO: 2406092 - DNA, 25 bp, Homo sapien
tattaaaggtagagctatgaccacc

SEQ ID NO: 2406093 - DNA, 25 bp, Homo sapien
ttggtatattaaaggtagagctatg

SEQ ID NO: 2406094 - DNA, 25 bp, Homo sapien
cttgacatggcaggaaatgtcgaat

SEQ ID NO: 2406095 - DNA, 25 bp, Homo sapien
ttcatagagcagacttgacatggca

SEQ ID NO: 2406096 - DNA, 25 bp, Homo sapien
caaacaaacaaggaatttcatagag

SEQ ID NO: 2406097 - DNA, 25 bp, Homo sapien
tggcaggaaatgtcgaattcctcac

SEQ ID NO: 2406098 - DNA, 25 bp, Homo sapien
gtagagtacatgagatcccatcctc

SEQ ID NO: 2406099 - DNA, 25 bp, Homo sapien
ctgcagtagagtacatgagatccca

SEQ ID NO: 2406100 - DNA, 25 bp, Homo sapien
cagtagagtacatgagatcccatcc

SEQ ID NO: 2406101 - DNA, 25 bp, Homo sapien
tctctccccaatcccttcaacctcc

SEQ ID NO: 2406102 - DNA, 25 bp, Homo sapien
tggggctttccagcgggaggtggca

SEQ ID NO: 2406103 - DNA, 25 bp, Homo sapien
tctgtgtggtctgcccccttgagga

SEQ ID NO: 2406104 - DNA, 25 bp, Homo sapien
ccctggggaggtctgtgtggtctgc

SEQ ID NO: 2406105 - DNA, 25 bp, Homo sapien
tgtccctggggaggtctgtgtggtc

SEQ ID NO: 2406106 - DNA, 25 bp, Homo sapien
ttcttgtgggggtggtccttgtggc

SEQ ID NO: 2406107 - DNA, 25 bp, Homo sapien
cttgtgggggtggtccttgtggctt

SEQ ID NO: 2406108 - DNA, 25 bp, Homo sapien
tgtgggggtggtccttgtggctttc

SEQ ID NO: 2406109 - DNA, 25 bp, Homo sapien
cttcttgtgggggtggtccttgtgg

SEQ ID NO: 2406110 - DNA, 25 bp, Homo sapien
cttctggctttcccggacgaggtgg

SEQ ID NO: 2406111 - DNA, 25 bp, Homo sapien
gaccttgaggtttgttgcctccttg

SEQ ID NO: 2406112 - DNA, 25 bp, Homo sapien
cttgaggtttgttgcctccttgtga

SEQ ID NO: 2406113 - DNA, 25 bp, Homo sapien
cttctggctttcccggacgaggcgg

SEQ ID NO: 2406114 - DNA, 25 bp, Homo sapien
cgttggggctggtttcctccttgtg

SEQ ID NO: 2406115 - DNA, 25 bp, Homo sapien
tggtttcctccttgtgggcgtcgtc

SEQ ID NO: 2406116 - DNA, 25 bp, Homo sapien
gaccttgggactggttgcctccttg

SEQ ID NO: 2406117 - DNA, 25 bp, Homo sapien
tccttgtgggggtcgtccttctggc

SEQ ID NO: 2406118 - DNA, 25 bp, Homo sapien
ggagggagattcttcctggctgaca

SEQ ID NO: 2406119 - DNA, 25 bp, Homo sapien
cacatcttctcctccttctgtctta

SEQ ID NO: 2406120 - DNA, 25 bp, Homo sapien
acatcttctcctccttctgtcttac

SEQ ID NO: 2406121 - DNA, 25 bp, Homo sapien
gcagggccaccgacagcagaatcag

SEQ ID NO: 2406122 - DNA, 25 bp, Homo sapien
agggccaccgacagcagaatcagta

SEQ ID NO: 2406123 - DNA, 25 bp, Homo sapien
gggccaccgacagcagaatcagtag

SEQ ID NO: 2406124 - DNA, 25 bp, Homo sapien
ccaccgacagcagaatcagtagcat

SEQ ID NO: 2406125 - DNA, 25 bp, Homo sapien
ctggaggctctggagtcactcccaa

SEQ ID NO: 2406126 - DNA, 25 bp, Homo sapien
tggagtcactcccaactctgtgctg

SEQ ID NO: 2406127 - DNA, 25 bp, Homo sapien
gtgctgggagaaccatggcagctcc

SEQ ID NO: 2406128 - DNA, 25 bp, Homo sapien
gctctggagtcactcccaactctgt

SEQ ID NO: 2406129 - DNA, 25 bp, Homo sapien
ctttataaagaggagcagaacagtg

SEQ ID NO: 2406130 - DNA, 25 bp, Homo sapien
ggcacctttgagctccacactgggt

SEQ ID NO: 2406131 - DNA, 25 bp, Homo sapien
cagtggcacctttgagctccacact

SEQ ID NO: 2406132 - DNA, 25 bp, Homo sapien
gcagaacagtggcacctttgagctc

SEQ ID NO: 2406133 - DNA, 25 bp, Homo sapien
gagacgtccccatgtatataagaaa

SEQ ID NO: 2406134 - DNA, 25 bp, Homo sapien
tcaaccttgcatggtgattggcacc

SEQ ID NO: 2406135 - DNA, 25 bp, Homo sapien
tgactatacacctagcatgctggct

SEQ ID NO: 2406136 - DNA, 25 bp, Homo sapien
ctgaggttggaggactattgatgcc

SEQ ID NO: 2406137 - DNA, 25 bp, Homo sapien
gtcacggcatttgtagcaattgaat

SEQ ID NO: 2406138 - DNA, 25 bp, Homo sapien
tgtcacggcatttgtagcaattgaa

SEQ ID NO: 2406139 - DNA, 25 bp, Homo sapien
cacggcatttgtagcaattgaatta

SEQ ID NO: 2406140 - DNA, 25 bp, Homo sapien
aatgtcacggcatttgtagcaattg

SEQ ID NO: 2406141 - DNA, 25 bp, Homo sapien
caggtctgggtggcctgcccccttg

SEQ ID NO: 2406142 - DNA, 25 bp, Homo sapien
ttactggggaggctgttgtccctgg

SEQ ID NO: 2406143 - DNA, 25 bp, Homo sapien
ggctgttgtccctgggcaggtctgg

SEQ ID NO: 2406144 - DNA, 25 bp, Homo sapien
tctgggtggcctgcccccttgagga

SEQ ID NO: 2406145 - DNA, 25 bp, Homo sapien
ccttgggactggttgcctccttgtg

SEQ ID NO: 2406146 - DNA, 25 bp, Homo sapien
agatcgggcacttcgggacttgttt

SEQ ID NO: 2406147 - DNA, 25 bp, Homo sapien
cttcgggacttgtttccttcctgtg

SEQ ID NO: 2406148 - DNA, 25 bp, Homo sapien
gacggtgggactggttgcctccttg

SEQ ID NO: 2406149 - DNA, 25 bp, Homo sapien
cttgtgggcgtcgtccttctggctt

SEQ ID NO: 2406150 - DNA, 25 bp, Homo sapien
tgtgggcgtcgtccttctggctttc

SEQ ID NO: 2406151 - DNA, 25 bp, Homo sapien
ttgtgggcgtcgtccttctggcttt

SEQ ID NO: 2406152 - DNA, 25 bp, Homo sapien
ggaggtgggggacatacggcattca

SEQ ID NO: 2406153 - DNA, 25 bp, Homo sapien
aggaggtgggggacatacggcattc

SEQ ID NO: 2406154 - DNA, 25 bp, Homo sapien
aagagagattcttcctggctgacat

SEQ ID NO: 2406155 - DNA, 25 bp, Homo sapien
ggaagagagattcttcctggctgac

SEQ ID NO: 2406156 - DNA, 25 bp, Homo sapien
ctgatattaggaagagagattcttc

SEQ ID NO: 2406157 - DNA, 25 bp, Homo sapien
taggaagagagattcttcctggctg

SEQ ID NO: 2406158 - DNA, 25 bp, Homo sapien
gccagcagggccactgacagcagaa

SEQ ID NO: 2406159 - DNA, 25 bp, Homo sapien
cttcacttgaactctcagctgagct

SEQ ID NO: 2406160 - DNA, 25 bp, Homo sapien
agggccactgacagcagaatcagca

SEQ ID NO: 2406161 - DNA, 25 bp, Homo sapien
agcagggccactgacagcagaatca

SEQ ID NO: 2406162 - DNA, 25 bp, Homo sapien
ctcgctggaggctctggagtcactc

SEQ ID NO: 2406163 - DNA, 25 bp, Homo sapien
ggctctggagtcactcccaactctg

SEQ ID NO: 2406164 - DNA, 25 bp, Homo sapien
ctggaggctctggagtcactcccaa

SEQ ID NO: 2406165 - DNA, 25 bp, Homo sapien
aggctctggagtcactcccaactct

SEQ ID NO: 2406166 - DNA, 25 bp, Homo sapien
agagctatgatgacctttttccaat

SEQ ID NO: 2406167 - DNA, 25 bp, Homo sapien
aagttagagctatgatgaccttttt

SEQ ID NO: 2406168 - DNA, 25 bp, Homo sapien
tagagctatgatgacctttttccaa

SEQ ID NO: 2406169 - DNA, 25 bp, Homo sapien
gttagagctatgatgacctttttcc

SEQ ID NO: 2406170 - DNA, 25 bp, Homo sapien
cattgaatcctagatgactggggag

SEQ ID NO: 2406171 - DNA, 25 bp, Homo sapien
ctgtcattgaatcctagatgactgg

SEQ ID NO: 2406172 - DNA, 25 bp, Homo sapien
ttgaatcctagatgactggggaggc

SEQ ID NO: 2406173 - DNA, 25 bp, Homo sapien
tgtcattgaatcctagatgactggg

SEQ ID NO: 2406174 - DNA, 25 bp, Homo sapien
cactggggaggtctggaaggtctgc

SEQ ID NO: 2406175 - DNA, 25 bp, Homo sapien
aggtctggaaggtctgcccccttga

SEQ ID NO: 2406176 - DNA, 25 bp, Homo sapien
cctgaggctgctggggattgcctcc

SEQ ID NO: 2406177 - DNA, 25 bp, Homo sapien
tctgcccccttgaggagggcgtggt

SEQ ID NO: 2406178 - DNA, 25 bp, Homo sapien
ctgcctccttgtgcgggtggtcctt

SEQ ID NO: 2406179 - DNA, 25 bp, Homo sapien
agatcgggcactttgggacttgctg

SEQ ID NO: 2406180 - DNA, 25 bp, Homo sapien
tgctgcctccttgtgcgggtggtcc

SEQ ID NO: 2406181 - DNA, 25 bp, Homo sapien
cgggcactttgggacttgctgcctc

SEQ ID NO: 2406182 - DNA, 25 bp, Homo sapien
tgtgggggtggtccttgtggctttc

SEQ ID NO: 2406183 - DNA, 25 bp, Homo sapien
cttgtgggggtggtccttgtggctt

SEQ ID NO: 2406184 - DNA, 25 bp, Homo sapien
ctccttgtgggggtggtccttgtgg

SEQ ID NO: 2406185 - DNA, 25 bp, Homo sapien
cttgaggtttgttgcctccttgtgg

SEQ ID NO: 2406186 - DNA, 25 bp, Homo sapien
acttcgggacttgtctccttgtggg

SEQ ID NO: 2406187 - DNA, 25 bp, Homo sapien
ctccttgtgggggtggtccttgtgg

SEQ ID NO: 2406188 - DNA, 25 bp, Homo sapien
tccttgtgggggtggtccttgtggc

SEQ ID NO: 2406189 - DNA, 25 bp, Homo sapien
tccttgtggctttcctggaggaggt

SEQ ID NO: 2406190 - DNA, 25 bp, Homo sapien
tggctttcctggaggaggtggggga

SEQ ID NO: 2406191 - DNA, 25 bp, Homo sapien
gggtggtccttgtggctttcctgga

SEQ ID NO: 2406192 - DNA, 25 bp, Homo sapien
cgggacttgtctccttgtgggggtg

SEQ ID NO: 2406193 - DNA, 25 bp, Homo sapien
cttgtctccttgtgggggtggtcct

SEQ ID NO: 2406194 - DNA, 25 bp, Homo sapien
ccttgtggctttcctggaggtgggg

SEQ ID NO: 2406195 - DNA, 25 bp, Homo sapien
tccttgtgggggtggtccttgtggc

SEQ ID NO: 2406196 - DNA, 25 bp, Homo sapien
tggctttcctggaggaggtggggga

SEQ ID NO: 2406197 - DNA, 25 bp, Homo sapien
tgaggtctgttgcctccttgtgggg

SEQ ID NO: 2406198 - DNA, 25 bp, Homo sapien
tccttgtggctttcctggaggaggt

SEQ ID NO: 2406199 - DNA, 25 bp, Homo sapien
gtccttgtggttttcctggaggaga

SEQ ID NO: 2406200 - DNA, 25 bp, Homo sapien
gaccttgaggtttgttgcctccttg

SEQ ID NO: 2406201 - DNA, 25 bp, Homo sapien
gagatcggggacttcgggacttgtc

SEQ ID NO: 2406202 - DNA, 25 bp, Homo sapien
ggccctggggcttgttgcctccttg

SEQ ID NO: 2406203 - DNA, 25 bp, Homo sapien
ggagggagattcttcctggctgaca

SEQ ID NO: 2406204 - DNA, 25 bp, Homo sapien
cacatcttttccctcttctgtttta

SEQ ID NO: 2406205 - DNA, 25 bp, Homo sapien
gccagcaaggccactgacagcagaa

SEQ ID NO: 2406206 - DNA, 25 bp, Homo sapien
gctgagctcagggccagcaaggcca

SEQ ID NO: 2406207 - DNA, 25 bp, Homo sapien
cttcatttaagttctgagctgagct

SEQ ID NO: 2406208 - DNA, 25 bp, Homo sapien
ttcatttaagttctgagctgagctc

SEQ ID NO: 2406209 - DNA, 25 bp, Homo sapien
tgcaggaggctctggagtcactccc

SEQ ID NO: 2406210 - DNA, 25 bp, Homo sapien
ttgcaggaggctctggagtcactcc

SEQ ID NO: 2406211 - DNA, 25 bp, Homo sapien
cttgcaggaggctctggagtcactc

SEQ ID NO: 2406212 - DNA, 25 bp, Homo sapien
atatacaggttagtcagtatcaaca

SEQ ID NO: 2406213 - DNA, 25 bp, Homo sapien
tcatcagttcgtggaatatacaggt

SEQ ID NO: 2406214 - DNA, 25 bp, Homo sapien
gctgccatttaccacttagaccttc

SEQ ID NO: 2406215 - DNA, 25 bp, Homo sapien
tcttatatctggtaaatccctgctc

SEQ ID NO: 2406216 - DNA, 25 bp, Homo sapien
cagtcttctgcatgaagatgtcacc

SEQ ID NO: 2406217 - DNA, 25 bp, Homo sapien
tcagtcttctgcatgaagatgtcac

SEQ ID NO: 2406218 - DNA, 25 bp, Homo sapien
agtcttctgcatgaagatgtcacct

SEQ ID NO: 2406219 - DNA, 25 bp, Homo sapien
gaagttagagctatgatgacctttt

SEQ ID NO: 2406220 - DNA, 25 bp, Homo sapien
ccaatgtcatggcatttgaatcatt

SEQ ID NO: 2406221 - DNA, 25 bp, Homo sapien
ttccaatgtcatggcatttgaatca

SEQ ID NO: 2406222 - DNA, 25 bp, Homo sapien
gagctatgatgacctttttccaatg

SEQ ID NO: 2406223 - DNA, 25 bp, Homo sapien
tggtcttactgcactacagtacatg

SEQ ID NO: 2406224 - DNA, 25 bp, Homo sapien
gaagatcattcttagcttattatta

SEQ ID NO: 2406225 - DNA, 25 bp, Homo sapien
aattgttccttacgtgatgaagaca

SEQ ID NO: 2406226 - DNA, 25 bp, Homo sapien
ttagcttattattacttgctgctga

SEQ ID NO: 2406227 - DNA, 25 bp, Homo sapien
tgtcattgaatcctagatgactggg

SEQ ID NO: 2406228 - DNA, 25 bp, Homo sapien
tctggaaggtctgcccccttgagga

SEQ ID NO: 2406229 - DNA, 25 bp, Homo sapien
gagatcgggcacttcgggacttgct

SEQ ID NO: 2406230 - DNA, 25 bp, Homo sapien
gaccttgaggtttgttgcctccttg

SEQ ID NO: 2406231 - DNA, 25 bp, Homo sapien
gagatcgagaacttcgggacttgtt

SEQ ID NO: 2406232 - DNA, 25 bp, Homo sapien
gagatcgagaacttcgggacttgct

SEQ ID NO: 2406233 - DNA, 25 bp, Homo sapien
gatcgggcactttgggacttgttgt

SEQ ID NO: 2406234 - DNA, 25 bp, Homo sapien
cgagaacttcgggacttgctgcctc

SEQ ID NO: 2406235 - DNA, 25 bp, Homo sapien
gggaccttgaggctggttgcctcct

SEQ ID NO: 2406236 - DNA, 25 bp, Homo sapien
gagatcggggacttcgggacttgtc

SEQ ID NO: 2406237 - DNA, 25 bp, Homo sapien
acttcgggacttgtctccttgtggg

SEQ ID NO: 2406238 - DNA, 25 bp, Homo sapien
gaccttgaggtttgttgcctccttg

SEQ ID NO: 2406239 - DNA, 25 bp, Homo sapien
tgtgggggtgctccttgtggatttc

SEQ ID NO: 2406240 - DNA, 25 bp, Homo sapien
ttgtgggggtgctccttgtggattt

SEQ ID NO: 2406241 - DNA, 25 bp, Homo sapien
cttgtgggggtgctccttgtggatt

SEQ ID NO: 2406242 - DNA, 25 bp, Homo sapien
aagagaaagacagagtaaaagccca

SEQ ID NO: 2406243 - DNA, 25 bp, Homo sapien
agagaaagacagagtaaaagcccat

SEQ ID NO: 2406244 - DNA, 25 bp, Homo sapien
ggagggagattcttcctggctgaca

SEQ ID NO: 2406245 - DNA, 25 bp, Homo sapien
agctcagggccagcaaggccactga

SEQ ID NO: 2406246 - DNA, 25 bp, Homo sapien
ccactgacagcagaatcaacagcat

SEQ ID NO: 2406247 - DNA, 25 bp, Homo sapien
cttcatttaagttctgagctgagct

SEQ ID NO: 2406248 - DNA, 25 bp, Homo sapien
ttcatttaagttctgagctgagctc

SEQ ID NO: 2406249 - DNA, 25 bp, Homo sapien
tgtgctgggaggaacgtggcaactc

SEQ ID NO: 2406250 - DNA, 25 bp, Homo sapien
ctgtgctgggaggaacgtggcaact

SEQ ID NO: 2406251 - DNA, 25 bp, Homo sapien
gtgctgggaggaacgtggcaactcc

SEQ ID NO: 2406252 - DNA, 25 bp, Homo sapien
ctgcagagcagtggcgcggtctctg

SEQ ID NO: 2406253 - DNA, 25 bp, Homo sapien
actgcgcctggcccattcatggtat

SEQ ID NO: 2406254 - DNA, 25 bp, Homo sapien
cggggtttcaaggatggtcttgatc

SEQ ID NO: 2406255 - DNA, 25 bp, Homo sapien
agacggggtttcaaggatggtcttg

SEQ ID NO: 2406256 - DNA, 25 bp, Homo sapien
gtgtgtggggatgtgactggacatc

SEQ ID NO: 2406257 - DNA, 25 bp, Homo sapien
tcgaataagtcttgtactgtcattc

SEQ ID NO: 2406258 - DNA, 25 bp, Homo sapien
tagtgataacttcagatgaccttgt

SEQ ID NO: 2406259 - DNA, 25 bp, Homo sapien
accttgttagaggtattgtgtgtgg

SEQ ID NO: 2406260 - DNA, 25 bp, Homo sapien
tagtggatagcagtgatcatcacag

SEQ ID NO: 2406261 - DNA, 25 bp, Homo sapien
ctatagtgtagtggtaggcatgctc

SEQ ID NO: 2406262 - DNA, 25 bp, Homo sapien
tacccagccaggatcaatgcctcag

SEQ ID NO: 2406263 - DNA, 25 bp, Homo sapien
tattgagcccgtactcgatgagaca

SEQ ID NO: 2406264 - DNA, 25 bp, Homo sapien
gtggattctggtaggtcagtggttg

SEQ ID NO: 2406265 - DNA, 25 bp, Homo sapien
ttctccaggtacacatctgtgggtg

SEQ ID NO: 2406266 - DNA, 25 bp, Homo sapien
ctgtgggtgactccaggtccatggt

SEQ ID NO: 2406267 - DNA, 25 bp, Homo sapien
tgggtgttctccaggtacacatctg

SEQ ID NO: 2406268 - DNA, 25 bp, Homo sapien
ctggggggagtgtgggaaatgtcac

SEQ ID NO: 2406269 - DNA, 25 bp, Homo sapien
gtgtgggaaatgtcacagccaggac

SEQ ID NO: 2406270 - DNA, 25 bp, Homo sapien
aaggctgagaagatcagggccttcc

SEQ ID NO: 2406271 - DNA, 25 bp, Homo sapien
caaggctgagaagatcagggccttc

SEQ ID NO: 2406272 - DNA, 25 bp, Homo sapien
cactggcagcaatataagaatattt

SEQ ID NO: 2406273 - DNA, 25 bp, Homo sapien
tattttccaccgtggaaaagtgcaa

SEQ ID NO: 2406274 - DNA, 25 bp, Homo sapien
agtggagtctctgaggtcctagagg

SEQ ID NO: 2406275 - DNA, 25 bp, Homo sapien
aactgactggcaaatgggcgaagtg

SEQ ID NO: 2406276 - DNA, 25 bp, Homo sapien
gaagatttgacttcttcctgaccac

SEQ ID NO: 2406277 - DNA, 25 bp, Homo sapien
ctagaagatttgacttcttcctgac

SEQ ID NO: 2406278 - DNA, 25 bp, Homo sapien
ctcctctagaagatttgacttcttc

SEQ ID NO: 2406279 - DNA, 25 bp, Homo sapien
tcctctagaagatttgacttcttcc

SEQ ID NO: 2406280 - DNA, 25 bp, Homo sapien
gtcatattcccaattctaatcagaa

SEQ ID NO: 2406281 - DNA, 25 bp, Homo sapien
gaattgcctttccaatcgcagtcct

SEQ ID NO: 2406282 - DNA, 25 bp, Homo sapien
gaatttccaaataggctgctagatg

SEQ ID NO: 2406283 - DNA, 25 bp, Homo sapien
gcagtcctcactaggttgaacctga

SEQ ID NO: 2406284 - DNA, 25 bp, Homo sapien
tcaccaaataattccgtcaaaccac

SEQ ID NO: 2406285 - DNA, 25 bp, Homo sapien
aataattccgtcaaaccaccaatga

SEQ ID NO: 2406286 - DNA, 25 bp, Homo sapien
taattccgtcaaaccaccaatgaat

SEQ ID NO: 2406287 - DNA, 25 bp, Homo sapien
ataattccgtcaaaccaccaatgaa

SEQ ID NO: 2406288 - DNA, 25 bp, Homo sapien
ctgaactatctgctggtatcccccg

SEQ ID NO: 2406289 - DNA, 25 bp, Homo sapien
tgaactatctgctggtatcccccgg

SEQ ID NO: 2406290 - DNA, 25 bp, Homo sapien
gaactatctgctggtatcccccggt

SEQ ID NO: 2406291 - DNA, 25 bp, Homo sapien
ccctgaactatctgctggtatcccc

SEQ ID NO: 2406292 - DNA, 25 bp, Homo sapien
agcgggcagaagaggctaccagtca

SEQ ID NO: 2406293 - DNA, 25 bp, Homo sapien
ggttggtgctagactcccttggagc

SEQ ID NO: 2406294 - DNA, 25 bp, Homo sapien
tgatttacgttggttggtgctagac

SEQ ID NO: 2406295 - DNA, 25 bp, Homo sapien
tagactcccttggagcgggcagaag

SEQ ID NO: 2406296 - DNA, 25 bp, Homo sapien
tcctcacccttcgaattgtcccacc

SEQ ID NO: 2406297 - DNA, 25 bp, Homo sapien
gaccgaaccatgtaaatcttccgca

SEQ ID NO: 2406298 - DNA, 25 bp, Homo sapien
cccttccagaccgaaccatgtaaat

SEQ ID NO: 2406299 - DNA, 25 bp, Homo sapien
gtaaatcttccgcatattgattgat

SEQ ID NO: 2406300 - DNA, 25 bp, Homo sapien
ttatctttctggacgagagtttcct

SEQ ID NO: 2406301 - DNA, 25 bp, Homo sapien
gtttcctggaatagctgacttttgt

SEQ ID NO: 2406302 - DNA, 25 bp, Homo sapien
tttcctggaatagctgacttttgtt

SEQ ID NO: 2406303 - DNA, 25 bp, Homo sapien
atttttatctttctggacgagagtt

SEQ ID NO: 2406304 - DNA, 25 bp, Homo sapien
ctgtgagtgaggttagggctttccc

SEQ ID NO: 2406305 - DNA, 25 bp, Homo sapien
tgtgagtgaggttagggctttccca

SEQ ID NO: 2406306 - DNA, 25 bp, Homo sapien
ctaaaattgtagctgctggagaacc

SEQ ID NO: 2406307 - DNA, 25 bp, Homo sapien
catctgccttcacacaggagcctgt

SEQ ID NO: 2406308 - DNA, 25 bp, Homo sapien
acaccaacagatgaaaagcaccctt

SEQ ID NO: 2406309 - DNA, 25 bp, Homo sapien
aacaccaacagatgaaaagcaccct

SEQ ID NO: 2406310 - DNA, 25 bp, Homo sapien
tctccaggatccctcttcataaaat

SEQ ID NO: 2406311 - DNA, 25 bp, Homo sapien
tcttcaagtgagtttacttctccag

SEQ ID NO: 2406312 - DNA, 25 bp, Homo sapien
tgatcctggcatagcgcatgatact

SEQ ID NO: 2406313 - DNA, 25 bp, Homo sapien
ggtataacacgagactccaaccttg

SEQ ID NO: 2406314 - DNA, 25 bp, Homo sapien
ttttgtagcctagaaatttcaccac

SEQ ID NO: 2406315 - DNA, 25 bp, Homo sapien
tgtacttgtagctttgctcacgaag

SEQ ID NO: 2406316 - DNA, 25 bp, Homo sapien
tcacgaagtttttgtagcctagaaa

SEQ ID NO: 2406317 - DNA, 25 bp, Homo sapien
gaaatttcaccactcttctgtccag

SEQ ID NO: 2406318 - DNA, 25 bp, Homo sapien
aagttcaaagtgtcagctagattgg

SEQ ID NO: 2406319 - DNA, 25 bp, Homo sapien
ttcaaagtgtcagctagattggttc

SEQ ID NO: 2406320 - DNA, 25 bp, Homo sapien
aagtgtcagctagattggttcctgg

SEQ ID NO: 2406321 - DNA, 25 bp, Homo sapien
gtccaagttcaaagtgtcagctaga

SEQ ID NO: 2406322 - DNA, 25 bp, Homo sapien
cagtgccaaaaacctgttttcttga

SEQ ID NO: 2406323 - DNA, 25 bp, Homo sapien
cacagtgccaaaaacctgttttctt

SEQ ID NO: 2406324 - DNA, 25 bp, Homo sapien
acagtgccaaaaacctgttttcttg

SEQ ID NO: 2406325 - DNA, 25 bp, Homo sapien
gaacagaagactcatgaggaaagcg

SEQ ID NO: 2406326 - DNA, 25 bp, Homo sapien
ccgtttccctaatgatgtcccagcc

SEQ ID NO: 2406327 - DNA, 25 bp, Homo sapien
gctgttcgactccgtttccctaatg

SEQ ID NO: 2406328 - DNA, 25 bp, Homo sapien
gattccttccaggtgggaagaaagc

SEQ ID NO: 2406329 - DNA, 25 bp, Homo sapien
aggagacatattcctcccagtgctg

SEQ ID NO: 2406330 - DNA, 25 bp, Homo sapien
agggtccgctgcaggacctctccct

SEQ ID NO: 2406331 - DNA, 25 bp, Homo sapien
cccagggtccgctgcaggacctctc

SEQ ID NO: 2406332 - DNA, 25 bp, Homo sapien
cctgttaagtgctacaagctcagca

SEQ ID NO: 2406333 - DNA, 25 bp, Homo sapien
cagtctcctgatgagcccactgaag

SEQ ID NO: 2406334 - DNA, 25 bp, Homo sapien
cacagaggtacctggtgacaccaat

SEQ ID NO: 2406335 - DNA, 25 bp, Homo sapien
tctgtgcctatatgatccatctgtt

SEQ ID NO: 2406336 - DNA, 25 bp, Homo sapien
tcacattgtgtaacttggtcctgaa

SEQ ID NO: 2406337 - DNA, 25 bp, Homo sapien
aattgccatttactgaagaaatcca

SEQ ID NO: 2406338 - DNA, 25 bp, Homo sapien
tcaattgccatttactgaagaaatc

SEQ ID NO: 2406339 - DNA, 25 bp, Homo sapien
attgccatttactgaagaaatccac

SEQ ID NO: 2406340 - DNA, 25 bp, Homo sapien
caattgccatttactgaagaaatcc

SEQ ID NO: 2406341 - DNA, 25 bp, Homo sapien
tataatgagccatgttgggttttca

SEQ ID NO: 2406342 - DNA, 25 bp, Homo sapien
aatgagccatgttgggttttcatca

SEQ ID NO: 2406343 - DNA, 25 bp, Homo sapien
gtatctctgtctttcccaaagttag

SEQ ID NO: 2406344 - DNA, 25 bp, Homo sapien
cccaaagttaggttcatcatctgac

SEQ ID NO: 2406345 - DNA, 25 bp, Homo sapien
catctgggtccgtgggtggctttcc

SEQ ID NO: 2406346 - DNA, 25 bp, Homo sapien
tcctccatctgggtccgtgggtggc

SEQ ID NO: 2406347 - DNA, 25 bp, Homo sapien
taatataaactgtggtaacaaataa

SEQ ID NO: 2406348 - DNA, 25 bp, Homo sapien
ccaagcaacagagtgtgttaattag

SEQ ID NO: 2406349 - DNA, 25 bp, Homo sapien
ggctttgtctccggcgtcgcgctcg

SEQ ID NO: 2406350 - DNA, 25 bp, Homo sapien
tcacctatttcggttggtagcggcc

SEQ ID NO: 2406351 - DNA, 25 bp, Homo sapien
ttcccttcccggagcgcgtgctcgg

SEQ ID NO: 2406352 - DNA, 25 bp, Homo sapien
agctgcctttgataactgccctgca

SEQ ID NO: 2406353 - DNA, 25 bp, Homo sapien
ggaattcacgtcagtttctgcactg

SEQ ID NO: 2406354 - DNA, 25 bp, Homo sapien
tctcaagatcaatgagcaaagagct

SEQ ID NO: 2406355 - DNA, 25 bp, Homo sapien
cagtttctgcactgaaactctcaag

SEQ ID NO: 2406356 - DNA, 25 bp, Homo sapien
gctcagtgctgggaattcacgtcag

SEQ ID NO: 2406357 - DNA, 25 bp, Homo sapien
tatttccgcattctggttggccaca

SEQ ID NO: 2406358 - DNA, 25 bp, Homo sapien
attggatgtatttccgcattctggt

SEQ ID NO: 2406359 - DNA, 25 bp, Homo sapien
gatgtatttccgcattctggttggc

SEQ ID NO: 2406360 - DNA, 25 bp, Homo sapien
ttgtggacattggatgtatttccgc

SEQ ID NO: 2406361 - DNA, 25 bp, Homo sapien
ccagctgcttccatccatttgcttt

SEQ ID NO: 2406362 - DNA, 25 bp, Homo sapien
gtccttcagtgctttccctgcacta

SEQ ID NO: 2406363 - DNA, 25 bp, Homo sapien
gggatggctgctgcacccacatcca

SEQ ID NO: 2406364 - DNA, 25 bp, Homo sapien
tgctttctagtgatgaagcactggg

SEQ ID NO: 2406365 - DNA, 25 bp, Homo sapien
tcagatgattttcgagcggctttcg

SEQ ID NO: 2406366 - DNA, 25 bp, Homo sapien
gcggctttcgattagattatctgca

SEQ ID NO: 2406367 - DNA, 25 bp, Homo sapien
taatggagcaattttgcagcaaact

SEQ ID NO: 2406368 - DNA, 25 bp, Homo sapien
caaactgctttggactgttcgactc

SEQ ID NO: 2406369 - DNA, 25 bp, Homo sapien
cagcgaacagtttgtactgtcaggt

SEQ ID NO: 2406370 - DNA, 25 bp, Homo sapien
tactctggtgcacatatgacctgca

SEQ ID NO: 2406371 - DNA, 25 bp, Homo sapien
ggaaagccctctacttcacagcgaa

SEQ ID NO: 2406372 - DNA, 25 bp, Homo sapien
ctgtaaatggaatcgaggtgaaatc

SEQ ID NO: 2406373 - DNA, 25 bp, Homo sapien
tggttgtggccaacttcttggactc

SEQ ID NO: 2406374 - DNA, 25 bp, Homo sapien
ggttgtggccaacttcttggactcc

SEQ ID NO: 2406375 - DNA, 25 bp, Homo sapien
gggtggttgtggccaacttcttgga

SEQ ID NO: 2406376 - DNA, 25 bp, Homo sapien
acttcttggactcctttggctgact

SEQ ID NO: 2406377 - DNA, 25 bp, Homo sapien
ctcctgcatgtagatttatggattc

SEQ ID NO: 2406378 - DNA, 25 bp, Homo sapien
tacacaggccccgagtcgtatgtgg

SEQ ID NO: 2406379 - DNA, 25 bp, Homo sapien
gattctaatcgggacctttctttga

SEQ ID NO: 2406380 - DNA, 25 bp, Homo sapien
ggagaacgtcatggcacacaggcat

SEQ ID NO: 2406381 - DNA, 25 bp, Homo sapien
tatttgaaagctgagtccaattctt

SEQ ID NO: 2406382 - DNA, 25 bp, Homo sapien
ttatttgaaagctgagtccaattct

SEQ ID NO: 2406383 - DNA, 25 bp, Homo sapien
tttatttgaaagctgagtccaattc

SEQ ID NO: 2406384 - DNA, 25 bp, Homo sapien
ggtgaactacggctggaacaccagc

SEQ ID NO: 2406385 - DNA, 25 bp, Homo sapien
gcatgcagaggacttgccttttagc

SEQ ID NO: 2406386 - DNA, 25 bp, Homo sapien
tgaggaggtcgcctgcccttgcata

SEQ ID NO: 2406387 - DNA, 25 bp, Homo sapien
ggtaggtgaactacggctggaacac

SEQ ID NO: 2406388 - DNA, 25 bp, Homo sapien
tatttttgatggctctgtgacatac

SEQ ID NO: 2406389 - DNA, 25 bp, Homo sapien
ttatttttgatggctctgtgacata

SEQ ID NO: 2406390 - DNA, 25 bp, Homo sapien
gaaggaaccgttgccaactggccag

SEQ ID NO: 2406391 - DNA, 25 bp, Homo sapien
caagtgtgagaaagcgtgacagtca

SEQ ID NO: 2406392 - DNA, 25 bp, Homo sapien
gctttagccttatcaccgtttcctg

SEQ ID NO: 2406393 - DNA, 25 bp, Homo sapien
gccaggtgtgccagttcgtggccta

SEQ ID NO: 2406394 - DNA, 25 bp, Homo sapien
tctggagaaggacgttgtccttcaa

SEQ ID NO: 2406395 - DNA, 25 bp, Homo sapien
gagaaggacgttgtccttcaagtac

SEQ ID NO: 2406396 - DNA, 25 bp, Homo sapien
ctactctggagaaggacgttgtcct

SEQ ID NO: 2406397 - DNA, 25 bp, Homo sapien
gaaggacgttgtccttcaagtacaa

SEQ ID NO: 2406398 - DNA, 25 bp, Homo sapien
tccttctgcctctagaggaccaaga

SEQ ID NO: 2406399 - DNA, 25 bp, Homo sapien
tgtatcccaccccatctttttctgc

SEQ ID NO: 2406400 - DNA, 25 bp, Homo sapien
gaacaacccttgttctgaaagcacc

SEQ ID NO: 2406401 - DNA, 25 bp, Homo sapien
cactgtgtcgtttgaatgtgctgct

SEQ ID NO: 2406402 - DNA, 25 bp, Homo sapien
atgctgagaggtggcccgctgtact

SEQ ID NO: 2406403 - DNA, 25 bp, Homo sapien
aaatccaggcgaagctgatgctgag

SEQ ID NO: 2406404 - DNA, 25 bp, Homo sapien
gctcggccgaccacttgatgtttta

SEQ ID NO: 2406405 - DNA, 25 bp, Homo sapien
agcaggaaaacctctgctcggccga

SEQ ID NO: 2406406 - DNA, 25 bp, Homo sapien
tattgctggcatgaccactcttgtc

SEQ ID NO: 2406407 - DNA, 25 bp, Homo sapien
tgacgacggtacaagcatcagcttt

SEQ ID NO: 2406408 - DNA, 25 bp, Homo sapien
aataaatagcttcccataggagagg

SEQ ID NO: 2406409 - DNA, 25 bp, Homo sapien
tcacagtgatgggacaccgaagtgc

SEQ ID NO: 2406410 - DNA, 25 bp, Homo sapien
tgtgcgctcgtcctttctttccagg

SEQ ID NO: 2406411 - DNA, 25 bp, Homo sapien
gccacgctgctttggaatctttcac

SEQ ID NO: 2406412 - DNA, 25 bp, Homo sapien
acctgcgtgagtgttcgtgacccga

SEQ ID NO: 2406413 - DNA, 25 bp, Homo sapien
gaaacatgcagtatatggcagagcc

SEQ ID NO: 2406414 - DNA, 25 bp, Homo sapien
tactggcctccaaagccgttgacac

SEQ ID NO: 2406415 - DNA, 25 bp, Homo sapien
ccaaagccgttgacacctgctgtgt

SEQ ID NO: 2406416 - DNA, 25 bp, Homo sapien
ctgtgctgctgatactggcctccaa

SEQ ID NO: 2406417 - DNA, 25 bp, Homo sapien
gctgatactggcctccaaagccgtt

SEQ ID NO: 2406418 - DNA, 25 bp, Homo sapien
cagggtgatgctctccagttcttct

SEQ ID NO: 2406419 - DNA, 25 bp, Homo sapien
tccaccctcctcagaaggttgcttt

SEQ ID NO: 2406420 - DNA, 25 bp, Homo sapien
ccagcagggtgatgctctccagttc

SEQ ID NO: 2406421 - DNA, 25 bp, Homo sapien
gttccaccctcctcagaaggttgct

SEQ ID NO: 2406422 - DNA, 25 bp, Homo sapien
gaacaggagacagaggatgcaggtt

SEQ ID NO: 2406423 - DNA, 25 bp, Homo sapien
ctgaatgcagagaacaggagacaga

SEQ ID NO: 2406424 - DNA, 25 bp, Homo sapien
agacagaggatgcaggttcttcctt

SEQ ID NO: 2406425 - DNA, 25 bp, Homo sapien
ggagacagaggatgcaggttcttcc

SEQ ID NO: 2406426 - DNA, 25 bp, Homo sapien
ggaggttcgaactgtaaaggtgcca

SEQ ID NO: 2406427 - DNA, 25 bp, Homo sapien
aatgttgtggcaccatgggagcaga

SEQ ID NO: 2406428 - DNA, 25 bp, Homo sapien
tcgaactgtaaaggtgccagggtca

SEQ ID NO: 2406429 - DNA, 25 bp, Homo sapien
ttcttaggaaactggaatgttgtgg

SEQ ID NO: 2406430 - DNA, 25 bp, Homo sapien
tctccttggtagtctgcatgagacc

SEQ ID NO: 2406431 - DNA, 25 bp, Homo sapien
tctgcatgagacctattgtgacacc

SEQ ID NO: 2406432 - DNA, 25 bp, Homo sapien
ccattggttctgacatctgtattga

SEQ ID NO: 2406433 - DNA, 25 bp, Homo sapien
cttgctgtttgccctcagctgggac

SEQ ID NO: 2406434 - DNA, 25 bp, Homo sapien
gcccctacgatgactgaagctgtgc

SEQ ID NO: 2406435 - DNA, 25 bp, Homo sapien
ctgtttgagaggagcatatagcccc

SEQ ID NO: 2406436 - DNA, 25 bp, Homo sapien
gatgcatcccagctgagtttccaaa

SEQ ID NO: 2406437 - DNA, 25 bp, Homo sapien
tgccacacacttaaagatgcatccc

SEQ ID NO: 2406438 - DNA, 25 bp, Homo sapien
gcacatgtggctgtacgagggccct

SEQ ID NO: 2406439 - DNA, 25 bp, Homo sapien
tttctactttccccgcggcacatgt

SEQ ID NO: 2406440 - DNA, 25 bp, Homo sapien
ctttccccgcggcacatgtggctgt

SEQ ID NO: 2406441 - DNA, 25 bp, Homo sapien
acgagggccctggttagctgcttca

SEQ ID NO: 2406442 - DNA, 25 bp, Homo sapien
gaaagaatttccgatgcaggcagac

SEQ ID NO: 2406443 - DNA, 25 bp, Homo sapien
gcagaacagccaggatgctttggaa

SEQ ID NO: 2406444 - DNA, 25 bp, Homo sapien
gctgtctgaaagaatttccgatgca

SEQ ID NO: 2406445 - DNA, 25 bp, Homo sapien
caggcagacgttaattcctagctcc

SEQ ID NO: 2406446 - DNA, 25 bp, Homo sapien
ctctgacaaagtggccctggtttcg

SEQ ID NO: 2406447 - DNA, 25 bp, Homo sapien
gctctgacaaagtggccctggtttc

SEQ ID NO: 2406448 - DNA, 25 bp, Homo sapien
tttaaggcagttcctccagcgtcag

SEQ ID NO: 2406449 - DNA, 25 bp, Homo sapien
catttaaggcagttcctccagcgtc

SEQ ID NO: 2406450 - DNA, 25 bp, Homo sapien
cgttgggatcgtcttatagctgtta

SEQ ID NO: 2406451 - DNA, 25 bp, Homo sapien
ctttcgttgggatcgtcttatagct

SEQ ID NO: 2406452 - DNA, 25 bp, Homo sapien
gggatcgtcttatagctgttattcc

SEQ ID NO: 2406453 - DNA, 25 bp, Homo sapien
tgctttcgttgggatcgtcttatag

SEQ ID NO: 2406454 - DNA, 25 bp, Homo sapien
cacaaagcttctgtgattattccta

SEQ ID NO: 2406455 - DNA, 25 bp, Homo sapien
caactgggtattgtagcattggcac

SEQ ID NO: 2406456 - DNA, 25 bp, Homo sapien
tactactgtgacgattcctgccacc

SEQ ID NO: 2406457 - DNA, 25 bp, Homo sapien
gcattggcactgtgcagacgctgtg

SEQ ID NO: 2406458 - DNA, 25 bp, Homo sapien
aaggaatttcctgtgtgggcagaca

SEQ ID NO: 2406459 - DNA, 25 bp, Homo sapien
gggcagacagagcttcctgacttga

SEQ ID NO: 2406460 - DNA, 25 bp, Homo sapien
acagagcttcctgacttgaaggctt

SEQ ID NO: 2406461 - DNA, 25 bp, Homo sapien
gaagcaaaggaatttcctgtgtggg

SEQ ID NO: 2406462 - DNA, 25 bp, Homo sapien
cagccttcttcatgcttcccttcct

SEQ ID NO: 2406463 - DNA, 25 bp, Homo sapien
cacagccttcttcatgcttcccttc

SEQ ID NO: 2406464 - DNA, 25 bp, Homo sapien
ttcttcacagccttcttcatgcttc

SEQ ID NO: 2406465 - DNA, 25 bp, Homo sapien
ctttcttcacagccttcttcatgct

SEQ ID NO: 2406466 - DNA, 25 bp, Homo sapien
aacagctctcgagagcagccggcag

SEQ ID NO: 2406467 - DNA, 25 bp, Homo sapien
gctctcgagagcagccggcagccag

SEQ ID NO: 2406468 - DNA, 25 bp, Homo sapien
caggccgggagcctgtttcttgctc

SEQ ID NO: 2406469 - DNA, 25 bp, Homo sapien
tcttgaacagctctcgagagcagcc

SEQ ID NO: 2406470 - DNA, 25 bp, Homo sapien
taagcacgctttttgattggagaaa

SEQ ID NO: 2406471 - DNA, 25 bp, Homo sapien
cacatacagaaactagggcttagag

SEQ ID NO: 2406472 - DNA, 25 bp, Homo sapien
ggccacagaactggctggtagcaga

SEQ ID NO: 2406473 - DNA, 25 bp, Homo sapien
tggtaagtaattgggtcaaggccac

SEQ ID NO: 2406474 - DNA, 25 bp, Homo sapien
atgcttagaaccgaagtcaaacccg

SEQ ID NO: 2406475 - DNA, 25 bp, Homo sapien
tcagtgcacccctactgttttgact

SEQ ID NO: 2406476 - DNA, 25 bp, Homo sapien
aaattgaccttatgcttagaaccga

SEQ ID NO: 2406477 - DNA, 25 bp, Homo sapien
tgttttgactgctgttaaattgacc

SEQ ID NO: 2406478 - DNA, 25 bp, Homo sapien
cacttatttgggcatagatagttcc

SEQ ID NO: 2406479 - DNA, 25 bp, Homo sapien
tatgtcctattattgaagtccagag

SEQ ID NO: 2406480 - DNA, 25 bp, Homo sapien
gataagcaaggaaggaactcagaat

SEQ ID NO: 2406481 - DNA, 25 bp, Homo sapien
ctaaaacttacatagctcttcacag

SEQ ID NO: 2406482 - DNA, 25 bp, Homo sapien
tcataagtaagtttgagttatatca

SEQ ID NO: 2406483 - DNA, 25 bp, Homo sapien
tcatcttcttcatagccgttgctct

SEQ ID NO: 2406484 - DNA, 25 bp, Homo sapien
taagtttgagttatatcatcttctt

SEQ ID NO: 2406485 - DNA, 25 bp, Homo sapien
cttcatagccgttgctcttcagaca

SEQ ID NO: 2406486 - DNA, 25 bp, Homo sapien
aaaggaagccagataactttctgtc

SEQ ID NO: 2406487 - DNA, 25 bp, Homo sapien
actagatgctgggttgcctatgccc

SEQ ID NO: 2406488 - DNA, 25 bp, Homo sapien
gaagccagataactttctgtcccca

SEQ ID NO: 2406489 - DNA, 25 bp, Homo sapien
gcctatgcccatgttaaaggaagcc

SEQ ID NO: 2406490 - DNA, 25 bp, Homo sapien
tgtcgggtgagctgccgaagggcca

SEQ ID NO: 2406491 - DNA, 25 bp, Homo sapien
tcacactgagtccacatttataagt

SEQ ID NO: 2406492 - DNA, 25 bp, Homo sapien
gtctttgctcaggtcattgctcaca

SEQ ID NO: 2406493 - DNA, 25 bp, Homo sapien
gggccagggaacgtgataaaccata

SEQ ID NO: 2406494 - DNA, 25 bp, Homo sapien
gacactggcgttagctggaaacttg

SEQ ID NO: 2406495 - DNA, 25 bp, Homo sapien
tgagaaccagaggaatgatactgcc

SEQ ID NO: 2406496 - DNA, 25 bp, Homo sapien
tattccaggccttatgcattgacca

SEQ ID NO: 2406497 - DNA, 25 bp, Homo sapien
tcttgagtaactctggacactggcg

SEQ ID NO: 2406498 - DNA, 25 bp, Homo sapien
cacttggagaaggatgccatggaga

SEQ ID NO: 2406499 - DNA, 25 bp, Homo sapien
gctttcagggttaatgagagctgtc

SEQ ID NO: 2406500 - DNA, 25 bp, Homo sapien
gagagctgtcaggagcagtatgacc

SEQ ID NO: 2406501 - DNA, 25 bp, Homo sapien
tgatgttgaacgagtcacttggaga

SEQ ID NO: 2406502 - DNA, 25 bp, Homo sapien
gaccctaaggtgttatctagtccaa

SEQ ID NO: 2406503 - DNA, 25 bp, Homo sapien
gatagagctgaaaaagaccctaagg

SEQ ID NO: 2406504 - DNA, 25 bp, Homo sapien
tactgttgccagtgatcaaacgctg

SEQ ID NO: 2406505 - DNA, 25 bp, Homo sapien
caagctgtggaagcatgaggttgct

SEQ ID NO: 2406506 - DNA, 25 bp, Homo sapien
tgggcctactaatcttcagggtggg

SEQ ID NO: 2406507 - DNA, 25 bp, Homo sapien
tgagacattttgagaaccccgttgg

SEQ ID NO: 2406508 - DNA, 25 bp, Homo sapien
gcacaacagattcacctggtggtcg

SEQ ID NO: 2406509 - DNA, 25 bp, Homo sapien
ggagggtcgtacacatcactgatgg

SEQ ID NO: 2406510 - DNA, 25 bp, Homo sapien
cagtaaagcccagtcgatcaatcag

SEQ ID NO: 2406511 - DNA, 25 bp, Homo sapien
tcttagaggcacaatgggaacccac

SEQ ID NO: 2406512 - DNA, 25 bp, Homo sapien
cccacggaagtcagagaaggagcag

SEQ ID NO: 2406513 - DNA, 25 bp, Homo sapien
aatgtgaaaagctcagcaaccgggc

SEQ ID NO: 2406514 - DNA, 25 bp, Homo sapien
cattctggtccgtgatcttagggct

SEQ ID NO: 2406515 - DNA, 25 bp, Homo sapien
gctgcctccgtactcagagatctta

SEQ ID NO: 2406516 - DNA, 25 bp, Homo sapien
caggttttctagtgcacgctccagg

SEQ ID NO: 2406517 - DNA, 25 bp, Homo sapien
tctaactagactcagctgtctgaag

SEQ ID NO: 2406518 - DNA, 25 bp, Homo sapien
tcacagttccaaaacctcggctgta

SEQ ID NO: 2406519 - DNA, 25 bp, Homo sapien
tgccagtcgttggtgaatgtggtaa

SEQ ID NO: 2406520 - DNA, 25 bp, Homo sapien
gctgccagtcgttggtgaatgtggt

SEQ ID NO: 2406521 - DNA, 25 bp, Homo sapien
gggctgccagtcgttggtgaatgtg

SEQ ID NO: 2406522 - DNA, 25 bp, Homo sapien
ccagggctgccagtcgttggtgaat

SEQ ID NO: 2406523 - DNA, 25 bp, Homo sapien
cagagactgggattcggtcatagga

SEQ ID NO: 2406524 - DNA, 25 bp, Homo sapien
cacagagactgggattcggtcatag

SEQ ID NO: 2406525 - DNA, 25 bp, Homo sapien
gagactgggattcggtcataggact

SEQ ID NO: 2406526 - DNA, 25 bp, Homo sapien
gccacagagactgggattcggtcat

SEQ ID NO: 2406527 - DNA, 25 bp, Homo sapien
ctcataccacctcttagagcccctg

SEQ ID NO: 2406528 - DNA, 25 bp, Homo sapien
ataccacctcttagagcccctgaaa

SEQ ID NO: 2406529 - DNA, 25 bp, Homo sapien
tttctcataccacctcttagagccc

SEQ ID NO: 2406530 - DNA, 25 bp, Homo sapien
tcataccacctcttagagcccctga

SEQ ID NO: 2406531 - DNA, 25 bp, Homo sapien
caagacccagtatctgccaaaacaa

SEQ ID NO: 2406532 - DNA, 25 bp, Homo sapien
tctgttggaccacaggaaatttcct

SEQ ID NO: 2406533 - DNA, 25 bp, Homo sapien
acaaatgtatgtgagtgataaacgc

SEQ ID NO: 2406534 - DNA, 25 bp, Homo sapien
tgataaacgctgagaggaatgtctg

SEQ ID NO: 2406535 - DNA, 25 bp, Homo sapien
tgcattgtgggacttttggctgcag

SEQ ID NO: 2406536 - DNA, 25 bp, Homo sapien
acttttggctgcagtcccttgacca

SEQ ID NO: 2406537 - DNA, 25 bp, Homo sapien
ttttggctgcagtcccttgaccaca

SEQ ID NO: 2406538 - DNA, 25 bp, Homo sapien
tttggctgcagtcccttgaccacag

SEQ ID NO: 2406539 - DNA, 25 bp, Homo sapien
gagaacccgtggctctttgacatac

SEQ ID NO: 2406540 - DNA, 25 bp, Homo sapien
tgattagcttctagaatccaggcat

SEQ ID NO: 2406541 - DNA, 25 bp, Homo sapien
ggagttggtggtctttctccatccc

SEQ ID NO: 2406542 - DNA, 25 bp, Homo sapien
ccatcccaacttaagtatgaaagag

SEQ ID NO: 2406543 - DNA, 25 bp, Homo sapien
ctaaaagcattagggaaacgttatg

SEQ ID NO: 2406544 - DNA, 25 bp, Homo sapien
cactgaagttttggtggaggggagc

SEQ ID NO: 2406545 - DNA, 25 bp, Homo sapien
ggaactctttgtttgtgcagtaagg

SEQ ID NO: 2406546 - DNA, 25 bp, Homo sapien
cacattccttcggtggggcactgaa

SEQ ID NO: 2406547 - DNA, 25 bp, Homo sapien
tgtttgtgcagtaaggacttcctta

SEQ ID NO: 2406548 - DNA, 25 bp, Homo sapien
ccgggggctgataacctgaaccact

SEQ ID NO: 2406549 - DNA, 25 bp, Homo sapien
ttcctgttggttaggccactgccgg

SEQ ID NO: 2406550 - DNA, 25 bp, Homo sapien
cactgccgggggctgataacctgaa

SEQ ID NO: 2406551 - DNA, 25 bp, Homo sapien
tcctgttggttaggccactgccggg

SEQ ID NO: 2406552 - DNA, 25 bp, Homo sapien
ttcccctatattccagagctgctca

SEQ ID NO: 2406553 - DNA, 25 bp, Homo sapien
tgagttcccctatattccagagctg

SEQ ID NO: 2406554 - DNA, 25 bp, Homo sapien
catgaagatttccactgagttcccc

SEQ ID NO: 2406555 - DNA, 25 bp, Homo sapien
ttccactgagttcccctatattcca

SEQ ID NO: 2406556 - DNA, 25 bp, Homo sapien
tgctccctcctgaacttggcgttct

SEQ ID NO: 2406557 - DNA, 25 bp, Homo sapien
cctcctgaacttggcgttctcagat

SEQ ID NO: 2406558 - DNA, 25 bp, Homo sapien
tccctcctgaacttggcgttctcag

SEQ ID NO: 2406559 - DNA, 25 bp, Homo sapien
cttgctccctcctgaacttggcgtt

SEQ ID NO: 2406560 - DNA, 25 bp, Homo sapien
tgattccagcaagggaaatgtcctt

SEQ ID NO: 2406561 - DNA, 25 bp, Homo sapien
ttccagcaagggaaatgtcctttca

SEQ ID NO: 2406562 - DNA, 25 bp, Homo sapien
attccagcaagggaaatgtcctttc

SEQ ID NO: 2406563 - DNA, 25 bp, Homo sapien
cctgattccagcaagggaaatgtcc

SEQ ID NO: 2406564 - DNA, 25 bp, Homo sapien
tacatggtagtcctcacacctttgc

SEQ ID NO: 2406565 - DNA, 25 bp, Homo sapien
aaaaatcctgcggagctcaactctg

SEQ ID NO: 2406566 - DNA, 25 bp, Homo sapien
cagcaccaaaaatcctgcggagctc

SEQ ID NO: 2406567 - DNA, 25 bp, Homo sapien
tcctgcggagctcaactctgtgacc

SEQ ID NO: 2406568 - DNA, 25 bp, Homo sapien
gctcagaaccaagcatctgtgtgcc

SEQ ID NO: 2406569 - DNA, 25 bp, Homo sapien
gagagctcgtgtagaaagcccttga

SEQ ID NO: 2406570 - DNA, 25 bp, Homo sapien
tttcgaagaccttgaaagagctggg

SEQ ID NO: 2406571 - DNA, 25 bp, Homo sapien
gcccttgaatgtaaacccgtgaaga

SEQ ID NO: 2406572 - DNA, 25 bp, Homo sapien
aagagatacaggaaatcagaatttt

SEQ ID NO: 2406573 - DNA, 25 bp, Homo sapien
tggcccttcacaaatcacgtcactt

SEQ ID NO: 2406574 - DNA, 25 bp, Homo sapien
cagaacacaggagtattgcgaatgg

SEQ ID NO: 2406575 - DNA, 25 bp, Homo sapien
taagttggagttgagaagacccatc

SEQ ID NO: 2406576 - DNA, 25 bp, Homo sapien
cagtttggtgtagtgaaagtcctca

SEQ ID NO: 2406577 - DNA, 25 bp, Homo sapien
taggtttgccagattgaagggctgt

SEQ ID NO: 2406578 - DNA, 25 bp, Homo sapien
gaagggctgtgtcaactggctattt

SEQ ID NO: 2406579 - DNA, 25 bp, Homo sapien
tgaagacaccagagttggctctttc

SEQ ID NO: 2406580 - DNA, 25 bp, Homo sapien
tccaaggatataggtcacagaaggg

SEQ ID NO: 2406581 - DNA, 25 bp, Homo sapien
tatgtccccttgcagtatctggcga

SEQ ID NO: 2406582 - DNA, 25 bp, Homo sapien
aacacggcctgtttggaagtaagca

SEQ ID NO: 2406583 - DNA, 25 bp, Homo sapien
tgaatctggcagcaggtaacgacag

SEQ ID NO: 2406584 - DNA, 25 bp, Homo sapien
catgacccctttggaacctttgtat

SEQ ID NO: 2406585 - DNA, 25 bp, Homo sapien
aaacttgatcttagcctttgctctc

SEQ ID NO: 2406586 - DNA, 25 bp, Homo sapien
tcctgggcctgttgatttgcgtctc

SEQ ID NO: 2406587 - DNA, 25 bp, Homo sapien
aatgtgatcctggtgtgtgagatgc

SEQ ID NO: 2406588 - DNA, 25 bp, Homo sapien
ttctctgaccagcatccgtgggctt

SEQ ID NO: 2406589 - DNA, 25 bp, Homo sapien
taatgcacccactgtccgctcagtg

SEQ ID NO: 2406590 - DNA, 25 bp, Homo sapien
ttagacagaagactcctacatctgg

SEQ ID NO: 2406591 - DNA, 25 bp, Homo sapien
ttcctgtgtccggagcttctctgcc

SEQ ID NO: 2406592 - DNA, 25 bp, Homo sapien
cctgccggctctggtctcgtaagtt

SEQ ID NO: 2406593 - DNA, 25 bp, Homo sapien
aacttataataacagaggcggcagg

SEQ ID NO: 2406594 - DNA, 25 bp, Homo sapien
gaatgtcatagcctactccatacat

SEQ ID NO: 2406595 - DNA, 25 bp, Homo sapien
gcaggcagcaggctgagaatgtcat

SEQ ID NO: 2406596 - DNA, 25 bp, Homo sapien
gccctgctgccaacttataataaca

SEQ ID NO: 2406597 - DNA, 25 bp, Homo sapien
ttctaggaggcaatcaaattactgg

SEQ ID NO: 2406598 - DNA, 25 bp, Homo sapien
cagagcctttgaacttgatgagact

SEQ ID NO: 2406599 - DNA, 25 bp, Homo sapien
tgctattaagtccatctagtccggt

SEQ ID NO: 2406600 - DNA, 25 bp, Homo sapien
gaaaattgtgactggatgctgagca

SEQ ID NO: 2406601 - DNA, 25 bp, Homo sapien
ttcctggtctccactggacacagag

SEQ ID NO: 2406602 - DNA, 25 bp, Homo sapien
ttaaagtttcctggtctccactgga

SEQ ID NO: 2406603 - DNA, 25 bp, Homo sapien
aaagtttcctggtctccactggaca

SEQ ID NO: 2406604 - DNA, 25 bp, Homo sapien
agtttcctggtctccactggacaca

SEQ ID NO: 2406605 - DNA, 25 bp, Homo sapien
agctcctccgggatacatatgtgcc

SEQ ID NO: 2406606 - DNA, 25 bp, Homo sapien
gtaaaatgagggtagtgccacttct

SEQ ID NO: 2406607 - DNA, 25 bp, Homo sapien
gattacacctgccttacaaagcacc

SEQ ID NO: 2406608 - DNA, 25 bp, Homo sapien
gactcttccaatataggtctcagaa

SEQ ID NO: 2406609 - DNA, 25 bp, Homo sapien
cggccttactgacaaggacaccaac

SEQ ID NO: 2406610 - DNA, 25 bp, Homo sapien
tccctcggccttactgacaaggaca

SEQ ID NO: 2406611 - DNA, 25 bp, Homo sapien
tttccctcggccttactgacaagga

SEQ ID NO: 2406612 - DNA, 25 bp, Homo sapien
gaattttccctcggccttactgaca

SEQ ID NO: 2406613 - DNA, 25 bp, Homo sapien
gggtgcaaacagatggactatggtt

SEQ ID NO: 2406614 - DNA, 25 bp, Homo sapien
cctcttatcagagcacaggtagaca

SEQ ID NO: 2406615 - DNA, 25 bp, Homo sapien
ggagctgatcaaggctctcttcagc

SEQ ID NO: 2406616 - DNA, 25 bp, Homo sapien
tatggttcaaggacactggaattga

SEQ ID NO: 2406617 - DNA, 25 bp, Homo sapien
gcattcagtaggacatggtgatccc

SEQ ID NO: 2406618 - DNA, 25 bp, Homo sapien
gattagagcctctcagtctggcctc

SEQ ID NO: 2406619 - DNA, 25 bp, Homo sapien
tatgaaatcagagaccagggcatga

SEQ ID NO: 2406620 - DNA, 25 bp, Homo sapien
tggtgatccctatttcagcctctaa

SEQ ID NO: 2406621 - DNA, 25 bp, Homo sapien
ggagatgagggtatccccacagaaa

SEQ ID NO: 2406622 - DNA, 25 bp, Homo sapien
tgtttggaaccctctgatccaatgt

SEQ ID NO: 2406623 - DNA, 25 bp, Homo sapien
tctcctttcaccagtatgtttggaa

SEQ ID NO: 2406624 - DNA, 25 bp, Homo sapien
aaaagaggaataatagaccaatgga

SEQ ID NO: 2406625 - DNA, 25 bp, Homo sapien
tttgcccaagcatttggtgctagtt

SEQ ID NO: 2406626 - DNA, 25 bp, Homo sapien
tggtgctagttagaggctgttcact

SEQ ID NO: 2406627 - DNA, 25 bp, Homo sapien
gcccaagcatttggtgctagttaga

SEQ ID NO: 2406628 - DNA, 25 bp, Homo sapien
ggtgctagttagaggctgttcactc

SEQ ID NO: 2406629 - DNA, 25 bp, Homo sapien
gatttctctttgtgaccgcaaccac

SEQ ID NO: 2406630 - DNA, 25 bp, Homo sapien
tgatactcttttgacccaactgcat

SEQ ID NO: 2406631 - DNA, 25 bp, Homo sapien
agaccccctgaatctttcacacatg

SEQ ID NO: 2406632 - DNA, 25 bp, Homo sapien
catcaacactaaacagctgcagacc

SEQ ID NO: 2406633 - DNA, 25 bp, Homo sapien
tagaaggtcatcacacagctcagag

SEQ ID NO: 2406634 - DNA, 25 bp, Homo sapien
tgatgaaggcgtaagggctgggata

SEQ ID NO: 2406635 - DNA, 25 bp, Homo sapien
caggactgtaatgacctagaaggtc

SEQ ID NO: 2406636 - DNA, 25 bp, Homo sapien
ggatagatcctatgactaaatacag

SEQ ID NO: 2406637 - DNA, 25 bp, Homo sapien
ttgctagtagatacttcattctctg

SEQ ID NO: 2406638 - DNA, 25 bp, Homo sapien
cctcggtgccgatgacgacatggca

SEQ ID NO: 2406639 - DNA, 25 bp, Homo sapien
taaatctcccttgctagtagatact

SEQ ID NO: 2406640 - DNA, 25 bp, Homo sapien
ttatcttcaaacatcacctcggtgc

SEQ ID NO: 2406641 - DNA, 25 bp, Homo sapien
aggaagcagagggtccgaaaatgtg

SEQ ID NO: 2406642 - DNA, 25 bp, Homo sapien
gaagcagagggtccgaaaatgtgct

SEQ ID NO: 2406643 - DNA, 25 bp, Homo sapien
cagagggtccgaaaatgtgcttctt

SEQ ID NO: 2406644 - DNA, 25 bp, Homo sapien
aatataaatctgtaccagggtgaga

SEQ ID NO: 2406645 - DNA, 25 bp, Homo sapien
ctttcatcaagagcaggcactggag

SEQ ID NO: 2406646 - DNA, 25 bp, Homo sapien
cacaaagccagtattgttgactgtg

SEQ ID NO: 2406647 - DNA, 25 bp, Homo sapien
ggagggacaacggaatccacaaagc

SEQ ID NO: 2406648 - DNA, 25 bp, Homo sapien
aggcactggagggacaacggaatcc

SEQ ID NO: 2406649 - DNA, 25 bp, Homo sapien
gatccagagaagactggggtttcca

SEQ ID NO: 2406650 - DNA, 25 bp, Homo sapien
ggagagaggatccagagaagactgg

SEQ ID NO: 2406651 - DNA, 25 bp, Homo sapien
ctggagagaggatccagagaagact

SEQ ID NO: 2406652 - DNA, 25 bp, Homo sapien
aggatccagagaagactggggtttc

SEQ ID NO: 2406653 - DNA, 25 bp, Homo sapien
tctcctctgtactgcttggattctc

SEQ ID NO: 2406654 - DNA, 25 bp, Homo sapien
ctctcctctgtactgcttggattct

SEQ ID NO: 2406655 - DNA, 25 bp, Homo sapien
ctgtactgcttggattctctcccat

SEQ ID NO: 2406656 - DNA, 25 bp, Homo sapien
cctctgtactgcttggattctctcc

SEQ ID NO: 2406657 - DNA, 25 bp, Homo sapien
gtctaaaatgcagggacttatatct

SEQ ID NO: 2406658 - DNA, 25 bp, Homo sapien
gcagggacttatatcttaatttcat

SEQ ID NO: 2406659 - DNA, 25 bp, Homo sapien
gagtctaaaatgcagggacttatat

SEQ ID NO: 2406660 - DNA, 25 bp, Homo sapien
aaaatgcagggacttatatcttaat

SEQ ID NO: 2406661 - DNA, 25 bp, Homo sapien
ggaatccagaaaggtaagtagctct

SEQ ID NO: 2406662 - DNA, 25 bp, Homo sapien
taactggcacagtgcttgaaactgg

SEQ ID NO: 2406663 - DNA, 25 bp, Homo sapien
ttagcactcactatgtaactggcac

SEQ ID NO: 2406664 - DNA, 25 bp, Homo sapien
aagtgtactgtacgccttgctgaaa

SEQ ID NO: 2406665 - DNA, 25 bp, Homo sapien
gtgacctggccgtgcccagtgcccc

SEQ ID NO: 2406666 - DNA, 25 bp, Homo sapien
tgacctggccgtgcccagtgcccca

SEQ ID NO: 2406667 - DNA, 25 bp, Homo sapien
ctggcggggactccaagtctcccct

SEQ ID NO: 2406668 - DNA, 25 bp, Homo sapien
tcatgatcatggcaaagatgtctgg

SEQ ID NO: 2406669 - DNA, 25 bp, Homo sapien
caggtaattgaagagtgtcctccaa

SEQ ID NO: 2406670 - DNA, 25 bp, Homo sapien
ctaaagctggtcttgggagtgcaaa

SEQ ID NO: 2406671 - DNA, 25 bp, Homo sapien
taataaggtaaatcggctaaagctg

SEQ ID NO: 2406672 - DNA, 25 bp, Homo sapien
ttccttgtaattgattggggttagc

SEQ ID NO: 2406673 - DNA, 25 bp, Homo sapien
tccttgtaattgattggggttagca

SEQ ID NO: 2406674 - DNA, 25 bp, Homo sapien
ccttgtaattgattggggttagcat

SEQ ID NO: 2406675 - DNA, 25 bp, Homo sapien
cttccttgtaattgattggggttag

SEQ ID NO: 2406676 - DNA, 25 bp, Homo sapien
tgcagggaattttcccacaatatcc

SEQ ID NO: 2406677 - DNA, 25 bp, Homo sapien
aattttcccacaatatccaggaacg

SEQ ID NO: 2406678 - DNA, 25 bp, Homo sapien
cagttttctcaagttgtttagagga

SEQ ID NO: 2406679 - DNA, 25 bp, Homo sapien
gggaattttcccacaatatccagga

SEQ ID NO: 2406680 - DNA, 25 bp, Homo sapien
ctatcttcctctcacagtcaccccc

SEQ ID NO: 2406681 - DNA, 25 bp, Homo sapien
cctctcacagtcacccccacctgcc

SEQ ID NO: 2406682 - DNA, 25 bp, Homo sapien
tcacccccacctgccagaacactcc

SEQ ID NO: 2406683 - DNA, 25 bp, Homo sapien
agtcacccccacctgccagaacact

SEQ ID NO: 2406684 - DNA, 25 bp, Homo sapien
ccttcctcagtttgtctgtcctcca

SEQ ID NO: 2406685 - DNA, 25 bp, Homo sapien
ccacgttagcacatgggaccaagca

SEQ ID NO: 2406686 - DNA, 25 bp, Homo sapien
cgttagcacatgggaccaagcacct

SEQ ID NO: 2406687 - DNA, 25 bp, Homo sapien
tcagttcccggtggtggtttctgtg

SEQ ID NO: 2406688 - DNA, 25 bp, Homo sapien
agtggttcaactcccctaagatcct

SEQ ID NO: 2406689 - DNA, 25 bp, Homo sapien
tctcggtggtaaacgtggctccctg

SEQ ID NO: 2406690 - DNA, 25 bp, Homo sapien
aaagaaatccttgacactcgcctcg

SEQ ID NO: 2406691 - DNA, 25 bp, Homo sapien
tcgcccaccctgagctataaggtaa

SEQ ID NO: 2406692 - DNA, 25 bp, Homo sapien
tgttagcacagagactccctgggaa

SEQ ID NO: 2406693 - DNA, 25 bp, Homo sapien
tgggaaacccgaggatgcctcacca

SEQ ID NO: 2406694 - DNA, 25 bp, Homo sapien
gactccctgggaaacccgaggatgc

SEQ ID NO: 2406695 - DNA, 25 bp, Homo sapien
gggaagtgttagcacagagactccc

SEQ ID NO: 2406696 - DNA, 25 bp, Homo sapien
catcacatcacatggttgtttcaac

SEQ ID NO: 2406697 - DNA, 25 bp, Homo sapien
catggttgtttcaactggaaaccaa

SEQ ID NO: 2406698 - DNA, 25 bp, Homo sapien
aaacctctggcccacatcgacacat

SEQ ID NO: 2406699 - DNA, 25 bp, Homo sapien
ccacatcgacacatcacatcacatg

SEQ ID NO: 2406700 - DNA, 25 bp, Homo sapien
gaaactctagttgaagtctgcccca

SEQ ID NO: 2406701 - DNA, 25 bp, Homo sapien
tacgcaccccaataattccaggaag

SEQ ID NO: 2406702 - DNA, 25 bp, Homo sapien
tcagtcgggccgaacagctgtacaa

SEQ ID NO: 2406703 - DNA, 25 bp, Homo sapien
taaggctaactggatacagcatctc

SEQ ID NO: 2406704 - DNA, 25 bp, Homo sapien
tccgaagtaaaggactggtgcgcct

SEQ ID NO: 2406705 - DNA, 25 bp, Homo sapien
gaaatccggcatgtggacagacacg

SEQ ID NO: 2406706 - DNA, 25 bp, Homo sapien
aaatgagttccccatacagaaaggg

SEQ ID NO: 2406707 - DNA, 25 bp, Homo sapien
aagaaagggcgctgctggttcacac

SEQ ID NO: 2406708 - DNA, 25 bp, Homo sapien
tcacctttagtattaaagaacagtc

SEQ ID NO: 2406709 - DNA, 25 bp, Homo sapien
tcatttcacctttagtattaaagaa

SEQ ID NO: 2406710 - DNA, 25 bp, Homo sapien
atgagtgtcagtgcccacgagatcc

SEQ ID NO: 2406711 - DNA, 25 bp, Homo sapien
gtcagtgcccacgagatccactcag

SEQ ID NO: 2406712 - DNA, 25 bp, Homo sapien
ccaccaagggattctccacacccct

SEQ ID NO: 2406713 - DNA, 25 bp, Homo sapien
gagatccactcaggcctcaactgtg

SEQ ID NO: 2406714 - DNA, 25 bp, Homo sapien
gcgaaccaggtgtccagcgtaactg

SEQ ID NO: 2406715 - DNA, 25 bp, Homo sapien
aggcacagcgaaccaggtgtccagc

SEQ ID NO: 2406716 - DNA, 25 bp, Homo sapien
gaaacacgaggtgcttgctgcagtt

SEQ ID NO: 2406717 - DNA, 25 bp, Homo sapien
ctgtgtgtggaaacacgaggtgctt

SEQ ID NO: 2406718 - DNA, 25 bp, Homo sapien
ctgccacccaccgggagggaagtga

SEQ ID NO: 2406719 - DNA, 25 bp, Homo sapien
ccaccgggagggaagtgaaatctca

SEQ ID NO: 2406720 - DNA, 25 bp, Homo sapien
caccgggagggaagtgaaatctcac

SEQ ID NO: 2406721 - DNA, 25 bp, Homo sapien
tgccacccaccgggagggaagtgaa

SEQ ID NO: 2406722 - DNA, 25 bp, Homo sapien
tacctggaatgtaggtgttcgttgc

SEQ ID NO: 2406723 - DNA, 25 bp, Homo sapien
tgttcgttgcagtgtggccttccca

SEQ ID NO: 2406724 - DNA, 25 bp, Homo sapien
gagaaccgtgcgacagtgcgtctgc

SEQ ID NO: 2406725 - DNA, 25 bp, Homo sapien
tcaacaagtgagtccgcagagcgag

SEQ ID NO: 2406726 - DNA, 25 bp, Homo sapien
caggaacggaaatctcccctccagg

SEQ ID NO: 2406727 - DNA, 25 bp, Homo sapien
tctgaaccagcattcagaggcccca

SEQ ID NO: 2406728 - DNA, 25 bp, Homo sapien
ccaggttctgaaccagcattcagag

SEQ ID NO: 2406729 - DNA, 25 bp, Homo sapien
ggttctgaaccagcattcagaggcc

SEQ ID NO: 2406730 - DNA, 25 bp, Homo sapien
gctccctccgctgtagggtagcctc

SEQ ID NO: 2406731 - DNA, 25 bp, Homo sapien
tttgtctccgtttgttctcttttgc

SEQ ID NO: 2406732 - DNA, 25 bp, Homo sapien
ttagctttgcctgtcgactgggcca

SEQ ID NO: 2406733 - DNA, 25 bp, Homo sapien
tccaggctcttgtggcggaggcccc

SEQ ID NO: 2406734 - DNA, 25 bp, Homo sapien
acatctggcctgcagtgccctgagc

SEQ ID NO: 2406735 - DNA, 25 bp, Homo sapien
aaaggaagccttgaatcaaaagcct

SEQ ID NO: 2406736 - DNA, 25 bp, Homo sapien
ccaaaaggaagccttgaatcaaaag

SEQ ID NO: 2406737 - DNA, 25 bp, Homo sapien
caaaaggaagccttgaatcaaaagc

SEQ ID NO: 2406738 - DNA, 25 bp, Homo sapien
cacgttggcctcagatggactacag

SEQ ID NO: 2406739 - DNA, 25 bp, Homo sapien
tactgtggtcctgtgcacgttggcc

SEQ ID NO: 2406740 - DNA, 25 bp, Homo sapien
tacaacgtacaaggcagatggagca

SEQ ID NO: 2406741 - DNA, 25 bp, Homo sapien
tcaaggaaagatccagcctgttagc

SEQ ID NO: 2406742 - DNA, 25 bp, Homo sapien
atgtcagacgcagccgtagacacca

SEQ ID NO: 2406743 - DNA, 25 bp, Homo sapien
ccaccatgtcagacgcagccgtaga

SEQ ID NO: 2406744 - DNA, 25 bp, Homo sapien
gcgtgccccaccatgtcagacgcag

SEQ ID NO: 2406745 - DNA, 25 bp, Homo sapien
ccatgtcagacgcagccgtagacac

SEQ ID NO: 2406746 - DNA, 25 bp, Homo sapien
tgtaagatgggcatcgggctgtctc

SEQ ID NO: 2406747 - DNA, 25 bp, Homo sapien
cagcttgtgatgtaagatgggcatc

SEQ ID NO: 2406748 - DNA, 25 bp, Homo sapien
ttcttgtctgccatgcagcttgtga

SEQ ID NO: 2406749 - DNA, 25 bp, Homo sapien
tgggcatcgggctgtctcctttttg

SEQ ID NO: 2406750 - DNA, 25 bp, Homo sapien
tctgggcaaaccctaagtgatggtg

SEQ ID NO: 2406751 - DNA, 25 bp, Homo sapien
gacaagggctgaccaaatgttggcc

SEQ ID NO: 2406752 - DNA, 25 bp, Homo sapien
tcacttgcaaataaggctagtccag

SEQ ID NO: 2406753 - DNA, 25 bp, Homo sapien
acagttcagcaaaagcgcgttgtct

SEQ ID NO: 2406754 - DNA, 25 bp, Homo sapien
tagtgcatagtctcatctgtagatg

SEQ ID NO: 2406755 - DNA, 25 bp, Homo sapien
tgtccacctactgataactggtcaa

SEQ ID NO: 2406756 - DNA, 25 bp, Homo sapien
taggactcagtccacacttagtgca

SEQ ID NO: 2406757 - DNA, 25 bp, Homo sapien
tctgtagatgcccaaatatttgtcc

SEQ ID NO: 2406758 - DNA, 25 bp, Homo sapien
gaagaagaggccattgccatcgcag

SEQ ID NO: 2406759 - DNA, 25 bp, Homo sapien
gatagctcaagatgtagcagcccca

SEQ ID NO: 2406760 - DNA, 25 bp, Homo sapien
gggaagcccaccagatcaagatgca

SEQ ID NO: 2406761 - DNA, 25 bp, Homo sapien
cagaatagcttactgtggtgcacac

SEQ ID NO: 2406762 - DNA, 25 bp, Homo sapien
agtagtgcaaggatatgagatttac

SEQ ID NO: 2406763 - DNA, 25 bp, Homo sapien
agtgcaaggatatgagatttacaac

SEQ ID NO: 2406764 - DNA, 25 bp, Homo sapien
gaaagtagtgcaaggatatgagatt

SEQ ID NO: 2406765 - DNA, 25 bp, Homo sapien
tagtgcaaggatatgagatttacaa

SEQ ID NO: 2406766 - DNA, 25 bp, Homo sapien
catttttacgttggaggcagtcaga

SEQ ID NO: 2406767 - DNA, 25 bp, Homo sapien
tgaaggctatctggctacatccatg

SEQ ID NO: 2406768 - DNA, 25 bp, Homo sapien
taccagagggctgatctctcctaca

SEQ ID NO: 2406769 - DNA, 25 bp, Homo sapien
gaggaggcagcaaggtaaacatacc

SEQ ID NO: 2406770 - DNA, 25 bp, Homo sapien
tgcaaagtgccggtagctatatggc

SEQ ID NO: 2406771 - DNA, 25 bp, Homo sapien
tgttgccactgaggtcattctccga

SEQ ID NO: 2406772 - DNA, 25 bp, Homo sapien
tcaagtcactggtatagcccttggc

SEQ ID NO: 2406773 - DNA, 25 bp, Homo sapien
ggagcatagtcactgtcacaaacat

SEQ ID NO: 2406774 - DNA, 25 bp, Homo sapien
ggtgaattcaatctagcctctggtt

SEQ ID NO: 2406775 - DNA, 25 bp, Homo sapien
caagaggcaattttcaatggcagat

SEQ ID NO: 2406776 - DNA, 25 bp, Homo sapien
tcccctctcagaatagaggtattag

SEQ ID NO: 2406777 - DNA, 25 bp, Homo sapien
tattagatgtcaactaccctatgaa

SEQ ID NO: 2406778 - DNA, 25 bp, Homo sapien
aattctgtgctctgagtatgttgct

SEQ ID NO: 2406779 - DNA, 25 bp, Homo sapien
taatagcatatgcaagcaatggctg

SEQ ID NO: 2406780 - DNA, 25 bp, Homo sapien
gaaccaatcttatcccaatatttca

SEQ ID NO: 2406781 - DNA, 25 bp, Homo sapien
caatggctgaacttacatttctctc

SEQ ID NO: 2406782 - DNA, 25 bp, Homo sapien
tagtgtaatgtgatcgctctgtggc

SEQ ID NO: 2406783 - DNA, 25 bp, Homo sapien
gacctatgagtggaaggactgtttg

SEQ ID NO: 2406784 - DNA, 25 bp, Homo sapien
ttccatagtgtaatgtgatcgctct

SEQ ID NO: 2406785 - DNA, 25 bp, Homo sapien
aaggactgtttgaagaatatccaaa

SEQ ID NO: 2406786 - DNA, 25 bp, Homo sapien
cctcatcatggctaaaaagtgcaaa

SEQ ID NO: 2406787 - DNA, 25 bp, Homo sapien
caaagtgacaaaaacgaaaatctgt

SEQ ID NO: 2406788 - DNA, 25 bp, Homo sapien
ctcattccctaagacctcatcatgg

SEQ ID NO: 2406789 - DNA, 25 bp, Homo sapien
ttgggactatggcttcctcattccc

SEQ ID NO: 2406790 - DNA, 25 bp, Homo sapien
gatcttatgtatgtcgcattcaaag

SEQ ID NO: 2406791 - DNA, 25 bp, Homo sapien
aaatctaagatcttatgtatgtcgc

SEQ ID NO: 2406792 - DNA, 25 bp, Homo sapien
gtatgtcgcattcaaaggaaaacag

SEQ ID NO: 2406793 - DNA, 25 bp, Homo sapien
tatgtatgtcgcattcaaaggaaaa

SEQ ID NO: 2406794 - DNA, 25 bp, Homo sapien
gctgatcattgatttacctcgagac

SEQ ID NO: 2406795 - DNA, 25 bp, Homo sapien
cagggaagtaagtgcctttggtgct

SEQ ID NO: 2406796 - DNA, 25 bp, Homo sapien
gaagaactacttgatgatgctcctg

SEQ ID NO: 2406797 - DNA, 25 bp, Homo sapien
ctgtaacatgggctcggtcataggg

SEQ ID NO: 2406798 - DNA, 25 bp, Homo sapien
catagtcattagtcatagtttcccc

SEQ ID NO: 2406799 - DNA, 25 bp, Homo sapien
ggtgtggcacataaccaagaggcac

SEQ ID NO: 2406800 - DNA, 25 bp, Homo sapien
cgtggacacaacatcctctggcaga

SEQ ID NO: 2406801 - DNA, 25 bp, Homo sapien
gaagctggtccatgaactacatagt

SEQ ID NO: 2406802 - DNA, 25 bp, Homo sapien
tggcacagcggaactgatcaattaa

SEQ ID NO: 2406803 - DNA, 25 bp, Homo sapien
gtgctttccaatgcactgaccattg

SEQ ID NO: 2406804 - DNA, 25 bp, Homo sapien
ctgacttgtcactgcaatccacatt

SEQ ID NO: 2406805 - DNA, 25 bp, Homo sapien
ctgcaatccacattatgatcacact

SEQ ID NO: 2406806 - DNA, 25 bp, Homo sapien
catacaggacaattgagttcatcac

SEQ ID NO: 2406807 - DNA, 25 bp, Homo sapien
gaactgggactctgagcatacagga

SEQ ID NO: 2406808 - DNA, 25 bp, Homo sapien
aacaagtaaactgctgaggagaaca

SEQ ID NO: 2406809 - DNA, 25 bp, Homo sapien
tccattgcatcggagggcaccatca

SEQ ID NO: 2406810 - DNA, 25 bp, Homo sapien
tccccctttacaagacaaatatgtg

SEQ ID NO: 2406811 - DNA, 25 bp, Homo sapien
tagaaccaggtgcatggggcaagaa

SEQ ID NO: 2406812 - DNA, 25 bp, Homo sapien
gggcaagaacaccttgtagtaccat

SEQ ID NO: 2406813 - DNA, 25 bp, Homo sapien
tgatagctcatcttgaagtagaacc

SEQ ID NO: 2406814 - DNA, 25 bp, Homo sapien
aatgtcactaagctgggcaattcga

SEQ ID NO: 2406815 - DNA, 25 bp, Homo sapien
ccacaggctgcaagatattggagtc

SEQ ID NO: 2406816 - DNA, 25 bp, Homo sapien
tcaaacacagtaagtcccacaggct

SEQ ID NO: 2406817 - DNA, 25 bp, Homo sapien
tcgagcttggactttggttctaccc

SEQ ID NO: 2406818 - DNA, 25 bp, Homo sapien
tctgaatcagcccaaaagagcttgc

SEQ ID NO: 2406819 - DNA, 25 bp, Homo sapien
cagcctgctatcaagggctaaagca

SEQ ID NO: 2406820 - DNA, 25 bp, Homo sapien
aagcagcccgttcaattttaggaga

SEQ ID NO: 2406821 - DNA, 25 bp, Homo sapien
atcactgctttcaattcgccggaga

SEQ ID NO: 2406822 - DNA, 25 bp, Homo sapien
tatcaatgctgaggtcatagggttg

SEQ ID NO: 2406823 - DNA, 25 bp, Homo sapien
ggttctgactcggaactgagctcac

SEQ ID NO: 2406824 - DNA, 25 bp, Homo sapien
gacattggtagcctcacaagtccag

SEQ ID NO: 2406825 - DNA, 25 bp, Homo sapien
tctgggtttaccacaacggctcgag

SEQ ID NO: 2406826 - DNA, 25 bp, Homo sapien
ccagttattagtcaggagaaatgaa

SEQ ID NO: 2406827 - DNA, 25 bp, Homo sapien
ggtgagtccagttattagtcaggag

SEQ ID NO: 2406828 - DNA, 25 bp, Homo sapien
acttaagtgaaacagagtggttggt

SEQ ID NO: 2406829 - DNA, 25 bp, Homo sapien
gagtggttggtgagtccagttatta

SEQ ID NO: 2406830 - DNA, 25 bp, Homo sapien
aatagagttgcttgtccagtgggtc

SEQ ID NO: 2406831 - DNA, 25 bp, Homo sapien
ttgttcatcaatcaccatgcggttg

SEQ ID NO: 2406832 - DNA, 25 bp, Homo sapien
cagtgggtcatagtcaatggcccgg

SEQ ID NO: 2406833 - DNA, 25 bp, Homo sapien
tgtcgtgagtcaatccaatagagtt

SEQ ID NO: 2406834 - DNA, 25 bp, Homo sapien
caacaacttcaaagtctaaggccat

SEQ ID NO: 2406835 - DNA, 25 bp, Homo sapien
tctcattctagcttgctttggaggg

SEQ ID NO: 2406836 - DNA, 25 bp, Homo sapien
catctgctataacttcacggttgag

SEQ ID NO: 2406837 - DNA, 25 bp, Homo sapien
ccctgactgtcgagatgagtgaaag

SEQ ID NO: 2406838 - DNA, 25 bp, Homo sapien
cctgaatgatggtgcggttttggcc

SEQ ID NO: 2406839 - DNA, 25 bp, Homo sapien
gccactggttttgttggcacgctca

SEQ ID NO: 2406840 - DNA, 25 bp, Homo sapien
ctattttcagaaaggcagtagacag

SEQ ID NO: 2406841 - DNA, 25 bp, Homo sapien
tattttcagaaaggcagtagacagg

SEQ ID NO: 2406842 - DNA, 25 bp, Homo sapien
aaatatgtgagaatacaagtgtctt

SEQ ID NO: 2406843 - DNA, 25 bp, Homo sapien
aatatgtgagaatacaagtgtcttg

SEQ ID NO: 2406844 - DNA, 25 bp, Homo sapien
tgtccaggtctgtccaataaagcct

SEQ ID NO: 2406845 - DNA, 25 bp, Homo sapien
aatcaatagttaggccgtttgcccg

SEQ ID NO: 2406846 - DNA, 25 bp, Homo sapien
taaggtagtacgttcacttccatcc

SEQ ID NO: 2406847 - DNA, 25 bp, Homo sapien
agattctattaagttggtgtccagg

SEQ ID NO: 2406848 - DNA, 25 bp, Homo sapien
gctctgtctatcttaggttttccac

SEQ ID NO: 2406849 - DNA, 25 bp, Homo sapien
gttttccaccccattcagtccaata

SEQ ID NO: 2406850 - DNA, 25 bp, Homo sapien
caccccattcagtccaatacataaa

SEQ ID NO: 2406851 - DNA, 25 bp, Homo sapien
tgcagctctgtctatcttaggtttt

SEQ ID NO: 2406852 - DNA, 25 bp, Homo sapien
accaaaacttgtcggtgctgcccat

SEQ ID NO: 2406853 - DNA, 25 bp, Homo sapien
aattcgattcgttcctgtgtctgcc

SEQ ID NO: 2406854 - DNA, 25 bp, Homo sapien
tccaacgcgagagctctgggactat

SEQ ID NO: 2406855 - DNA, 25 bp, Homo sapien
tgcactgccattcataaaggctctg

SEQ ID NO: 2406856 - DNA, 25 bp, Homo sapien
cgtctgatatctgctctccgtgaaa

SEQ ID NO: 2406857 - DNA, 25 bp, Homo sapien
gtctatagaggcagagatggctaca

SEQ ID NO: 2406858 - DNA, 25 bp, Homo sapien
tgacaccagtgagtggaatagccac

SEQ ID NO: 2406859 - DNA, 25 bp, Homo sapien
tgatgagttcaaagccaatagggca

SEQ ID NO: 2406860 - DNA, 25 bp, Homo sapien
cacagaaggacacacacattgatac

SEQ ID NO: 2406861 - DNA, 25 bp, Homo sapien
aggggcacagaaggacacacacatt

SEQ ID NO: 2406862 - DNA, 25 bp, Homo sapien
aaggacacacacattgatacattca

SEQ ID NO: 2406863 - DNA, 25 bp, Homo sapien
cacacacattgatacattcaacata

SEQ ID NO: 2406864 - DNA, 25 bp, Homo sapien
gaactctttcaatgctacgcctctg

SEQ ID NO: 2406865 - DNA, 25 bp, Homo sapien
actagtactcgtctcccagtgccat

SEQ ID NO: 2406866 - DNA, 25 bp, Homo sapien
ggtcaggcagctgatctatgatcac

SEQ ID NO: 2406867 - DNA, 25 bp, Homo sapien
ccagtcagtccagtaaacatagtca

SEQ ID NO: 2406868 - DNA, 25 bp, Homo sapien
caaaagagaaggggatgaattatgc

SEQ ID NO: 2406869 - DNA, 25 bp, Homo sapien
aaagagaaggggatgaattatgcat

SEQ ID NO: 2406870 - DNA, 25 bp, Homo sapien
aaaagagaaggggatgaattatgca

SEQ ID NO: 2406871 - DNA, 25 bp, Homo sapien
ttcaaaagagaaggggatgaattat

SEQ ID NO: 2406872 - DNA, 25 bp, Homo sapien
tgaaatattctaaaccacactgaga

SEQ ID NO: 2406873 - DNA, 25 bp, Homo sapien
cttctaaaatctaactccaaatctg

SEQ ID NO: 2406874 - DNA, 25 bp, Homo sapien
aaactgaaattaggcttctgtcact

SEQ ID NO: 2406875 - DNA, 25 bp, Homo sapien
ttctaaaccacactgagaatatagg

SEQ ID NO: 2406876 - DNA, 25 bp, Homo sapien
gaaatgctttggacccagtaggtga

SEQ ID NO: 2406877 - DNA, 25 bp, Homo sapien
tgaagtaaagggacaccacacacct

SEQ ID NO: 2406878 - DNA, 25 bp, Homo sapien
gaagtatcatagttactctgggtag

SEQ ID NO: 2406879 - DNA, 25 bp, Homo sapien
aatcatgccaaatctcactgagatg

SEQ ID NO: 2406880 - DNA, 25 bp, Homo sapien
tcatcataatccaaggctaaaccat

SEQ ID NO: 2406881 - DNA, 25 bp, Homo sapien
aaccatttggccaaccaagagaagt

SEQ ID NO: 2406882 - DNA, 25 bp, Homo sapien
tgctcgctcaattttcggaatttct

SEQ ID NO: 2406883 - DNA, 25 bp, Homo sapien
gagaagtgttaaccaatactacacg

SEQ ID NO: 2406884 - DNA, 25 bp, Homo sapien
tatgatcagggtggcatggcaaaac

SEQ ID NO: 2406885 - DNA, 25 bp, Homo sapien
tatcccagcagtattagtcagatgg

SEQ ID NO: 2406886 - DNA, 25 bp, Homo sapien
gctcctggatgtttagatggctcta

SEQ ID NO: 2406887 - DNA, 25 bp, Homo sapien
taagtgattcttacggctcctggat

SEQ ID NO: 2406888 - DNA, 25 bp, Homo sapien
tcaagtctgtccttcgagctaaaag

SEQ ID NO: 2406889 - DNA, 25 bp, Homo sapien
taaagatttcgtgcaacccagtcca

SEQ ID NO: 2406890 - DNA, 25 bp, Homo sapien
taaatgaacggcgtatggccctcac

SEQ ID NO: 2406891 - DNA, 25 bp, Homo sapien
gatgtagccttccacaggatcgtaa

SEQ ID NO: 2406892 - DNA, 25 bp, Homo sapien
tccattctccaggagtttgacccca

SEQ ID NO: 2406893 - DNA, 25 bp, Homo sapien
gcaagcacactgataaaaaggcttg

SEQ ID NO: 2406894 - DNA, 25 bp, Homo sapien
tttgaccccagtggggcaagcacac

SEQ ID NO: 2406895 - DNA, 25 bp, Homo sapien
tttgcaggtttttccattctccagg

SEQ ID NO: 2406896 - DNA, 25 bp, Homo sapien
ggaacaacccccattgtcaattcca

SEQ ID NO: 2406897 - DNA, 25 bp, Homo sapien
cccccattgtcaattccacatggat

SEQ ID NO: 2406898 - DNA, 25 bp, Homo sapien
acacaaatgggaacaacccccattg

SEQ ID NO: 2406899 - DNA, 25 bp, Homo sapien
caacccccattgtcaattccacatg

SEQ ID NO: 2406900 - DNA, 25 bp, Homo sapien
tataaatcacattgattaatatcaa

SEQ ID NO: 2406901 - DNA, 25 bp, Homo sapien
tacaaagctgttccaacttgcaatt

SEQ ID NO: 2406902 - DNA, 25 bp, Homo sapien
cattagagtgctacaaagctgttcc

SEQ ID NO: 2406903 - DNA, 25 bp, Homo sapien
taaagccagacattagagtgctaca

SEQ ID NO: 2406904 - DNA, 25 bp, Homo sapien
gtgctacaaagctgttccaacttgc

SEQ ID NO: 2406905 - DNA, 25 bp, Homo sapien
tcagaatggatttcacgcagaccct

SEQ ID NO: 2406906 - DNA, 25 bp, Homo sapien
gagtgtgtgctccagtcagtccagt

SEQ ID NO: 2406907 - DNA, 25 bp, Homo sapien
gctgaaggcatgtatatccatggga

SEQ ID NO: 2406908 - DNA, 25 bp, Homo sapien
ataacgtcaaggcaaaaggatgtgg

SEQ ID NO: 2406909 - DNA, 25 bp, Homo sapien
tctgctgatgtactctcatggtgca

SEQ ID NO: 2406910 - DNA, 25 bp, Homo sapien
gcagctttatctgaagaggtctttc

SEQ ID NO: 2406911 - DNA, 25 bp, Homo sapien
caatctctccgttaaagtacctaag

SEQ ID NO: 2406912 - DNA, 25 bp, Homo sapien
gctattgtaaatgacactgccttct

SEQ ID NO: 2406913 - DNA, 25 bp, Homo sapien
tcatctaccatgttaaaatgtgcac

SEQ ID NO: 2406914 - DNA, 25 bp, Homo sapien
caaagaatgggctatttaagcacca

SEQ ID NO: 2406915 - DNA, 25 bp, Homo sapien
taatcttatgttatcctttcacatg

SEQ ID NO: 2406916 - DNA, 25 bp, Homo sapien
ttgagcaaagttaaatgccaaagga

SEQ ID NO: 2406917 - DNA, 25 bp, Homo sapien
aaaacactctatagcatgtgtctct

SEQ ID NO: 2406918 - DNA, 25 bp, Homo sapien
taaaacactctatagcatgtgtctc

SEQ ID NO: 2406919 - DNA, 25 bp, Homo sapien
aataaaacactctatagcatgtgtc

SEQ ID NO: 2406920 - DNA, 25 bp, Homo sapien
caataaaacactctatagcatgtgt

SEQ ID NO: 2406921 - DNA, 25 bp, Homo sapien
tgcatgagggtgatctgcaagaatt

SEQ ID NO: 2406922 - DNA, 25 bp, Homo sapien
tggacatgagtgcatgagggtgatc

SEQ ID NO: 2406923 - DNA, 25 bp, Homo sapien
catgagtgcatgagggtgatctgca

SEQ ID NO: 2406924 - DNA, 25 bp, Homo sapien
agtgcatgagggtgatctgcaagaa

SEQ ID NO: 2406925 - DNA, 25 bp, Homo sapien
tgtggtctgtcaaacttgcagagta

SEQ ID NO: 2406926 - DNA, 25 bp, Homo sapien
gtctgtcaaacttgcagagtagctg

SEQ ID NO: 2406927 - DNA, 25 bp, Homo sapien
cttcattaacagcatactcattatc

SEQ ID NO: 2406928 - DNA, 25 bp, Homo sapien
tcattaacagcatactcattatctg

SEQ ID NO: 2406929 - DNA, 25 bp, Homo sapien
ctggagaatggaatccacattcttc

SEQ ID NO: 2406930 - DNA, 25 bp, Homo sapien
gaggctgaggcatctcactggtact

SEQ ID NO: 2406931 - DNA, 25 bp, Homo sapien
catctccatttccaggtattttctg

SEQ ID NO: 2406932 - DNA, 25 bp, Homo sapien
aaggaggctgaggcatctcactggt

SEQ ID NO: 2406933 - DNA, 25 bp, Homo sapien
ggctgaggcatctcactggtactgc

SEQ ID NO: 2406934 - DNA, 25 bp, Homo sapien
tcctgatgggctttttgaagttgtt

SEQ ID NO: 2406935 - DNA, 25 bp, Homo sapien
gatgggctttttgaagttgtttctg

SEQ ID NO: 2406936 - DNA, 25 bp, Homo sapien
tctgcatactgctcctgatgggctt

SEQ ID NO: 2406937 - DNA, 25 bp, Homo sapien
gctttttgaagttgtttctgcaaat

SEQ ID NO: 2406938 - DNA, 25 bp, Homo sapien
agggtttgagtcctgcttccacgtc

SEQ ID NO: 2406939 - DNA, 25 bp, Homo sapien
gggtttgagtcctgcttccacgtca

SEQ ID NO: 2406940 - DNA, 25 bp, Homo sapien
ggtttgagtcctgcttccacgtcat

SEQ ID NO: 2406941 - DNA, 25 bp, Homo sapien
tagggtttgagtcctgcttccacgt

SEQ ID NO: 2406942 - DNA, 25 bp, Homo sapien
acgttctatctttggcacttctccc

SEQ ID NO: 2406943 - DNA, 25 bp, Homo sapien
gaaattaagttttgcatctgcccaa

SEQ ID NO: 2406944 - DNA, 25 bp, Homo sapien
ttattataatgaagcgacttgaacc

SEQ ID NO: 2406945 - DNA, 25 bp, Homo sapien
catccattccagcacgttctatctt

SEQ ID NO: 2406946 - DNA, 25 bp, Homo sapien
gccatgacagagcagatatcaatca

SEQ ID NO: 2406947 - DNA, 25 bp, Homo sapien
aagccatgacagagcagatatcaat

SEQ ID NO: 2406948 - DNA, 25 bp, Homo sapien
gatatcaatcaaatactctgtaatt

SEQ ID NO: 2406949 - DNA, 25 bp, Homo sapien
catgacagagcagatatcaatcaaa

SEQ ID NO: 2406950 - DNA, 25 bp, Homo sapien
attctgaatgtataaactggttgcc

SEQ ID NO: 2406951 - DNA, 25 bp, Homo sapien
tgaaattctgaatgtataaactggt

SEQ ID NO: 2406952 - DNA, 25 bp, Homo sapien
ttgcttgtgacagtatgcatcatca

SEQ ID NO: 2406953 - DNA, 25 bp, Homo sapien
atcatgaaattctgaatgtataaac

SEQ ID NO: 2406954 - DNA, 25 bp, Homo sapien
gtgagacctcttgtatctgtcttat

SEQ ID NO: 2406955 - DNA, 25 bp, Homo sapien
cgtgagacctcttgtatctgtctta

SEQ ID NO: 2406956 - DNA, 25 bp, Homo sapien
gggctcaacttacaaataaagatag

SEQ ID NO: 2406957 - DNA, 25 bp, Homo sapien
aagaagcaatcctcagtgcatgcta

SEQ ID NO: 2406958 - DNA, 25 bp, Homo sapien
taataaggaactaggtatttggcaa

SEQ ID NO: 2406959 - DNA, 25 bp, Homo sapien
caaataacttaaggacacaagagga

SEQ ID NO: 2406960 - DNA, 25 bp, Homo sapien
catggtaactgtggaatcagactga

SEQ ID NO: 2406961 - DNA, 25 bp, Homo sapien
ggagcagccacataggaatcacctc

SEQ ID NO: 2406962 - DNA, 25 bp, Homo sapien
ggttgcttagcatggtaactgtgga

SEQ ID NO: 2406963 - DNA, 25 bp, Homo sapien
tcaacatcaccaagattagtacggt

SEQ ID NO: 2406964 - DNA, 25 bp, Homo sapien
ataagacaactgtttactgtaactc

SEQ ID NO: 2406965 - DNA, 25 bp, Homo sapien
gtttactgtaactctggttgttcat

SEQ ID NO: 2406966 - DNA, 25 bp, Homo sapien
agacaactgtttactgtaactctgg

SEQ ID NO: 2406967 - DNA, 25 bp, Homo sapien
caactgtttactgtaactctggttg

SEQ ID NO: 2406968 - DNA, 25 bp, Homo sapien
agaaaaaccgaaaggaggtatgatg

SEQ ID NO: 2406969 - DNA, 25 bp, Homo sapien
gtatgatgatcttcgtacactgtac

SEQ ID NO: 2406970 - DNA, 25 bp, Homo sapien
accgaaaggaggtatgatgatcttc

SEQ ID NO: 2406971 - DNA, 25 bp, Homo sapien
tgatgatcttcgtacactgtacaaa

SEQ ID NO: 2406972 - DNA, 25 bp, Homo sapien
gggttgatccaactcttgccaaaat

SEQ ID NO: 2406973 - DNA, 25 bp, Homo sapien
caagtcccgtctgtttgcataaagc

SEQ ID NO: 2406974 - DNA, 25 bp, Homo sapien
tcgtttaatggcttcttcgctgaca

SEQ ID NO: 2406975 - DNA, 25 bp, Homo sapien
tagcatcaaccaatcgcaagtcccg

SEQ ID NO: 2406976 - DNA, 25 bp, Homo sapien
aagcattctgagtctcttctccctc

SEQ ID NO: 2406977 - DNA, 25 bp, Homo sapien
ctctcaaaattttctctccacccat

SEQ ID NO: 2406978 - DNA, 25 bp, Homo sapien
tgtaaactgggagtacatcacaccc

SEQ ID NO: 2406979 - DNA, 25 bp, Homo sapien
cacacccatcattgcagagtattca

SEQ ID NO: 2406980 - DNA, 25 bp, Homo sapien
gccattctgattccccttgcctaaa

SEQ ID NO: 2406981 - DNA, 25 bp, Homo sapien
tctagaccttcatgactttaggcct

SEQ ID NO: 2406982 - DNA, 25 bp, Homo sapien
cacagtggcccatgatcctatttaa

SEQ ID NO: 2406983 - DNA, 25 bp, Homo sapien
caactgtctttgagatttcccctaa

SEQ ID NO: 2406984 - DNA, 25 bp, Homo sapien
tcaaagccagagaggcttaccctcc

SEQ ID NO: 2406985 - DNA, 25 bp, Homo sapien
tgttcaaacctcctaaatgatgcct

SEQ ID NO: 2406986 - DNA, 25 bp, Homo sapien
ttatcagtaataggttaatcatcac

SEQ ID NO: 2406987 - DNA, 25 bp, Homo sapien
taagtattttgtcatctacagatag

SEQ ID NO: 2406988 - DNA, 25 bp, Homo sapien
cgtccttgcaataggagatctttca

SEQ ID NO: 2406989 - DNA, 25 bp, Homo sapien
agcacttgcaaatcagctacaggcc

SEQ ID NO: 2406990 - DNA, 25 bp, Homo sapien
ctatagctaatgaacgattgagtca

SEQ ID NO: 2406991 - DNA, 25 bp, Homo sapien
catgacccagactaagaaatctttg

SEQ ID NO: 2406992 - DNA, 25 bp, Homo sapien
gaagttcactcgtcacctttctcag

SEQ ID NO: 2406993 - DNA, 25 bp, Homo sapien
tctggtacatggtgcatataaaggg

SEQ ID NO: 2406994 - DNA, 25 bp, Homo sapien
tagaatttctacgatgaaaataatc

SEQ ID NO: 2406995 - DNA, 25 bp, Homo sapien
tttcaatagaatttctacgatgaaa

SEQ ID NO: 2406996 - DNA, 25 bp, Homo sapien
gaatttctacgatgaaaataatctt

SEQ ID NO: 2406997 - DNA, 25 bp, Homo sapien
actttcaatagaatttctacgatga

SEQ ID NO: 2406998 - DNA, 25 bp, Homo sapien
ctctcaggagcacacagaagctgca

SEQ ID NO: 2406999 - DNA, 25 bp, Homo sapien
ggagcacacagaagctgcaggccag

SEQ ID NO: 2407000 - DNA, 25 bp, Homo sapien
tcaggagcacacagaagctgcaggc

SEQ ID NO: 2407001 - DNA, 25 bp, Homo sapien
ggaggctcctcaggacggcccccat

SEQ ID NO: 2407002 - DNA, 25 bp, Homo sapien
cccttctcgcgttctcttctctcac

SEQ ID NO: 2407003 - DNA, 25 bp, Homo sapien
tcccttctcgcgttctcttctctca

SEQ ID NO: 2407004 - DNA, 25 bp, Homo sapien
cggccgccgcagcggcagggctgca

SEQ ID NO: 2407005 - DNA, 25 bp, Homo sapien
ccgccgcagcggcagggctgcacgc

SEQ ID NO: 2407006 - DNA, 25 bp, Homo sapien
gccgccgcagcggcagggctgcacg

SEQ ID NO: 2407007 - DNA, 25 bp, Homo sapien
ggccgccgcagcggcagggctgcac

SEQ ID NO: 2407008 - DNA, 25 bp, Homo sapien
gcttcccagcgagagaagaaagaaa

SEQ ID NO: 2407009 - DNA, 25 bp, Homo sapien
cccagcttcccagcgagagaagaaa

SEQ ID NO: 2407010 - DNA, 25 bp, Homo sapien
ttcccagcttcccagcgagagaaga

SEQ ID NO: 2407011 - DNA, 25 bp, Homo sapien
acttcccagcttcccagcgagagaa

SEQ ID NO: 2407012 - DNA, 25 bp, Homo sapien
gctcgcgcgacgccagcgtctgctt

SEQ ID NO: 2407013 - DNA, 25 bp, Homo sapien
cgcgcgacgccagcgtctgcttcca

SEQ ID NO: 2407014 - DNA, 25 bp, Homo sapien
ccgggctcgcgcgacgccagcgtct

SEQ ID NO: 2407015 - DNA, 25 bp, Homo sapien
cgccctctctaccgcgccgctcggc

SEQ ID NO: 2407016 - DNA, 25 bp, Homo sapien
tagggtcgccgcgaccgtgtccctg

SEQ ID NO: 2407017 - DNA, 25 bp, Homo sapien
gatacggtcggcaccgcctcctagg

SEQ ID NO: 2407018 - DNA, 25 bp, Homo sapien
cagcggcgcagggatacggtcggca

SEQ ID NO: 2407019 - DNA, 25 bp, Homo sapien
caacgagccccttctcccggtactg

SEQ ID NO: 2407020 - DNA, 25 bp, Homo sapien
gccagggaagggagtcggcaaccgc

SEQ ID NO: 2407021 - DNA, 25 bp, Homo sapien
gggagtcggcaaccgcacgcacagc

SEQ ID NO: 2407022 - DNA, 25 bp, Homo sapien
gaagggagtcggcaaccgcacgcac

SEQ ID NO: 2407023 - DNA, 25 bp, Homo sapien
agggaagggagtcggcaaccgcacg

SEQ ID NO: 2407024 - DNA, 25 bp, Homo sapien
ttgcggggtgatgagctccgtcttc

SEQ ID NO: 2407025 - DNA, 25 bp, Homo sapien
tgccccgctctttgtgcggccgccg

SEQ ID NO: 2407026 - DNA, 25 bp, Homo sapien
gagccacggcggatcccgttgcggg

SEQ ID NO: 2407027 - DNA, 25 bp, Homo sapien
tcggggttggaaatcggtttcagca

SEQ ID NO: 2407028 - DNA, 25 bp, Homo sapien
aacgctgtttacaccggctttcagc

SEQ ID NO: 2407029 - DNA, 25 bp, Homo sapien
gcggaatttttgaacgctgtttaca

SEQ ID NO: 2407030 - DNA, 25 bp, Homo sapien
tgtttacaccggctttcagcgtgga

SEQ ID NO: 2407031 - DNA, 25 bp, Homo sapien
ttgaacgctgtttacaccggctttc

SEQ ID NO: 2407032 - DNA, 25 bp, Homo sapien
aacgccaattcaaaactgagattgt

SEQ ID NO: 2407033 - DNA, 25 bp, Homo sapien
ctggtgaacgatattaaaacgccaa

SEQ ID NO: 2407034 - DNA, 25 bp, Homo sapien
cgccaattcaaaactgagattgtca

SEQ ID NO: 2407035 - DNA, 25 bp, Homo sapien
gaacgatattaaaacgccaattcaa

SEQ ID NO: 2407036 - DNA, 25 bp, Homo sapien
cagttaaccctaatggagccatcag

SEQ ID NO: 2407037 - DNA, 25 bp, Homo sapien
caacagttaaccctaatggagccat

SEQ ID NO: 2407038 - DNA, 25 bp, Homo sapien
cgctccaacagttaaccctaatgga

SEQ ID NO: 2407039 - DNA, 25 bp, Homo sapien
ctgccaggctttcgtctgggcagag

SEQ ID NO: 2407040 - DNA, 25 bp, Homo sapien
caggatgaaaggatatctgcaatag

SEQ ID NO: 2407041 - DNA, 25 bp, Homo sapien
aaggatatctgcaatagagggtaac

SEQ ID NO: 2407042 - DNA, 25 bp, Homo sapien
tgaaaggatatctgcaatagagggt

SEQ ID NO: 2407043 - DNA, 25 bp, Homo sapien
aaacaggatgaaaggatatctgcaa

SEQ ID NO: 2407044 - DNA, 25 bp, Homo sapien
cagggggcatgctaatcttgtatca

SEQ ID NO: 2407045 - DNA, 25 bp, Homo sapien
ttccaatttttgtatatgtgctgcc

SEQ ID NO: 2407046 - DNA, 25 bp, Homo sapien
tgtgtcatccttaagcagggggcat

SEQ ID NO: 2407047 - DNA, 25 bp, Homo sapien
ttgtgtgtcatccttaagcaggggg

SEQ ID NO: 2407048 - DNA, 25 bp, Homo sapien
gctctgatcatagcactgcctctgg

SEQ ID NO: 2407049 - DNA, 25 bp, Homo sapien
gcatttggcttgtgtgccactgtac

SEQ ID NO: 2407050 - DNA, 25 bp, Homo sapien
actgtacctggtcagcctggcatgg

SEQ ID NO: 2407051 - DNA, 25 bp, Homo sapien
taactggagcataagaacgcctgtc

SEQ ID NO: 2407052 - DNA, 25 bp, Homo sapien
caaaagttcctcactcaggccaggg

SEQ ID NO: 2407053 - DNA, 25 bp, Homo sapien
ggcacataacagtattcatccagga

SEQ ID NO: 2407054 - DNA, 25 bp, Homo sapien
ttaaccaaggcatcccggagactgg

SEQ ID NO: 2407055 - DNA, 25 bp, Homo sapien
ttcagctaaaacttgggtcacaggc

SEQ ID NO: 2407056 - DNA, 25 bp, Homo sapien
tatcctcacggccactaacagtttg

SEQ ID NO: 2407057 - DNA, 25 bp, Homo sapien
taatctgattctggcctacatgtgg

SEQ ID NO: 2407058 - DNA, 25 bp, Homo sapien
gggcccgtagcatcactcatctgga

SEQ ID NO: 2407059 - DNA, 25 bp, Homo sapien
gatgtttgagcagaaggacctacct

SEQ ID NO: 2407060 - DNA, 25 bp, Homo sapien
tagagacagattacccaaaattacc

SEQ ID NO: 2407061 - DNA, 25 bp, Homo sapien
tgctaagactagcaagtcagcagaa

SEQ ID NO: 2407062 - DNA, 25 bp, Homo sapien
tggaacctagatgtcctaacctgtt

SEQ ID NO: 2407063 - DNA, 25 bp, Homo sapien
tgaattaagagacaccgagttccat

SEQ ID NO: 2407064 - DNA, 25 bp, Homo sapien
cgagaggattctacccaggaggacg

SEQ ID NO: 2407065 - DNA, 25 bp, Homo sapien
tgtccacatagatcccattgatcaa

SEQ ID NO: 2407066 - DNA, 25 bp, Homo sapien
caaataatccagtcttgagtaacgt

SEQ ID NO: 2407067 - DNA, 25 bp, Homo sapien
tttcctgcggagtgattccgagagg

SEQ ID NO: 2407068 - DNA, 25 bp, Homo sapien
tcaccaggaacaggacaccaaagag

SEQ ID NO: 2407069 - DNA, 25 bp, Homo sapien
gagcagggacccgataagaagccat

SEQ ID NO: 2407070 - DNA, 25 bp, Homo sapien
gaacaggacaccaaagagcagggac

SEQ ID NO: 2407071 - DNA, 25 bp, Homo sapien
tttttcaaatggaaggccgtactga

SEQ ID NO: 2407072 - DNA, 25 bp, Homo sapien
ccttataagcaaggagctgggcact

SEQ ID NO: 2407073 - DNA, 25 bp, Homo sapien
taagctgcctttcgagtccgtaggt

SEQ ID NO: 2407074 - DNA, 25 bp, Homo sapien
tggagaagcaactgccaccgtagct

SEQ ID NO: 2407075 - DNA, 25 bp, Homo sapien
tagccgcagcccgtgtaaaaactgt

SEQ ID NO: 2407076 - DNA, 25 bp, Homo sapien
tgctggtttcaatggacaggcttcc

SEQ ID NO: 2407077 - DNA, 25 bp, Homo sapien
tgtaactcataagtccttttgctgg

SEQ ID NO: 2407078 - DNA, 25 bp, Homo sapien
caggcttcctcgttgggacagaaaa

SEQ ID NO: 2407079 - DNA, 25 bp, Homo sapien
cgagtgtcgaagatcatcaagttac

SEQ ID NO: 2407080 - DNA, 25 bp, Homo sapien
ctgcaatgaaaggtttcataagcat

SEQ ID NO: 2407081 - DNA, 25 bp, Homo sapien
gccggcaagcaccaaagaggctgtg

SEQ ID NO: 2407082 - DNA, 25 bp, Homo sapien
ggttacaccctgagcaggcctgatg

SEQ ID NO: 2407083 - DNA, 25 bp, Homo sapien
tggccaaggttacaccctgagcagg

SEQ ID NO: 2407084 - DNA, 25 bp, Homo sapien
aagaggcatgcgctctgctggcccc

SEQ ID NO: 2407085 - DNA, 25 bp, Homo sapien
ttgtctacccagtcacctgagggat

SEQ ID NO: 2407086 - DNA, 25 bp, Homo sapien
gataccagttgggatataacaccag

SEQ ID NO: 2407087 - DNA, 25 bp, Homo sapien
aaaacacatggaacaaaggattgcc

SEQ ID NO: 2407088 - DNA, 25 bp, Homo sapien
ttcataccctgtcgagaatcactgg

SEQ ID NO: 2407089 - DNA, 25 bp, Homo sapien
gaattaatgcagtcttcttgagttg

SEQ ID NO: 2407090 - DNA, 25 bp, Homo sapien
tcttgagttgaagtatatacgggct

SEQ ID NO: 2407091 - DNA, 25 bp, Homo sapien
tgttgaacagcaagaattaatgcag

SEQ ID NO: 2407092 - DNA, 25 bp, Homo sapien
tatacgggctcattgcctctgattc

SEQ ID NO: 2407093 - DNA, 25 bp, Homo sapien
gatgtcaatgacaacatcttctaga

SEQ ID NO: 2407094 - DNA, 25 bp, Homo sapien
cttagaaagagatgactggatgtca

SEQ ID NO: 2407095 - DNA, 25 bp, Homo sapien
gaggcaattctgactagcagacagc

SEQ ID NO: 2407096 - DNA, 25 bp, Homo sapien
ttgaggcaattctgactagcagaca

SEQ ID NO: 2407097 - DNA, 25 bp, Homo sapien
cttagtgtcaggaagcaaattatta

SEQ ID NO: 2407098 - DNA, 25 bp, Homo sapien
ttagtgtcaggaagcaaattattac

SEQ ID NO: 2407099 - DNA, 25 bp, Homo sapien
caaagtgtaagtcaagctcccttct

SEQ ID NO: 2407100 - DNA, 25 bp, Homo sapien
aaagtgtaagtcaagctcccttctc

SEQ ID NO: 2407101 - DNA, 25 bp, Homo sapien
agtttgctttaagaaggctgcacag

SEQ ID NO: 2407102 - DNA, 25 bp, Homo sapien
aaaggtcaaggataatcctccctct

SEQ ID NO: 2407103 - DNA, 25 bp, Homo sapien
ggtcaaggataatcctccctctggt

SEQ ID NO: 2407104 - DNA, 25 bp, Homo sapien
tccctctggtcttagtttgctttaa

SEQ ID NO: 2407105 - DNA, 25 bp, Homo sapien
acagacgcatgccaccacgcccggc

SEQ ID NO: 2407106 - DNA, 25 bp, Homo sapien
tacagacgcatgccaccacgcccgg

SEQ ID NO: 2407107 - DNA, 25 bp, Homo sapien
tcttgggttcgagtgattcccctgc

SEQ ID NO: 2407108 - DNA, 25 bp, Homo sapien
ccacctcttgggttcgagtgattcc

SEQ ID NO: 2407109 - DNA, 25 bp, Homo sapien
taagggcctgaagtcgagttgaatc

SEQ ID NO: 2407110 - DNA, 25 bp, Homo sapien
cagagtcaacgacaagaaaacaggg

SEQ ID NO: 2407111 - DNA, 25 bp, Homo sapien
gaatactgcagcgactcaaggatcc

SEQ ID NO: 2407112 - DNA, 25 bp, Homo sapien
ggatgcccctgagttttaacgtctg

SEQ ID NO: 2407113 - DNA, 25 bp, Homo sapien
cctttggatgctcgggtgtgggtga

SEQ ID NO: 2407114 - DNA, 25 bp, Homo sapien
tctccgcaggtagcgacgtcgcctg

SEQ ID NO: 2407115 - DNA, 25 bp, Homo sapien
gtgtgggtgaaggagcctcggcccc

SEQ ID NO: 2407116 - DNA, 25 bp, Homo sapien
tggaaaggaggggaccgactctctc

SEQ ID NO: 2407117 - DNA, 25 bp, Homo sapien
tgctgccatccaggtgcgaggacag

SEQ ID NO: 2407118 - DNA, 25 bp, Homo sapien
tcgcagcgacggcaagtttgccgcg

SEQ ID NO: 2407119 - DNA, 25 bp, Homo sapien
tgcttcccggcaacattagcgcgtc

SEQ ID NO: 2407120 - DNA, 25 bp, Homo sapien
caagttcctgcttccgtcgcagcga

SEQ ID NO: 2407121 - DNA, 25 bp, Homo sapien
aagtaaatcaatggctgtgtaaaca

SEQ ID NO: 2407122 - DNA, 25 bp, Homo sapien
gatgttcatagttcagaaggagaaa

SEQ ID NO: 2407123 - DNA, 25 bp, Homo sapien
cacctgcaggggaaactaaagacca

SEQ ID NO: 2407124 - DNA, 25 bp, Homo sapien
aataccaatgagatctacctttaag

SEQ ID NO: 2407125 - DNA, 25 bp, Homo sapien
tccaaaagggaatggtctcactgct

SEQ ID NO: 2407126 - DNA, 25 bp, Homo sapien
cacctgctgaccatggaggagtcac

SEQ ID NO: 2407127 - DNA, 25 bp, Homo sapien
gagtcacctacttacaggctgcagg

SEQ ID NO: 2407128 - DNA, 25 bp, Homo sapien
aagttcggagaacgctagagccagc

SEQ ID NO: 2407129 - DNA, 25 bp, Homo sapien
ggaggtcaagccctttaaggtggca

SEQ ID NO: 2407130 - DNA, 25 bp, Homo sapien
cttccgcagttctggcttcgaggag

SEQ ID NO: 2407131 - DNA, 25 bp, Homo sapien
cctaagtcgcaggagcgggtctctc

SEQ ID NO: 2407132 - DNA, 25 bp, Homo sapien
gcagttctggcttcgaggaggtcaa

SEQ ID NO: 2407133 - DNA, 25 bp, Homo sapien
ctttagtgcaaaggtctccagaaac

SEQ ID NO: 2407134 - DNA, 25 bp, Homo sapien
tcttggtccgttttctaatcttgta

SEQ ID NO: 2407135 - DNA, 25 bp, Homo sapien
gttttctaatcttgtagaggttggc

SEQ ID NO: 2407136 - DNA, 25 bp, Homo sapien
tggtccgttttctaatcttgtagag

SEQ ID NO: 2407137 - DNA, 25 bp, Homo sapien
tcttgagtacgagtcacactcctgt

SEQ ID NO: 2407138 - DNA, 25 bp, Homo sapien
ttgtctgctgtatctagtatcttca

SEQ ID NO: 2407139 - DNA, 25 bp, Homo sapien
tactcagaggcaatttctattgact

SEQ ID NO: 2407140 - DNA, 25 bp, Homo sapien
tgtagttctgtgagcttataattgc

SEQ ID NO: 2407141 - DNA, 25 bp, Homo sapien
cctttctgtgattgccccatatctc

SEQ ID NO: 2407142 - DNA, 25 bp, Homo sapien
ccatatctccctagtccgctgtggg

SEQ ID NO: 2407143 - DNA, 25 bp, Homo sapien
tgctcttccccgtggcttgggcaca

SEQ ID NO: 2407144 - DNA, 25 bp, Homo sapien
ggcttttctgtggcaatcccagctg

SEQ ID NO: 2407145 - DNA, 25 bp, Homo sapien
tttcaacaagtggagagcacctagg

SEQ ID NO: 2407146 - DNA, 25 bp, Homo sapien
ttcaacaagtggagagcacctaggt

SEQ ID NO: 2407147 - DNA, 25 bp, Homo sapien
gagtgagggccttctcactttgaat

SEQ ID NO: 2407148 - DNA, 25 bp, Homo sapien
tctcatctgaattgtgaatgtttgt

SEQ ID NO: 2407149 - DNA, 25 bp, Homo sapien
ttcactcagtgagagctgttgaaag

SEQ ID NO: 2407150 - DNA, 25 bp, Homo sapien
tctgaattgtgaatgtttgtaatgt

SEQ ID NO: 2407151 - DNA, 25 bp, Homo sapien
gaagaaaacctggttcaattctctc

SEQ ID NO: 2407152 - DNA, 25 bp, Homo sapien
tcagagtttacatttggaagaaaac

SEQ ID NO: 2407153 - DNA, 25 bp, Homo sapien
tacatttggaagaaaacctggttca

SEQ ID NO: 2407154 - DNA, 25 bp, Homo sapien
aattttcagagtttacatttggaag

SEQ ID NO: 2407155 - DNA, 25 bp, Homo sapien
gcgattcaggctcccaatagtcttc

SEQ ID NO: 2407156 - DNA, 25 bp, Homo sapien
tcccaatagtcttctgaagcaccgg

SEQ ID NO: 2407157 - DNA, 25 bp, Homo sapien
cattctgcgattcaggctcccaata

SEQ ID NO: 2407158 - DNA, 25 bp, Homo sapien
tcttctgaagcaccggagagcttcc

SEQ ID NO: 2407159 - DNA, 25 bp, Homo sapien
tcagactgagacaaggactcgctct

SEQ ID NO: 2407160 - DNA, 25 bp, Homo sapien
cagattcagactgagacaaggactc

SEQ ID NO: 2407161 - DNA, 25 bp, Homo sapien
gagacaaggactcgctcttaggcat

SEQ ID NO: 2407162 - DNA, 25 bp, Homo sapien
gactgagacaaggactcgctcttag

SEQ ID NO: 2407163 - DNA, 25 bp, Homo sapien
tggcaaaccattagtccttggcttc

SEQ ID NO: 2407164 - DNA, 25 bp, Homo sapien
tgtggatagcatactcgtgcctggg

SEQ ID NO: 2407165 - DNA, 25 bp, Homo sapien
ccttggcttctaggctgtggataca

SEQ ID NO: 2407166 - DNA, 25 bp, Homo sapien
gccaaccagaaaggagtgtgcttcc

SEQ ID NO: 2407167 - DNA, 25 bp, Homo sapien
tgtaaggtatgctgcacagggcttc

SEQ ID NO: 2407168 - DNA, 25 bp, Homo sapien
gctgcttctggttcggcggactgta

SEQ ID NO: 2407169 - DNA, 25 bp, Homo sapien
ggcggactgtaaggtatgctgcaca

SEQ ID NO: 2407170 - DNA, 25 bp, Homo sapien
tctggttcggcggactgtaaggtat

SEQ ID NO: 2407171 - DNA, 25 bp, Homo sapien
tgactcaccaggataggaatatgcc

SEQ ID NO: 2407172 - DNA, 25 bp, Homo sapien
tgagaactttttacgcacatgcctt

SEQ ID NO: 2407173 - DNA, 25 bp, Homo sapien
gccctgttgtaggtgtcgaggaaat

SEQ ID NO: 2407174 - DNA, 25 bp, Homo sapien
cagagaccttacattccattgtgga

SEQ ID NO: 2407175 - DNA, 25 bp, Homo sapien
gagtccaggttagtggcgtggcttg

SEQ ID NO: 2407176 - DNA, 25 bp, Homo sapien
aattctggacatcggaaaagggagt

SEQ ID NO: 2407177 - DNA, 25 bp, Homo sapien
aaagggagtccaggttagtggcgtg

SEQ ID NO: 2407178 - DNA, 25 bp, Homo sapien
ctctttaattctggacatcggaaaa

SEQ ID NO: 2407179 - DNA, 25 bp, Homo sapien
cctcacctgatgtggtagtgacagc

SEQ ID NO: 2407180 - DNA, 25 bp, Homo sapien
ctcacctgatgtggtagtgacagca

SEQ ID NO: 2407181 - DNA, 25 bp, Homo sapien
tctttatacttccaaccgtgctttg

SEQ ID NO: 2407182 - DNA, 25 bp, Homo sapien
ttccaaccgtgctttggagaatggg

SEQ ID NO: 2407183 - DNA, 25 bp, Homo sapien
gagagtggactcatgcctaggagct

SEQ ID NO: 2407184 - DNA, 25 bp, Homo sapien
gactgtggtggtacagaaggtagac

SEQ ID NO: 2407185 - DNA, 25 bp, Homo sapien
tggagagccgcggtttcccatgatt

SEQ ID NO: 2407186 - DNA, 25 bp, Homo sapien
cttgatcgtggctgggtcgggccca

SEQ ID NO: 2407187 - DNA, 25 bp, Homo sapien
gtttcccatgattgttaagattagg

SEQ ID NO: 2407188 - DNA, 25 bp, Homo sapien
ccgcggtttcccatgattgttaaga

SEQ ID NO: 2407189 - DNA, 25 bp, Homo sapien
cttggactgttcctcttgcagactc

SEQ ID NO: 2407190 - DNA, 25 bp, Homo sapien
tgttcctcttgcagactcagctacc

SEQ ID NO: 2407191 - DNA, 25 bp, Homo sapien
gactgttcctcttgcagactcagct

SEQ ID NO: 2407192 - DNA, 25 bp, Homo sapien
ttcctcttgcagactcagctaccac

SEQ ID NO: 2407193 - DNA, 25 bp, Homo sapien
taaccggtttccttgatgcagacat

SEQ ID NO: 2407194 - DNA, 25 bp, Homo sapien
caaatatggccgtatagcctcaggc

SEQ ID NO: 2407195 - DNA, 25 bp, Homo sapien
gatgtgtccaatattgtgccaggga

SEQ ID NO: 2407196 - DNA, 25 bp, Homo sapien
taggtgtcccttagtcgtcatcaga

SEQ ID NO: 2407197 - DNA, 25 bp, Homo sapien
tttcatacattaacatacatgacac

SEQ ID NO: 2407198 - DNA, 25 bp, Homo sapien
tatggctgcaaagataggtcttttc

SEQ ID NO: 2407199 - DNA, 25 bp, Homo sapien
cccaccgagtttatggctgcaaaga

SEQ ID NO: 2407200 - DNA, 25 bp, Homo sapien
gataggtcttttctcgtatttatgt

SEQ ID NO: 2407201 - DNA, 25 bp, Homo sapien
tacatgctgaagagagccagccacc

SEQ ID NO: 2407202 - DNA, 25 bp, Homo sapien
caactagtgaggtctgtgcggctca

SEQ ID NO: 2407203 - DNA, 25 bp, Homo sapien
tgagatacgaggcagcaactagcga

SEQ ID NO: 2407204 - DNA, 25 bp, Homo sapien
gagggtttccccaattacatgctga

SEQ ID NO: 2407205 - DNA, 25 bp, Homo sapien
ggaccgattccatacagtgattgta

SEQ ID NO: 2407206 - DNA, 25 bp, Homo sapien
taggttgaggactgaggacgcccct

SEQ ID NO: 2407207 - DNA, 25 bp, Homo sapien
tgaggcaatcatagaaacatcagcc

SEQ ID NO: 2407208 - DNA, 25 bp, Homo sapien
cgccggccagcgtttccaaaaacag

SEQ ID NO: 2407209 - DNA, 25 bp, Homo sapien
aattatctccatctaggcccacggg

SEQ ID NO: 2407210 - DNA, 25 bp, Homo sapien
taatggtccgtccagcagagtgatg

SEQ ID NO: 2407211 - DNA, 25 bp, Homo sapien
gatatggtagtggtcaaagccccga

SEQ ID NO: 2407212 - DNA, 25 bp, Homo sapien
gagatctcttagtagcacaacgtga

SEQ ID NO: 2407213 - DNA, 25 bp, Homo sapien
gaagctggtgtggtaattgtcctcc

SEQ ID NO: 2407214 - DNA, 25 bp, Homo sapien
ccaggccagcagacttcgtgaggtg

SEQ ID NO: 2407215 - DNA, 25 bp, Homo sapien
gagtctgctccgatagttcctgaac

SEQ ID NO: 2407216 - DNA, 25 bp, Homo sapien
gcctgcgcacagaatagacttggtc

SEQ ID NO: 2407217 - DNA, 25 bp, Homo sapien
acaggtgcagcccactgagcgcctg

SEQ ID NO: 2407218 - DNA, 25 bp, Homo sapien
tgagcgcctgtaccagcgggctgtc

SEQ ID NO: 2407219 - DNA, 25 bp, Homo sapien
cactgagcgcctgtaccagcgggct

SEQ ID NO: 2407220 - DNA, 25 bp, Homo sapien
aggtgcagcccactgagcgcctgta

SEQ ID NO: 2407221 - DNA, 25 bp, Homo sapien
ctaacagcgacggctgcacgctggg

SEQ ID NO: 2407222 - DNA, 25 bp, Homo sapien
taacagcgacggctgcacgctgggc

SEQ ID NO: 2407223 - DNA, 25 bp, Homo sapien
ctctaacagcgacggctgcacgctg

SEQ ID NO: 2407224 - DNA, 25 bp, Homo sapien
tctaacagcgacggctgcacgctgg

SEQ ID NO: 2407225 - DNA, 25 bp, Homo sapien
gactgaggggcgtctcgcttttctg

SEQ ID NO: 2407226 - DNA, 25 bp, Homo sapien
ggactgaggggcgtctcgcttttct

SEQ ID NO: 2407227 - DNA, 25 bp, Homo sapien
cagagtcggcacagggtggactgag

SEQ ID NO: 2407228 - DNA, 25 bp, Homo sapien
tgaggggcgtctcgcttttctgtcc

SEQ ID NO: 2407229 - DNA, 25 bp, Homo sapien
tagtccaggagttggcccagaaaat

SEQ ID NO: 2407230 - DNA, 25 bp, Homo sapien
caggagttggcccagaaaattgaag

SEQ ID NO: 2407231 - DNA, 25 bp, Homo sapien
tggagatatagtaggtcttttttct

SEQ ID NO: 2407232 - DNA, 25 bp, Homo sapien
aattgaagtttggagatatagtagg

SEQ ID NO: 2407233 - DNA, 25 bp, Homo sapien
cacatcctggagtatgccagaagag

SEQ ID NO: 2407234 - DNA, 25 bp, Homo sapien
gggaagctttgcacacatcctggag

SEQ ID NO: 2407235 - DNA, 25 bp, Homo sapien
tcccaatgcagctgataagagatgg

SEQ ID NO: 2407236 - DNA, 25 bp, Homo sapien
tggtttacaagttcggggagatgct

SEQ ID NO: 2407237 - DNA, 25 bp, Homo sapien
aacacatccattggaggcttttgct

SEQ ID NO: 2407238 - DNA, 25 bp, Homo sapien
taagcttcatctaaagacatgtcca

SEQ ID NO: 2407239 - DNA, 25 bp, Homo sapien
gcggagcgggagatcccagctaaac

SEQ ID NO: 2407240 - DNA, 25 bp, Homo sapien
taaacagtgcactagaacacatcca

SEQ ID NO: 2407241 - DNA, 25 bp, Homo sapien
ctatgaatcaggtttagcaggtcac

SEQ ID NO: 2407242 - DNA, 25 bp, Homo sapien
taagcaagctactactaactcaggt

SEQ ID NO: 2407243 - DNA, 25 bp, Homo sapien
tctgtatgtcataaaatggctcaac

SEQ ID NO: 2407244 - DNA, 25 bp, Homo sapien
gaagaaaaccttgtataggctatga

SEQ ID NO: 2407245 - DNA, 25 bp, Homo sapien
tggtaggcatccagctgatactggc

SEQ ID NO: 2407246 - DNA, 25 bp, Homo sapien
tgccctactgctaagaagctcaaag

SEQ ID NO: 2407247 - DNA, 25 bp, Homo sapien
caaaagacttaacgctaggcacatg

SEQ ID NO: 2407248 - DNA, 25 bp, Homo sapien
tcttgggagacatgagccctaaact

SEQ ID NO: 2407249 - DNA, 25 bp, Homo sapien
tcacgagtttggcatgaggagagct

SEQ ID NO: 2407250 - DNA, 25 bp, Homo sapien
tgagtatcccatagcacaaacgggc

SEQ ID NO: 2407251 - DNA, 25 bp, Homo sapien
aaacgggcaaactctgttactggca

SEQ ID NO: 2407252 - DNA, 25 bp, Homo sapien
caagaggctgtatatgtagccagct

SEQ ID NO: 2407253 - DNA, 25 bp, Homo sapien
aatgacatgctatcactaaccatgg

SEQ ID NO: 2407254 - DNA, 25 bp, Homo sapien
tatgggctgaattcaaaaagtggcc

SEQ ID NO: 2407255 - DNA, 25 bp, Homo sapien
cttagcaattgtagtgaatatgggc

SEQ ID NO: 2407256 - DNA, 25 bp, Homo sapien
cccacagaggagaagacttagcaat

SEQ ID NO: 2407257 - DNA, 25 bp, Homo sapien
aattccttacatggaacatcaagag

SEQ ID NO: 2407258 - DNA, 25 bp, Homo sapien
tcagagtaattatggattagggtgc

SEQ ID NO: 2407259 - DNA, 25 bp, Homo sapien
tggtaatggtaaccaattcagagta

SEQ ID NO: 2407260 - DNA, 25 bp, Homo sapien
gggtgctccaacttatgtaactggg

SEQ ID NO: 2407261 - DNA, 25 bp, Homo sapien
caacaaggcaacagggaatattacc

SEQ ID NO: 2407262 - DNA, 25 bp, Homo sapien
cacaaggccagtccttagggacagt

SEQ ID NO: 2407263 - DNA, 25 bp, Homo sapien
aaattattggcatgtggaccccggc

SEQ ID NO: 2407264 - DNA, 25 bp, Homo sapien
tcaccttgaccaccagatgagtaag

SEQ ID NO: 2407265 - DNA, 25 bp, Homo sapien
cattcacaggcacacgcaggaaatg

SEQ ID NO: 2407266 - DNA, 25 bp, Homo sapien
gaaatctactgatttgtccaaccac

SEQ ID NO: 2407267 - DNA, 25 bp, Homo sapien
gtcattcacaggcacacgcaggaaa

SEQ ID NO: 2407268 - DNA, 25 bp, Homo sapien
gtccaaccacggcaaaattttctca

SEQ ID NO: 2407269 - DNA, 25 bp, Homo sapien
catttaacacataaccaatcccatt

SEQ ID NO: 2407270 - DNA, 25 bp, Homo sapien
tcaggctttggacaggtattgctgg

SEQ ID NO: 2407271 - DNA, 25 bp, Homo sapien
taacacataaccaatcccattctgc

SEQ ID NO: 2407272 - DNA, 25 bp, Homo sapien
ggctttggacaggtattgctggcat

SEQ ID NO: 2407273 - DNA, 25 bp, Homo sapien
gaactgtccatactcgtaaggccaa

SEQ ID NO: 2407274 - DNA, 25 bp, Homo sapien
taattctccacctagtcagcactgc

SEQ ID NO: 2407275 - DNA, 25 bp, Homo sapien
caattgttcgtactcacttggcaag

SEQ ID NO: 2407276 - DNA, 25 bp, Homo sapien
aatgcgcccagatataatgccttcc

SEQ ID NO: 2407277 - DNA, 25 bp, Homo sapien
gtgtgtgagccacaaatataaattt

SEQ ID NO: 2407278 - DNA, 25 bp, Homo sapien
ctaggattccaaagtgtgtgagcca

SEQ ID NO: 2407279 - DNA, 25 bp, Homo sapien
cccacctgacccttccaaggtgcta

SEQ ID NO: 2407280 - DNA, 25 bp, Homo sapien
caaggtgctaggattccaaagtgtg

SEQ ID NO: 2407281 - DNA, 25 bp, Homo sapien
tcgctggcagccaagataaagattg

SEQ ID NO: 2407282 - DNA, 25 bp, Homo sapien
ttcgggttggcccaatgttggcaac

SEQ ID NO: 2407283 - DNA, 25 bp, Homo sapien
ctgagaaatgcaggtagggactaga

SEQ ID NO: 2407284 - DNA, 25 bp, Homo sapien
cttgttgaggacatctcgctggcag

SEQ ID NO: 2407285 - DNA, 25 bp, Homo sapien
ccagggaaacaacgagagaactcag

SEQ ID NO: 2407286 - DNA, 25 bp, Homo sapien
caacgagagaactcagcaaacccac

SEQ ID NO: 2407287 - DNA, 25 bp, Homo sapien
gaaacaacgagagaactcagcaaac

SEQ ID NO: 2407288 - DNA, 25 bp, Homo sapien
acagaggccagggaaacaacgagag

SEQ ID NO: 2407289 - DNA, 25 bp, Homo sapien
tccatgccgttctcttgtccaagaa

SEQ ID NO: 2407290 - DNA, 25 bp, Homo sapien
ccagccacataaaactcattgttat

SEQ ID NO: 2407291 - DNA, 25 bp, Homo sapien
gaagccacggtacatacagcataca

SEQ ID NO: 2407292 - DNA, 25 bp, Homo sapien
cgccccatgcatgcacacgtagaag

SEQ ID NO: 2407293 - DNA, 25 bp, Homo sapien
tccaaagttgccataaggagcagag

SEQ ID NO: 2407294 - DNA, 25 bp, Homo sapien
gaaaacacaggctacagctttgacc

SEQ ID NO: 2407295 - DNA, 25 bp, Homo sapien
cactgagttgatcagaagaccctga

SEQ ID NO: 2407296 - DNA, 25 bp, Homo sapien
tgcagatgttagatcacctagggaa

SEQ ID NO: 2407297 - DNA, 25 bp, Homo sapien
gggataaccactctgtcacgaagca

SEQ ID NO: 2407298 - DNA, 25 bp, Homo sapien
tgttgagtaaggtctccccataggg

SEQ ID NO: 2407299 - DNA, 25 bp, Homo sapien
ggtaaagtccctcacacagtggcca

SEQ ID NO: 2407300 - DNA, 25 bp, Homo sapien
tcttccgtgggtaaggtagccctga

SEQ ID NO: 2407301 - DNA, 25 bp, Homo sapien
tcttctccagtttacccagaagtac

SEQ ID NO: 2407302 - DNA, 25 bp, Homo sapien
cttgggagctttgatcgtaaactac

SEQ ID NO: 2407303 - DNA, 25 bp, Homo sapien
ttgatcgtaaactacaaccttctga

SEQ ID NO: 2407304 - DNA, 25 bp, Homo sapien
ccagaagtacagtgagaaaacagtc

SEQ ID NO: 2407305 - DNA, 25 bp, Homo sapien
tattttgaggtaccacaaggcacca

SEQ ID NO: 2407306 - DNA, 25 bp, Homo sapien
agatctcacatttaccagtgctggg

SEQ ID NO: 2407307 - DNA, 25 bp, Homo sapien
cagacaacattttagtatcccagga

SEQ ID NO: 2407308 - DNA, 25 bp, Homo sapien
tgtaggtgatctcacgattccctgg

SEQ ID NO: 2407309 - DNA, 25 bp, Homo sapien
caaccttcgcttcataagcttggag

SEQ ID NO: 2407310 - DNA, 25 bp, Homo sapien
gctggatgagctctgtaattaacac

SEQ ID NO: 2407311 - DNA, 25 bp, Homo sapien
caaatggccggctatcaattagcag

SEQ ID NO: 2407312 - DNA, 25 bp, Homo sapien
tttgagttccaatcatctcatgggc

SEQ ID NO: 2407313 - DNA, 25 bp, Homo sapien
caagagccctccaagtgaatgtctc

SEQ ID NO: 2407314 - DNA, 25 bp, Homo sapien
caacagctttacactggactgaaag

SEQ ID NO: 2407315 - DNA, 25 bp, Homo sapien
gcaaaggactccgtccacaaagcag

SEQ ID NO: 2407316 - DNA, 25 bp, Homo sapien
ttggagcagccagcgcattacatca

SEQ ID NO: 2407317 - DNA, 25 bp, Homo sapien
catattttgatagacgcttaggttg

SEQ ID NO: 2407318 - DNA, 25 bp, Homo sapien
tgaaaacagccatactaccaggagt

SEQ ID NO: 2407319 - DNA, 25 bp, Homo sapien
tgaaaaatgtcaggtctttcaccca

SEQ ID NO: 2407320 - DNA, 25 bp, Homo sapien
taccaggagtgggatactatcttac

SEQ ID NO: 2407321 - DNA, 25 bp, Homo sapien
gacagtcacccgtgaattcaggtat

SEQ ID NO: 2407322 - DNA, 25 bp, Homo sapien
cacacatggttggttatactaagta

SEQ ID NO: 2407323 - DNA, 25 bp, Homo sapien
tgttccagatactaagtcagacttc

SEQ ID NO: 2407324 - DNA, 25 bp, Homo sapien
gcccttaaatacctcatgttccaga

SEQ ID NO: 2407325 - DNA, 25 bp, Homo sapien
ttaaagcttgggagagatagagttc

SEQ ID NO: 2407326 - DNA, 25 bp, Homo sapien
caaatgtttaggtgtagatgtgtca

SEQ ID NO: 2407327 - DNA, 25 bp, Homo sapien
gtgttcaccggcttatgaatgcacg

SEQ ID NO: 2407328 - DNA, 25 bp, Homo sapien
gaatgcacgttaaataaatatctcc

SEQ ID NO: 2407329 - DNA, 25 bp, Homo sapien
cccttacagcattgataatacaagc

SEQ ID NO: 2407330 - DNA, 25 bp, Homo sapien
aactcaagaagcctaggaatgtttg

SEQ ID NO: 2407331 - DNA, 25 bp, Homo sapien
gtcttatataaatacctgcccaagt

SEQ ID NO: 2407332 - DNA, 25 bp, Homo sapien
tcttgtatgccacttactcctgtgg

SEQ ID NO: 2407333 - DNA, 25 bp, Homo sapien
tggtgataagtagccccaaagggcc

SEQ ID NO: 2407334 - DNA, 25 bp, Homo sapien
caagggtggctctgaccattatggc

SEQ ID NO: 2407335 - DNA, 25 bp, Homo sapien
tcacagatggtcaagcacaaagaca

SEQ ID NO: 2407336 - DNA, 25 bp, Homo sapien
ggtaatggtcaatcaagacctggca

SEQ ID NO: 2407337 - DNA, 25 bp, Homo sapien
actacaggcgtgcactgccatgcct

SEQ ID NO: 2407338 - DNA, 25 bp, Homo sapien
atatcgctctgttacccatgctgga

SEQ ID NO: 2407339 - DNA, 25 bp, Homo sapien
tacaggcgtgcactgccatgcctgg

SEQ ID NO: 2407340 - DNA, 25 bp, Homo sapien
ggactacaggcgtgcactgccatgc

SEQ ID NO: 2407341 - DNA, 25 bp, Homo sapien
gaataagtgcaatttatcgaccctg

SEQ ID NO: 2407342 - DNA, 25 bp, Homo sapien
ggtctagcacttggtagaggatcag

SEQ ID NO: 2407343 - DNA, 25 bp, Homo sapien
gactgttcattagactatcataggc

SEQ ID NO: 2407344 - DNA, 25 bp, Homo sapien
tttccactgtatggccagggtctag

SEQ ID NO: 2407345 - DNA, 25 bp, Homo sapien
ggtatcagagggcatttttccactt

SEQ ID NO: 2407346 - DNA, 25 bp, Homo sapien
tactgatcatactcctggcaagctt

SEQ ID NO: 2407347 - DNA, 25 bp, Homo sapien
ccatttgtgtagaagaaccagctct

SEQ ID NO: 2407348 - DNA, 25 bp, Homo sapien
tctaaccccagtcaagaagggcgtg

SEQ ID NO: 2407349 - DNA, 25 bp, Homo sapien
tgaaacagcataaatcctttgagga

SEQ ID NO: 2407350 - DNA, 25 bp, Homo sapien
atcctttacgtggactctccatcag

SEQ ID NO: 2407351 - DNA, 25 bp, Homo sapien
tttcttgatggaggtgaaacagcat

SEQ ID NO: 2407352 - DNA, 25 bp, Homo sapien
ggttatcctttacgtggactctcca

SEQ ID NO: 2407353 - DNA, 25 bp, Homo sapien
ccgagcccctgtccgaaaattgagg

SEQ ID NO: 2407354 - DNA, 25 bp, Homo sapien
gttggttggttgaagaaagcagcac

SEQ ID NO: 2407355 - DNA, 25 bp, Homo sapien
ataaagaagtcactaggcgtcgggc

SEQ ID NO: 2407356 - DNA, 25 bp, Homo sapien
gtggcctcgctgcttacaccaaagg

SEQ ID NO: 2407357 - DNA, 25 bp, Homo sapien
gccccacttggcaggcgtgttgtgt

SEQ ID NO: 2407358 - DNA, 25 bp, Homo sapien
gaagtgagcagcttcgcccgcaaag

SEQ ID NO: 2407359 - DNA, 25 bp, Homo sapien
tgttgtgtaacagtcgcgcctggaa

SEQ ID NO: 2407360 - DNA, 25 bp, Homo sapien
tcgcgcctggaagtgagcagcttcg

SEQ ID NO: 2407361 - DNA, 25 bp, Homo sapien
tcccaattccctcagagggaaacga

SEQ ID NO: 2407362 - DNA, 25 bp, Homo sapien
gagacgctcgcaacttttcttcact

SEQ ID NO: 2407363 - DNA, 25 bp, Homo sapien
agttgtcacggcgtctcccctcggg

SEQ ID NO: 2407364 - DNA, 25 bp, Homo sapien
agagaggagacgctcgcaacttttc

SEQ ID NO: 2407365 - DNA, 25 bp, Homo sapien
aaacgcaaacactgatttgagagaa

SEQ ID NO: 2407366 - DNA, 25 bp, Homo sapien
aaaagtctggcgaatgcaaaaggca

SEQ ID NO: 2407367 - DNA, 25 bp, Homo sapien
gctgcctcaccaacgtcaaaaaacg

SEQ ID NO: 2407368 - DNA, 25 bp, Homo sapien
tgagagaattacactcgctctgtaa

SEQ ID NO: 2407369 - DNA, 25 bp, Homo sapien
acttgtctaccttcagcttgcggac

SEQ ID NO: 2407370 - DNA, 25 bp, Homo sapien
taccttcagcttgcggacaattcca

SEQ ID NO: 2407371 - DNA, 25 bp, Homo sapien
cttccttagtcttaggccagtgggc

SEQ ID NO: 2407372 - DNA, 25 bp, Homo sapien
ggcctggaggcactcgtcatgaagt

SEQ ID NO: 2407373 - DNA, 25 bp, Homo sapien
cagggtctccggcactgtgctgagt

SEQ ID NO: 2407374 - DNA, 25 bp, Homo sapien
gcagggtctccggcactgtgctgag

SEQ ID NO: 2407375 - DNA, 25 bp, Homo sapien
ggcagggtctccggcactgtgctga

SEQ ID NO: 2407376 - DNA, 25 bp, Homo sapien
atcagggcagggtctccggcactgt

SEQ ID NO: 2407377 - DNA, 25 bp, Homo sapien
gctgtactgactccctgtcctgtga

SEQ ID NO: 2407378 - DNA, 25 bp, Homo sapien
tggtgctgtactgactccctgtcct

SEQ ID NO: 2407379 - DNA, 25 bp, Homo sapien
ccctgtcctgtgaaagaaggctgct

SEQ ID NO: 2407380 - DNA, 25 bp, Homo sapien
actccctgtcctgtgaaagaaggct

SEQ ID NO: 2407381 - DNA, 25 bp, Homo sapien
tgtgcttaagtacttcgctgacaac

SEQ ID NO: 2407382 - DNA, 25 bp, Homo sapien
tgcttaagtacttcgctgacaacat

SEQ ID NO: 2407383 - DNA, 25 bp, Homo sapien
cccctgtgcttaagtacttcgctga

SEQ ID NO: 2407384 - DNA, 25 bp, Homo sapien
agcccctgtgcttaagtacttcgct

SEQ ID NO: 2407385 - DNA, 25 bp, Homo sapien
aatgaccacagaataatttcctgtc

SEQ ID NO: 2407386 - DNA, 25 bp, Homo sapien
attcccctattgcaggagccaaatc

SEQ ID NO: 2407387 - DNA, 25 bp, Homo sapien
gcaggagccaaatccacttaactgg

SEQ ID NO: 2407388 - DNA, 25 bp, Homo sapien
tggatgacgccctcagaatgaccct

SEQ ID NO: 2407389 - DNA, 25 bp, Homo sapien
tgccttgcggggacctggcaaaact

SEQ ID NO: 2407390 - DNA, 25 bp, Homo sapien
aggagaacagccttgccgtgcatct

SEQ ID NO: 2407391 - DNA, 25 bp, Homo sapien
ccttgccgtgcatcttagcactttg

SEQ ID NO: 2407392 - DNA, 25 bp, Homo sapien
gactgaactgccttgcggggacctg

SEQ ID NO: 2407393 - DNA, 25 bp, Homo sapien
tgggcgaccatgaagagaagttatg

SEQ ID NO: 2407394 - DNA, 25 bp, Homo sapien
gaggagtgggcgaccatgaagagaa

SEQ ID NO: 2407395 - DNA, 25 bp, Homo sapien
gcaggaaggttacaagcacgtattt

SEQ ID NO: 2407396 - DNA, 25 bp, Homo sapien
gaagttatgatctcgtcctctggaa

SEQ ID NO: 2407397 - DNA, 25 bp, Homo sapien
tcagcgctagctagtaggcaaaagg

SEQ ID NO: 2407398 - DNA, 25 bp, Homo sapien
ttaggagccaaaacctcaggtcagg

SEQ ID NO: 2407399 - DNA, 25 bp, Homo sapien
tcaggtcaggcgcactttgggcctc

SEQ ID NO: 2407400 - DNA, 25 bp, Homo sapien
tagggtttcctcagcgtcccagagg

SEQ ID NO: 2407401 - DNA, 25 bp, Homo sapien
cggctctccagagcgtctgtaaaca

SEQ ID NO: 2407402 - DNA, 25 bp, Homo sapien
gctctccagagcgtctgtaaacacc

SEQ ID NO: 2407403 - DNA, 25 bp, Homo sapien
gcggctctccagagcgtctgtaaac

SEQ ID NO: 2407404 - DNA, 25 bp, Homo sapien
ggctctccagagcgtctgtaaacac

SEQ ID NO: 2407405 - DNA, 25 bp, Homo sapien
ctcgtccccgtgactctggcatcag

SEQ ID NO: 2407406 - DNA, 25 bp, Homo sapien
cattcctgaactggtccctcgtccc

SEQ ID NO: 2407407 - DNA, 25 bp, Homo sapien
cagggtccgctctgccattcctgaa

SEQ ID NO: 2407408 - DNA, 25 bp, Homo sapien
tcgtccccgtgactctggcatcagg

SEQ ID NO: 2407409 - DNA, 25 bp, Homo sapien
gaggaggaggcagccagaaccatat

SEQ ID NO: 2407410 - DNA, 25 bp, Homo sapien
gcagccagaaccatatccccttctt

SEQ ID NO: 2407411 - DNA, 25 bp, Homo sapien
aggaggcagccagaaccatatcccc

SEQ ID NO: 2407412 - DNA, 25 bp, Homo sapien
ggcagccagaaccatatccccttct

SEQ ID NO: 2407413 - DNA, 25 bp, Homo sapien
ggtttggaagtatggtggctgtgcc

SEQ ID NO: 2407414 - DNA, 25 bp, Homo sapien
attttcttcagtgtaagggaagatg

SEQ ID NO: 2407415 - DNA, 25 bp, Homo sapien
cattttcttcagtgtaagggaagat

SEQ ID NO: 2407416 - DNA, 25 bp, Homo sapien
ttttcttcagtgtaagggaagatga

SEQ ID NO: 2407417 - DNA, 25 bp, Homo sapien
taaatgagtttgctgcgagttctcc

SEQ ID NO: 2407418 - DNA, 25 bp, Homo sapien
aatgagtttgctgcgagttctccac

SEQ ID NO: 2407419 - DNA, 25 bp, Homo sapien
gagtttgctgcgagttctccacact

SEQ ID NO: 2407420 - DNA, 25 bp, Homo sapien
ggtgataaatgagtttgctgcgagt

SEQ ID NO: 2407421 - DNA, 25 bp, Homo sapien
gaaacacactgtgggcgtgcatctg

SEQ ID NO: 2407422 - DNA, 25 bp, Homo sapien
gggacaaattgctggtagatctact

SEQ ID NO: 2407423 - DNA, 25 bp, Homo sapien
gactaccaaatggagtgacggttga

SEQ ID NO: 2407424 - DNA, 25 bp, Homo sapien
ttgtgcacagcaccgcagctagtgg

SEQ ID NO: 2407425 - DNA, 25 bp, Homo sapien
catttgaataaagtgcctcccttag

SEQ ID NO: 2407426 - DNA, 25 bp, Homo sapien
gcctgagctcctaaagacctcttgt

SEQ ID NO: 2407427 - DNA, 25 bp, Homo sapien
tggttgcaaactcagatctctagtc

SEQ ID NO: 2407428 - DNA, 25 bp, Homo sapien
tgagataccactagcccagtttgct

SEQ ID NO: 2407429 - DNA, 25 bp, Homo sapien
cacacactaagagaacgttgattgc

SEQ ID NO: 2407430 - DNA, 25 bp, Homo sapien
tagaggatgtataattttgggcgaa

SEQ ID NO: 2407431 - DNA, 25 bp, Homo sapien
ccctcccgctagtatctttacagga

SEQ ID NO: 2407432 - DNA, 25 bp, Homo sapien
ttacagagtcatttgagctttctcc

SEQ ID NO: 2407433 - DNA, 25 bp, Homo sapien
gaccaggtcaagttttaggatatag

SEQ ID NO: 2407434 - DNA, 25 bp, Homo sapien
tatgtttagaccagccaaattctgt

SEQ ID NO: 2407435 - DNA, 25 bp, Homo sapien
ggacttagcttgagttaaaggcaaa

SEQ ID NO: 2407436 - DNA, 25 bp, Homo sapien
aatgatcatcctgcgcaaattcaga

SEQ ID NO: 2407437 - DNA, 25 bp, Homo sapien
gaactgcctctactgtggagcctgc

SEQ ID NO: 2407438 - DNA, 25 bp, Homo sapien
taggagaactgcctctactgtggag

SEQ ID NO: 2407439 - DNA, 25 bp, Homo sapien
gacggtttacgagaacctggagcca

SEQ ID NO: 2407440 - DNA, 25 bp, Homo sapien
ctctactgtggagcctgcttccaac

SEQ ID NO: 2407441 - DNA, 25 bp, Homo sapien
tttgaaccaacagtaaatagtaaga

SEQ ID NO: 2407442 - DNA, 25 bp, Homo sapien
ctctggtgcataacaattgaaagaa

SEQ ID NO: 2407443 - DNA, 25 bp, Homo sapien
tattaatagtaaaaggactgttggc

SEQ ID NO: 2407444 - DNA, 25 bp, Homo sapien
catttcccttggaaagttgagtgaa

SEQ ID NO: 2407445 - DNA, 25 bp, Homo sapien
tgctggcaacgctgatgagaaggtc

SEQ ID NO: 2407446 - DNA, 25 bp, Homo sapien
gaacgtagatctggacacctggagt

SEQ ID NO: 2407447 - DNA, 25 bp, Homo sapien
catagctgagctacatgaaaaggca

SEQ ID NO: 2407448 - DNA, 25 bp, Homo sapien
tagaaccggtctatgcagatggaga

SEQ ID NO: 2407449 - DNA, 25 bp, Homo sapien
aggtttaagttgaccacaggctgca

SEQ ID NO: 2407450 - DNA, 25 bp, Homo sapien
cagttttgtgaaggaatggataacc

SEQ ID NO: 2407451 - DNA, 25 bp, Homo sapien
gagctttaccccacatgaaggttta

SEQ ID NO: 2407452 - DNA, 25 bp, Homo sapien
ggataaccactggtagctaccctac

SEQ ID NO: 2407453 - DNA, 25 bp, Homo sapien
tttctaggtggcaagatcacaactg

SEQ ID NO: 2407454 - DNA, 25 bp, Homo sapien
gacattgaataggtaagttaatctc

SEQ ID NO: 2407455 - DNA, 25 bp, Homo sapien
tctacctgccgtctgtggacattga

SEQ ID NO: 2407456 - DNA, 25 bp, Homo sapien
tacacaagaaaggagctaaggacaa

SEQ ID NO: 2407457 - DNA, 25 bp, Homo sapien
tgtagcacttgccagctggtttgtg

SEQ ID NO: 2407458 - DNA, 25 bp, Homo sapien
cagctggtttgtgcttccgtcaggg

SEQ ID NO: 2407459 - DNA, 25 bp, Homo sapien
cacttgccagctggtttgtgcttcc

SEQ ID NO: 2407460 - DNA, 25 bp, Homo sapien
gggcatgtagcacttgccagctggt

SEQ ID NO: 2407461 - DNA, 25 bp, Homo sapien
gtgatgatgaaacctagttggtttc

SEQ ID NO: 2407462 - DNA, 25 bp, Homo sapien
cagtgatgatgaaacctagttggtt

SEQ ID NO: 2407463 - DNA, 25 bp, Homo sapien
gatgatgaaacctagttggtttcgg

SEQ ID NO: 2407464 - DNA, 25 bp, Homo sapien
tgatgaaacctagttggtttcggta

SEQ ID NO: 2407465 - DNA, 25 bp, Homo sapien
tttcagtcgcaataccaagggatcc

SEQ ID NO: 2407466 - DNA, 25 bp, Homo sapien
gcatctaaggcaggacaaaatctcc

SEQ ID NO: 2407467 - DNA, 25 bp, Homo sapien
gaactacctaggcatcttttctgga

SEQ ID NO: 2407468 - DNA, 25 bp, Homo sapien
aaagaaggcattatgtcctctgagc

SEQ ID NO: 2407469 - DNA, 25 bp, Homo sapien
ggagtttggagaatgccataaacca

SEQ ID NO: 2407470 - DNA, 25 bp, Homo sapien
tgatttcagagacgttctctttaga

SEQ ID NO: 2407471 - DNA, 25 bp, Homo sapien
gttctctttagatcttcttggtcag

SEQ ID NO: 2407472 - DNA, 25 bp, Homo sapien
tggtcaggaatagcccttgcatagg

SEQ ID NO: 2407473 - DNA, 25 bp, Homo sapien
tgccttccccttggctcacagcctg

SEQ ID NO: 2407474 - DNA, 25 bp, Homo sapien
ttccccttggctcacagcctgcttc

SEQ ID NO: 2407475 - DNA, 25 bp, Homo sapien
gtcctctgccttccccttggctcac

SEQ ID NO: 2407476 - DNA, 25 bp, Homo sapien
ctctgccttccccttggctcacagc

SEQ ID NO: 2407477 - DNA, 25 bp, Homo sapien
caagatgacgctgtgcagggtagac

SEQ ID NO: 2407478 - DNA, 25 bp, Homo sapien
aagatgacgctgtgcagggtagact

SEQ ID NO: 2407479 - DNA, 25 bp, Homo sapien
cttttgacattggaagaagataaag

SEQ ID NO: 2407480 - DNA, 25 bp, Homo sapien
caaatgcacaaaattccacaatact

SEQ ID NO: 2407481 - DNA, 25 bp, Homo sapien
gaaacagttgtcttccatccaaatg

SEQ ID NO: 2407482 - DNA, 25 bp, Homo sapien
gaacatgagtaatgtgatcttctca

SEQ ID NO: 2407483 - DNA, 25 bp, Homo sapien
taaaacaacgctcttaccaggcacg

SEQ ID NO: 2407484 - DNA, 25 bp, Homo sapien
aactggtgcagtcgagatgtcatgc

SEQ ID NO: 2407485 - DNA, 25 bp, Homo sapien
caagagaactagcatggactcatca

SEQ ID NO: 2407486 - DNA, 25 bp, Homo sapien
tgttctgtactatagacctctggct

SEQ ID NO: 2407487 - DNA, 25 bp, Homo sapien
gaggtggccaatactccctgggaga

SEQ ID NO: 2407488 - DNA, 25 bp, Homo sapien
tgttcaggccaagtccacaatagca

SEQ ID NO: 2407489 - DNA, 25 bp, Homo sapien
tgaactaacagccagtaggcctgcc

SEQ ID NO: 2407490 - DNA, 25 bp, Homo sapien
gagttcaccatgagttcaccagctg

SEQ ID NO: 2407491 - DNA, 25 bp, Homo sapien
tggcagccagacgttagattagaca

SEQ ID NO: 2407492 - DNA, 25 bp, Homo sapien
gcagagtctgtttgacccagcctaa

SEQ ID NO: 2407493 - DNA, 25 bp, Homo sapien
tctaaattcttaggaggcagagtct

SEQ ID NO: 2407494 - DNA, 25 bp, Homo sapien
ccacgctggtggataagctcaataa

SEQ ID NO: 2407495 - DNA, 25 bp, Homo sapien
ctttaagatgttgcggggccaaatc

SEQ ID NO: 2407496 - DNA, 25 bp, Homo sapien
gccaaatccaatgccggtgcaggtg

SEQ ID NO: 2407497 - DNA, 25 bp, Homo sapien
aatccaatgccggtgcaggtgtccc

SEQ ID NO: 2407498 - DNA, 25 bp, Homo sapien
tgccggtgcaggtgtcccatatatc

SEQ ID NO: 2407499 - DNA, 25 bp, Homo sapien
tccatcagatcaacgcgacggacac

SEQ ID NO: 2407500 - DNA, 25 bp, Homo sapien
gagcttgtggacttttgcctgcaaa

SEQ ID NO: 2407501 - DNA, 25 bp, Homo sapien
tctcatagaatgtggtgttgtgtac

SEQ ID NO: 2407502 - DNA, 25 bp, Homo sapien
aagggccaaatcggaccgcctctca

SEQ ID NO: 2407503 - DNA, 25 bp, Homo sapien
gaagaagatctctgcgaggcccaga

SEQ ID NO: 2407504 - DNA, 25 bp, Homo sapien
agccagtttatcaccttggaaccag

SEQ ID NO: 2407505 - DNA, 25 bp, Homo sapien
tcactctacgaaaaagcccattggc

SEQ ID NO: 2407506 - DNA, 25 bp, Homo sapien
tataactagccgacaggctagcggc

SEQ ID NO: 2407507 - DNA, 25 bp, Homo sapien
tttgtttaccagtccaggcgaagcg

SEQ ID NO: 2407508 - DNA, 25 bp, Homo sapien
agcgccttggtttgctcccttgacg

SEQ ID NO: 2407509 - DNA, 25 bp, Homo sapien
gtcctgttgccattgcgcctgcgcg

SEQ ID NO: 2407510 - DNA, 25 bp, Homo sapien
gaagcgctgtgtcgcggttctcgcc

SEQ ID NO: 2407511 - DNA, 25 bp, Homo sapien
cccagatagctgtatggctgctctc

SEQ ID NO: 2407512 - DNA, 25 bp, Homo sapien
ttgaacacattaggcaagatcccac

SEQ ID NO: 2407513 - DNA, 25 bp, Homo sapien
ctgatgctcctgttaccactcccca

SEQ ID NO: 2407514 - DNA, 25 bp, Homo sapien
cttgctccgccctatccaccatggg

SEQ ID NO: 2407515 - DNA, 25 bp, Homo sapien
gcttaaaaggttgcatactgagcca

SEQ ID NO: 2407516 - DNA, 25 bp, Homo sapien
tcagcagaatggtgatcactccagg

SEQ ID NO: 2407517 - DNA, 25 bp, Homo sapien
tcattgcctgtgtatggaaaaacca

SEQ ID NO: 2407518 - DNA, 25 bp, Homo sapien
caaaaatccgaggtgcttgggagtt

SEQ ID NO: 2407519 - DNA, 25 bp, Homo sapien
tgttgtagcagtctgtccactcagg

SEQ ID NO: 2407520 - DNA, 25 bp, Homo sapien
tatgtttgaattgctggtgggccga

SEQ ID NO: 2407521 - DNA, 25 bp, Homo sapien
acatctcgatgggtccctttactcc

SEQ ID NO: 2407522 - DNA, 25 bp, Homo sapien
tgggccgagtcctccacatctcgat

SEQ ID NO: 2407523 - DNA, 25 bp, Homo sapien
tattgaagaatcctctgttagatga

SEQ ID NO: 2407524 - DNA, 25 bp, Homo sapien
tctgttagatgaaaaagcccacgtg

SEQ ID NO: 2407525 - DNA, 25 bp, Homo sapien
atgttgttgtgtttttaaccttctg

SEQ ID NO: 2407526 - DNA, 25 bp, Homo sapien
gatgaaaaagcccacgtgactgcat

SEQ ID NO: 2407527 - DNA, 25 bp, Homo sapien
tctttttcgagaatagctgctttac

SEQ ID NO: 2407528 - DNA, 25 bp, Homo sapien
tgtagagtacagaattagacccgtt

SEQ ID NO: 2407529 - DNA, 25 bp, Homo sapien
gctgctccgcatgcctctttatgaa

SEQ ID NO: 2407530 - DNA, 25 bp, Homo sapien
taatgccagcaatcgatttttccag

SEQ ID NO: 2407531 - DNA, 25 bp, Homo sapien
aggataattctaggccatcttaatc

SEQ ID NO: 2407532 - DNA, 25 bp, Homo sapien
taaggataattctaggccatcttaa

SEQ ID NO: 2407533 - DNA, 25 bp, Homo sapien
ataattctaggccatcttaatctct

SEQ ID NO: 2407534 - DNA, 25 bp, Homo sapien
cttttaaggataattctaggccatc

SEQ ID NO: 2407535 - DNA, 25 bp, Homo sapien
catcatctccaaagagatttgaaga

SEQ ID NO: 2407536 - DNA, 25 bp, Homo sapien
gatttgaagagattggactcaggct

SEQ ID NO: 2407537 - DNA, 25 bp, Homo sapien
ttgaagagattggactcaggctcat

SEQ ID NO: 2407538 - DNA, 25 bp, Homo sapien
gagatttgaagagattggactcagg

SEQ ID NO: 2407539 - DNA, 25 bp, Homo sapien
tatcccacaagaggttgactttctg

SEQ ID NO: 2407540 - DNA, 25 bp, Homo sapien
gaaatggcatcgaggcctgtgtcct

SEQ ID NO: 2407541 - DNA, 25 bp, Homo sapien
gctacaatagccataagcagcaaca

SEQ ID NO: 2407542 - DNA, 25 bp, Homo sapien
gcaacttatgatggaggaaatggca

SEQ ID NO: 2407543 - DNA, 25 bp, Homo sapien
tggacgaactcagcgagcagctgga

SEQ ID NO: 2407544 - DNA, 25 bp, Homo sapien
gattcagaaactggccgagagcctg

SEQ ID NO: 2407545 - DNA, 25 bp, Homo sapien
cagctggagtctcgggttcagctct

SEQ ID NO: 2407546 - DNA, 25 bp, Homo sapien
tctttggctcacgtggcttcctcat

SEQ ID NO: 2407547 - DNA, 25 bp, Homo sapien
cagtgtctcaccgtatgaacaaggg

SEQ ID NO: 2407548 - DNA, 25 bp, Homo sapien
tctgggtggttctgcggcacactaa

SEQ ID NO: 2407549 - DNA, 25 bp, Homo sapien
ggctcatatagtgtagtccctggaa

SEQ ID NO: 2407550 - DNA, 25 bp, Homo sapien
tcagagtcgttcacagatgaccaag

SEQ ID NO: 2407551 - DNA, 25 bp, Homo sapien
ggccagatgctagcattttagatca

SEQ ID NO: 2407552 - DNA, 25 bp, Homo sapien
tagaattaaactgggcacttttgga

SEQ ID NO: 2407553 - DNA, 25 bp, Homo sapien
ttccaatgcctaagctattccctag

SEQ ID NO: 2407554 - DNA, 25 bp, Homo sapien
tggcataaaggtacaaccattccct

SEQ ID NO: 2407555 - DNA, 25 bp, Homo sapien
aagatcatccatcgccttatgtgtg

SEQ ID NO: 2407556 - DNA, 25 bp, Homo sapien
catgtcaagcaatcagccaacgtgg

SEQ ID NO: 2407557 - DNA, 25 bp, Homo sapien
gattggagcctctatcaagatttag

SEQ ID NO: 2407558 - DNA, 25 bp, Homo sapien
gctttgatgcacttgccctcgggca

SEQ ID NO: 2407559 - DNA, 25 bp, Homo sapien
caggcacaagccacctgcctggccg

SEQ ID NO: 2407560 - DNA, 25 bp, Homo sapien
tgattttctaatgggctatgcacag

SEQ ID NO: 2407561 - DNA, 25 bp, Homo sapien
ggacaggcatttgcgttaccaggca

SEQ ID NO: 2407562 - DNA, 25 bp, Homo sapien
cacttaattgggaagaaactaccag

SEQ ID NO: 2407563 - DNA, 25 bp, Homo sapien
cctcaggtatgatgtggaactcttc

SEQ ID NO: 2407564 - DNA, 25 bp, Homo sapien
tatgaaggctcgagttctgctgttc

SEQ ID NO: 2407565 - DNA, 25 bp, Homo sapien
agaagaaacgctcgcgagaggatgc

SEQ ID NO: 2407566 - DNA, 25 bp, Homo sapien
gatgcccatgacctgtaattgtaaa

SEQ ID NO: 2407567 - DNA, 25 bp, Homo sapien
gtcaaggactaggttgatgatgccc

SEQ ID NO: 2407568 - DNA, 25 bp, Homo sapien
gaggcagactccttgtatgactaca

SEQ ID NO: 2407569 - DNA, 25 bp, Homo sapien
caagaagatctgctaggttgaccca

SEQ ID NO: 2407570 - DNA, 25 bp, Homo sapien
tccctctgggatgttgatgaagcca

SEQ ID NO: 2407571 - DNA, 25 bp, Homo sapien
gagccccgaagtaaaggcaagttca

SEQ ID NO: 2407572 - DNA, 25 bp, Homo sapien
tccaatggtggagaaacatctggtc

SEQ ID NO: 2407573 - DNA, 25 bp, Homo sapien
gtattgtaggttcagccaccaccag

SEQ ID NO: 2407574 - DNA, 25 bp, Homo sapien
tcagtcttctgactgtagactttgc

SEQ ID NO: 2407575 - DNA, 25 bp, Homo sapien
ttgctgtgacggcagaagtggtatt

SEQ ID NO: 2407576 - DNA, 25 bp, Homo sapien
ggcaccatagcggatcctgtattta

SEQ ID NO: 2407577 - DNA, 25 bp, Homo sapien
tctggaaggaggcaccatagcggat

SEQ ID NO: 2407578 - DNA, 25 bp, Homo sapien
gaaggaggcaccatagcggatcctg

SEQ ID NO: 2407579 - DNA, 25 bp, Homo sapien
ggaggcaccatagcggatcctgtat

SEQ ID NO: 2407580 - DNA, 25 bp, Homo sapien
acaattccaactttattggtgcatt

SEQ ID NO: 2407581 - DNA, 25 bp, Homo sapien
gttacggcctgagtgtggagtgggc

SEQ ID NO: 2407582 - DNA, 25 bp, Homo sapien
tgcggttacggcctgagtgtggagt

SEQ ID NO: 2407583 - DNA, 25 bp, Homo sapien
caacccccttctattgtgagggagt

SEQ ID NO: 2407584 - DNA, 25 bp, Homo sapien
tcagaatgtgcggttacggcctgag

SEQ ID NO: 2407585 - DNA, 25 bp, Homo sapien
ttccatactggttactgcccatact

SEQ ID NO: 2407586 - DNA, 25 bp, Homo sapien
ccatactggttactgcccatactgg

SEQ ID NO: 2407587 - DNA, 25 bp, Homo sapien
atactggttactgcccatactggtc

SEQ ID NO: 2407588 - DNA, 25 bp, Homo sapien
tcttccatactggttactgcccata

SEQ ID NO: 2407589 - DNA, 25 bp, Homo sapien
gaagaatggaaaggttatgtggtcc

SEQ ID NO: 2407590 - DNA, 25 bp, Homo sapien
tgaacatctccttcccggtcactgg

SEQ ID NO: 2407591 - DNA, 25 bp, Homo sapien
aagctgaacatctccttcccggtca

SEQ ID NO: 2407592 - DNA, 25 bp, Homo sapien
tggaaaggttatgtggtccgaatca

SEQ ID NO: 2407593 - DNA, 25 bp, Homo sapien
ttgtcctgttacctaccctcaaaga

SEQ ID NO: 2407594 - DNA, 25 bp, Homo sapien
tcagatcccaggtcaagcatatcct

SEQ ID NO: 2407595 - DNA, 25 bp, Homo sapien
gatgttaatgtcagcttacgttgag

SEQ ID NO: 2407596 - DNA, 25 bp, Homo sapien
ttttagaggctatcaccacacgctg

SEQ ID NO: 2407597 - DNA, 25 bp, Homo sapien
gaatttacagattgggaagccgaag

SEQ ID NO: 2407598 - DNA, 25 bp, Homo sapien
aagtttggaagatgtgtcagcctga

SEQ ID NO: 2407599 - DNA, 25 bp, Homo sapien
ggtttagccacctgcccaagattgt

SEQ ID NO: 2407600 - DNA, 25 bp, Homo sapien
tatgttctcgtaactcctctcagag

SEQ ID NO: 2407601 - DNA, 25 bp, Homo sapien
caagcgcgctgataaccactttaaa

SEQ ID NO: 2407602 - DNA, 25 bp, Homo sapien
aataatccagattagtttaccaagc

SEQ ID NO: 2407603 - DNA, 25 bp, Homo sapien
taccaagcgcgctgataaccacttt

SEQ ID NO: 2407604 - DNA, 25 bp, Homo sapien
gattagtttaccaagcgcgctgata

SEQ ID NO: 2407605 - DNA, 25 bp, Homo sapien
acaaagacgagtttcggtccgattg

SEQ ID NO: 2407606 - DNA, 25 bp, Homo sapien
caggatcgttccacacgtaaacaaa

SEQ ID NO: 2407607 - DNA, 25 bp, Homo sapien
gagtttcggtccgattggcttgatc

SEQ ID NO: 2407608 - DNA, 25 bp, Homo sapien
cactccaggatcgttccacacgtaa

SEQ ID NO: 2407609 - DNA, 25 bp, Homo sapien
ttggctttcacgtggctttggctgg

SEQ ID NO: 2407610 - DNA, 25 bp, Homo sapien
ccttggctttcacgtggctttggct

SEQ ID NO: 2407611 - DNA, 25 bp, Homo sapien
agcctggcttcccatacggcagtgg

SEQ ID NO: 2407612 - DNA, 25 bp, Homo sapien
cctttttctgaagcctggcttccca

SEQ ID NO: 2407613 - DNA, 25 bp, Homo sapien
ttctcttgatgtgtgggcggtcagt

SEQ ID NO: 2407614 - DNA, 25 bp, Homo sapien
tagatctagaagcccatcccttttc

SEQ ID NO: 2407615 - DNA, 25 bp, Homo sapien
gagttttgggaattagatctagaag

SEQ ID NO: 2407616 - DNA, 25 bp, Homo sapien
ggtgtgccttgagttgctcagaaac

SEQ ID NO: 2407617 - DNA, 25 bp, Homo sapien
gttcattcctgaaggggaacacttc

SEQ ID NO: 2407618 - DNA, 25 bp, Homo sapien
gggttcggccgaatcagccactgct

SEQ ID NO: 2407619 - DNA, 25 bp, Homo sapien
cttcagctacttcagacacaatggg

SEQ ID NO: 2407620 - DNA, 25 bp, Homo sapien
tgttgaagggttcggccgaatcagc

SEQ ID NO: 2407621 - DNA, 25 bp, Homo sapien
agtgaagagggtctcgtcctcatac

SEQ ID NO: 2407622 - DNA, 25 bp, Homo sapien
gtgaagagggtctcgtcctcatact

SEQ ID NO: 2407623 - DNA, 25 bp, Homo sapien
tgaagagggtctcgtcctcatactc

SEQ ID NO: 2407624 - DNA, 25 bp, Homo sapien
aagtgaagagggtctcgtcctcata

SEQ ID NO: 2407625 - DNA, 25 bp, Homo sapien
gctcctaatctcagacccaaagtgc

SEQ ID NO: 2407626 - DNA, 25 bp, Homo sapien
ccacctgcggccactaagataggag

SEQ ID NO: 2407627 - DNA, 25 bp, Homo sapien
tggccaggcgctcctaatctcagac

SEQ ID NO: 2407628 - DNA, 25 bp, Homo sapien
aaaacctcaggattcatgctttcct

SEQ ID NO: 2407629 - DNA, 25 bp, Homo sapien
tgttcttgaggcaaacaccacatca

SEQ ID NO: 2407630 - DNA, 25 bp, Homo sapien
tctataaggccctgagactcagcac

SEQ ID NO: 2407631 - DNA, 25 bp, Homo sapien
tcctgtctgtccagtaccagaactg

SEQ ID NO: 2407632 - DNA, 25 bp, Homo sapien
cagctgcgctggaagaggagcctat

SEQ ID NO: 2407633 - DNA, 25 bp, Homo sapien
cagtgaagtgcacagggcctgagtt

SEQ ID NO: 2407634 - DNA, 25 bp, Homo sapien
ccacattcacggtgtagcctgggag

SEQ ID NO: 2407635 - DNA, 25 bp, Homo sapien
gctcgccgcccttgaaggaaatagg

SEQ ID NO: 2407636 - DNA, 25 bp, Homo sapien
tttcctgctagacaacaccctggtg

SEQ ID NO: 2407637 - DNA, 25 bp, Homo sapien
tagatttaccgcatttacggctgca

SEQ ID NO: 2407638 - DNA, 25 bp, Homo sapien
taagtgggcatggtctcctaatgga

SEQ ID NO: 2407639 - DNA, 25 bp, Homo sapien
cactggcctgaatctacactggaag

SEQ ID NO: 2407640 - DNA, 25 bp, Homo sapien
ggaattctttcagacctcactagca

SEQ ID NO: 2407641 - DNA, 25 bp, Homo sapien
tctttccccggaaatggcatcatct

SEQ ID NO: 2407642 - DNA, 25 bp, Homo sapien
caactttctgtgctcgagtgattct

SEQ ID NO: 2407643 - DNA, 25 bp, Homo sapien
gaggacagggtgtcaagaacagcat

SEQ ID NO: 2407644 - DNA, 25 bp, Homo sapien
actatatgggccaggcagatctcga

SEQ ID NO: 2407645 - DNA, 25 bp, Homo sapien
tgtgagatgcgaaatagagcgtgtc

SEQ ID NO: 2407646 - DNA, 25 bp, Homo sapien
tctcattttaggctgaggccgtcca

SEQ ID NO: 2407647 - DNA, 25 bp, Homo sapien
cctttgacctaaacgggcgatgatg

SEQ ID NO: 2407648 - DNA, 25 bp, Homo sapien
cactagatggcgctgacacttcagg

SEQ ID NO: 2407649 - DNA, 25 bp, Homo sapien
tctcccttctgcgtgtaagccatgg

SEQ ID NO: 2407650 - DNA, 25 bp, Homo sapien
catccccatgagacaagactgatgg

SEQ ID NO: 2407651 - DNA, 25 bp, Homo sapien
gattgcaaagcaaggcaaagcgttc

SEQ ID NO: 2407652 - DNA, 25 bp, Homo sapien
gaggacagcttctggttaaacacag

SEQ ID NO: 2407653 - DNA, 25 bp, Homo sapien
ccccgtgggctatcagggctatgct

SEQ ID NO: 2407654 - DNA, 25 bp, Homo sapien
tgactcttcattggcagcgtgactc

SEQ ID NO: 2407655 - DNA, 25 bp, Homo sapien
tatgctacccaggacggtctgctgg

SEQ ID NO: 2407656 - DNA, 25 bp, Homo sapien
ctcaaaatggtggtcttctggtgga

SEQ ID NO: 2407657 - DNA, 25 bp, Homo sapien
ttagtttagcctgtgggatgaaaca

SEQ ID NO: 2407658 - DNA, 25 bp, Homo sapien
ttgctgggggcttagtttagcctgt

SEQ ID NO: 2407659 - DNA, 25 bp, Homo sapien
cctgtgggatgaaacactcttgtgt

SEQ ID NO: 2407660 - DNA, 25 bp, Homo sapien
tttagcctgtgggatgaaacactct

SEQ ID NO: 2407661 - DNA, 25 bp, Homo sapien
tgaatgggagtaccatatgaagtta

SEQ ID NO: 2407662 - DNA, 25 bp, Homo sapien
tatgaagttaatgctacatcctcct

SEQ ID NO: 2407663 - DNA, 25 bp, Homo sapien
gcggctgaatgggagtaccatatga

SEQ ID NO: 2407664 - DNA, 25 bp, Homo sapien
ctgcggctgaatgggagtaccatat

SEQ ID NO: 2407665 - DNA, 25 bp, Homo sapien
tcctactgcatgatttttctcctgc

SEQ ID NO: 2407666 - DNA, 25 bp, Homo sapien
tctcctgtaggagcacctccctgct

SEQ ID NO: 2407667 - DNA, 25 bp, Homo sapien
tcctgcttctcctgtaggagcacct

SEQ ID NO: 2407668 - DNA, 25 bp, Homo sapien
tcatcctactgcatgatttttctcc

SEQ ID NO: 2407669 - DNA, 25 bp, Homo sapien
agagcaatgcagacgaccgggtcgt

SEQ ID NO: 2407670 - DNA, 25 bp, Homo sapien
gaaaacccatgcgttggtgaccaga

SEQ ID NO: 2407671 - DNA, 25 bp, Homo sapien
gggcactcctgtctacacgatctgt

SEQ ID NO: 2407672 - DNA, 25 bp, Homo sapien
cgatgtacagcagcaggaaaaccca

SEQ ID NO: 2407673 - DNA, 25 bp, Homo sapien
gcgggttgcctctcaggagcatgga

SEQ ID NO: 2407674 - DNA, 25 bp, Homo sapien
ctgcgggttgcctctcaggagcatg

SEQ ID NO: 2407675 - DNA, 25 bp, Homo sapien
ggttgcctctcaggagcatggagat

SEQ ID NO: 2407676 - DNA, 25 bp, Homo sapien
ttgcctctcaggagcatggagatcc

SEQ ID NO: 2407677 - DNA, 25 bp, Homo sapien
gaaccagcttcactagattggaggc

SEQ ID NO: 2407678 - DNA, 25 bp, Homo sapien
cgatgatgaaggcaaaagcgagtcc

SEQ ID NO: 2407679 - DNA, 25 bp, Homo sapien
gcacagaattgtcgtccaggagaag

SEQ ID NO: 2407680 - DNA, 25 bp, Homo sapien
gcagaattgtgaccacgatgccaag

SEQ ID NO: 2407681 - DNA, 25 bp, Homo sapien
ctcaccagaatggttttctgatgcc

SEQ ID NO: 2407682 - DNA, 25 bp, Homo sapien
ggtgacttatgggtgtggacctcac

SEQ ID NO: 2407683 - DNA, 25 bp, Homo sapien
tgacttatgggtgtggacctcacca

SEQ ID NO: 2407684 - DNA, 25 bp, Homo sapien
gtggacctcaccagaatggttttct

SEQ ID NO: 2407685 - DNA, 25 bp, Homo sapien
tgtccactctggaagcttaggctgt

SEQ ID NO: 2407686 - DNA, 25 bp, Homo sapien
taggctgtagtgctggcaaagttgt

SEQ ID NO: 2407687 - DNA, 25 bp, Homo sapien
tgtaactgccaatgagtaagaaaga

SEQ ID NO: 2407688 - DNA, 25 bp, Homo sapien
caaatgggcggaagaaccgtaggct

SEQ ID NO: 2407689 - DNA, 25 bp, Homo sapien
ctgaatatatgtatttcgacagagg

SEQ ID NO: 2407690 - DNA, 25 bp, Homo sapien
tgaagaccccaaaccagtgtctggt

SEQ ID NO: 2407691 - DNA, 25 bp, Homo sapien
tggtttcaaggtgcttgtgatctgg

SEQ ID NO: 2407692 - DNA, 25 bp, Homo sapien
tcgacagaggactgctgaagacccc

SEQ ID NO: 2407693 - DNA, 25 bp, Homo sapien
ataagacacattctgctcacaccgg

SEQ ID NO: 2407694 - DNA, 25 bp, Homo sapien
tcttagaatggttgaggctttgctg

SEQ ID NO: 2407695 - DNA, 25 bp, Homo sapien
tccgtggagcctttgcagatacatc

SEQ ID NO: 2407696 - DNA, 25 bp, Homo sapien
gacaccctggtgtgaatccacaatc

SEQ ID NO: 2407697 - DNA, 25 bp, Homo sapien
cgaagtttgattatgcaatagctct

SEQ ID NO: 2407698 - DNA, 25 bp, Homo sapien
gaagtttgattatgcaatagctctt

SEQ ID NO: 2407699 - DNA, 25 bp, Homo sapien
ccgaagtttgattatgcaatagctc

SEQ ID NO: 2407700 - DNA, 25 bp, Homo sapien
gacatgtaataaggcctgtgtggct

SEQ ID NO: 2407701 - DNA, 25 bp, Homo sapien
ggctgcacttttgtcttggctccaa

SEQ ID NO: 2407702 - DNA, 25 bp, Homo sapien
agtatcacgttcctgctcaaagctg

SEQ ID NO: 2407703 - DNA, 25 bp, Homo sapien
tgggagcctgtggaatcctcagctt

SEQ ID NO: 2407704 - DNA, 25 bp, Homo sapien
gggctctgctccagctcagctgcca

SEQ ID NO: 2407705 - DNA, 25 bp, Homo sapien
ggctctgctccagctcagctgccat

SEQ ID NO: 2407706 - DNA, 25 bp, Homo sapien
tgagaaggatgctgcatatcttggc

SEQ ID NO: 2407707 - DNA, 25 bp, Homo sapien
tctggtctatcgcagaattttctac

SEQ ID NO: 2407708 - DNA, 25 bp, Homo sapien
tgaaagatcaggcacaaatcacatt

SEQ ID NO: 2407709 - DNA, 25 bp, Homo sapien
agaaaagctgccaggatttttctgg

SEQ ID NO: 2407710 - DNA, 25 bp, Homo sapien
aagttggttaagttggacttgcagc

SEQ ID NO: 2407711 - DNA, 25 bp, Homo sapien
tggcagtaactgactttgaaggaaa

SEQ ID NO: 2407712 - DNA, 25 bp, Homo sapien
aagagacttagtatatggaacatgc

SEQ ID NO: 2407713 - DNA, 25 bp, Homo sapien
gacttgcagctggaacttgggaagc

SEQ ID NO: 2407714 - DNA, 25 bp, Homo sapien
gtaagttcttggttcagtgggtcac

SEQ ID NO: 2407715 - DNA, 25 bp, Homo sapien
agccagatctcattgcgccgtccgt

SEQ ID NO: 2407716 - DNA, 25 bp, Homo sapien
gggtcataacccgtgcagaagtaga

SEQ ID NO: 2407717 - DNA, 25 bp, Homo sapien
ggcttgtgctacgtagtctgcttcc

SEQ ID NO: 2407718 - DNA, 25 bp, Homo sapien
cacgcagacgggtggcttgtgctac

SEQ ID NO: 2407719 - DNA, 25 bp, Homo sapien
gaaaggacatgacctctgagagagg

SEQ ID NO: 2407720 - DNA, 25 bp, Homo sapien
tggttacgaaaggacatgacctctg

SEQ ID NO: 2407721 - DNA, 25 bp, Homo sapien
agcaagggctggttacgaaaggaca

SEQ ID NO: 2407722 - DNA, 25 bp, Homo sapien
ggctggttacgaaaggacatgacct

SEQ ID NO: 2407723 - DNA, 25 bp, Homo sapien
catgtagctgagtgttgtggtgcat

SEQ ID NO: 2407724 - DNA, 25 bp, Homo sapien
actgatcaaggccaggagttgaggc

SEQ ID NO: 2407725 - DNA, 25 bp, Homo sapien
gagttgaggctgcactgtgctatga

SEQ ID NO: 2407726 - DNA, 25 bp, Homo sapien
gaggcaggaggactgatcaaggcca

SEQ ID NO: 2407727 - DNA, 25 bp, Homo sapien
caaacaaactgggtgggctatggga

SEQ ID NO: 2407728 - DNA, 25 bp, Homo sapien
aatcccctggtgtatgaagggagcc

SEQ ID NO: 2407729 - DNA, 25 bp, Homo sapien
gagcacaataacagtgggcccactg

SEQ ID NO: 2407730 - DNA, 25 bp, Homo sapien
aattcctgcgcgcacttgaaggtga

SEQ ID NO: 2407731 - DNA, 25 bp, Homo sapien
tgatgctggcaatgaatagtatgac

SEQ ID NO: 2407732 - DNA, 25 bp, Homo sapien
cagagcttccaacaaacagaggctg

SEQ ID NO: 2407733 - DNA, 25 bp, Homo sapien
aatgaatagtatgacaaccttctgt

SEQ ID NO: 2407734 - DNA, 25 bp, Homo sapien
cagaggctgtggagggttgagagga

SEQ ID NO: 2407735 - DNA, 25 bp, Homo sapien
tgttaaaaattccatggagccaggc

SEQ ID NO: 2407736 - DNA, 25 bp, Homo sapien
caagtggcgagttgaggaatgatca

SEQ ID NO: 2407737 - DNA, 25 bp, Homo sapien
gctgtgtgagaactccgtgttaaaa

SEQ ID NO: 2407738 - DNA, 25 bp, Homo sapien
aatgctcatttgactatgcagtgac

SEQ ID NO: 2407739 - DNA, 25 bp, Homo sapien
cactcaatcagggacaatcagacac

SEQ ID NO: 2407740 - DNA, 25 bp, Homo sapien
taaaaatgtaccatcagccaggtgt

SEQ ID NO: 2407741 - DNA, 25 bp, Homo sapien
cactcaaaaaacgaagatgcagacc

SEQ ID NO: 2407742 - DNA, 25 bp, Homo sapien
tggcctctaatggaacaagacatct

SEQ ID NO: 2407743 - DNA, 25 bp, Homo sapien
gaaaatgaccccacatgaagtcctg

SEQ ID NO: 2407744 - DNA, 25 bp, Homo sapien
tgagcggagccaaaccacctatgat

SEQ ID NO: 2407745 - DNA, 25 bp, Homo sapien
gcttaagctcgtcccatcaatttgg

SEQ ID NO: 2407746 - DNA, 25 bp, Homo sapien
tgtgtccacgaatccagaccatggc

SEQ ID NO: 2407747 - DNA, 25 bp, Homo sapien
ctggtgggtcgctttgaaattggtt

SEQ ID NO: 2407748 - DNA, 25 bp, Homo sapien
aaggaaatagggactgtcatcccca

SEQ ID NO: 2407749 - DNA, 25 bp, Homo sapien
atagacagtgatgccttcccgttcc

SEQ ID NO: 2407750 - DNA, 25 bp, Homo sapien
ccgttcctcaatcttaacgcttttg

SEQ ID NO: 2407751 - DNA, 25 bp, Homo sapien
aagtgagaccttgcaaagctggtcc

SEQ ID NO: 2407752 - DNA, 25 bp, Homo sapien
gagaccttgcaaagctggtccccga

SEQ ID NO: 2407753 - DNA, 25 bp, Homo sapien
gatgaagtgagaccttgcaaagctg

SEQ ID NO: 2407754 - DNA, 25 bp, Homo sapien
tgcaaagctggtccccgagaccaga

SEQ ID NO: 2407755 - DNA, 25 bp, Homo sapien
tgtggcaaatttgccgccttcacag

SEQ ID NO: 2407756 - DNA, 25 bp, Homo sapien
cccgcatactttgcgaccttgggca

SEQ ID NO: 2407757 - DNA, 25 bp, Homo sapien
gcctcatccacaggcttatctgtca

SEQ ID NO: 2407758 - DNA, 25 bp, Homo sapien
attgcttcccgtagagcctcatcca

SEQ ID NO: 2407759 - DNA, 25 bp, Homo sapien
gcgagttcttgatcatgcccaacat

SEQ ID NO: 2407760 - DNA, 25 bp, Homo sapien
tccgaacagcgagttcttgatcatg

SEQ ID NO: 2407761 - DNA, 25 bp, Homo sapien
gtctctacgcttccgaacagcgagt

SEQ ID NO: 2407762 - DNA, 25 bp, Homo sapien
aaggccacgtctctacgcttccgaa

SEQ ID NO: 2407763 - DNA, 25 bp, Homo sapien
acgggcagcgaccaccggcggcagg

SEQ ID NO: 2407764 - DNA, 25 bp, Homo sapien
tggcagggcggcaaggcggcgggac

SEQ ID NO: 2407765 - DNA, 25 bp, Homo sapien
gacgcacgggaggacgtgaggtggc

SEQ ID NO: 2407766 - DNA, 25 bp, Homo sapien
gttgtagccgagacgctcccgacgc

SEQ ID NO: 2407767 - DNA, 25 bp, Homo sapien
tccctgtcttggtagctgtccctct

SEQ ID NO: 2407768 - DNA, 25 bp, Homo sapien
tccggtcctctacccgaaggctcga

SEQ ID NO: 2407769 - DNA, 25 bp, Homo sapien
gctcgatcccgctggtacagcggcg

SEQ ID NO: 2407770 - DNA, 25 bp, Homo sapien
gccaggctccctgtcttggtagctg

SEQ ID NO: 2407771 - DNA, 25 bp, Homo sapien
gccgaaagccggagcctgtggcggc

SEQ ID NO: 2407772 - DNA, 25 bp, Homo sapien
cacacggcggcgcagtgatggatgt

SEQ ID NO: 2407773 - DNA, 25 bp, Homo sapien
atgttaacagcagcggccacccgga

SEQ ID NO: 2407774 - DNA, 25 bp, Homo sapien
cggcttcttgggcagcgccacacgg

SEQ ID NO: 2407775 - DNA, 25 bp, Homo sapien
gctctttcctcctgccggaggtggg

SEQ ID NO: 2407776 - DNA, 25 bp, Homo sapien
tgctctttcctcctgccggaggtgg

SEQ ID NO: 2407777 - DNA, 25 bp, Homo sapien
ctctttcctcctgccggaggtgggg

SEQ ID NO: 2407778 - DNA, 25 bp, Homo sapien
cgcggtctccgggacgccgcatctg

SEQ ID NO: 2407779 - DNA, 25 bp, Homo sapien
tccgggacgccgcatctgctgagcg

SEQ ID NO: 2407780 - DNA, 25 bp, Homo sapien
gtggcgccgaaccggtcgcggtctc

SEQ ID NO: 2407781 - DNA, 25 bp, Homo sapien
cgaggtgacggccagcccggcgccc

SEQ ID NO: 2407782 - DNA, 25 bp, Homo sapien
tcatctctctgcgatcgcgggcaac

SEQ ID NO: 2407783 - DNA, 25 bp, Homo sapien
tgtgatcggctctgtcctgacgctc

SEQ ID NO: 2407784 - DNA, 25 bp, Homo sapien
gcaactgcctggtggtatctccgtg

SEQ ID NO: 2407785 - DNA, 25 bp, Homo sapien
agaaagggccgagaaagttgtgatc

SEQ ID NO: 2407786 - DNA, 25 bp, Homo sapien
tcatcagtgtcaccgacctcatcgg

SEQ ID NO: 2407787 - DNA, 25 bp, Homo sapien
ctgatcgtgtccatggcgctggcca

SEQ ID NO: 2407788 - DNA, 25 bp, Homo sapien
tgtaacgtcttctccatgaatgtca

SEQ ID NO: 2407789 - DNA, 25 bp, Homo sapien
gctgcacggcctggatcttgacctt

SEQ ID NO: 2407790 - DNA, 25 bp, Homo sapien
gacagcagtagtcaccctgaatggc

SEQ ID NO: 2407791 - DNA, 25 bp, Homo sapien
gacccttctgtctatggcactgcct

SEQ ID NO: 2407792 - DNA, 25 bp, Homo sapien
gaagagtgtgcaaacctttcgagac

SEQ ID NO: 2407793 - DNA, 25 bp, Homo sapien
gaaacagaaagcagcgactaccttg

SEQ ID NO: 2407794 - DNA, 25 bp, Homo sapien
gagatgggggcataaacgtgttcat

SEQ ID NO: 2407795 - DNA, 25 bp, Homo sapien
tatggaaatagtgtgggaataatgg

SEQ ID NO: 2407796 - DNA, 25 bp, Homo sapien
catgaaaggttgtgatgcttctgga

SEQ ID NO: 2407797 - DNA, 25 bp, Homo sapien
taactgtatgttatatggaaatagt

SEQ ID NO: 2407798 - DNA, 25 bp, Homo sapien
tcgaagatgcttatttcagaaatgt

SEQ ID NO: 2407799 - DNA, 25 bp, Homo sapien
tgtgaatcgcacaacccacacagtg

SEQ ID NO: 2407800 - DNA, 25 bp, Homo sapien
cataggcatcgaagatgcttatttc

SEQ ID NO: 2407801 - DNA, 25 bp, Homo sapien
cacaacccacacagtgatgcagctt

SEQ ID NO: 2407802 - DNA, 25 bp, Homo sapien
agaggccattagagaatttcttatc

SEQ ID NO: 2407803 - DNA, 25 bp, Homo sapien
tgatcttgagatagaaatttcagac

SEQ ID NO: 2407804 - DNA, 25 bp, Homo sapien
tttcagacacgaagggacagaggcc

SEQ ID NO: 2407805 - DNA, 25 bp, Homo sapien
tcctcatcatacagtaccaggtatg

SEQ ID NO: 2407806 - DNA, 25 bp, Homo sapien
tggcaccagtgtagcagagggtact

SEQ ID NO: 2407807 - DNA, 25 bp, Homo sapien
ggtactaccctcagcttcagataag

SEQ ID NO: 2407808 - DNA, 25 bp, Homo sapien
taagtcagtggagttcagatttgtc

SEQ ID NO: 2407809 - DNA, 25 bp, Homo sapien
tctgctgatagatgtaggaatggct

SEQ ID NO: 2407810 - DNA, 25 bp, Homo sapien
tggtggacgtcttttacttcacgct

SEQ ID NO: 2407811 - DNA, 25 bp, Homo sapien
tacttcacgctctcttattgtcttt

SEQ ID NO: 2407812 - DNA, 25 bp, Homo sapien
tcagcctgagtaggacttaaggcaa

SEQ ID NO: 2407813 - DNA, 25 bp, Homo sapien
gaagctggatttgacgcctggctcc

SEQ ID NO: 2407814 - DNA, 25 bp, Homo sapien
ggcagctgaatacccaaaacttggg

SEQ ID NO: 2407815 - DNA, 25 bp, Homo sapien
gcttcatctgaccaatgtgggtgct

SEQ ID NO: 2407816 - DNA, 25 bp, Homo sapien
tggtagcagtagatccaagcatgca

SEQ ID NO: 2407817 - DNA, 25 bp, Homo sapien
caggcattatgacctaacaggaggt

SEQ ID NO: 2407818 - DNA, 25 bp, Homo sapien
tgtgacttccagaacaattcgcgcg

SEQ ID NO: 2407819 - DNA, 25 bp, Homo sapien
tcgcgcgtaccatggaaagttgagc

SEQ ID NO: 2407820 - DNA, 25 bp, Homo sapien
tttctagaagtgaccctgaccctgt

SEQ ID NO: 2407821 - DNA, 25 bp, Homo sapien
tcagcagacgtgtaaggtagggctc

SEQ ID NO: 2407822 - DNA, 25 bp, Homo sapien
ctctacagatgacctaactgcttct

SEQ ID NO: 2407823 - DNA, 25 bp, Homo sapien
tttgaaatcccttgttccgcagctc

SEQ ID NO: 2407824 - DNA, 25 bp, Homo sapien
tccgcagctcggagtagaagtcgac

SEQ ID NO: 2407825 - DNA, 25 bp, Homo sapien
tatgatactggtggtagctggtcaa

SEQ ID NO: 2407826 - DNA, 25 bp, Homo sapien
tgatgtggtaggcagttcgggtttt

SEQ ID NO: 2407827 - DNA, 25 bp, Homo sapien
ggtgatgtggtaggcagttcgggtt

SEQ ID NO: 2407828 - DNA, 25 bp, Homo sapien
tggtgatgtggtaggcagttcgggt

SEQ ID NO: 2407829 - DNA, 25 bp, Homo sapien
gatgtggtaggcagttcgggttttc

SEQ ID NO: 2407830 - DNA, 25 bp, Homo sapien
cagccgacgccatgcagcaggtgaa

SEQ ID NO: 2407831 - DNA, 25 bp, Homo sapien
gtggtgacagccgacgccatgcagc

SEQ ID NO: 2407832 - DNA, 25 bp, Homo sapien
gacagccgacgccatgcagcaggtg

SEQ ID NO: 2407833 - DNA, 25 bp, Homo sapien
ttgaaggtggtgacagccgacgcca

SEQ ID NO: 2407834 - DNA, 25 bp, Homo sapien
tgcagccctgtgtggttgacaggct

SEQ ID NO: 2407835 - DNA, 25 bp, Homo sapien
aggcagggcttcaccgaataagcat

SEQ ID NO: 2407836 - DNA, 25 bp, Homo sapien
ggaagaatggatgtgccctgatgat

SEQ ID NO: 2407837 - DNA, 25 bp, Homo sapien
aatggatgtgccctgatgatgcagc

SEQ ID NO: 2407838 - DNA, 25 bp, Homo sapien
aattccaaacatgtggtctccagtc

SEQ ID NO: 2407839 - DNA, 25 bp, Homo sapien
gtctccagtcttctggacccaagtt

SEQ ID NO: 2407840 - DNA, 25 bp, Homo sapien
gaaggcccagccataattccaaaca

SEQ ID NO: 2407841 - DNA, 25 bp, Homo sapien
gtcgcttggaagacttgtgaataca

SEQ ID NO: 2407842 - DNA, 25 bp, Homo sapien
ccgatgtaggtgatctgcgttccca

SEQ ID NO: 2407843 - DNA, 25 bp, Homo sapien
gcagcaaaggcgctcagtttgagcc

SEQ ID NO: 2407844 - DNA, 25 bp, Homo sapien
ctgatgaattgaagtccgatgtagg

SEQ ID NO: 2407845 - DNA, 25 bp, Homo sapien
tcccagtgagtagcaagtctgttag

SEQ ID NO: 2407846 - DNA, 25 bp, Homo sapien
ctgccagaaaccagaggaagaggga

SEQ ID NO: 2407847 - DNA, 25 bp, Homo sapien
agaaaccagaggaagagggagcgct

SEQ ID NO: 2407848 - DNA, 25 bp, Homo sapien
accagaggaagagggagcgctcacc

SEQ ID NO: 2407849 - DNA, 25 bp, Homo sapien
aaaccagaggaagagggagcgctca

SEQ ID NO: 2407850 - DNA, 25 bp, Homo sapien
tcagaagagaaaagtgggagatcac

SEQ ID NO: 2407851 - DNA, 25 bp, Homo sapien
agaaaagtgggagatcacagtgcag

SEQ ID NO: 2407852 - DNA, 25 bp, Homo sapien
cacagtgcagtttagatccggagag

SEQ ID NO: 2407853 - DNA, 25 bp, Homo sapien
tttagatccggagaggcccaagtca

SEQ ID NO: 2407854 - DNA, 25 bp, Homo sapien
tgtaaattccttatcagacacatac

SEQ ID NO: 2407855 - DNA, 25 bp, Homo sapien
tgccacaaagccccaagggagggga

SEQ ID NO: 2407856 - DNA, 25 bp, Homo sapien
aaccgcttccctccaaatcggagag

SEQ ID NO: 2407857 - DNA, 25 bp, Homo sapien
gtgacatgggccttgcaacgtggca

SEQ ID NO: 2407858 - DNA, 25 bp, Homo sapien
ggcaaattccagtagtcctttctca

SEQ ID NO: 2407859 - DNA, 25 bp, Homo sapien
gcttccctccaaatcggagagtggg

SEQ ID NO: 2407860 - DNA, 25 bp, Homo sapien
ctcttggctggtggtgtaagttcaa

SEQ ID NO: 2407861 - DNA, 25 bp, Homo sapien
gctggtggtgtaagttcaatgaaac

SEQ ID NO: 2407862 - DNA, 25 bp, Homo sapien
ggtgtaagttcaatgaaacttcggc

SEQ ID NO: 2407863 - DNA, 25 bp, Homo sapien
gttcaatgaaacttcggcacctctc

SEQ ID NO: 2407864 - DNA, 25 bp, Homo sapien
cttttgctgccgctgtaccactgga

SEQ ID NO: 2407865 - DNA, 25 bp, Homo sapien
tgtaccactggaccgaagggctcta

SEQ ID NO: 2407866 - DNA, 25 bp, Homo sapien
ccactggaccgaagggctctaaatt

SEQ ID NO: 2407867 - DNA, 25 bp, Homo sapien
tgccgctgtaccactggaccgaagg

SEQ ID NO: 2407868 - DNA, 25 bp, Homo sapien
tttttaattcctcttccatctcgct

SEQ ID NO: 2407869 - DNA, 25 bp, Homo sapien
taattcctcttccatctcgctttta

SEQ ID NO: 2407870 - DNA, 25 bp, Homo sapien
aattcctcttccatctcgcttttag

SEQ ID NO: 2407871 - DNA, 25 bp, Homo sapien
tttaattcctcttccatctcgcttt

SEQ ID NO: 2407872 - DNA, 25 bp, Homo sapien
cattcctccaaacctgaggaacgca

SEQ ID NO: 2407873 - DNA, 25 bp, Homo sapien
ctgaggaacgcacatcgaccagcac

SEQ ID NO: 2407874 - DNA, 25 bp, Homo sapien
tccaaacctgaggaacgcacatcga

SEQ ID NO: 2407875 - DNA, 25 bp, Homo sapien
agctcattcctccaaacctgaggaa

SEQ ID NO: 2407876 - DNA, 25 bp, Homo sapien
tgtgttggtatctccatccagggac

SEQ ID NO: 2407877 - DNA, 25 bp, Homo sapien
tgtgcccacaaaccagtagttgctg

SEQ ID NO: 2407878 - DNA, 25 bp, Homo sapien
cactggcatgtcaaagcacttggct

SEQ ID NO: 2407879 - DNA, 25 bp, Homo sapien
gctccggaaggagaaccggtcatcc

SEQ ID NO: 2407880 - DNA, 25 bp, Homo sapien
gatggcagataggagtgtccgctgg

SEQ ID NO: 2407881 - DNA, 25 bp, Homo sapien
cagataggagtgtccgctggccaga

SEQ ID NO: 2407882 - DNA, 25 bp, Homo sapien
gccagagaaggccttcgagagctcc

SEQ ID NO: 2407883 - DNA, 25 bp, Homo sapien
cagagaaggccttcgagagctccat

SEQ ID NO: 2407884 - DNA, 25 bp, Homo sapien
taatagacaagcacaagtggaaggg

SEQ ID NO: 2407885 - DNA, 25 bp, Homo sapien
ctcagagccgcctcggagatgtggc

SEQ ID NO: 2407886 - DNA, 25 bp, Homo sapien
ggcacaacccgcctctgacattttt

SEQ ID NO: 2407887 - DNA, 25 bp, Homo sapien
atggaagccccgcttcaggagtggt

SEQ ID NO: 2407888 - DNA, 25 bp, Homo sapien
gatgtggggctattgaaacctttgg

SEQ ID NO: 2407889 - DNA, 25 bp, Homo sapien
agaggtagcagtcgggcccagcttc

SEQ ID NO: 2407890 - DNA, 25 bp, Homo sapien
tgtgtggtgcctgtgtaggctggac

SEQ ID NO: 2407891 - DNA, 25 bp, Homo sapien
gacaatagagtttcaaatgcgaggt

SEQ ID NO: 2407892 - DNA, 25 bp, Homo sapien
cataggggaggctgccgaaagaact

SEQ ID NO: 2407893 - DNA, 25 bp, Homo sapien
tgccgaaagaactgaggccccagat

SEQ ID NO: 2407894 - DNA, 25 bp, Homo sapien
gaacctggagggccgtgtcttccag

SEQ ID NO: 2407895 - DNA, 25 bp, Homo sapien
ccacagagccatgggtagggtgtcg

SEQ ID NO: 2407896 - DNA, 25 bp, Homo sapien
ctggaagaaccgaaggatgccatct

SEQ ID NO: 2407897 - DNA, 25 bp, Homo sapien
tgcactccaagtccctttggtttaa

SEQ ID NO: 2407898 - DNA, 25 bp, Homo sapien
tatctcatattctttggagtgcctc

SEQ ID NO: 2407899 - DNA, 25 bp, Homo sapien
tctcatattctttggagtgcctcat

SEQ ID NO: 2407900 - DNA, 25 bp, Homo sapien
agctgttctgggagattacaccaga

SEQ ID NO: 2407901 - DNA, 25 bp, Homo sapien
tgttctgggagattacaccagagag

SEQ ID NO: 2407902 - DNA, 25 bp, Homo sapien
agggaacacgggcatttaataattg

SEQ ID NO: 2407903 - DNA, 25 bp, Homo sapien
aataattgacaaggcaatcagggcc

SEQ ID NO: 2407904 - DNA, 25 bp, Homo sapien
cccatgggaaatacaactccacggt

SEQ ID NO: 2407905 - DNA, 25 bp, Homo sapien
tagatcctcaaatacttcccatggg

SEQ ID NO: 2407906 - DNA, 25 bp, Homo sapien
gttagccaatgtttcctgatgagtt

SEQ ID NO: 2407907 - DNA, 25 bp, Homo sapien
gcttcagtgactcagtagatcctca

SEQ ID NO: 2407908 - DNA, 25 bp, Homo sapien
tcctccgtcggttgagaacggtgtc

SEQ ID NO: 2407909 - DNA, 25 bp, Homo sapien
tgggtcttcctccgtcggttgagaa

SEQ ID NO: 2407910 - DNA, 25 bp, Homo sapien
tctgggtcttcctccgtcggttgag

SEQ ID NO: 2407911 - DNA, 25 bp, Homo sapien
cttcctccgtcggttgagaacggtg

SEQ ID NO: 2407912 - DNA, 25 bp, Homo sapien
cgactgcactgaggattttggccaa

SEQ ID NO: 2407913 - DNA, 25 bp, Homo sapien
tatttacgacccaatgcacgactgc

SEQ ID NO: 2407914 - DNA, 25 bp, Homo sapien
tagtcggagggattccttacaccca

SEQ ID NO: 2407915 - DNA, 25 bp, Homo sapien
ccggtaaagctatgggtcccaggct

SEQ ID NO: 2407916 - DNA, 25 bp, Homo sapien
tgaattagggaagctgcctgaaccc

SEQ ID NO: 2407917 - DNA, 25 bp, Homo sapien
gagatcctaacttccagctggtcaa

SEQ ID NO: 2407918 - DNA, 25 bp, Homo sapien
ccctgtgttggagtgtatgtacgtg

SEQ ID NO: 2407919 - DNA, 25 bp, Homo sapien
cccagaagtgcctcttaagttatcc

SEQ ID NO: 2407920 - DNA, 25 bp, Homo sapien
tctattgttgccaccgctactgggc

SEQ ID NO: 2407921 - DNA, 25 bp, Homo sapien
tctctgagacgagaaagagcttgac

SEQ ID NO: 2407922 - DNA, 25 bp, Homo sapien
caggctccagattttggcaacggga

SEQ ID NO: 2407923 - DNA, 25 bp, Homo sapien
ggtcaaatgctaaacaagccgcaac

SEQ ID NO: 2407924 - DNA, 25 bp, Homo sapien
tctgttctgtctcaatcagttgggt

SEQ ID NO: 2407925 - DNA, 25 bp, Homo sapien
agggatcgctcattcactcttgcag

SEQ ID NO: 2407926 - DNA, 25 bp, Homo sapien
cagttgggtagaatgagtgtttagc

SEQ ID NO: 2407927 - DNA, 25 bp, Homo sapien
tttgagtcagttgagagggatcgct

SEQ ID NO: 2407928 - DNA, 25 bp, Homo sapien
ctccagtgcatggactgtgcttcga

SEQ ID NO: 2407929 - DNA, 25 bp, Homo sapien
tgtgcttcgattgtccccaaacagc

SEQ ID NO: 2407930 - DNA, 25 bp, Homo sapien
gagggatggctgtacagagcactct

SEQ ID NO: 2407931 - DNA, 25 bp, Homo sapien
cagagatgacaatcagctgcgttca

SEQ ID NO: 2407932 - DNA, 25 bp, Homo sapien
ggactagccactgtttcacgcaggg

SEQ ID NO: 2407933 - DNA, 25 bp, Homo sapien
cctgggagcactggccggcatttag

SEQ ID NO: 2407934 - DNA, 25 bp, Homo sapien
actgtttcacgcagggcccctggga

SEQ ID NO: 2407935 - DNA, 25 bp, Homo sapien
gtgtgttcacatggactagccactg

SEQ ID NO: 2407936 - DNA, 25 bp, Homo sapien
gagcttgcttttgcccctcctgttg

SEQ ID NO: 2407937 - DNA, 25 bp, Homo sapien
gatttccgaaagacaacgggcatct

SEQ ID NO: 2407938 - DNA, 25 bp, Homo sapien
aaagacaacgggcatctgagcttgc

SEQ ID NO: 2407939 - DNA, 25 bp, Homo sapien
tctgggagatttccgaaagacaacg

SEQ ID NO: 2407940 - DNA, 25 bp, Homo sapien
ctggcccacagggacaccagcctgg

SEQ ID NO: 2407941 - DNA, 25 bp, Homo sapien
tggcccacagggacaccagcctggg

SEQ ID NO: 2407942 - DNA, 25 bp, Homo sapien
ggacaccagcctgggcccttctcac

SEQ ID NO: 2407943 - DNA, 25 bp, Homo sapien
cagggacaccagcctgggcccttct

SEQ ID NO: 2407944 - DNA, 25 bp, Homo sapien
agccgcggaattccaagccaaacag

SEQ ID NO: 2407945 - DNA, 25 bp, Homo sapien
ttcagaaagctgtatcactcctcca

SEQ ID NO: 2407946 - DNA, 25 bp, Homo sapien
gctgttgctgcccatttgttttgaa

SEQ ID NO: 2407947 - DNA, 25 bp, Homo sapien
cctgggcttgtttccgctgctggca

SEQ ID NO: 2407948 - DNA, 25 bp, Homo sapien
ctgacacagccgcttcttagactca

SEQ ID NO: 2407949 - DNA, 25 bp, Homo sapien
ttcttagactcagggagcagacgct

SEQ ID NO: 2407950 - DNA, 25 bp, Homo sapien
gccgcttcttagactcagggagcag

SEQ ID NO: 2407951 - DNA, 25 bp, Homo sapien
cacagccgcttcttagactcaggga

SEQ ID NO: 2407952 - DNA, 25 bp, Homo sapien
ggaagtaaactgcttgtattaccgc

SEQ ID NO: 2407953 - DNA, 25 bp, Homo sapien
aagtaaactgcttgtattaccgcca

SEQ ID NO: 2407954 - DNA, 25 bp, Homo sapien
gtaaactgcttgtattaccgccaat

SEQ ID NO: 2407955 - DNA, 25 bp, Homo sapien
gaagtaaactgcttgtattaccgcc

SEQ ID NO: 2407956 - DNA, 25 bp, Homo sapien
accacttggtccaaggactggtatt

SEQ ID NO: 2407957 - DNA, 25 bp, Homo sapien
gaccacttggtccaaggactggtat

SEQ ID NO: 2407958 - DNA, 25 bp, Homo sapien
tctgggttgctatcaagaagcacca

SEQ ID NO: 2407959 - DNA, 25 bp, Homo sapien
ccattcagggtctttgacactgagc

SEQ ID NO: 2407960 - DNA, 25 bp, Homo sapien
ctttgccaggagtaggtttccatgc

SEQ ID NO: 2407961 - DNA, 25 bp, Homo sapien
ttcctaagttgctgaccctggcctc

SEQ ID NO: 2407962 - DNA, 25 bp, Homo sapien
agatttttgcaggagccaacctccc

SEQ ID NO: 2407963 - DNA, 25 bp, Homo sapien
gatttttgcaggagccaacctcccc

SEQ ID NO: 2407964 - DNA, 25 bp, Homo sapien
tttttgcaggagccaacctccccca

SEQ ID NO: 2407965 - DNA, 25 bp, Homo sapien
tgctcatatccaatccttcatctgg

SEQ ID NO: 2407966 - DNA, 25 bp, Homo sapien
aatccttcatctggtcctatattga

SEQ ID NO: 2407967 - DNA, 25 bp, Homo sapien
tgcatccaatccctcatccggtccc

SEQ ID NO: 2407968 - DNA, 25 bp, Homo sapien
atctggtcctatattgaatccctca

SEQ ID NO: 2407969 - DNA, 25 bp, Homo sapien
tcctacattcaatccctcatccaac

SEQ ID NO: 2407970 - DNA, 25 bp, Homo sapien
caaatccctcatccgatcctacatt

SEQ ID NO: 2407971 - DNA, 25 bp, Homo sapien
gtccctcatcccgtcctacatcaaa

SEQ ID NO: 2407972 - DNA, 25 bp, Homo sapien
cagtccctcatcccgtcctacatca

SEQ ID NO: 2407973 - DNA, 25 bp, Homo sapien
catccaatccctcatccagtcctat

SEQ ID NO: 2407974 - DNA, 25 bp, Homo sapien
ccgccctacatccaatcgctcatct

SEQ ID NO: 2407975 - DNA, 25 bp, Homo sapien
ctgtcctacatccaatccctcttct

SEQ ID NO: 2407976 - DNA, 25 bp, Homo sapien
cctcatcccgccctacatccaatcg

SEQ ID NO: 2407977 - DNA, 25 bp, Homo sapien
gcgaactgacatacccttgcttatc

SEQ ID NO: 2407978 - DNA, 25 bp, Homo sapien
ctgtgatcagcgaactgacataccc

SEQ ID NO: 2407979 - DNA, 25 bp, Homo sapien
tcagcgaactgacatacccttgctt

SEQ ID NO: 2407980 - DNA, 25 bp, Homo sapien
tgatcagcgaactgacatacccttg

SEQ ID NO: 2407981 - DNA, 25 bp, Homo sapien
tcagcgccctccttagtactgccat

SEQ ID NO: 2407982 - DNA, 25 bp, Homo sapien
gcactcatcaccctcagcgccctcc

SEQ ID NO: 2407983 - DNA, 25 bp, Homo sapien
cctcagcgccctccttagtactgcc

SEQ ID NO: 2407984 - DNA, 25 bp, Homo sapien
ctgcactcatcaccctcagcgccct

SEQ ID NO: 2407985 - DNA, 25 bp, Homo sapien
ttctttctgtcccatagaccagcct

SEQ ID NO: 2407986 - DNA, 25 bp, Homo sapien
ttccttgttgctggcgggcaaccat

SEQ ID NO: 2407987 - DNA, 25 bp, Homo sapien
tttctgtcccatagaccagcctttc

SEQ ID NO: 2407988 - DNA, 25 bp, Homo sapien
ttgagggacagcaacgcttccttgt

SEQ ID NO: 2407989 - DNA, 25 bp, Homo sapien
cagctcttagagttcacctttgcac

SEQ ID NO: 2407990 - DNA, 25 bp, Homo sapien
tagagttcacctttgcactgccggc

SEQ ID NO: 2407991 - DNA, 25 bp, Homo sapien
gtcacttcaacaagccaatttccgg

SEQ ID NO: 2407992 - DNA, 25 bp, Homo sapien
caatttccggtccttattgggactg

SEQ ID NO: 2407993 - DNA, 25 bp, Homo sapien
agactgtccctgagtcccaatttcc

SEQ ID NO: 2407994 - DNA, 25 bp, Homo sapien
catttagagactgtccctgagtccc

SEQ ID NO: 2407995 - DNA, 25 bp, Homo sapien
cttttccatttagagactgtccctg

SEQ ID NO: 2407996 - DNA, 25 bp, Homo sapien
tttccatttagagactgtccctgag

SEQ ID NO: 2407997 - DNA, 25 bp, Homo sapien
actcagagcgcctctgtcgctggga

SEQ ID NO: 2407998 - DNA, 25 bp, Homo sapien
aaagtgtattttgaggacggagtct

SEQ ID NO: 2407999 - DNA, 25 bp, Homo sapien
cagtgcggtcacatacttccagaag

SEQ ID NO: 2408000 - DNA, 25 bp, Homo sapien
tccagaagagcggaccagggctgct

SEQ ID NO: 2408001 - DNA, 25 bp, Homo sapien
acctcctccgttttgattccgattg

SEQ ID NO: 2408002 - DNA, 25 bp, Homo sapien
ggaggaaacaccacacaccttggaa

SEQ ID NO: 2408003 - DNA, 25 bp, Homo sapien
cttgaactgttactctgctcgctgg

SEQ ID NO: 2408004 - DNA, 25 bp, Homo sapien
ttggaaatgacatcgggaactggcc

SEQ ID NO: 2408005 - DNA, 25 bp, Homo sapien
gaaggagaccttttcacaatggaaa

SEQ ID NO: 2408006 - DNA, 25 bp, Homo sapien
tctttgctaggcctcttgctgaaag

SEQ ID NO: 2408007 - DNA, 25 bp, Homo sapien
tggtcagagcccagtcgagacctca

SEQ ID NO: 2408008 - DNA, 25 bp, Homo sapien
acacacggctgtccctcatggagac

SEQ ID NO: 2408009 - DNA, 25 bp, Homo sapien
taggattcccctcaatgcagtcagt

SEQ ID NO: 2408010 - DNA, 25 bp, Homo sapien
tcagccatgataagaacagagtgcc

SEQ ID NO: 2408011 - DNA, 25 bp, Homo sapien
taccccagggagaatctgagacatc

SEQ ID NO: 2408012 - DNA, 25 bp, Homo sapien
tagctctggcttagacaccacctgg

SEQ ID NO: 2408013 - DNA, 25 bp, Homo sapien
tactctggtggattgttctagtact

SEQ ID NO: 2408014 - DNA, 25 bp, Homo sapien
tgggcttcttcgttaatagattatt

SEQ ID NO: 2408015 - DNA, 25 bp, Homo sapien
tactgtattgggcttcttcgttaat

SEQ ID NO: 2408016 - DNA, 25 bp, Homo sapien
tataactctagggatataaaaacag

SEQ ID NO: 2408017 - DNA, 25 bp, Homo sapien
gattaattaaacaacagtggatggg

SEQ ID NO: 2408018 - DNA, 25 bp, Homo sapien
acttggcacatgagggactttatga

SEQ ID NO: 2408019 - DNA, 25 bp, Homo sapien
gaacagacttttgagctcttcccaa

SEQ ID NO: 2408020 - DNA, 25 bp, Homo sapien
gatatgggctaaaaagacttctgta

SEQ ID NO: 2408021 - DNA, 25 bp, Homo sapien
ccttttctggtttctactacagttg

SEQ ID NO: 2408022 - DNA, 25 bp, Homo sapien
tcccatccatgttctgctctaattc

SEQ ID NO: 2408023 - DNA, 25 bp, Homo sapien
ccatgttctgctctaattctctgca

SEQ ID NO: 2408024 - DNA, 25 bp, Homo sapien
ccatccatgttctgctctaattctc

SEQ ID NO: 2408025 - DNA, 25 bp, Homo sapien
gaaattacggtctccatatccagcc

SEQ ID NO: 2408026 - DNA, 25 bp, Homo sapien
tgaaatctgcatccccgtctgtgac

SEQ ID NO: 2408027 - DNA, 25 bp, Homo sapien
ggagaaacaccagcctcaagttcag

SEQ ID NO: 2408028 - DNA, 25 bp, Homo sapien
gttcagataaaaagtctaggccaca

SEQ ID NO: 2408029 - DNA, 25 bp, Homo sapien
tgacagttgaatcctgtcccactca

SEQ ID NO: 2408030 - DNA, 25 bp, Homo sapien
ctgacagttgaatcctgtcccactc

SEQ ID NO: 2408031 - DNA, 25 bp, Homo sapien
gtactcgccggtctgagctaagcaa

SEQ ID NO: 2408032 - DNA, 25 bp, Homo sapien
tcagaggaagggttgcccaccaggt

SEQ ID NO: 2408033 - DNA, 25 bp, Homo sapien
aggtactcgccggtctgagctaagc

SEQ ID NO: 2408034 - DNA, 25 bp, Homo sapien
agggttgcccaccaggtactcgccg

SEQ ID NO: 2408035 - DNA, 25 bp, Homo sapien
tccacagtgcaccacaatttctggt

SEQ ID NO: 2408036 - DNA, 25 bp, Homo sapien
tctccacagtgcaccacaatttctg

SEQ ID NO: 2408037 - DNA, 25 bp, Homo sapien
cacagtgcaccacaatttctggtcc

SEQ ID NO: 2408038 - DNA, 25 bp, Homo sapien
agtgcaccacaatttctggtccgct

SEQ ID NO: 2408039 - DNA, 25 bp, Homo sapien
gaggtgctcctggacttgagataaa

SEQ ID NO: 2408040 - DNA, 25 bp, Homo sapien
ccatattattcacccagaggactgg

SEQ ID NO: 2408041 - DNA, 25 bp, Homo sapien
tttaggctctgggagcaaccaggcg

SEQ ID NO: 2408042 - DNA, 25 bp, Homo sapien
taacttgtggacagagctaagcagt

SEQ ID NO: 2408043 - DNA, 25 bp, Homo sapien
tgttgttttgaccacttccaaccca

SEQ ID NO: 2408044 - DNA, 25 bp, Homo sapien
gcagagattttctcgcccttggatt

SEQ ID NO: 2408045 - DNA, 25 bp, Homo sapien
ccagaaaagcgcaccatgagttctc

SEQ ID NO: 2408046 - DNA, 25 bp, Homo sapien
ttgctggggttcacagcgtaacgag

SEQ ID NO: 2408047 - DNA, 25 bp, Homo sapien
catagcttcttagcatgaagggaac

SEQ ID NO: 2408048 - DNA, 25 bp, Homo sapien
tgcttggtcctgacctctcatggac

SEQ ID NO: 2408049 - DNA, 25 bp, Homo sapien
gagttctctaacctgatctgcttgg

SEQ ID NO: 2408050 - DNA, 25 bp, Homo sapien
gatctaaggaagaggttaagtctcc

SEQ ID NO: 2408051 - DNA, 25 bp, Homo sapien
ggatcagcgctgttagggcactgct

SEQ ID NO: 2408052 - DNA, 25 bp, Homo sapien
ggtgggtggatctgtcatgtctaaa

SEQ ID NO: 2408053 - DNA, 25 bp, Homo sapien
ttagatccagtatgagagggttcgc

SEQ ID NO: 2408054 - DNA, 25 bp, Homo sapien
gagggttcgctgagagcagtgggat

SEQ ID NO: 2408055 - DNA, 25 bp, Homo sapien
atacaccatacgcaacattttgtgg

SEQ ID NO: 2408056 - DNA, 25 bp, Homo sapien
tacaccatacgcaacattttgtggg

SEQ ID NO: 2408057 - DNA, 25 bp, Homo sapien
catggcagacacgggctagagggct

SEQ ID NO: 2408058 - DNA, 25 bp, Homo sapien
caccatacgcaacattttgtgggtg

SEQ ID NO: 2408059 - DNA, 25 bp, Homo sapien
gctccgcagagagtgcctccagcgg

SEQ ID NO: 2408060 - DNA, 25 bp, Homo sapien
gggtcgcagtcgagcagctggcgcc

SEQ ID NO: 2408061 - DNA, 25 bp, Homo sapien
aatactccctcgacttcgtgtccag

SEQ ID NO: 2408062 - DNA, 25 bp, Homo sapien
tgtccagcggcccattcgattttga

SEQ ID NO: 2408063 - DNA, 25 bp, Homo sapien
gacctgtgagtctgtggacagcagt

SEQ ID NO: 2408064 - DNA, 25 bp, Homo sapien
ggacctgtgagtctgtggacagcag

SEQ ID NO: 2408065 - DNA, 25 bp, Homo sapien
atttaatagcttcctagggaggtgt

SEQ ID NO: 2408066 - DNA, 25 bp, Homo sapien
taatagcttcctagggaggtgttag

SEQ ID NO: 2408067 - DNA, 25 bp, Homo sapien
aggcacattttgccaatgtctgatt

SEQ ID NO: 2408068 - DNA, 25 bp, Homo sapien
atagcttcctagggaggtgttagtt

SEQ ID NO: 2408069 - DNA, 25 bp, Homo sapien
actgtttagggtggtaagaggatca

SEQ ID NO: 2408070 - DNA, 25 bp, Homo sapien
ggttggctaatcatggcatctgaag

SEQ ID NO: 2408071 - DNA, 25 bp, Homo sapien
cacaaagagatgtgtgtagtgattt

SEQ ID NO: 2408072 - DNA, 25 bp, Homo sapien
caggcttcaccggtgtaagtagctt

SEQ ID NO: 2408073 - DNA, 25 bp, Homo sapien
gggctgcttgggctaactcctgagt

SEQ ID NO: 2408074 - DNA, 25 bp, Homo sapien
cttggccgggctgcttgggctaact

SEQ ID NO: 2408075 - DNA, 25 bp, Homo sapien
ggcagtatcccccatctttcatcca

SEQ ID NO: 2408076 - DNA, 25 bp, Homo sapien
cccatctttcatccaacaggcttgg

SEQ ID NO: 2408077 - DNA, 25 bp, Homo sapien
tgtactgctgaaggtatctggtgtg

SEQ ID NO: 2408078 - DNA, 25 bp, Homo sapien
gacagagccaatgcatcaattaggg

SEQ ID NO: 2408079 - DNA, 25 bp, Homo sapien
gatatcatagcccaaatttgtgccc

SEQ ID NO: 2408080 - DNA, 25 bp, Homo sapien
tctggtgtggtgaggtagatatcat

SEQ ID NO: 2408081 - DNA, 25 bp, Homo sapien
ggctgccaaagattgagtctttgct

SEQ ID NO: 2408082 - DNA, 25 bp, Homo sapien
aggggctgccaaagattgagtcttt

SEQ ID NO: 2408083 - DNA, 25 bp, Homo sapien
gggctgccaaagattgagtctttgc

SEQ ID NO: 2408084 - DNA, 25 bp, Homo sapien
gaggggctgccaaagattgagtctt

SEQ ID NO: 2408085 - DNA, 25 bp, Homo sapien
taatttgaagcactccattccagag

SEQ ID NO: 2408086 - DNA, 25 bp, Homo sapien
ttgaagcactccattccagagggca

SEQ ID NO: 2408087 - DNA, 25 bp, Homo sapien
agggcactaaaactaatttgaagca

SEQ ID NO: 2408088 - DNA, 25 bp, Homo sapien
ctaaaactaatttgaagcactccat

SEQ ID NO: 2408089 - DNA, 25 bp, Homo sapien
cacacggttccagttgttgtggacc

SEQ ID NO: 2408090 - DNA, 25 bp, Homo sapien
tcttgggacatcttgtagcggtcgc

SEQ ID NO: 2408091 - DNA, 25 bp, Homo sapien
tgtggaccttgcaaattctctggcc

SEQ ID NO: 2408092 - DNA, 25 bp, Homo sapien
tgtgggatgtgccttgtatcggtca

SEQ ID NO: 2408093 - DNA, 25 bp, Homo sapien
ttctgtacatcactagggctgctgc

SEQ ID NO: 2408094 - DNA, 25 bp, Homo sapien
ccagatcacgcagggtatccataga

SEQ ID NO: 2408095 - DNA, 25 bp, Homo sapien
tagatttgctggcactagtcccggg

SEQ ID NO: 2408096 - DNA, 25 bp, Homo sapien
gtcccgggcttctgtacatcactag

SEQ ID NO: 2408097 - DNA, 25 bp, Homo sapien
tcagacactgtagcgtgactggcca

SEQ ID NO: 2408098 - DNA, 25 bp, Homo sapien
agacactgtagcgtgactggccatg

SEQ ID NO: 2408099 - DNA, 25 bp, Homo sapien
tctacagaggtttcttcagacactg

SEQ ID NO: 2408100 - DNA, 25 bp, Homo sapien
tcttcagacactgtagcgtgactgg

SEQ ID NO: 2408101 - DNA, 25 bp, Homo sapien
cagtgacaaccgagagcctgaagct

SEQ ID NO: 2408102 - DNA, 25 bp, Homo sapien
gctcgctgggacaccatggtctttg

SEQ ID NO: 2408103 - DNA, 25 bp, Homo sapien
gatgagtgcccaacgcagaatcctg

SEQ ID NO: 2408104 - DNA, 25 bp, Homo sapien
ttccctggcaggcatatttacactg

SEQ ID NO: 2408105 - DNA, 25 bp, Homo sapien
ctgaagtggtgaaagccatcatgaa

SEQ ID NO: 2408106 - DNA, 25 bp, Homo sapien
tgagggtcaagtgctgaacggtcac

SEQ ID NO: 2408107 - DNA, 25 bp, Homo sapien
gtcactttagaaaggcagcggcctg

SEQ ID NO: 2408108 - DNA, 25 bp, Homo sapien
catcatgaaggtgagggtcaagtgc

SEQ ID NO: 2408109 - DNA, 25 bp, Homo sapien
gccaagcttaagagggagttctgca

SEQ ID NO: 2408110 - DNA, 25 bp, Homo sapien
gaatccaggtccagataagtcatgt

SEQ ID NO: 2408111 - DNA, 25 bp, Homo sapien
catatatgaaagaggacatgtggca

SEQ ID NO: 2408112 - DNA, 25 bp, Homo sapien
caccaggaaaggcatcgaggacttt

SEQ ID NO: 2408113 - DNA, 25 bp, Homo sapien
aggaacctaaagaagctctccctct

SEQ ID NO: 2408114 - DNA, 25 bp, Homo sapien
caggaacctaaagaagctctccctc

SEQ ID NO: 2408115 - DNA, 25 bp, Homo sapien
tatgaatgagcctgaggagtctgca

SEQ ID NO: 2408116 - DNA, 25 bp, Homo sapien
tcttagcccttttgagcatgagttc

SEQ ID NO: 2408117 - DNA, 25 bp, Homo sapien
ccaacatgttgggtgcaaacgggca

SEQ ID NO: 2408118 - DNA, 25 bp, Homo sapien
tatatccaaccacatttagggcagc

SEQ ID NO: 2408119 - DNA, 25 bp, Homo sapien
tccagcagaatgtgtctacgagcgc

SEQ ID NO: 2408120 - DNA, 25 bp, Homo sapien
ttaaagccgtctgtccactcttcag

SEQ ID NO: 2408121 - DNA, 25 bp, Homo sapien
gactcttccagggaacgattcctca

SEQ ID NO: 2408122 - DNA, 25 bp, Homo sapien
tctagtcttagtggatttcccaggg

SEQ ID NO: 2408123 - DNA, 25 bp, Homo sapien
agattatacattcctgagacctggg

SEQ ID NO: 2408124 - DNA, 25 bp, Homo sapien
ctagagataagcaagagattataca

SEQ ID NO: 2408125 - DNA, 25 bp, Homo sapien
tgagacctgggcattacttgagtat

SEQ ID NO: 2408126 - DNA, 25 bp, Homo sapien
taagcaagagattatacattcctga

SEQ ID NO: 2408127 - DNA, 25 bp, Homo sapien
tcaagggaatggactttctgtggct

SEQ ID NO: 2408128 - DNA, 25 bp, Homo sapien
ggactttctgtggctgcagttggca

SEQ ID NO: 2408129 - DNA, 25 bp, Homo sapien
agggaatggactttctgtggctgca

SEQ ID NO: 2408130 - DNA, 25 bp, Homo sapien
gactttctgtggctgcagttggcac

SEQ ID NO: 2408131 - DNA, 25 bp, Homo sapien
gtctttttcagaaagcttgcccgtg

SEQ ID NO: 2408132 - DNA, 25 bp, Homo sapien
ttggcacagttcctccggagtcctt

SEQ ID NO: 2408133 - DNA, 25 bp, Homo sapien
cttgcccgtggctgacagcctgctt

SEQ ID NO: 2408134 - DNA, 25 bp, Homo sapien
gggctgacaggattcaaatggccag

SEQ ID NO: 2408135 - DNA, 25 bp, Homo sapien
caagcaggtcagagaacaactgatc

SEQ ID NO: 2408136 - DNA, 25 bp, Homo sapien
cagcccttcgtttcagaggtaagta

SEQ ID NO: 2408137 - DNA, 25 bp, Homo sapien
gcttttgaatttaggaatctttcca

SEQ ID NO: 2408138 - DNA, 25 bp, Homo sapien
gagaacaactgatctgggtcagccc

SEQ ID NO: 2408139 - DNA, 25 bp, Homo sapien
atgtccaagatcaggagaaagatga

SEQ ID NO: 2408140 - DNA, 25 bp, Homo sapien
tgtccaagatcaggagaaagatgaa

SEQ ID NO: 2408141 - DNA, 25 bp, Homo sapien
tgatgtccaagatcaggagaaagat

SEQ ID NO: 2408142 - DNA, 25 bp, Homo sapien
gatgtccaagatcaggagaaagatg

SEQ ID NO: 2408143 - DNA, 25 bp, Homo sapien
gaagaggtctgttgtaggaaatagc

SEQ ID NO: 2408144 - DNA, 25 bp, Homo sapien
gaggtctgttgtaggaaatagccca

SEQ ID NO: 2408145 - DNA, 25 bp, Homo sapien
aaggatgaaggacactatcaggcag

SEQ ID NO: 2408146 - DNA, 25 bp, Homo sapien
gacactatcaggcaggaagaggtct

SEQ ID NO: 2408147 - DNA, 25 bp, Homo sapien
tcaggctattcctagccgaatggaa

SEQ ID NO: 2408148 - DNA, 25 bp, Homo sapien
ggaaaaggcgatgcaactcctccat

SEQ ID NO: 2408149 - DNA, 25 bp, Homo sapien
tggccagggaaaaggcgatgcaact

SEQ ID NO: 2408150 - DNA, 25 bp, Homo sapien
cctagccgaatggaatggccaggga

SEQ ID NO: 2408151 - DNA, 25 bp, Homo sapien
gcatcctttcaagacaggccttgag

SEQ ID NO: 2408152 - DNA, 25 bp, Homo sapien
atcaccctctggcatcctttcaaga

SEQ ID NO: 2408153 - DNA, 25 bp, Homo sapien
caagacaggccttgagcataattgc

SEQ ID NO: 2408154 - DNA, 25 bp, Homo sapien
cctctggcatcctttcaagacaggc

SEQ ID NO: 2408155 - DNA, 25 bp, Homo sapien
tttctggatggtcattgcattattt

SEQ ID NO: 2408156 - DNA, 25 bp, Homo sapien
tccactttactttgaatatctcctc

SEQ ID NO: 2408157 - DNA, 25 bp, Homo sapien
gggggtcaaggcaagatgtggccat

SEQ ID NO: 2408158 - DNA, 25 bp, Homo sapien
ttttttgccagcagaaatccatcca

SEQ ID NO: 2408159 - DNA, 25 bp, Homo sapien
cctgccaggtaaaaggtgatgtgct

SEQ ID NO: 2408160 - DNA, 25 bp, Homo sapien
agcaatgcggtatgagggctcagcc

SEQ ID NO: 2408161 - DNA, 25 bp, Homo sapien
gatcttcgccagtgaggtccaattg

SEQ ID NO: 2408162 - DNA, 25 bp, Homo sapien
gaatccagatcctgcctagagtggg

SEQ ID NO: 2408163 - DNA, 25 bp, Homo sapien
ctgatataaccaattgaagagtgag

SEQ ID NO: 2408164 - DNA, 25 bp, Homo sapien
aagagtgagaaagacagtacaaagg

SEQ ID NO: 2408165 - DNA, 25 bp, Homo sapien
ctgatcctggagattagggatgttg

SEQ ID NO: 2408166 - DNA, 25 bp, Homo sapien
gccctgatcctggagattagggatg

SEQ ID NO: 2408167 - DNA, 25 bp, Homo sapien
gatcctggagattagggatgttgta

SEQ ID NO: 2408168 - DNA, 25 bp, Homo sapien
ccctgatcctggagattagggatgt

SEQ ID NO: 2408169 - DNA, 25 bp, Homo sapien
tgcaggggttactatggagaaaaca

SEQ ID NO: 2408170 - DNA, 25 bp, Homo sapien
ttgcaggggttactatggagaaaac

SEQ ID NO: 2408171 - DNA, 25 bp, Homo sapien
ttggaaacttgcaggggttactatg

SEQ ID NO: 2408172 - DNA, 25 bp, Homo sapien
aaacttgcaggggttactatggaga

SEQ ID NO: 2408173 - DNA, 25 bp, Homo sapien
tctgagccttgatcgtttgagtcca

SEQ ID NO: 2408174 - DNA, 25 bp, Homo sapien
tcgtttgagtccatcccgactgggc

SEQ ID NO: 2408175 - DNA, 25 bp, Homo sapien
caacaaccaggcagtttaagctcat

SEQ ID NO: 2408176 - DNA, 25 bp, Homo sapien
tgctttgtatctggacggctgagct

SEQ ID NO: 2408177 - DNA, 25 bp, Homo sapien
agaattgtgcagctggcgaagtgtg

SEQ ID NO: 2408178 - DNA, 25 bp, Homo sapien
tgcagctggcgaagtgtgctttgat

SEQ ID NO: 2408179 - DNA, 25 bp, Homo sapien
ttgtgttgcctctctcagatgtttg

SEQ ID NO: 2408180 - DNA, 25 bp, Homo sapien
ctttgtgttgcctctctcagatgtt

SEQ ID NO: 2408181 - DNA, 25 bp, Homo sapien
cagaagcagtgttcacagtcacaaa

SEQ ID NO: 2408182 - DNA, 25 bp, Homo sapien
tctgagttttctcgcctctagcaga

SEQ ID NO: 2408183 - DNA, 25 bp, Homo sapien
ttccagtttggaccttccccatgac

SEQ ID NO: 2408184 - DNA, 25 bp, Homo sapien
aatgtctttgactaagagtttccct

SEQ ID NO: 2408185 - DNA, 25 bp, Homo sapien
ccatatctcccccttccctgcaggc

SEQ ID NO: 2408186 - DNA, 25 bp, Homo sapien
tcactttccatatctcccccttccc

SEQ ID NO: 2408187 - DNA, 25 bp, Homo sapien
ctttccatatctcccccttccctgc

SEQ ID NO: 2408188 - DNA, 25 bp, Homo sapien
tggatgaacttctgtcttcctcact

SEQ ID NO: 2408189 - DNA, 25 bp, Homo sapien
ttgcttggacttaggtcctccaaac

SEQ ID NO: 2408190 - DNA, 25 bp, Homo sapien
cttgcttggacttaggtcctccaaa

SEQ ID NO: 2408191 - DNA, 25 bp, Homo sapien
ccttgcttggacttaggtcctccaa

SEQ ID NO: 2408192 - DNA, 25 bp, Homo sapien
aagccatcaggtactctgaaaacaa

SEQ ID NO: 2408193 - DNA, 25 bp, Homo sapien
cttcccttctgtcggcttcctgttc

SEQ ID NO: 2408194 - DNA, 25 bp, Homo sapien
ttggcctcaatctggactttctcct

SEQ ID NO: 2408195 - DNA, 25 bp, Homo sapien
catggagggttccaatggccagtct

SEQ ID NO: 2408196 - DNA, 25 bp, Homo sapien
cctgctgcatggagggttccaatgg

SEQ ID NO: 2408197 - DNA, 25 bp, Homo sapien
aggcctgctgcatggagggttccaa

SEQ ID NO: 2408198 - DNA, 25 bp, Homo sapien
gctgcatggagggttccaatggcca

SEQ ID NO: 2408199 - DNA, 25 bp, Homo sapien
gccacgcagaggcatgtgtccacca

SEQ ID NO: 2408200 - DNA, 25 bp, Homo sapien
ccacgcagaggcatgtgtccaccat

SEQ ID NO: 2408201 - DNA, 25 bp, Homo sapien
cagccacgcagaggcatgtgtccac

SEQ ID NO: 2408202 - DNA, 25 bp, Homo sapien
agccacgcagaggcatgtgtccacc

SEQ ID NO: 2408203 - DNA, 25 bp, Homo sapien
ccttgacatgcccatctttggtgat

SEQ ID NO: 2408204 - DNA, 25 bp, Homo sapien
cttgacatgcccatctttggtgatt

SEQ ID NO: 2408205 - DNA, 25 bp, Homo sapien
ttctctgatgcactagatggttctt

SEQ ID NO: 2408206 - DNA, 25 bp, Homo sapien
cagggtatggtgcatttggagcctc

SEQ ID NO: 2408207 - DNA, 25 bp, Homo sapien
ttggacttctggctagggcaccact

SEQ ID NO: 2408208 - DNA, 25 bp, Homo sapien
gctgtcatcccctcaacagggtatg

SEQ ID NO: 2408209 - DNA, 25 bp, Homo sapien
gggcaccactccatgctcttagctg

SEQ ID NO: 2408210 - DNA, 25 bp, Homo sapien
cgaggtcagacgagatcaggcgtgt

SEQ ID NO: 2408211 - DNA, 25 bp, Homo sapien
tactaaccagggctgaaccctgctt

SEQ ID NO: 2408212 - DNA, 25 bp, Homo sapien
caagtactaaccagggctgaaccct

SEQ ID NO: 2408213 - DNA, 25 bp, Homo sapien
accagggctgaaccctgcttagctt

SEQ ID NO: 2408214 - DNA, 25 bp, Homo sapien
cacagatctttctgctggggagttg

SEQ ID NO: 2408215 - DNA, 25 bp, Homo sapien
ggagttgttggcaaaagcattccac

SEQ ID NO: 2408216 - DNA, 25 bp, Homo sapien
tcaacaaaggccagatgccatcgag

SEQ ID NO: 2408217 - DNA, 25 bp, Homo sapien
aagaggaccacacaccgaagcccac

SEQ ID NO: 2408218 - DNA, 25 bp, Homo sapien
tttgtaaagtgggcaaatataatac

SEQ ID NO: 2408219 - DNA, 25 bp, Homo sapien
gtttgtaaagtgggcaaatataata

SEQ ID NO: 2408220 - DNA, 25 bp, Homo sapien
tgtttgtaaagtgggcaaatataat

SEQ ID NO: 2408221 - DNA, 25 bp, Homo sapien
cactaatatctttggccttggcaat

SEQ ID NO: 2408222 - DNA, 25 bp, Homo sapien
ccagtatgaggatgtcgtagtgtgc

SEQ ID NO: 2408223 - DNA, 25 bp, Homo sapien
cttggcaatgcgtcagaatgtaggt

SEQ ID NO: 2408224 - DNA, 25 bp, Homo sapien
gaaacacgatgccatccctgagcct

SEQ ID NO: 2408225 - DNA, 25 bp, Homo sapien
ggagaccccactaataatcttgact

SEQ ID NO: 2408226 - DNA, 25 bp, Homo sapien
tagccttggaggtcagagcaggtcc

SEQ ID NO: 2408227 - DNA, 25 bp, Homo sapien
tgctgccttgtctaagtagccttgg

SEQ ID NO: 2408228 - DNA, 25 bp, Homo sapien
gactctgcctgcatatgctgccttg

SEQ ID NO: 2408229 - DNA, 25 bp, Homo sapien
ctatgaaatgctttacgaacttgca

SEQ ID NO: 2408230 - DNA, 25 bp, Homo sapien
atatagtcgcagctctgagtcagcc

SEQ ID NO: 2408231 - DNA, 25 bp, Homo sapien
cagcgtgtgctgccccaacactgaa

SEQ ID NO: 2408232 - DNA, 25 bp, Homo sapien
acaccagtgtcccagcaggattcac

SEQ ID NO: 2408233 - DNA, 25 bp, Homo sapien
tgctcctggtgtcagatcaaggtcc

SEQ ID NO: 2408234 - DNA, 25 bp, Homo sapien
aaagccccccgctgcatctccctcc

SEQ ID NO: 2408235 - DNA, 25 bp, Homo sapien
cctcggagtagctgcttgttctctg

SEQ ID NO: 2408236 - DNA, 25 bp, Homo sapien
ttcagggtccgaaaaattgaaagca

SEQ ID NO: 2408237 - DNA, 25 bp, Homo sapien
tcccgcgggtcactgcttttttctc

SEQ ID NO: 2408238 - DNA, 25 bp, Homo sapien
tgacaggggatctaagatttcttct

SEQ ID NO: 2408239 - DNA, 25 bp, Homo sapien
gtgtgcgggctaaaggattctgttc

SEQ ID NO: 2408240 - DNA, 25 bp, Homo sapien
tcttgccacagggagtgtgcgggct

SEQ ID NO: 2408241 - DNA, 25 bp, Homo sapien
caggggatctaagatttcttctggc

SEQ ID NO: 2408242 - DNA, 25 bp, Homo sapien
tacccatgtgacagaactcagaccc

SEQ ID NO: 2408243 - DNA, 25 bp, Homo sapien
tccaagggtacagtagagtcagata

SEQ ID NO: 2408244 - DNA, 25 bp, Homo sapien
ccagtgccacatagtacccatgtga

SEQ ID NO: 2408245 - DNA, 25 bp, Homo sapien
ctgtcctcgggagactaagtccaag

SEQ ID NO: 2408246 - DNA, 25 bp, Homo sapien
tggtgatgctgcctagcatgtcacc

SEQ ID NO: 2408247 - DNA, 25 bp, Homo sapien
gatgctgcctagcatgtcaccaagc

SEQ ID NO: 2408248 - DNA, 25 bp, Homo sapien
gctgcctagcatgtcaccaagccaa

SEQ ID NO: 2408249 - DNA, 25 bp, Homo sapien
caccaagccaatggccactccatat

SEQ ID NO: 2408250 - DNA, 25 bp, Homo sapien
cctgagagtgggaaacattaatacc

SEQ ID NO: 2408251 - DNA, 25 bp, Homo sapien
tgagagtgggaaacattaataccat

SEQ ID NO: 2408252 - DNA, 25 bp, Homo sapien
ctgagagtgggaaacattaatacca

SEQ ID NO: 2408253 - DNA, 25 bp, Homo sapien
cagacacaggtctccagcgagtctt

SEQ ID NO: 2408254 - DNA, 25 bp, Homo sapien
gcgagtcttcagaccaagccctgta

SEQ ID NO: 2408255 - DNA, 25 bp, Homo sapien
tagcagtgtgttgtcccctcggtta

SEQ ID NO: 2408256 - DNA, 25 bp, Homo sapien
ggttattgctagacaggctcctggt

SEQ ID NO: 2408257 - DNA, 25 bp, Homo sapien
cttggcaggctctgctcagagacag

SEQ ID NO: 2408258 - DNA, 25 bp, Homo sapien
ggcaggctctgctcagagacagaat

SEQ ID NO: 2408259 - DNA, 25 bp, Homo sapien
tggcaggctctgctcagagacagaa

SEQ ID NO: 2408260 - DNA, 25 bp, Homo sapien
aggctctgctcagagacagaatact

SEQ ID NO: 2408261 - DNA, 25 bp, Homo sapien
ggatctggctaaacaggaggaaaaa

SEQ ID NO: 2408262 - DNA, 25 bp, Homo sapien
caggatctggctaaacaggaggaaa

SEQ ID NO: 2408263 - DNA, 25 bp, Homo sapien
tggctaaacaggaggaaaaatagga

SEQ ID NO: 2408264 - DNA, 25 bp, Homo sapien
tctggctaaacaggaggaaaaatag

SEQ ID NO: 2408265 - DNA, 25 bp, Homo sapien
cagagcccaaggagatatccttgtt

SEQ ID NO: 2408266 - DNA, 25 bp, Homo sapien
gcccaaggagatatccttgttctcc

SEQ ID NO: 2408267 - DNA, 25 bp, Homo sapien
caaggagatatccttgttctcctca

SEQ ID NO: 2408268 - DNA, 25 bp, Homo sapien
caattctagaccagagccatgttga

SEQ ID NO: 2408269 - DNA, 25 bp, Homo sapien
ctgcaaggtggacgaaggtgcccat

SEQ ID NO: 2408270 - DNA, 25 bp, Homo sapien
tctgcaaggtggacgaaggtgccca

SEQ ID NO: 2408271 - DNA, 25 bp, Homo sapien
ttctgcaaggtggacgaaggtgccc

SEQ ID NO: 2408272 - DNA, 25 bp, Homo sapien
tttctgcaaggtggacgaaggtgcc

SEQ ID NO: 2408273 - DNA, 25 bp, Homo sapien
tttgcaacgcaaccccatagtggat

SEQ ID NO: 2408274 - DNA, 25 bp, Homo sapien
tgagtgtaaccaagggctccagcac

SEQ ID NO: 2408275 - DNA, 25 bp, Homo sapien
gatagtcactgggtaacaaagctcc

SEQ ID NO: 2408276 - DNA, 25 bp, Homo sapien
tctagatgatttgatgcaggccaca

SEQ ID NO: 2408277 - DNA, 25 bp, Homo sapien
tagttcactagaaatggcctaacag

SEQ ID NO: 2408278 - DNA, 25 bp, Homo sapien
gaaaacggctggcaggatatgacca

SEQ ID NO: 2408279 - DNA, 25 bp, Homo sapien
tgtgtcagaaacaacgtgcagtgtc

SEQ ID NO: 2408280 - DNA, 25 bp, Homo sapien
tccaaagagtggattccgggaggtc

SEQ ID NO: 2408281 - DNA, 25 bp, Homo sapien
gagtgatcccagcttgaatctcaat

SEQ ID NO: 2408282 - DNA, 25 bp, Homo sapien
ttcctgccggatggctatatgactc

SEQ ID NO: 2408283 - DNA, 25 bp, Homo sapien
taacttgccaccctgtttaagcagc

SEQ ID NO: 2408284 - DNA, 25 bp, Homo sapien
aacacactgcagttgcccttgactc

SEQ ID NO: 2408285 - DNA, 25 bp, Homo sapien
taaaagccaaatcctgacagtgtcc

SEQ ID NO: 2408286 - DNA, 25 bp, Homo sapien
tcctgtcttacactgatggcaactc

SEQ ID NO: 2408287 - DNA, 25 bp, Homo sapien
tcagggtatactctcaacacagcag

SEQ ID NO: 2408288 - DNA, 25 bp, Homo sapien
agagcttcctaaccggtctttcagc

SEQ ID NO: 2408289 - DNA, 25 bp, Homo sapien
ctttcataggatagctaagcaccca

SEQ ID NO: 2408290 - DNA, 25 bp, Homo sapien
tacattccacccctaggctcagtgg

SEQ ID NO: 2408291 - DNA, 25 bp, Homo sapien
ttgctgttccggagcaagctctggg

SEQ ID NO: 2408292 - DNA, 25 bp, Homo sapien
tatactcggtttagtggcttcagtc

SEQ ID NO: 2408293 - DNA, 25 bp, Homo sapien
tactaagtacaagagctctgtggtt

SEQ ID NO: 2408294 - DNA, 25 bp, Homo sapien
gggaataagatgctccaaatactca

SEQ ID NO: 2408295 - DNA, 25 bp, Homo sapien
gccgctatggtacagctcagaaaag

SEQ ID NO: 2408296 - DNA, 25 bp, Homo sapien
cagctgttggccctgtgacctgttt

SEQ ID NO: 2408297 - DNA, 25 bp, Homo sapien
tattaattttggagcccccatgctt

SEQ ID NO: 2408298 - DNA, 25 bp, Homo sapien
tcaggcttgtatgtttgaacttaat

SEQ ID NO: 2408299 - DNA, 25 bp, Homo sapien
gaactaacttatgccttaatcctag

SEQ ID NO: 2408300 - DNA, 25 bp, Homo sapien
cattgtgtatgtgaactgccttata

SEQ ID NO: 2408301 - DNA, 25 bp, Homo sapien
gatccacaagccaggtagagcaaag

SEQ ID NO: 2408302 - DNA, 25 bp, Homo sapien
tcttagtaccagtccatcaacagga

SEQ ID NO: 2408303 - DNA, 25 bp, Homo sapien
gcttcctgcctatgtgaaaccttga

SEQ ID NO: 2408304 - DNA, 25 bp, Homo sapien
tcctgaccctgggagagagagaaca

SEQ ID NO: 2408305 - DNA, 25 bp, Homo sapien
tatacatgtgattgtgtgtgcagat

SEQ ID NO: 2408306 - DNA, 25 bp, Homo sapien
gggggattcatccttaggtgctact

SEQ ID NO: 2408307 - DNA, 25 bp, Homo sapien
tcacttacttgaacacatgtagtgt

SEQ ID NO: 2408308 - DNA, 25 bp, Homo sapien
tgtagtgttccaagtacactttcct

SEQ ID NO: 2408309 - DNA, 25 bp, Homo sapien
caaaccttggccagtcgagagtcta

SEQ ID NO: 2408310 - DNA, 25 bp, Homo sapien
cttgaggcacctgactacacatggg

SEQ ID NO: 2408311 - DNA, 25 bp, Homo sapien
tcaaaggtggcttcgttcttcccca

SEQ ID NO: 2408312 - DNA, 25 bp, Homo sapien
caagcagtgtgctaaatggtctcac

SEQ ID NO: 2408313 - DNA, 25 bp, Homo sapien
tgaagaggttctcctcacagggcgg

SEQ ID NO: 2408314 - DNA, 25 bp, Homo sapien
gatcaagtcgtcgtggccactgtag

SEQ ID NO: 2408315 - DNA, 25 bp, Homo sapien
tgctggagccattgaaagccctggg

SEQ ID NO: 2408316 - DNA, 25 bp, Homo sapien
tgtcacagtcgtagagcccatcgat

SEQ ID NO: 2408317 - DNA, 25 bp, Homo sapien
gaccatgccaggcttgccagaacag

SEQ ID NO: 2408318 - DNA, 25 bp, Homo sapien
agaacagacacccataaagcaatgt

SEQ ID NO: 2408319 - DNA, 25 bp, Homo sapien
tcggaactgccaatagaaaaggtgt

SEQ ID NO: 2408320 - DNA, 25 bp, Homo sapien
aaaaggtgttcgcagatgaaggtga

SEQ ID NO: 2408321 - DNA, 25 bp, Homo sapien
tcattgtgacaaatgccagtgagcc

SEQ ID NO: 2408322 - DNA, 25 bp, Homo sapien
tcaatgacctttttccacttcacca

SEQ ID NO: 2408323 - DNA, 25 bp, Homo sapien
aatgacctttttccacttcaccaga

SEQ ID NO: 2408324 - DNA, 25 bp, Homo sapien
tgacctttttccacttcaccagatg

SEQ ID NO: 2408325 - DNA, 25 bp, Homo sapien
caatgacctttttccacttcaccag

SEQ ID NO: 2408326 - DNA, 25 bp, Homo sapien
tgtaatgctaacagaaacagtagtt

SEQ ID NO: 2408327 - DNA, 25 bp, Homo sapien
gtctggctgctcatccacaactgag

SEQ ID NO: 2408328 - DNA, 25 bp, Homo sapien
gacataattgagatagccacttggc

SEQ ID NO: 2408329 - DNA, 25 bp, Homo sapien
ctggtgaagccaacaagggtctggc

SEQ ID NO: 2408330 - DNA, 25 bp, Homo sapien
ctaaccctgccttctgcctcttcca

SEQ ID NO: 2408331 - DNA, 25 bp, Homo sapien
taaccctgccttctgcctcttccag

SEQ ID NO: 2408332 - DNA, 25 bp, Homo sapien
atctaatatcagttctcctacttta

SEQ ID NO: 2408333 - DNA, 25 bp, Homo sapien
tgtgagatgactggatgaaacatct

SEQ ID NO: 2408334 - DNA, 25 bp, Homo sapien
taaagagcagagaccttccacagtt

SEQ ID NO: 2408335 - DNA, 25 bp, Homo sapien
attattttggccacatgtgagatga

SEQ ID NO: 2408336 - DNA, 25 bp, Homo sapien
cacccagaatctttttggatggcaa

SEQ ID NO: 2408337 - DNA, 25 bp, Homo sapien
tgccatatagttcagcactgctgca

SEQ ID NO: 2408338 - DNA, 25 bp, Homo sapien
aatgccatagccagtggaagcaaag

SEQ ID NO: 2408339 - DNA, 25 bp, Homo sapien
gagctgcaggatagcaaggtccacc

SEQ ID NO: 2408340 - DNA, 25 bp, Homo sapien
gttattgcgaatatttctctctgtg

SEQ ID NO: 2408341 - DNA, 25 bp, Homo sapien
tgcatttctgcatagttattgcgaa

SEQ ID NO: 2408342 - DNA, 25 bp, Homo sapien
gcatcatctacacccctctggttga

SEQ ID NO: 2408343 - DNA, 25 bp, Homo sapien
cctgttttcagggagagcaatgcat

SEQ ID NO: 2408344 - DNA, 25 bp, Homo sapien
tgccatcttaattgctcagtgctgg

SEQ ID NO: 2408345 - DNA, 25 bp, Homo sapien
cataaatgccatcttaattgctcag

SEQ ID NO: 2408346 - DNA, 25 bp, Homo sapien
catcttaattgctcagtgctggcca

SEQ ID NO: 2408347 - DNA, 25 bp, Homo sapien
ggagccataaatgccatcttaattg

SEQ ID NO: 2408348 - DNA, 25 bp, Homo sapien
aagacattatatggcacttgcttag

SEQ ID NO: 2408349 - DNA, 25 bp, Homo sapien
cccaagctgtaagacattatatggc

SEQ ID NO: 2408350 - DNA, 25 bp, Homo sapien
cacttgcttagcctgagtggcaatt

SEQ ID NO: 2408351 - DNA, 25 bp, Homo sapien
agcctgagtggcaatttgggaacga

SEQ ID NO: 2408352 - DNA, 25 bp, Homo sapien
tcgctctgagagaatcggtgcacca

SEQ ID NO: 2408353 - DNA, 25 bp, Homo sapien
ctcccattcggttgactaaagtctg

SEQ ID NO: 2408354 - DNA, 25 bp, Homo sapien
tgccggagattccacctataggtgc

SEQ ID NO: 2408355 - DNA, 25 bp, Homo sapien
tgattcttagctgacctaggtgacc

SEQ ID NO: 2408356 - DNA, 25 bp, Homo sapien
ctaatacggtatcagcatcttcaga

SEQ ID NO: 2408357 - DNA, 25 bp, Homo sapien
ctgaggttctaatacggtatcagca

SEQ ID NO: 2408358 - DNA, 25 bp, Homo sapien
tctaatacggtatcagcatcttcag

SEQ ID NO: 2408359 - DNA, 25 bp, Homo sapien
ggttctaatacggtatcagcatctt

SEQ ID NO: 2408360 - DNA, 25 bp, Homo sapien
accacactgcactagaactagaagg

SEQ ID NO: 2408361 - DNA, 25 bp, Homo sapien
aggctttgtcaaatgcatgctcaag

SEQ ID NO: 2408362 - DNA, 25 bp, Homo sapien
aattcttacaggatgtaaaaccaca

SEQ ID NO: 2408363 - DNA, 25 bp, Homo sapien
gatggctacttgagaaatagaatta

SEQ ID NO: 2408364 - DNA, 25 bp, Homo sapien
atcaaaagccctgttctttcggtct

SEQ ID NO: 2408365 - DNA, 25 bp, Homo sapien
gccctgttctttcggtctaagtgat

SEQ ID NO: 2408366 - DNA, 25 bp, Homo sapien
aagccctgttctttcggtctaagtg

SEQ ID NO: 2408367 - DNA, 25 bp, Homo sapien
gacaccccctattttcacatccaca

SEQ ID NO: 2408368 - DNA, 25 bp, Homo sapien
ggttcctgaaccccagaggtcctca

SEQ ID NO: 2408369 - DNA, 25 bp, Homo sapien
tgaaccccagaggtcctcagctgca

SEQ ID NO: 2408370 - DNA, 25 bp, Homo sapien
ttcccagaggttcctgaaccccaga

SEQ ID NO: 2408371 - DNA, 25 bp, Homo sapien
cctgaaccccagaggtcctcagctg

SEQ ID NO: 2408372 - DNA, 25 bp, Homo sapien
tccactctggccattctcaggatca

SEQ ID NO: 2408373 - DNA, 25 bp, Homo sapien
aatccaagctgctccgtgctgaggg

SEQ ID NO: 2408374 - DNA, 25 bp, Homo sapien
tgaggacccgaggtcttgagcctcc

SEQ ID NO: 2408375 - DNA, 25 bp, Homo sapien
gaaacaacttctggtactgactagc

SEQ ID NO: 2408376 - DNA, 25 bp, Homo sapien
tcgatcaaagccatcacctgagtgg

SEQ ID NO: 2408377 - DNA, 25 bp, Homo sapien
gatcaaagccatcacctgagtggca

SEQ ID NO: 2408378 - DNA, 25 bp, Homo sapien
gctctcgatcaaagccatcacctga

SEQ ID NO: 2408379 - DNA, 25 bp, Homo sapien
ctcgatcaaagccatcacctgagtg

SEQ ID NO: 2408380 - DNA, 25 bp, Homo sapien
tgggagactgacaatgcaaatcggg

SEQ ID NO: 2408381 - DNA, 25 bp, Homo sapien
ggacatcactactaaaaggcctcgt

SEQ ID NO: 2408382 - DNA, 25 bp, Homo sapien
ttaaccagcaaggagaagactgcct

SEQ ID NO: 2408383 - DNA, 25 bp, Homo sapien
cattaatccggctcaaggacacagc

SEQ ID NO: 2408384 - DNA, 25 bp, Homo sapien
tgtgcaccggaaccaagggagagcc

SEQ ID NO: 2408385 - DNA, 25 bp, Homo sapien
tcagccccagaaacacgagtgtgca

SEQ ID NO: 2408386 - DNA, 25 bp, Homo sapien
aaacacgagtgtgcaccggaaccaa

SEQ ID NO: 2408387 - DNA, 25 bp, Homo sapien
cagaaacacgagtgtgcaccggaac

SEQ ID NO: 2408388 - DNA, 25 bp, Homo sapien
caggattgagggaaagacgggagat

SEQ ID NO: 2408389 - DNA, 25 bp, Homo sapien
atgagaactttgagtatggctgaga

SEQ ID NO: 2408390 - DNA, 25 bp, Homo sapien
gggaaagacgggagatttcaaatga

SEQ ID NO: 2408391 - DNA, 25 bp, Homo sapien
aactttgagtatggctgagaacagg

SEQ ID NO: 2408392 - DNA, 25 bp, Homo sapien
tcatgaaggcagctaagttggcagt

SEQ ID NO: 2408393 - DNA, 25 bp, Homo sapien
ggttctgcacaggtacggagttgtt

SEQ ID NO: 2408394 - DNA, 25 bp, Homo sapien
agttgttaaacaccagaccccagag

SEQ ID NO: 2408395 - DNA, 25 bp, Homo sapien
ttgccgatggtgaaagagggtccac

SEQ ID NO: 2408396 - DNA, 25 bp, Homo sapien
tctgccatcagcgaggcacctgtta

SEQ ID NO: 2408397 - DNA, 25 bp, Homo sapien
agcgaggcacctgttataacccaca

SEQ ID NO: 2408398 - DNA, 25 bp, Homo sapien
cacccatacgtcagcgctgaatggc

SEQ ID NO: 2408399 - DNA, 25 bp, Homo sapien
gacagccacggctgagacgatgagc

SEQ ID NO: 2408400 - DNA, 25 bp, Homo sapien
actgatgcctgtctctatgaagggc

SEQ ID NO: 2408401 - DNA, 25 bp, Homo sapien
ccattgctgcgtgacaccatgacac

SEQ ID NO: 2408402 - DNA, 25 bp, Homo sapien
gccatgtaggccctcttcatgacca

SEQ ID NO: 2408403 - DNA, 25 bp, Homo sapien
agagaagtcgaccacctccgatcgt

SEQ ID NO: 2408404 - DNA, 25 bp, Homo sapien
cattggtaaccaggtaaaggtcata

SEQ ID NO: 2408405 - DNA, 25 bp, Homo sapien
gcattttttgatgtaacccggctcc

SEQ ID NO: 2408406 - DNA, 25 bp, Homo sapien
gaaattttcttaaggatgtcaatac

SEQ ID NO: 2408407 - DNA, 25 bp, Homo sapien
tccaatcataccattccaggttcca

SEQ ID NO: 2408408 - DNA, 25 bp, Homo sapien
cccatgccacccaaagtcattgaga

SEQ ID NO: 2408409 - DNA, 25 bp, Homo sapien
tcccatgccacccaaagtcattgag

SEQ ID NO: 2408410 - DNA, 25 bp, Homo sapien
tccagggtcacaatgctcagatggt

SEQ ID NO: 2408411 - DNA, 25 bp, Homo sapien
cacatagtacttcatctgcagggac

SEQ ID NO: 2408412 - DNA, 25 bp, Homo sapien
cagtgactatgcgtttttggcaggg

SEQ ID NO: 2408413 - DNA, 25 bp, Homo sapien
ttccactcagagggtccacactttc

SEQ ID NO: 2408414 - DNA, 25 bp, Homo sapien
ggctcataaggcttcccgtaggaaa

SEQ ID NO: 2408415 - DNA, 25 bp, Homo sapien
tacaaacctgtggtaccttcgagtg

SEQ ID NO: 2408416 - DNA, 25 bp, Homo sapien
gtttggttctcttggtacaggctga

SEQ ID NO: 2408417 - DNA, 25 bp, Homo sapien
tggcaccaattagcaccctgacaag

SEQ ID NO: 2408418 - DNA, 25 bp, Homo sapien
cagactcagttctatgtgaatggct

SEQ ID NO: 2408419 - DNA, 25 bp, Homo sapien
tcagccttcctgattataaagttac

SEQ ID NO: 2408420 - DNA, 25 bp, Homo sapien
taaagttaccctggacagactcagt

SEQ ID NO: 2408421 - DNA, 25 bp, Homo sapien
aaaggatgtaagatgtaaagcctgc

SEQ ID NO: 2408422 - DNA, 25 bp, Homo sapien
gggacactgagacatccattgccat

SEQ ID NO: 2408423 - DNA, 25 bp, Homo sapien
ccaatcctgtctggcacctgcatgg

SEQ ID NO: 2408424 - DNA, 25 bp, Homo sapien
gggaccggtgtctctgggtacacac

SEQ ID NO: 2408425 - DNA, 25 bp, Homo sapien
gggaagcccatccagccaatcctgt

SEQ ID NO: 2408426 - DNA, 25 bp, Homo sapien
tgttaagatgccaggtaacttgcct

SEQ ID NO: 2408427 - DNA, 25 bp, Homo sapien
tgctgaggagaaaacgcctgtttac

SEQ ID NO: 2408428 - DNA, 25 bp, Homo sapien
tgctaagtggcctcctaaaggaacc

SEQ ID NO: 2408429 - DNA, 25 bp, Homo sapien
aaaggaacctccacagcctgtgcaa

SEQ ID NO: 2408430 - DNA, 25 bp, Homo sapien
ggctcagggtccctctcagcgccta

SEQ ID NO: 2408431 - DNA, 25 bp, Homo sapien
ggaatgtgccggaatgatggaagag

SEQ ID NO: 2408432 - DNA, 25 bp, Homo sapien
ctgacaggaggaatgtgccggaatg

SEQ ID NO: 2408433 - DNA, 25 bp, Homo sapien
tcagcgcctacgacacagctgctga

SEQ ID NO: 2408434 - DNA, 25 bp, Homo sapien
ggtaagtagtctacaacagctgcta

SEQ ID NO: 2408435 - DNA, 25 bp, Homo sapien
ttctttcttaactccccagacagtg

SEQ ID NO: 2408436 - DNA, 25 bp, Homo sapien
gtaagtagtctacaacagctgctac

SEQ ID NO: 2408437 - DNA, 25 bp, Homo sapien
cttaactccccagacagtgttcact

SEQ ID NO: 2408438 - DNA, 25 bp, Homo sapien
cagagagcagtagcaatgaagcaaa

SEQ ID NO: 2408439 - DNA, 25 bp, Homo sapien
ttaggaacgattaaatggaagcaga

SEQ ID NO: 2408440 - DNA, 25 bp, Homo sapien
catgagaggctctgatagagacaga

SEQ ID NO: 2408441 - DNA, 25 bp, Homo sapien
gaagccttaaagcttgttggaactg

SEQ ID NO: 2408442 - DNA, 25 bp, Homo sapien
agcagcattaggcgtcttgaggatg

SEQ ID NO: 2408443 - DNA, 25 bp, Homo sapien
cagcattaggcgtcttgaggatgat

SEQ ID NO: 2408444 - DNA, 25 bp, Homo sapien
ctgaagcagcattaggcgtcttgag

SEQ ID NO: 2408445 - DNA, 25 bp, Homo sapien
gaagcagcattaggcgtcttgagga

SEQ ID NO: 2408446 - DNA, 25 bp, Homo sapien
gtttcgggtgcatctggtagccatc

SEQ ID NO: 2408447 - DNA, 25 bp, Homo sapien
cagaagaattatcaccagtttcggg

SEQ ID NO: 2408448 - DNA, 25 bp, Homo sapien
ttgttcagaagaattatcaccagtt

SEQ ID NO: 2408449 - DNA, 25 bp, Homo sapien
tatcaccagtttcgggtgcatctgg

SEQ ID NO: 2408450 - DNA, 25 bp, Homo sapien
ctgatgagcagtcccttcactggga

SEQ ID NO: 2408451 - DNA, 25 bp, Homo sapien
cagtcccttcactgggaattcccaa

SEQ ID NO: 2408452 - DNA, 25 bp, Homo sapien
tgagcagtcccttcactgggaattc

SEQ ID NO: 2408453 - DNA, 25 bp, Homo sapien
catctgatgagcagtcccttcactg

SEQ ID NO: 2408454 - DNA, 25 bp, Homo sapien
cacaactgaataccatgaattagtt

SEQ ID NO: 2408455 - DNA, 25 bp, Homo sapien
actgaataccatgaattagtttaat

SEQ ID NO: 2408456 - DNA, 25 bp, Homo sapien
tcacaactgaataccatgaattagt

SEQ ID NO: 2408457 - DNA, 25 bp, Homo sapien
caactgaataccatgaattagttta

SEQ ID NO: 2408458 - DNA, 25 bp, Homo sapien
aattgctttctgtctagatactacc

SEQ ID NO: 2408459 - DNA, 25 bp, Homo sapien
tcacaccgtagaatagctccttcct

SEQ ID NO: 2408460 - DNA, 25 bp, Homo sapien
cctgtttgatctctccacagattca

SEQ ID NO: 2408461 - DNA, 25 bp, Homo sapien
tccacagattcacaccgtagaatag

SEQ ID NO: 2408462 - DNA, 25 bp, Homo sapien
caaaggcagtgtcaagtttatgcag

SEQ ID NO: 2408463 - DNA, 25 bp, Homo sapien
tacaactgtatatttggagaagctc

SEQ ID NO: 2408464 - DNA, 25 bp, Homo sapien
gctccttcccagtctattgtgcaag

SEQ ID NO: 2408465 - DNA, 25 bp, Homo sapien
tgtccatgcacagaagtacttccct

SEQ ID NO: 2408466 - DNA, 25 bp, Homo sapien
taaattaattaatattggtcaccac

SEQ ID NO: 2408467 - DNA, 25 bp, Homo sapien
aaattaattaatattggtcaccaca

SEQ ID NO: 2408468 - DNA, 25 bp, Homo sapien
tataaattaattaatattggtcacc

SEQ ID NO: 2408469 - DNA, 25 bp, Homo sapien
tatataaattaattaatattggtca

SEQ ID NO: 2408470 - DNA, 25 bp, Homo sapien
tgtatgacctagcaataactgagtc

SEQ ID NO: 2408471 - DNA, 25 bp, Homo sapien
ggcctgccactgtcatatctctcag

SEQ ID NO: 2408472 - DNA, 25 bp, Homo sapien
tctctcaggtgtatgacctagcaat

SEQ ID NO: 2408473 - DNA, 25 bp, Homo sapien
ttctaccttgccaaacactggcctg

SEQ ID NO: 2408474 - DNA, 25 bp, Homo sapien
gagtatgggaatgatgaaggtatag

SEQ ID NO: 2408475 - DNA, 25 bp, Homo sapien
agtgtgtcaggtacaaagaagagta

SEQ ID NO: 2408476 - DNA, 25 bp, Homo sapien
caggtacaaagaagagtatgggaat

SEQ ID NO: 2408477 - DNA, 25 bp, Homo sapien
agagtgtgtcaggtacaaagaagag

SEQ ID NO: 2408478 - DNA, 25 bp, Homo sapien
ggaaagattataacttcagtgacac

SEQ ID NO: 2408479 - DNA, 25 bp, Homo sapien
cggagtgaagtagcattatctcagc

SEQ ID NO: 2408480 - DNA, 25 bp, Homo sapien
gagaggagaaacctacctgaaagga

SEQ ID NO: 2408481 - DNA, 25 bp, Homo sapien
accttggagaggagaaacctacctg

SEQ ID NO: 2408482 - DNA, 25 bp, Homo sapien
ggactgaagggcagtaatacgctgt

SEQ ID NO: 2408483 - DNA, 25 bp, Homo sapien
aatttcaacaaaagaggactgaagg

SEQ ID NO: 2408484 - DNA, 25 bp, Homo sapien
ctgaagggcagtaatacgctgtctg

SEQ ID NO: 2408485 - DNA, 25 bp, Homo sapien
ttcaacaaaagaggactgaagggca

SEQ ID NO: 2408486 - DNA, 25 bp, Homo sapien
actgatggcaattttaaggaggtca

SEQ ID NO: 2408487 - DNA, 25 bp, Homo sapien
ccaacttgaggtgattgacaaatct

SEQ ID NO: 2408488 - DNA, 25 bp, Homo sapien
cctatgtaatttcgctaactgtgga

SEQ ID NO: 2408489 - DNA, 25 bp, Homo sapien
tgggagatgtcagtaccctgggact

SEQ ID NO: 2408490 - DNA, 25 bp, Homo sapien
gtgaaagtctatccatccctgagag

SEQ ID NO: 2408491 - DNA, 25 bp, Homo sapien
tatgtgctacctagatccaaggagg

SEQ ID NO: 2408492 - DNA, 25 bp, Homo sapien
taagcggctatcaactaaaccagga

SEQ ID NO: 2408493 - DNA, 25 bp, Homo sapien
cataaagacggaccccacaagagtt

SEQ ID NO: 2408494 - DNA, 25 bp, Homo sapien
tttccttccccctgataatgatttg

SEQ ID NO: 2408495 - DNA, 25 bp, Homo sapien
gatttgacaatcctatccattcttt

SEQ ID NO: 2408496 - DNA, 25 bp, Homo sapien
ctggatttgacaatcctatccattc

SEQ ID NO: 2408497 - DNA, 25 bp, Homo sapien
ccttccccctgataatgatttgctg

SEQ ID NO: 2408498 - DNA, 25 bp, Homo sapien
ttctgaagcctctccgttatcatca

SEQ ID NO: 2408499 - DNA, 25 bp, Homo sapien
tctccgttatcatcacccatatcat

SEQ ID NO: 2408500 - DNA, 25 bp, Homo sapien
tctgaagcctctccgttatcatcac

SEQ ID NO: 2408501 - DNA, 25 bp, Homo sapien
tatcatcacccatatcatattcact

SEQ ID NO: 2408502 - DNA, 25 bp, Homo sapien
ccaagaacatctcagtggcctgcat

SEQ ID NO: 2408503 - DNA, 25 bp, Homo sapien
caagaacatctcagtggcctgcatg

SEQ ID NO: 2408504 - DNA, 25 bp, Homo sapien
tccaagaacatctcagtggcctgca

SEQ ID NO: 2408505 - DNA, 25 bp, Homo sapien
tgctgctcctcttcctccttttccc

SEQ ID NO: 2408506 - DNA, 25 bp, Homo sapien
ctgctcctcttcctccttttccctc

SEQ ID NO: 2408507 - DNA, 25 bp, Homo sapien
gctgctcctcttcctccttttccct

SEQ ID NO: 2408508 - DNA, 25 bp, Homo sapien
atgctgctcctcttcctccttttcc

SEQ ID NO: 2408509 - DNA, 25 bp, Homo sapien
gaaagtccacatatagtttcaagtg

SEQ ID NO: 2408510 - DNA, 25 bp, Homo sapien
cttaaccaggagtatttaaggagag

SEQ ID NO: 2408511 - DNA, 25 bp, Homo sapien
taaccaggagtatttaaggagagat

SEQ ID NO: 2408512 - DNA, 25 bp, Homo sapien
cctgatcagtcaagaaacttaacca

SEQ ID NO: 2408513 - DNA, 25 bp, Homo sapien
tggcttcagccaacttcacggagca

SEQ ID NO: 2408514 - DNA, 25 bp, Homo sapien
gctctggcttcagccaacttcacgg

SEQ ID NO: 2408515 - DNA, 25 bp, Homo sapien
tctggcttcagccaacttcacggag

SEQ ID NO: 2408516 - DNA, 25 bp, Homo sapien
tctgctctggcttcagccaacttca

SEQ ID NO: 2408517 - DNA, 25 bp, Homo sapien
gatgtcagtgaaaggcaaacaactt

SEQ ID NO: 2408518 - DNA, 25 bp, Homo sapien
acaacttccttgagacagagcaata

SEQ ID NO: 2408519 - DNA, 25 bp, Homo sapien
tattgccagatgcattctactatgg

SEQ ID NO: 2408520 - DNA, 25 bp, Homo sapien
tctactatggtgtctaggacatagc

SEQ ID NO: 2408521 - DNA, 25 bp, Homo sapien
tttatttctcagcacaccgttgtca

SEQ ID NO: 2408522 - DNA, 25 bp, Homo sapien
ctcaggataatagtgtcccctggag

SEQ ID NO: 2408523 - DNA, 25 bp, Homo sapien
accgttgtcactatctagcctcagg

SEQ ID NO: 2408524 - DNA, 25 bp, Homo sapien
cctgaaaccactcttctttgggcaa

SEQ ID NO: 2408525 - DNA, 25 bp, Homo sapien
cacaagtatcttctcacacaaatca

SEQ ID NO: 2408526 - DNA, 25 bp, Homo sapien
ttctcacttacggtattgtgtctcc

SEQ ID NO: 2408527 - DNA, 25 bp, Homo sapien
tctccatacacaagtatcttctcac

SEQ ID NO: 2408528 - DNA, 25 bp, Homo sapien
tcagcacccatcagtaaaactctct

SEQ ID NO: 2408529 - DNA, 25 bp, Homo sapien
tatacgggccaggatgttgagagac

SEQ ID NO: 2408530 - DNA, 25 bp, Homo sapien
tgtcaatatgagcagggatagccca

SEQ ID NO: 2408531 - DNA, 25 bp, Homo sapien
cattcagctaacaagtatacgggcc

SEQ ID NO: 2408532 - DNA, 25 bp, Homo sapien
gaagcaagcccagacaggttaggaa

SEQ ID NO: 2408533 - DNA, 25 bp, Homo sapien
ctttctgatgatagcttgttgcctt

SEQ ID NO: 2408534 - DNA, 25 bp, Homo sapien
ctgatgatagcttgttgcctttcaa

SEQ ID NO: 2408535 - DNA, 25 bp, Homo sapien
tctgttccacttgtaaacaccacat

SEQ ID NO: 2408536 - DNA, 25 bp, Homo sapien
tgcctttcaaaagaacaactctgtt

SEQ ID NO: 2408537 - DNA, 25 bp, Homo sapien
gaaggataaccatgccattcccctg

SEQ ID NO: 2408538 - DNA, 25 bp, Homo sapien
tgccaacgtggagctaacagtctag

SEQ ID NO: 2408539 - DNA, 25 bp, Homo sapien
tcccctgagttggagaaaaccagtg

SEQ ID NO: 2408540 - DNA, 25 bp, Homo sapien
tgaatttctggtacgtgcaacagga

SEQ ID NO: 2408541 - DNA, 25 bp, Homo sapien
gccagggctgacagacatagcatgt

SEQ ID NO: 2408542 - DNA, 25 bp, Homo sapien
taaccagaatgactgatacgacagc

SEQ ID NO: 2408543 - DNA, 25 bp, Homo sapien
caaccgagtgtggagaagtaggatc

SEQ ID NO: 2408544 - DNA, 25 bp, Homo sapien
tacacgggattcagaagatttccaa

SEQ ID NO: 2408545 - DNA, 25 bp, Homo sapien
tgggctgttccgcacacttctgagc

SEQ ID NO: 2408546 - DNA, 25 bp, Homo sapien
cactcagtaggtactccccggtgta

SEQ ID NO: 2408547 - DNA, 25 bp, Homo sapien
tccccggtgtaatacttgtggctga

SEQ ID NO: 2408548 - DNA, 25 bp, Homo sapien
cacacttctgagcactcagtaggta

SEQ ID NO: 2408549 - DNA, 25 bp, Homo sapien
tgtgcccggcttagaactttgattt

SEQ ID NO: 2408550 - DNA, 25 bp, Homo sapien
agtgattctcacctaagcttcccag

SEQ ID NO: 2408551 - DNA, 25 bp, Homo sapien
tatgctatataaagcccttggcaca

SEQ ID NO: 2408552 - DNA, 25 bp, Homo sapien
tggaggcaatcatatccctgtacaa

SEQ ID NO: 2408553 - DNA, 25 bp, Homo sapien
caatgcagaatggactataggaatc

SEQ ID NO: 2408554 - DNA, 25 bp, Homo sapien
ccaatgctggagattgagccagtgg

SEQ ID NO: 2408555 - DNA, 25 bp, Homo sapien
gtgaccccaatgctggagattgagc

SEQ ID NO: 2408556 - DNA, 25 bp, Homo sapien
tgaactttatcgaaatgcaaaaagg

SEQ ID NO: 2408557 - DNA, 25 bp, Homo sapien
gccaaacaaaccagactaagagtaa

SEQ ID NO: 2408558 - DNA, 25 bp, Homo sapien
agagacaaaaaccaagcctgtttct

SEQ ID NO: 2408559 - DNA, 25 bp, Homo sapien
tgtaaaagccacctctatagcagca

SEQ ID NO: 2408560 - DNA, 25 bp, Homo sapien
agaatatccttcatacgactacaga

SEQ ID NO: 2408561 - DNA, 25 bp, Homo sapien
ccagactgggcacgatccacgtgta

SEQ ID NO: 2408562 - DNA, 25 bp, Homo sapien
cagcagtggtgattatggcaattcc

SEQ ID NO: 2408563 - DNA, 25 bp, Homo sapien
gatcttagaatctccatcgtccagg

SEQ ID NO: 2408564 - DNA, 25 bp, Homo sapien
gagttggccacttcaaagatgtagg

SEQ ID NO: 2408565 - DNA, 25 bp, Homo sapien
taccttctagttctactgtcctcca

SEQ ID NO: 2408566 - DNA, 25 bp, Homo sapien
ctgattcctctgctccgattgatgc

SEQ ID NO: 2408567 - DNA, 25 bp, Homo sapien
cgtaccttctagttctactgtcctc

SEQ ID NO: 2408568 - DNA, 25 bp, Homo sapien
tgctccgattgatgcccagctcaac

SEQ ID NO: 2408569 - DNA, 25 bp, Homo sapien
gctgttcacaatcaaagaggctttg

SEQ ID NO: 2408570 - DNA, 25 bp, Homo sapien
cttcctcacatatagcaaagtacgg

SEQ ID NO: 2408571 - DNA, 25 bp, Homo sapien
cacatatagcaaagtacggctgttc

SEQ ID NO: 2408572 - DNA, 25 bp, Homo sapien
aaagtacggctgttcacaatcaaag

SEQ ID NO: 2408573 - DNA, 25 bp, Homo sapien
aattggtgcactgattgtgaacctg

SEQ ID NO: 2408574 - DNA, 25 bp, Homo sapien
ttaaaccaggataggccaagtactg

SEQ ID NO: 2408575 - DNA, 25 bp, Homo sapien
taggccaagtactgtcctcaccgac

SEQ ID NO: 2408576 - DNA, 25 bp, Homo sapien
tttacacccaggaattggtgcactg

SEQ ID NO: 2408577 - DNA, 25 bp, Homo sapien
cacactagcctgaatcccaccaagg

SEQ ID NO: 2408578 - DNA, 25 bp, Homo sapien
tgttcttaaatagggactcagagct

SEQ ID NO: 2408579 - DNA, 25 bp, Homo sapien
tattagtgtcaacacatctgtgttg

SEQ ID NO: 2408580 - DNA, 25 bp, Homo sapien
ttagggcattattagtgtcaacaca

SEQ ID NO: 2408581 - DNA, 25 bp, Homo sapien
cttcattttcttttcttgatctcta

SEQ ID NO: 2408582 - DNA, 25 bp, Homo sapien
attttcttttcttgatctctaactt

SEQ ID NO: 2408583 - DNA, 25 bp, Homo sapien
tttcttttcttgatctctaactttc

SEQ ID NO: 2408584 - DNA, 25 bp, Homo sapien
tcattttcttttcttgatctctaac

SEQ ID NO: 2408585 - DNA, 25 bp, Homo sapien
tgggaatagacacgtgaagtttcat

SEQ ID NO: 2408586 - DNA, 25 bp, Homo sapien
gtttcattgagagtgcaatacaatc

SEQ ID NO: 2408587 - DNA, 25 bp, Homo sapien
ttcattgagagtgcaatacaatcca

SEQ ID NO: 2408588 - DNA, 25 bp, Homo sapien
gaagtttcattgagagtgcaataca

SEQ ID NO: 2408589 - DNA, 25 bp, Homo sapien
ctaggatggatgcccagctcctaac

SEQ ID NO: 2408590 - DNA, 25 bp, Homo sapien
ctaatcctgtcaacattcctggagc

SEQ ID NO: 2408591 - DNA, 25 bp, Homo sapien
cctccttgctgcaatcagcactgca

SEQ ID NO: 2408592 - DNA, 25 bp, Homo sapien
taatcctgtcaacattcctggagcc

SEQ ID NO: 2408593 - DNA, 25 bp, Homo sapien
tcttgtccctccttgctgcaatcag

SEQ ID NO: 2408594 - DNA, 25 bp, Homo sapien
cggccaactgtgaattctgatccat

SEQ ID NO: 2408595 - DNA, 25 bp, Homo sapien
tcaggctcacatcggccaactgtga

SEQ ID NO: 2408596 - DNA, 25 bp, Homo sapien
cacatcggccaactgtgaattctga

SEQ ID NO: 2408597 - DNA, 25 bp, Homo sapien
ctgaagctatcaggctcacatcggc

SEQ ID NO: 2408598 - DNA, 25 bp, Homo sapien
tcttcccaaaagtgctcaaaggcaa

SEQ ID NO: 2408599 - DNA, 25 bp, Homo sapien
acatcttcccaaaagtgctcaaagg

SEQ ID NO: 2408600 - DNA, 25 bp, Homo sapien
ccaaaagtgctcaaaggcaagcaaa

SEQ ID NO: 2408601 - DNA, 25 bp, Homo sapien
gtgctcaaaggcaagcaaatgcctc

SEQ ID NO: 2408602 - DNA, 25 bp, Homo sapien
gagtaaaagacttttggagtatgac

SEQ ID NO: 2408603 - DNA, 25 bp, Homo sapien
gttcttcttggtatgggcacactga

SEQ ID NO: 2408604 - DNA, 25 bp, Homo sapien
tatgacgaaactgttcttcttggta

SEQ ID NO: 2408605 - DNA, 25 bp, Homo sapien
gacttttggagtatgacgaaactgt

SEQ ID NO: 2408606 - DNA, 25 bp, Homo sapien
agaaaagccataaggagccaaggat

SEQ ID NO: 2408607 - DNA, 25 bp, Homo sapien
gagaaaagccataaggagccaagga

SEQ ID NO: 2408608 - DNA, 25 bp, Homo sapien
ggagaaaagccataaggagccaagg

SEQ ID NO: 2408609 - DNA, 25 bp, Homo sapien
gaaaagccataaggagccaaggatt

SEQ ID NO: 2408610 - DNA, 25 bp, Homo sapien
gaaaagagagactgatactccaaac

SEQ ID NO: 2408611 - DNA, 25 bp, Homo sapien
aagagagactgatactccaaacccc

SEQ ID NO: 2408612 - DNA, 25 bp, Homo sapien
cttctgtaccttgatacagttcaga

SEQ ID NO: 2408613 - DNA, 25 bp, Homo sapien
agaaattcttctgtaccttgataca

SEQ ID NO: 2408614 - DNA, 25 bp, Homo sapien
ggaagagttaaaggaggtcactatc

SEQ ID NO: 2408615 - DNA, 25 bp, Homo sapien
taaaggaggtcactatccacactgc

SEQ ID NO: 2408616 - DNA, 25 bp, Homo sapien
cactgcactgaagtattccgcaata

SEQ ID NO: 2408617 - DNA, 25 bp, Homo sapien
cgcaatacccatcttcagaataagg

SEQ ID NO: 2408618 - DNA, 25 bp, Homo sapien
cccagtcttccttgttgtcaaatca

SEQ ID NO: 2408619 - DNA, 25 bp, Homo sapien
atctctccccagtcttccttgttgt

SEQ ID NO: 2408620 - DNA, 25 bp, Homo sapien
tgattccattttatttggccaaaaa

SEQ ID NO: 2408621 - DNA, 25 bp, Homo sapien
ttggccaaaaatctttttccatctc

SEQ ID NO: 2408622 - DNA, 25 bp, Homo sapien
tttaagtaatcctgtccctcacttg

SEQ ID NO: 2408623 - DNA, 25 bp, Homo sapien
caagaccagtgctctgagatttttt

SEQ ID NO: 2408624 - DNA, 25 bp, Homo sapien
ggtttctaggaaatcaatccattct

SEQ ID NO: 2408625 - DNA, 25 bp, Homo sapien
cctcacttgatcgttcattcttcgt

SEQ ID NO: 2408626 - DNA, 25 bp, Homo sapien
gccgtggtgatcagggtccggaggc

SEQ ID NO: 2408627 - DNA, 25 bp, Homo sapien
ttaagaaagcagacctgccattggc

SEQ ID NO: 2408628 - DNA, 25 bp, Homo sapien
ccaggaatataccagatttttccca

SEQ ID NO: 2408629 - DNA, 25 bp, Homo sapien
ggaatataccagatttttcccacag

SEQ ID NO: 2408630 - DNA, 25 bp, Homo sapien
tccctttctttgtccatgcaggctg

SEQ ID NO: 2408631 - DNA, 25 bp, Homo sapien
tttctttgtccatgcaggctgcgct

SEQ ID NO: 2408632 - DNA, 25 bp, Homo sapien
cctttctttgtccatgcaggctgcg

SEQ ID NO: 2408633 - DNA, 25 bp, Homo sapien
ttgccgctgtgcctgttgtccactc

SEQ ID NO: 2408634 - DNA, 25 bp, Homo sapien
ctcctgtgtcctctcatcccctccc

SEQ ID NO: 2408635 - DNA, 25 bp, Homo sapien
cctgtgtcctctcatcccctcccat

SEQ ID NO: 2408636 - DNA, 25 bp, Homo sapien
tcctgtgtcctctcatcccctccca

SEQ ID NO: 2408637 - DNA, 25 bp, Homo sapien
ctgaggaaggtgactagtgggaaac

SEQ ID NO: 2408638 - DNA, 25 bp, Homo sapien
cccagaccctgttgaagctttaact

SEQ ID NO: 2408639 - DNA, 25 bp, Homo sapien
tagtgggaaactagtatccacaggg

SEQ ID NO: 2408640 - DNA, 25 bp, Homo sapien
tctcaatggaagaagaccgcagggt

SEQ ID NO: 2408641 - DNA, 25 bp, Homo sapien
gcttatcctctaaccaaagatgtgt

SEQ ID NO: 2408642 - DNA, 25 bp, Homo sapien
cgttattcaactcacaaatccttag

SEQ ID NO: 2408643 - DNA, 25 bp, Homo sapien
atgaagtcatcagccctaatggcca

SEQ ID NO: 2408644 - DNA, 25 bp, Homo sapien
gccctaatggccatgccaattgtga

SEQ ID NO: 2408645 - DNA, 25 bp, Homo sapien
gctggataaggccagagccctatga

SEQ ID NO: 2408646 - DNA, 25 bp, Homo sapien
cattgtcctgggcatcgaagccaga

SEQ ID NO: 2408647 - DNA, 25 bp, Homo sapien
cagcaagcctcaccatgagaggagc

SEQ ID NO: 2408648 - DNA, 25 bp, Homo sapien
gagctgccacatgcctagagccagc

SEQ ID NO: 2408649 - DNA, 25 bp, Homo sapien
cacttaaggctgagacacagtcacc

SEQ ID NO: 2408650 - DNA, 25 bp, Homo sapien
tctcagggtagaaccccagggcatc

SEQ ID NO: 2408651 - DNA, 25 bp, Homo sapien
caggacacctgaaagattgctagac

SEQ ID NO: 2408652 - DNA, 25 bp, Homo sapien
catttctagggactgtcaatctggc

SEQ ID NO: 2408653 - DNA, 25 bp, Homo sapien
cagtctctggtgtctttgctaagtt

SEQ ID NO: 2408654 - DNA, 25 bp, Homo sapien
tgtgctcaattttgacgttaaggac

SEQ ID NO: 2408655 - DNA, 25 bp, Homo sapien
ttgacgttaaggacccatcccagtc

SEQ ID NO: 2408656 - DNA, 25 bp, Homo sapien
tcccagtctctggtgtctttgctaa

SEQ ID NO: 2408657 - DNA, 25 bp, Homo sapien
gcctcccctcttctagtaccagtaa

SEQ ID NO: 2408658 - DNA, 25 bp, Homo sapien
ccctcttctagtaccagtaagtaag

SEQ ID NO: 2408659 - DNA, 25 bp, Homo sapien
ctcttctagtaccagtaagtaagct

SEQ ID NO: 2408660 - DNA, 25 bp, Homo sapien
tcccctcttctagtaccagtaagta

SEQ ID NO: 2408661 - DNA, 25 bp, Homo sapien
tactcagtagcttcgaggtctatcc

SEQ ID NO: 2408662 - DNA, 25 bp, Homo sapien
cagggattctactgtgtctactcag

SEQ ID NO: 2408663 - DNA, 25 bp, Homo sapien
catgtggtcattctaaagggcttta

SEQ ID NO: 2408664 - DNA, 25 bp, Homo sapien
tacagggccctgagaaatggaataa

SEQ ID NO: 2408665 - DNA, 25 bp, Homo sapien
caaatactattacaccaggccaggc

SEQ ID NO: 2408666 - DNA, 25 bp, Homo sapien
tctaggactaacaatgtgcttcttg

SEQ ID NO: 2408667 - DNA, 25 bp, Homo sapien
ccattattagctatactccttgcca

SEQ ID NO: 2408668 - DNA, 25 bp, Homo sapien
gcttcttgaaactgctacactcctt

SEQ ID NO: 2408669 - DNA, 25 bp, Homo sapien
caagcattagcttttctttcacaca

SEQ ID NO: 2408670 - DNA, 25 bp, Homo sapien
aaatgtcctaatattctctggagca

SEQ ID NO: 2408671 - DNA, 25 bp, Homo sapien
tgaacatgagagtcatagagaaact

SEQ ID NO: 2408672 - DNA, 25 bp, Homo sapien
gacttctagatttatgatcctgcag

SEQ ID NO: 2408673 - DNA, 25 bp, Homo sapien
ttcccaggagacttgacgggcatgt

SEQ ID NO: 2408674 - DNA, 25 bp, Homo sapien
caggagacttgacgggcatgtgatc

SEQ ID NO: 2408675 - DNA, 25 bp, Homo sapien
acttgacgggcatgtgatcttgtgc

SEQ ID NO: 2408676 - DNA, 25 bp, Homo sapien
agctgccagcccagtactcctcatc

SEQ ID NO: 2408677 - DNA, 25 bp, Homo sapien
catggaacactggttaggaattctg

SEQ ID NO: 2408678 - DNA, 25 bp, Homo sapien
ccatgcatggaacactggttaggaa

SEQ ID NO: 2408679 - DNA, 25 bp, Homo sapien
tgcatggaacactggttaggaattc

SEQ ID NO: 2408680 - DNA, 25 bp, Homo sapien
tggaacactggttaggaattctggc

SEQ ID NO: 2408681 - DNA, 25 bp, Homo sapien
gaagagttttctgcgtggctctgaa

SEQ ID NO: 2408682 - DNA, 25 bp, Homo sapien
ccatgtgtggtcctttgggatcaag

SEQ ID NO: 2408683 - DNA, 25 bp, Homo sapien
ctttgggatcaagccagtgatgctg

SEQ ID NO: 2408684 - DNA, 25 bp, Homo sapien
tcagggaagagttttctgcgtggct

SEQ ID NO: 2408685 - DNA, 25 bp, Homo sapien
gatcttctgacagagccctgtgagc

SEQ ID NO: 2408686 - DNA, 25 bp, Homo sapien
tcccctagtccttctggcctgtttg

SEQ ID NO: 2408687 - DNA, 25 bp, Homo sapien
ctcttctgttgggacctggagatct

SEQ ID NO: 2408688 - DNA, 25 bp, Homo sapien
ctggagatcttctgacagagccctg

SEQ ID NO: 2408689 - DNA, 25 bp, Homo sapien
aatgagagtgatggagcccagaagc

SEQ ID NO: 2408690 - DNA, 25 bp, Homo sapien
atggagcccagaagcagctttacca

SEQ ID NO: 2408691 - DNA, 25 bp, Homo sapien
tggagcccagaagcagctttaccat

SEQ ID NO: 2408692 - DNA, 25 bp, Homo sapien
ctgaatgagagtgatggagcccaga

SEQ ID NO: 2408693 - DNA, 25 bp, Homo sapien
tgacgaagggactgccactgccagt

SEQ ID NO: 2408694 - DNA, 25 bp, Homo sapien
gacatcagggagcttcgtataacca

SEQ ID NO: 2408695 - DNA, 25 bp, Homo sapien
cactgccagtatgggtcatgggaca

SEQ ID NO: 2408696 - DNA, 25 bp, Homo sapien
cttggccaaaaaggaggcttgacga

SEQ ID NO: 2408697 - DNA, 25 bp, Homo sapien
tctatggcctgtgagtagttgggac

SEQ ID NO: 2408698 - DNA, 25 bp, Homo sapien
tccagccacatgtactgtagtgttc

SEQ ID NO: 2408699 - DNA, 25 bp, Homo sapien
tagttgggacacaccagtttctgga

SEQ ID NO: 2408700 - DNA, 25 bp, Homo sapien
cctaagtagctcattagaagaatgc

SEQ ID NO: 2408701 - DNA, 25 bp, Homo sapien
gagagccagaatcagtccaggtctg

SEQ ID NO: 2408702 - DNA, 25 bp, Homo sapien
tagggcattatgtccttgggtggcc

SEQ ID NO: 2408703 - DNA, 25 bp, Homo sapien
aattagctacagctcctcacccagg

SEQ ID NO: 2408704 - DNA, 25 bp, Homo sapien
gatggaagagcactacaaggtccca

SEQ ID NO: 2408705 - DNA, 25 bp, Homo sapien
tctgctaaaaataaagtggacacaa

SEQ ID NO: 2408706 - DNA, 25 bp, Homo sapien
gattgctggtatctggccctcatat

SEQ ID NO: 2408707 - DNA, 25 bp, Homo sapien
ctggaagtgccaggttgctgattgc

SEQ ID NO: 2408708 - DNA, 25 bp, Homo sapien
cttttgccatgtctgtctgctaaaa

SEQ ID NO: 2408709 - DNA, 25 bp, Homo sapien
ccaagggcctcggtagtggaacagc

SEQ ID NO: 2408710 - DNA, 25 bp, Homo sapien
aacagctaaagggaacactgacacc

SEQ ID NO: 2408711 - DNA, 25 bp, Homo sapien
ggtagtggaacagctaaagggaaca

SEQ ID NO: 2408712 - DNA, 25 bp, Homo sapien
acactgacaccctttcagcattgtc

SEQ ID NO: 2408713 - DNA, 25 bp, Homo sapien
aataactctcatagacccatacttg

SEQ ID NO: 2408714 - DNA, 25 bp, Homo sapien
aactctcatagacccatacttgctg

SEQ ID NO: 2408715 - DNA, 25 bp, Homo sapien
caaataactctcatagacccatact

SEQ ID NO: 2408716 - DNA, 25 bp, Homo sapien
tctcatagacccatacttgctgatt

SEQ ID NO: 2408717 - DNA, 25 bp, Homo sapien
ttaagcccccaaacattcctctgca

SEQ ID NO: 2408718 - DNA, 25 bp, Homo sapien
agcccccaaacattcctctgcatgg

SEQ ID NO: 2408719 - DNA, 25 bp, Homo sapien
ctgccaccacccattcagcatcgaa

SEQ ID NO: 2408720 - DNA, 25 bp, Homo sapien
agcatcgaacgcctggggctgagcc

SEQ ID NO: 2408721 - DNA, 25 bp, Homo sapien
cctgctgccgacaggtggcggtaac

SEQ ID NO: 2408722 - DNA, 25 bp, Homo sapien
gaggttgtcaactagccaggcagca

SEQ ID NO: 2408723 - DNA, 25 bp, Homo sapien
gctcagctgctccactgcggaggtt

SEQ ID NO: 2408724 - DNA, 25 bp, Homo sapien
ggttcctttagtctcggctcagctg

SEQ ID NO: 2408725 - DNA, 25 bp, Homo sapien
cagcacaaaccctcaggcccttctc

SEQ ID NO: 2408726 - DNA, 25 bp, Homo sapien
tcagcacaaaccctcaggcccttct

SEQ ID NO: 2408727 - DNA, 25 bp, Homo sapien
tgagaacgagctctgctgcctgaca

SEQ ID NO: 2408728 - DNA, 25 bp, Homo sapien
tcggaagtgcccacgaggatgacag

SEQ ID NO: 2408729 - DNA, 25 bp, Homo sapien
gaaatcatctttctcgtgggcatcc

SEQ ID NO: 2408730 - DNA, 25 bp, Homo sapien
cttgatggccacctcgtcggaagtg

SEQ ID NO: 2408731 - DNA, 25 bp, Homo sapien
ttggaatcaatatcttcaatcacaa

SEQ ID NO: 2408732 - DNA, 25 bp, Homo sapien
cacacgtcagatttggaatcaatat

SEQ ID NO: 2408733 - DNA, 25 bp, Homo sapien
tcacacgtcagatttggaatcaata

SEQ ID NO: 2408734 - DNA, 25 bp, Homo sapien
aatcaatatcttcaatcacaaagag

SEQ ID NO: 2408735 - DNA, 25 bp, Homo sapien
aaaatatgttcatgaacaactccac

SEQ ID NO: 2408736 - DNA, 25 bp, Homo sapien
taaaatatgttcatgaacaactcca

SEQ ID NO: 2408737 - DNA, 25 bp, Homo sapien
ttaaaatatgttcatgaacaactcc

SEQ ID NO: 2408738 - DNA, 25 bp, Homo sapien
ggttgtcctttacaagatttgtcac

SEQ ID NO: 2408739 - DNA, 25 bp, Homo sapien
tggttgtcctttacaagatttgtca

SEQ ID NO: 2408740 - DNA, 25 bp, Homo sapien
gctgttctaattttccctggttgtc

SEQ ID NO: 2408741 - DNA, 25 bp, Homo sapien
ccctggttgtcctttacaagatttg

SEQ ID NO: 2408742 - DNA, 25 bp, Homo sapien
tttcttcccccattgcaccatccac

SEQ ID NO: 2408743 - DNA, 25 bp, Homo sapien
tgtttcttcccccattgcaccatcc

SEQ ID NO: 2408744 - DNA, 25 bp, Homo sapien
gtttcttcccccattgcaccatcca

SEQ ID NO: 2408745 - DNA, 25 bp, Homo sapien
ctgtttcttcccccattgcaccatc

SEQ ID NO: 2408746 - DNA, 25 bp, Homo sapien
actagcacctggcggtctccttcgg

SEQ ID NO: 2408747 - DNA, 25 bp, Homo sapien
atctctccacatttccgtggcccac

SEQ ID NO: 2408748 - DNA, 25 bp, Homo sapien
ggtctccttcggcacctcttcctct

SEQ ID NO: 2408749 - DNA, 25 bp, Homo sapien
atttccgtggcccactagcacctgg

SEQ ID NO: 2408750 - DNA, 25 bp, Homo sapien
ttaaatatgttacgtatttcatttg

SEQ ID NO: 2408751 - DNA, 25 bp, Homo sapien
tttcatttgtgcaatgccctggata

SEQ ID NO: 2408752 - DNA, 25 bp, Homo sapien
cttcagctgattgccatctttcatc

SEQ ID NO: 2408753 - DNA, 25 bp, Homo sapien
aatatgttacgtatttcatttgtgc

SEQ ID NO: 2408754 - DNA, 25 bp, Homo sapien
gaaaacggcaggcttgattgcctct

SEQ ID NO: 2408755 - DNA, 25 bp, Homo sapien
gattgcctctgccatcagtgcagca

SEQ ID NO: 2408756 - DNA, 25 bp, Homo sapien
agtgcagcaaagctttgccgtactg

SEQ ID NO: 2408757 - DNA, 25 bp, Homo sapien
tttgccgtactgtgcgtgcagtgcg

SEQ ID NO: 2408758 - DNA, 25 bp, Homo sapien
aaagtggttgagcacgatccaggct

SEQ ID NO: 2408759 - DNA, 25 bp, Homo sapien
gaaagtggttgagcacgatccaggc

SEQ ID NO: 2408760 - DNA, 25 bp, Homo sapien
gagaaagtggttgagcacgatccag

SEQ ID NO: 2408761 - DNA, 25 bp, Homo sapien
ttgagaaagtggttgagcacgatcc

SEQ ID NO: 2408762 - DNA, 25 bp, Homo sapien
tgaaaatgagagcaacaacgatgca

SEQ ID NO: 2408763 - DNA, 25 bp, Homo sapien
gagcaacaacgatgcagatgaactg

SEQ ID NO: 2408764 - DNA, 25 bp, Homo sapien
cagatgaactggctggagcatttga

SEQ ID NO: 2408765 - DNA, 25 bp, Homo sapien
catttgacgccctttaccacaggag

SEQ ID NO: 2408766 - DNA, 25 bp, Homo sapien
tgcaggatattgtttgttgatcctt

SEQ ID NO: 2408767 - DNA, 25 bp, Homo sapien
tgtaactgtgcaggatattgtttgt

SEQ ID NO: 2408768 - DNA, 25 bp, Homo sapien
gtgcaggatattgtttgttgatcct

SEQ ID NO: 2408769 - DNA, 25 bp, Homo sapien
aactgtgcaggatattgtttgttga

SEQ ID NO: 2408770 - DNA, 25 bp, Homo sapien
gaagacgtcactttgatgttggcct

SEQ ID NO: 2408771 - DNA, 25 bp, Homo sapien
caaaggtacagttttgccggtgaca

SEQ ID NO: 2408772 - DNA, 25 bp, Homo sapien
tggttagatcccagcagtgagaggc

SEQ ID NO: 2408773 - DNA, 25 bp, Homo sapien
agctgctatgctccaggtgcacctg

SEQ ID NO: 2408774 - DNA, 25 bp, Homo sapien
ttttacaataagtactgcgaatgac

SEQ ID NO: 2408775 - DNA, 25 bp, Homo sapien
tttttacaataagtactgcgaatga

SEQ ID NO: 2408776 - DNA, 25 bp, Homo sapien
tccttctccagttgacagcatgtgc

SEQ ID NO: 2408777 - DNA, 25 bp, Homo sapien
ttctccagttgacagcatgtgctca

SEQ ID NO: 2408778 - DNA, 25 bp, Homo sapien
ttatccttctccagttgacagcatg

SEQ ID NO: 2408779 - DNA, 25 bp, Homo sapien
gagaccaccttgtacgataaccctc

SEQ ID NO: 2408780 - DNA, 25 bp, Homo sapien
ccatgaccaccaccatgttactttt

SEQ ID NO: 2408781 - DNA, 25 bp, Homo sapien
cgtcttccacgtgcaaacctctctc

SEQ ID NO: 2408782 - DNA, 25 bp, Homo sapien
ttgatcatgatgtcgattacagaac

SEQ ID NO: 2408783 - DNA, 25 bp, Homo sapien
tttgatcatgatgtcgattacagaa

SEQ ID NO: 2408784 - DNA, 25 bp, Homo sapien
tcatcacgagcatacctggagggtc

SEQ ID NO: 2408785 - DNA, 25 bp, Homo sapien
gttccgtatggactctgggtgccct

SEQ ID NO: 2408786 - DNA, 25 bp, Homo sapien
aacaagcgcctttttctccaagtcg

SEQ ID NO: 2408787 - DNA, 25 bp, Homo sapien
gtaagcccgtgagccacagaacaaa

SEQ ID NO: 2408788 - DNA, 25 bp, Homo sapien
agctggcggtttctcctccacaaat

SEQ ID NO: 2408789 - DNA, 25 bp, Homo sapien
gagctggcggtttctcctccacaaa

SEQ ID NO: 2408790 - DNA, 25 bp, Homo sapien
tgcctcccttgatgacgatgcaggc

SEQ ID NO: 2408791 - DNA, 25 bp, Homo sapien
tgccgactccccagcacagcagtcg

SEQ ID NO: 2408792 - DNA, 25 bp, Homo sapien
tcccttgatgacgatgcaggctctg

SEQ ID NO: 2408793 - DNA, 25 bp, Homo sapien
ttgatgacgatgcaggctctgcgga

SEQ ID NO: 2408794 - DNA, 25 bp, Homo sapien
ttctgaatcttcgtggtttactgta

SEQ ID NO: 2408795 - DNA, 25 bp, Homo sapien
tgggtgagctcccacattctgaatc

SEQ ID NO: 2408796 - DNA, 25 bp, Homo sapien
ttgggtgagctcccacattctgaat

SEQ ID NO: 2408797 - DNA, 25 bp, Homo sapien
cttgggtgagctcccacattctgaa

SEQ ID NO: 2408798 - DNA, 25 bp, Homo sapien
taagtggagccgagcttttcagcct

SEQ ID NO: 2408799 - DNA, 25 bp, Homo sapien
ccaatattgggagaacatgccagga

SEQ ID NO: 2408800 - DNA, 25 bp, Homo sapien
agatttttctatccaccactggaga

SEQ ID NO: 2408801 - DNA, 25 bp, Homo sapien
cagaatggacgcttgattgaggctt

SEQ ID NO: 2408802 - DNA, 25 bp, Homo sapien
gcagctgtcgctttctgattctccc

SEQ ID NO: 2408803 - DNA, 25 bp, Homo sapien
tgattctcccccagaagagtgccaa

SEQ ID NO: 2408804 - DNA, 25 bp, Homo sapien
tctcccccagaagagtgccaaaatt

SEQ ID NO: 2408805 - DNA, 25 bp, Homo sapien
ggcagagcagctgtcgctttctgat

SEQ ID NO: 2408806 - DNA, 25 bp, Homo sapien
tcgaggaggacacgtaacctccaag

SEQ ID NO: 2408807 - DNA, 25 bp, Homo sapien
tggttgtcgaggaggacacgtaacc

SEQ ID NO: 2408808 - DNA, 25 bp, Homo sapien
ggacacgtaacctccaaggtgactg

SEQ ID NO: 2408809 - DNA, 25 bp, Homo sapien
ggaggacacgtaacctccaaggtga

SEQ ID NO: 2408810 - DNA, 25 bp, Homo sapien
tttctttcccatgtcacccacattg

SEQ ID NO: 2408811 - DNA, 25 bp, Homo sapien
gacaaaatagaacccagtcagctct

SEQ ID NO: 2408812 - DNA, 25 bp, Homo sapien
cccacattgtaagggggctggcaga

SEQ ID NO: 2408813 - DNA, 25 bp, Homo sapien
aaaagacaaaatagaacccagtcag

SEQ ID NO: 2408814 - DNA, 25 bp, Homo sapien
gatgtgtgggtataaatagatatgt

SEQ ID NO: 2408815 - DNA, 25 bp, Homo sapien
agagtgtagaagtaacagtttgctt

SEQ ID NO: 2408816 - DNA, 25 bp, Homo sapien
gaactctgcaagatagccattttgc

SEQ ID NO: 2408817 - DNA, 25 bp, Homo sapien
tagatatgtagacagaaggagaaat

SEQ ID NO: 2408818 - DNA, 25 bp, Homo sapien
aagccaaacctctagacggacagat

SEQ ID NO: 2408819 - DNA, 25 bp, Homo sapien
acggacagattaagggagtgagcat

SEQ ID NO: 2408820 - DNA, 25 bp, Homo sapien
cagtcccttcttctcgcttgcatat

SEQ ID NO: 2408821 - DNA, 25 bp, Homo sapien
tatccacataagaaagacgaaggat

SEQ ID NO: 2408822 - DNA, 25 bp, Homo sapien
caaaggtaattcagggtatggagag

SEQ ID NO: 2408823 - DNA, 25 bp, Homo sapien
aaaggtaattcagggtatggagagc

SEQ ID NO: 2408824 - DNA, 25 bp, Homo sapien
ttcaaaggtaattcagggtatggag

SEQ ID NO: 2408825 - DNA, 25 bp, Homo sapien
taattcaaaggtaattcagggtatg

SEQ ID NO: 2408826 - DNA, 25 bp, Homo sapien
taacgcttcttctggcaattacggt

SEQ ID NO: 2408827 - DNA, 25 bp, Homo sapien
tgaggttagtggctggaatagattt

SEQ ID NO: 2408828 - DNA, 25 bp, Homo sapien
tgcagaatccagagtaattattccg

SEQ ID NO: 2408829 - DNA, 25 bp, Homo sapien
agagtaattattccgtgtgcatgtg

SEQ ID NO: 2408830 - DNA, 25 bp, Homo sapien
agaaacacaattcccacttaactcg

SEQ ID NO: 2408831 - DNA, 25 bp, Homo sapien
acttaactcgccagcgagtgcggcc

SEQ ID NO: 2408832 - DNA, 25 bp, Homo sapien
ttcccacttaactcgccagcgagtg

SEQ ID NO: 2408833 - DNA, 25 bp, Homo sapien
aattcccacttaactcgccagcgag

SEQ ID NO: 2408834 - DNA, 25 bp, Homo sapien
cccgggcttgtgctgaatgggttct

SEQ ID NO: 2408835 - DNA, 25 bp, Homo sapien
ctgaatgggttctgattgtgcacgg

SEQ ID NO: 2408836 - DNA, 25 bp, Homo sapien
tgcacggggtgcacactgggcattt

SEQ ID NO: 2408837 - DNA, 25 bp, Homo sapien
tcccaccccgggcttgtgctgaatg

SEQ ID NO: 2408838 - DNA, 25 bp, Homo sapien
gccgcgctgaggtgcagcgcacggg

SEQ ID NO: 2408839 - DNA, 25 bp, Homo sapien
ccgcgctgaggtgcagcgcacgggg

SEQ ID NO: 2408840 - DNA, 25 bp, Homo sapien
gttgcagtctgcggagaggggtggc

SEQ ID NO: 2408841 - DNA, 25 bp, Homo sapien
ctccgcggttgcagtctgcggagag

SEQ ID NO: 2408842 - DNA, 25 bp, Homo sapien
tctgcggagaggggtggccggtggc

SEQ ID NO: 2408843 - DNA, 25 bp, Homo sapien
ccgcggttgcagtctgcggagaggg

SEQ ID NO: 2408844 - DNA, 25 bp, Homo sapien
cgatagagcgaagccccgagatttc

SEQ ID NO: 2408845 - DNA, 25 bp, Homo sapien
tcaagaatcacccttgacgagcact

SEQ ID NO: 2408846 - DNA, 25 bp, Homo sapien
caaaaggatatgcattcggacgcca

SEQ ID NO: 2408847 - DNA, 25 bp, Homo sapien
tcggacgccagcactactggatggt

SEQ ID NO: 2408848 - DNA, 25 bp, Homo sapien
cacaccctgactccggggggaggag

SEQ ID NO: 2408849 - DNA, 25 bp, Homo sapien
gcacaccctgactccggggggagga

SEQ ID NO: 2408850 - DNA, 25 bp, Homo sapien
cgcacaccctgactccggggggagg

SEQ ID NO: 2408851 - DNA, 25 bp, Homo sapien
aattccattccaccctgttcacttt

SEQ ID NO: 2408852 - DNA, 25 bp, Homo sapien
caccctgttcacttttccaagtgta

SEQ ID NO: 2408853 - DNA, 25 bp, Homo sapien
tgtacagggaagaatgaacgctcat

SEQ ID NO: 2408854 - DNA, 25 bp, Homo sapien
tttccaagtgtacagggaagaatga

SEQ ID NO: 2408855 - DNA, 25 bp, Homo sapien
gccagttgagaagaagcaccatccg

SEQ ID NO: 2408856 - DNA, 25 bp, Homo sapien
tagtccttctcgcagcatgcagagg

SEQ ID NO: 2408857 - DNA, 25 bp, Homo sapien
tgttgccactctaccaggccagatg

SEQ ID NO: 2408858 - DNA, 25 bp, Homo sapien
gccagatgtgtagtccttctcgcag

SEQ ID NO: 2408859 - DNA, 25 bp, Homo sapien
cagtcttggcattgagatagtcctc

SEQ ID NO: 2408860 - DNA, 25 bp, Homo sapien
tcatattgatgtaccactggaatgt

SEQ ID NO: 2408861 - DNA, 25 bp, Homo sapien
cataaggaatattgtcagtcttggc

SEQ ID NO: 2408862 - DNA, 25 bp, Homo sapien
actggaatgtgtgtatgcagagaat

SEQ ID NO: 2408863 - DNA, 25 bp, Homo sapien
caagcaagcagagcaggataaacgc

SEQ ID NO: 2408864 - DNA, 25 bp, Homo sapien
taggaacatatcgaagcacagcttc

SEQ ID NO: 2408865 - DNA, 25 bp, Homo sapien
cgctataggaacatatcgaagcaca

SEQ ID NO: 2408866 - DNA, 25 bp, Homo sapien
ggataaacgctataggaacatatcg

SEQ ID NO: 2408867 - DNA, 25 bp, Homo sapien
atttcttagggaaatatgctttctc

SEQ ID NO: 2408868 - DNA, 25 bp, Homo sapien
tacaagtcctggtcttactgagaat

SEQ ID NO: 2408869 - DNA, 25 bp, Homo sapien
gatctaattcagatcttgtgccatt

SEQ ID NO: 2408870 - DNA, 25 bp, Homo sapien
tatcctatgtcaaaagggaggaggt

SEQ ID NO: 2408871 - DNA, 25 bp, Homo sapien
ctggcagactagtggagtcagaggc

SEQ ID NO: 2408872 - DNA, 25 bp, Homo sapien
agtcagaggcccttcctgtgacagc

SEQ ID NO: 2408873 - DNA, 25 bp, Homo sapien
gagtcagaggcccttcctgtgacag

SEQ ID NO: 2408874 - DNA, 25 bp, Homo sapien
gcagactagtggagtcagaggccct

SEQ ID NO: 2408875 - DNA, 25 bp, Homo sapien
tactgccaagttctgccattgtctg

SEQ ID NO: 2408876 - DNA, 25 bp, Homo sapien
tgtcgctgagctaagccattatcac

SEQ ID NO: 2408877 - DNA, 25 bp, Homo sapien
gtcccatccttcatatgtcgctgag

SEQ ID NO: 2408878 - DNA, 25 bp, Homo sapien
tgaggtgttcctggccatactgcca

SEQ ID NO: 2408879 - DNA, 25 bp, Homo sapien
tctttcgaggttacaagactgtggc

SEQ ID NO: 2408880 - DNA, 25 bp, Homo sapien
taaataccttatgaggtggccagcc

SEQ ID NO: 2408881 - DNA, 25 bp, Homo sapien
tatgtcatgaccagccctacagaga

SEQ ID NO: 2408882 - DNA, 25 bp, Homo sapien
tctacatggccaatagagtagggca

SEQ ID NO: 2408883 - DNA, 25 bp, Homo sapien
tgtgctccgtcggaaaacacccaaa

SEQ ID NO: 2408884 - DNA, 25 bp, Homo sapien
cctaaatgagggtgaagactcagct

SEQ ID NO: 2408885 - DNA, 25 bp, Homo sapien
taaggacatacaacctcttcctggg

SEQ ID NO: 2408886 - DNA, 25 bp, Homo sapien
ccagagagatgatctaccatgagtg

SEQ ID NO: 2408887 - DNA, 25 bp, Homo sapien
gctaaagaatttaaactctgattcc

SEQ ID NO: 2408888 - DNA, 25 bp, Homo sapien
caacagggatgagaactgaggtgtc

SEQ ID NO: 2408889 - DNA, 25 bp, Homo sapien
ttggtcatcaggctaaagaatttaa

SEQ ID NO: 2408890 - DNA, 25 bp, Homo sapien
gggattgacgtcaacacccccagct

SEQ ID NO: 2408891 - DNA, 25 bp, Homo sapien
ctggtgacaggcacagatgggcagc

SEQ ID NO: 2408892 - DNA, 25 bp, Homo sapien
gtgacaggcacagatgggcagcaga

SEQ ID NO: 2408893 - DNA, 25 bp, Homo sapien
acaggcacagatgggcagcagagtc

SEQ ID NO: 2408894 - DNA, 25 bp, Homo sapien
tggtgacaggcacagatgggcagca

SEQ ID NO: 2408895 - DNA, 25 bp, Homo sapien
agagagtggggcagggcactagaag

SEQ ID NO: 2408896 - DNA, 25 bp, Homo sapien
agagagagagtggggcagggcacta

SEQ ID NO: 2408897 - DNA, 25 bp, Homo sapien
tccagagagagagtggggcagggca

SEQ ID NO: 2408898 - DNA, 25 bp, Homo sapien
gagagagtggggcagggcactagaa

SEQ ID NO: 2408899 - DNA, 25 bp, Homo sapien
ttattcctactcatagacgctgaag

SEQ ID NO: 2408900 - DNA, 25 bp, Homo sapien
tgtgtttggttctattattcctact

SEQ ID NO: 2408901 - DNA, 25 bp, Homo sapien
ggactccttgtgtttggttctatta

SEQ ID NO: 2408902 - DNA, 25 bp, Homo sapien
atgtctgcaccttggactccttgtg

SEQ ID NO: 2408903 - DNA, 25 bp, Homo sapien
tcctctggaagtaagactggcctgt

SEQ ID NO: 2408904 - DNA, 25 bp, Homo sapien
gtctataccatgaaataaccagccc

SEQ ID NO: 2408905 - DNA, 25 bp, Homo sapien
tcagaacacaagtgccttgaagagc

SEQ ID NO: 2408906 - DNA, 25 bp, Homo sapien
tgaataactcctaaatacctgcctg

SEQ ID NO: 2408907 - DNA, 25 bp, Homo sapien
ctagtcccgatggactatagtagat

SEQ ID NO: 2408908 - DNA, 25 bp, Homo sapien
ttaaagaaacatccgccctctcctg

SEQ ID NO: 2408909 - DNA, 25 bp, Homo sapien
aagacaggaggtggtcccacaacgg

SEQ ID NO: 2408910 - DNA, 25 bp, Homo sapien
tagtagatagattggaagttaaaga

SEQ ID NO: 2408911 - DNA, 25 bp, Homo sapien
gccacaaacaccagggttccagaat

SEQ ID NO: 2408912 - DNA, 25 bp, Homo sapien
tcctttcagggtggctggttctcct

SEQ ID NO: 2408913 - DNA, 25 bp, Homo sapien
ggttccagaattgtccgcttcttca

SEQ ID NO: 2408914 - DNA, 25 bp, Homo sapien
cacaggtaccaccacttggaatttc

SEQ ID NO: 2408915 - DNA, 25 bp, Homo sapien
atgccactcgctgagcttccacaca

SEQ ID NO: 2408916 - DNA, 25 bp, Homo sapien
cttggctgcttaggcgcccaagttc

SEQ ID NO: 2408917 - DNA, 25 bp, Homo sapien
acacagctgcgttgtttctgcccca

SEQ ID NO: 2408918 - DNA, 25 bp, Homo sapien
gcttaggcgcccaagttctacccga

SEQ ID NO: 2408919 - DNA, 25 bp, Homo sapien
tgttgacttgtaatcccatgttaga

SEQ ID NO: 2408920 - DNA, 25 bp, Homo sapien
gaatagtttatcactatccccttgg

SEQ ID NO: 2408921 - DNA, 25 bp, Homo sapien
cacgtgatttcatgatggcagtaat

SEQ ID NO: 2408922 - DNA, 25 bp, Homo sapien
ccaaacgtaggactttcttaagcat

SEQ ID NO: 2408923 - DNA, 25 bp, Homo sapien
cgtgcacgtaatccccgcagaggga

SEQ ID NO: 2408924 - DNA, 25 bp, Homo sapien
aatgcttcacaaatgacgtgcacgt

SEQ ID NO: 2408925 - DNA, 25 bp, Homo sapien
tgcttcacaaatgacgtgcacgtaa

SEQ ID NO: 2408926 - DNA, 25 bp, Homo sapien
ttcacaaatgacgtgcacgtaatcc

SEQ ID NO: 2408927 - DNA, 25 bp, Homo sapien
gtctctgtgccataatccagtccgc

SEQ ID NO: 2408928 - DNA, 25 bp, Homo sapien
gctgctgccagtagtggcaaagtca

SEQ ID NO: 2408929 - DNA, 25 bp, Homo sapien
aaatataaggcctggagcgtggaca

SEQ ID NO: 2408930 - DNA, 25 bp, Homo sapien
gacttcgcagaaagaactggatttg

SEQ ID NO: 2408931 - DNA, 25 bp, Homo sapien
cagcgagttccgaaactactgctaa

SEQ ID NO: 2408932 - DNA, 25 bp, Homo sapien
tcctccagcgagttccgaaactact

SEQ ID NO: 2408933 - DNA, 25 bp, Homo sapien
aggaatgcaggaggcattccagccc

SEQ ID NO: 2408934 - DNA, 25 bp, Homo sapien
gcctcctccagcgagttccgaaact

SEQ ID NO: 2408935 - DNA, 25 bp, Homo sapien
tccaggctttcacatgatctacagc

SEQ ID NO: 2408936 - DNA, 25 bp, Homo sapien
cattgaaggttgtcccttgctctct

SEQ ID NO: 2408937 - DNA, 25 bp, Homo sapien
caaggaagacagtgaaccagctggt

SEQ ID NO: 2408938 - DNA, 25 bp, Homo sapien
tgactacacccagcgcattgaaggt

SEQ ID NO: 2408939 - DNA, 25 bp, Homo sapien
agaactagacctacacctctgcagc

SEQ ID NO: 2408940 - DNA, 25 bp, Homo sapien
caaaatcggaaaagccagaactaga

SEQ ID NO: 2408941 - DNA, 25 bp, Homo sapien
agcccaatccatgacaaaatcggaa

SEQ ID NO: 2408942 - DNA, 25 bp, Homo sapien
gcagcagtccctttgtgcagtgatg

SEQ ID NO: 2408943 - DNA, 25 bp, Homo sapien
caggagcctgcaagcgcaggctgct

SEQ ID NO: 2408944 - DNA, 25 bp, Homo sapien
gtggcttcgtctgccccagacttca

SEQ ID NO: 2408945 - DNA, 25 bp, Homo sapien
gacttcactactaatgttgcccctg

SEQ ID NO: 2408946 - DNA, 25 bp, Homo sapien
aggctgctgtcggagtccccgtggc

SEQ ID NO: 2408947 - DNA, 25 bp, Homo sapien
aatgcctgatcctccttggtttaat

SEQ ID NO: 2408948 - DNA, 25 bp, Homo sapien
ggatcagtgtgcacatactctgcag

SEQ ID NO: 2408949 - DNA, 25 bp, Homo sapien
ttggcatgcctctaatgatatcaga

SEQ ID NO: 2408950 - DNA, 25 bp, Homo sapien
ggcagttgttggtgagcataatcaa

SEQ ID NO: 2408951 - DNA, 25 bp, Homo sapien
tagtaatgaacaccacttttggcca

SEQ ID NO: 2408952 - DNA, 25 bp, Homo sapien
agcctactttctgcctttcataatg

SEQ ID NO: 2408953 - DNA, 25 bp, Homo sapien
catctttctttcttaggtgtgggat

SEQ ID NO: 2408954 - DNA, 25 bp, Homo sapien
gagcctagagttgattgacaccaat

SEQ ID NO: 2408955 - DNA, 25 bp, Homo sapien
gacccccaaccaagagcagcttcag

SEQ ID NO: 2408956 - DNA, 25 bp, Homo sapien
ggcgcgtgccaccacgactagctaa

SEQ ID NO: 2408957 - DNA, 25 bp, Homo sapien
gcgcgtgccaccacgactagctaat

SEQ ID NO: 2408958 - DNA, 25 bp, Homo sapien
ctcatggtctgcccgcctcggcctc

SEQ ID NO: 2408959 - DNA, 25 bp, Homo sapien
cctcatggtctgcccgcctcggcct

SEQ ID NO: 2408960 - DNA, 25 bp, Homo sapien
acactgcaactgagagacgcagcgc

SEQ ID NO: 2408961 - DNA, 25 bp, Homo sapien
cacactgcaactgagagacgcagcg

SEQ ID NO: 2408962 - DNA, 25 bp, Homo sapien
cactgcaactgagagacgcagcgcc

SEQ ID NO: 2408963 - DNA, 25 bp, Homo sapien
actgcaactgagagacgcagcgcca

SEQ ID NO: 2408964 - DNA, 25 bp, Homo sapien
gccccggcgcgtgcaagggagaagc

SEQ ID NO: 2408965 - DNA, 25 bp, Homo sapien
cggcgcgtgcaagggagaagcgggt

SEQ ID NO: 2408966 - DNA, 25 bp, Homo sapien
cgcgtgcaagggagaagcgggtttg

SEQ ID NO: 2408967 - DNA, 25 bp, Homo sapien
cgtgcaagggagaagcgggtttgtt

SEQ ID NO: 2408968 - DNA, 25 bp, Homo sapien
tgcgggagttgtgtctgcgcctgcg

SEQ ID NO: 2408969 - DNA, 25 bp, Homo sapien
gagtcaagaccgcattatggcggct

SEQ ID NO: 2408970 - DNA, 25 bp, Homo sapien
ctgaagagtcaagaccgcattatgg

SEQ ID NO: 2408971 - DNA, 25 bp, Homo sapien
ggcggctgcgggagttgtgtctgcg

SEQ ID NO: 2408972 - DNA, 25 bp, Homo sapien
gtgcctggccgaaaatgtgacttcc

SEQ ID NO: 2408973 - DNA, 25 bp, Homo sapien
tcaaggagattttatgggagttgta

SEQ ID NO: 2408974 - DNA, 25 bp, Homo sapien
ttccaagggccttgtaatatacaca

SEQ ID NO: 2408975 - DNA, 25 bp, Homo sapien
gtagctttctacagaatatgacaag

SEQ ID NO: 2408976 - DNA, 25 bp, Homo sapien
tattttgggcactaattccacatag

SEQ ID NO: 2408977 - DNA, 25 bp, Homo sapien
ttggcaaagttagggatgaaggcat

SEQ ID NO: 2408978 - DNA, 25 bp, Homo sapien
tcatatctgcaaggtttggcagcat

SEQ ID NO: 2408979 - DNA, 25 bp, Homo sapien
taattccacataggattcctccttg

SEQ ID NO: 2408980 - DNA, 25 bp, Homo sapien
gaaatacatccctattgtgtgctta

SEQ ID NO: 2408981 - DNA, 25 bp, Homo sapien
tattagcttgtctccactaccagaa

SEQ ID NO: 2408982 - DNA, 25 bp, Homo sapien
gaaaccgcatcatctgacttaatga

SEQ ID NO: 2408983 - DNA, 25 bp, Homo sapien
cacataggtctaatgaggtgttgat

SEQ ID NO: 2408984 - DNA, 25 bp, Homo sapien
tatcatccatttgacagtgtgttcc

SEQ ID NO: 2408985 - DNA, 25 bp, Homo sapien
taaacatagattccagtgctacagt

SEQ ID NO: 2408986 - DNA, 25 bp, Homo sapien
cattaggcagctctgaatattttgg

SEQ ID NO: 2408987 - DNA, 25 bp, Homo sapien
gaggcttgaagaagatatcatccat

SEQ ID NO: 2408988 - DNA, 25 bp, Homo sapien
gagataataaattctgtgtgcccat

SEQ ID NO: 2408989 - DNA, 25 bp, Homo sapien
tgtcaagtcatagggccaatctcct

SEQ ID NO: 2408990 - DNA, 25 bp, Homo sapien
tacacaggttagctagattttagga

SEQ ID NO: 2408991 - DNA, 25 bp, Homo sapien
gatagatagaacaagatacacaggt

SEQ ID NO: 2408992 - DNA, 25 bp, Homo sapien
cttttatgtgataatcagttctgtt

SEQ ID NO: 2408993 - DNA, 25 bp, Homo sapien
atgttaccgctgtgttaaaggacat

SEQ ID NO: 2408994 - DNA, 25 bp, Homo sapien
ttctttaaatgttaccgctgtgtta

SEQ ID NO: 2408995 - DNA, 25 bp, Homo sapien
taaatgttaccgctgtgttaaagga

SEQ ID NO: 2408996 - DNA, 25 bp, Homo sapien
tcaacttgatgttcttaatggtgat

SEQ ID NO: 2408997 - DNA, 25 bp, Homo sapien
tatcaacttgatgttcttaatggtg

SEQ ID NO: 2408998 - DNA, 25 bp, Homo sapien
cactatcaacttgatgttcttaatg

SEQ ID NO: 2408999 - DNA, 25 bp, Homo sapien
caacttgatgttcttaatggtgata

SEQ ID NO: 2409000 - DNA, 25 bp, Homo sapien
tttgggatggtagcctccatgtctc

SEQ ID NO: 2409001 - DNA, 25 bp, Homo sapien
gggaagtggtacttgctacacatgg

SEQ ID NO: 2409002 - DNA, 25 bp, Homo sapien
ttgtctttgggatggtagcctccat

SEQ ID NO: 2409003 - DNA, 25 bp, Homo sapien
catgggatatgctgataatttgtct

SEQ ID NO: 2409004 - DNA, 25 bp, Homo sapien
ggaatgtatcttctatggataaggg

SEQ ID NO: 2409005 - DNA, 25 bp, Homo sapien
gggccattatgcgtagtgcttctat

SEQ ID NO: 2409006 - DNA, 25 bp, Homo sapien
gggaataccgtaaatggaatcattc

SEQ ID NO: 2409007 - DNA, 25 bp, Homo sapien
tatccattcattagtcacagggcat

SEQ ID NO: 2409008 - DNA, 25 bp, Homo sapien
tgtggggagattatataaactaaga

SEQ ID NO: 2409009 - DNA, 25 bp, Homo sapien
taagagtatggctgcagcaagctcc

SEQ ID NO: 2409010 - DNA, 25 bp, Homo sapien
tcttgggtatgtttgaaaaattaca

SEQ ID NO: 2409011 - DNA, 25 bp, Homo sapien
tataaactaagagtatggctgcagc

SEQ ID NO: 2409012 - DNA, 25 bp, Homo sapien
ctagcactttgccagtctttgtact

SEQ ID NO: 2409013 - DNA, 25 bp, Homo sapien
gacaatccagtcatttgcctttaca

SEQ ID NO: 2409014 - DNA, 25 bp, Homo sapien
tacatactgtaaagattgtctgcaa

SEQ ID NO: 2409015 - DNA, 25 bp, Homo sapien
agagtgtctcattggtttaccttca

SEQ ID NO: 2409016 - DNA, 25 bp, Homo sapien
gaaagcaaagcaatagtacaaatta

SEQ ID NO: 2409017 - DNA, 25 bp, Homo sapien
tatctgagtataaaaaatgcgtaca

SEQ ID NO: 2409018 - DNA, 25 bp, Homo sapien
tatttggcttcaaggaagaggaatt

SEQ ID NO: 2409019 - DNA, 25 bp, Homo sapien
gaaacaggaattgacttcatcagaa

SEQ ID NO: 2409020 - DNA, 25 bp, Homo sapien
tagcagtttccactccacggttacc

SEQ ID NO: 2409021 - DNA, 25 bp, Homo sapien
aataagctagattctcccagtttgg

SEQ ID NO: 2409022 - DNA, 25 bp, Homo sapien
tataaatcacatacgaagacgtctg

SEQ ID NO: 2409023 - DNA, 25 bp, Homo sapien
tactgcaacctgcaatgtaggatgt

SEQ ID NO: 2409024 - DNA, 25 bp, Homo sapien
catgaagcgtttgttagtgtggcag

SEQ ID NO: 2409025 - DNA, 25 bp, Homo sapien
ttcatccccttgagccagccaatgg

SEQ ID NO: 2409026 - DNA, 25 bp, Homo sapien
aaaccgatgtgtgattctaccttcc

SEQ ID NO: 2409027 - DNA, 25 bp, Homo sapien
tgtggcagacttgtctaattcctga

SEQ ID NO: 2409028 - DNA, 25 bp, Homo sapien
agcaagtggccctatttttattagg

SEQ ID NO: 2409029 - DNA, 25 bp, Homo sapien
tgtaagaaacttgcatcctaatttt

SEQ ID NO: 2409030 - DNA, 25 bp, Homo sapien
tgtatagtagagtggtgtctgtata

SEQ ID NO: 2409031 - DNA, 25 bp, Homo sapien
ctgtataagtgttacctgtagtggg

SEQ ID NO: 2409032 - DNA, 25 bp, Homo sapien
aacatagctaaaatagtgcctttgg

SEQ ID NO: 2409033 - DNA, 25 bp, Homo sapien
tacagtcttctagtccgtcatctcc

SEQ ID NO: 2409034 - DNA, 25 bp, Homo sapien
tttacagtcttctagtccgtcatct

SEQ ID NO: 2409035 - DNA, 25 bp, Homo sapien
gcctttggtatcttatttacagtct

SEQ ID NO: 2409036 - DNA, 25 bp, Homo sapien
tcaaaattggtttcatggtaataaa

SEQ ID NO: 2409037 - DNA, 25 bp, Homo sapien
cattttatatcaagtttcaaaattg

SEQ ID NO: 2409038 - DNA, 25 bp, Homo sapien
caagtttcaaaattggtttcatggt

SEQ ID NO: 2409039 - DNA, 25 bp, Homo sapien
tggtttcatggtaataaaatcaaag

SEQ ID NO: 2409040 - DNA, 25 bp, Homo sapien
tcccagcgaaaaacagggaggccac

SEQ ID NO: 2409041 - DNA, 25 bp, Homo sapien
gagatgctaggtagatatctgccac

SEQ ID NO: 2409042 - DNA, 25 bp, Homo sapien
cataggatgtgtactgagatgctag

SEQ ID NO: 2409043 - DNA, 25 bp, Homo sapien
tgtgggaccacttatggcataggat

SEQ ID NO: 2409044 - DNA, 25 bp, Homo sapien
tctcccactaccaaagtcacaatat

SEQ ID NO: 2409045 - DNA, 25 bp, Homo sapien
ccactaccaaagtcacaatattagc

SEQ ID NO: 2409046 - DNA, 25 bp, Homo sapien
actctcccactaccaaagtcacaat

SEQ ID NO: 2409047 - DNA, 25 bp, Homo sapien
tcccactaccaaagtcacaatatta

SEQ ID NO: 2409048 - DNA, 25 bp, Homo sapien
gaatacacactttaccctgacaggt

SEQ ID NO: 2409049 - DNA, 25 bp, Homo sapien
cccaagccaagagtgcaaaaggatg

SEQ ID NO: 2409050 - DNA, 25 bp, Homo sapien
ggttcctgcatgtctataagctggc

SEQ ID NO: 2409051 - DNA, 25 bp, Homo sapien
tcagacgtcccaaatccagtggtga

SEQ ID NO: 2409052 - DNA, 25 bp, Homo sapien
gtcataacaacctccaggacttggg

SEQ ID NO: 2409053 - DNA, 25 bp, Homo sapien
tcacggcagcagatggtattacagg

SEQ ID NO: 2409054 - DNA, 25 bp, Homo sapien
agttcaggtcctcacggcagcagat

SEQ ID NO: 2409055 - DNA, 25 bp, Homo sapien
gggtcacctctactgtaaggatcct

SEQ ID NO: 2409056 - DNA, 25 bp, Homo sapien
catggatgccgtatcagtcactttc

SEQ ID NO: 2409057 - DNA, 25 bp, Homo sapien
ccggaaaattttggctcgtggagct

SEQ ID NO: 2409058 - DNA, 25 bp, Homo sapien
tcataagagtagtccaagcccagct

SEQ ID NO: 2409059 - DNA, 25 bp, Homo sapien
gaaaggaacattgtaggagggccaa

SEQ ID NO: 2409060 - DNA, 25 bp, Homo sapien
caaggaatgtctccaccatgcaggg

SEQ ID NO: 2409061 - DNA, 25 bp, Homo sapien
gaatcaggtcttaggcaggcaactt

SEQ ID NO: 2409062 - DNA, 25 bp, Homo sapien
tggcctgggttactgcctacagaac

SEQ ID NO: 2409063 - DNA, 25 bp, Homo sapien
taggctcagggcttaagaatcaggt

SEQ ID NO: 2409064 - DNA, 25 bp, Homo sapien
tatacatggtgtctctaagaggaaa

SEQ ID NO: 2409065 - DNA, 25 bp, Homo sapien
ccagtctattctcccttgtcaggaa

SEQ ID NO: 2409066 - DNA, 25 bp, Homo sapien
cataaagtctgaactgtccagtagg

SEQ ID NO: 2409067 - DNA, 25 bp, Homo sapien
tccagaaattcttgggagccagatg

SEQ ID NO: 2409068 - DNA, 25 bp, Homo sapien
caatgtacagagtgcctttgtcaag

SEQ ID NO: 2409069 - DNA, 25 bp, Homo sapien
ccgtagaacatcagtttgttcagaa

SEQ ID NO: 2409070 - DNA, 25 bp, Homo sapien
ttcagctttactttcttcaggtcca

SEQ ID NO: 2409071 - DNA, 25 bp, Homo sapien
tacatatgtaggaatttgctccaca

SEQ ID NO: 2409072 - DNA, 25 bp, Homo sapien
attttgaaaagatgtctgcccacct

SEQ ID NO: 2409073 - DNA, 25 bp, Homo sapien
cccacctcttgccactatctgccat

SEQ ID NO: 2409074 - DNA, 25 bp, Homo sapien
acctcttgccactatctgccatcat

SEQ ID NO: 2409075 - DNA, 25 bp, Homo sapien
tattttgaaaagatgtctgcccacc

SEQ ID NO: 2409076 - DNA, 25 bp, Homo sapien
ttggccacacggactctttgccagg

SEQ ID NO: 2409077 - DNA, 25 bp, Homo sapien
caatatcaatccactgctaagaatg

SEQ ID NO: 2409078 - DNA, 25 bp, Homo sapien
acactgtttgtggtctgcagcaata

SEQ ID NO: 2409079 - DNA, 25 bp, Homo sapien
tcgggtattacctgctttagcaggg

SEQ ID NO: 2409080 - DNA, 25 bp, Homo sapien
gagataacttacttggcctgaaggt

SEQ ID NO: 2409081 - DNA, 25 bp, Homo sapien
tataatatgcaaggctctgtgctca

SEQ ID NO: 2409082 - DNA, 25 bp, Homo sapien
tgctcgtatcaagggtgagtattcc

SEQ ID NO: 2409083 - DNA, 25 bp, Homo sapien
tatgcacagggtacctaggaagctc

SEQ ID NO: 2409084 - DNA, 25 bp, Homo sapien
tttatatatcctgagcatggctgca

SEQ ID NO: 2409085 - DNA, 25 bp, Homo sapien
catacgtgtaccagcttgagtgagc

SEQ ID NO: 2409086 - DNA, 25 bp, Homo sapien
tatctatgacgttgaagtcccagtg

SEQ ID NO: 2409087 - DNA, 25 bp, Homo sapien
taactgctgaaagagaggcgactac

SEQ ID NO: 2409088 - DNA, 25 bp, Homo sapien
catacagggattgtgccatttcagg

SEQ ID NO: 2409089 - DNA, 25 bp, Homo sapien
cagatgtacatagctaactgactgc

SEQ ID NO: 2409090 - DNA, 25 bp, Homo sapien
tatggccaaggagtcaagattaacc

SEQ ID NO: 2409091 - DNA, 25 bp, Homo sapien
gtggcttacgctcgaaatcctagca

SEQ ID NO: 2409092 - DNA, 25 bp, Homo sapien
gggaatcagatccaatagatctcca

SEQ ID NO: 2409093 - DNA, 25 bp, Homo sapien
ttaggctgccgttttttgtgggaga

SEQ ID NO: 2409094 - DNA, 25 bp, Homo sapien
actgaatctggaacagggtcattgg

SEQ ID NO: 2409095 - DNA, 25 bp, Homo sapien
ttgataagagcggagcaatgtccca

SEQ ID NO: 2409096 - DNA, 25 bp, Homo sapien
catagcctgtatgtctccaaaatga

SEQ ID NO: 2409097 - DNA, 25 bp, Homo sapien
tttgtcccttctaatatagccctct

SEQ ID NO: 2409098 - DNA, 25 bp, Homo sapien
gaggccatctatttgtgccatcaca

SEQ ID NO: 2409099 - DNA, 25 bp, Homo sapien
cttgtattctttgatatttttccgg

SEQ ID NO: 2409100 - DNA, 25 bp, Homo sapien
cagctgtgggtagaggtttgtgtag

SEQ ID NO: 2409101 - DNA, 25 bp, Homo sapien
tttatccatgatggaaggtttcgtg

SEQ ID NO: 2409102 - DNA, 25 bp, Homo sapien
aaggtttcgtgatcagctgtgggta

SEQ ID NO: 2409103 - DNA, 25 bp, Homo sapien
tagaggtttgtgtagtggtcattca

SEQ ID NO: 2409104 - DNA, 25 bp, Homo sapien
agtcactgtggaacatgggaaggac

SEQ ID NO: 2409105 - DNA, 25 bp, Homo sapien
cagctactcttcagttctaatgtgc

SEQ ID NO: 2409106 - DNA, 25 bp, Homo sapien
ggctctaccatgactgggatactta

SEQ ID NO: 2409107 - DNA, 25 bp, Homo sapien
gggttgcctggcagtggctctacca

SEQ ID NO: 2409108 - DNA, 25 bp, Homo sapien
gagccatagccagctctgatctcca

SEQ ID NO: 2409109 - DNA, 25 bp, Homo sapien
tcattgctcagggtttgagagccat

SEQ ID NO: 2409110 - DNA, 25 bp, Homo sapien
gcagtgaggtaaccctccaaaaagc

SEQ ID NO: 2409111 - DNA, 25 bp, Homo sapien
tattgtaaaagccataggcgtcccc

SEQ ID NO: 2409112 - DNA, 25 bp, Homo sapien
ccagtatgcagttgcatagtagact

SEQ ID NO: 2409113 - DNA, 25 bp, Homo sapien
cagtatgcagttgcatagtagactc

SEQ ID NO: 2409114 - DNA, 25 bp, Homo sapien
cagtttgcccttaattccaagtggg

SEQ ID NO: 2409115 - DNA, 25 bp, Homo sapien
tctattagaattgggaaatctgccg

SEQ ID NO: 2409116 - DNA, 25 bp, Homo sapien
tatccaacaatttcaagacgtttgc

SEQ ID NO: 2409117 - DNA, 25 bp, Homo sapien
tgacaaaaacgccattcaaatgagt

SEQ ID NO: 2409118 - DNA, 25 bp, Homo sapien
aggatggctcagctagttgtatacc

SEQ ID NO: 2409119 - DNA, 25 bp, Homo sapien
gatggctcagctagttgtataccct

SEQ ID NO: 2409120 - DNA, 25 bp, Homo sapien
tgtttggaggttctcgcaggatggc

SEQ ID NO: 2409121 - DNA, 25 bp, Homo sapien
ttgtttggaggttctcgcaggatgg

SEQ ID NO: 2409122 - DNA, 25 bp, Homo sapien
ccttcttgaataaatagtgctccat

SEQ ID NO: 2409123 - DNA, 25 bp, Homo sapien
aggtggtaccttcttgaataaatag

SEQ ID NO: 2409124 - DNA, 25 bp, Homo sapien
taagatgcagtttcttacaaggtgg

SEQ ID NO: 2409125 - DNA, 25 bp, Homo sapien
gcttcctgttggaggaactgtttaa

SEQ ID NO: 2409126 - DNA, 25 bp, Homo sapien
ggcggctccgcggtgactaacaaca

SEQ ID NO: 2409127 - DNA, 25 bp, Homo sapien
gctccgcggtgactaacaacagcgg

SEQ ID NO: 2409128 - DNA, 25 bp, Homo sapien
cgcggtgactaacaacagcggcagc

SEQ ID NO: 2409129 - DNA, 25 bp, Homo sapien
gtttcggcggctccgcggtgactaa

SEQ ID NO: 2409130 - DNA, 25 bp, Homo sapien
cctctttcttgagcccggcctgctc

SEQ ID NO: 2409131 - DNA, 25 bp, Homo sapien
ggccgcgaccttcctctgcgggatc

SEQ ID NO: 2409132 - DNA, 25 bp, Homo sapien
ctccgaggtggggcgtcctcaactt

SEQ ID NO: 2409133 - DNA, 25 bp, Homo sapien
ttcctctgcgggatcaggcggccgc

SEQ ID NO: 2409134 - DNA, 25 bp, Homo sapien
caaggcttgggcgaatcagttcaca

SEQ ID NO: 2409135 - DNA, 25 bp, Homo sapien
tttcgcagttttgcggcccaaggct

SEQ ID NO: 2409136 - DNA, 25 bp, Homo sapien
atttatctccagcagcggaccaggc

SEQ ID NO: 2409137 - DNA, 25 bp, Homo sapien
tgcacttctgggaaatgcagaggct

SEQ ID NO: 2409138 - DNA, 25 bp, Homo sapien
atcaaacagatgactcccccgctaa

SEQ ID NO: 2409139 - DNA, 25 bp, Homo sapien
tcccccgctaacgaggaggacagtc

SEQ ID NO: 2409140 - DNA, 25 bp, Homo sapien
gaggacagtcctagacccttcacat

SEQ ID NO: 2409141 - DNA, 25 bp, Homo sapien
gaggaggacagtcctagacccttca

SEQ ID NO: 2409142 - DNA, 25 bp, Homo sapien
tattcttgcctaatatatagcatat

SEQ ID NO: 2409143 - DNA, 25 bp, Homo sapien
tcttctcaagttctagatagtctat

SEQ ID NO: 2409144 - DNA, 25 bp, Homo sapien
ctcaagttctagatagtctattcat

SEQ ID NO: 2409145 - DNA, 25 bp, Homo sapien
taagaataaaatcttctcaagttct

SEQ ID NO: 2409146 - DNA, 25 bp, Homo sapien
ttctcaagttctagatagtctattc

SEQ ID NO: 2409147 - DNA, 25 bp, Homo sapien
ggcagccaagcctaagtacatttct

SEQ ID NO: 2409148 - DNA, 25 bp, Homo sapien
catctgattcatgcaagaaagtcca

SEQ ID NO: 2409149 - DNA, 25 bp, Homo sapien
tagaagctccctggaacaactgctg

SEQ ID NO: 2409150 - DNA, 25 bp, Homo sapien
tgtaagctttcaggacacttgaggt

SEQ ID NO: 2409151 - DNA, 25 bp, Homo sapien
tatagctggctacccgtctgggttt

SEQ ID NO: 2409152 - DNA, 25 bp, Homo sapien
tctgaaaattctgcttgcaaacgct

SEQ ID NO: 2409153 - DNA, 25 bp, Homo sapien
tgcttgcaaacgctgttgattctcc

SEQ ID NO: 2409154 - DNA, 25 bp, Homo sapien
gctgcaagtattccagagtgccttt

SEQ ID NO: 2409155 - DNA, 25 bp, Homo sapien
tcccagtcagccagtaggtagtctc

SEQ ID NO: 2409156 - DNA, 25 bp, Homo sapien
tcagccagtaggtagtctcatttcc

SEQ ID NO: 2409157 - DNA, 25 bp, Homo sapien
ggttggcaggttgaatttctggtcc

SEQ ID NO: 2409158 - DNA, 25 bp, Homo sapien
ccttcatcccagtcagccagtaggt

SEQ ID NO: 2409159 - DNA, 25 bp, Homo sapien
tggagccactcacgtgaattctcaa

SEQ ID NO: 2409160 - DNA, 25 bp, Homo sapien
ggagccactcacgtgaattctcaaa

SEQ ID NO: 2409161 - DNA, 25 bp, Homo sapien
gagccactcacgtgaattctcaaag

SEQ ID NO: 2409162 - DNA, 25 bp, Homo sapien
gtggagccactcacgtgaattctca

SEQ ID NO: 2409163 - DNA, 25 bp, Homo sapien
catgaatctatggtaaatgccagga

SEQ ID NO: 2409164 - DNA, 25 bp, Homo sapien
caggaatgtgaaccagagtgtgtag

SEQ ID NO: 2409165 - DNA, 25 bp, Homo sapien
tagcaaaaggtggattgacacgggt

SEQ ID NO: 2409166 - DNA, 25 bp, Homo sapien
tattctacatctcactggcactttg

SEQ ID NO: 2409167 - DNA, 25 bp, Homo sapien
cctctgagaaaaacagtctcccttc

SEQ ID NO: 2409168 - DNA, 25 bp, Homo sapien
tctgagaaaaacagtctcccttctt

SEQ ID NO: 2409169 - DNA, 25 bp, Homo sapien
ctctgagaaaaacagtctcccttct

SEQ ID NO: 2409170 - DNA, 25 bp, Homo sapien
tgagaaaaacagtctcccttcttac

SEQ ID NO: 2409171 - DNA, 25 bp, Homo sapien
tatctccaaatagacaataacgagg

SEQ ID NO: 2409172 - DNA, 25 bp, Homo sapien
ggcatcttgattcccacaactccag

SEQ ID NO: 2409173 - DNA, 25 bp, Homo sapien
gctgtgttgaccgtatctccaaata

SEQ ID NO: 2409174 - DNA, 25 bp, Homo sapien
gaggccagtggattccatcctagag

SEQ ID NO: 2409175 - DNA, 25 bp, Homo sapien
cagagtgaactccaatgcgaatcca

SEQ ID NO: 2409176 - DNA, 25 bp, Homo sapien
cgaatccatattgggaggccaggaa

SEQ ID NO: 2409177 - DNA, 25 bp, Homo sapien
catgtacgcatcaccgatggtttcc

SEQ ID NO: 2409178 - DNA, 25 bp, Homo sapien
aatgtctattgcatgccgattgcca

SEQ ID NO: 2409179 - DNA, 25 bp, Homo sapien
attaatggtttcagcctgttaggtg
